United States Patent Application Publication US 2020/0095579 A1 - sequence listing, part 8

SEQ ID NO: 101171 - DNA, 20 bp, Artificial Sequence
  Description of Artificial Sequence: Synthetic oligonucleotide
  Target: LAMA2; (-) strand; PAM type: NRG; PAM sequence: CAG
cgtttgctttctctgtttat

SEQ ID NO: 101172 - DNA, 20 bp, Artificial Sequence
  Description of Artificial Sequence: Synthetic oligonucleotide
  Target: LAMA2; (-) strand; PAM type: NRG; PAM sequence: TGG
ttcattaatgttgaatatac

SEQ ID NO: 101173 - DNA, 20 bp, Artificial Sequence
  Description of Artificial Sequence: Synthetic oligonucleotide
  Target: LAMA2; (-) strand; PAM type: NRG; PAM sequence: GGG
ggaagcagtaaatgaataaa

SEQ ID NO: 101174 - DNA, 20 bp, Artificial Sequence
  Description of Artificial Sequence: Synthetic oligonucleotide
  Target: LAMA2; (-) strand; PAM type: NRG; PAM sequence: AGG
tggaagcagtaaatgaataa

SEQ ID NO: 101175 - DNA, 20 bp, Artificial Sequence
  Description of Artificial Sequence: Synthetic oligonucleotide
  Target: LAMA2; (-) strand; PAM type: NRG; PAM sequence: AAG
atggaagcagtaaatgaata

SEQ ID NO: 101176 - DNA, 20 bp, Artificial Sequence
  Description of Artificial Sequence: Synthetic oligonucleotide
  Target: LAMA2; (-) strand; PAM type: NRG; PAM sequence: CAG
atgggctctaaacatggaag

SEQ ID NO: 101177 - DNA, 20 bp, Artificial Sequence
  Description of Artificial Sequence: Synthetic oligonucleotide
  Target: LAMA2; (-) strand; PAM type: NRG; PAM sequence: AAG
agaatgggctctaaacatgg

SEQ ID NO: 101178 - DNA, 20 bp, Artificial Sequence
  Description of Artificial Sequence: Synthetic oligonucleotide
  Target: LAMA2; (-) strand; PAM type: NRG; PAM sequence: TGG
ggtagaatgggctctaaaca

SEQ ID NO: 101179 - DNA, 20 bp, Artificial Sequence
  Description of Artificial Sequence: Synthetic oligonucleotide
  Target: LAMA2; (-) strand; PAM type: NRG; PAM sequence: GGG
atttttaatcgaggtagaat

SEQ ID NO: 101180 - DNA, 20 bp, Artificial Sequence
  Description of Artificial Sequence: Synthetic oligonucleotide
  Target: LAMA2; (-) strand; PAM type: NRG; PAM sequence: TGG
tatttttaatcgaggtagaa

SEQ ID NO: 101181 - DNA, 20 bp, Artificial Sequence
  Description of Artificial Sequence: Synthetic oligonucleotide
  Target: LAMA2; (-) strand; PAM type: NRG; PAM sequence: TAG
atatttatttttaatcgagg

SEQ ID NO: 101182 - DNA, 20 bp, Artificial Sequence
  Description of Artificial Sequence: Synthetic oligonucleotide
  Target: LAMA2; (-) strand; PAM type: NRG; PAM sequence: AGG
tttatatttatttttaatcg

SEQ ID NO: 101183 - DNA, 20 bp, Artificial Sequence
  Description of Artificial Sequence: Synthetic oligonucleotide
  Target: LAMA2; (-) strand; PAM type: NRG; PAM sequence: GAG
ttttatatttatttttaatc

SEQ ID NO: 101184 - DNA, 20 bp, Artificial Sequence
  Description of Artificial Sequence: Synthetic oligonucleotide
  Target: LAMA2; (-) strand; PAM type: NRG; PAM sequence: TAG
aatttctcattttgtaattt

SEQ ID NO: 101185 - DNA, 20 bp, Artificial Sequence
  Description of Artificial Sequence: Synthetic oligonucleotide
  Target: LAMA2; (-) strand; PAM type: NRG; PAM sequence: GAG
agaaaataaatgtcattact

SEQ ID NO: 101186 - DNA, 20 bp, Artificial Sequence
  Description of Artificial Sequence: Synthetic oligonucleotide
  Target: LAMA2; (-) strand; PAM type: NRG; PAM sequence: CAG
agaggagtctcaatgattag

SEQ ID NO: 101187 - DNA, 20 bp, Artificial Sequence
  Description of Artificial Sequence: Synthetic oligonucleotide
  Target: LAMA2; (-) strand; PAM type: NRG; PAM sequence: TAG
cttagaggagtctcaatgat

SEQ ID NO: 101188 - DNA, 20 bp, Artificial Sequence
  Description of Artificial Sequence: Synthetic oligonucleotide
  Target: LAMA2; (-) strand; PAM type: NRG; PAM sequence: GAG
taatgttttaaatcttagag

SEQ ID NO: 101189 - DNA, 20 bp, Artificial Sequence
  Description of Artificial Sequence: Synthetic oligonucleotide
  Target: LAMA2; (-) strand; PAM type: NRG; PAM sequence: AGG
cataatgttttaaatcttag

SEQ ID NO: 101190 - DNA, 20 bp, Artificial Sequence
  Description of Artificial Sequence: Synthetic oligonucleotide
  Target: LAMA2; (-) strand; PAM type: NRG; PAM sequence: GAG
ccataatgttttaaatctta

SEQ ID NO: 101191 - DNA, 20 bp, Artificial Sequence
  Description of Artificial Sequence: Synthetic oligonucleotide
  Target: LAMA2; (-) strand; PAM type: NRG; PAM sequence: TAG
tgccataatgttttaaatct

SEQ ID NO: 101192 - DNA, 20 bp, Artificial Sequence
  Description of Artificial Sequence: Synthetic oligonucleotide
  Target: LAMA2; (-) strand; PAM type: NRG; PAM sequence: AGG
cttgacaatctctgatgaaa

SEQ ID NO: 101193 - DNA, 20 bp, Artificial Sequence
  Description of Artificial Sequence: Synthetic oligonucleotide
  Target: LAMA2; (-) strand; PAM type: NRG; PAM sequence: AAG
acttgacaatctctgatgaa

SEQ ID NO: 101194 - DNA, 20 bp, Artificial Sequence
  Description of Artificial Sequence: Synthetic oligonucleotide
  Target: LAMA2; (-) strand; PAM type: NRG; PAM sequence: CAG
cttttcttctgcatagaaga

SEQ ID NO: 101195 - DNA, 20 bp, Artificial Sequence
  Description of Artificial Sequence: Synthetic oligonucleotide
  Target: LAMA2; (-) strand; PAM type: NRG; PAM sequence: AAG
gtatcttttcttctgcatag

SEQ ID NO: 101196 - DNA, 20 bp, Artificial Sequence
  Description of Artificial Sequence: Synthetic oligonucleotide
  Target: LAMA2; (-) strand; PAM type: NRG; PAM sequence: TAG
ctagtatcttttcttctgca

SEQ ID NO: 101197 - DNA, 20 bp, Artificial Sequence
  Description of Artificial Sequence: Synthetic oligonucleotide
  Target: LAMA2; (-) strand; PAM type: NRG; PAM sequence: TAG
agttaatctgggcacccagc

SEQ ID NO: 101198 - DNA, 20 bp, Artificial Sequence
  Description of Artificial Sequence: Synthetic oligonucleotide
  Target: LAMA2; (-) strand; PAM type: NRG; PAM sequence: CAG
gtgaagttaatctgggcacc

SEQ ID NO: 101199 - DNA, 20 bp, Artificial Sequence
  Description of Artificial Sequence: Synthetic oligonucleotide
  Target: LAMA2; (-) strand; PAM type: NRG; PAM sequence: GGG
agaggctgtgaagttaatct

SEQ ID NO: 101200 - DNA, 20 bp, Artificial Sequence
  Description of Artificial Sequence: Synthetic oligonucleotide
  Target: LAMA2; (-) strand; PAM type: NRG; PAM sequence: TGG
aagaggctgtgaagttaatc

SEQ ID NO: 101201 - DNA, 20 bp, Artificial Sequence
  Description of Artificial Sequence: Synthetic oligonucleotide
  Target: LAMA2; (-) strand; PAM type: NRG; PAM sequence: AAG
ttagaaaaaaagaggctgtg

SEQ ID NO: 101202 - DNA, 20 bp, Artificial Sequence
  Description of Artificial Sequence: Synthetic oligonucleotide
  Target: LAMA2; (-) strand; PAM type: NRG; PAM sequence: AGG
aattccttttagaaaaaaag

SEQ ID NO: 101203 - DNA, 20 bp, Artificial Sequence
  Description of Artificial Sequence: Synthetic oligonucleotide
  Target: LAMA2; (-) strand; PAM type: NRG; PAM sequence: GAG
taattccttttagaaaaaaa

SEQ ID NO: 101204 - DNA, 20 bp, Artificial Sequence
  Description of Artificial Sequence: Synthetic oligonucleotide
  Target: LAMA2; (-) strand; PAM type: NRG; PAM sequence: AAG
aataattccttttagaaaaa

SEQ ID NO: 101205 - DNA, 20 bp, Artificial Sequence
  Description of Artificial Sequence: Synthetic oligonucleotide
  Target: LAMA2; (-) strand; PAM type: NRG; PAM sequence: TAG
ctgtcccaaataattccttt

SEQ ID NO: 101206 - DNA, 20 bp, Artificial Sequence
  Description of Artificial Sequence: Synthetic oligonucleotide
  Target: LAMA2; (-) strand; PAM type: NRG; PAM sequence: AAG
ccaacttacataacattgta

SEQ ID NO: 101207 - DNA, 20 bp, Artificial Sequence
  Description of Artificial Sequence: Synthetic oligonucleotide
  Target: LAMA2; (-) strand; PAM type: NRG; PAM sequence: CAG
aaattaataaaatatctctt

SEQ ID NO: 101208 - DNA, 20 bp, Artificial Sequence
  Description of Artificial Sequence: Synthetic oligonucleotide
  Target: LAMA2; (-) strand; PAM type: NRG; PAM sequence: GGG
tcaagaagaaatcttaattt

SEQ ID NO: 101209 - DNA, 20 bp, Artificial Sequence
  Description of Artificial Sequence: Synthetic oligonucleotide
  Target: LAMA2; (-) strand; PAM type: NRG; PAM sequence: TGG
atcaagaagaaatcttaatt

SEQ ID NO: 101210 - DNA, 20 bp, Artificial Sequence
  Description of Artificial Sequence: Synthetic oligonucleotide
  Target: LAMA2; (-) strand; PAM type: NRG; PAM sequence: AAG
atttgtattaacttatcaag

SEQ ID NO: 101211 - DNA, 20 bp, Artificial Sequence
  Description of Artificial Sequence: Synthetic oligonucleotide
  Target: LAMA2; (-) strand; PAM type: NRG; PAM sequence: AAG
tggatttgtattaacttatc

SEQ ID NO: 101212 - DNA, 20 bp, Artificial Sequence
  Description of Artificial Sequence: Synthetic oligonucleotide
  Target: LAMA2; (-) strand; PAM type: NRG; PAM sequence: TGG
tgacagttgaaagaggagga

SEQ ID NO: 101213 - DNA, 20 bp, Artificial Sequence
  Description of Artificial Sequence: Synthetic oligonucleotide
  Target: LAMA2; (-) strand; PAM type: NRG; PAM sequence: AGG
tgaatgacagttgaaagagg

SEQ ID NO: 101214 - DNA, 20 bp, Artificial Sequence
  Description of Artificial Sequence: Synthetic oligonucleotide
  Target: LAMA2; (-) strand; PAM type: NRG; PAM sequence: GAG
atgaatgacagttgaaagag

SEQ ID NO: 101215 - DNA, 20 bp, Artificial Sequence
  Description of Artificial Sequence: Synthetic oligonucleotide
  Target: LAMA2; (-) strand; PAM type: NRG; PAM sequence: AGG
ctatgaatgacagttgaaag

SEQ ID NO: 101216 - DNA, 20 bp, Artificial Sequence
  Description of Artificial Sequence: Synthetic oligonucleotide
  Target: LAMA2; (-) strand; PAM type: NRG; PAM sequence: GAG
actatgaatgacagttgaaa

SEQ ID NO: 101217 - DNA, 20 bp, Artificial Sequence
  Description of Artificial Sequence: Synthetic oligonucleotide
  Target: LAMA2; (-) strand; PAM type: NRG; PAM sequence: AAG
gaactatgaatgacagttga

SEQ ID NO: 101218 - DNA, 20 bp, Artificial Sequence
  Description of Artificial Sequence: Synthetic oligonucleotide
  Target: LAMA2; (-) strand; PAM type: NRG; PAM sequence: CAG
gacatgtgaactatgaatga

SEQ ID NO: 101219 - DNA, 20 bp, Artificial Sequence
  Description of Artificial Sequence: Synthetic oligonucleotide
  Target: LAMA2; (-) strand; PAM type: NRG; PAM sequence: TAG
taagtttcttgaaggcaggt

SEQ ID NO: 101220 - DNA, 20 bp, Artificial Sequence
  Description of Artificial Sequence: Synthetic oligonucleotide
  Target: LAMA2; (-) strand; PAM type: NRG; PAM sequence: AGG
tttttaagtttcttgaaggc

SEQ ID NO: 101221 - DNA, 20 bp, Artificial Sequence
  Description of Artificial Sequence: Synthetic oligonucleotide
  Target: LAMA2; (-) strand; PAM type: NRG; PAM sequence: CAG
atttttaagtttcttgaagg

SEQ ID NO: 101222 - DNA, 20 bp, Artificial Sequence
  Description of Artificial Sequence: Synthetic oligonucleotide
  Target: LAMA2; (-) strand; PAM type: NRG; PAM sequence: AGG
ttcatttttaagtttcttga

SEQ ID NO: 101223 - DNA, 20 bp, Artificial Sequence
  Description of Artificial Sequence: Synthetic oligonucleotide
  Target: LAMA2; (-) strand; PAM type: NRG; PAM sequence: AAG
gttcatttttaagtttcttg

SEQ ID NO: 101224 - DNA, 20 bp, Artificial Sequence
  Description of Artificial Sequence: Synthetic oligonucleotide
  Target: LAMA2; (-) strand; PAM type: NRG; PAM sequence: AAG
tggcttctttgttcattttt

SEQ ID NO: 101225 - DNA, 20 bp, Artificial Sequence
  Description of Artificial Sequence: Synthetic oligonucleotide
  Target: LAMA2; (-) strand; PAM type: NRG; PAM sequence: TGG
ctttactgttaagcaaataa

SEQ ID NO: 101226 - DNA, 20 bp, Artificial Sequence
  Description of Artificial Sequence: Synthetic oligonucleotide
  Target: LAMA2; (-) strand; PAM type: NRG; PAM sequence: AAG
aaatactaaactttactgtt

SEQ ID NO: 101227 - DNA, 20 bp, Artificial Sequence
  Description of Artificial Sequence: Synthetic oligonucleotide
  Target: LAMA2; (-) strand; PAM type: NRG; PAM sequence: AAG
aataggatatgaacaaatcc

SEQ ID NO: 101228 - DNA, 20 bp, Artificial Sequence
  Description of Artificial Sequence: Synthetic oligonucleotide
  Target: LAMA2; (-) strand; PAM type: NRG; PAM sequence: AGG
gatatgagtttacagaaaat

SEQ ID NO: 101229 - DNA, 20 bp, Artificial Sequence
  Description of Artificial Sequence: Synthetic oligonucleotide
  Target: LAMA2; (-) strand; PAM type: NRG; PAM sequence: TAG
tgatatgagtttacagaaaa

SEQ ID NO: 101230 - DNA, 20 bp, Artificial Sequence
  Description of Artificial Sequence: Synthetic oligonucleotide
  Target: LAMA2; (-) strand; PAM type: NRG; PAM sequence: CAG
gtgttaatgatatgagttta

SEQ ID NO: 101231 - DNA, 20 bp, Artificial Sequence
  Description of Artificial Sequence: Synthetic oligonucleotide
  Target: LAMA2; (-) strand; PAM type: NRG; PAM sequence: GAG
ttattctgtgttaatgatat

SEQ ID NO: 101232 - DNA, 20 bp, Artificial Sequence
  Description of Artificial Sequence: Synthetic oligonucleotide
  Target: LAMA2; (-) strand; PAM type: NRG; PAM sequence: GGG
atctattttaaacatcacat

SEQ ID NO: 101233 - DNA, 20 bp, Artificial Sequence
  Description of Artificial Sequence: Synthetic oligonucleotide
  Target: LAMA2; (-) strand; PAM type: NRG; PAM sequence: TGG
aatctattttaaacatcaca

SEQ ID NO: 101234 - DNA, 20 bp, Artificial Sequence
  Description of Artificial Sequence: Synthetic oligonucleotide
  Target: LAMA2; (-) strand; PAM type: NRG; PAM sequence: GAG
ttaatttctgttctctagga

SEQ ID NO: 101235 - DNA, 20 bp, Artificial Sequence
  Description of Artificial Sequence: Synthetic oligonucleotide
  Target: LAMA2; (-) strand; PAM type: NRG; PAM sequence: GAG
ttttaatttctgttctctag

SEQ ID NO: 101236 - DNA, 20 bp, Artificial Sequence
  Description of Artificial Sequence: Synthetic oligonucleotide
  Target: LAMA2; (-) strand; PAM type: NRG; PAM sequence: AGG
aattttaatttctgttctct

SEQ ID NO: 101237 - DNA, 20 bp, Artificial Sequence
  Description of Artificial Sequence: Synthetic oligonucleotide
  Target: LAMA2; (-) strand; PAM type: NRG; PAM sequence: TAG
taattttaatttctgttctc

SEQ ID NO: 101238 - DNA, 20 bp, Artificial Sequence
  Description of Artificial Sequence: Synthetic oligonucleotide
  Target: LAMA2; (-) strand; PAM type: NRG; PAM sequence: CAG
atgaagtaatatcttgccaa

SEQ ID NO: 101239 - DNA, 20 bp, Artificial Sequence
  Description of Artificial Sequence: Synthetic oligonucleotide
  Target: LAMA2; (-) strand; PAM type: NRG; PAM sequence: AAG
tatttcaggcaatttttatg

SEQ ID NO: 101240 - DNA, 20 bp, Artificial Sequence
  Description of Artificial Sequence: Synthetic oligonucleotide
  Target: LAMA2; (-) strand; PAM type: NRG; PAM sequence: AGG
tatttataaaatgctatttc

SEQ ID NO: 101241 - DNA, 20 bp, Artificial Sequence
  Description of Artificial Sequence: Synthetic oligonucleotide
  Target: LAMA2; (-) strand; PAM type: NRG; PAM sequence: CAG
atatttataaaatgctattt

SEQ ID NO: 101242 - DNA, 20 bp, Artificial Sequence
  Description of Artificial Sequence: Synthetic oligonucleotide
  Target: LAMA2; (-) strand; PAM type: NRG; PAM sequence: AGG
actatgcagtgattaaaaat

SEQ ID NO: 101243 - DNA, 20 bp, Artificial Sequence
  Description of Artificial Sequence: Synthetic oligonucleotide
  Target: LAMA2; (-) strand; PAM type: NRG; PAM sequence: TAG
cactatgcagtgattaaaaa

SEQ ID NO: 101244 - DNA, 20 bp, Artificial Sequence
  Description of Artificial Sequence: Synthetic oligonucleotide
  Target: LAMA2; (-) strand; PAM type: NRG; PAM sequence: CAG
atcccaaaaaccccactatg

SEQ ID NO: 101245 - DNA, 20 bp, Artificial Sequence
  Description of Artificial Sequence: Synthetic oligonucleotide
  Target: LAMA2; (-) strand; PAM type: NRG; PAM sequence: AAG
attgtgactataaataataa

SEQ ID NO: 101246 - DNA, 20 bp, Artificial Sequence
  Description of Artificial Sequence: Synthetic oligonucleotide
  Target: LAMA2; (-) strand; PAM type: NRG; PAM sequence: AAG
ataaatatatgttagaattt

SEQ ID NO: 101247 - DNA, 20 bp, Artificial Sequence
  Description of Artificial Sequence: Synthetic oligonucleotide
  Target: LAMA2; (-) strand; PAM type: NRG; PAM sequence: TAG
tattttaaataaatatatgt

SEQ ID NO: 101248 - DNA, 20 bp, Artificial Sequence
  Description of Artificial Sequence: Synthetic oligonucleotide
  Target: LAMA2; (-) strand; PAM type: NRG; PAM sequence: AAG
cttttgcaaattggcaagca

SEQ ID NO: 101249 - DNA, 20 bp, Artificial Sequence
  Description of Artificial Sequence: Synthetic oligonucleotide
  Target: LAMA2; (-) strand; PAM type: NRG; PAM sequence: AAG
gatcacttttgcaaattggc

SEQ ID NO: 101250 - DNA, 20 bp, Artificial Sequence
  Description of Artificial Sequence: Synthetic oligonucleotide
  Target: LAMA2; (-) strand; PAM type: NRG; PAM sequence: TGG
tcatgatcacttttgcaaat

SEQ ID NO: 101251 - DNA, 20 bp, Artificial Sequence
  Description of Artificial Sequence: Synthetic oligonucleotide
  Target: LAMA2; (-) strand; PAM type: NRG; PAM sequence: TAG
caggttgcaagtagaaaaca

SEQ ID NO: 101252 - DNA, 20 bp, Artificial Sequence
  Description of Artificial Sequence: Synthetic oligonucleotide
  Target: LAMA2; (-) strand; PAM type: NRG; PAM sequence: TAG
ggcttatctcaggttgcaag

SEQ ID NO: 101253 - DNA, 20 bp, Artificial Sequence
  Description of Artificial Sequence: Synthetic oligonucleotide
  Target: LAMA2; (-) strand; PAM type: NRG; PAM sequence: AAG
ctaggcttatctcaggttgc

SEQ ID NO: 101254 - DNA, 20 bp, Artificial Sequence
  Description of Artificial Sequence: Synthetic oligonucleotide
  Target: LAMA2; (-) strand; PAM type: NRG; PAM sequence: AGG
catttagctaggcttatctc

SEQ ID NO: 101255 - DNA, 20 bp, Artificial Sequence
  Description of Artificial Sequence: Synthetic oligonucleotide
  Target: LAMA2; (-) strand; PAM type: NRG; PAM sequence: CAG
acatttagctaggcttatct

SEQ ID NO: 101256 - DNA, 20 bp, Artificial Sequence
  Description of Artificial Sequence: Synthetic oligonucleotide
  Target: LAMA2; (-) strand; PAM type: NRG; PAM sequence: AGG
gaaaattaccacatttagct

SEQ ID NO: 101257 - DNA, 20 bp, Artificial Sequence
  Description of Artificial Sequence: Synthetic oligonucleotide
  Target: LAMA2; (-) strand; PAM type: NRG; PAM sequence: TAG
ggaaaattaccacatttagc

SEQ ID NO: 101258 - DNA, 20 bp, Artificial Sequence
  Description of Artificial Sequence: Synthetic oligonucleotide
  Target: LAMA2; (-) strand; PAM type: NRG; PAM sequence: TAG
ttaaggaaaattaccacatt

SEQ ID NO: 101259 - DNA, 20 bp, Artificial Sequence
  Description of Artificial Sequence: Synthetic oligonucleotide
  Target: LAMA2; (-) strand; PAM type: NRG; PAM sequence: AGG
ttgccaattttacagagtta

SEQ ID NO: 101260 - DNA, 20 bp, Artificial Sequence
  Description of Artificial Sequence: Synthetic oligonucleotide
  Target: LAMA2; (-) strand; PAM type: NRG; PAM sequence: AAG
gttgccaattttacagagtt

SEQ ID NO: 101261 - DNA, 20 bp, Artificial Sequence
  Description of Artificial Sequence: Synthetic oligonucleotide
  Target: LAMA2; (-) strand; PAM type: NRG; PAM sequence: GAG
tggaagttgccaattttaca

SEQ ID NO: 101262 - DNA, 20 bp, Artificial Sequence
  Description of Artificial Sequence: Synthetic oligonucleotide
  Target: LAMA2; (-) strand; PAM type: NRG; PAM sequence: CAG
gttggaagttgccaatttta

SEQ ID NO: 101263 - DNA, 20 bp, Artificial Sequence
  Description of Artificial Sequence: Synthetic oligonucleotide
  Target: LAMA2; (-) strand; PAM type: NRG; PAM sequence: AAG
cggtttcaccaagtggttgg

SEQ ID NO: 101264 - DNA, 20 bp, Artificial Sequence
  Description of Artificial Sequence: Synthetic oligonucleotide
  Target: LAMA2; (-) strand; PAM type: NRG; PAM sequence: TGG
ttccggtttcaccaagtggt

SEQ ID NO: 101265 - DNA, 20 bp, Artificial Sequence
  Description of Artificial Sequence: Synthetic oligonucleotide
  Target: LAMA2; (-) strand; PAM type: NRG; PAM sequence: TGG
agacttccggtttcaccaag

SEQ ID NO: 101266 - DNA, 20 bp, Artificial Sequence
  Description of Artificial Sequence: Synthetic oligonucleotide
  Target: LAMA2; (-) strand; PAM type: NRG; PAM sequence: AAG
ttcagacttccggtttcacc

SEQ ID NO: 101267 - DNA, 20 bp, Artificial Sequence
  Description of Artificial Sequence: Synthetic oligonucleotide
  Target: LAMA2; (-) strand; PAM type: NRG; PAM sequence: CGG
aggataaaacttcagacttc

SEQ ID NO: 101268 - DNA, 20 bp, Artificial Sequence
  Description of Artificial Sequence: Synthetic oligonucleotide
  Target: LAMA2; (-) strand; PAM type: NRG; PAM sequence: CAG
atcaagataggataaaactt

SEQ ID NO: 101269 - DNA, 20 bp, Artificial Sequence
  Description of Artificial Sequence: Synthetic oligonucleotide
  Target: LAMA2; (-) strand; PAM type: NRG; PAM sequence: AGG
atatctctgtagatcaagat

SEQ ID NO: 101270 - DNA, 20 bp, Artificial Sequence
  Description of Artificial Sequence: Synthetic oligonucleotide
  Target: LAMA2; (-) strand; PAM type: NRG; PAM sequence: TAG
tatatctctgtagatcaaga

SEQ ID NO: 101271 - DNA, 20 bp, Artificial Sequence
  Description of Artificial Sequence: Synthetic oligonucleotide
  Target: LAMA2; (-) strand; PAM type: NRG; PAM sequence: AAG
tgattatatctctgtagatc

SEQ ID NO: 101272 - DNA, 20 bp, Artificial Sequence
  Description of Artificial Sequence: Synthetic oligonucleotide
  Target: LAMA2; (-) strand; PAM type: NRG; PAM sequence: TAG
caatgttgattatatctctg

SEQ ID NO: 101273 - DNA, 20 bp, Artificial Sequence
  Description of Artificial Sequence: Synthetic oligonucleotide
  Target: LAMA2; (-) strand; PAM type: NRG; PAM sequence: TGG
atcagatctttggtggcaac

SEQ ID NO: 101274 - DNA, 20 bp, Artificial Sequence
  Description of Artificial Sequence: Synthetic oligonucleotide
  Target: LAMA2; (-) strand; PAM type: NRG; PAM sequence: TGG
tattgtgatcagatctttgg

SEQ ID NO: 101275 - DNA, 20 bp, Artificial Sequence
  Description of Artificial Sequence: Synthetic oligonucleotide
  Target: LAMA2; (-) strand; PAM type: NRG; PAM sequence: TGG
cattattgtgatcagatctt

SEQ ID NO: 101276 - DNA, 20 bp, Artificial Sequence
  Description of Artificial Sequence: Synthetic oligonucleotide
  Target: LAMA2; (-) strand; PAM type: NRG; PAM sequence: CAG
ggtctctgcattattgtgat

SEQ ID NO: 101277 - DNA, 20 bp, Artificial Sequence
  Description of Artificial Sequence: Synthetic oligonucleotide
  Target: LAMA2; (-) strand; PAM type: NRG; PAM sequence: AGG
gttctagtgataatatataa

SEQ ID NO: 101278 - DNA, 20 bp, Artificial Sequence
  Description of Artificial Sequence: Synthetic oligonucleotide
  Target: LAMA2; (-) strand; PAM type: NRG; PAM sequence: AAG
tgttctagtgataatatata

SEQ ID NO: 101279 - DNA, 20 bp, Artificial Sequence
  Description of Artificial Sequence: Synthetic oligonucleotide
  Target: LAMA2; (-) strand; PAM type: NRG; PAM sequence: TAG
ataaatgtacaacagtgttc

SEQ ID NO: 101280 - DNA, 20 bp, Artificial Sequence
  Description of Artificial Sequence: Synthetic oligonucleotide
  Target: LAMA2; (-) strand; PAM type: NRG; PAM sequence: CAG
ttttgattataaatgtacaa

SEQ ID NO: 101281 - DNA, 20 bp, Artificial Sequence
  Description of Artificial Sequence: Synthetic oligonucleotide
  Target: LAMA2; (-) strand; PAM type: NRG; PAM sequence: GGG
tttctgctcccatatatagg

SEQ ID NO: 101282 - DNA, 20 bp, Artificial Sequence
  Description of Artificial Sequence: Synthetic oligonucleotide
  Target: LAMA2; (-) strand; PAM type: NRG; PAM sequence: GGG
gtttctgctcccatatatag

SEQ ID NO: 101283 - DNA, 20 bp, Artificial Sequence
  Description of Artificial Sequence: Synthetic oligonucleotide
  Target: LAMA2; (-) strand; PAM type: NRG; PAM sequence: GGG
tgtttctgctcccatatata

SEQ ID NO: 101284 - DNA, 20 bp, Artificial Sequence
  Description of Artificial Sequence: Synthetic oligonucleotide
  Target: LAMA2; (-) strand; PAM type: NRG; PAM sequence: AGG
ttgtttctgctcccatatat

SEQ ID NO: 101285 - DNA, 20 bp, Artificial Sequence
  Description of Artificial Sequence: Synthetic oligonucleotide
  Target: LAMA2; (-) strand; PAM type: NRG; PAM sequence: TAG
tttgtttctgctcccatata

SEQ ID NO: 101286 - DNA, 20 bp, Artificial Sequence
  Description of Artificial Sequence: Synthetic oligonucleotide
  Target: LAMA2; (-) strand; PAM type: NRG; PAM sequence: CAG
agtaagtcctgttttcatta

SEQ ID NO: 101287 - DNA, 20 bp, Artificial Sequence
  Description of Artificial Sequence: Synthetic oligonucleotide
  Target: LAMA2; (-) strand; PAM type: NRG; PAM sequence: AAG
tcatcatttttcagaatagt

SEQ ID NO: 101288 - DNA, 20 bp, Artificial Sequence
  Description of Artificial Sequence: Synthetic oligonucleotide
  Target: LAMA2; (-) strand; PAM type: NRG; PAM sequence: TAG
tttatcatcatttttcagaa

SEQ ID NO: 101289 - DNA, 20 bp, Artificial Sequence
  Description of Artificial Sequence: Synthetic oligonucleotide
  Target: LAMA2; (-) strand; PAM type: NRG; PAM sequence: CAG
tgatgtttatcatcattttt

SEQ ID NO: 101290 - DNA, 20 bp, Artificial Sequence
  Description of Artificial Sequence: Synthetic oligonucleotide
  Target: LAMA2; (-) strand; PAM type: NRG; PAM sequence: GAG
agatcagtaatcagcatctg

SEQ ID NO: 101291 - DNA, 20 bp, Artificial Sequence
  Description of Artificial Sequence: Synthetic oligonucleotide
  Target: LAMA2; (-) strand; PAM type: NRG; PAM sequence: TGG
ttagatcagtaatcagcatc

SEQ ID NO: 101292 - DNA, 20 bp, Artificial Sequence
  Description of Artificial Sequence: Synthetic oligonucleotide
  Target: LAMA2; (-) strand; PAM type: NRG; PAM sequence: CAG
caaagtgttagatcagtaat

SEQ ID NO: 101293 - DNA, 20 bp, Artificial Sequence
  Description of Artificial Sequence: Synthetic oligonucleotide
  Target: LAMA2; (-) strand; PAM type: NRG; PAM sequence: CAG
caacaagcaaagtgttagat

SEQ ID NO: 101294 - DNA, 20 bp, Artificial Sequence
  Description of Artificial Sequence: Synthetic oligonucleotide
  Target: LAMA2; (-) strand; PAM type: NRG; PAM sequence: TAG
gggtacaacaagcaaagtgt

SEQ ID NO: 101295 - DNA, 20 bp, Artificial Sequence
  Description of Artificial Sequence: Synthetic oligonucleotide
  Target: LAMA2; (-) strand; PAM type: NRG; PAM sequence: AAG
tttagggggtacaacaagca

SEQ ID NO: 101296 - DNA, 20 bp, Artificial Sequence
  Description of Artificial Sequence: Synthetic oligonucleotide
  Target: LAMA2; (-) strand; PAM type: NRG; PAM sequence: AAG
tgacatttagggggtacaac

SEQ ID NO: 101297 - DNA, 20 bp, Artificial Sequence
  Description of Artificial Sequence: Synthetic oligonucleotide
  Target: LAMA2; (-) strand; PAM type: NRG; PAM sequence: GGG
gagagaggatgacatttagg

SEQ ID NO: 101298 - DNA, 20 bp, Artificial Sequence
  Description of Artificial Sequence: Synthetic oligonucleotide
  Target: LAMA2; (-) strand; PAM type: NRG; PAM sequence: GGG
agagagaggatgacatttag

SEQ ID NO: 101299 - DNA, 20 bp, Artificial Sequence
  Description of Artificial Sequence: Synthetic oligonucleotide
  Target: LAMA2; (-) strand; PAM type: NRG; PAM sequence: GGG
cagagagaggatgacattta

SEQ ID NO: 101300 - DNA, 20 bp, Artificial Sequence
  Description of Artificial Sequence: Synthetic oligonucleotide
  Target: LAMA2; (-) strand; PAM type: NRG; PAM sequence: AGG
gcagagagaggatgacattt

SEQ ID NO: 101301 - DNA, 20 bp, Artificial Sequence
  Description of Artificial Sequence: Synthetic oligonucleotide
  Target: LAMA2; (-) strand; PAM type: NRG; PAM sequence: TAG
agcagagagaggatgacatt

SEQ ID NO: 101302 - DNA, 20 bp, Artificial Sequence
  Description of Artificial Sequence: Synthetic oligonucleotide
  Target: LAMA2; (-) strand; PAM type: NRG; PAM sequence: AGG
cagtgagtacgagcagagag

SEQ ID NO: 101303 - DNA, 20 bp, Artificial Sequence
  Description of Artificial Sequence: Synthetic oligonucleotide
  Target: LAMA2; (-) strand; PAM type: NRG; PAM sequence: GAG
gcagtgagtacgagcagaga

SEQ ID NO: 101304 - DNA, 20 bp, Artificial Sequence
  Description of Artificial Sequence: Synthetic oligonucleotide
  Target: LAMA2; (-) strand; PAM type: NRG; PAM sequence: GAG
gagcagtgagtacgagcaga

SEQ ID NO: 101305 - DNA, 20 bp, Artificial Sequence
  Description of Artificial Sequence: Synthetic oligonucleotide
  Target: LAMA2; (-) strand; PAM type: NRG; PAM sequence: GAG
ttgagcagtgagtacgagca

SEQ ID NO: 101306 - DNA, 20 bp, Artificial Sequence
  Description of Artificial Sequence: Synthetic oligonucleotide
  Target: LAMA2; (-) strand; PAM type: NRG; PAM sequence: CAG
acttgagcagtgagtacgag

SEQ ID NO: 101307 - DNA, 20 bp, Artificial Sequence
  Description of Artificial Sequence: Synthetic oligonucleotide
  Target: LAMA2; (-) strand; PAM type: NRG; PAM sequence: GAG
cttacttgagcagtgagtac

SEQ ID NO: 101308 - DNA, 20 bp, Artificial Sequence
  Description of Artificial Sequence: Synthetic oligonucleotide
  Target: LAMA2; (-) strand; PAM type: NRG; PAM sequence: GAG
taagaacttacttgagcagt

SEQ ID NO: 101309 - DNA, 20 bp, Artificial Sequence
  Description of Artificial Sequence: Synthetic oligonucleotide
  Target: LAMA2; (-) strand; PAM type: NRG; PAM sequence: CAG
caaataagaacttacttgag

SEQ ID NO: 101310 - DNA, 20 bp, Artificial Sequence
  Description of Artificial Sequence: Synthetic oligonucleotide
  Target: LAMA2; (-) strand; PAM type: NRG; PAM sequence: GAG
tttcaaataagaacttactt

SEQ ID NO: 101311 - DNA, 20 bp, Artificial Sequence
  Description of Artificial Sequence: Synthetic oligonucleotide
  Target: LAMA2; (-) strand; PAM type: NRG; PAM sequence: AAG
tacttactgtcctttcaaat

SEQ ID NO: 101312 - DNA, 20 bp, Artificial Sequence
  Description of Artificial Sequence: Synthetic oligonucleotide
  Target: LAMA2; (-) strand; PAM type: NRG; PAM sequence: CAG
acatgacacagcttagacta

SEQ ID NO: 101313 - DNA, 20 bp, Artificial Sequence
  Description of Artificial Sequence: Synthetic oligonucleotide
  Target: LAMA2; (-) strand; PAM type: NRG; PAM sequence: TAG
gtgaacaacatgacacagct

SEQ ID NO: 101314 - DNA, 20 bp, Artificial Sequence
  Description of Artificial Sequence: Synthetic oligonucleotide
  Target: LAMA2; (-) strand; PAM type: NRG; PAM sequence: CAG
tggatgtgaacaacatgaca

SEQ ID NO: 101315 - DNA, 20 bp, Artificial Sequence
  Description of Artificial Sequence: Synthetic oligonucleotide
  Target: LAMA2; (-) strand; PAM type: NRG; PAM sequence: TGG
tttatagattgcctaacacc

SEQ ID NO: 101316 - DNA, 20 bp, Artificial Sequence
  Description of Artificial Sequence: Synthetic oligonucleotide
  Target: LAMA2; (-) strand; PAM type: NRG; PAM sequence: TAG
ggtgaacagaagatgtttta

SEQ ID NO: 101317 - DNA, 20 bp, Artificial Sequence
  Description of Artificial Sequence: Synthetic oligonucleotide
  Target: LAMA2; (-) strand; PAM type: NRG; PAM sequence: AAG
ggtgcaaacaaggtgaacag

SEQ ID NO: 101318 - DNA, 20 bp, Artificial Sequence
  Description of Artificial Sequence: Synthetic oligonucleotide
  Target: LAMA2; (-) strand; PAM type: NRG; PAM sequence: CAG
gaaggtgcaaacaaggtgaa

SEQ ID NO: 101319 - DNA, 20 bp, Artificial Sequence
  Description of Artificial Sequence: Synthetic oligonucleotide
  Target: LAMA2; (-) strand; PAM type: NRG; PAM sequence: AGG
atgagtagaaggtgcaaaca

SEQ ID NO: 101320 - DNA, 20 bp, Artificial Sequence
  Description of Artificial Sequence: Synthetic oligonucleotide
  Target: LAMA2; (-) strand; PAM type: NRG; PAM sequence: AAG
aatgagtagaaggtgcaaac

SEQ ID NO: 101321 - DNA, 20 bp, Artificial Sequence
  Description of Artificial Sequence: Synthetic oligonucleotide
  Target: LAMA2; (-) strand; PAM type: NRG; PAM sequence: AGG
taacaaaacaaatgagtaga

SEQ ID NO: 101322 - DNA, 20 bp, Artificial Sequence
  Description of Artificial Sequence: Synthetic oligonucleotide
  Target: LAMA2; (-) strand; PAM type: NRG; PAM sequence: AAG
ctaacaaaacaaatgagtag

SEQ ID NO: 101323 - DNA, 20 bp, Artificial Sequence
  Description of Artificial Sequence: Synthetic oligonucleotide
  Target: LAMA2; (-) strand; PAM type: NRG; PAM sequence: TAG
ttactaacaaaacaaatgag

SEQ ID NO: 101324 - DNA, 20 bp, Artificial Sequence
  Description of Artificial Sequence: Synthetic oligonucleotide
  Target: LAMA2; (-) strand; PAM type: NRG; PAM sequence: GAG
cttttactaacaaaacaaat

SEQ ID NO: 101325 - DNA, 20 bp, Artificial Sequence
  Description of Artificial Sequence: Synthetic oligonucleotide
  Target: LAMA2; (-) strand; PAM type: NRG; PAM sequence: AAG
ccaatgctaaggttgacaac

SEQ ID NO: 101326 - DNA, 20 bp, Artificial Sequence
  Description of Artificial Sequence: Synthetic oligonucleotide
  Target: LAMA2; (-) strand; PAM type: NRG; PAM sequence: AGG
gttagcctggaccaatgcta

SEQ ID NO: 101327 - DNA, 20 bp, Artificial Sequence
  Description of Artificial Sequence: Synthetic oligonucleotide
  Target: LAMA2; (-) strand; PAM type: NRG; PAM sequence: AAG
tgttagcctggaccaatgct

SEQ ID NO: 101328 - DNA, 20 bp, Artificial Sequence
  Description of Artificial Sequence: Synthetic oligonucleotide
  Target: LAMA2; (-) strand; PAM type: NRG; PAM sequence: TGG
cattccacacattgttagcc

SEQ ID NO: 101329 - DNA, 20 bp, Artificial Sequence
  Description of Artificial Sequence: Synthetic oligonucleotide
  Target: LAMA2; (-) strand; PAM type: NRG; PAM sequence: TAG
gttgccattccacacattgt

SEQ ID NO: 101330 - DNA, 20 bp, Artificial Sequence
  Description of Artificial Sequence: Synthetic oligonucleotide
  Target: LAMA2; (-) strand; PAM type: NRG; PAM sequence: TAG
atcatctagaatcacggtga

SEQ ID NO: 101331 - DNA, 20 bp, Artificial Sequence
  Description of Artificial Sequence: Synthetic oligonucleotide
  Target: LAMA2; (-) strand; PAM type: NRG; PAM sequence: CGG
aggaaaatcatctagaatca

SEQ ID NO: 101332 - DNA, 20 bp, Artificial Sequence
  Description of Artificial Sequence: Synthetic oligonucleotide
  Target: LAMA2; (-) strand; PAM type: NRG; PAM sequence: TAG
taacaactaggaaaatcatc

SEQ ID NO: 101333 - DNA, 20 bp, Artificial Sequence
  Description of Artificial Sequence: Synthetic oligonucleotide
  Target: LAMA2; (-) strand; PAM type: NRG; PAM sequence: AGG
gagactgatctctaacaact

SEQ ID NO: 101334 - DNA, 20 bp, Artificial Sequence
  Description of Artificial Sequence: Synthetic oligonucleotide
  Target: LAMA2; (-) strand; PAM type: NRG; PAM sequence: TAG
tgagactgatctctaacaac

SEQ ID NO: 101335 - DNA, 20 bp, Artificial Sequence
  Description of Artificial Sequence: Synthetic oligonucleotide
  Target: LAMA2; (-) strand; PAM type: NRG; PAM sequence: GAG
tcaataatatacaaaccact

SEQ ID NO: 101336 - DNA, 20 bp, Artificial Sequence
  Description of Artificial Sequence: Synthetic oligonucleotide
  Target: LAMA2; (-) strand; PAM type: NRG; PAM sequence: CAG
tccttaatcagctagcagaa

SEQ ID NO: 101337 - DNA, 20 bp, Artificial Sequence
  Description of Artificial Sequence: Synthetic oligonucleotide
  Target: LAMA2; (-) strand; PAM type: NRG; PAM sequence: CAG
gcaactccttaatcagctag

SEQ ID NO: 101338 - DNA, 20 bp, Artificial Sequence
  Description of Artificial Sequence: Synthetic oligonucleotide
  Target: LAMA2; (-) strand; PAM type: NRG; PAM sequence: TAG
tgtgcaactccttaatcagc

SEQ ID NO: 101339 - DNA, 20 bp, Artificial Sequence
  Description of Artificial Sequence: Synthetic oligonucleotide
  Target: LAMA2; (-) strand; PAM type: NRG; PAM sequence: CAG
caactgtgcaactccttaat

SEQ ID NO: 101340 - DNA, 20 bp, Artificial Sequence
  Description of Artificial Sequence: Synthetic oligonucleotide
  Target: LAMA2; (-) strand; PAM type: NRG; PAM sequence: CAG
aaaacaaaggcaacagtgat

SEQ ID NO: 101341 - DNA, 20 bp, Artificial Sequence
  Description of Artificial Sequence: Synthetic oligonucleotide
  Target: LAMA2; (-) strand; PAM type: NRG; PAM sequence: CAG
cttgctgaaaacaaaggcaa

SEQ ID NO: 101342 - DNA, 20 bp, Artificial Sequence
  Description of Artificial Sequence: Synthetic oligonucleotide
  Target: LAMA2; (-) strand; PAM type: NRG; PAM sequence: AGG
ataaaacttgctgaaaacaa

SEQ ID NO: 101343 - DNA, 20 bp, Artificial Sequence
  Description of Artificial Sequence: Synthetic oligonucleotide
  Target: LAMA2; (-) strand; PAM type: NRG; PAM sequence: AAG
aataaaacttgctgaaaaca

SEQ ID NO: 101344 - DNA, 20 bp, Artificial Sequence
  Description of Artificial Sequence: Synthetic oligonucleotide
  Target: LAMA2; (-) strand; PAM type: NRG; PAM sequence: TAG
attgcaatcaaagtagagtt

SEQ ID NO: 101345 - DNA, 20 bp, Artificial Sequence
  Description of Artificial Sequence: Synthetic oligonucleotide
  Target: LAMA2; (-) strand; PAM type: NRG; PAM sequence: GAG
tagaaattgcaatcaaagta

SEQ ID NO: 101346 - DNA, 20 bp, Artificial Sequence
  Description of Artificial Sequence: Synthetic oligonucleotide
  Target: LAMA2; (-) strand; PAM type: NRG; PAM sequence: TAG
agtagaaattgcaatcaaag

SEQ ID NO: 101347 - DNA, 20 bp, Artificial Sequence
  Description of Artificial Sequence: Synthetic oligonucleotide
  Target: LAMA2; (-) strand; PAM type: NRG; PAM sequence: AAG
cagagtagaaattgcaatca

SEQ ID NO: 101348 - DNA, 20 bp, Artificial Sequence
  Description of Artificial Sequence: Synthetic oligonucleotide
  Target: LAMA2; (-) strand; PAM type: NRG; PAM sequence: TAG
cctcctgagccttgccagag

SEQ ID NO: 101349 - DNA, 20 bp, Artificial Sequence
  Description of Artificial Sequence: Synthetic oligonucleotide
  Target: LAMA2; (-) strand; PAM type: NRG; PAM sequence: GAG
aaacctcctgagccttgcca

SEQ ID NO: 101350 - DNA, 20 bp, Artificial Sequence
  Description of Artificial Sequence: Synthetic oligonucleotide
  Target: LAMA2; (-) strand; PAM type: NRG; PAM sequence: CAG
taaaacctcctgagccttgc

SEQ ID NO: 101351 - DNA, 20 bp, Artificial Sequence
  Description of Artificial Sequence: Synthetic oligonucleotide
  Target: LAMA2; (-) strand; PAM type: NRG; PAM sequence: GAG
caaggtcaataaaacctcct

SEQ ID NO: 101352 - DNA, 20 bp, Artificial Sequence
  Description of Artificial Sequence: Synthetic oligonucleotide
  Target: LAMA2; (-) strand; PAM type: NRG; PAM sequence: AGG
tgattttagtttgtctttca

SEQ ID NO: 101353 - DNA, 20 bp, Artificial Sequence
  Description of Artificial Sequence: Synthetic oligonucleotide
  Target: LAMA2; (-) strand; PAM type: NRG; PAM sequence: AAG
gtgattttagtttgtctttc

SEQ ID NO: 101354 - DNA, 20 bp, Artificial Sequence
  Description of Artificial Sequence: Synthetic oligonucleotide
  Target: LAMA2; (-) strand; PAM type: NRG; PAM sequence: TAG
actttaagattatgtgattt

SEQ ID NO: 101355 - DNA, 20 bp, Artificial Sequence
  Description of Artificial Sequence: Synthetic oligonucleotide
  Target: LAMA2; (-) strand; PAM type: NRG; PAM sequence: AAG
tacttatttcttccaacttt

SEQ ID NO: 101356 - DNA, 20 bp, Artificial Sequence
  Description of Artificial Sequence: Synthetic oligonucleotide
  Target: LAMA2; (-) strand; PAM type: NRG; PAM sequence: TAG
agaaaaagagaaggctaggc

SEQ ID NO: 101357 - DNA, 20 bp, Artificial Sequence
  Description of Artificial Sequence: Synthetic oligonucleotide
  Target: LAMA2; (-) strand; PAM type: NRG; PAM sequence: AGG
tcacagaaaaagagaaggct

SEQ ID NO: 101358 - DNA, 20 bp, Artificial Sequence
  Description of Artificial Sequence: Synthetic oligonucleotide
  Target: LAMA2; (-) strand; PAM type: NRG; PAM sequence: TAG
gtcacagaaaaagagaaggc

SEQ ID NO: 101359 - DNA, 20 bp, Artificial Sequence
  Description of Artificial Sequence: Synthetic oligonucleotide
  Target: LAMA2; (-) strand; PAM type: NRG; PAM sequence: AGG
ggatgtcacagaaaaagaga

SEQ ID NO: 101360 - DNA, 20 bp, Artificial Sequence
  Description of Artificial Sequence: Synthetic oligonucleotide
  Target: LAMA2; (-) strand; PAM type: NRG; PAM sequence: AAG
tggatgtcacagaaaaagag

SEQ ID NO: 101361 - DNA, 20 bp, Artificial Sequence
  Description of Artificial Sequence: Synthetic oligonucleotide
  Target: LAMA2; (-) strand; PAM type: NRG; PAM sequence: GAG
ttgtggatgtcacagaaaaa

SEQ ID NO: 101362 - DNA, 20 bp, Artificial Sequence
  Description of Artificial Sequence: Synthetic oligonucleotide
  Target: LAMA2; (-) strand; PAM type: NRG; PAM sequence: AAG
ttttgtggatgtcacagaaa

SEQ ID NO: 101363 - DNA, 20 bp, Artificial Sequence
  Description of Artificial Sequence: Synthetic oligonucleotide
  Target: LAMA2; (-) strand; PAM type: NRG; PAM sequence: CAG
tgtctgttttgtggatgtca

SEQ ID NO: 101364 - DNA, 20 bp, Artificial Sequence
  Description of Artificial Sequence: Synthetic oligonucleotide
  Target: LAMA2; (-) strand; PAM type: NRG; PAM sequence: TGG
ttaggatgctgtctgttttg

SEQ ID NO: 101365 - DNA, 20 bp, Artificial Sequence
  Description of Artificial Sequence: Synthetic oligonucleotide
  Target: LAMA2; (-) strand; PAM type: NRG; PAM sequence: AGG
acaccatgcttccttgcatt

SEQ ID NO: 101366 - DNA, 20 bp, Artificial Sequence
  Description of Artificial Sequence: Synthetic oligonucleotide
  Target: LAMA2; (-) strand; PAM type: NRG; PAM sequence: TAG
aacaccatgcttccttgcat

SEQ ID NO: 101367 - DNA, 20 bp, Artificial Sequence
  Description of Artificial Sequence: Synthetic oligonucleotide
  Target: LAMA2; (-) strand; PAM type: NRG; PAM sequence: TAG
gctaggtttcaaaccttctg

SEQ ID NO: 101368 - DNA, 20 bp, Artificial Sequence
  Description of Artificial Sequence: Synthetic oligonucleotide
  Target: LAMA2; (-) strand; PAM type: NRG; PAM sequence: AGG
tgtcacacaaattgcaagct

SEQ ID NO: 101369 - DNA, 20 bp, Artificial Sequence
  Description of Artificial Sequence: Synthetic oligonucleotide
  Target: LAMA2; (-) strand; PAM type: NRG; PAM sequence: TAG
atgtcacacaaattgcaagc

SEQ ID NO: 101370 - DNA, 20 bp, Artificial Sequence
  Description of Artificial Sequence: Synthetic oligonucleotide
  Target: LAMA2; (-) strand; PAM type: NRG; PAM sequence: AAG
aataatgtcacacaaattgc

SEQ ID NO: 101371 - DNA, 20 bp, Artificial Sequence
  Description of Artificial Sequence: Synthetic oligonucleotide
  Target: LAMA2; (-) strand; PAM type: NRG; PAM sequence: AGG
agaggatgaaaatgaggttt

SEQ ID NO: 101372 - DNA, 20 bp, Artificial Sequence
  Description of Artificial Sequence: Synthetic oligonucleotide
  Target: LAMA2; (-) strand; PAM type: NRG; PAM sequence: TAG
cagaggatgaaaatgaggtt

SEQ ID NO: 101373 - DNA, 20 bp, Artificial Sequence
  Description of Artificial Sequence: Synthetic oligonucleotide
  Target: LAMA2; (-) strand; PAM type: NRG; PAM sequence: AGG
ttttacagaggatgaaaatg

SEQ ID NO: 101374 - DNA, 20 bp, Artificial Sequence
  Description of Artificial Sequence: Synthetic oligonucleotide
  Target: LAMA2; (-) strand; PAM type: NRG; PAM sequence: GAG
attttacagaggatgaaaat

SEQ ID NO: 101375 - DNA, 20 bp, Artificial Sequence
  Description of Artificial Sequence: Synthetic oligonucleotide
  Target: LAMA2; (-) strand; PAM type: NRG; PAM sequence: AGG
attttacatccattttacag

SEQ ID NO: 101376 - DNA, 20 bp, Artificial Sequence
  Description of Artificial Sequence: Synthetic oligonucleotide
  Target: LAMA2; (-) strand; PAM type: NRG; PAM sequence: GAG
cattttacatccattttaca

SEQ ID NO: 101377 - DNA, 20 bp, Artificial Sequence
  Description of Artificial Sequence: Synthetic oligonucleotide
  Target: LAMA2; (-) strand; PAM type: NRG; PAM sequence: CAG
agcattttacatccatttta

SEQ ID NO: 101378 - DNA, 20 bp, Artificial Sequence
  Description of Artificial Sequence: Synthetic oligonucleotide
  Target: LAMA2; (-) strand; PAM type: NRG; PAM sequence: TAG
atacttcacatacatgtatg

SEQ ID NO: 101379 - DNA, 20 bp, Artificial Sequence
  Description of Artificial Sequence: Synthetic oligonucleotide
  Target: LAMA2; (-) strand; PAM type: NRG; PAM sequence: TAG
tattgagcacctattatgct

SEQ ID NO: 101380 - DNA, 20 bp, Artificial Sequence
  Description of Artificial Sequence: Synthetic oligonucleotide
  Target: LAMA2; (-) strand; PAM type: NRG; PAM sequence: GAG
aacaatgcctagaatttatt

SEQ ID NO: 101381 - DNA, 20 bp, Artificial Sequence
  Description of Artificial Sequence: Synthetic oligonucleotide
  Target: LAMA2; (-) strand; PAM type: NRG; PAM sequence: TAG
acaatgatgataacaatgcc

SEQ ID NO: 101382 - DNA, 20 bp, Artificial Sequence
  Description of Artificial Sequence: Synthetic oligonucleotide
  Target: LAMA2; (-) strand; PAM type: NRG; PAM sequence: TGG
caggtctttggggaaaaaaa

SEQ ID NO: 101383 - DNA, 20 bp, Artificial Sequence
  Description of Artificial Sequence: Synthetic oligonucleotide
  Target: LAMA2; (-) strand; PAM type: NRG; PAM sequence: GGG
cacaaaacatcaggtctttg

SEQ ID NO: 101384 - DNA, 20 bp, Artificial Sequence
  Description of Artificial Sequence: Synthetic oligonucleotide
  Target: LAMA2; (-) strand; PAM type: NRG; PAM sequence: GGG
gcacaaaacatcaggtcttt

SEQ ID NO: 101385 - DNA, 20 bp, Artificial Sequence
  Description of Artificial Sequence: Synthetic oligonucleotide
  Target: LAMA2; (-) strand; PAM type: NRG; PAM sequence: TGG
tgcacaaaacatcaggtctt

SEQ ID NO: 101386 - DNA, 20 bp, Artificial Sequence
  Description of Artificial Sequence: Synthetic oligonucleotide
  Target: LAMA2; (-) strand; PAM type: NRG; PAM sequence: AGG
gatgcgttgcacaaaacatc

SEQ ID NO: 101387 - DNA, 20 bp, Artificial Sequence
  Description of Artificial Sequence: Synthetic oligonucleotide
  Target: LAMA2; (-) strand; PAM type: NRG; PAM sequence: CAG
tgatgcgttgcacaaaacat

SEQ ID NO: 101388 - DNA, 20 bp, Artificial Sequence
  Description of Artificial Sequence: Synthetic oligonucleotide
  Target: LAMA2; (-) strand; PAM type: NRG; PAM sequence: CAG
aactaaagaaaatatttcat

SEQ ID NO: 101389 - DNA, 20 bp, Artificial Sequence
  Description of Artificial Sequence: Synthetic oligonucleotide
  Target: LAMA2; (-) strand; PAM type: NRG; PAM sequence: AAG
ctgaaagtcagcctaaacta

SEQ ID NO: 101390 - DNA, 20 bp, Artificial Sequence
  Description of Artificial Sequence: Synthetic oligonucleotide
  Target: LAMA2; (-) strand; PAM type: NRG; PAM sequence: CAG
agtaacaggaaactgaaagt

SEQ ID NO: 101391 - DNA, 20 bp, Artificial Sequence
  Description of Artificial Sequence: Synthetic oligonucleotide
  Target: LAMA2; (-) strand; PAM type: NRG; PAM sequence: AAG
agatagtaacaggaaactga

SEQ ID NO: 101392 - DNA, 20 bp, Artificial Sequence
  Description of Artificial Sequence: Synthetic oligonucleotide
  Target: LAMA2; (-) strand; PAM type: NRG; PAM sequence: AGG
ctagaattagagatagtaac

SEQ ID NO: 101393 - DNA, 20 bp, Artificial Sequence
  Description of Artificial Sequence: Synthetic oligonucleotide
  Target: LAMA2; (-) strand; PAM type: NRG; PAM sequence: CAG
cctagaattagagatagtaa

SEQ ID NO: 101394 - DNA, 20 bp, Artificial Sequence
  Description of Artificial Sequence: Synthetic oligonucleotide
  Target: LAMA2; (-) strand; PAM type: NRG; PAM sequence: TAG
gaagaacctagaattagaga

SEQ ID NO: 101395 - DNA, 20 bp, Artificial Sequence
  Description of Artificial Sequence: Synthetic oligonucleotide
  Target: LAMA2; (-) strand; PAM type: NRG; PAM sequence: GAG
acttgaagaacctagaatta

SEQ ID NO: 101396 - DNA, 20 bp, Artificial Sequence
  Description of Artificial Sequence: Synthetic oligonucleotide
  Target: LAMA2; (-) strand; PAM type: NRG; PAM sequence: TAG
tgacttgaagaacctagaat

SEQ ID NO: 101397 - DNA, 20 bp, Artificial Sequence
  Description of Artificial Sequence: Synthetic oligonucleotide
  Target: LAMA2; (-) strand; PAM type: NRG; PAM sequence: TAG
tttcagtgacttgaagaacc

SEQ ID NO: 101398 - DNA, 20 bp, Artificial Sequence
  Description of Artificial Sequence: Synthetic oligonucleotide
  Target: LAMA2; (-) strand; PAM type: NRG; PAM sequence: AAG
aagtggttttcagtgacttg

SEQ ID NO: 101399 - DNA, 20 bp, Artificial Sequence
  Description of Artificial Sequence: Synthetic oligonucleotide
  Target: LAMA2; (-) strand; PAM type: NRG; PAM sequence: CAG
gtggccataaaagtggtttt

SEQ ID NO: 101400 - DNA, 20 bp, Artificial Sequence
  Description of Artificial Sequence: Synthetic oligonucleotide
  Target: LAMA2; (-) strand; PAM type: NRG; PAM sequence: TGG
atgtaaggtggccataaaag

SEQ ID NO: 101401 - DNA, 20 bp, Artificial Sequence
  Description of Artificial Sequence: Synthetic oligonucleotide
  Target: LAMA2; (-) strand; PAM type: NRG; PAM sequence: AAG
gaaatgtaaggtggccataa

SEQ ID NO: 101402 - DNA, 20 bp, Artificial Sequence
  Description of Artificial Sequence: Synthetic oligonucleotide
  Target: LAMA2; (-) strand; PAM type: NRG; PAM sequence: TGG
aagacaggagaaatgtaagg

SEQ ID NO: 101403 - DNA, 20 bp, Artificial Sequence
  Description of Artificial Sequence: Synthetic oligonucleotide
  Target: LAMA2; (-) strand; PAM type: NRG; PAM sequence: AGG
ttaaagacaggagaaatgta

SEQ ID NO: 101404 - DNA, 20 bp, Artificial Sequence
  Description of Artificial Sequence: Synthetic oligonucleotide
  Target: LAMA2; (-) strand; PAM type: NRG; PAM sequence: AAG
cttaaagacaggagaaatgt

SEQ ID NO: 101405 - DNA, 20 bp, Artificial Sequence
  Description of Artificial Sequence: Synthetic oligonucleotide
  Target: LAMA2; (-) strand; PAM type: NRG; PAM sequence: GAG
tgtgaagggcttaaagacag

SEQ ID NO: 101406 - DNA, 20 bp, Artificial Sequence
  Description of Artificial Sequence: Synthetic oligonucleotide
  Target: LAMA2; (-) strand; PAM type: NRG; PAM sequence: AGG
catgtgaagggcttaaagac

SEQ ID NO: 101407 - DNA, 20 bp, Artificial Sequence
  Description of Artificial Sequence: Synthetic oligonucleotide
  Target: LAMA2; (-) strand; PAM type: NRG; PAM sequence: CAG
gcatgtgaagggcttaaaga

SEQ ID NO: 101408 - DNA, 20 bp, Artificial Sequence
  Description of Artificial Sequence: Synthetic oligonucleotide
  Target: LAMA2; (-) strand; PAM type: NRG; PAM sequence: AAG
taatgcatgtgaagggctta

SEQ ID NO: 101409 - DNA, 20 bp, Artificial Sequence
  Description of Artificial Sequence: Synthetic oligonucleotide
  Target: LAMA2; (-) strand; PAM type: NRG; PAM sequence: GGG
ctataaataatgcatgtgaa

SEQ ID NO: 101410 - DNA, 20 bp, Artificial Sequence
  Description of Artificial Sequence: Synthetic oligonucleotide
  Target: LAMA2; (-) strand; PAM type: NRG; PAM sequence: AGG
tctataaataatgcatgtga

SEQ ID NO: 101411 - DNA, 20 bp, Artificial Sequence
  Description of Artificial Sequence: Synthetic oligonucleotide
  Target: LAMA2; (-) strand; PAM type: NRG; PAM sequence: AAG
atctataaataatgcatgtg

SEQ ID NO: 101412 - DNA, 20 bp, Artificial Sequence
  Description of Artificial Sequence: Synthetic oligonucleotide
  Target: LAMA2; (-) strand; PAM type: NRG; PAM sequence: GAG
gagaaaaatagtcacaacca

SEQ ID NO: 101413 - DNA, 20 bp, Artificial Sequence
  Description of Artificial Sequence: Synthetic oligonucleotide
  Target: LAMA2; (-) strand; PAM type: NRG; PAM sequence: CAG
atgagaaaaatagtcacaac

SEQ ID NO: 101414 - DNA, 20 bp, Artificial Sequence
  Description of Artificial Sequence: Synthetic oligonucleotide
  Target: LAMA2; (-) strand; PAM type: NRG; PAM sequence: TAG
cattttacagatgagaaaaa

SEQ ID NO: 101415 - DNA, 20 bp, Artificial Sequence
  Description of Artificial Sequence: Synthetic oligonucleotide
  Target: LAMA2; (-) strand; PAM type: NRG; PAM sequence: GAG
catatcctcattttacagat

SEQ ID NO: 101416 - DNA, 20 bp, Artificial Sequence
  Description of Artificial Sequence: Synthetic oligonucleotide
  Target: LAMA2; (-) strand; PAM type: NRG; PAM sequence: CAG
ccattcatatcctcatttta

SEQ ID NO: 101417 - DNA, 20 bp, Artificial Sequence
  Description of Artificial Sequence: Synthetic oligonucleotide
  Target: LAMA2; (-) strand; PAM type: NRG; PAM sequence: AAG
ttaaagcaattctatgaggt

SEQ ID NO: 101418 - DNA, 20 bp, Artificial Sequence
  Description of Artificial Sequence: Synthetic oligonucleotide
  Target: LAMA2; (-) strand; PAM type: NRG; PAM sequence: AGG
atatttaaagcaattctatg

SEQ ID NO: 101419 - DNA, 20 bp, Artificial Sequence
  Description of Artificial Sequence: Synthetic oligonucleotide
  Target: LAMA2; (-) strand; PAM type: NRG; PAM sequence: GAG
aatatttaaagcaattctat

SEQ ID NO: 101420 - DNA, 20 bp, Artificial Sequence
  Description of Artificial Sequence: Synthetic oligonucleotide
  Target: LAMA2; (-) strand; PAM type: NRG; PAM sequence: AAG
attatctcacttaatattta

SEQ ID NO: 101421 - DNA, 20 bp, Artificial Sequence
  Description of Artificial Sequence: Synthetic oligonucleotide
  Target: LAMA2; (-) strand; PAM type: NRG; PAM sequence: TGG
cacaacagtcactacatgac

SEQ ID NO: 101422 - DNA, 20 bp, Artificial Sequence
  Description of Artificial Sequence: Synthetic oligonucleotide
  Target: LAMA2; (-) strand; PAM type: NRG; PAM sequence: CAG
aatagtttttatctacacaa

SEQ ID NO: 101423 - DNA, 20 bp, Artificial Sequence
  Description of Artificial Sequence: Synthetic oligonucleotide
  Target: LAMA2; (-) strand; PAM type: NRG; PAM sequence: TAG
tataaataataatgggataa

SEQ ID NO: 101424 - DNA, 20 bp, Artificial Sequence
  Description of Artificial Sequence: Synthetic oligonucleotide
  Target: LAMA2; (-) strand; PAM type: NRG; PAM sequence: GGG
aaagtactataaataataat

SEQ ID NO: 101425 - DNA, 20 bp, Artificial Sequence
  Description of Artificial Sequence: Synthetic oligonucleotide
  Target: LAMA2; (-) strand; PAM type: NRG; PAM sequence: TGG
gaaagtactataaataataa

SEQ ID NO: 101426 - DNA, 20 bp, Artificial Sequence
  Description of Artificial Sequence: Synthetic oligonucleotide
  Target: LAMA2; (-) strand; PAM type: NRG; PAM sequence: AAG
aacactaatggaaactttga

SEQ ID NO: 101427 - DNA, 20 bp, Artificial Sequence
  Description of Artificial Sequence: Synthetic oligonucleotide
  Target: LAMA2; (-) strand; PAM type: NRG; PAM sequence: TGG
gtaactcttcaaaacactaa

SEQ ID NO: 101428 - DNA, 20 bp, Artificial Sequence
  Description of Artificial Sequence: Synthetic oligonucleotide
  Target: LAMA2; (-) strand; PAM type: NRG; PAM sequence: TGG
agttcaatgtggttcaaaga

SEQ ID NO: 101429 - DNA, 20 bp, Artificial Sequence
  Description of Artificial Sequence: Synthetic oligonucleotide
  Target: LAMA2; (-) strand; PAM type: NRG; PAM sequence: AAG
aacaagttcaatgtggttca

SEQ ID NO: 101430 - DNA, 20 bp, Artificial Sequence
  Description of Artificial Sequence: Synthetic oligonucleotide
  Target: LAMA2; (-) strand; PAM type: NRG; PAM sequence: TGG
atgggaaaacaagttcaatg

SEQ ID NO: 101431 - DNA, 20 bp, Artificial Sequence
  Description of Artificial Sequence: Synthetic oligonucleotide
  Target: LAMA2; (-) strand; PAM type: NRG; PAM sequence: AAG
tatataatacatgggaaaac

SEQ ID NO: 101432 - DNA, 20 bp, Artificial Sequence
  Description of Artificial Sequence: Synthetic oligonucleotide
  Target: LAMA2; (-) strand; PAM type: NRG; PAM sequence: GGG
aaattctatatataatacat

SEQ ID NO: 101433 - DNA, 20 bp, Artificial Sequence
  Description of Artificial Sequence: Synthetic oligonucleotide
  Target: LAMA2; (-) strand; PAM type: NRG; PAM sequence: TGG
aaaattctatatataataca

SEQ ID NO: 101434 - DNA, 20 bp, Artificial Sequence
  Description of Artificial Sequence: Synthetic oligonucleotide
  Target: LAMA2; (-) strand; PAM type: NRG; PAM sequence: AAG
gatgaatttgtcgacatacc

SEQ ID NO: 101435 - DNA, 20 bp, Artificial Sequence
  Description of Artificial Sequence: Synthetic oligonucleotide
  Target: LAMA2; (-) strand; PAM type: NRG; PAM sequence: GAG
gaaagctgtagacctcagct

SEQ ID NO: 101436 - DNA, 20 bp, Artificial Sequence
  Description of Artificial Sequence: Synthetic oligonucleotide
  Target: LAMA2; (-) strand; PAM type: NRG; PAM sequence: CAG
gagaggaaagctgtagacct

SEQ ID NO: 101437 - DNA, 20 bp, Artificial Sequence
  Description of Artificial Sequence: Synthetic oligonucleotide
  Target: LAMA2; (-) strand; PAM type: NRG; PAM sequence: TAG
ttgaatagagaggaaagctg

SEQ ID NO: 101438 - DNA, 20 bp, Artificial Sequence
  Description of Artificial Sequence: Synthetic oligonucleotide
  Target: LAMA2; (-) strand; PAM type: NRG; PAM sequence: AAG
atttctttgaatagagagga

SEQ ID NO: 101439 - DNA, 20 bp, Artificial Sequence
  Description of Artificial Sequence: Synthetic oligonucleotide
  Target: LAMA2; (-) strand; PAM type: NRG; PAM sequence: AGG
tgtcatttctttgaatagag

SEQ ID NO: 101440 - DNA, 20 bp, Artificial Sequence
  Description of Artificial Sequence: Synthetic oligonucleotide
  Target: LAMA2; (-) strand; PAM type: NRG; PAM sequence: GAG
ctgtcatttctttgaataga

SEQ ID NO: 101441 - DNA, 20 bp, Artificial Sequence
  Description of Artificial Sequence: Synthetic oligonucleotide
  Target: LAMA2; (-) strand; PAM type: NRG; PAM sequence: GAG
acctgtcatttctttgaata

SEQ ID NO: 101442 - DNA, 20 bp, Artificial Sequence
  Description of Artificial Sequence: Synthetic oligonucleotide
  Target: LAMA2; (-) strand; PAM type: NRG; PAM sequence: TAG
taacctgtcatttctttgaa

SEQ ID NO: 101443 - DNA, 20 bp, Artificial Sequence
  Description of Artificial Sequence: Synthetic oligonucleotide
  Target: LAMA2; (-) strand; PAM type: NRG; PAM sequence: AAG
ttgattccagagtcattaag

SEQ ID NO: 101444 - DNA, 20 bp, Artificial Sequence
  Description of Artificial Sequence: Synthetic oligonucleotide
  Target: LAMA2; (-) strand; PAM type: NRG; PAM sequence: AAG
aatttgattccagagtcatt

SEQ ID NO: 101445 - DNA, 20 bp, Artificial Sequence
  Description of Artificial Sequence: Synthetic oligonucleotide
  Target: LAMA2; (-) strand; PAM type: NRG; PAM sequence: GAG
caaataaaaatttgattcca

SEQ ID NO: 101446 - DNA, 20 bp, Artificial Sequence
  Description of Artificial Sequence: Synthetic oligonucleotide
  Target: LAMA2; (-) strand; PAM type: NRG; PAM sequence: CAG
ctcaaataaaaatttgattc

SEQ ID NO: 101447 - DNA, 20 bp, Artificial Sequence
  Description of Artificial Sequence: Synthetic oligonucleotide
  Target: LAMA2; (-) strand; PAM type: NRG; PAM sequence: TAG
agggcttattaagatgtatt

SEQ ID NO: 101448 - DNA, 20 bp, Artificial Sequence
  Description of Artificial Sequence: Synthetic oligonucleotide
  Target: LAMA2; (-) strand; PAM type: NRG; PAM sequence: AAG
gcatatatttagggcttatt

SEQ ID NO: 101449 - DNA, 20 bp, Artificial Sequence
  Description of Artificial Sequence: Synthetic oligonucleotide
  Target: LAMA2; (-) strand; PAM type: NRG; PAM sequence: GGG
tttacattagcatatattta

SEQ ID NO: 101450 - DNA, 20 bp, Artificial Sequence
  Description of Artificial Sequence: Synthetic oligonucleotide
  Target: LAMA2; (-) strand; PAM type: NRG; PAM sequence: AGG
ttttacattagcatatattt

SEQ ID NO: 101451 - DNA, 20 bp, Artificial Sequence
  Description of Artificial Sequence: Synthetic oligonucleotide
  Target: LAMA2; (-) strand; PAM type: NRG; PAM sequence: TAG
cttttacattagcatatatt

SEQ ID NO: 101452 - DNA, 20 bp, Artificial Sequence
  Description of Artificial Sequence: Synthetic oligonucleotide
  Target: LAMA2; (-) strand; PAM type: NRG; PAM sequence: TAG
tcaaaaagaaacttttacat

SEQ ID NO: 101453 - DNA, 20 bp, Artificial Sequence
  Description of Artificial Sequence: Synthetic oligonucleotide
  Target: LAMA2; (-) strand; PAM type: NRG; PAM sequence: AAG
ttccctttttccccttcaaa

SEQ ID NO: 101454 - DNA, 20 bp, Artificial Sequence
  Description of Artificial Sequence: Synthetic oligonucleotide
  Target: LAMA2; (-) strand; PAM type: NRG; PAM sequence: TGG
gaatgccattgacggttccc

SEQ ID NO: 101455 - DNA, 20 bp, Artificial Sequence
  Description of Artificial Sequence: Synthetic oligonucleotide
  Target: LAMA2; (-) strand; PAM type: NRG; PAM sequence: CGG
tcctagatgaatgccattga

SEQ ID NO: 101456 - DNA, 20 bp, Artificial Sequence
  Description of Artificial Sequence: Synthetic oligonucleotide
  Target: LAMA2; (-) strand; PAM type: NRG; PAM sequence: TAG
gtatgttaaattaactctcc

SEQ ID NO: 101457 - DNA, 20 bp, Artificial Sequence
  Description of Artificial Sequence: Synthetic oligonucleotide
  Target: LAMA2; (-) strand; PAM type: NRG; PAM sequence: AAG
taaatacacatttttaacaa

SEQ ID NO: 101458 - DNA, 20 bp, Artificial Sequence
  Description of Artificial Sequence: Synthetic oligonucleotide
  Target: LAMA2; (-) strand; PAM type: NRG; PAM sequence: GAG
taatcaaataggaataaaat

SEQ ID NO: 101459 - DNA, 20 bp, Artificial Sequence
  Description of Artificial Sequence: Synthetic oligonucleotide
  Target: LAMA2; (-) strand; PAM type: NRG; PAM sequence: AGG
attctctgctctaatcaaat

SEQ ID NO: 101460 - DNA, 20 bp, Artificial Sequence
  Description of Artificial Sequence: Synthetic oligonucleotide
  Target: LAMA2; (-) strand; PAM type: NRG; PAM sequence: TAG
aattctctgctctaatcaaa

SEQ ID NO: 101461 - DNA, 20 bp, Artificial Sequence
  Description of Artificial Sequence: Synthetic oligonucleotide
  Target: LAMA2; (-) strand; PAM type: NRG; PAM sequence: TAG
agctattaaccaattttagg

SEQ ID NO: 101462 - DNA, 20 bp, Artificial Sequence
  Description of Artificial Sequence: Synthetic oligonucleotide
  Target: LAMA2; (-) strand; PAM type: NRG; PAM sequence: AGG
gaaagctattaaccaatttt

SEQ ID NO: 101463 - DNA, 20 bp, Artificial Sequence
  Description of Artificial Sequence: Synthetic oligonucleotide
  Target: LAMA2; (-) strand; PAM type: NRG; PAM sequence: TAG
cgaaagctattaaccaattt

SEQ ID NO: 101464 - DNA, 20 bp, Artificial Sequence
  Description of Artificial Sequence: Synthetic oligonucleotide
  Target: LAMA2; (-) strand; PAM type: NRG; PAM sequence: AAG
gagtatttttgaaagggcga

SEQ ID NO: 101465 - DNA, 20 bp, Artificial Sequence
  Description of Artificial Sequence: Synthetic oligonucleotide
  Target: LAMA2; (-) strand; PAM type: NRG; PAM sequence: GGG
gacactgagtatttttgaaa

SEQ ID NO: 101466 - DNA, 20 bp, Artificial Sequence
  Description of Artificial Sequence: Synthetic oligonucleotide
  Target: LAMA2; (-) strand; PAM type: NRG; PAM sequence: AGG
ggacactgagtatttttgaa

SEQ ID NO: 101467 - DNA, 20 bp, Artificial Sequence
  Description of Artificial Sequence: Synthetic oligonucleotide
  Target: LAMA2; (-) strand; PAM type: NRG; PAM sequence: AAG
aggacactgagtatttttga

SEQ ID NO: 101468 - DNA, 20 bp, Artificial Sequence
  Description of Artificial Sequence: Synthetic oligonucleotide
  Target: LAMA2; (-) strand; PAM type: NRG; PAM sequence: GAG
gaagctaaaatgaggacact

SEQ ID NO: 101469 - DNA, 20 bp, Artificial Sequence
  Description of Artificial Sequence: Synthetic oligonucleotide
  Target: LAMA2; (-) strand; PAM type: NRG; PAM sequence: AGG
aagaagctgaagctaaaatg

SEQ ID NO: 101470 - DNA, 20 bp, Artificial Sequence
  Description of Artificial Sequence: Synthetic oligonucleotide
  Target: LAMA2; (-) strand; PAM type: NRG; PAM sequence: GAG
aaagaagctgaagctaaaat

SEQ ID NO: 101471 - DNA, 20 bp, Artificial Sequence
  Description of Artificial Sequence: Synthetic oligonucleotide
  Target: LAMA2; (-) strand; PAM type: NRG; PAM sequence: AAG
catccaaaccaaagaagctg

SEQ ID NO: 101472 - DNA, 20 bp, Artificial Sequence
  Description of Artificial Sequence: Synthetic oligonucleotide
  Target: LAMA2; (-) strand; PAM type: NRG; PAM sequence: AAG
acactgcatccaaaccaaag

SEQ ID NO: 101473 - DNA, 20 bp, Artificial Sequence
  Description of Artificial Sequence: Synthetic oligonucleotide
  Target: LAMA2; (-) strand; PAM type: NRG; PAM sequence: AAG
cacacactgcatccaaacca

SEQ ID NO: 101474 - DNA, 20 bp, Artificial Sequence
  Description of Artificial Sequence: Synthetic oligonucleotide
  Target: LAMA2; (-) strand; PAM type: NRG; PAM sequence: TGG
tccccatgcataataactac

SEQ ID NO: 101475 - DNA, 20 bp, Artificial Sequence
  Description of Artificial Sequence: Synthetic oligonucleotide
  Target: LAMA2; (-) strand; PAM type: NRG; PAM sequence: AGG
caaaatactgcatttctacc

SEQ ID NO: 101476 - DNA, 20 bp, Artificial Sequence
  Description of Artificial Sequence: Synthetic oligonucleotide
  Target: LAMA2; (-) strand; PAM type: NRG; PAM sequence: CAG
acaaaatactgcatttctac

SEQ ID NO: 101477 - DNA, 20 bp, Artificial Sequence
  Description of Artificial Sequence: Synthetic oligonucleotide
  Target: LAMA2; (-) strand; PAM type: NRG; PAM sequence: TAG
cagatctttctgttagcaat

SEQ ID NO: 101478 - DNA, 20 bp, Artificial Sequence
  Description of Artificial Sequence: Synthetic oligonucleotide
  Target: LAMA2; (-) strand; PAM type: NRG; PAM sequence: TAG
agtattacagatctttctgt

SEQ ID NO: 101479 - DNA, 20 bp, Artificial Sequence
  Description of Artificial Sequence: Synthetic oligonucleotide
  Target: LAMA2; (-) strand; PAM type: NRG; PAM sequence: CAG
aaatcatgcagccagtatta

SEQ ID NO: 101480 - DNA, 20 bp, Artificial Sequence
  Description of Artificial Sequence: Synthetic oligonucleotide
  Target: LAMA2; (-) strand; PAM type: NRG; PAM sequence: CAG
taaggggcaaatcatgcagc

SEQ ID NO: 101481 - DNA, 20 bp, Artificial Sequence
  Description of Artificial Sequence: Synthetic oligonucleotide
  Target: LAMA2; (-) strand; PAM type: NRG; PAM sequence: CAG
catgtaaggggcaaatcatg

SEQ ID NO: 101482 - DNA, 20 bp, Artificial Sequence
  Description of Artificial Sequence: Synthetic oligonucleotide
  Target: LAMA2; (-) strand; PAM type: NRG; PAM sequence: GGG
tatggctgggcacatgtaag

SEQ ID NO: 101483 - DNA, 20 bp, Artificial Sequence
  Description of Artificial Sequence: Synthetic oligonucleotide
  Target: LAMA2; (-) strand; PAM type: NRG; PAM sequence: GGG
ttatggctgggcacatgtaa

SEQ ID NO: 101484 - DNA, 20 bp, Artificial Sequence
  Description of Artificial Sequence: Synthetic oligonucleotide
  Target: LAMA2; (-) strand; PAM type: NRG; PAM sequence: AGG
gttatggctgggcacatgta

SEQ ID NO: 101485 - DNA, 20 bp, Artificial Sequence
  Description of Artificial Sequence: Synthetic oligonucleotide
  Target: LAMA2; (-) strand; PAM type: NRG; PAM sequence: AAG
tgttatggctgggcacatgt

SEQ ID NO: 101486 - DNA, 20 bp, Artificial Sequence
  Description of Artificial Sequence: Synthetic oligonucleotide
  Target: LAMA2; (-) strand; PAM type: NRG; PAM sequence: GGG
aaattcagattgttatggct

SEQ ID NO: 101487 - DNA, 20 bp, Artificial Sequence
  Description of Artificial Sequence: Synthetic oligonucleotide
  Target: LAMA2; (-) strand; PAM type: NRG; PAM sequence: TGG
taaattcagattgttatggc

SEQ ID NO: 101488 - DNA, 20 bp, Artificial Sequence
  Description of Artificial Sequence: Synthetic oligonucleotide
  Target: LAMA2; (-) strand; PAM type: NRG; PAM sequence: TGG
gtactaaattcagattgtta

SEQ ID NO: 101489 - DNA, 20 bp, Artificial Sequence
  Description of Artificial Sequence: Synthetic oligonucleotide
  Target: LAMA2; (-) strand; PAM type: NRG; PAM sequence: CAG
aacaaacacagtactaaatt

SEQ ID NO: 101490 - DNA, 20 bp, Artificial Sequence
  Description of Artificial Sequence: Synthetic oligonucleotide
  Target: LAMA2; (-) strand; PAM type: NRG; PAM sequence: CAG
gtgtctaatattaacaaaca

SEQ ID NO: 101491 - DNA, 20 bp, Artificial Sequence
  Description of Artificial Sequence: Synthetic oligonucleotide
  Target: LAMA2; (-) strand; PAM type: NRG; PAM sequence: AGG
gctttgcctataaaagtgtc

SEQ ID NO: 101492 - DNA, 20 bp, Artificial Sequence
  Description of Artificial Sequence: Synthetic oligonucleotide
  Target: LAMA2; (-) strand; PAM type: NRG; PAM sequence: CAG
ggctttgcctataaaagtgt

SEQ ID NO: 101493 - DNA, 20 bp, Artificial Sequence
  Description of Artificial Sequence: Synthetic oligonucleotide
  Target: LAMA2; (-) strand; PAM type: NRG; PAM sequence: AAG
ttccgaggctttgcctataa

SEQ ID NO: 101494 - DNA, 20 bp, Artificial Sequence
  Description of Artificial Sequence: Synthetic oligonucleotide
  Target: LAMA2; (-) strand; PAM type: NRG; PAM sequence: AGG
tacatgactaaatgtttccg

SEQ ID NO: 101495 - DNA, 20 bp, Artificial Sequence
  Description of Artificial Sequence: Synthetic oligonucleotide
  Target: LAMA2; (-) strand; PAM type: NRG; PAM sequence: GAG
ttacatgactaaatgtttcc

SEQ ID NO: 101496 - DNA, 20 bp, Artificial Sequence
  Description of Artificial Sequence: Synthetic oligonucleotide
  Target: LAMA2; (-) strand; PAM type: NRG; PAM sequence: AAG
ggagcaaaagcaaatatttc

SEQ ID NO: 101497 - DNA, 20 bp, Artificial Sequence
  Description of Artificial Sequence: Synthetic oligonucleotide
  Target: LAMA2; (-) strand; PAM type: NRG; PAM sequence: AAG
cctaaaatgcacaggagcaa

SEQ ID NO: 101498 - DNA, 20 bp, Artificial Sequence
  Description of Artificial Sequence: Synthetic oligonucleotide
  Target: LAMA2; (-) strand; PAM type: NRG; PAM sequence: GAG
atcctgcctaaaatgcacag

SEQ ID NO: 101499 - DNA, 20 bp, Artificial Sequence
  Description of Artificial Sequence: Synthetic oligonucleotide
  Target: LAMA2; (-) strand; PAM type: NRG; PAM sequence: AGG
aaatcctgcctaaaatgcac

SEQ ID NO: 101500 - DNA, 20 bp, Artificial Sequence
  Description of Artificial Sequence: Synthetic oligonucleotide
  Target: LAMA2; (-) strand; PAM type: NRG; PAM sequence: CAG
gaaatcctgcctaaaatgca

SEQ ID NO: 101501 - DNA, 20 bp, Artificial Sequence
  Description of Artificial Sequence: Synthetic oligonucleotide
  Target: LAMA2; (-) strand; PAM type: NRG; PAM sequence: AAG
gcaatactaataaggttaca

SEQ ID NO: 101502 - DNA, 20 bp, Artificial Sequence
  Description of Artificial Sequence: Synthetic oligonucleotide
  Target: LAMA2; (-) strand; PAM type: NRG; PAM sequence: AGG
caaattcagcaatactaata

SEQ ID NO: 101503 - DNA, 20 bp, Artificial Sequence
  Description of Artificial Sequence: Synthetic oligonucleotide
  Target: LAMA2; (-) strand; PAM type: NRG; PAM sequence: AAG
ccaaattcagcaatactaat

SEQ ID NO: 101504 - DNA, 20 bp, Artificial Sequence
  Description of Artificial Sequence: Synthetic oligonucleotide
  Target: LAMA2; (-) strand; PAM type: NRG; PAM sequence: CAG
tccaaaccattctccaaatt

SEQ ID NO: 101505 - DNA, 20 bp, Artificial Sequence
  Description of Artificial Sequence: Synthetic oligonucleotide
  Target: LAMA2; (-) strand; PAM type: NRG; PAM sequence: AAG
atcttacaatcaggacctca

SEQ ID NO: 101506 - DNA, 20 bp, Artificial Sequence
  Description of Artificial Sequence: Synthetic oligonucleotide
  Target: LAMA2; (-) strand; PAM type: NRG; PAM sequence: AGG
tgaacacctatcttacaatc

SEQ ID NO: 101507 - DNA, 20 bp, Artificial Sequence
  Description of Artificial Sequence: Synthetic oligonucleotide
  Target: LAMA2; (-) strand; PAM type: NRG; PAM sequence: CAG
atgaacacctatcttacaat

SEQ ID NO: 101508 - DNA, 20 bp, Artificial Sequence
  Description of Artificial Sequence: Synthetic oligonucleotide
  Target: LAMA2; (-) strand; PAM type: NRG; PAM sequence: CAG
gataaagtgcagtaatggct

SEQ ID NO: 101509 - DNA, 20 bp, Artificial Sequence
  Description of Artificial Sequence: Synthetic oligonucleotide
  Target: LAMA2; (-) strand; PAM type: NRG; PAM sequence: TGG
tctttgataaagtgcagtaa

SEQ ID NO: 101510 - DNA, 20 bp, Artificial Sequence
  Description of Artificial Sequence: Synthetic oligonucleotide
  Target: LAMA2; (-) strand; PAM type: NRG; PAM sequence: CAG
aactgttctttgataaagtg

SEQ ID NO: 101511 - DNA, 20 bp, Artificial Sequence
  Description of Artificial Sequence: Synthetic oligonucleotide
  Target: LAMA2; (-) strand; PAM type: NRG; PAM sequence: AAG
taaacaactgttctttgata

SEQ ID NO: 101512 - DNA, 20 bp, Artificial Sequence
  Description of Artificial Sequence: Synthetic oligonucleotide
  Target: LAMA2; (-) strand; PAM type: NRG; PAM sequence: TGG
ctgaagagtgtgtagagaca

SEQ ID NO: 101513 - DNA, 20 bp, Artificial Sequence
  Description of Artificial Sequence: Synthetic oligonucleotide
  Target: LAMA2; (-) strand; PAM type: NRG; PAM sequence: GAG
gaaaatctgaagagtgtgta

SEQ ID NO: 101514 - DNA, 20 bp, Artificial Sequence
  Description of Artificial Sequence: Synthetic oligonucleotide
  Target: LAMA2; (-) strand; PAM type: NRG; PAM sequence: TAG
gggaaaatctgaagagtgtg

SEQ ID NO: 101515 - DNA, 20 bp, Artificial Sequence
  Description of Artificial Sequence: Synthetic oligonucleotide
  Target: LAMA2; (-) strand; PAM type: NRG; PAM sequence: GAG
tatcatagggaaaatctgaa

SEQ ID NO: 101516 - DNA, 20 bp, Artificial Sequence
  Description of Artificial Sequence: Synthetic oligonucleotide
  Target: LAMA2; (-) strand; PAM type: NRG; PAM sequence: AAG
actatcatagggaaaatctg

SEQ ID NO: 101517 - DNA, 20 bp, Artificial Sequence
  Description of Artificial Sequence: Synthetic oligonucleotide
  Target: LAMA2; (-) strand; PAM type: NRG; PAM sequence: GGG
aaatgtaatttactatcata

SEQ ID NO: 101518 - DNA, 20 bp, Artificial Sequence
  Description of Artificial Sequence: Synthetic oligonucleotide
  Target: LAMA2; (-) strand; PAM type: NRG; PAM sequence: AGG
caaatgtaatttactatcat

SEQ ID NO: 101519 - DNA, 20 bp, Artificial Sequence
  Description of Artificial Sequence: Synthetic oligonucleotide
  Target: LAMA2; (-) strand; PAM type: NRG; PAM sequence: TAG
ccaaatgtaatttactatca

SEQ ID NO: 101520 - DNA, 20 bp, Artificial Sequence
  Description of Artificial Sequence: Synthetic oligonucleotide
  Target: LAMA2; (-) strand; PAM type: NRG; PAM sequence: TGG
ctggcaacaaacattggaaa

SEQ ID NO: 101521 - DNA, 20 bp, Artificial Sequence
  Description of Artificial Sequence: Synthetic oligonucleotide
  Target: LAMA2; (-) strand; PAM type: NRG; PAM sequence: TGG
aagtgtctggcaacaaacat

SEQ ID NO: 101522 - DNA, 20 bp, Artificial Sequence
  Description of Artificial Sequence: Synthetic oligonucleotide
  Target: LAMA2; (-) strand; PAM type: NRG; PAM sequence: TGG
ctcaaaaagtccaaagtgtc

SEQ ID NO: 101523 - DNA, 20 bp, Artificial Sequence
  Description of Artificial Sequence: Synthetic oligonucleotide
  Target: LAMA2; (-) strand; PAM type: NRG; PAM sequence: AAG
atttgccctcaaaaagtcca

SEQ ID NO: 101524 - DNA, 20 bp, Artificial Sequence
  Description of Artificial Sequence: Synthetic oligonucleotide
  Target: LAMA2; (-) strand; PAM type: NRG; PAM sequence: AAG
tacttttatttgccctcaaa

SEQ ID NO: 101525 - DNA, 20 bp, Artificial Sequence
  Description of Artificial Sequence: Synthetic oligonucleotide
  Target: LAMA2; (-) strand; PAM type: NRG; PAM sequence: AAG
aaatatttcacttacaccag

SEQ ID NO: 101526 - DNA, 20 bp, Artificial Sequence
  Description of Artificial Sequence: Synthetic oligonucleotide
  Target: LAMA2; (-) strand; PAM type: NRG; PAM sequence: CAG
acaaaatatttcacttacac

SEQ ID NO: 101527 - DNA, 20 bp, Artificial Sequence
  Description of Artificial Sequence: Synthetic oligonucleotide
  Target: LAMA2; (-) strand; PAM type: NRG; PAM sequence: TGG
ggaaagtgccctttacataa

SEQ ID NO: 101528 - DNA, 20 bp, Artificial Sequence
  Description of Artificial Sequence: Synthetic oligonucleotide
  Target: LAMA2; (-) strand; PAM type: NRG; PAM sequence: AAG
ataaggtaaacacatgggga

SEQ ID NO: 101529 - DNA, 20 bp, Artificial Sequence
  Description of Artificial Sequence: Synthetic oligonucleotide
  Target: LAMA2; (-) strand; PAM type: NRG; PAM sequence: GGG
agttataaggtaaacacatg

SEQ ID NO: 101530 - DNA, 20 bp, Artificial Sequence
  Description of Artificial Sequence: Synthetic oligonucleotide
  Target: LAMA2; (-) strand; PAM type: NRG; PAM sequence: GGG
aagttataaggtaaacacat

SEQ ID NO: 101531 - DNA, 20 bp, Artificial Sequence
  Description of Artificial Sequence: Synthetic oligonucleotide
  Target: LAMA2; (-) strand; PAM type: NRG; PAM sequence: TGG
gaagttataaggtaaacaca

SEQ ID NO: 101532 - DNA, 20 bp, Artificial Sequence
  Description of Artificial Sequence: Synthetic oligonucleotide
  Target: LAMA2; (-) strand; PAM type: NRG; PAM sequence: AGG
gtctagctcatgaagttata

SEQ ID NO: 101533 - DNA, 20 bp, Artificial Sequence
  Description of Artificial Sequence: Synthetic oligonucleotide
  Target: LAMA2; (-) strand; PAM type: NRG; PAM sequence: AAG
agtctagctcatgaagttat

SEQ ID NO: 101534 - DNA, 20 bp, Artificial Sequence
  Description of Artificial Sequence: Synthetic oligonucleotide
  Target: LAMA2; (-) strand; PAM type: NRG; PAM sequence: AAG
ctgtacaagtctagctcatg

SEQ ID NO: 101535 - DNA, 20 bp, Artificial Sequence
  Description of Artificial Sequence: Synthetic oligonucleotide
  Target: LAMA2; (-) strand; PAM type: NRG; PAM sequence: TAG
tcaaagcttctgtacaagtc

SEQ ID NO: 101536 - DNA, 20 bp, Artificial Sequence
  Description of Artificial Sequence: Synthetic oligonucleotide
  Target: LAMA2; (-) strand; PAM type: NRG; PAM sequence: AAG
ttttttcaaagcttctgtac

SEQ ID NO: 101537 - DNA, 20 bp, Artificial Sequence
  Description of Artificial Sequence: Synthetic oligonucleotide
  Target: LAMA2; (-) strand; PAM type: NRG; PAM sequence: AAG
cagccatggggattttttca

SEQ ID NO: 101538 - DNA, 20 bp, Artificial Sequence
  Description of Artificial Sequence: Synthetic oligonucleotide
  Target: LAMA2; (-) strand; PAM type: NRG; PAM sequence: GGG
ttatgaatatgacagccatg

SEQ ID NO: 101539 - DNA, 20 bp, Artificial Sequence
  Description of Artificial Sequence: Synthetic oligonucleotide
  Target: LAMA2; (-) strand; PAM type: NRG; PAM sequence: GGG
cttatgaatatgacagccat

SEQ ID NO: 101540 - DNA, 20 bp, Artificial Sequence
  Description of Artificial Sequence: Synthetic oligonucleotide
  Target: LAMA2; (-) strand; PAM type: NRG; PAM sequence: TGG
acttatgaatatgacagcca

SEQ ID NO: 101541 - DNA, 20 bp, Artificial Sequence
  Description of Artificial Sequence: Synthetic oligonucleotide
  Target: LAMA2; (-) strand; PAM type: NRG; PAM sequence: CAG
agagagacttatgaatatga

SEQ ID NO: 101542 - DNA, 20 bp, Artificial Sequence
  Description of Artificial Sequence: Synthetic oligonucleotide
  Target: LAMA2; (-) strand; PAM type: NRG; PAM sequence: GAG
atctgtctgaatgggtcaga

SEQ ID NO: 101543 - DNA, 20 bp, Artificial Sequence
  Description of Artificial Sequence: Synthetic oligonucleotide
  Target: LAMA2; (-) strand; PAM type: NRG; PAM sequence: GAG
acatctgtctgaatgggtca

SEQ ID NO: 101544 - DNA, 20 bp, Artificial Sequence
  Description of Artificial Sequence: Synthetic oligonucleotide
  Target: LAMA2; (-) strand; PAM type: NRG; PAM sequence: CAG
taacatctgtctgaatgggt

SEQ ID NO: 101545 - DNA, 20 bp, Artificial Sequence
  Description of Artificial Sequence: Synthetic oligonucleotide
  Target: LAMA2; (-) strand; PAM type: NRG; PAM sequence: GGG
atactaacatctgtctgaat

SEQ ID NO: 101546 - DNA, 20 bp, Artificial Sequence
  Description of Artificial Sequence: Synthetic oligonucleotide
  Target: LAMA2; (-) strand; PAM type: NRG; PAM sequence: TGG
tatactaacatctgtctgaa

SEQ ID NO: 101547 - DNA, 20 bp, Artificial Sequence
  Description of Artificial Sequence: Synthetic oligonucleotide
  Target: LAMA2; (-) strand; PAM type: NRG; PAM sequence: AAG
taagttttatagtacgctcc

SEQ ID NO: 101548 - DNA, 20 bp, Artificial Sequence
  Description of Artificial Sequence: Synthetic oligonucleotide
  Target: LAMA2; (-) strand; PAM type: NRG; PAM sequence: TAG
taagtgaaaggtaagtttta

SEQ ID NO: 101549 - DNA, 20 bp, Artificial Sequence
  Description of Artificial Sequence: Synthetic oligonucleotide
  Target: LAMA2; (-) strand; PAM type: NRG; PAM sequence: AAG
catttccataagtgaaaggt

SEQ ID NO: 101550 - DNA, 20 bp, Artificial Sequence
  Description of Artificial Sequence: Synthetic oligonucleotide
  Target: LAMA2; (-) strand; PAM type: NRG; PAM sequence: AGG
agcacatttccataagtgaa

SEQ ID NO: 101551 - DNA, 20 bp, Artificial Sequence
  Description of Artificial Sequence: Synthetic oligonucleotide
  Target: LAMA2; (-) strand; PAM type: NRG; PAM sequence: AAG
aagcacatttccataagtga

SEQ ID NO: 101552 - DNA, 20 bp, Artificial Sequence
  Description of Artificial Sequence: Synthetic oligonucleotide
  Target: LAMA2; (-) strand; PAM type: NRG; PAM sequence: AAG
aagtacaagcacatttccat

SEQ ID NO: 101553 - DNA, 20 bp, Artificial Sequence
  Description of Artificial Sequence: Synthetic oligonucleotide
  Target: LAMA2; (-) strand; PAM type: NRG; PAM sequence: AAG
ctttttggggaacaaagtac

SEQ ID NO: 101554 - DNA, 20 bp, Artificial Sequence
  Description of Artificial Sequence: Synthetic oligonucleotide
  Target: LAMA2; (-) strand; PAM type: NRG; PAM sequence: AAG
tatttgctttttggggaaca

SEQ ID NO: 101555 - DNA, 20 bp, Artificial Sequence
  Description of Artificial Sequence: Synthetic oligonucleotide
  Target: LAMA2; (-) strand; PAM type: NRG; PAM sequence: GGG
gtatctgtatttgctttttg

SEQ ID NO: 101556 - DNA, 20 bp, Artificial Sequence
  Description of Artificial Sequence: Synthetic oligonucleotide
  Target: LAMA2; (-) strand; PAM type: NRG; PAM sequence: GGG
ggtatctgtatttgcttttt

SEQ ID NO: 101557 - DNA, 20 bp, Artificial Sequence
  Description of Artificial Sequence: Synthetic oligonucleotide
  Target: LAMA2; (-) strand; PAM type: NRG; PAM sequence: TGG
tggtatctgtatttgctttt

SEQ ID NO: 101558 - DNA, 20 bp, Artificial Sequence
  Description of Artificial Sequence: Synthetic oligonucleotide
  Target: LAMA2; (-) strand; PAM type: NRG; PAM sequence: TGG
tattattatcccatgtctta

SEQ ID NO: 101559 - DNA, 20 bp, Artificial Sequence
  Description of Artificial Sequence: Synthetic oligonucleotide
  Target: LAMA2; (-) strand; PAM type: NRG; PAM sequence: AGG
ttttatgtttctgtgtccaa

SEQ ID NO: 101560 - DNA, 20 bp, Artificial Sequence
  Description of Artificial Sequence: Synthetic oligonucleotide
  Target: LAMA2; (-) strand; PAM type: NRG; PAM sequence: AAG
attttatgtttctgtgtcca

SEQ ID NO: 101561 - DNA, 20 bp, Artificial Sequence
  Description of Artificial Sequence: Synthetic oligonucleotide
  Target: LAMA2; (-) strand; PAM type: NRG; PAM sequence: GGG
gtatttaattgctctttcaa

SEQ ID NO: 101562 - DNA, 20 bp, Artificial Sequence
  Description of Artificial Sequence: Synthetic oligonucleotide
  Target: LAMA2; (-) strand; PAM type: NRG; PAM sequence: AGG
tgtatttaattgctctttca

SEQ ID NO: 101563 - DNA, 20 bp, Artificial Sequence
  Description of Artificial Sequence: Synthetic oligonucleotide
  Target: LAMA2; (-) strand; PAM type: NRG; PAM sequence: AAG
atgtatttaattgctctttc

SEQ ID NO: 101564 - DNA, 20 bp, Artificial Sequence
  Description of Artificial Sequence: Synthetic oligonucleotide
  Target: LAMA2; (-) strand; PAM type: NRG; PAM sequence: CAG
ctgttttggttcctcatctt

SEQ ID NO: 101565 - DNA, 20 bp, Artificial Sequence
  Description of Artificial Sequence: Synthetic oligonucleotide
  Target: LAMA2; (-) strand; PAM type: NRG; PAM sequence: TGG
tatcccctgcccatctgttt

SEQ ID NO: 101566 - DNA, 20 bp, Artificial Sequence
  Description of Artificial Sequence: Synthetic oligonucleotide
  Target: LAMA2; (-) strand; PAM type: NRG; PAM sequence: AGG
cggtgtactagaatgccaag

SEQ ID NO: 101567 - DNA, 20 bp, Artificial Sequence
  Description of Artificial Sequence: Synthetic oligonucleotide
  Target: LAMA2; (-) strand; PAM type: NRG; PAM sequence: GAG
acggtgtactagaatgccaa

SEQ ID NO: 101568 - DNA, 20 bp, Artificial Sequence
  Description of Artificial Sequence: Synthetic oligonucleotide
  Target: LAMA2; (-) strand; PAM type: NRG; PAM sequence: AAG
ctacggtgtactagaatgcc

SEQ ID NO: 101569 - DNA, 20 bp, Artificial Sequence
  Description of Artificial Sequence: Synthetic oligonucleotide
  Target: LAMA2; (-) strand; PAM type: NRG; PAM sequence: TAG
tgtaatatgctacggtgtac

SEQ ID NO: 101570 - DNA, 20 bp, Artificial Sequence
  Description of Artificial Sequence: Synthetic oligonucleotide
  Target: LAMA2; (-) strand; PAM type: NRG; PAM sequence: CGG
tgatgtactgtaatatgcta

SEQ ID NO: 101571 - DNA, 20 bp, Artificial Sequence
  Description of Artificial Sequence: Synthetic oligonucleotide
  Target: LAMA2; (-) strand; PAM type: NRG; PAM sequence: GAG
gggaccagaatgcagaacta

SEQ ID NO: 101572 - DNA, 20 bp, Artificial Sequence
  Description of Artificial Sequence: Synthetic oligonucleotide
  Target: LAMA2; (-) strand; PAM type: NRG; PAM sequence: TAG
cagggaccagaatgcagaac

SEQ ID NO: 101573 - DNA, 20 bp, Artificial Sequence
  Description of Artificial Sequence: Synthetic oligonucleotide
  Target: LAMA2; (-) strand; PAM type: NRG; PAM sequence: CAG
ataaatcagggaccagaatg

SEQ ID NO: 101574 - DNA, 20 bp, Artificial Sequence
  Description of Artificial Sequence: Synthetic oligonucleotide
  Target: LAMA2; (-) strand; PAM type: NRG; PAM sequence: CAG
tacaagaataaatcagggac

SEQ ID NO: 101575 - DNA, 20 bp, Artificial Sequence
  Description of Artificial Sequence: Synthetic oligonucleotide
  Target: LAMA2; (-) strand; PAM type: NRG; PAM sequence: GGG
cttcatacaagaataaatca

SEQ ID NO: 101576 - DNA, 20 bp, Artificial Sequence
  Description of Artificial Sequence: Synthetic oligonucleotide
  Target: LAMA2; (-) strand; PAM type: NRG; PAM sequence: AGG
acttcatacaagaataaatc

SEQ ID NO: 101577 - DNA, 20 bp, Artificial Sequence
  Description of Artificial Sequence: Synthetic oligonucleotide
  Target: LAMA2; (-) strand; PAM type: NRG; PAM sequence: CAG
tacttcatacaagaataaat

SEQ ID NO: 101578 - DNA, 20 bp, Artificial Sequence
  Description of Artificial Sequence: Synthetic oligonucleotide
  Target: LAMA2; (-) strand; PAM type: NRG; PAM sequence: AAG
tctcagtttttacttcatac

SEQ ID NO: 101579 - DNA, 20 bp, Artificial Sequence
  Description of Artificial Sequence: Synthetic oligonucleotide
  Target: LAMA2; (-) strand; PAM type: NRG; PAM sequence: CAG
gaaagtacctatcgttttct

SEQ ID NO: 101580 - DNA, 20 bp, Artificial Sequence
  Description of Artificial Sequence: Synthetic oligonucleotide
  Target: LAMA2; (-) strand; PAM type: NRG; PAM sequence: AAG
gttccagaaatttccaagga

SEQ ID NO: 101581 - DNA, 20 bp, Artificial Sequence
  Description of Artificial Sequence: Synthetic oligonucleotide
  Target: LAMA2; (-) strand; PAM type: NRG; PAM sequence: AGG
gatggttccagaaatttcca

SEQ ID NO: 101582 - DNA, 20 bp, Artificial Sequence
  Description of Artificial Sequence: Synthetic oligonucleotide
  Target: LAMA2; (-) strand; PAM type: NRG; PAM sequence: AAG
agatggttccagaaatttcc

SEQ ID NO: 101583 - DNA, 20 bp, Artificial Sequence
  Description of Artificial Sequence: Synthetic oligonucleotide
  Target: LAMA2; (-) strand; PAM type: NRG; PAM sequence: CAG
tactccttactagatggttc

SEQ ID NO: 101584 - DNA, 20 bp, Artificial Sequence
  Description of Artificial Sequence: Synthetic oligonucleotide
  Target: LAMA2; (-) strand; PAM type: NRG; PAM sequence: TGG
gctagatactccttactaga

SEQ ID NO: 101585 - DNA, 20 bp, Artificial Sequence
  Description of Artificial Sequence: Synthetic oligonucleotide
  Target: LAMA2; (-) strand; PAM type: NRG; PAM sequence: TAG
gatggctagatactccttac

SEQ ID NO: 101586 - DNA, 20 bp, Artificial Sequence
  Description of Artificial Sequence: Synthetic oligonucleotide
  Target: LAMA2; (-) strand; PAM type: NRG; PAM sequence: TAG
tttgttgataacaggatggc

SEQ ID NO: 101587 - DNA, 20 bp, Artificial Sequence
  Description of Artificial Sequence: Synthetic oligonucleotide
  Target: LAMA2; (-) strand; PAM type: NRG; PAM sequence: TGG
tcagtttgttgataacagga

SEQ ID NO: 101588 - DNA, 20 bp, Artificial Sequence
  Description of Artificial Sequence: Synthetic oligonucleotide
  Target: LAMA2; (-) strand; PAM type: NRG; PAM sequence: AGG
tgaatcagtttgttgataac

SEQ ID NO: 101589 - DNA, 20 bp, Artificial Sequence
  Description of Artificial Sequence: Synthetic oligonucleotide
  Target: LAMA2; (-) strand; PAM type: NRG; PAM sequence: CAG
ttgaatcagtttgttgataa

SEQ ID NO: 101590 - DNA, 20 bp, Artificial Sequence
  Description of Artificial Sequence: Synthetic oligonucleotide
  Target: LAMA2; (-) strand; PAM type: NRG; PAM sequence: CAG
tttccaagaaggaattgaat

SEQ ID NO: 101591 - DNA, 20 bp, Artificial Sequence
  Description of Artificial Sequence: Synthetic oligonucleotide
  Target: LAMA2; (-) strand; PAM type: NRG; PAM sequence: AGG
taacctacctatttccaaga

SEQ ID NO: 101592 - DNA, 20 bp, Artificial Sequence
  Description of Artificial Sequence: Synthetic oligonucleotide
  Target: LAMA2; (-) strand; PAM type: NRG; PAM sequence: AAG
ataacctacctatttccaag

SEQ ID NO: 101593 - DNA, 20 bp, Artificial Sequence
  Description of Artificial Sequence: Synthetic oligonucleotide
  Target: LAMA2; (-) strand; PAM type: NRG; PAM sequence: AAG
tatataacctacctatttcc

SEQ ID NO: 101594 - DNA, 20 bp, Artificial Sequence
  Description of Artificial Sequence: Synthetic oligonucleotide
  Target: LAMA2; (-) strand; PAM type: NRG; PAM sequence: TAG
agggcagtgtgtgcctttga

SEQ ID NO: 101595 - DNA, 20 bp, Artificial Sequence
  Description of Artificial Sequence: Synthetic oligonucleotide
  Target: LAMA2; (-) strand; PAM type: NRG; PAM sequence: CAG
tttcaccatgctttttaggg

SEQ ID NO: 101596 - DNA, 20 bp, Artificial Sequence
  Description of Artificial Sequence: Synthetic oligonucleotide
  Target: LAMA2; (-) strand; PAM type: NRG; PAM sequence: GGG
atgtttcaccatgcttttta

SEQ ID NO: 101597 - DNA, 20 bp, Artificial Sequence
  Description of Artificial Sequence: Synthetic oligonucleotide
  Target: LAMA2; (-) strand; PAM type: NRG; PAM sequence: AGG
gatgtttcaccatgcttttt

SEQ ID NO: 101598 - DNA, 20 bp, Artificial Sequence
  Description of Artificial Sequence: Synthetic oligonucleotide
  Target: LAMA2; (-) strand; PAM type: NRG; PAM sequence: TAG
ggatgtttcaccatgctttt

SEQ ID NO: 101599 - DNA, 20 bp, Artificial Sequence
  Description of Artificial Sequence: Synthetic oligonucleotide
  Target: LAMA2; (-) strand; PAM type: NRG; PAM sequence: AGG
agatacttggtaatgataat

SEQ ID NO: 101600 - DNA, 20 bp, Artificial Sequence
  Description of Artificial Sequence: Synthetic oligonucleotide
  Target: LAMA2; (-) strand; PAM type: NRG; PAM sequence: TAG
aagatacttggtaatgataa

SEQ ID NO: 101601 - DNA, 20 bp, Artificial Sequence
  Description of Artificial Sequence: Synthetic oligonucleotide
  Target: LAMA2; (-) strand; PAM type: NRG; PAM sequence: TGG
ccaagatctttaaagatact

SEQ ID NO: 101602 - DNA, 20 bp, Artificial Sequence
  Description of Artificial Sequence: Synthetic oligonucleotide
  Target: LAMA2; (-) strand; PAM type: NRG; PAM sequence: AAG
tttcacctccaagatcttta

SEQ ID NO: 101603 - DNA, 20 bp, Artificial Sequence
  Description of Artificial Sequence: Synthetic oligonucleotide
  Target: LAMA2; (-) strand; PAM type: NRG; PAM sequence: AAG
tttgctcttttttcacctcc

SEQ ID NO: 101604 - DNA, 20 bp, Artificial Sequence
  Description of Artificial Sequence: Synthetic oligonucleotide
  Target: LAMA2; (-) strand; PAM type: NRG; PAM sequence: AAG
gatgttcctaggatgcaagc

SEQ ID NO: 101605 - DNA, 20 bp, Artificial Sequence
  Description of Artificial Sequence: Synthetic oligonucleotide
  Target: LAMA2; (-) strand; PAM type: NRG; PAM sequence: AAG
ggcagatgttcctaggatgc

SEQ ID NO: 101606 - DNA, 20 bp, Artificial Sequence
  Description of Artificial Sequence: Synthetic oligonucleotide
  Target: LAMA2; (-) strand; PAM type: NRG; PAM sequence: AGG
tattttgggcagatgttcct

SEQ ID NO: 101607 - DNA, 20 bp, Artificial Sequence
  Description of Artificial Sequence: Synthetic oligonucleotide
  Target: LAMA2; (-) strand; PAM type: NRG; PAM sequence: TAG
gtattttgggcagatgttcc

SEQ ID NO: 101608 - DNA, 20 bp, Artificial Sequence
  Description of Artificial Sequence: Synthetic oligonucleotide
  Target: LAMA2; (-) strand; PAM type: NRG; PAM sequence: CAG
tagtgaagatgtattttggg

SEQ ID NO: 101609 - DNA, 20 bp, Artificial Sequence
  Description of Artificial Sequence: Synthetic oligonucleotide
  Target: LAMA2; (-) strand; PAM type: NRG; PAM sequence: GGG
ctctagtgaagatgtatttt

SEQ ID NO: 101610 - DNA, 20 bp, Artificial Sequence
  Description of Artificial Sequence: Synthetic oligonucleotide
  Target: LAMA2; (-) strand; PAM type: NRG; PAM sequence: TGG
cctctagtgaagatgtattt

SEQ ID NO: 101611 - DNA, 20 bp, Artificial Sequence
  Description of Artificial Sequence: Synthetic oligonucleotide
  Target: LAMA2; (-) strand; PAM type: NRG; PAM sequence: AAG
gttccatttgacctctagtg

SEQ ID NO: 101612 - DNA, 20 bp, Artificial Sequence
  Description of Artificial Sequence: Synthetic oligonucleotide
  Target: LAMA2; (-) strand; PAM type: NRG; PAM sequence: TAG
taaaagttccatttgacctc

SEQ ID NO: 101613 - DNA, 20 bp, Artificial Sequence
  Description of Artificial Sequence: Synthetic oligonucleotide
  Target: LAMA2; (-) strand; PAM type: NRG; PAM sequence: AAG
caagttcatcattgttttaa

SEQ ID NO: 101614 - DNA, 20 bp, Artificial Sequence
  Description of Artificial Sequence: Synthetic oligonucleotide
  Target: LAMA2; (-) strand; PAM type: NRG; PAM sequence: AAG
gttcttctctcactgagccc

SEQ ID NO: 101615 - DNA, 20 bp, Artificial Sequence
  Description of Artificial Sequence: Synthetic oligonucleotide
  Target: LAMA2; (-) strand; PAM type: NRG; PAM sequence: GAG
aggaaggttcttctctcact

SEQ ID NO: 101616 - DNA, 20 bp, Artificial Sequence
  Description of Artificial Sequence: Synthetic oligonucleotide
  Target: LAMA2; (-) strand; PAM type: NRG; PAM sequence: AGG
aggaattatgaagaatagga

SEQ ID NO: 101617 - DNA, 20 bp, Artificial Sequence
  Description of Artificial Sequence: Synthetic oligonucleotide
  Target: LAMA2; (-) strand; PAM type: NRG; PAM sequence: AAG
taggaattatgaagaatagg

SEQ ID NO: 101618 - DNA, 20 bp, Artificial Sequence
  Description of Artificial Sequence: Synthetic oligonucleotide
  Target: LAMA2; (-) strand; PAM type: NRG; PAM sequence: AGG
tattaggaattatgaagaat

SEQ ID NO: 101619 - DNA, 20 bp, Artificial Sequence
  Description of Artificial Sequence: Synthetic oligonucleotide
  Target: LAMA2; (-) strand; PAM type: NRG; PAM sequence: TAG
ttattaggaattatgaagaa

SEQ ID NO: 101620 - DNA, 20 bp, Artificial Sequence
  Description of Artificial Sequence: Synthetic oligonucleotide
  Target: LAMA2; (-) strand; PAM type: NRG; PAM sequence: AAG
taattttattaggaattatg

SEQ ID NO: 101621 - DNA, 20 bp, Artificial Sequence
  Description of Artificial Sequence: Synthetic oligonucleotide
  Target: LAMA2; (-) strand; PAM type: NRG; PAM sequence: AGG
gtaacaattataattttatt

SEQ ID NO: 101622 - DNA, 20 bp, Artificial Sequence
  Description of Artificial Sequence: Synthetic oligonucleotide
  Target: LAMA2; (-) strand; PAM type: NRG; PAM sequence: TAG
agtaacaattataattttat

SEQ ID NO: 101623 - DNA, 20 bp, Artificial Sequence
  Description of Artificial Sequence: Synthetic oligonucleotide
  Target: LAMA2; (-) strand; PAM type: NRG; PAM sequence: TAG
tcataggttaaaaacagcag

SEQ ID NO: 101624 - DNA, 20 bp, Artificial Sequence
  Description of Artificial Sequence: Synthetic oligonucleotide
  Target: LAMA2; (-) strand; PAM type: NRG; PAM sequence: CAG
aattcataggttaaaaacag

SEQ ID NO: 101625 - DNA, 20 bp, Artificial Sequence
  Description of Artificial Sequence: Synthetic oligonucleotide
  Target: LAMA2; (-) strand; PAM type: NRG; PAM sequence: CAG
tgcaattcataggttaaaaa

SEQ ID NO: 101626 - DNA, 20 bp, Artificial Sequence
  Description of Artificial Sequence: Synthetic oligonucleotide
  Target: LAMA2; (-) strand; PAM type: NRG; PAM sequence: AGG
actttcaagctgcaattcat

SEQ ID NO: 101627 - DNA, 20 bp, Artificial Sequence
  Description of Artificial Sequence: Synthetic oligonucleotide
  Target: LAMA2; (-) strand; PAM type: NRG; PAM sequence: TAG
gactttcaagctgcaattca

SEQ ID NO: 101628 - DNA, 20 bp, Artificial Sequence
  Description of Artificial Sequence: Synthetic oligonucleotide
  Target: LAMA2; (-) strand; PAM type: NRG; PAM sequence: AAG
gattcagatcagagactttc

SEQ ID NO: 101629 - DNA, 20 bp, Artificial Sequence
  Description of Artificial Sequence: Synthetic oligonucleotide
  Target: LAMA2; (-) strand; PAM type: NRG; PAM sequence: GAG
tgcacatgtgattcagatca

SEQ ID NO: 101630 - DNA, 20 bp, Artificial Sequence
  Description of Artificial Sequence: Synthetic oligonucleotide
  Target: LAMA2; (-) strand; PAM type: NRG; PAM sequence: CAG
tttgcacatgtgattcagat

SEQ ID NO: 101631 - DNA, 20 bp, Artificial Sequence
  Description of Artificial Sequence: Synthetic oligonucleotide
  Target: LAMA2; (-) strand; PAM type: NRG; PAM sequence: CAG
caagttttgcacatgtgatt

SEQ ID NO: 101632 - DNA, 20 bp, Artificial Sequence
  Description of Artificial Sequence: Synthetic oligonucleotide
  Target: LAMA2; (-) strand; PAM type: NRG; PAM sequence: AAG
gataactgacacactttttc

SEQ ID NO: 101633 - DNA, 20 bp, Artificial Sequence
  Description of Artificial Sequence: Synthetic oligonucleotide
  Target: LAMA2; (-) strand; PAM type: NRG; PAM sequence: TGG
tgttttaagctactaaactt

SEQ ID NO: 101634 - DNA, 20 bp, Artificial Sequence
  Description of Artificial Sequence: Synthetic oligonucleotide
  Target: LAMA2; (-) strand; PAM type: NRG; PAM sequence: AAG
gtgtatgcacttgttgtttt

SEQ ID NO: 101635 - DNA, 20 bp, Artificial Sequence
  Description of Artificial Sequence: Synthetic oligonucleotide
  Target: LAMA2; (-) strand; PAM type: NRG; PAM sequence: GAG
gccaacctacagaatcatga

SEQ ID NO: 101636 - DNA, 20 bp, Artificial Sequence
  Description of Artificial Sequence: Synthetic oligonucleotide
  Target: LAMA2; (-) strand; PAM type: NRG; PAM sequence: GAG
ttgccaacctacagaatcat

SEQ ID NO: 101637 - DNA, 20 bp, Artificial Sequence
  Description of Artificial Sequence: Synthetic oligonucleotide
  Target: LAMA2; (-) strand; PAM type: NRG; PAM sequence: CAG
cagcccaaattgccaaccta

SEQ ID NO: 101638 - DNA, 20 bp, Artificial Sequence
  Description of Artificial Sequence: Synthetic oligonucleotide
  Target: LAMA2; (-) strand; PAM type: NRG; PAM sequence: CAG
aagatctgtccaactgagct

SEQ ID NO: 101639 - DNA, 20 bp, Artificial Sequence
  Description of Artificial Sequence: Synthetic oligonucleotide
  Target: LAMA2; (-) strand; PAM type: NRG; PAM sequence: GAG
agtggaagatctgtccaact

SEQ ID NO: 101640 - DNA, 20 bp, Artificial Sequence
  Description of Artificial Sequence: Synthetic oligonucleotide
  Target: LAMA2; (-) strand; PAM type: NRG; PAM sequence: AAG
gcccctaggcgtgacagtgg

SEQ ID NO: 101641 - DNA, 20 bp, Artificial Sequence
  Description of Artificial Sequence: Synthetic oligonucleotide
  Target: LAMA2; (-) strand; PAM type: NRG; PAM sequence: TGG
ggagcccctaggcgtgacag

SEQ ID NO: 101642 - DNA, 20 bp, Artificial Sequence
  Description of Artificial Sequence: Synthetic oligonucleotide
  Target: LAMA2; (-) strand; PAM type: NRG; PAM sequence: CAG
ctgggagcccctaggcgtga

SEQ ID NO: 101643 - DNA, 20 bp, Artificial Sequence
  Description of Artificial Sequence: Synthetic oligonucleotide
  Target: LAMA2; (-) strand; PAM type: NRG; PAM sequence: AGG
gaggccatctgggagcccct

SEQ ID NO: 101644 - DNA, 20 bp, Artificial Sequence
  Description of Artificial Sequence: Synthetic oligonucleotide
  Target: LAMA2; (-) strand; PAM type: NRG; PAM sequence: TAG
tgaggccatctgggagcccc

SEQ ID NO: 101645 - DNA, 20 bp, Artificial Sequence
  Description of Artificial Sequence: Synthetic oligonucleotide
  Target: LAMA2; (-) strand; PAM type: NRG; PAM sequence: GAG
ttgggcttgaggccatctgg

SEQ ID NO: 101646 - DNA, 20 bp, Artificial Sequence
  Description of Artificial Sequence: Synthetic oligonucleotide
  Target: LAMA2; (-) strand; PAM type: NRG; PAM sequence: GGG
atttgggcttgaggccatct

SEQ ID NO: 101647 - DNA, 20 bp, Artificial Sequence
  Description of Artificial Sequence: Synthetic oligonucleotide
  Target: LAMA2; (-) strand; PAM type: NRG; PAM sequence: TGG
aatttgggcttgaggccatc

SEQ ID NO: 101648 - DNA, 20 bp, Artificial Sequence
  Description of Artificial Sequence: Synthetic oligonucleotide
  Target: LAMA2; (-) strand; PAM type: NRG; PAM sequence: AGG
gaggccccaatttgggcttg

SEQ ID NO: 101649 - DNA, 20 bp, Artificial Sequence
  Description of Artificial Sequence: Synthetic oligonucleotide
  Target: LAMA2; (-) strand; PAM type: NRG; PAM sequence: GAG
tgaggccccaatttgggctt

SEQ ID NO: 101650 - DNA, 20 bp, Artificial Sequence
  Description of Artificial Sequence: Synthetic oligonucleotide
  Target: LAMA2; (-) strand; PAM type: NRG; PAM sequence: GGG
ggcagttgaggccccaattt

SEQ ID NO: 101651 - DNA, 20 bp, Artificial Sequence
  Description of Artificial Sequence: Synthetic oligonucleotide
  Target: LAMA2; (-) strand; PAM type: NRG; PAM sequence: TGG
gggcagttgaggccccaatt

SEQ ID NO: 101652 - DNA, 20 bp, Artificial Sequence
  Description of Artificial Sequence: Synthetic oligonucleotide
  Target: LAMA2; (-) strand; PAM type: NRG; PAM sequence: AGG
gagagaggaaagggcagttg

SEQ ID NO: 101653 - DNA, 20 bp, Artificial Sequence
  Description of Artificial Sequence: Synthetic oligonucleotide
  Target: LAMA2; (-) strand; PAM type: NRG; PAM sequence: GAG
tgagagaggaaagggcagtt

SEQ ID NO: 101654 - DNA, 20 bp, Artificial Sequence
  Description of Artificial Sequence: Synthetic oligonucleotide
  Target: LAMA2; (-) strand; PAM type: NRG; PAM sequence: CAG
caacgtgagagaggaaaggg

SEQ ID NO: 101655 - DNA, 20 bp, Artificial Sequence
  Description of Artificial Sequence: Synthetic oligonucleotide
  Target: LAMA2; (-) strand; PAM type: NRG; PAM sequence: GGG
aggcaacgtgagagaggaaa

SEQ ID NO: 101656 - DNA, 20 bp, Artificial Sequence
  Description of Artificial Sequence: Synthetic oligonucleotide
  Target: LAMA2; (-) strand; PAM type: NRG; PAM sequence: AGG
gaggcaacgtgagagaggaa

SEQ ID NO: 101657 - DNA, 20 bp, Artificial Sequence
  Description of Artificial Sequence: Synthetic oligonucleotide
  Target: LAMA2; (-) strand; PAM type: NRG; PAM sequence: AAG
ggaggcaacgtgagagagga

SEQ ID NO: 101658 - DNA, 20 bp, Artificial Sequence
  Description of Artificial Sequence: Synthetic oligonucleotide
  Target: LAMA2; (-) strand; PAM type: NRG; PAM sequence: AGG
gaagggaggcaacgtgagag

SEQ ID NO: 101659 - DNA, 20 bp, Artificial Sequence
  Description of Artificial Sequence: Synthetic oligonucleotide
  Target: LAMA2; (-) strand; PAM type: NRG; PAM sequence: GAG
ggaagggaggcaacgtgaga

SEQ ID NO: 101660 - DNA, 20 bp, Artificial Sequence
  Description of Artificial Sequence: Synthetic oligonucleotide
  Target: LAMA2; (-) strand; PAM type: NRG; PAM sequence: GAG
gaggaagggaggcaacgtga

SEQ ID NO: 101661 - DNA, 20 bp, Artificial Sequence
  Description of Artificial Sequence: Synthetic oligonucleotide
  Target: LAMA2; (-) strand; PAM type: NRG; PAM sequence: GAG
ttgaggaagggaggcaacgt

SEQ ID NO: 101662 - DNA, 20 bp, Artificial Sequence
  Description of Artificial Sequence: Synthetic oligonucleotide
  Target: LAMA2; (-) strand; PAM type: NRG; PAM sequence: AGG
ttagcctccttgaggaaggg

SEQ ID NO: 101663 - DNA, 20 bp, Artificial Sequence
  Description of Artificial Sequence: Synthetic oligonucleotide
  Target: LAMA2; (-) strand; PAM type: NRG; PAM sequence: GAG
gttagcctccttgaggaagg

SEQ ID NO: 101664 - DNA, 20 bp, Artificial Sequence
  Description of Artificial Sequence: Synthetic oligonucleotide
  Target: LAMA2; (-) strand; PAM type: NRG; PAM sequence: GGG
aggttagcctccttgaggaa

SEQ ID NO: 101665 - DNA, 20 bp, Artificial Sequence
  Description of Artificial Sequence: Synthetic oligonucleotide
  Target: LAMA2; (-) strand; PAM type: NRG; PAM sequence: AGG
caggttagcctccttgagga

SEQ ID NO: 101666 - DNA, 20 bp, Artificial Sequence
  Description of Artificial Sequence: Synthetic oligonucleotide
  Target: LAMA2; (-) strand; PAM type: NRG; PAM sequence: AAG
ccaggttagcctccttgagg

SEQ ID NO: 101667 - DNA, 20 bp, Artificial Sequence
  Description of Artificial Sequence: Synthetic oligonucleotide
  Target: LAMA2; (-) strand; PAM type: NRG; PAM sequence: AGG
atcccaggttagcctccttg

SEQ ID NO: 101668 - DNA, 20 bp, Artificial Sequence
  Description of Artificial Sequence: Synthetic oligonucleotide
  Target: LAMA2; (-) strand; PAM type: NRG; PAM sequence: GAG
aatcccaggttagcctcctt

SEQ ID NO: 101669 - DNA, 20 bp, Artificial Sequence
  Description of Artificial Sequence: Synthetic oligonucleotide
  Target: LAMA2; (-) strand; PAM type: NRG; PAM sequence: TAG
ccttcagaacaatcccaggt

SEQ ID NO: 101670 - DNA, 20 bp, Artificial Sequence
  Description of Artificial Sequence: Synthetic oligonucleotide
  Target: LAMA2; (-) strand; PAM type: NRG; PAM sequence: AGG
gctgccttcagaacaatccc

SEQ ID NO: 101671 - DNA, 20 bp, Artificial Sequence
  Description of Artificial Sequence: Synthetic oligonucleotide
  Target: LAMA2; (-) strand; PAM type: NRG; PAM sequence: CAG
tgctgccttcagaacaatcc

SEQ ID NO: 101672 - DNA, 20 bp, Artificial Sequence
  Description of Artificial Sequence: Synthetic oligonucleotide
  Target: LAMA2; (-) strand; PAM type: NRG; PAM sequence: CAG
tcttggacccctgctgcctt

SEQ ID NO: 101673 - DNA, 20 bp, Artificial Sequence
  Description of Artificial Sequence: Synthetic oligonucleotide
  Target: LAMA2; (-) strand; PAM type: NRG; PAM sequence: TGG
actttctgctttcacactct

SEQ ID NO: 101674 - DNA, 20 bp, Artificial Sequence
  Description of Artificial Sequence: Synthetic oligonucleotide
  Target: LAMA2; (-) strand; PAM type: NRG; PAM sequence: GAG
ctgaccaacagaatgtggca

SEQ ID NO: 101675 - DNA, 20 bp, Artificial Sequence
  Description of Artificial Sequence: Synthetic oligonucleotide
  Target: LAMA2; (-) strand; PAM type: NRG; PAM sequence: CAG
ctctgaccaacagaatgtgg

SEQ ID NO: 101676 - DNA, 20 bp, Artificial Sequence
  Description of Artificial Sequence: Synthetic oligonucleotide
  Target: LAMA2; (-) strand; PAM type: NRG; PAM sequence: TGG
atactctgaccaacagaatg

SEQ ID NO: 101677 - DNA, 20 bp, Artificial Sequence
  Description of Artificial Sequence: Synthetic oligonucleotide
  Target: LAMA2; (-) strand; PAM type: NRG; PAM sequence: CAG
ttgcaacatactctgaccaa

SEQ ID NO: 101678 - DNA, 20 bp, Artificial Sequence
  Description of Artificial Sequence: Synthetic oligonucleotide
  Target: LAMA2; (-) strand; PAM type: NRG; PAM sequence: TAG
ccttccccttgaatctgggt

SEQ ID NO: 101679 - DNA, 20 bp, Artificial Sequence
  Description of Artificial Sequence: Synthetic oligonucleotide
  Target: LAMA2; (-) strand; PAM type: NRG; PAM sequence: GGG
cttcccttccccttgaatct

SEQ ID NO: 101680 - DNA, 20 bp, Artificial Sequence
  Description of Artificial Sequence: Synthetic oligonucleotide
  Target: LAMA2; (-) strand; PAM type: NRG; PAM sequence: TGG
acttcccttccccttgaatc

SEQ ID NO: 101681 - DNA, 20 bp, Artificial Sequence
  Description of Artificial Sequence: Synthetic oligonucleotide
  Target: LAMA2; (-) strand; PAM type: NRG; PAM sequence: AAG
acacctcacattaagatgtg

SEQ ID NO: 101682 - DNA, 20 bp, Artificial Sequence
  Description of Artificial Sequence: Synthetic oligonucleotide
  Target: LAMA2; (-) strand; PAM type: NRG; PAM sequence: AAG
tctttgccacacctcacatt

SEQ ID NO: 101683 - DNA, 20 bp, Artificial Sequence
  Description of Artificial Sequence: Synthetic oligonucleotide
  Target: LAMA2; (-) strand; PAM type: NRG; PAM sequence: AGG
tcaaaaaaaaaaaaaaaaaa

SEQ ID NO: 101684 - DNA, 20 bp, Artificial Sequence
  Description of Artificial Sequence: Synthetic oligonucleotide
  Target: LAMA2; (-) strand; PAM type: NRG; PAM sequence: AAG
ctcaaaaaaaaaaaaaaaaa

SEQ ID NO: 101685 - DNA, 20 bp, Artificial Sequence
  Description of Artificial Sequence: Synthetic oligonucleotide
  Target: LAMA2; (-) strand; PAM type: NRG; PAM sequence: GAG
ttcagcctgggaaacagagt

SEQ ID NO: 101686 - DNA, 20 bp, Artificial Sequence
  Description of Artificial Sequence: Synthetic oligonucleotide
  Target: LAMA2; (-) strand; PAM type: NRG; PAM sequence: GAG
gcacttcagcctgggaaaca

SEQ ID NO: 101687 - DNA, 20 bp, Artificial Sequence
  Description of Artificial Sequence: Synthetic oligonucleotide
  Target: LAMA2; (-) strand; PAM type: NRG; PAM sequence: CAG
ctgcacttcagcctgggaaa

SEQ ID NO: 101688 - DNA, 20 bp, Artificial Sequence
  Description of Artificial Sequence: Synthetic oligonucleotide
  Target: LAMA2; (-) strand; PAM type: NRG; PAM sequence: GGG
atgccactgcacttcagcct

SEQ ID NO: 101689 - DNA, 20 bp, Artificial Sequence
  Description of Artificial Sequence: Synthetic oligonucleotide
  Target: LAMA2; (-) strand; PAM type: NRG; PAM sequence: TGG
catgccactgcacttcagcc

SEQ ID NO: 101690 - DNA, 20 bp, Artificial Sequence
  Description of Artificial Sequence: Synthetic oligonucleotide
  Target: LAMA2; (-) strand; PAM type: NRG; PAM sequence: CAG
tagatcatgccactgcactt

SEQ ID NO: 101691 - DNA, 20 bp, Artificial Sequence
  Description of Artificial Sequence: Synthetic oligonucleotide
  Target: LAMA2; (-) strand; PAM type: NRG; PAM sequence: TAG
ggtagaggctgcagtgagcc

SEQ ID NO: 101692 - DNA, 20 bp, Artificial Sequence
  Description of Artificial Sequence: Synthetic oligonucleotide
  Target: LAMA2; (-) strand; PAM type: NRG; PAM sequence: GAG
caggaggtagaggctgcagt

SEQ ID NO: 101693 - DNA, 20 bp, Artificial Sequence
  Description of Artificial Sequence: Synthetic oligonucleotide
  Target: LAMA2; (-) strand; PAM type: NRG; PAM sequence: CAG
aacccaggaggtagaggctg

SEQ ID NO: 101694 - DNA, 20 bp, Artificial Sequence
  Description of Artificial Sequence: Synthetic oligonucleotide
  Target: LAMA2; (-) strand; PAM type: NRG; PAM sequence: AGG
cacttgaacccaggaggtag

SEQ ID NO: 101695 - DNA, 20 bp, Artificial Sequence
  Description of Artificial Sequence: Synthetic oligonucleotide
  Target: LAMA2; (-) strand; PAM type: NRG; PAM sequence: GAG
tcacttgaacccaggaggta

SEQ ID NO: 101696 - DNA, 20 bp, Artificial Sequence
  Description of Artificial Sequence: Synthetic oligonucleotide
  Target: LAMA2; (-) strand; PAM type: NRG; PAM sequence: TAG
tatcacttgaacccaggagg

SEQ ID NO: 101697 - DNA, 20 bp, Artificial Sequence
  Description of Artificial Sequence: Synthetic oligonucleotide
  Target: LAMA2; (-) strand; PAM type: NRG; PAM sequence: AGG
gagtatcacttgaacccagg

SEQ ID NO: 101698 - DNA, 20 bp, Artificial Sequence
  Description of Artificial Sequence: Synthetic oligonucleotide
  Target: LAMA2; (-) strand; PAM type: NRG; PAM sequence: GAG
ggagtatcacttgaacccag

SEQ ID NO: 101699 - DNA, 20 bp, Artificial Sequence
  Description of Artificial Sequence: Synthetic oligonucleotide
  Target: LAMA2; (-) strand; PAM type: NRG; PAM sequence: AGG
gaggagtatcacttgaaccc

SEQ ID NO: 101700 - DNA, 20 bp, Artificial Sequence
  Description of Artificial Sequence: Synthetic oligonucleotide
  Target: LAMA2; (-) strand; PAM type: NRG; PAM sequence: CAG
ggaggagtatcacttgaacc

SEQ ID NO: 101701 - DNA, 20 bp, Artificial Sequence
  Description of Artificial Sequence: Synthetic oligonucleotide
  Target: LAMA2; (-) strand; PAM type: NRG; PAM sequence: GAG
tactcgggaggctgagggag

SEQ ID NO: 101702 - DNA, 20 bp, Artificial Sequence
  Description of Artificial Sequence: Synthetic oligonucleotide
  Target: LAMA2; (-) strand; PAM type: NRG; PAM sequence: AGG
gctactcgggaggctgaggg

SEQ ID NO: 101703 - DNA, 20 bp, Artificial Sequence
  Description of Artificial Sequence: Synthetic oligonucleotide
  Target: LAMA2; (-) strand; PAM type: NRG; PAM sequence: GAG
cgctactcgggaggctgagg

SEQ ID NO: 101704 - DNA, 20 bp, Artificial Sequence
  Description of Artificial Sequence: Synthetic oligonucleotide
  Target: LAMA2; (-) strand; PAM type: NRG; PAM sequence: GGG
cccgctactcgggaggctga

SEQ ID NO: 101705 - DNA, 20 bp, Artificial Sequence
  Description of Artificial Sequence: Synthetic oligonucleotide
  Target: LAMA2; (-) strand; PAM type: NRG; PAM sequence: AGG
tcccgctactcgggaggctg

SEQ ID NO: 101706 - DNA, 20 bp, Artificial Sequence
  Description of Artificial Sequence: Synthetic oligonucleotide
  Target: LAMA2; (-) strand; PAM type: NRG; PAM sequence: GAG
gtcccgctactcgggaggct

SEQ ID NO: 101707 - DNA, 20 bp, Artificial Sequence
  Description of Artificial Sequence: Synthetic oligonucleotide
  Target: LAMA2; (-) strand; PAM type: NRG; PAM sequence: AGG
ctctagtcccgctactcggg

SEQ ID NO: 101708 - DNA, 20 bp, Artificial Sequence
  Description of Artificial Sequence: Synthetic oligonucleotide
  Target: LAMA2; (-) strand; PAM type: NRG; PAM sequence: GAG
cctctagtcccgctactcgg

SEQ ID NO: 101709 - DNA, 20 bp, Artificial Sequence
  Description of Artificial Sequence: Synthetic oligonucleotide
  Target: LAMA2; (-) strand; PAM type: NRG; PAM sequence: GGG
tgcctctagtcccgctactc

SEQ ID NO: 101710 - DNA, 20 bp, Artificial Sequence
  Description of Artificial Sequence: Synthetic oligonucleotide
  Target: LAMA2; (-) strand; PAM type: NRG; PAM sequence: CGG
gtgcctctagtcccgctact

SEQ ID NO: 101711 - DNA, 20 bp, Artificial Sequence
  Description of Artificial Sequence: Synthetic oligonucleotide
  Target: LAMA2; (-) strand; PAM type: NRG; PAM sequence: TAG
ggtgtggtggcatgtgcctc

SEQ ID NO: 101712 - DNA, 20 bp, Artificial Sequence
  Description of Artificial Sequence: Synthetic oligonucleotide
  Target: LAMA2; (-) strand; PAM type: NRG; PAM sequence: TGG
caaaaattagccaggtgtgg

SEQ ID NO: 101713 - DNA, 20 bp, Artificial Sequence
  Description of Artificial Sequence: Synthetic oligonucleotide
  Target: LAMA2; (-) strand; PAM type: NRG; PAM sequence: TGG
atacaaaaattagccaggtg

SEQ ID NO: 101714 - DNA, 20 bp, Artificial Sequence
  Description of Artificial Sequence: Synthetic oligonucleotide
  Target: LAMA2; (-) strand; PAM type: NRG; PAM sequence: AGG
taaaaatacaaaaattagcc

SEQ ID NO: 101715 - DNA, 20 bp, Artificial Sequence
  Description of Artificial Sequence: Synthetic oligonucleotide
  Target: LAMA2; (-) strand; PAM type: NRG; PAM sequence: CAG
ctaaaaatacaaaaattagc

SEQ ID NO: 101716 - DNA, 20 bp, Artificial Sequence
  Description of Artificial Sequence: Synthetic oligonucleotide
  Target: LAMA2; (-) strand; PAM type: NRG; PAM sequence: TAG
tctactaaaaatacaaaaat

SEQ ID NO: 101717 - DNA, 20 bp, Artificial Sequence
  Description of Artificial Sequence: Synthetic oligonucleotide
  Target: LAMA2; (-) strand; PAM type: NRG; PAM sequence: TGG
tgagaccagcctggccaaca

SEQ ID NO: 101718 - DNA, 20 bp, Artificial Sequence
  Description of Artificial Sequence: Synthetic oligonucleotide
  Target: LAMA2; (-) strand; PAM type: NRG; PAM sequence: TGG
tgagaagtttgagaccagcc

SEQ ID NO: 101719 - DNA, 20 bp, Artificial Sequence
  Description of Artificial Sequence: Synthetic oligonucleotide
  Target: LAMA2; (-) strand; PAM type: NRG; PAM sequence: CAG
tgaggtgagaagtttgagac

SEQ ID NO: 101720 - DNA, 20 bp, Artificial Sequence
  Description of Artificial Sequence: Synthetic oligonucleotide
  Target: LAMA2; (-) strand; PAM type: NRG; PAM sequence: GAG
tcacttgaggtgagaagttt

SEQ ID NO: 101721 - DNA, 20 bp, Artificial Sequence
  Description of Artificial Sequence: Synthetic oligonucleotide
  Target: LAMA2; (-) strand; PAM type: NRG; PAM sequence: AAG
ggcagatcacttgaggtgag

SEQ ID NO: 101722 - DNA, 20 bp, Artificial Sequence
  Description of Artificial Sequence: Synthetic oligonucleotide
  Target: LAMA2; (-) strand; PAM type: NRG; PAM sequence: GAG
atgggcagatcacttgaggt

SEQ ID NO: 101723 - DNA, 20 bp, Artificial Sequence
  Description of Artificial Sequence: Synthetic oligonucleotide
  Target: LAMA2; (-) strand; PAM type: NRG; PAM sequence: AGG
tgagatgggcagatcacttg

SEQ ID NO: 101724 - DNA, 20 bp, Artificial Sequence
  Description of Artificial Sequence: Synthetic oligonucleotide
  Target: LAMA2; (-) strand; PAM type: NRG; PAM sequence: GAG
ttgagatgggcagatcactt

SEQ ID NO: 101725 - DNA, 20 bp, Artificial Sequence
  Description of Artificial Sequence: Synthetic oligonucleotide
  Target: LAMA2; (-) strand; PAM type: NRG; PAM sequence: CAG
tatgggaggcttgagatggg

SEQ ID NO: 101726 - DNA, 20 bp, Artificial Sequence
  Description of Artificial Sequence: Synthetic oligonucleotide
  Target: LAMA2; (-) strand; PAM type: NRG; PAM sequence: GGG
cagtatgggaggcttgagat

SEQ ID NO: 101727 - DNA, 20 bp, Artificial Sequence
  Description of Artificial Sequence: Synthetic oligonucleotide
  Target: LAMA2; (-) strand; PAM type: NRG; PAM sequence: TGG
gcagtatgggaggcttgaga

SEQ ID NO: 101728 - DNA, 20 bp, Artificial Sequence
  Description of Artificial Sequence: Synthetic oligonucleotide
  Target: LAMA2; (-) strand; PAM type: NRG; PAM sequence: GAG
ccaagcagtatgggaggctt

SEQ ID NO: 101729 - DNA, 20 bp, Artificial Sequence
  Description of Artificial Sequence: Synthetic oligonucleotide
  Target: LAMA2; (-) strand; PAM type: NRG; PAM sequence: AGG
tgtaatccaagcagtatggg

SEQ ID NO: 101730 - DNA, 20 bp, Artificial Sequence
  Description of Artificial Sequence: Synthetic oligonucleotide
  Target: LAMA2; (-) strand; PAM type: NRG; PAM sequence: GAG
ctgtaatccaagcagtatgg

SEQ ID NO: 101731 - DNA, 20 bp, Artificial Sequence
  Description of Artificial Sequence: Synthetic oligonucleotide
  Target: LAMA2; (-) strand; PAM type: NRG; PAM sequence: GGG
gcctgtaatccaagcagtat

SEQ ID NO: 101732 - DNA, 20 bp, Artificial Sequence
  Description of Artificial Sequence: Synthetic oligonucleotide
  Target: LAMA2; (-) strand; PAM type: NRG; PAM sequence: TGG
ggcctgtaatccaagcagta

SEQ ID NO: 101733 - DNA, 20 bp, Artificial Sequence
  Description of Artificial Sequence: Synthetic oligonucleotide
  Target: LAMA2; (-) strand; PAM type: NRG; PAM sequence: CAG
gctcaggcctgtaatccaag

SEQ ID NO: 101734 - DNA, 20 bp, Artificial Sequence
  Description of Artificial Sequence: Synthetic oligonucleotide
  Target: LAMA2; (-) strand; PAM type: NRG; PAM sequence: AAG
gtggctcaggcctgtaatcc

SEQ ID NO: 101735 - DNA, 20 bp, Artificial Sequence
  Description of Artificial Sequence: Synthetic oligonucleotide
  Target: LAMA2; (-) strand; PAM type: NRG; PAM sequence: AGG
ctggctgggtgtggtggctc

SEQ ID NO: 101736 - DNA, 20 bp, Artificial Sequence
  Description of Artificial Sequence: Synthetic oligonucleotide
  Target: LAMA2; (-) strand; PAM type: NRG; PAM sequence: CAG
actggctgggtgtggtggct

SEQ ID NO: 101737 - DNA, 20 bp, Artificial Sequence
  Description of Artificial Sequence: Synthetic oligonucleotide
  Target: LAMA2; (-) strand; PAM type: NRG; PAM sequence: TGG
ttactactggctgggtgtgg

SEQ ID NO: 101738 - DNA, 20 bp, Artificial Sequence
  Description of Artificial Sequence: Synthetic oligonucleotide
  Target: LAMA2; (-) strand; PAM type: NRG; PAM sequence: TGG
tggttactactggctgggtg

SEQ ID NO: 101739 - DNA, 20 bp, Artificial Sequence
  Description of Artificial Sequence: Synthetic oligonucleotide
  Target: LAMA2; (-) strand; PAM type: NRG; PAM sequence: GGG
aaaaatggttactactggct

SEQ ID NO: 101740 - DNA, 20 bp, Artificial Sequence
  Description of Artificial Sequence: Synthetic oligonucleotide
  Target: LAMA2; (-) strand; PAM type: NRG; PAM sequence: TGG
taaaaatggttactactggc

SEQ ID NO: 101741 - DNA, 20 bp, Artificial Sequence
  Description of Artificial Sequence: Synthetic oligonucleotide
  Target: LAMA2; (-) strand; PAM type: NRG; PAM sequence: TGG
caattaaaaatggttactac

SEQ ID NO: 101742 - DNA, 20 bp, Artificial Sequence
  Description of Artificial Sequence: Synthetic oligonucleotide
  Target: LAMA2; (-) strand; PAM type: NRG; PAM sequence: TGG
tttctggggacaattaaaaa

SEQ ID NO: 101743 - DNA, 20 bp, Artificial Sequence
  Description of Artificial Sequence: Synthetic oligonucleotide
  Target: LAMA2; (-) strand; PAM type: NRG; PAM sequence: GGG
caaagcgatgatcatttctg

SEQ ID NO: 101744 - DNA, 20 bp, Artificial Sequence
  Description of Artificial Sequence: Synthetic oligonucleotide
  Target: LAMA2; (-) strand; PAM type: NRG; PAM sequence: GGG
tcaaagcgatgatcatttct

SEQ ID NO: 101745 - DNA, 20 bp, Artificial Sequence
  Description of Artificial Sequence: Synthetic oligonucleotide
  Target: LAMA2; (-) strand; PAM type: NRG; PAM sequence: TGG
atcaaagcgatgatcatttc

SEQ ID NO: 101746 - DNA, 20 bp, Artificial Sequence
  Description of Artificial Sequence: Synthetic oligonucleotide
  Target: LAMA2; (-) strand; PAM type: NRG; PAM sequence: AAG
acaccatgactgacagatca

SEQ ID NO: 101747 - DNA, 20 bp, Artificial Sequence
  Description of Artificial Sequence: Synthetic oligonucleotide
  Target: LAMA2; (-) strand; PAM type: NRG; PAM sequence: CAG
ggaaagaacaccatgactga

SEQ ID NO: 101748 - DNA, 20 bp, Artificial Sequence
  Description of Artificial Sequence: Synthetic oligonucleotide
  Target: LAMA2; (-) strand; PAM type: NRG; PAM sequence: AAG
agcacaaaactttaggagga

SEQ ID NO: 101749 - DNA, 20 bp, Artificial Sequence
  Description of Artificial Sequence: Synthetic oligonucleotide
  Target: LAMA2; (-) strand; PAM type: NRG; PAM sequence: AGG
aatcagcacaaaactttagg

SEQ ID NO: 101750 - DNA, 20 bp, Artificial Sequence
  Description of Artificial Sequence: Synthetic oligonucleotide
  Target: LAMA2; (-) strand; PAM type: NRG; PAM sequence: GAG
aaatcagcacaaaactttag

SEQ ID NO: 101751 - DNA, 20 bp, Artificial Sequence
  Description of Artificial Sequence: Synthetic oligonucleotide
  Target: LAMA2; (-) strand; PAM type: NRG; PAM sequence: AGG
gaaaatcagcacaaaacttt

SEQ ID NO: 101752 - DNA, 20 bp, Artificial Sequence
  Description of Artificial Sequence: Synthetic oligonucleotide
  Target: LAMA2; (-) strand; PAM type: NRG; PAM sequence: TAG
agaaaatcagcacaaaactt

SEQ ID NO: 101753 - DNA, 20 bp, Artificial Sequence
  Description of Artificial Sequence: Synthetic oligonucleotide
  Target: LAMA2; (-) strand; PAM type: NRG; PAM sequence: CAG
gagatggacgggaagaaaat

SEQ ID NO: 101754 - DNA, 20 bp, Artificial Sequence
  Description of Artificial Sequence: Synthetic oligonucleotide
  Target: LAMA2; (-) strand; PAM type: NRG; PAM sequence: AAG
gaaagggagagatggacggg

SEQ ID NO: 101755 - DNA, 20 bp, Artificial Sequence
  Description of Artificial Sequence: Synthetic oligonucleotide
  Target: LAMA2; (-) strand; PAM type: NRG; PAM sequence: GGG
caggaaagggagagatggac

SEQ ID NO: 101756 - DNA, 20 bp, Artificial Sequence
  Description of Artificial Sequence: Synthetic oligonucleotide
  Target: LAMA2; (-) strand; PAM type: NRG; PAM sequence: CGG
tcaggaaagggagagatgga

SEQ ID NO: 101757 - DNA, 20 bp, Artificial Sequence
  Description of Artificial Sequence: Synthetic oligonucleotide
  Target: LAMA2; (-) strand; PAM type: NRG; PAM sequence: TGG
tgactcaggaaagggagaga

SEQ ID NO: 101758 - DNA, 20 bp, Artificial Sequence
  Description of Artificial Sequence: Synthetic oligonucleotide
  Target: LAMA2; (-) strand; PAM type: NRG; PAM sequence: GAG
gttttgactcaggaaaggga

SEQ ID NO: 101759 - DNA, 20 bp, Artificial Sequence
  Description of Artificial Sequence: Synthetic oligonucleotide
  Target: LAMA2; (-) strand; PAM type: NRG; PAM sequence: GAG
cagttttgactcaggaaagg

SEQ ID NO: 101760 - DNA, 20 bp, Artificial Sequence
  Description of Artificial Sequence: Synthetic oligonucleotide
  Target: LAMA2; (-) strand; PAM type: NRG; PAM sequence: GGG
ttcagttttgactcaggaaa

SEQ ID NO: 101761 - DNA, 20 bp, Artificial Sequence
  Description of Artificial Sequence: Synthetic oligonucleotide
  Target: LAMA2; (-) strand; PAM type: NRG; PAM sequence: AGG
tttcagttttgactcaggaa

SEQ ID NO: 101762 - DNA, 20 bp, Artificial Sequence
  Description of Artificial Sequence: Synthetic oligonucleotide
  Target: LAMA2; (-) strand; PAM type: NRG; PAM sequence: AAG
atttcagttttgactcagga

SEQ ID NO: 101763 - DNA, 20 bp, Artificial Sequence
  Description of Artificial Sequence: Synthetic oligonucleotide
  Target: LAMA2; (-) strand; PAM type: NRG; PAM sequence: AGG
aaggatttcagttttgactc

SEQ ID NO: 101764 - DNA, 20 bp, Artificial Sequence
  Description of Artificial Sequence: Synthetic oligonucleotide
  Target: LAMA2; (-) strand; PAM type: NRG; PAM sequence: CAG
gaaggatttcagttttgact

SEQ ID NO: 101765 - DNA, 20 bp, Artificial Sequence
  Description of Artificial Sequence: Synthetic oligonucleotide
  Target: LAMA2; (-) strand; PAM type: NRG; PAM sequence: CAG
gatacctgcctgaaggattt

SEQ ID NO: 101766 - DNA, 20 bp, Artificial Sequence
  Description of Artificial Sequence: Synthetic oligonucleotide
  Target: LAMA2; (-) strand; PAM type: NRG; PAM sequence: AGG
ctattcagatacctgcctga

SEQ ID NO: 101767 - DNA, 20 bp, Artificial Sequence
  Description of Artificial Sequence: Synthetic oligonucleotide
  Target: LAMA2; (-) strand; PAM type: NRG; PAM sequence: AAG
actattcagatacctgcctg

SEQ ID NO: 101768 - DNA, 20 bp, Artificial Sequence
  Description of Artificial Sequence: Synthetic oligonucleotide
  Target: LAMA2; (-) strand; PAM type: NRG; PAM sequence: CAG
gatcaacaagaatgactatt

SEQ ID NO: 101769 - DNA, 20 bp, Artificial Sequence
  Description of Artificial Sequence: Synthetic oligonucleotide
  Target: LAMA2; (-) strand; PAM type: NRG; PAM sequence: AAG
gcagagactgtccgatcaac

SEQ ID NO: 101770 - DNA, 20 bp, Artificial Sequence
  Description of Artificial Sequence: Synthetic oligonucleotide
  Target: LAMA2; (-) strand; PAM type: NRG; PAM sequence: GAG
atcttgtgattgcagaggca

SEQ ID NO: 101771 - DNA, 20 bp, Artificial Sequence
  Description of Artificial Sequence: Synthetic oligonucleotide
  Target: LAMA2; (-) strand; PAM type: NRG; PAM sequence: CAG
ctatcttgtgattgcagagg

SEQ ID NO: 101772 - DNA, 20 bp, Artificial Sequence
  Description of Artificial Sequence: Synthetic oligonucleotide
  Target: LAMA2; (-) strand; PAM type: NRG; PAM sequence: AGG
gaactatcttgtgattgcag

SEQ ID NO: 101773 - DNA, 20 bp, Artificial Sequence
  Description of Artificial Sequence: Synthetic oligonucleotide
  Target: LAMA2; (-) strand; PAM type: NRG; PAM sequence: GAG
agaactatcttgtgattgca

SEQ ID NO: 101774 - DNA, 20 bp, Artificial Sequence
  Description of Artificial Sequence: Synthetic oligonucleotide
  Target: LAMA2; (-) strand; PAM type: NRG; PAM sequence: CAG
agagaactatcttgtgattg

SEQ ID NO: 101775 - DNA, 20 bp, Artificial Sequence
  Description of Artificial Sequence: Synthetic oligonucleotide
  Target: LAMA2; (-) strand; PAM type: NRG; PAM sequence: GAG
caatggtttagagacagaaa

SEQ ID NO: 101776 - DNA, 20 bp, Artificial Sequence
  Description of Artificial Sequence: Synthetic oligonucleotide
  Target: LAMA2; (-) strand; PAM type: NRG; PAM sequence: AAG
aacaatggtttagagacaga

SEQ ID NO: 101777 - DNA, 20 bp, Artificial Sequence
  Description of Artificial Sequence: Synthetic oligonucleotide
  Target: LAMA2; (-) strand; PAM type: NRG; PAM sequence: CAG
taaaaacaatggtttagaga

SEQ ID NO: 101778 - DNA, 20 bp, Artificial Sequence
  Description of Artificial Sequence: Synthetic oligonucleotide
  Target: LAMA2; (-) strand; PAM type: NRG; PAM sequence: GAG
acattaaaaacaatggttta

SEQ ID NO: 101779 - DNA, 20 bp, Artificial Sequence
  Description of Artificial Sequence: Synthetic oligonucleotide
  Target: LAMA2; (-) strand; PAM type: NRG; PAM sequence: TAG
atacattaaaaacaatggtt

SEQ ID NO: 101780 - DNA, 20 bp, Artificial Sequence
  Description of Artificial Sequence: Synthetic oligonucleotide
  Target: LAMA2; (-) strand; PAM type: NRG; PAM sequence: TGG
ggagaatacattaaaaacaa

SEQ ID NO: 101781 - DNA, 20 bp, Artificial Sequence
  Description of Artificial Sequence: Synthetic oligonucleotide
  Target: LAMA2; (-) strand; PAM type: NRG; PAM sequence: GAG
cacagatgtgtgaggaacag

SEQ ID NO: 101782 - DNA, 20 bp, Artificial Sequence
  Description of Artificial Sequence: Synthetic oligonucleotide
  Target: LAMA2; (-) strand; PAM type: NRG; PAM sequence: AGG
ctcacagatgtgtgaggaac

SEQ ID NO: 101783 - DNA, 20 bp, Artificial Sequence
  Description of Artificial Sequence: Synthetic oligonucleotide
  Target: LAMA2; (-) strand; PAM type: NRG; PAM sequence: CAG
cctcacagatgtgtgaggaa

SEQ ID NO: 101784 - DNA, 20 bp, Artificial Sequence
  Description of Artificial Sequence: Synthetic oligonucleotide
  Target: LAMA2; (-) strand; PAM type: NRG; PAM sequence: AGG
gaaaacctcacagatgtgtg

SEQ ID NO: 101785 - DNA, 20 bp, Artificial Sequence
  Description of Artificial Sequence: Synthetic oligonucleotide
  Target: LAMA2; (-) strand; PAM type: NRG; PAM sequence: GAG
agaaaacctcacagatgtgt

SEQ ID NO: 101786 - DNA, 20 bp, Artificial Sequence
  Description of Artificial Sequence: Synthetic oligonucleotide
  Target: LAMA2; (-) strand; PAM type: NRG; PAM sequence: CAG
gaacaagatagaaaacctca

SEQ ID NO: 101787 - DNA, 20 bp, Artificial Sequence
  Description of Artificial Sequence: Synthetic oligonucleotide
  Target: LAMA2; (-) strand; PAM type: NRG; PAM sequence: TAG
ttctgaatgtgagaacaaga

SEQ ID NO: 101788 - DNA, 20 bp, Artificial Sequence
  Description of Artificial Sequence: Synthetic oligonucleotide
  Target: LAMA2; (-) strand; PAM type: NRG; PAM sequence: AAG
aaacttctgaatgtgagaac

SEQ ID NO: 101789 - DNA, 20 bp, Artificial Sequence
  Description of Artificial Sequence: Synthetic oligonucleotide
  Target: LAMA2; (-) strand; PAM type: NRG; PAM sequence: GAG
ggaagaaaacttctgaatgt

SEQ ID NO: 101790 - DNA, 20 bp, Artificial Sequence
  Description of Artificial Sequence: Synthetic oligonucleotide
  Target: LAMA2; (-) strand; PAM type: NRG; PAM sequence: AAG
aagaggttggggttggccgg

SEQ ID NO: 101791 - DNA, 20 bp, Artificial Sequence
  Description of Artificial Sequence: Synthetic oligonucleotide
  Target: LAMA2; (-) strand; PAM type: NRG; PAM sequence: CGG
gggaagaggttggggttggc

SEQ ID NO: 101792 - DNA, 20 bp, Artificial Sequence
  Description of Artificial Sequence: Synthetic oligonucleotide
  Target: LAMA2; (-) strand; PAM type: NRG; PAM sequence: TGG
aagagggaagaggttggggt

SEQ ID NO: 101793 - DNA, 20 bp, Artificial Sequence
  Description of Artificial Sequence: Synthetic oligonucleotide
  Target: LAMA2; (-) strand; PAM type: NRG; PAM sequence: GGG
ggggaagagggaagaggttg

SEQ ID NO: 101794 - DNA, 20 bp, Artificial Sequence
  Description of Artificial Sequence: Synthetic oligonucleotide
  Target: LAMA2; (-) strand; PAM type: NRG; PAM sequence: GGG
aggggaagagggaagaggtt

SEQ ID NO: 101795 - DNA, 20 bp, Artificial Sequence
  Description of Artificial Sequence: Synthetic oligonucleotide
  Target: LAMA2; (-) strand; PAM type: NRG; PAM sequence: TGG
gaggggaagagggaagaggt

SEQ ID NO: 101796 - DNA, 20 bp, Artificial Sequence
  Description of Artificial Sequence: Synthetic oligonucleotide
  Target: LAMA2; (-) strand; PAM type: NRG; PAM sequence: AGG
ggaagaggggaagagggaag

SEQ ID NO: 101797 - DNA, 20 bp, Artificial Sequence
  Description of Artificial Sequence: Synthetic oligonucleotide
  Target: LAMA2; (-) strand; PAM type: NRG; PAM sequence: GAG
gggaagaggggaagagggaa

SEQ ID NO: 101798 - DNA, 20 bp, Artificial Sequence
  Description of Artificial Sequence: Synthetic oligonucleotide
  Target: LAMA2; (-) strand; PAM type: NRG; PAM sequence: AAG
aggggaagaggggaagaggg

SEQ ID NO: 101799 - DNA, 20 bp, Artificial Sequence
  Description of Artificial Sequence: Synthetic oligonucleotide
  Target: LAMA2; (-) strand; PAM type: NRG; PAM sequence: GGG
gagaggggaagaggggaaga

SEQ ID NO: 101800 - DNA, 20 bp, Artificial Sequence
  Description of Artificial Sequence: Synthetic oligonucleotide
  Target: LAMA2; (-) strand; PAM type: NRG; PAM sequence: AGG
agagaggggaagaggggaag

SEQ ID NO: 101801 - DNA, 20 bp, Artificial Sequence
  Description of Artificial Sequence: Synthetic oligonucleotide
  Target: LAMA2; (-) strand; PAM type: NRG; PAM sequence: GAG
gagagaggggaagaggggaa

SEQ ID NO: 101802 - DNA, 20 bp, Artificial Sequence
  Description of Artificial Sequence: Synthetic oligonucleotide
  Target: LAMA2; (-) strand; PAM type: NRG; PAM sequence: AAG
aagagagaggggaagagggg

SEQ ID NO: 101803 - DNA, 20 bp, Artificial Sequence
  Description of Artificial Sequence: Synthetic oligonucleotide
  Target: LAMA2; (-) strand; PAM type: NRG; PAM sequence: GGG
gagaagagagaggggaagag

SEQ ID NO: 101804 - DNA, 20 bp, Artificial Sequence
  Description of Artificial Sequence: Synthetic oligonucleotide
  Target: LAMA2; (-) strand; PAM type: NRG; PAM sequence: GGG
agagaagagagaggggaaga

SEQ ID NO: 101805 - DNA, 20 bp, Artificial Sequence
  Description of Artificial Sequence: Synthetic oligonucleotide
  Target: LAMA2; (-) strand; PAM type: NRG; PAM sequence: AGG
gagagaagagagaggggaag

SEQ ID NO: 101806 - DNA, 20 bp, Artificial Sequence
  Description of Artificial Sequence: Synthetic oligonucleotide
  Target: LAMA2; (-) strand; PAM type: NRG; PAM sequence: GAG
ggagagaagagagaggggaa

SEQ ID NO: 101807 - DNA, 20 bp, Artificial Sequence
  Description of Artificial Sequence: Synthetic oligonucleotide
  Target: LAMA2; (-) strand; PAM type: NRG; PAM sequence: AAG
taggagagaagagagagggg

SEQ ID NO: 101808 - DNA, 20 bp, Artificial Sequence
  Description of Artificial Sequence: Synthetic oligonucleotide
  Target: LAMA2; (-) strand; PAM type: NRG; PAM sequence: GGG
tgttaggagagaagagagag

SEQ ID NO: 101809 - DNA, 20 bp, Artificial Sequence
  Description of Artificial Sequence: Synthetic oligonucleotide
  Target: LAMA2; (-) strand; PAM type: NRG; PAM sequence: GGG
atgttaggagagaagagaga

SEQ ID NO: 101810 - DNA, 20 bp, Artificial Sequence
  Description of Artificial Sequence: Synthetic oligonucleotide
  Target: LAMA2; (-) strand; PAM type: NRG; PAM sequence: AGG
aatgttaggagagaagagag

SEQ ID NO: 101811 - DNA, 20 bp, Artificial Sequence
  Description of Artificial Sequence: Synthetic oligonucleotide
  Target: LAMA2; (-) strand; PAM type: NRG; PAM sequence: GAG
gaatgttaggagagaagaga

SEQ ID NO: 101812 - DNA, 20 bp, Artificial Sequence
  Description of Artificial Sequence: Synthetic oligonucleotide
  Target: LAMA2; (-) strand; PAM type: NRG; PAM sequence: GAG
tagaatgttaggagagaaga

SEQ ID NO: 101813 - DNA, 20 bp, Artificial Sequence
  Description of Artificial Sequence: Synthetic oligonucleotide
  Target: LAMA2; (-) strand; PAM type: NRG; PAM sequence: GAG
ggtagaatgttaggagagaa

SEQ ID NO: 101814 - DNA, 20 bp, Artificial Sequence
  Description of Artificial Sequence: Synthetic oligonucleotide
  Target: LAMA2; (-) strand; PAM type: NRG; PAM sequence: AAG
gaggtagaatgttaggagag

SEQ ID NO: 101815 - DNA, 20 bp, Artificial Sequence
  Description of Artificial Sequence: Synthetic oligonucleotide
  Target: LAMA2; (-) strand; PAM type: NRG; PAM sequence: GAG
agggaggtagaatgttagga

SEQ ID NO: 101816 - DNA, 20 bp, Artificial Sequence
  Description of Artificial Sequence: Synthetic oligonucleotide
  Target: LAMA2; (-) strand; PAM type: NRG; PAM sequence: GAG
tcagggaggtagaatgttag

SEQ ID NO: 101817 - DNA, 20 bp, Artificial Sequence
  Description of Artificial Sequence: Synthetic oligonucleotide
  Target: LAMA2; (-) strand; PAM type: NRG; PAM sequence: AGG
gatcagggaggtagaatgtt

SEQ ID NO: 101818 - DNA, 20 bp, Artificial Sequence
  Description of Artificial Sequence: Synthetic oligonucleotide
  Target: LAMA2; (-) strand; PAM type: NRG; PAM sequence: TAG
agatcagggaggtagaatgt

SEQ ID NO: 101819 - DNA, 20 bp, Artificial Sequence
  Description of Artificial Sequence: Synthetic oligonucleotide
  Target: LAMA2; (-) strand; PAM type: NRG; PAM sequence: TAG
tagtgagaagatcagggagg

SEQ ID NO: 101820 - DNA, 20 bp, Artificial Sequence
  Description of Artificial Sequence: Synthetic oligonucleotide
  Target: LAMA2; (-) strand; PAM type: NRG; PAM sequence: AGG
aaatagtgagaagatcaggg

SEQ ID NO: 101821 - DNA, 20 bp, Artificial Sequence
  Description of Artificial Sequence: Synthetic oligonucleotide
  Target: LAMA2; (-) strand; PAM type: NRG; PAM sequence: GAG
gaaatagtgagaagatcagg

SEQ ID NO: 101822 - DNA, 20 bp, Artificial Sequence
  Description of Artificial Sequence: Synthetic oligonucleotide
  Target: LAMA2; (-) strand; PAM type: NRG; PAM sequence: GGG
atgaaatagtgagaagatca

SEQ ID NO: 101823 - DNA, 20 bp, Artificial Sequence
  Description of Artificial Sequence: Synthetic oligonucleotide
  Target: LAMA2; (-) strand; PAM type: NRG; PAM sequence: AGG
catgaaatagtgagaagatc

SEQ ID NO: 101824 - DNA, 20 bp, Artificial Sequence
  Description of Artificial Sequence: Synthetic oligonucleotide
  Target: LAMA2; (-) strand; PAM type: NRG; PAM sequence: CAG
acatgaaatagtgagaagat

SEQ ID NO: 101825 - DNA, 20 bp, Artificial Sequence
  Description of Artificial Sequence: Synthetic oligonucleotide
  Target: LAMA2; (-) strand; PAM type: NRG; PAM sequence: AAG
caagtacatgaaatagtgag

SEQ ID NO: 101826 - DNA, 20 bp, Artificial Sequence
  Description of Artificial Sequence: Synthetic oligonucleotide
  Target: LAMA2; (-) strand; PAM type: NRG; PAM sequence: GAG
gcccaagtacatgaaatagt

SEQ ID NO: 101827 - DNA, 20 bp, Artificial Sequence
  Description of Artificial Sequence: Synthetic oligonucleotide
  Target: LAMA2; (-) strand; PAM type: NRG; PAM sequence: TAG
atgtgcccaagtacatgaaa

SEQ ID NO: 101828 - DNA, 20 bp, Artificial Sequence
  Description of Artificial Sequence: Synthetic oligonucleotide
  Target: LAMA2; (-) strand; PAM type: NRG; PAM sequence: AAG
tttgagcatggcatgtgccc

SEQ ID NO: 101829 - DNA, 20 bp, Artificial Sequence
  Description of Artificial Sequence: Synthetic oligonucleotide
  Target: LAMA2; (-) strand; PAM type: NRG; PAM sequence: TGG
caagggttaatgtttgagca

SEQ ID NO: 101830 - DNA, 20 bp, Artificial Sequence
  Description of Artificial Sequence: Synthetic oligonucleotide
  Target: LAMA2; (-) strand; PAM type: NRG; PAM sequence: GAG
aatggcaagggttaatgttt

SEQ ID NO: 101831 - DNA, 20 bp, Artificial Sequence
  Description of Artificial Sequence: Synthetic oligonucleotide
  Target: LAMA2; (-) strand; PAM type: NRG; PAM sequence: GGG
ttggacaaagagaatggcaa

SEQ ID NO: 101832 - DNA, 20 bp, Artificial Sequence
  Description of Artificial Sequence: Synthetic oligonucleotide
  Target: LAMA2; (-) strand; PAM type: NRG; PAM sequence: AGG
tttggacaaagagaatggca

SEQ ID NO: 101833 - DNA, 20 bp, Artificial Sequence
  Description of Artificial Sequence: Synthetic oligonucleotide
  Target: LAMA2; (-) strand; PAM type: NRG; PAM sequence: AAG
ctttggacaaagagaatggc

SEQ ID NO: 101834 - DNA, 20 bp, Artificial Sequence
  Description of Artificial Sequence: Synthetic oligonucleotide
  Target: LAMA2; (-) strand; PAM type: NRG; PAM sequence: TGG
aacactttggacaaagagaa

SEQ ID NO: 101835 - DNA, 20 bp, Artificial Sequence
  Description of Artificial Sequence: Synthetic oligonucleotide
  Target: LAMA2; (-) strand; PAM type: NRG; PAM sequence: GAG
atcaaaacactttggacaaa

SEQ ID NO: 101836 - DNA, 20 bp, Artificial Sequence
  Description of Artificial Sequence: Synthetic oligonucleotide
  Target: LAMA2; (-) strand; PAM type: NRG; PAM sequence: AAG
gtatcaaaacactttggaca

SEQ ID NO: 101837 - DNA, 20 bp, Artificial Sequence
  Description of Artificial Sequence: Synthetic oligonucleotide
  Target: LAMA2; (-) strand; PAM type: NRG; PAM sequence: TGG
agaagggtatcaaaacactt

SEQ ID NO: 101838 - DNA, 20 bp, Artificial Sequence
  Description of Artificial Sequence: Synthetic oligonucleotide
  Target: LAMA2; (-) strand; PAM type: NRG; PAM sequence: GGG
ctaatatttttgtgagagaa

SEQ ID NO: 101839 - DNA, 20 bp, Artificial Sequence
  Description of Artificial Sequence: Synthetic oligonucleotide
  Target: LAMA2; (-) strand; PAM type: NRG; PAM sequence: AGG
gctaatatttttgtgagaga

SEQ ID NO: 101840 - DNA, 20 bp, Artificial Sequence
  Description of Artificial Sequence: Synthetic oligonucleotide
  Target: LAMA2; (-) strand; PAM type: NRG; PAM sequence: AAG
ggctaatatttttgtgagag

SEQ ID NO: 101841 - DNA, 20 bp, Artificial Sequence
  Description of Artificial Sequence: Synthetic oligonucleotide
  Target: LAMA2; (-) strand; PAM type: NRG; PAM sequence: GAG
gtgggctaatatttttgtga

SEQ ID NO: 101842 - DNA, 20 bp, Artificial Sequence
  Description of Artificial Sequence: Synthetic oligonucleotide
  Target: LAMA2; (-) strand; PAM type: NRG; PAM sequence: GAG
ttgtgggctaatatttttgt

SEQ ID NO: 101843 - DNA, 20 bp, Artificial Sequence
  Description of Artificial Sequence: Synthetic oligonucleotide
  Target: LAMA2; (-) strand; PAM type: NRG; PAM sequence: GGG
aatattcagtaaatatttgt

SEQ ID NO: 101844 - DNA, 20 bp, Artificial Sequence
  Description of Artificial Sequence: Synthetic oligonucleotide
  Target: LAMA2; (-) strand; PAM type: NRG; PAM sequence: TGG
taatattcagtaaatatttg

SEQ ID NO: 101845 - DNA, 20 bp, Artificial Sequence
  Description of Artificial Sequence: Synthetic oligonucleotide
  Target: LAMA2; (-) strand; PAM type: NRG; PAM sequence: CAG
tcttgtacacagttaatatt

SEQ ID NO: 101846 - DNA, 20 bp, Artificial Sequence
  Description of Artificial Sequence: Synthetic oligonucleotide
  Target: LAMA2; (-) strand; PAM type: NRG; PAM sequence: CAG
ctaggaaagggtcttgtaca

SEQ ID NO: 101847 - DNA, 20 bp, Artificial Sequence
  Description of Artificial Sequence: Synthetic oligonucleotide
  Target: LAMA2; (-) strand; PAM type: NRG; PAM sequence: GGG
tggttatggtgcctaggaaa

SEQ ID NO: 101848 - DNA, 20 bp, Artificial Sequence
  Description of Artificial Sequence: Synthetic oligonucleotide
  Target: LAMA2; (-) strand; PAM type: NRG; PAM sequence: AGG
ttggttatggtgcctaggaa

SEQ ID NO: 101849 - DNA, 20 bp, Artificial Sequence
  Description of Artificial Sequence: Synthetic oligonucleotide
  Target: LAMA2; (-) strand; PAM type: NRG; PAM sequence: AAG
cttggttatggtgcctagga

SEQ ID NO: 101850 - DNA, 20 bp, Artificial Sequence
  Description of Artificial Sequence: Synthetic oligonucleotide
  Target: LAMA2; (-) strand; PAM type: NRG; PAM sequence: AGG
acaccttggttatggtgcct

SEQ ID NO: 101851 - DNA, 20 bp, Artificial Sequence
  Description of Artificial Sequence: Synthetic oligonucleotide
  Target: LAMA2; (-) strand; PAM type: NRG; PAM sequence: TAG
aacaccttggttatggtgcc

SEQ ID NO: 101852 - DNA, 20 bp, Artificial Sequence
  Description of Artificial Sequence: Synthetic oligonucleotide
  Target: LAMA2; (-) strand; PAM type: NRG; PAM sequence: TGG
gaccttaaacaccttggtta

SEQ ID NO: 101853 - DNA, 20 bp, Artificial Sequence
  Description of Artificial Sequence: Synthetic oligonucleotide
  Target: LAMA2; (-) strand; PAM type: NRG; PAM sequence: TGG
agaagggaccttaaacacct

SEQ ID NO: 101854 - DNA, 20 bp, Artificial Sequence
  Description of Artificial Sequence: Synthetic oligonucleotide
  Target: LAMA2; (-) strand; PAM type: NRG; PAM sequence: GGG
ctttcttcctcgttaaagaa

SEQ ID NO: 101855 - DNA, 20 bp, Artificial Sequence
  Description of Artificial Sequence: Synthetic oligonucleotide
  Target: LAMA2; (-) strand; PAM type: NRG; PAM sequence: AGG
tctttcttcctcgttaaaga

SEQ ID NO: 101856 - DNA, 20 bp, Artificial Sequence
  Description of Artificial Sequence: Synthetic oligonucleotide
  Target: LAMA2; (-) strand; PAM type: NRG; PAM sequence: AAG
ttctttcttcctcgttaaag

SEQ ID NO: 101857 - DNA, 20 bp, Artificial Sequence
  Description of Artificial Sequence: Synthetic oligonucleotide
  Target: LAMA2; (-) strand; PAM type: NRG; PAM sequence: AAG
atattctttcttcctcgtta

SEQ ID NO: 101858 - DNA, 20 bp, Artificial Sequence
  Description of Artificial Sequence: Synthetic oligonucleotide
  Target: LAMA2; (-) strand; PAM type: NRG; PAM sequence: GGG
cttaacacttatgcctgttt

SEQ ID NO: 101859 - DNA, 20 bp, Artificial Sequence
  Description of Artificial Sequence: Synthetic oligonucleotide
  Target: LAMA2; (-) strand; PAM type: NRG; PAM sequence: TGG
tcttaacacttatgcctgtt

SEQ ID NO: 101860 - DNA, 20 bp, Artificial Sequence
  Description of Artificial Sequence: Synthetic oligonucleotide
  Target: LAMA2; (-) strand; PAM type: NRG; PAM sequence: CAG
cccagccctataccctgcgc

SEQ ID NO: 101861 - DNA, 20 bp, Artificial Sequence
  Description of Artificial Sequence: Synthetic oligonucleotide
  Target: LAMA2; (-) strand; PAM type: NRG; PAM sequence: CAG
ctgaaactccccaccacccc

SEQ ID NO: 101862 - DNA, 20 bp, Artificial Sequence
  Description of Artificial Sequence: Synthetic oligonucleotide
  Target: LAMA2; (-) strand; PAM type: NRG; PAM sequence: AAG
gtgtcactttttcagagagc

SEQ ID NO: 101863 - DNA, 20 bp, Artificial Sequence
  Description of Artificial Sequence: Synthetic oligonucleotide
  Target: LAMA2; (-) strand; PAM type: NRG; PAM sequence: GAG
tcaagtgtcactttttcaga

SEQ ID NO: 101864 - DNA, 20 bp, Artificial Sequence
  Description of Artificial Sequence: Synthetic oligonucleotide
  Target: LAMA2; (-) strand; PAM type: NRG; PAM sequence: GAG
gctcaagtgtcactttttca

SEQ ID NO: 101865 - DNA, 20 bp, Artificial Sequence
  Description of Artificial Sequence: Synthetic oligonucleotide
  Target: LAMA2; (-) strand; PAM type: NRG; PAM sequence: CAG
gtgctcaagtgtcacttttt

SEQ ID NO: 101866 - DNA, 20 bp, Artificial Sequence
  Description of Artificial Sequence: Synthetic oligonucleotide
  Target: LAMA2; (-) strand; PAM type: NRG; PAM sequence: AAG
ggtgttcaggtcaagtgctc

SEQ ID NO: 101867 - DNA, 20 bp, Artificial Sequence
  Description of Artificial Sequence: Synthetic oligonucleotide
  Target: LAMA2; (-) strand; PAM type: NRG; PAM sequence: AAG
ggttcctaggtgttcaggtc

SEQ ID NO: 101868 - DNA, 20 bp, Artificial Sequence
  Description of Artificial Sequence: Synthetic oligonucleotide
  Target: LAMA2; (-) strand; PAM type: NRG; PAM sequence: AGG
cacctggttcctaggtgttc

SEQ ID NO: 101869 - DNA, 20 bp, Artificial Sequence
  Description of Artificial Sequence: Synthetic oligonucleotide
  Target: LAMA2; (-) strand; PAM type: NRG; PAM sequence: CAG
ccacctggttcctaggtgtt

SEQ ID NO: 101870 - DNA, 20 bp, Artificial Sequence
  Description of Artificial Sequence: Synthetic oligonucleotide
  Target: LAMA2; (-) strand; PAM type: NRG; PAM sequence: AGG
tcttctcccacctggttcct

SEQ ID NO: 101871 - DNA, 20 bp, Artificial Sequence
  Description of Artificial Sequence: Synthetic oligonucleotide
  Target: LAMA2; (-) strand; PAM type: NRG; PAM sequence: TAG
gtcttctcccacctggttcc

SEQ ID NO: 101872 - DNA, 20 bp, Artificial Sequence
  Description of Artificial Sequence: Synthetic oligonucleotide
  Target: LAMA2; (-) strand; PAM type: NRG; PAM sequence: TGG
tcccttggtcttctcccacc

SEQ ID NO: 101873 - DNA, 20 bp, Artificial Sequence
  Description of Artificial Sequence: Synthetic oligonucleotide
  Target: LAMA2; (-) strand; PAM type: NRG; PAM sequence: TGG
tacctagaattcttctccct

SEQ ID NO: 101874 - DNA, 20 bp, Artificial Sequence
  Description of Artificial Sequence: Synthetic oligonucleotide
  Target: LAMA2; (-) strand; PAM type: NRG; PAM sequence: TAG
tgcttgctgtcttctctacc

SEQ ID NO: 101875 - DNA, 20 bp, Artificial Sequence
  Description of Artificial Sequence: Synthetic oligonucleotide
  Target: LAMA2; (-) strand; PAM type: NRG; PAM sequence: AGG
agggagcaaggatttggaag

SEQ ID NO: 101876 - DNA, 20 bp, Artificial Sequence
  Description of Artificial Sequence: Synthetic oligonucleotide
  Target: LAMA2; (-) strand; PAM type: NRG; PAM sequence: GAG
aagggagcaaggatttggaa

SEQ ID NO: 101877 - DNA, 20 bp, Artificial Sequence
  Description of Artificial Sequence: Synthetic oligonucleotide
  Target: LAMA2; (-) strand; PAM type: NRG; PAM sequence: AAG
tcaagggagcaaggatttgg

SEQ ID NO: 101878 - DNA, 20 bp, Artificial Sequence
  Description of Artificial Sequence: Synthetic oligonucleotide
  Target: LAMA2; (-) strand; PAM type: NRG; PAM sequence: TGG
tcttcaagggagcaaggatt

SEQ ID NO: 101879 - DNA, 20 bp, Artificial Sequence
  Description of Artificial Sequence: Synthetic oligonucleotide
  Target: LAMA2; (-) strand; PAM type: NRG; PAM sequence: AGG
gctcaatcttcaagggagca

SEQ ID NO: 101880 - DNA, 20 bp, Artificial Sequence
  Description of Artificial Sequence: Synthetic oligonucleotide
  Target: LAMA2; (-) strand; PAM type: NRG; PAM sequence: AAG
tgctcaatcttcaagggagc

SEQ ID NO: 101881 - DNA, 20 bp, Artificial Sequence
  Description of Artificial Sequence: Synthetic oligonucleotide
  Target: LAMA2; (-) strand; PAM type: NRG; PAM sequence: GAG
gggatgctcaatcttcaagg

SEQ ID NO: 101882 - DNA, 20 bp, Artificial Sequence
  Description of Artificial Sequence: Synthetic oligonucleotide
  Target: LAMA2; (-) strand; PAM type: NRG; PAM sequence: GGG
tagggatgctcaatcttcaa

SEQ ID NO: 101883 - DNA, 20 bp, Artificial Sequence
  Description of Artificial Sequence: Synthetic oligonucleotide
  Target: LAMA2; (-) strand; PAM type: NRG; PAM sequence: AGG
atagggatgctcaatcttca

SEQ ID NO: 101884 - DNA, 20 bp, Artificial Sequence
  Description of Artificial Sequence: Synthetic oligonucleotide
  Target: LAMA2; (-) strand; PAM type: NRG; PAM sequence: AAG
tatagggatgctcaatcttc

SEQ ID NO: 101885 - DNA, 20 bp, Artificial Sequence
  Description of Artificial Sequence: Synthetic oligonucleotide
  Target: LAMA2; (-) strand; PAM type: NRG; PAM sequence: GGG
ggaccaggtgataaattata

SEQ ID NO: 101886 - DNA, 20 bp, Artificial Sequence
  Description of Artificial Sequence: Synthetic oligonucleotide
  Target: LAMA2; (-) strand; PAM type: NRG; PAM sequence: AGG
tggaccaggtgataaattat

SEQ ID NO: 101887 - DNA, 20 bp, Artificial Sequence
  Description of Artificial Sequence: Synthetic oligonucleotide
  Target: LAMA2; (-) strand; PAM type: NRG; PAM sequence: TAG
ctggaccaggtgataaatta

SEQ ID NO: 101888 - DNA, 20 bp, Artificial Sequence
  Description of Artificial Sequence: Synthetic oligonucleotide
  Target: LAMA2; (-) strand; PAM type: NRG; PAM sequence: AGG
aaggataaaaccactggacc

SEQ ID NO: 101889 - DNA, 20 bp, Artificial Sequence
  Description of Artificial Sequence: Synthetic oligonucleotide
  Target: LAMA2; (-) strand; PAM type: NRG; PAM sequence: CAG
aaaggataaaaccactggac

SEQ ID NO: 101890 - DNA, 20 bp, Artificial Sequence
  Description of Artificial Sequence: Synthetic oligonucleotide
  Target: LAMA2; (-) strand; PAM type: NRG; PAM sequence: TGG
tagccaaaggataaaaccac

SEQ ID NO: 101891 - DNA, 20 bp, Artificial Sequence
  Description of Artificial Sequence: Synthetic oligonucleotide
  Target: LAMA2; (-) strand; PAM type: NRG; PAM sequence: AGG
ttgaaaaaccatgtagccaa

SEQ ID NO: 101892 - DNA, 20 bp, Artificial Sequence
  Description of Artificial Sequence: Synthetic oligonucleotide
  Target: LAMA2; (-) strand; PAM type: NRG; PAM sequence: AAG
attgaaaaaccatgtagcca

SEQ ID NO: 101893 - DNA, 20 bp, Artificial Sequence
  Description of Artificial Sequence: Synthetic oligonucleotide
  Target: LAMA2; (-) strand; PAM type: NRG; PAM sequence: TAG
ccagtaattgaaaaaccatg

SEQ ID NO: 101894 - DNA, 20 bp, Artificial Sequence
  Description of Artificial Sequence: Synthetic oligonucleotide
  Target: LAMA2; (-) strand; PAM type: NRG; PAM sequence: CAG
actgtattttaaaaatattc

SEQ ID NO: 101895 - DNA, 20 bp, Artificial Sequence
  Description of Artificial Sequence: Synthetic oligonucleotide
  Target: LAMA2; (-) strand; PAM type: NRG; PAM sequence: AGG
tccccaagtgctgggatcat

SEQ ID NO: 101896 - DNA, 20 bp, Artificial Sequence
  Description of Artificial Sequence: Synthetic oligonucleotide
  Target: LAMA2; (-) strand; PAM type: NRG; PAM sequence: TAG
ttccccaagtgctgggatca

SEQ ID NO: 101897 - DNA, 20 bp, Artificial Sequence
  Description of Artificial Sequence: Synthetic oligonucleotide
  Target: LAMA2; (-) strand; PAM type: NRG; PAM sequence: GGG
cctcagcttccccaagtgct

SEQ ID NO: 101898 - DNA, 20 bp, Artificial Sequence
  Description of Artificial Sequence: Synthetic oligonucleotide
  Target: LAMA2; (-) strand; PAM type: NRG; PAM sequence: TGG
acctcagcttccccaagtgc

SEQ ID NO: 101899 - DNA, 20 bp, Artificial Sequence
  Description of Artificial Sequence: Synthetic oligonucleotide
  Target: LAMA2; (-) strand; PAM type: NRG; PAM sequence: AAG
cctcccacctcagcttcccc

SEQ ID NO: 101900 - DNA, 20 bp, Artificial Sequence
  Description of Artificial Sequence: Synthetic oligonucleotide
  Target: LAMA2; (-) strand; PAM type: NRG; PAM sequence: CAG
ctcaagtgatcctcccacct

SEQ ID NO: 101901 - DNA, 20 bp, Artificial Sequence
  Description of Artificial Sequence: Synthetic oligonucleotide
  Target: LAMA2; (-) strand; PAM type: NRG; PAM sequence: AAG
gatgtcagactcctggcctc

SEQ ID NO: 101902 - DNA, 20 bp, Artificial Sequence
  Description of Artificial Sequence: Synthetic oligonucleotide
  Target: LAMA2; (-) strand; PAM type: NRG; PAM sequence: TGG
cctggctgatgtcagactcc

SEQ ID NO: 101903 - DNA, 20 bp, Artificial Sequence
  Description of Artificial Sequence: Synthetic oligonucleotide
  Target: LAMA2; (-) strand; PAM type: NRG; PAM sequence: CAG
tgtgttgccctggctgatgt

SEQ ID NO: 101904 - DNA, 20 bp, Artificial Sequence
  Description of Artificial Sequence: Synthetic oligonucleotide
  Target: LAMA2; (-) strand; PAM type: NRG; PAM sequence: TGG
ggggtcttgctgtgttgccc

SEQ ID NO: 101905 - DNA, 20 bp, Artificial Sequence
  Description of Artificial Sequence: Synthetic oligonucleotide
  Target: LAMA2; (-) strand; PAM type: NRG; PAM sequence: GGG
agttttttaacatagagatg

SEQ ID NO: 101906 - DNA, 20 bp, Artificial Sequence
  Description of Artificial Sequence: Synthetic oligonucleotide
  Target: LAMA2; (-) strand; PAM type: NRG; PAM sequence: GGG
tagttttttaacatagagat

SEQ ID NO: 101907 - DNA, 20 bp, Artificial Sequence
  Description of Artificial Sequence: Synthetic oligonucleotide
  Target: LAMA2; (-) strand; PAM type: NRG; PAM sequence: TGG
ctagttttttaacatagaga

SEQ ID NO: 101908 - DNA, 20 bp, Artificial Sequence
  Description of Artificial Sequence: Synthetic oligonucleotide
  Target: LAMA2; (-) strand; PAM type: NRG; PAM sequence: GAG
ccagctagttttttaacata

SEQ ID NO: 101909 - DNA, 20 bp, Artificial Sequence
  Description of Artificial Sequence: Synthetic oligonucleotide
  Target: LAMA2; (-) strand; PAM type: NRG; PAM sequence: TAG
atccagctagttttttaaca

SEQ ID NO: 101910 - DNA, 20 bp, Artificial Sequence
  Description of Artificial Sequence: Synthetic oligonucleotide
  Target: LAMA2; (-) strand; PAM type: NRG; PAM sequence: TAG
cacatgccaccacatccagc

SEQ ID NO: 101911 - DNA, 20 bp, Artificial Sequence
  Description of Artificial Sequence: Synthetic oligonucleotide
  Target: LAMA2; (-) strand; PAM type: NRG; PAM sequence: CAG
caggcacatgccaccacatc

SEQ ID NO: 101912 - DNA, 20 bp, Artificial Sequence
  Description of Artificial Sequence: Synthetic oligonucleotide
  Target: LAMA2; (-) strand; PAM type: NRG; PAM sequence: AGG
tcccgagtggttgagactac

SEQ ID NO: 101913 - DNA, 20 bp, Artificial Sequence
  Description of Artificial Sequence: Synthetic oligonucleotide
  Target: LAMA2; (-) strand; PAM type: NRG; PAM sequence: CAG
ctcccgagtggttgagacta

SEQ ID NO: 101914 - DNA, 20 bp, Artificial Sequence
  Description of Artificial Sequence: Synthetic oligonucleotide
  Target: LAMA2; (-) strand; PAM type: NRG; PAM sequence: GAG
cctcagcctcccgagtggtt

SEQ ID NO: 101915 - DNA, 20 bp, Artificial Sequence
  Description of Artificial Sequence: Synthetic oligonucleotide
  Target: LAMA2; (-) strand; PAM type: NRG; PAM sequence: TGG
tcctgcctcagcctcccgag

SEQ ID NO: 101916 - DNA, 20 bp, Artificial Sequence
  Description of Artificial Sequence: Synthetic oligonucleotide
  Target: LAMA2; (-) strand; PAM type: NRG; PAM sequence: GAG
tcctcctgcctcagcctccc

SEQ ID NO: 101917 - DNA, 20 bp, Artificial Sequence
  Description of Artificial Sequence: Synthetic oligonucleotide
  Target: LAMA2; (-) strand; PAM type: NRG; PAM sequence: CAG
ctaaagtgatcctcctgcct

SEQ ID NO: 101918 - DNA, 20 bp, Artificial Sequence
  Description of Artificial Sequence: Synthetic oligonucleotide
  Target: LAMA2; (-) strand; PAM type: NRG; PAM sequence: AAG
ggcctcaaactcctgggcta

SEQ ID NO: 101919 - DNA, 20 bp, Artificial Sequence
  Description of Artificial Sequence: Synthetic oligonucleotide
  Target: LAMA2; (-) strand; PAM type: NRG; PAM sequence: GGG
cactgcggcctcaaactcct

SEQ ID NO: 101920 - DNA, 20 bp, Artificial Sequence
  Description of Artificial Sequence: Synthetic oligonucleotide
  Target: LAMA2; (-) strand; PAM type: NRG; PAM sequence: TGG
tcactgcggcctcaaactcc

SEQ ID NO: 101921 - DNA, 20 bp, Artificial Sequence
  Description of Artificial Sequence: Synthetic oligonucleotide
  Target: LAMA2; (-) strand; PAM type: NRG; PAM sequence: CGG
ggtgtgatcatgactcactg

SEQ ID NO: 101922 - DNA, 20 bp, Artificial Sequence
  Description of Artificial Sequence: Synthetic oligonucleotide
  Target: LAMA2; (-) strand; PAM type: NRG; PAM sequence: TGG
ccacccatgctggagtacag

SEQ ID NO: 101923 - DNA, 20 bp, Artificial Sequence
  Description of Artificial Sequence: Synthetic oligonucleotide
  Target: LAMA2; (-) strand; PAM type: NRG; PAM sequence: CAG
ctgccacccatgctggagta

SEQ ID NO: 101924 - DNA, 20 bp, Artificial Sequence
  Description of Artificial Sequence: Synthetic oligonucleotide
  Target: LAMA2; (-) strand; PAM type: NRG; PAM sequence: GAG
ttgctctgccacccatgctg

SEQ ID NO: 101925 - DNA, 20 bp, Artificial Sequence
  Description of Artificial Sequence: Synthetic oligonucleotide
  Target: LAMA2; (-) strand; PAM type: NRG; PAM sequence: TGG
tcttgctctgccacccatgc

SEQ ID NO: 101926 - DNA, 20 bp, Artificial Sequence
  Description of Artificial Sequence: Synthetic oligonucleotide
  Target: LAMA2; (-) strand; PAM type: NRG; PAM sequence: GGG
ttttatttttttctgagaca

SEQ ID NO: 101927 - DNA, 20 bp, Artificial Sequence
  Description of Artificial Sequence: Synthetic oligonucleotide
  Target: LAMA2; (-) strand; PAM type: NRG; PAM sequence: AGG
tttttatttttttctgagac

SEQ ID NO: 101928 - DNA, 20 bp, Artificial Sequence
  Description of Artificial Sequence: Synthetic oligonucleotide
  Target: LAMA2; (-) strand; PAM type: NRG; PAM sequence: CAG
atttttatttttttctgaga

SEQ ID NO: 101929 - DNA, 20 bp, Artificial Sequence
  Description of Artificial Sequence: Synthetic oligonucleotide
  Target: LAMA2; (-) strand; PAM type: NRG; PAM sequence: GAG
ttctatttttatttttttct

SEQ ID NO: 101930 - DNA, 20 bp, Artificial Sequence
  Description of Artificial Sequence: Synthetic oligonucleotide
  Target: LAMA2; (-) strand; PAM type: NRG; PAM sequence: CAG
ctgtggtaaggtctaaccat

SEQ ID NO: 101931 - DNA, 20 bp, Artificial Sequence
  Description of Artificial Sequence: Synthetic oligonucleotide
  Target: LAMA2; (-) strand; PAM type: NRG; PAM sequence: AGG
tttttgatgggtctgtggta

SEQ ID NO: 101932 - DNA, 20 bp, Artificial Sequence
  Description of Artificial Sequence: Synthetic oligonucleotide
  Target: LAMA2; (-) strand; PAM type: NRG; PAM sequence: AAG
atttttgatgggtctgtggt

SEQ ID NO: 101933 - DNA, 20 bp, Artificial Sequence
  Description of Artificial Sequence: Synthetic oligonucleotide
  Target: LAMA2; (-) strand; PAM type: NRG; PAM sequence: TGG
tatgatttttgatgggtctg

SEQ ID NO: 101934 - DNA, 20 bp, Artificial Sequence
  Description of Artificial Sequence: Synthetic oligonucleotide
  Target: LAMA2; (-) strand; PAM type: NRG; PAM sequence: GGG
cacagaatatgatttttgat

SEQ ID NO: 101935 - DNA, 20 bp, Artificial Sequence
  Description of Artificial Sequence: Synthetic oligonucleotide
  Target: LAMA2; (-) strand; PAM type: NRG; PAM sequence: TGG
ccacagaatatgatttttga

SEQ ID NO: 101936 - DNA, 20 bp, Artificial Sequence
  Description of Artificial Sequence: Synthetic oligonucleotide
  Target: LAMA2; (-) strand; PAM type: NRG; PAM sequence: CAG
tctttccctcctcaccacca

SEQ ID NO: 101937 - DNA, 20 bp, Artificial Sequence
  Description of Artificial Sequence: Synthetic oligonucleotide
  Target: LAMA2; (-) strand; PAM type: NRG; PAM sequence: GGG
tttataaaatacagatgcct

SEQ ID NO: 101938 - DNA, 20 bp, Artificial Sequence
  Description of Artificial Sequence: Synthetic oligonucleotide
  Target: LAMA2; (-) strand; PAM type: NRG; PAM sequence: TGG
atttataaaatacagatgcc

SEQ ID NO: 101939 - DNA, 20 bp, Artificial Sequence
  Description of Artificial Sequence: Synthetic oligonucleotide
  Target: LAMA2; (-) strand; PAM type: NRG; PAM sequence: CAG
acatgaacatttataaaata

SEQ ID NO: 101940 - DNA, 20 bp, Artificial Sequence
  Description of Artificial Sequence: Synthetic oligonucleotide
  Target: LAMA2; (-) strand; PAM type: NRG; PAM sequence: TGG
tctcacctttggctgcccat

SEQ ID NO: 101941 - DNA, 20 bp, Artificial Sequence
  Description of Artificial Sequence: Synthetic oligonucleotide
  Target: LAMA2; (-) strand; PAM type: NRG; PAM sequence: TGG
ggatcagtggttctcacctt

SEQ ID NO: 101942 - DNA, 20 bp, Artificial Sequence
  Description of Artificial Sequence: Synthetic oligonucleotide
  Target: LAMA2; (-) strand; PAM type: NRG; PAM sequence: TGG
acaacattggtgtggatcag

SEQ ID NO: 101943 - DNA, 20 bp, Artificial Sequence
  Description of Artificial Sequence: Synthetic oligonucleotide
  Target: LAMA2; (-) strand; PAM type: NRG; PAM sequence: CAG
gtgacaacattggtgtggat

SEQ ID NO: 101944 - DNA, 20 bp, Artificial Sequence
  Description of Artificial Sequence: Synthetic oligonucleotide
  Target: LAMA2; (-) strand; PAM type: NRG; PAM sequence: TGG
agaatgtgacaacattggtg

SEQ ID NO: 101945 - DNA, 20 bp, Artificial Sequence
  Description of Artificial Sequence: Synthetic oligonucleotide
  Target: LAMA2; (-) strand; PAM type: NRG; PAM sequence: TGG
acattagaatgtgacaacat

SEQ ID NO: 101946 - DNA, 20 bp, Artificial Sequence
  Description of Artificial Sequence: Synthetic oligonucleotide
  Target: LAMA2; (-) strand; PAM type: NRG; PAM sequence: TAG
cccacattatctctgcacat

SEQ ID NO: 101947 - DNA, 20 bp, Artificial Sequence
  Description of Artificial Sequence: Synthetic oligonucleotide
  Target: LAMA2; (-) strand; PAM type: NRG; PAM sequence: CAG
ctaccccagatctaggaaat

SEQ ID NO: 101948 - DNA, 20 bp, Artificial Sequence
  Description of Artificial Sequence: Synthetic oligonucleotide
  Target: LAMA2; (-) strand; PAM type: NRG; PAM sequence: AGG
tcgggctctaccccagatct

SEQ ID NO: 101949 - DNA, 20 bp, Artificial Sequence
  Description of Artificial Sequence: Synthetic oligonucleotide
  Target: LAMA2; (-) strand; PAM type: NRG; PAM sequence: TAG
atcgggctctaccccagatc

SEQ ID NO: 101950 - DNA, 20 bp, Artificial Sequence
  Description of Artificial Sequence: Synthetic oligonucleotide
  Target: LAMA2; (-) strand; PAM type: NRG; PAM sequence: CAG
tgtataatcgggctctaccc

SEQ ID NO: 101951 - DNA, 20 bp, Artificial Sequence
  Description of Artificial Sequence: Synthetic oligonucleotide
  Target: LAMA2; (-) strand; PAM type: NRG; PAM sequence: GGG
cttattagaaatgtataatc

SEQ ID NO: 101952 - DNA, 20 bp, Artificial Sequence
  Description of Artificial Sequence: Synthetic oligonucleotide
  Target: LAMA2; (-) strand; PAM type: NRG; PAM sequence: CGG
gcttattagaaatgtataat

SEQ ID NO: 101953 - DNA, 20 bp, Artificial Sequence
  Description of Artificial Sequence: Synthetic oligonucleotide
  Target: LAMA2; (-) strand; PAM type: NRG; PAM sequence: TAG
ggcaccacctggaagcttat

SEQ ID NO: 101954 - DNA, 20 bp, Artificial Sequence
  Description of Artificial Sequence: Synthetic oligonucleotide
  Target: LAMA2; (-) strand; PAM type: NRG; PAM sequence: AAG
acagttttggcaccacctgg

SEQ ID NO: 101955 - DNA, 20 bp, Artificial Sequence
  Description of Artificial Sequence: Synthetic oligonucleotide
  Target: LAMA2; (-) strand; PAM type: NRG; PAM sequence: TGG
ccaacagttttggcaccacc

SEQ ID NO: 101956 - DNA, 20 bp, Artificial Sequence
  Description of Artificial Sequence: Synthetic oligonucleotide
  Target: LAMA2; (-) strand; PAM type: NRG; PAM sequence: TGG
agcaatcagaccaacagttt

SEQ ID NO: 101957 - DNA, 20 bp, Artificial Sequence
  Description of Artificial Sequence: Synthetic oligonucleotide
  Target: LAMA2; (-) strand; PAM type: NRG; PAM sequence: CAG
ttgagtagcaatcagaccaa

SEQ ID NO: 101958 - DNA, 20 bp, Artificial Sequence
  Description of Artificial Sequence: Synthetic oligonucleotide
  Target: LAMA2; (-) strand; PAM type: NRG; PAM sequence: CAG
accacactttgagtagcaat

SEQ ID NO: 101959 - DNA, 20 bp, Artificial Sequence
  Description of Artificial Sequence: Synthetic oligonucleotide
  Target: LAMA2; (-) strand; PAM type: NRG; PAM sequence: TAG
tctgtgcaccacactttgag

SEQ ID NO: 101960 - DNA, 20 bp, Artificial Sequence
  Description of Artificial Sequence: Synthetic oligonucleotide
  Target: LAMA2; (-) strand; PAM type: NRG; PAM sequence: GAG
tggtctgtgcaccacacttt

SEQ ID NO: 101961 - DNA, 20 bp, Artificial Sequence
  Description of Artificial Sequence: Synthetic oligonucleotide
  Target: LAMA2; (-) strand; PAM type: NRG; PAM sequence: TGG
ccaggtgatattgctactgt

SEQ ID NO: 101962 - DNA, 20 bp, Artificial Sequence
  Description of Artificial Sequence: Synthetic oligonucleotide
  Target: LAMA2; (-) strand; PAM type: NRG; PAM sequence: AGG
tgcttttctaacaagctccc

SEQ ID NO: 101963 - DNA, 20 bp, Artificial Sequence
  Description of Artificial Sequence: Synthetic oligonucleotide
  Target: LAMA2; (-) strand; PAM type: NRG; PAM sequence: CAG
gtgcttttctaacaagctcc

SEQ ID NO: 101964 - DNA, 20 bp, Artificial Sequence
  Description of Artificial Sequence: Synthetic oligonucleotide
  Target: LAMA2; (-) strand; PAM type: NRG; PAM sequence: AAG
tgagaatgtgcttttctaac

SEQ ID NO: 101965 - DNA, 20 bp, Artificial Sequence
  Description of Artificial Sequence: Synthetic oligonucleotide
  Target: LAMA2; (-) strand; PAM type: NRG; PAM sequence: GAG
gtttctcttagtctctgact

SEQ ID NO: 101966 - DNA, 20 bp, Artificial Sequence
  Description of Artificial Sequence: Synthetic oligonucleotide
  Target: LAMA2; (-) strand; PAM type: NRG; PAM sequence: TAG
tttgatcacctggtttctct

SEQ ID NO: 101967 - DNA, 20 bp, Artificial Sequence
  Description of Artificial Sequence: Synthetic oligonucleotide
  Target: LAMA2; (-) strand; PAM type: NRG; PAM sequence: TGG
caggaggtgatttgatcacc

SEQ ID NO: 101968 - DNA, 20 bp, Artificial Sequence
  Description of Artificial Sequence: Synthetic oligonucleotide
  Target: LAMA2; (-) strand; PAM type: NRG; PAM sequence: AGG
cctagtatttctgaatcagg

SEQ ID NO: 101969 - DNA, 20 bp, Artificial Sequence
  Description of Artificial Sequence: Synthetic oligonucleotide
  Target: LAMA2; (-) strand; PAM type: NRG; PAM sequence: GAG
ccctagtatttctgaatcag

SEQ ID NO: 101970 - DNA, 20 bp, Artificial Sequence
  Description of Artificial Sequence: Synthetic oligonucleotide
  Target: LAMA2; (-) strand; PAM type: NRG; PAM sequence: AGG
ccccctagtatttctgaatc

SEQ ID NO: 101971 - DNA, 20 bp, Artificial Sequence
  Description of Artificial Sequence: Synthetic oligonucleotide
  Target: LAMA2; (-) strand; PAM type: NRG; PAM sequence: CAG
accccctagtatttctgaat

SEQ ID NO: 101972 - DNA, 20 bp, Artificial Sequence
  Description of Artificial Sequence: Synthetic oligonucleotide
  Target: LAMA2; (-) strand; PAM type: NRG; PAM sequence: TAG
gagggctggtccacaccccc

SEQ ID NO: 101973 - DNA, 20 bp, Artificial Sequence
  Description of Artificial Sequence: Synthetic oligonucleotide
  Target: LAMA2; (-) strand; PAM type: NRG; PAM sequence: TGG
tttcggaaatcctagagggc

SEQ ID NO: 101974 - DNA, 20 bp, Artificial Sequence
  Description of Artificial Sequence: Synthetic oligonucleotide
  Target: LAMA2; (-) strand; PAM type: NRG; PAM sequence: GGG
ggactttcggaaatcctaga

SEQ ID NO: 101975 - DNA, 20 bp, Artificial Sequence
  Description of Artificial Sequence: Synthetic oligonucleotide
  Target: LAMA2; (-) strand; PAM type: NRG; PAM sequence: AGG
aggactttcggaaatcctag

SEQ ID NO: 101976 - DNA, 20 bp, Artificial Sequence
  Description of Artificial Sequence: Synthetic oligonucleotide
  Target: LAMA2; (-) strand; PAM type: NRG; PAM sequence: GAG
taggactttcggaaatccta

SEQ ID NO: 101977 - DNA, 20 bp, Artificial Sequence
  Description of Artificial Sequence: Synthetic oligonucleotide
  Target: LAMA2; (-) strand; PAM type: NRG; PAM sequence: TAG
agtaggactttcggaaatcc

SEQ ID NO: 101978 - DNA, 20 bp, Artificial Sequence
  Description of Artificial Sequence: Synthetic oligonucleotide
  Target: LAMA2; (-) strand; PAM type: NRG; PAM sequence: CGG
agaaccaccagtaggacttt

SEQ ID NO: 101979 - DNA, 20 bp, Artificial Sequence
  Description of Artificial Sequence: Synthetic oligonucleotide
  Target: LAMA2; (-) strand; PAM type: NRG; PAM sequence: AGG
tgggcctcagaaccaccagt

SEQ ID NO: 101980 - DNA, 20 bp, Artificial Sequence
  Description of Artificial Sequence: Synthetic oligonucleotide
  Target: LAMA2; (-) strand; PAM type: NRG; PAM sequence: TAG
gtgggcctcagaaccaccag

SEQ ID NO: 101981 - DNA, 20 bp, Artificial Sequence
  Description of Artificial Sequence: Synthetic oligonucleotide
  Target: LAMA2; (-) strand; PAM type: NRG; PAM sequence: CAG
ttagtgggcctcagaaccac

SEQ ID NO: 101982 - DNA, 20 bp, Artificial Sequence
  Description of Artificial Sequence: Synthetic oligonucleotide
  Target: LAMA2; (-) strand; PAM type: NRG; PAM sequence: CAG
tctcaagctttagtgggcct

SEQ ID NO: 101983 - DNA, 20 bp, Artificial Sequence
  Description of Artificial Sequence: Synthetic oligonucleotide
  Target: LAMA2; (-) strand; PAM type: NRG; PAM sequence: GGG
tctggttctcaagctttagt

SEQ ID NO: 101984 - DNA, 20 bp, Artificial Sequence
  Description of Artificial Sequence: Synthetic oligonucleotide
  Target: LAMA2; (-) strand; PAM type: NRG; PAM sequence: TGG
gtctggttctcaagctttag

SEQ ID NO: 101985 - DNA, 20 bp, Artificial Sequence
  Description of Artificial Sequence: Synthetic oligonucleotide
  Target: LAMA2; (-) strand; PAM type: NRG; PAM sequence: TAG
acagtctggttctcaagctt

SEQ ID NO: 101986 - DNA, 20 bp, Artificial Sequence
  Description of Artificial Sequence: Synthetic oligonucleotide
  Target: LAMA2; (-) strand; PAM type: NRG; PAM sequence: AAG
agatccacagtctggttctc

SEQ ID NO: 101987 - DNA, 20 bp, Artificial Sequence
  Description of Artificial Sequence: Synthetic oligonucleotide
  Target: LAMA2; (-) strand; PAM type: NRG; PAM sequence: TGG
aaacaccaagatccacagtc

SEQ ID NO: 101988 - DNA, 20 bp, Artificial Sequence
  Description of Artificial Sequence: Synthetic oligonucleotide
  Target: LAMA2; (-) strand; PAM type: NRG; PAM sequence: CAG
tgtctaaacaccaagatcca

SEQ ID NO: 101989 - DNA, 20 bp, Artificial Sequence
  Description of Artificial Sequence: Synthetic oligonucleotide
  Target: LAMA2; (-) strand; PAM type: NRG; PAM sequence: AAG
attgactgtgtctaaacacc

SEQ ID NO: 101990 - DNA, 20 bp, Artificial Sequence
  Description of Artificial Sequence: Synthetic oligonucleotide
  Target: LAMA2; (-) strand; PAM type: NRG; PAM sequence: AAG
acacaacatagaactcagtt

SEQ ID NO: 101991 - DNA, 20 bp, Artificial Sequence
  Description of Artificial Sequence: Synthetic oligonucleotide
  Target: LAMA2; (-) strand; PAM type: NRG; PAM sequence: CAG
agaaaacacaacatagaact

SEQ ID NO: 101992 - DNA, 20 bp, Artificial Sequence
  Description of Artificial Sequence: Synthetic oligonucleotide
  Target: LAMA2; (-) strand; PAM type: NRG; PAM sequence: TAG
caattagagaaaacacaaca

SEQ ID NO: 101993 - DNA, 20 bp, Artificial Sequence
  Description of Artificial Sequence: Synthetic oligonucleotide
  Target: LAMA2; (-) strand; PAM type: NRG; PAM sequence: GAG
ttgtccacattaaacaatta

SEQ ID NO: 101994 - DNA, 20 bp, Artificial Sequence
  Description of Artificial Sequence: Synthetic oligonucleotide
  Target: LAMA2; (-) strand; PAM type: NRG; PAM sequence: TAG
acttgtccacattaaacaat

SEQ ID NO: 101995 - DNA, 20 bp, Artificial Sequence
  Description of Artificial Sequence: Synthetic oligonucleotide
  Target: LAMA2; (-) strand; PAM type: NRG; PAM sequence: CAG
ccgttcaatgcaaacttcaa

SEQ ID NO: 101996 - DNA, 20 bp, Artificial Sequence
  Description of Artificial Sequence: Synthetic oligonucleotide
  Target: LAMA2; (-) strand; PAM type: NRG; PAM sequence: TAG
aaaagattattttggcttca

SEQ ID NO: 101997 - DNA, 20 bp, Artificial Sequence
  Description of Artificial Sequence: Synthetic oligonucleotide
  Target: LAMA2; (-) strand; PAM type: NRG; PAM sequence: TGG
aaccaagtaaaagattattt

SEQ ID NO: 101998 - DNA, 20 bp, Artificial Sequence
  Description of Artificial Sequence: Synthetic oligonucleotide
  Target: LAMA2; (-) strand; PAM type: NRG; PAM sequence: AAG
actgcatggaaaccaagtaa

SEQ ID NO: 101999 - DNA, 20 bp, Artificial Sequence
  Description of Artificial Sequence: Synthetic oligonucleotide
  Target: LAMA2; (-) strand; PAM type: NRG; PAM sequence: AAG
atttgcactgcatggaaacc

SEQ ID NO: 102000 - DNA, 20 bp, Artificial Sequence
  Description of Artificial Sequence: Synthetic oligonucleotide
  Target: LAMA2; (-) strand; PAM type: NRG; PAM sequence: TGG
gaaaccaaatttgcactgca

SEQ ID NO: 102001 - DNA, 20 bp, Artificial Sequence
  Description of Artificial Sequence: Synthetic oligonucleotide
  Target: LAMA2; (-) strand; PAM type: NRG; PAM sequence: CAG
tctcttactcttctcctagc

SEQ ID NO: 102002 - DNA, 20 bp, Artificial Sequence
  Description of Artificial Sequence: Synthetic oligonucleotide
  Target: LAMA2; (-) strand; PAM type: NRG; PAM sequence: TAG
tatatctcttactcttctcc

SEQ ID NO: 102003 - DNA, 20 bp, Artificial Sequence
  Description of Artificial Sequence: Synthetic oligonucleotide
  Target: LAMA2; (-) strand; PAM type: NRG; PAM sequence: GGG
agagcagaagtctggaacta

SEQ ID NO: 102004 - DNA, 20 bp, Artificial Sequence
  Description of Artificial Sequence: Synthetic oligonucleotide
  Target: LAMA2; (-) strand; PAM type: NRG; PAM sequence: AGG
cagagcagaagtctggaact

SEQ ID NO: 102005 - DNA, 20 bp, Artificial Sequence
  Description of Artificial Sequence: Synthetic oligonucleotide
  Target: LAMA2; (-) strand; PAM type: NRG; PAM sequence: TAG
ccagagcagaagtctggaac

SEQ ID NO: 102006 - DNA, 20 bp, Artificial Sequence
  Description of Artificial Sequence: Synthetic oligonucleotide
  Target: LAMA2; (-) strand; PAM type: NRG; PAM sequence: TGG
tggaggccagagcagaagtc

SEQ ID NO: 102007 - DNA, 20 bp, Artificial Sequence
  Description of Artificial Sequence: Synthetic oligonucleotide
  Target: LAMA2; (-) strand; PAM type: NRG; PAM sequence: AAG
ggctttggaggccagagcag

SEQ ID NO: 102008 - DNA, 20 bp, Artificial Sequence
  Description of Artificial Sequence: Synthetic oligonucleotide
  Target: LAMA2; (-) strand; PAM type: NRG; PAM sequence: CAG
agaggctttggaggccagag

SEQ ID NO: 102009 - DNA, 20 bp, Artificial Sequence
  Description of Artificial Sequence: Synthetic oligonucleotide
  Target: LAMA2; (-) strand; PAM type: NRG; PAM sequence: GAG
caaagaggctttggaggcca

SEQ ID NO: 102010 - DNA, 20 bp, Artificial Sequence
  Description of Artificial Sequence: Synthetic oligonucleotide
  Target: LAMA2; (-) strand; PAM type: NRG; PAM sequence: CAG
aacaaagaggctttggaggc

SEQ ID NO: 102011 - DNA, 20 bp, Artificial Sequence
  Description of Artificial Sequence: Synthetic oligonucleotide
  Target: LAMA2; (-) strand; PAM type: NRG; PAM sequence: AGG
aatgaacaaagaggctttgg

SEQ ID NO: 102012 - DNA, 20 bp, Artificial Sequence
  Description of Artificial Sequence: Synthetic oligonucleotide
  Target: LAMA2; (-) strand; PAM type: NRG; PAM sequence: GAG
gaatgaacaaagaggctttg

SEQ ID NO: 102013 - DNA, 20 bp, Artificial Sequence
  Description of Artificial Sequence: Synthetic oligonucleotide
  Target: LAMA2; (-) strand; PAM type: NRG; PAM sequence: TGG
ctgaatgaacaaagaggctt

SEQ ID NO: 102014 - DNA, 20 bp, Artificial Sequence
  Description of Artificial Sequence: Synthetic oligonucleotide
  Target: LAMA2; (-) strand; PAM type: NRG; PAM sequence: AGG
cacaagctgaatgaacaaag

SEQ ID NO: 102015 - DNA, 20 bp, Artificial Sequence
  Description of Artificial Sequence: Synthetic oligonucleotide
  Target: LAMA2; (-) strand; PAM type: NRG; PAM sequence: GAG
tcacaagctgaatgaacaaa

SEQ ID NO: 102016 - DNA, 20 bp, Artificial Sequence
  Description of Artificial Sequence: Synthetic oligonucleotide
  Target: LAMA2; (-) strand; PAM type: NRG; PAM sequence: AAG
cttcacaagctgaatgaaca

SEQ ID NO: 102017 - DNA, 20 bp, Artificial Sequence
  Description of Artificial Sequence: Synthetic oligonucleotide
  Target: LAMA2; (-) strand; PAM type: NRG; PAM sequence: AAG
gcaagctcctgatgcttcac

SEQ ID NO: 102018 - DNA, 20 bp, Artificial Sequence
  Description of Artificial Sequence: Synthetic oligonucleotide
  Target: LAMA2; (-) strand; PAM type: NRG; PAM sequence: AAG
gtcacctgcaggggctttgc

SEQ ID NO: 102019 - DNA, 20 bp, Artificial Sequence
  Description of Artificial Sequence: Synthetic oligonucleotide
  Target: LAMA2; (-) strand; PAM type: NRG; PAM sequence: GGG
ctgtagagcgtcacctgcag

SEQ ID NO: 102020 - DNA, 20 bp, Artificial Sequence
  Description of Artificial Sequence: Synthetic oligonucleotide
  Target: LAMA2; (-) strand; PAM type: NRG; PAM sequence: GGG
actgtagagcgtcacctgca

SEQ ID NO: 102021 - DNA, 20 bp, Artificial Sequence
  Description of Artificial Sequence: Synthetic oligonucleotide
  Target: LAMA2; (-) strand; PAM type: NRG; PAM sequence: AGG
aactgtagagcgtcacctgc

SEQ ID NO: 102022 - DNA, 20 bp, Artificial Sequence
  Description of Artificial Sequence: Synthetic oligonucleotide
  Target: LAMA2; (-) strand; PAM type: NRG; PAM sequence: CAG
caactgtagagcgtcacctg

SEQ ID NO: 102023 - DNA, 20 bp, Artificial Sequence
  Description of Artificial Sequence: Synthetic oligonucleotide
  Target: LAMA2; (-) strand; PAM type: NRG; PAM sequence: GAG
tcttgcaggtgacaactgta

SEQ ID NO: 102024 - DNA, 20 bp, Artificial Sequence
  Description of Artificial Sequence: Synthetic oligonucleotide
  Target: LAMA2; (-) strand; PAM type: NRG; PAM sequence: TAG
cttcttgcaggtgacaactg

SEQ ID NO: 102025 - DNA, 20 bp, Artificial Sequence
  Description of Artificial Sequence: Synthetic oligonucleotide
  Target: LAMA2; (-) strand; PAM type: NRG; PAM sequence: AGG
tgacacctgcagcttcttgc

SEQ ID NO: 102026 - DNA, 20 bp, Artificial Sequence
  Description of Artificial Sequence: Synthetic oligonucleotide
  Target: LAMA2; (-) strand; PAM type: NRG; PAM sequence: CAG
gtgacacctgcagcttcttg

SEQ ID NO: 102027 - DNA, 20 bp, Artificial Sequence
  Description of Artificial Sequence: Synthetic oligonucleotide
  Target: LAMA2; (-) strand; PAM type: NRG; PAM sequence: CAG
cttcttgcaggtgacacctg

SEQ ID NO: 102028 - DNA, 20 bp, Artificial Sequence
  Description of Artificial Sequence: Synthetic oligonucleotide
  Target: LAMA2; (-) strand; PAM type: NRG; PAM sequence: AGG
ttaataaatcagcttcttgc

SEQ ID NO: 102029 - DNA, 20 bp, Artificial Sequence
  Description of Artificial Sequence: Synthetic oligonucleotide
  Target: LAMA2; (-) strand; PAM type: NRG; PAM sequence: CAG
tttaataaatcagcttcttg

SEQ ID NO: 102030 - DNA, 20 bp, Artificial Sequence
  Description of Artificial Sequence: Synthetic oligonucleotide
  Target: LAMA2; (-) strand; PAM type: NRG; PAM sequence: CAG
tggcagggcttttaataaat

SEQ ID NO: 102031 - DNA, 20 bp, Artificial Sequence
  Description of Artificial Sequence: Synthetic oligonucleotide
  Target: LAMA2; (-) strand; PAM type: NRG; PAM sequence: GGG
gggattaaactgccctggca

SEQ ID NO: 102032 - DNA, 20 bp, Artificial Sequence
  Description of Artificial Sequence: Synthetic oligonucleotide
  Target: LAMA2; (-) strand; PAM type: NRG; PAM sequence: AGG
agggattaaactgccctggc

SEQ ID NO: 102033 - DNA, 20 bp, Artificial Sequence
  Description of Artificial Sequence: Synthetic oligonucleotide
  Target: LAMA2; (-) strand; PAM type: NRG; PAM sequence: CAG
cagggattaaactgccctgg

SEQ ID NO: 102034 - DNA, 20 bp, Artificial Sequence
  Description of Artificial Sequence: Synthetic oligonucleotide
  Target: LAMA2; (-) strand; PAM type: NRG; PAM sequence: TGG
tcacagggattaaactgccc

SEQ ID NO: 102035 - DNA, 20 bp, Artificial Sequence
  Description of Artificial Sequence: Synthetic oligonucleotide
  Target: LAMA2; (-) strand; PAM type: NRG; PAM sequence: GGG
agttacaatatcacttcaca

SEQ ID NO: 102036 - DNA, 20 bp, Artificial Sequence
  Description of Artificial Sequence: Synthetic oligonucleotide
  Target: LAMA2; (-) strand; PAM type: NRG; PAM sequence: AGG
gagttacaatatcacttcac

SEQ ID NO: 102037 - DNA, 20 bp, Artificial Sequence
  Description of Artificial Sequence: Synthetic oligonucleotide
  Target: LAMA2; (-) strand; PAM type: NRG; PAM sequence: CAG
tgagttacaatatcacttca

SEQ ID NO: 102038 - DNA, 20 bp, Artificial Sequence
  Description of Artificial Sequence: Synthetic oligonucleotide
  Target: LAMA2; (-) strand; PAM type: NRG; PAM sequence: GAG
ataggacagcagctagaggt

SEQ ID NO: 102039 - DNA, 20 bp, Artificial Sequence
  Description of Artificial Sequence: Synthetic oligonucleotide
  Target: LAMA2; (-) strand; PAM type: NRG; PAM sequence: AGG
tttgataggacagcagctag

SEQ ID NO: 102040 - DNA, 20 bp, Artificial Sequence
  Description of Artificial Sequence: Synthetic oligonucleotide
  Target: LAMA2; (-) strand; PAM type: NRG; PAM sequence: GAG
ttttgataggacagcagcta

SEQ ID NO: 102041 - DNA, 20 bp, Artificial Sequence
  Description of Artificial Sequence: Synthetic oligonucleotide
  Target: LAMA2; (-) strand; PAM type: NRG; PAM sequence: TAG
ttttttgataggacagcagc

SEQ ID NO: 102042 - DNA, 20 bp, Artificial Sequence
  Description of Artificial Sequence: Synthetic oligonucleotide
  Target: LAMA2; (-) strand; PAM type: NRG; PAM sequence: CAG
gtgattttttgataggacag

SEQ ID NO: 102043 - DNA, 20 bp, Artificial Sequence
  Description of Artificial Sequence: Synthetic oligonucleotide
  Target: LAMA2; (-) strand; PAM type: NRG; PAM sequence: CAG
agagtgattttttgatagga

SEQ ID NO: 102044 - DNA, 20 bp, Artificial Sequence
  Description of Artificial Sequence: Synthetic oligonucleotide
  Target: LAMA2; (-) strand; PAM type: NRG; PAM sequence: AGG
acggagagtgattttttgat

SEQ ID NO: 102045 - DNA, 20 bp, Artificial Sequence
  Description of Artificial Sequence: Synthetic oligonucleotide
  Target: LAMA2; (-) strand; PAM type: NRG; PAM sequence: TAG
gacggagagtgattttttga

SEQ ID NO: 102046 - DNA, 20 bp, Artificial Sequence
  Description of Artificial Sequence: Synthetic oligonucleotide
  Target: LAMA2; (-) strand; PAM type: NRG; PAM sequence: GAG
acaaagagaaggaggacgga

SEQ ID NO: 102047 - DNA, 20 bp, Artificial Sequence
  Description of Artificial Sequence: Synthetic oligonucleotide
  Target: LAMA2; (-) strand; PAM type: NRG; PAM sequence: GAG
aaacaaagagaaggaggacg

SEQ ID NO: 102048 - DNA, 20 bp, Artificial Sequence
  Description of Artificial Sequence: Synthetic oligonucleotide
  Target: LAMA2; (-) strand; PAM type: NRG; PAM sequence: CGG
gtaaacaaagagaaggagga

SEQ ID NO: 102049 - DNA, 20 bp, Artificial Sequence
  Description of Artificial Sequence: Synthetic oligonucleotide
  Target: LAMA2; (-) strand; PAM type: NRG; PAM sequence: AGG
gcttgtaaacaaagagaagg

SEQ ID NO: 102050 - DNA, 20 bp, Artificial Sequence
  Description of Artificial Sequence: Synthetic oligonucleotide
  Target: LAMA2; (-) strand; PAM type: NRG; PAM sequence: GAG
tgcttgtaaacaaagagaag

SEQ ID NO: 102051 - DNA, 20 bp, Artificial Sequence
  Description of Artificial Sequence: Synthetic oligonucleotide
  Target: LAMA2; (-) strand; PAM type: NRG; PAM sequence: AGG
ggtgcttgtaaacaaagaga

SEQ ID NO: 102052 - DNA, 20 bp, Artificial Sequence
  Description of Artificial Sequence: Synthetic oligonucleotide
  Target: LAMA2; (-) strand; PAM type: NRG; PAM sequence: AAG
tggtgcttgtaaacaaagag

SEQ ID NO: 102053 - DNA, 20 bp, Artificial Sequence
  Description of Artificial Sequence: Synthetic oligonucleotide
  Target: LAMA2; (-) strand; PAM type: NRG; PAM sequence: GAG
aactggtgcttgtaaacaaa

SEQ ID NO: 102054 - DNA, 20 bp, Artificial Sequence
  Description of Artificial Sequence: Synthetic oligonucleotide
  Target: LAMA2; (-) strand; PAM type: NRG; PAM sequence: AAG
ttaactggtgcttgtaaaca

SEQ ID NO: 102055 - DNA, 20 bp, Artificial Sequence
  Description of Artificial Sequence: Synthetic oligonucleotide
  Target: LAMA2; (-) strand; PAM type: NRG; PAM sequence: TGG
atggagagaaaaccattaac

SEQ ID NO: 102056 - DNA, 20 bp, Artificial Sequence
  Description of Artificial Sequence: Synthetic oligonucleotide
  Target: LAMA2; (-) strand; PAM type: NRG; PAM sequence: GAG
cccctgagctgcttaatgga

SEQ ID NO: 102057 - DNA, 20 bp, Artificial Sequence
  Description of Artificial Sequence: Synthetic oligonucleotide
  Target: LAMA2; (-) strand; PAM type: NRG; PAM sequence: GAG
gtcccctgagctgcttaatg

SEQ ID NO: 102058 - DNA, 20 bp, Artificial Sequence
  Description of Artificial Sequence: Synthetic oligonucleotide
  Target: LAMA2; (-) strand; PAM type: NRG; PAM sequence: TGG
cagtcccctgagctgcttaa

SEQ ID NO: 102059 - DNA, 20 bp, Artificial Sequence
  Description of Artificial Sequence: Synthetic oligonucleotide
  Target: LAMA2; (-) strand; PAM type: NRG; PAM sequence: GAG
tctctaaacagcagtcccct

SEQ ID NO: 102060 - DNA, 20 bp, Artificial Sequence
  Description of Artificial Sequence: Synthetic oligonucleotide
  Target: LAMA2; (-) strand; PAM type: NRG; PAM sequence: CAG
tcaattaggtctctaaacag

SEQ ID NO: 102061 - DNA, 20 bp, Artificial Sequence
  Description of Artificial Sequence: Synthetic oligonucleotide
  Target: LAMA2; (-) strand; PAM type: NRG; PAM sequence: CAG
aattcaattaggtctctaaa

SEQ ID NO: 102062 - DNA, 20 bp, Artificial Sequence
  Description of Artificial Sequence: Synthetic oligonucleotide
  Target: LAMA2; (-) strand; PAM type: NRG; PAM sequence: AGG
aacttggcaagaattcaatt

SEQ ID NO: 102063 - DNA, 20 bp, Artificial Sequence
  Description of Artificial Sequence: Synthetic oligonucleotide
  Target: LAMA2; (-) strand; PAM type: NRG; PAM sequence: TAG
aaacttggcaagaattcaat

SEQ ID NO: 102064 - DNA, 20 bp, Artificial Sequence
  Description of Artificial Sequence: Synthetic oligonucleotide
  Target: LAMA2; (-) strand; PAM type: NRG; PAM sequence: AAG
ggatcatgcccaaacttggc

SEQ ID NO: 102065 - DNA, 20 bp, Artificial Sequence
  Description of Artificial Sequence: Synthetic oligonucleotide
  Target: LAMA2; (-) strand; PAM type: NRG; PAM sequence: TGG
ctctggatcatgcccaaact

SEQ ID NO: 102066 - DNA, 20 bp, Artificial Sequence
  Description of Artificial Sequence: Synthetic oligonucleotide
  Target: LAMA2; (-) strand; PAM type: NRG; PAM sequence: TGG
accgagaattggagcagctc

SEQ ID NO: 102067 - DNA, 20 bp, Artificial Sequence
  Description of Artificial Sequence: Synthetic oligonucleotide
  Target: LAMA2; (-) strand; PAM type: NRG; PAM sequence: CAG
gaaaataccgagaattggag

SEQ ID NO: 102068 - DNA, 20 bp, Artificial Sequence
  Description of Artificial Sequence: Synthetic oligonucleotide
  Target: LAMA2; (-) strand; PAM type: NRG; PAM sequence: GAG
atggaaaataccgagaattg

SEQ ID NO: 102069 - DNA, 20 bp, Artificial Sequence
  Description of Artificial Sequence: Synthetic oligonucleotide
  Target: LAMA2; (-) strand; PAM type: NRG; PAM sequence: TGG
gcatggaaaataccgagaat

SEQ ID NO: 102070 - DNA, 20 bp, Artificial Sequence
  Description of Artificial Sequence: Synthetic oligonucleotide
  Target: LAMA2; (-) strand; PAM type: NRG; PAM sequence: GAG
tacatagcatggaaaatacc

SEQ ID NO: 102071 - DNA, 20 bp, Artificial Sequence
  Description of Artificial Sequence: Synthetic oligonucleotide
  Target: LAMA2; (-) strand; PAM type: NRG; PAM sequence: TGG
ataggggaaaatacatagca

SEQ ID NO: 102072 - DNA, 20 bp, Artificial Sequence
  Description of Artificial Sequence: Synthetic oligonucleotide
  Target: LAMA2; (-) strand; PAM type: NRG; PAM sequence: TAG
ttagaataggggaaaataca

SEQ ID NO: 102073 - DNA, 20 bp, Artificial Sequence
  Description of Artificial Sequence: Synthetic oligonucleotide
  Target: LAMA2; (-) strand; PAM type: NRG; PAM sequence: GGG
ctatatacatgttagaatag

SEQ ID NO: 102074 - DNA, 20 bp, Artificial Sequence
  Description of Artificial Sequence: Synthetic oligonucleotide
  Target: LAMA2; (-) strand; PAM type: NRG; PAM sequence: GGG
gctatatacatgttagaata

SEQ ID NO: 102075 - DNA, 20 bp, Artificial Sequence
  Description of Artificial Sequence: Synthetic oligonucleotide
  Target: LAMA2; (-) strand; PAM type: NRG; PAM sequence: AGG
tgctatatacatgttagaat

SEQ ID NO: 102076 - DNA, 20 bp, Artificial Sequence
  Description of Artificial Sequence: Synthetic oligonucleotide
  Target: LAMA2; (-) strand; PAM type: NRG; PAM sequence: TAG
atgctatatacatgttagaa

SEQ ID NO: 102077 - DNA, 20 bp, Artificial Sequence
  Description of Artificial Sequence: Synthetic oligonucleotide
  Target: LAMA2; (-) strand; PAM type: NRG; PAM sequence: TAG
tatcaatgctatatacatgt

SEQ ID NO: 102078 - DNA, 20 bp, Artificial Sequence
  Description of Artificial Sequence: Synthetic oligonucleotide
  Target: LAMA2; (-) strand; PAM type: NRG; PAM sequence: AGG
ttcttacattctgcagatag

SEQ ID NO: 102079 - DNA, 20 bp, Artificial Sequence
  Description of Artificial Sequence: Synthetic oligonucleotide
  Target: LAMA2; (-) strand; PAM type: NRG; PAM sequence: GAG
tttcttacattctgcagata

SEQ ID NO: 102080 - DNA, 20 bp, Artificial Sequence
  Description of Artificial Sequence: Synthetic oligonucleotide
  Target: LAMA2; (-) strand; PAM type: NRG; PAM sequence: TAG
aatttcttacattctgcaga

SEQ ID NO: 102081 - DNA, 20 bp, Artificial Sequence
  Description of Artificial Sequence: Synthetic oligonucleotide
  Target: LAMA2; (-) strand; PAM type: NRG; PAM sequence: CAG
ttacaatttcttacattctg

SEQ ID NO: 102082 - DNA, 20 bp, Artificial Sequence
  Description of Artificial Sequence: Synthetic oligonucleotide
  Target: LAMA2; (-) strand; PAM type: NRG; PAM sequence: CAG
ataatatactctcatgtata

SEQ ID NO: 102083 - DNA, 20 bp, Artificial Sequence
  Description of Artificial Sequence: Synthetic oligonucleotide
  Target: LAMA2; (-) strand; PAM type: NRG; PAM sequence: AGG
gtatctgcacgccaaggagc

SEQ ID NO: 102084 - DNA, 20 bp, Artificial Sequence
  Description of Artificial Sequence: Synthetic oligonucleotide
  Target: LAMA2; (-) strand; PAM type: NRG; PAM sequence: CAG
tgtatctgcacgccaaggag

SEQ ID NO: 102085 - DNA, 20 bp, Artificial Sequence
  Description of Artificial Sequence: Synthetic oligonucleotide
  Target: LAMA2; (-) strand; PAM type: NRG; PAM sequence: GAG
aggtgtatctgcacgccaag

SEQ ID NO: 102086 - DNA, 20 bp, Artificial Sequence
  Description of Artificial Sequence: Synthetic oligonucleotide
  Target: LAMA2; (-) strand; PAM type: NRG; PAM sequence: AGG
tgaggtgtatctgcacgcca

SEQ ID NO: 102087 - DNA, 20 bp, Artificial Sequence
  Description of Artificial Sequence: Synthetic oligonucleotide
  Target: LAMA2; (-) strand; PAM type: NRG; PAM sequence: AAG
atgaggtgtatctgcacgcc

SEQ ID NO: 102088 - DNA, 20 bp, Artificial Sequence
  Description of Artificial Sequence: Synthetic oligonucleotide
  Target: LAMA2; (-) strand; PAM type: NRG; PAM sequence: AGG
ttttgcattgcagagtaatg

SEQ ID NO: 102089 - DNA, 20 bp, Artificial Sequence
  Description of Artificial Sequence: Synthetic oligonucleotide
  Target: LAMA2; (-) strand; PAM type: NRG; PAM sequence: GAG
gttttgcattgcagagtaat

SEQ ID NO: 102090 - DNA, 20 bp, Artificial Sequence
  Description of Artificial Sequence: Synthetic oligonucleotide
  Target: LAMA2; (-) strand; PAM type: NRG; PAM sequence: GAG
atttttagttttgcattgca

SEQ ID NO: 102091 - DNA, 20 bp, Artificial Sequence
  Description of Artificial Sequence: Synthetic oligonucleotide
  Target: LAMA2; (-) strand; PAM type: NRG; PAM sequence: CAG
atatttttagttttgcattg

SEQ ID NO: 102092 - DNA, 20 bp, Artificial Sequence
  Description of Artificial Sequence: Synthetic oligonucleotide
  Target: LAMA2; (-) strand; PAM type: NRG; PAM sequence: TAG
ttaaaaaacatgtatatttt

SEQ ID NO: 102093 - DNA, 20 bp, Artificial Sequence
  Description of Artificial Sequence: Synthetic oligonucleotide
  Target: LAMA2; (-) strand; PAM type: NRG; PAM sequence: CAG
acatatattgaatcttttag

SEQ ID NO: 102094 - DNA, 20 bp, Artificial Sequence
  Description of Artificial Sequence: Synthetic oligonucleotide
  Target: LAMA2; (-) strand; PAM type: NRG; PAM sequence: TAG
ttaacatatattgaatcttt

SEQ ID NO: 102095 - DNA, 20 bp, Artificial Sequence
  Description of Artificial Sequence: Synthetic oligonucleotide
  Target: LAMA2; (-) strand; PAM type: NRG; PAM sequence: TAG
tatggaatagatctcataaa

SEQ ID NO: 102096 - DNA, 20 bp, Artificial Sequence
  Description of Artificial Sequence: Synthetic oligonucleotide
  Target: LAMA2; (-) strand; PAM type: NRG; PAM sequence: TAG
gttgactcttcattatggaa

SEQ ID NO: 102097 - DNA, 20 bp, Artificial Sequence
  Description of Artificial Sequence: Synthetic oligonucleotide
  Target: LAMA2; (-) strand; PAM type: NRG; PAM sequence: TGG
ggattgttgactcttcatta

SEQ ID NO: 102098 - DNA, 20 bp, Artificial Sequence
  Description of Artificial Sequence: Synthetic oligonucleotide
  Target: LAMA2; (-) strand; PAM type: NRG; PAM sequence: TGG
agaattggtagagagacaaa

SEQ ID NO: 102099 - DNA, 20 bp, Artificial Sequence
  Description of Artificial Sequence: Synthetic oligonucleotide
  Target: LAMA2; (-) strand; PAM type: NRG; PAM sequence: GAG
taggtggtagaattggtaga

SEQ ID NO: 102100 - DNA, 20 bp, Artificial Sequence
  Description of Artificial Sequence: Synthetic oligonucleotide
  Target: LAMA2; (-) strand; PAM type: NRG; PAM sequence: GAG
gataggtggtagaattggta

SEQ ID NO: 102101 - DNA, 20 bp, Artificial Sequence
  Description of Artificial Sequence: Synthetic oligonucleotide
  Target: LAMA2; (-) strand; PAM type: NRG; PAM sequence: TAG
aggataggtggtagaattgg

SEQ ID NO: 102102 - DNA, 20 bp, Artificial Sequence
  Description of Artificial Sequence: Synthetic oligonucleotide
  Target: LAMA2; (-) strand; PAM type: NRG; PAM sequence: TGG
gccaggataggtggtagaat

SEQ ID NO: 102103 - DNA, 20 bp, Artificial Sequence
  Description of Artificial Sequence: Synthetic oligonucleotide
  Target: LAMA2; (-) strand; PAM type: NRG; PAM sequence: TAG
gtaggggccaggataggtgg

SEQ ID NO: 102104 - DNA, 20 bp, Artificial Sequence
  Description of Artificial Sequence: Synthetic oligonucleotide
  Target: LAMA2; (-) strand; PAM type: NRG; PAM sequence: TGG
gtggtaggggccaggatagg

SEQ ID NO: 102105 - DNA, 20 bp, Artificial Sequence
  Description of Artificial Sequence: Synthetic oligonucleotide
  Target: LAMA2; (-) strand; PAM type: NRG; PAM sequence: AGG
ttggtggtaggggccaggat

SEQ ID NO: 102106 - DNA, 20 bp, Artificial Sequence
  Description of Artificial Sequence: Synthetic oligonucleotide
  Target: LAMA2; (-) strand; PAM type: NRG; PAM sequence: TAG
tttggtggtaggggccagga

SEQ ID NO: 102107 - DNA, 20 bp, Artificial Sequence
  Description of Artificial Sequence: Synthetic oligonucleotide
  Target: LAMA2; (-) strand; PAM type: NRG; PAM sequence: AGG
caaatttggtggtaggggcc

SEQ ID NO: 102108 - DNA, 20 bp, Artificial Sequence
  Description of Artificial Sequence: Synthetic oligonucleotide
  Target: LAMA2; (-) strand; PAM type: NRG; PAM sequence: CAG
tcaaatttggtggtaggggc

SEQ ID NO: 102109 - DNA, 20 bp, Artificial Sequence
  Description of Artificial Sequence: Synthetic oligonucleotide
  Target: LAMA2; (-) strand; PAM type: NRG; PAM sequence: GGG
ctattcaaatttggtggtag

SEQ ID NO: 102110 - DNA, 20 bp, Artificial Sequence
  Description of Artificial Sequence: Synthetic oligonucleotide
  Target: LAMA2; (-) strand; PAM type: NRG; PAM sequence: GGG
gctattcaaatttggtggta

SEQ ID NO: 102111 - DNA, 20 bp, Artificial Sequence
  Description of Artificial Sequence: Synthetic oligonucleotide
  Target: LAMA2; (-) strand; PAM type: NRG; PAM sequence: AGG
tgctattcaaatttggtggt

SEQ ID NO: 102112 - DNA, 20 bp, Artificial Sequence
  Description of Artificial Sequence: Synthetic oligonucleotide
  Target: LAMA2; (-) strand; PAM type: NRG; PAM sequence: TAG
gtgctattcaaatttggtgg

SEQ ID NO: 102113 - DNA, 20 bp, Artificial Sequence
  Description of Artificial Sequence: Synthetic oligonucleotide
  Target: LAMA2; (-) strand; PAM type: NRG; PAM sequence: TGG
gaggtgctattcaaatttgg

SEQ ID NO: 102114 - DNA, 20 bp, Artificial Sequence
  Description of Artificial Sequence: Synthetic oligonucleotide
  Target: LAMA2; (-) strand; PAM type: NRG; PAM sequence: TGG
aaagaggtgctattcaaatt

SEQ ID NO: 102115 - DNA, 20 bp, Artificial Sequence
  Description of Artificial Sequence: Synthetic oligonucleotide
  Target: LAMA2; (-) strand; PAM type: NRG; PAM sequence: AGG
aatatttttggccatcaaag

SEQ ID NO: 102116 - DNA, 20 bp, Artificial Sequence
  Description of Artificial Sequence: Synthetic oligonucleotide
  Target: LAMA2; (-) strand; PAM type: NRG; PAM sequence: GAG
taatatttttggccatcaaa

SEQ ID NO: 102117 - DNA, 20 bp, Artificial Sequence
  Description of Artificial Sequence: Synthetic oligonucleotide
  Target: LAMA2; (-) strand; PAM type: NRG; PAM sequence: AAG
cataatatttttggccatca

SEQ ID NO: 102118 - DNA, 20 bp, Artificial Sequence
  Description of Artificial Sequence: Synthetic oligonucleotide
  Target: LAMA2; (-) strand; PAM type: NRG; PAM sequence: TGG
tacactcaccataatatttt

SEQ ID NO: 102119 - DNA, 20 bp, Artificial Sequence
  Description of Artificial Sequence: Synthetic oligonucleotide
  Target: LAMA2; (-) strand; PAM type: NRG; PAM sequence: TGG
tctttatagcaatacgaaaa

SEQ ID NO: 102120 - DNA, 20 bp, Artificial Sequence
  Description of Artificial Sequence: Synthetic oligonucleotide
  Target: LAMA2; (-) strand; PAM type: NRG; PAM sequence: TAG
gagcttcaggcatttcttta

SEQ ID NO: 102121 - DNA, 20 bp, Artificial Sequence
  Description of Artificial Sequence: Synthetic oligonucleotide
  Target: LAMA2; (-) strand; PAM type: NRG; PAM sequence: AGG
tttacaaattgccgagcttc

SEQ ID NO: 102122 - DNA, 20 bp, Artificial Sequence
  Description of Artificial Sequence: Synthetic oligonucleotide
  Target: LAMA2; (-) strand; PAM type: NRG; PAM sequence: CAG
ctttacaaattgccgagctt

SEQ ID NO: 102123 - DNA, 20 bp, Artificial Sequence
  Description of Artificial Sequence: Synthetic oligonucleotide
  Target: LAMA2; (-) strand; PAM type: NRG; PAM sequence: GAG
tcttttctttacaaattgcc

SEQ ID NO: 102124 - DNA, 20 bp, Artificial Sequence
  Description of Artificial Sequence: Synthetic oligonucleotide
  Target: LAMA2; (-) strand; PAM type: NRG; PAM sequence: GAG
gtacagcctgatggaaccat

SEQ ID NO: 102125 - DNA, 20 bp, Artificial Sequence
  Description of Artificial Sequence: Synthetic oligonucleotide
  Target: LAMA2; (-) strand; PAM type: NRG; PAM sequence: TGG
atgcttcctgtacagcctga

SEQ ID NO: 102126 - DNA, 20 bp, Artificial Sequence
  Description of Artificial Sequence: Synthetic oligonucleotide
  Target: LAMA2; (-) strand; PAM type: NRG; PAM sequence: CAG
ccccagccatgcttcctgta

SEQ ID NO: 102127 - DNA, 20 bp, Artificial Sequence
  Description of Artificial Sequence: Synthetic oligonucleotide
  Target: LAMA2; (-) strand; PAM type: NRG; PAM sequence: CAG
aaagttccctgaggccaccc

SEQ ID NO: 102128 - DNA, 20 bp, Artificial Sequence
  Description of Artificial Sequence: Synthetic oligonucleotide
  Target: LAMA2; (-) strand; PAM type: NRG; PAM sequence: AGG
ccatgagtgaaagttccctg

SEQ ID NO: 102129 - DNA, 20 bp, Artificial Sequence
  Description of Artificial Sequence: Synthetic oligonucleotide
  Target: LAMA2; (-) strand; PAM type: NRG; PAM sequence: GAG
gccatgagtgaaagttccct

SEQ ID NO: 102130 - DNA, 20 bp, Artificial Sequence
  Description of Artificial Sequence: Synthetic oligonucleotide
  Target: LAMA2; (-) strand; PAM type: NRG; PAM sequence: AAG
ttgccttctgccatgagtga

SEQ ID NO: 102131 - DNA, 20 bp, Artificial Sequence
  Description of Artificial Sequence: Synthetic oligonucleotide
  Target: LAMA2; (-) strand; PAM type: NRG; PAM sequence: GAG
ccagctttgccttctgccat

SEQ ID NO: 102132 - DNA, 20 bp, Artificial Sequence
  Description of Artificial Sequence: Synthetic oligonucleotide
  Target: LAMA2; (-) strand; PAM type: NRG; PAM sequence: CAG
ctgtgtgaagatgcctgctc

SEQ ID NO: 102133 - DNA, 20 bp, Artificial Sequence
  Description of Artificial Sequence: Synthetic oligonucleotide
  Target: LAMA2; (-) strand; PAM type: NRG; PAM sequence: AAG
cctcctgctctgcctgtgtg

SEQ ID NO: 102134 - DNA, 20 bp, Artificial Sequence
  Description of Artificial Sequence: Synthetic oligonucleotide
  Target: LAMA2; (-) strand; PAM type: NRG; PAM sequence: CAG
ttaaaagtgtgtgccacctc

SEQ ID NO: 102135 - DNA, 20 bp, Artificial Sequence
  Description of Artificial Sequence: Synthetic oligonucleotide
  Target: LAMA2; (-) strand; PAM type: NRG; PAM sequence: AAG
cataagacctggttatttaa

SEQ ID NO: 102136 - DNA, 20 bp, Artificial Sequence
  Description of Artificial Sequence: Synthetic oligonucleotide
  Target: LAMA2; (-) strand; PAM type: NRG; PAM sequence: TGG
gacagagttctcataagacc

SEQ ID NO: 102137 - DNA, 20 bp, Artificial Sequence
  Description of Artificial Sequence: Synthetic oligonucleotide
  Target: LAMA2; (-) strand; PAM type: NRG; PAM sequence: AAG
tctcatgacagagttctcat

SEQ ID NO: 102138 - DNA, 20 bp, Artificial Sequence
  Description of Artificial Sequence: Synthetic oligonucleotide
  Target: LAMA2; (-) strand; PAM type: NRG; PAM sequence: GAG
ctagtgatgttctcatgaca

SEQ ID NO: 102139 - DNA, 20 bp, Artificial Sequence
  Description of Artificial Sequence: Synthetic oligonucleotide
  Target: LAMA2; (-) strand; PAM type: NRG; PAM sequence: CAG
ccctagtgatgttctcatga

SEQ ID NO: 102140 - DNA, 20 bp, Artificial Sequence
  Description of Artificial Sequence: Synthetic oligonucleotide
  Target: LAMA2; (-) strand; PAM type: NRG; PAM sequence: TAG
atggcttagcaccaccgccc

SEQ ID NO: 102141 - DNA, 20 bp, Artificial Sequence
  Description of Artificial Sequence: Synthetic oligonucleotide
  Target: LAMA2; (-) strand; PAM type: NRG; PAM sequence: TAG
ctggagtggttttaatggct

SEQ ID NO: 102142 - DNA, 20 bp, Artificial Sequence
  Description of Artificial Sequence: Synthetic oligonucleotide
  Target: LAMA2; (-) strand; PAM type: NRG; PAM sequence: TGG
aatcactggagtggttttaa

SEQ ID NO: 102143 - DNA, 20 bp, Artificial Sequence
  Description of Artificial Sequence: Synthetic oligonucleotide
  Target: LAMA2; (-) strand; PAM type: NRG; PAM sequence: TGG
gaggtattgaatcactggag

SEQ ID NO: 102144 - DNA, 20 bp, Artificial Sequence
  Description of Artificial Sequence: Synthetic oligonucleotide
  Target: LAMA2; (-) strand; PAM type: NRG; PAM sequence: GAG
tgggaggtattgaatcactg

SEQ ID NO: 102145 - DNA, 20 bp, Artificial Sequence
  Description of Artificial Sequence: Synthetic oligonucleotide
  Target: LAMA2; (-) strand; PAM type: NRG; PAM sequence: TGG
cgtgggaggtattgaatcac

SEQ ID NO: 102146 - DNA, 20 bp, Artificial Sequence
  Description of Artificial Sequence: Synthetic oligonucleotide
  Target: LAMA2; (-) strand; PAM type: NRG; PAM sequence: AGG
tggatatggggcctcgtggg

SEQ ID NO: 102147 - DNA, 20 bp, Artificial Sequence
  Description of Artificial Sequence: Synthetic oligonucleotide
  Target: LAMA2; (-) strand; PAM type: NRG; PAM sequence: GAG
ctggatatggggcctcgtgg

SEQ ID NO: 102148 - DNA, 20 bp, Artificial Sequence
  Description of Artificial Sequence: Synthetic oligonucleotide
  Target: LAMA2; (-) strand; PAM type: NRG; PAM sequence: GGG
tactggatatggggcctcgt

SEQ ID NO: 102149 - DNA, 20 bp, Artificial Sequence
  Description of Artificial Sequence: Synthetic oligonucleotide
  Target: LAMA2; (-) strand; PAM type: NRG; PAM sequence: TGG
atactggatatggggcctcg

SEQ ID NO: 102150 - DNA, 20 bp, Artificial Sequence
  Description of Artificial Sequence: Synthetic oligonucleotide
  Target: LAMA2; (-) strand; PAM type: NRG; PAM sequence: GGG
catccccaatactggatatg

SEQ ID NO: 102151 - DNA, 20 bp, Artificial Sequence
  Description of Artificial Sequence: Synthetic oligonucleotide
  Target: LAMA2; (-) strand; PAM type: NRG; PAM sequence: GGG
tcatccccaatactggatat

SEQ ID NO: 102152 - DNA, 20 bp, Artificial Sequence
  Description of Artificial Sequence: Synthetic oligonucleotide
  Target: LAMA2; (-) strand; PAM type: NRG; PAM sequence: TGG
gtcatccccaatactggata

SEQ ID NO: 102153 - DNA, 20 bp, Artificial Sequence
  Description of Artificial Sequence: Synthetic oligonucleotide
  Target: LAMA2; (-) strand; PAM type: NRG; PAM sequence: TGG
tgaaatgtcatccccaatac

SEQ ID NO: 102154 - DNA, 20 bp, Artificial Sequence
  Description of Artificial Sequence: Synthetic oligonucleotide
  Target: LAMA2; (-) strand; PAM type: NRG; PAM sequence: TGG
atattctaccagatatggtt

SEQ ID NO: 102155 - DNA, 20 bp, Artificial Sequence
  Description of Artificial Sequence: Synthetic oligonucleotide
  Target: LAMA2; (-) strand; PAM type: NRG; PAM sequence: TGG
tgctaatattctaccagata

SEQ ID NO: 102156 - DNA, 20 bp, Artificial Sequence
  Description of Artificial Sequence: Synthetic oligonucleotide
  Target: LAMA2; (-) strand; PAM type: NRG; PAM sequence: CAG
caagaatgctaatattctac

SEQ ID NO: 102157 - DNA, 20 bp, Artificial Sequence
  Description of Artificial Sequence: Synthetic oligonucleotide
  Target: LAMA2; (-) strand; PAM type: NRG; PAM sequence: AAG
actatattctttaagtagcc

SEQ ID NO: 102158 - DNA, 20 bp, Artificial Sequence
  Description of Artificial Sequence: Synthetic oligonucleotide
  Target: LAMA2; (-) strand; PAM type: NRG; PAM sequence: TAG
gaaaaactatattctttaag

SEQ ID NO: 102159 - DNA, 20 bp, Artificial Sequence
  Description of Artificial Sequence: Synthetic oligonucleotide
  Target: LAMA2; (-) strand; PAM type: NRG; PAM sequence: AAG
ctagaaaaactatattcttt

SEQ ID NO: 102160 - DNA, 20 bp, Artificial Sequence
  Description of Artificial Sequence: Synthetic oligonucleotide
  Target: LAMA2; (-) strand; PAM type: NRG; PAM sequence: TAG
gataaataattgctaaaggc

SEQ ID NO: 102161 - DNA, 20 bp, Artificial Sequence
  Description of Artificial Sequence: Synthetic oligonucleotide
  Target: LAMA2; (-) strand; PAM type: NRG; PAM sequence: AGG
tatagataaataattgctaa

SEQ ID NO: 102162 - DNA, 20 bp, Artificial Sequence
  Description of Artificial Sequence: Synthetic oligonucleotide
  Target: LAMA2; (-) strand; PAM type: NRG; PAM sequence: AAG
ttatagataaataattgcta

SEQ ID NO: 102163 - DNA, 20 bp, Artificial Sequence
  Description of Artificial Sequence: Synthetic oligonucleotide
  Target: LAMA2; (-) strand; PAM type: NRG; PAM sequence: TAG
attaacctctttcagtctta

SEQ ID NO: 102164 - DNA, 20 bp, Artificial Sequence
  Description of Artificial Sequence: Synthetic oligonucleotide
  Target: LAMA2; (-) strand; PAM type: NRG; PAM sequence: CAG
ctttgatgattaacctcttt

SEQ ID NO: 102165 - DNA, 20 bp, Artificial Sequence
  Description of Artificial Sequence: Synthetic oligonucleotide
  Target: LAMA2; (-) strand; PAM type: NRG; PAM sequence: CAG
ttaccacccatgattagatg

SEQ ID NO: 102166 - DNA, 20 bp, Artificial Sequence
  Description of Artificial Sequence: Synthetic oligonucleotide
  Target: LAMA2; (-) strand; PAM type: NRG; PAM sequence: TAG
agtctattaccacccatgat

SEQ ID NO: 102167 - DNA, 20 bp, Artificial Sequence
  Description of Artificial Sequence: Synthetic oligonucleotide
  Target: LAMA2; (-) strand; PAM type: NRG; PAM sequence: CAG
actgttcctctttatccctt

SEQ ID NO: 102168 - DNA, 20 bp, Artificial Sequence
  Description of Artificial Sequence: Synthetic oligonucleotide
  Target: LAMA2; (-) strand; PAM type: NRG; PAM sequence: TAG
aaaaataacttttctttcta

SEQ ID NO: 102169 - DNA, 20 bp, Artificial Sequence
  Description of Artificial Sequence: Synthetic oligonucleotide
  Target: LAMA2; (-) strand; PAM type: NRG; PAM sequence: AAG
cccccaaaaaataaaataaa

SEQ ID NO: 102170 - DNA, 20 bp, Artificial Sequence
  Description of Artificial Sequence: Synthetic oligonucleotide
  Target: LAMA2; (-) strand; PAM type: NRG; PAM sequence: GAG
tccagcctgggcgacagact

SEQ ID NO: 102171 - DNA, 20 bp, Artificial Sequence
  Description of Artificial Sequence: Synthetic oligonucleotide
  Target: LAMA2; (-) strand; PAM type: NRG; PAM sequence: CAG
ctgcactccagcctgggcga

SEQ ID NO: 102172 - DNA, 20 bp, Artificial Sequence
  Description of Artificial Sequence: Synthetic oligonucleotide
  Target: LAMA2; (-) strand; PAM type: NRG; PAM sequence: GGG
gcaccactgcactccagcct

SEQ ID NO: 102173 - DNA, 20 bp, Artificial Sequence
  Description of Artificial Sequence: Synthetic oligonucleotide
  Target: LAMA2; (-) strand; PAM type: NRG; PAM sequence: TGG
tgcaccactgcactccagcc

SEQ ID NO: 102174 - DNA, 20 bp, Artificial Sequence
  Description of Artificial Sequence: Synthetic oligonucleotide
  Target: LAMA2; (-) strand; PAM type: NRG; PAM sequence: CAG
aagattgcaccactgcactc

SEQ ID NO: 102175 - DNA, 20 bp, Artificial Sequence
  Description of Artificial Sequence: Synthetic oligonucleotide
  Target: LAMA2; (-) strand; PAM type: NRG; PAM sequence: AAG
ggcggaggttgcagtgagcc

SEQ ID NO: 102176 - DNA, 20 bp, Artificial Sequence
  Description of Artificial Sequence: Synthetic oligonucleotide
  Target: LAMA2; (-) strand; PAM type: NRG; PAM sequence: GAG
tgggaggcggaggttgcagt

SEQ ID NO: 102177 - DNA, 20 bp, Artificial Sequence
  Description of Artificial Sequence: Synthetic oligonucleotide
  Target: LAMA2; (-) strand; PAM type: NRG; PAM sequence: CAG
aaactgggaggcggaggttg

SEQ ID NO: 102178 - DNA, 20 bp, Artificial Sequence
  Description of Artificial Sequence: Synthetic oligonucleotide
  Target: LAMA2; (-) strand; PAM type: NRG; PAM sequence: AGG
cacttgaaactgggaggcgg

SEQ ID NO: 102179 - DNA, 20 bp, Artificial Sequence
  Description of Artificial Sequence: Synthetic oligonucleotide
  Target: LAMA2; (-) strand; PAM type: NRG; PAM sequence: GAG
tcacttgaaactgggaggcg

SEQ ID NO: 102180 - DNA, 20 bp, Artificial Sequence
  Description of Artificial Sequence: Synthetic oligonucleotide
  Target: LAMA2; (-) strand; PAM type: NRG; PAM sequence: CGG
aatcacttgaaactgggagg

SEQ ID NO: 102181 - DNA, 20 bp, Artificial Sequence
  Description of Artificial Sequence: Synthetic oligonucleotide
  Target: LAMA2; (-) strand; PAM type: NRG; PAM sequence: AGG
gagaatcacttgaaactggg

SEQ ID NO: 102182 - DNA, 20 bp, Artificial Sequence
  Description of Artificial Sequence: Synthetic oligonucleotide
  Target: LAMA2; (-) strand; PAM type: NRG; PAM sequence: GAG
ggagaatcacttgaaactgg

SEQ ID NO: 102183 - DNA, 20 bp, Artificial Sequence
  Description of Artificial Sequence: Synthetic oligonucleotide
  Target: LAMA2; (-) strand; PAM type: NRG; PAM sequence: GGG
caggagaatcacttgaaact

SEQ ID NO: 102184 - DNA, 20 bp, Artificial Sequence
  Description of Artificial Sequence: Synthetic oligonucleotide
  Target: LAMA2; (-) strand; PAM type: NRG; PAM sequence: TGG
gcaggagaatcacttgaaac

SEQ ID NO: 102185 - DNA, 20 bp, Artificial Sequence
  Description of Artificial Sequence: Synthetic oligonucleotide
  Target: LAMA2; (-) strand; PAM type: NRG; PAM sequence: GAG
tacccagaaggctgaggcag

SEQ ID NO: 102186 - DNA, 20 bp, Artificial Sequence
  Description of Artificial Sequence: Synthetic oligonucleotide
  Target: LAMA2; (-) strand; PAM type: NRG; PAM sequence: AGG
gctacccagaaggctgaggc

SEQ ID NO: 102187 - DNA, 20 bp, Artificial Sequence
  Description of Artificial Sequence: Synthetic oligonucleotide
  Target: LAMA2; (-) strand; PAM type: NRG; PAM sequence: CAG
agctacccagaaggctgagg

SEQ ID NO: 102188 - DNA, 20 bp, Artificial Sequence
  Description of Artificial Sequence: Synthetic oligonucleotide
  Target: LAMA2; (-) strand; PAM type: NRG; PAM sequence: AGG
ctcagctacccagaaggctg

SEQ ID NO: 102189 - DNA, 20 bp, Artificial Sequence
  Description of Artificial Sequence: Synthetic oligonucleotide
  Target: LAMA2; (-) strand; PAM type: NRG; PAM sequence: GAG
tctcagctacccagaaggct

SEQ ID NO: 102190 - DNA, 20 bp, Artificial Sequence
  Description of Artificial Sequence: Synthetic oligonucleotide
  Target: LAMA2; (-) strand; PAM type: NRG; PAM sequence: AGG
tgtagtctcagctacccaga

SEQ ID NO: 102191 - DNA, 20 bp, Artificial Sequence
  Description of Artificial Sequence: Synthetic oligonucleotide
  Target: LAMA2; (-) strand; PAM type: NRG; PAM sequence: AAG
ctgtagtctcagctacccag

SEQ ID NO: 102192 - DNA, 20 bp, Artificial Sequence
  Description of Artificial Sequence: Synthetic oligonucleotide
  Target: LAMA2; (-) strand; PAM type: NRG; PAM sequence: CAG
cccctgtagtctcagctacc

SEQ ID NO: 102193 - DNA, 20 bp, Artificial Sequence
  Description of Artificial Sequence: Synthetic oligonucleotide
  Target: LAMA2; (-) strand; PAM type: NRG; PAM sequence: CAG
gtggcgggcccctgtagtct

SEQ ID NO: 102194 - DNA, 20 bp, Artificial Sequence
  Description of Artificial Sequence: Synthetic oligonucleotide
  Target: LAMA2; (-) strand; PAM type: NRG; PAM sequence: TAG
ggcgtggtggcgggcccctg

SEQ ID NO: 102195 - DNA, 20 bp, Artificial Sequence
  Description of Artificial Sequence: Synthetic oligonucleotide
  Target: LAMA2; (-) strand; PAM type: NRG; PAM sequence: GGG
aattagccaggcgtggtggc

SEQ ID NO: 102196 - DNA, 20 bp, Artificial Sequence
  Description of Artificial Sequence: Synthetic oligonucleotide
  Target: LAMA2; (-) strand; PAM type: NRG; PAM sequence: CGG
aaattagccaggcgtggtgg

SEQ ID NO: 102197 - DNA, 20 bp, Artificial Sequence
  Description of Artificial Sequence: Synthetic oligonucleotide
  Target: LAMA2; (-) strand; PAM type: NRG; PAM sequence: TGG
caaaaattagccaggcgtgg

SEQ ID NO: 102198 - DNA, 20 bp, Artificial Sequence
  Description of Artificial Sequence: Synthetic oligonucleotide
  Target: LAMA2; (-) strand; PAM type: NRG; PAM sequence: TGG
atacaaaaattagccaggcg

SEQ ID NO: 102199 - DNA, 20 bp, Artificial Sequence
  Description of Artificial Sequence: Synthetic oligonucleotide
  Target: LAMA2; (-) strand; PAM type: NRG; PAM sequence: AGG
taaaaatacaaaaattagcc

SEQ ID NO: 102200 - DNA, 20 bp, Artificial Sequence
  Description of Artificial Sequence: Synthetic oligonucleotide
  Target: LAMA2; (-) strand; PAM type: NRG; PAM sequence: CAG
ctaaaaatacaaaaattagc

SEQ ID NO: 102201 - DNA, 20 bp, Artificial Sequence
  Description of Artificial Sequence: Synthetic oligonucleotide
  Target: LAMA2; (-) strand; PAM type: NRG; PAM sequence: TAG
tctactaaaaatacaaaaat

SEQ ID NO: 102202 - DNA, 20 bp, Artificial Sequence
  Description of Artificial Sequence: Synthetic oligonucleotide
  Target: LAMA2; (-) strand; PAM type: NRG; PAM sequence: TGG
caagaccagcctgaccaaca

SEQ ID NO: 102203 - DNA, 20 bp, Artificial Sequence
  Description of Artificial Sequence: Synthetic oligonucleotide
  Target: LAMA2; (-) strand; PAM type: NRG; PAM sequence: CAG
tgaggtcaggagttcaagac

SEQ ID NO: 102204 - DNA, 20 bp, Artificial Sequence
  Description of Artificial Sequence: Synthetic oligonucleotide
  Target: LAMA2; (-) strand; PAM type: NRG; PAM sequence: AAG
tcacctgaggtcaggagttc

SEQ ID NO: 102205 - DNA, 20 bp, Artificial Sequence
  Description of Artificial Sequence: Synthetic oligonucleotide
  Target: LAMA2; (-) strand; PAM type: NRG; PAM sequence: GAG
ggtggatcacctgaggtcag

SEQ ID NO: 102206 - DNA, 20 bp, Artificial Sequence
  Description of Artificial Sequence: Synthetic oligonucleotide
  Target: LAMA2; (-) strand; PAM type: NRG; PAM sequence: AGG
tgggtggatcacctgaggtc

SEQ ID NO: 102207 - DNA, 20 bp, Artificial Sequence
  Description of Artificial Sequence: Synthetic oligonucleotide
  Target: LAMA2; (-) strand; PAM type: NRG; PAM sequence: CAG
gtgggtggatcacctgaggt

SEQ ID NO: 102208 - DNA, 20 bp, Artificial Sequence
  Description of Artificial Sequence: Synthetic oligonucleotide
  Target: LAMA2; (-) strand; PAM type: NRG; PAM sequence: AGG
cgaggtgggtggatcacctg

SEQ ID NO: 102209 - DNA, 20 bp, Artificial Sequence
  Description of Artificial Sequence: Synthetic oligonucleotide
  Target: LAMA2; (-) strand; PAM type: NRG; PAM sequence: GAG
ccgaggtgggtggatcacct

SEQ ID NO: 102210 - DNA, 20 bp, Artificial Sequence
  Description of Artificial Sequence: Synthetic oligonucleotide
  Target: LAMA2; (-) strand; PAM type: NRG; PAM sequence: TGG
ctttgagaggccgaggtggg

SEQ ID NO: 102211 - DNA, 20 bp, Artificial Sequence
  Description of Artificial Sequence: Synthetic oligonucleotide
  Target: LAMA2; (-) strand; PAM type: NRG; PAM sequence: GGG
acactttgagaggccgaggt

SEQ ID NO: 102212 - DNA, 20 bp, Artificial Sequence
  Description of Artificial Sequence: Synthetic oligonucleotide
  Target: LAMA2; (-) strand; PAM type: NRG; PAM sequence: TGG
aacactttgagaggccgagg

SEQ ID NO: 102213 - DNA, 20 bp, Artificial Sequence
  Description of Artificial Sequence: Synthetic oligonucleotide
  Target: LAMA2; (-) strand; PAM type: NRG; PAM sequence: AGG
cccaacactttgagaggccg

SEQ ID NO: 102214 - DNA, 20 bp, Artificial Sequence
  Description of Artificial Sequence: Synthetic oligonucleotide
  Target: LAMA2; (-) strand; PAM type: NRG; PAM sequence: GAG
tcccaacactttgagaggcc

SEQ ID NO: 102215 - DNA, 20 bp, Artificial Sequence
  Description of Artificial Sequence: Synthetic oligonucleotide
  Target: LAMA2; (-) strand; PAM type: NRG; PAM sequence: AGG
tgtaatcccaacactttgag

SEQ ID NO: 102216 - DNA, 20 bp, Artificial Sequence
  Description of Artificial Sequence: Synthetic oligonucleotide
  Target: LAMA2; (-) strand; PAM type: NRG; PAM sequence: GAG
ctgtaatcccaacactttga

SEQ ID NO: 102217 - DNA, 20 bp, Artificial Sequence
  Description of Artificial Sequence: Synthetic oligonucleotide
  Target: LAMA2; (-) strand; PAM type: NRG; PAM sequence: GAG
gcctgtaatcccaacacttt

SEQ ID NO: 102218 - DNA, 20 bp, Artificial Sequence
  Description of Artificial Sequence: Synthetic oligonucleotide
  Target: LAMA2; (-) strand; PAM type: NRG; PAM sequence: TGG
ctaaagaaggccgggtgtgg

SEQ ID NO: 102219 - DNA, 20 bp, Artificial Sequence
  Description of Artificial Sequence: Synthetic oligonucleotide
  Target: LAMA2; (-) strand; PAM type: NRG; PAM sequence: TGG
agtctaaagaaggccgggtg

SEQ ID NO: 102220 - DNA, 20 bp, Artificial Sequence
  Description of Artificial Sequence: Synthetic oligonucleotide
  Target: LAMA2; (-) strand; PAM type: NRG; PAM sequence: GGG
aaaaaagtctaaagaaggcc

SEQ ID NO: 102221 - DNA, 20 bp, Artificial Sequence
  Description of Artificial Sequence: Synthetic oligonucleotide
  Target: LAMA2; (-) strand; PAM type: NRG; PAM sequence: CGG
aaaaaaagtctaaagaaggc

SEQ ID NO: 102222 - DNA, 20 bp, Artificial Sequence
  Description of Artificial Sequence: Synthetic oligonucleotide
  Target: LAMA2; (-) strand; PAM type: NRG; PAM sequence: AGG
aaaaaaaaaaagtctaaaga

SEQ ID NO: 102223 - DNA, 20 bp, Artificial Sequence
  Description of Artificial Sequence: Synthetic oligonucleotide
  Target: LAMA2; (-) strand; PAM type: NRG; PAM sequence: AAG
aaaaaaaaaaaagtctaaag

SEQ ID NO: 102224 - DNA, 20 bp, Artificial Sequence
  Description of Artificial Sequence: Synthetic oligonucleotide
  Target: LAMA2; (-) strand; PAM type: NRG; PAM sequence: AAG
ttaaaaaaaaaaaaagtcta

SEQ ID NO: 102225 - DNA, 20 bp, Artificial Sequence
  Description of Artificial Sequence: Synthetic oligonucleotide
  Target: LAMA2; (-) strand; PAM type: NRG; PAM sequence: AAG
agaataattaaaaaaaaaaa

SEQ ID NO: 102226 - DNA, 20 bp, Artificial Sequence
  Description of Artificial Sequence: Synthetic oligonucleotide
  Target: LAMA2; (-) strand; PAM type: NRG; PAM sequence: TAG
ttagcttggtatctattgag

SEQ ID NO: 102227 - DNA, 20 bp, Artificial Sequence
  Description of Artificial Sequence: Synthetic oligonucleotide
  Target: LAMA2; (-) strand; PAM type: NRG; PAM sequence: GAG
tttttagcttggtatctatt

SEQ ID NO: 102228 - DNA, 20 bp, Artificial Sequence
  Description of Artificial Sequence: Synthetic oligonucleotide
  Target: LAMA2; (-) strand; PAM type: NRG; PAM sequence: TGG
aagtatataaatttttagct

SEQ ID NO: 102229 - DNA, 20 bp, Artificial Sequence
  Description of Artificial Sequence: Synthetic oligonucleotide
  Target: LAMA2; (-) strand; PAM type: NRG; PAM sequence: TAG
tcaaaaagtatataaatttt

SEQ ID NO: 102230 - DNA, 20 bp, Artificial Sequence
  Description of Artificial Sequence: Synthetic oligonucleotide
  Target: LAMA2; (-) strand; PAM type: NRG; PAM sequence: AAG
ttatgtattacacattcaaa

SEQ ID NO: 102231 - DNA, 20 bp, Artificial Sequence
  Description of Artificial Sequence: Synthetic oligonucleotide
  Target: LAMA2; (-) strand; PAM type: NRG; PAM sequence: TAG
gattgcactggagaaagtca

SEQ ID NO: 102232 - DNA, 20 bp, Artificial Sequence
  Description of Artificial Sequence: Synthetic oligonucleotide
  Target: LAMA2; (-) strand; PAM type: NRG; PAM sequence: AAG
ccattagattgcactggaga

SEQ ID NO: 102233 - DNA, 20 bp, Artificial Sequence
  Description of Artificial Sequence: Synthetic oligonucleotide
  Target: LAMA2; (-) strand; PAM type: NRG; PAM sequence: GAG
tgctccattagattgcactg

SEQ ID NO: 102234 - DNA, 20 bp, Artificial Sequence
  Description of Artificial Sequence: Synthetic oligonucleotide
  Target: LAMA2; (-) strand; PAM type: NRG; PAM sequence: TGG
ggtgctccattagattgcac

SEQ ID NO: 102235 - DNA, 20 bp, Artificial Sequence
  Description of Artificial Sequence: Synthetic oligonucleotide
  Target: LAMA2; (-) strand; PAM type: NRG; PAM sequence: TAG
ctaaatgtgtggtgctccat

SEQ ID NO: 102236 - DNA, 20 bp, Artificial Sequence
  Description of Artificial Sequence: Synthetic oligonucleotide
  Target: LAMA2; (-) strand; PAM type: NRG; PAM sequence: TGG
tgctccagagtctaaatgtg

SEQ ID NO: 102237 - DNA, 20 bp, Artificial Sequence
  Description of Artificial Sequence: Synthetic oligonucleotide
  Target: LAMA2; (-) strand; PAM type: NRG; PAM sequence: GAG
agggaataaaacatgctcca

SEQ ID NO: 102238 - DNA, 20 bp, Artificial Sequence
  Description of Artificial Sequence: Synthetic oligonucleotide
  Target: LAMA2; (-) strand; PAM type: NRG; PAM sequence: CAG
acagggaataaaacatgctc

SEQ ID NO: 102239 - DNA, 20 bp, Artificial Sequence
  Description of Artificial Sequence: Synthetic oligonucleotide
  Target: LAMA2; (-) strand; PAM type: NRG; PAM sequence: GGG
tcgaaaggaacctgtccaca

SEQ ID NO: 102240 - DNA, 20 bp, Artificial Sequence
  Description of Artificial Sequence: Synthetic oligonucleotide
  Target: LAMA2; (-) strand; PAM type: NRG; PAM sequence: AGG
atcgaaaggaacctgtccac

SEQ ID NO: 102241 - DNA, 20 bp, Artificial Sequence
  Description of Artificial Sequence: Synthetic oligonucleotide
  Target: LAMA2; (-) strand; PAM type: NRG; PAM sequence: CAG
aatcgaaaggaacctgtcca

SEQ ID NO: 102242 - DNA, 20 bp, Artificial Sequence
  Description of Artificial Sequence: Synthetic oligonucleotide
  Target: LAMA2; (-) strand; PAM type: NRG; PAM sequence: AGG
tccctacatgagcaatcgaa

SEQ ID NO: 102243 - DNA, 20 bp, Artificial Sequence
  Description of Artificial Sequence: Synthetic oligonucleotide
  Target: LAMA2; (-) strand; PAM type: NRG; PAM sequence: AAG
atccctacatgagcaatcga

SEQ ID NO: 102244 - DNA, 20 bp, Artificial Sequence
  Description of Artificial Sequence: Synthetic oligonucleotide
  Target: LAMA2; (-) strand; PAM type: NRG; PAM sequence: GAG
taccccctaaatccctacat

SEQ ID NO: 102245 - DNA, 20 bp, Artificial Sequence
  Description of Artificial Sequence: Synthetic oligonucleotide
  Target: LAMA2; (-) strand; PAM type: NRG; PAM sequence: AAG
ggcatagaatataacattaa

SEQ ID NO: 102246 - DNA, 20 bp, Artificial Sequence
  Description of Artificial Sequence: Synthetic oligonucleotide
  Target: LAMA2; (-) strand; PAM type: NRG; PAM sequence: TAG
tgaagatttcctttaaggca

SEQ ID NO: 102247 - DNA, 20 bp, Artificial Sequence
  Description of Artificial Sequence: Synthetic oligonucleotide
  Target: LAMA2; (-) strand; PAM type: NRG; PAM sequence: AGG
agtattgaagatttccttta

SEQ ID NO: 102248 - DNA, 20 bp, Artificial Sequence
  Description of Artificial Sequence: Synthetic oligonucleotide
  Target: LAMA2; (-) strand; PAM type: NRG; PAM sequence: AAG
aagtattgaagatttccttt

SEQ ID NO: 102249 - DNA, 20 bp, Artificial Sequence
  Description of Artificial Sequence: Synthetic oligonucleotide
  Target: LAMA2; (-) strand; PAM type: NRG; PAM sequence: AAG
agtgtattgcacaagtattg

SEQ ID NO: 102250 - DNA, 20 bp, Artificial Sequence
  Description of Artificial Sequence: Synthetic oligonucleotide
  Target: LAMA2; (-) strand; PAM type: NRG; PAM sequence: AAG
ggagaaaaagtgtattgcac

SEQ ID NO: 102251 - DNA, 20 bp, Artificial Sequence
  Description of Artificial Sequence: Synthetic oligonucleotide
  Target: LAMA2; (-) strand; PAM type: NRG; PAM sequence: AAG
caaatagatttggggagaaa

SEQ ID NO: 102252 - DNA, 20 bp, Artificial Sequence
  Description of Artificial Sequence: Synthetic oligonucleotide
  Target: LAMA2; (-) strand; PAM type: NRG; PAM sequence: GAG
gaggagcaaatagatttggg

SEQ ID NO: 102253 - DNA, 20 bp, Artificial Sequence
  Description of Artificial Sequence: Synthetic oligonucleotide
  Target: LAMA2; (-) strand; PAM type: NRG; PAM sequence: GGG
aggaggagcaaatagatttg

SEQ ID NO: 102254 - DNA, 20 bp, Artificial Sequence
  Description of Artificial Sequence: Synthetic oligonucleotide
  Target: LAMA2; (-) strand; PAM type: NRG; PAM sequence: GGG
gaggaggagcaaatagattt

SEQ ID NO: 102255 - DNA, 20 bp, Artificial Sequence
  Description of Artificial Sequence: Synthetic oligonucleotide
  Target: LAMA2; (-) strand; PAM type: NRG; PAM sequence: TGG
agaggaggagcaaatagatt

SEQ ID NO: 102256 - DNA, 20 bp, Artificial Sequence
  Description of Artificial Sequence: Synthetic oligonucleotide
  Target: LAMA2; (-) strand; PAM type: NRG; PAM sequence: TAG
gaccaaagaggaggagcaaa

SEQ ID NO: 102257 - DNA, 20 bp, Artificial Sequence
  Description of Artificial Sequence: Synthetic oligonucleotide
  Target: LAMA2; (-) strand; PAM type: NRG; PAM sequence: GAG
actgagggaccaaagaggag

SEQ ID NO: 102258 - DNA, 20 bp, Artificial Sequence
  Description of Artificial Sequence: Synthetic oligonucleotide
  Target: LAMA2; (-) strand; PAM type: NRG; PAM sequence: AGG
aaactgagggaccaaagagg

SEQ ID NO: 102259 - DNA, 20 bp, Artificial Sequence
  Description of Artificial Sequence: Synthetic oligonucleotide
  Target: LAMA2; (-) strand; PAM type: NRG; PAM sequence: GAG
taaactgagggaccaaagag

SEQ ID NO: 102260 - DNA, 20 bp, Artificial Sequence
  Description of Artificial Sequence: Synthetic oligonucleotide
  Target: LAMA2; (-) strand; PAM type: NRG; PAM sequence: AGG
tataaactgagggaccaaag

SEQ ID NO: 102261 - DNA, 20 bp, Artificial Sequence
  Description of Artificial Sequence: Synthetic oligonucleotide
  Target: LAMA2; (-) strand; PAM type: NRG; PAM sequence: GAG
atataaactgagggaccaaa

SEQ ID NO: 102262 - DNA, 20 bp, Artificial Sequence
  Description of Artificial Sequence: Synthetic oligonucleotide
  Target: LAMA2; (-) strand; PAM type: NRG; PAM sequence: AAG
taatataaactgagggacca

SEQ ID NO: 102263 - DNA, 20 bp, Artificial Sequence
  Description of Artificial Sequence: Synthetic oligonucleotide
  Target: LAMA2; (-) strand; PAM type: NRG; PAM sequence: GGG
gaggcgataatataaactga

SEQ ID NO: 102264 - DNA, 20 bp, Artificial Sequence
  Description of Artificial Sequence: Synthetic oligonucleotide
  Target: LAMA2; (-) strand; PAM type: NRG; PAM sequence: AGG
agaggcgataatataaactg

SEQ ID NO: 102265 - DNA, 20 bp, Artificial Sequence
  Description of Artificial Sequence: Synthetic oligonucleotide
  Target: LAMA2; (-) strand; PAM type: NRG; PAM sequence: GAG
tagaggcgataatataaact

SEQ ID NO: 102266 - DNA, 20 bp, Artificial Sequence
  Description of Artificial Sequence: Synthetic oligonucleotide
  Target: LAMA2; (-) strand; PAM type: NRG; PAM sequence: AGG
tcgcccagaacctgaaatag

SEQ ID NO: 102267 - DNA, 20 bp, Artificial Sequence
  Description of Artificial Sequence: Synthetic oligonucleotide
  Target: LAMA2; (-) strand; PAM type: NRG; PAM sequence: GAG
gtcgcccagaacctgaaata

SEQ ID NO: 102268 - DNA, 20 bp, Artificial Sequence
  Description of Artificial Sequence: Synthetic oligonucleotide
  Target: LAMA2; (-) strand; PAM type: NRG; PAM sequence: TAG
atgtcgcccagaacctgaaa

SEQ ID NO: 102269 - DNA, 20 bp, Artificial Sequence
  Description of Artificial Sequence: Synthetic oligonucleotide
  Target: LAMA2; (-) strand; PAM type: NRG; PAM sequence: CAG
gaacagatatgcatgtcgcc

SEQ ID NO: 102270 - DNA, 20 bp, Artificial Sequence
  Description of Artificial Sequence: Synthetic oligonucleotide
  Target: LAMA2; (-) strand; PAM type: NRG; PAM sequence: CAG
taagaacaacaacaaaagaa

SEQ ID NO: 102271 - DNA, 20 bp, Artificial Sequence
  Description of Artificial Sequence: Synthetic oligonucleotide
  Target: LAMA2; (-) strand; PAM type: NRG; PAM sequence: AAG
aaagataagaacaacaacaa

SEQ ID NO: 102272 - DNA, 20 bp, Artificial Sequence
  Description of Artificial Sequence: Synthetic oligonucleotide
  Target: LAMA2; (-) strand; PAM type: NRG; PAM sequence: AAG
gatgatggttgaggaaagat

SEQ ID NO: 102273 - DNA, 20 bp, Artificial Sequence
  Description of Artificial Sequence: Synthetic oligonucleotide
  Target: LAMA2; (-) strand; PAM type: NRG; PAM sequence: AAG
aaatggatgatggttgagga

SEQ ID NO: 102274 - DNA, 20 bp, Artificial Sequence
  Description of Artificial Sequence: Synthetic oligonucleotide
  Target: LAMA2; (-) strand; PAM type: NRG; PAM sequence: AGG
tatcaaatggatgatggttg

SEQ ID NO: 102275 - DNA, 20 bp, Artificial Sequence
  Description of Artificial Sequence: Synthetic oligonucleotide
  Target: LAMA2; (-) strand; PAM type: NRG; PAM sequence: GAG
ctatcaaatggatgatggtt

SEQ ID NO: 102276 - DNA, 20 bp, Artificial Sequence
  Description of Artificial Sequence: Synthetic oligonucleotide
  Target: LAMA2; (-) strand; PAM type: NRG; PAM sequence: TGG
taatgctatcaaatggatga

SEQ ID NO: 102277 - DNA, 20 bp, Artificial Sequence
  Description of Artificial Sequence: Synthetic oligonucleotide
  Target: LAMA2; (-) strand; PAM type: NRG; PAM sequence: TGG
agaatattaatgctatcaaa

SEQ ID NO: 102278 - DNA, 20 bp, Artificial Sequence
  Description of Artificial Sequence: Synthetic oligonucleotide
  Target: LAMA2; (-) strand; PAM type: NRG; PAM sequence: CAG
gaagatgaaactactcatct

SEQ ID NO: 102279 - DNA, 20 bp, Artificial Sequence
  Description of Artificial Sequence: Synthetic oligonucleotide
  Target: LAMA2; (-) strand; PAM type: NRG; PAM sequence: AAG
gtccaagaataattccatgg

SEQ ID NO: 102280 - DNA, 20 bp, Artificial Sequence
  Description of Artificial Sequence: Synthetic oligonucleotide
  Target: LAMA2; (-) strand; PAM type: NRG; PAM sequence: TGG
atggtccaagaataattcca

SEQ ID NO: 102281 - DNA, 20 bp, Artificial Sequence
  Description of Artificial Sequence: Synthetic oligonucleotide
  Target: LAMA2; (-) strand; PAM type: NRG; PAM sequence: AAG
tatgaaatattttatggtcc

SEQ ID NO: 102282 - DNA, 20 bp, Artificial Sequence
  Description of Artificial Sequence: Synthetic oligonucleotide
  Target: LAMA2; (-) strand; PAM type: NRG; PAM sequence: TGG
ttcagctatgaaatatttta

SEQ ID NO: 102283 - DNA, 20 bp, Artificial Sequence
  Description of Artificial Sequence: Synthetic oligonucleotide
  Target: LAMA2; (-) strand; PAM type: NRG; PAM sequence: CAG
aggcagatgttcaaagaatt

SEQ ID NO: 102284 - DNA, 20 bp, Artificial Sequence
  Description of Artificial Sequence: Synthetic oligonucleotide
  Target: LAMA2; (-) strand; PAM type: NRG; PAM sequence: AAG
acatcccaggcagatgttca

SEQ ID NO: 102285 - DNA, 20 bp, Artificial Sequence
  Description of Artificial Sequence: Synthetic oligonucleotide
  Target: LAMA2; (-) strand; PAM type: NRG; PAM sequence: CAG
cttctgctaaacatcccagg

SEQ ID NO: 102286 - DNA, 20 bp, Artificial Sequence
  Description of Artificial Sequence: Synthetic oligonucleotide
  Target: LAMA2; (-) strand; PAM type: NRG; PAM sequence: AGG
ttacttctgctaaacatccc

SEQ ID NO: 102287 - DNA, 20 bp, Artificial Sequence
  Description of Artificial Sequence: Synthetic oligonucleotide
  Target: LAMA2; (-) strand; PAM type: NRG; PAM sequence: CAG
gttacttctgctaaacatcc

SEQ ID NO: 102288 - DNA, 20 bp, Artificial Sequence
  Description of Artificial Sequence: Synthetic oligonucleotide
  Target: LAMA2; (-) strand; PAM type: NRG; PAM sequence: TAG
gaaagagaagtgacaaagag

SEQ ID NO: 102289 - DNA, 20 bp, Artificial Sequence
  Description of Artificial Sequence: Synthetic oligonucleotide
  Target: LAMA2; (-) strand; PAM type: NRG; PAM sequence: GAG
tgtgaaagagaagtgacaaa

SEQ ID NO: 102290 - DNA, 20 bp, Artificial Sequence
  Description of Artificial Sequence: Synthetic oligonucleotide
  Target: LAMA2; (-) strand; PAM type: NRG; PAM sequence: AAG
actgtgaaagagaagtgaca

SEQ ID NO: 102291 - DNA, 20 bp, Artificial Sequence
  Description of Artificial Sequence: Synthetic oligonucleotide
  Target: LAMA2; (-) strand; PAM type: NRG; PAM sequence: AAG
ctccacaaactgtgaaagag

SEQ ID NO: 102292 - DNA, 20 bp, Artificial Sequence
  Description of Artificial Sequence: Synthetic oligonucleotide
  Target: LAMA2; (-) strand; PAM type: NRG; PAM sequence: GAG
catctccacaaactgtgaaa

SEQ ID NO: 102293 - DNA, 20 bp, Artificial Sequence
  Description of Artificial Sequence: Synthetic oligonucleotide
  Target: LAMA2; (-) strand; PAM type: NRG; PAM sequence: AAG
ctcatctccacaaactgtga

SEQ ID NO: 102294 - DNA, 20 bp, Artificial Sequence
  Description of Artificial Sequence: Synthetic oligonucleotide
  Target: LAMA2; (-) strand; PAM type: NRG; PAM sequence: CAG
caagtcaccgagaagaaggc

SEQ ID NO: 102295 - DNA, 20 bp, Artificial Sequence
  Description of Artificial Sequence: Synthetic oligonucleotide
  Target: LAMA2; (-) strand; PAM type: NRG; PAM sequence: AGG
gagccaagtcaccgagaaga

SEQ ID NO: 102296 - DNA, 20 bp, Artificial Sequence
  Description of Artificial Sequence: Synthetic oligonucleotide
  Target: LAMA2; (-) strand; PAM type: NRG; PAM sequence: AAG
cgagccaagtcaccgagaag

SEQ ID NO: 102297 - DNA, 20 bp, Artificial Sequence
  Description of Artificial Sequence: Synthetic oligonucleotide
  Target: LAMA2; (-) strand; PAM type: NRG; PAM sequence: AAG
aggcgagccaagtcaccgag

SEQ ID NO: 102298 - DNA, 20 bp, Artificial Sequence
  Description of Artificial Sequence: Synthetic oligonucleotide
  Target: LAMA2; (-) strand; PAM type: NRG; PAM sequence: GAG
tccaggcgagccaagtcacc

SEQ ID NO: 102299 - DNA, 20 bp, Artificial Sequence
  Description of Artificial Sequence: Synthetic oligonucleotide
  Target: LAMA2; (-) strand; PAM type: NRG; PAM sequence: AAG
ccatctgctccaggcgagcc

SEQ ID NO: 102300 - DNA, 20 bp, Artificial Sequence
  Description of Artificial Sequence: Synthetic oligonucleotide
  Target: LAMA2; (-) strand; PAM type: NRG; PAM sequence: GAG
catgaccatctgctccaggc

SEQ ID NO: 102301 - DNA, 20 bp, Artificial Sequence
  Description of Artificial Sequence: Synthetic oligonucleotide
  Target: LAMA2; (-) strand; PAM type: NRG; PAM sequence: AGG
tgctcatgaccatctgctcc

SEQ ID NO: 102302 - DNA, 20 bp, Artificial Sequence
  Description of Artificial Sequence: Synthetic oligonucleotide
  Target: LAMA2; (-) strand; PAM type: NRG; PAM sequence: CAG
atgctcatgaccatctgctc

SEQ ID NO: 102303 - DNA, 20 bp, Artificial Sequence
  Description of Artificial Sequence: Synthetic oligonucleotide
  Target: LAMA2; (-) strand; PAM type: NRG; PAM sequence: AGG
gcgcaggcagcggaccagtg

SEQ ID NO: 102304 - DNA, 20 bp, Artificial Sequence
  Description of Artificial Sequence: Synthetic oligonucleotide
  Target: LAMA2; (-) strand; PAM type: NRG; PAM sequence: GAG
ggcgcaggcagcggaccagt

SEQ ID NO: 102305 - DNA, 20 bp, Artificial Sequence
  Description of Artificial Sequence: Synthetic oligonucleotide
  Target: LAMA2; (-) strand; PAM type: NRG; PAM sequence: CAG
atatggcgcaggcagcggac

SEQ ID NO: 102306 - DNA, 20 bp, Artificial Sequence
  Description of Artificial Sequence: Synthetic oligonucleotide
  Target: LAMA2; (-) strand; PAM type: NRG; PAM sequence: CGG
attttatatggcgcaggcag

SEQ ID NO: 102307 - DNA, 20 bp, Artificial Sequence
  Description of Artificial Sequence: Synthetic oligonucleotide
  Target: LAMA2; (-) strand; PAM type: NRG; PAM sequence: CAG
agcattttatatggcgcagg

SEQ ID NO: 102308 - DNA, 20 bp, Artificial Sequence
  Description of Artificial Sequence: Synthetic oligonucleotide
  Target: LAMA2; (-) strand; PAM type: NRG; PAM sequence: AGG
tacagcattttatatggcgc

SEQ ID NO: 102309 - DNA, 20 bp, Artificial Sequence
  Description of Artificial Sequence: Synthetic oligonucleotide
  Target: LAMA2; (-) strand; PAM type: NRG; PAM sequence: CAG
atacagcattttatatggcg

SEQ ID NO: 102310 - DNA, 20 bp, Artificial Sequence
  Description of Artificial Sequence: Synthetic oligonucleotide
  Target: LAMA2; (-) strand; PAM type: NRG; PAM sequence: TGG
agaccatacagcattttata

SEQ ID NO: 102311 - DNA, 20 bp, Artificial Sequence
  Description of Artificial Sequence: Synthetic oligonucleotide
  Target: LAMA2; (-) strand; PAM type: NRG; PAM sequence: CAG
gtcatattttcaagaccata

SEQ ID NO: 102312 - DNA, 20 bp, Artificial Sequence
  Description of Artificial Sequence: Synthetic oligonucleotide
  Target: LAMA2; (-) strand; PAM type: NRG; PAM sequence: AAG
agctcctgagtcatattttc

SEQ ID NO: 102313 - DNA, 20 bp, Artificial Sequence
  Description of Artificial Sequence: Synthetic oligonucleotide
  Target: LAMA2; (-) strand; PAM type: NRG; PAM sequence: GAG
ccaacctacctttagctcct

SEQ ID NO: 102314 - DNA, 20 bp, Artificial Sequence
  Description of Artificial Sequence: Synthetic oligonucleotide
  Target: LAMA2; (-) strand; PAM type: NRG; PAM sequence: TAG
tgactgcaccaacctacctt

SEQ ID NO: 102315 - DNA, 20 bp, Artificial Sequence
  Description of Artificial Sequence: Synthetic oligonucleotide
  Target: LAMA2; (-) strand; PAM type: NRG; PAM sequence: TGG
agcttctgtcaccttgtccc

SEQ ID NO: 102316 - DNA, 20 bp, Artificial Sequence
  Description of Artificial Sequence: Synthetic oligonucleotide
  Target: LAMA2; (-) strand; PAM type: NRG; PAM sequence: AAG
tacagccaataccgcttgtg

SEQ ID NO: 102317 - DNA, 20 bp, Artificial Sequence
  Description of Artificial Sequence: Synthetic oligonucleotide
  Target: LAMA2; (-) strand; PAM type: NRG; PAM sequence: CAG
ggaagaacatttaccaatta

SEQ ID NO: 102318 - DNA, 20 bp, Artificial Sequence
  Description of Artificial Sequence: Synthetic oligonucleotide
  Target: LAMA2; (-) strand; PAM type: NRG; PAM sequence: AAG
ccttgatttggggctgtggg

SEQ ID NO: 102319 - DNA, 20 bp, Artificial Sequence
  Description of Artificial Sequence: Synthetic oligonucleotide
  Target: LAMA2; (-) strand; PAM type: NRG; PAM sequence: GGG
gtcccttgatttggggctgt

SEQ ID NO: 102320 - DNA, 20 bp, Artificial Sequence
  Description of Artificial Sequence: Synthetic oligonucleotide
  Target: LAMA2; (-) strand; PAM type: NRG; PAM sequence: TGG
tgtcccttgatttggggctg

SEQ ID NO: 102321 - DNA, 20 bp, Artificial Sequence
  Description of Artificial Sequence: Synthetic oligonucleotide
  Target: LAMA2; (-) strand; PAM type: NRG; PAM sequence: GGG
cagttgtgtcccttgatttg

SEQ ID NO: 102322 - DNA, 20 bp, Artificial Sequence
  Description of Artificial Sequence: Synthetic oligonucleotide
  Target: LAMA2; (-) strand; PAM type: NRG; PAM sequence: GGG
acagttgtgtcccttgattt

SEQ ID NO: 102323 - DNA, 20 bp, Artificial Sequence
  Description of Artificial Sequence: Synthetic oligonucleotide
  Target: LAMA2; (-) strand; PAM type: NRG; PAM sequence: TGG
aacagttgtgtcccttgatt

SEQ ID NO: 102324 - DNA, 20 bp, Artificial Sequence
  Description of Artificial Sequence: Synthetic oligonucleotide
  Target: LAMA2; (-) strand; PAM type: NRG; PAM sequence: CAG
aagtctctgaatttccctaa

SEQ ID NO: 102325 - DNA, 20 bp, Artificial Sequence
  Description of Artificial Sequence: Synthetic oligonucleotide
  Target: LAMA2; (-) strand; PAM type: NRG; PAM sequence: AAG
ttgaaaaacactggttaaga

SEQ ID NO: 102326 - DNA, 20 bp, Artificial Sequence
  Description of Artificial Sequence: Synthetic oligonucleotide
  Target: LAMA2; (-) strand; PAM type: NRG; PAM sequence: AAG
gagtttgaaaaacactggtt

SEQ ID NO: 102327 - DNA, 20 bp, Artificial Sequence
  Description of Artificial Sequence: Synthetic oligonucleotide
  Target: LAMA2; (-) strand; PAM type: NRG; PAM sequence: TGG
ttcttgagtttgaaaaacac

SEQ ID NO: 102328 - DNA, 20 bp, Artificial Sequence
  Description of Artificial Sequence: Synthetic oligonucleotide
  Target: LAMA2; (-) strand; PAM type: NRG; PAM sequence: GAG
atctgtatattatagttctt

SEQ ID NO: 102329 - DNA, 20 bp, Artificial Sequence
  Description of Artificial Sequence: Synthetic oligonucleotide
  Target: LAMA2; (-) strand; PAM type: NRG; PAM sequence: TAG
taatagaaatctgtatatta

SEQ ID NO: 102330 - DNA, 20 bp, Artificial Sequence
  Description of Artificial Sequence: Synthetic oligonucleotide
  Target: LAMA2; (-) strand; PAM type: NRG; PAM sequence: TAG
atgagactcttttcccttaa

SEQ ID NO: 102331 - DNA, 20 bp, Artificial Sequence
  Description of Artificial Sequence: Synthetic oligonucleotide
  Target: LAMA2; (-) strand; PAM type: NRG; PAM sequence: GAG
ccagacactggggggtacat

SEQ ID NO: 102332 - DNA, 20 bp, Artificial Sequence
  Description of Artificial Sequence: Synthetic oligonucleotide
  Target: LAMA2; (-) strand; PAM type: NRG; PAM sequence: GGG
gatttaggccagacactggg

SEQ ID NO: 102333 - DNA, 20 bp, Artificial Sequence
  Description of Artificial Sequence: Synthetic oligonucleotide
  Target: LAMA2; (-) strand; PAM type: NRG; PAM sequence: GGG
tgatttaggccagacactgg

SEQ ID NO: 102334 - DNA, 20 bp, Artificial Sequence
  Description of Artificial Sequence: Synthetic oligonucleotide
  Target: LAMA2; (-) strand; PAM type: NRG; PAM sequence: GGG
ctgatttaggccagacactg

SEQ ID NO: 102335 - DNA, 20 bp, Artificial Sequence
  Description of Artificial Sequence: Synthetic oligonucleotide
  Target: LAMA2; (-) strand; PAM type: NRG; PAM sequence: GGG
actgatttaggccagacact

SEQ ID NO: 102336 - DNA, 20 bp, Artificial Sequence
  Description of Artificial Sequence: Synthetic oligonucleotide
  Target: LAMA2; (-) strand; PAM type: NRG; PAM sequence: TGG
aactgatttaggccagacac

SEQ ID NO: 102337 - DNA, 20 bp, Artificial Sequence
  Description of Artificial Sequence: Synthetic oligonucleotide
  Target: LAMA2; (-) strand; PAM type: NRG; PAM sequence: CAG
ataataaaactgatttaggc

SEQ ID NO: 102338 - DNA, 20 bp, Artificial Sequence
  Description of Artificial Sequence: Synthetic oligonucleotide
  Target: LAMA2; (-) strand; PAM type: NRG; PAM sequence: AGG
tgacataataaaactgattt

SEQ ID NO: 102339 - DNA, 20 bp, Artificial Sequence
  Description of Artificial Sequence: Synthetic oligonucleotide
  Target: LAMA2; (-) strand; PAM type: NRG; PAM sequence: TAG
gtgacataataaaactgatt

SEQ ID NO: 102340 - DNA, 20 bp, Artificial Sequence
  Description of Artificial Sequence: Synthetic oligonucleotide
  Target: LAMA2; (-) strand; PAM type: NRG; PAM sequence: AAG
ttttatgtttgcacatattt

SEQ ID NO: 102341 - DNA, 20 bp, Artificial Sequence
  Description of Artificial Sequence: Synthetic oligonucleotide
  Target: LAMA2; (-) strand; PAM type: NRG; PAM sequence: GAG
tatagagctataagtataaa

SEQ ID NO: 102342 - DNA, 20 bp, Artificial Sequence
  Description of Artificial Sequence: Synthetic oligonucleotide
  Target: LAMA2; (-) strand; PAM type: NRG; PAM sequence: AAG
tttatagagctataagtata

SEQ ID NO: 102343 - DNA, 20 bp, Artificial Sequence
  Description of Artificial Sequence: Synthetic oligonucleotide
  Target: LAMA2; (-) strand; PAM type: NRG; PAM sequence: AAG
ttttaattttatagagctat

SEQ ID NO: 102344 - DNA, 20 bp, Artificial Sequence
  Description of Artificial Sequence: Synthetic oligonucleotide
  Target: LAMA2; (-) strand; PAM type: NRG; PAM sequence: GAG
taatttgttttaattttata

SEQ ID NO: 102345 - DNA, 20 bp, Artificial Sequence
  Description of Artificial Sequence: Synthetic oligonucleotide
  Target: LAMA2; (-) strand; PAM type: NRG; PAM sequence: TAG
attaatttgttttaatttta

SEQ ID NO: 102346 - DNA, 20 bp, Artificial Sequence
  Description of Artificial Sequence: Synthetic oligonucleotide
  Target: LAMA2; (-) strand; PAM type: NRG; PAM sequence: AGG
tgaattttattggttttgta

SEQ ID NO: 102347 - DNA, 20 bp, Artificial Sequence
  Description of Artificial Sequence: Synthetic oligonucleotide
  Target: LAMA2; (-) strand; PAM type: NRG; PAM sequence: AAG
ttgaattttattggttttgt

SEQ ID NO: 102348 - DNA, 20 bp, Artificial Sequence
  Description of Artificial Sequence: Synthetic oligonucleotide
  Target: LAMA2; (-) strand; PAM type: NRG; PAM sequence: TGG
gtttttaatttgaattttat

SEQ ID NO: 102349 - DNA, 20 bp, Artificial Sequence
  Description of Artificial Sequence: Synthetic oligonucleotide
  Target: LAMA2; (-) strand; PAM type: NRG; PAM sequence: CAG
tgcaagcagcaatttccatt

SEQ ID NO: 102350 - DNA, 20 bp, Artificial Sequence
  Description of Artificial Sequence: Synthetic oligonucleotide
  Target: LAMA2; (-) strand; PAM type: NRG; PAM sequence: CAG
tatcctattcttgttgcaag

SEQ ID NO: 102351 - DNA, 20 bp, Artificial Sequence
  Description of Artificial Sequence: Synthetic oligonucleotide
  Target: LAMA2; (-) strand; PAM type: NRG; PAM sequence: AAG
caatatcctattcttgttgc

SEQ ID NO: 102352 - DNA, 20 bp, Artificial Sequence
  Description of Artificial Sequence: Synthetic oligonucleotide
  Target: LAMA2; (-) strand; PAM type: NRG; PAM sequence: TAG
gtggaagaactgtgtgaaaa

SEQ ID NO: 102353 - DNA, 20 bp, Artificial Sequence
  Description of Artificial Sequence: Synthetic oligonucleotide
  Target: LAMA2; (-) strand; PAM type: NRG; PAM sequence: AAG
taccacatcatctctggtgg

SEQ ID NO: 102354 - DNA, 20 bp, Artificial Sequence
  Description of Artificial Sequence: Synthetic oligonucleotide
  Target: LAMA2; (-) strand; PAM type: NRG; PAM sequence: TGG
agttaccacatcatctctgg

SEQ ID NO: 102355 - DNA, 20 bp, Artificial Sequence
  Description of Artificial Sequence: Synthetic oligonucleotide
  Target: LAMA2; (-) strand; PAM type: NRG; PAM sequence: TGG
atgagttaccacatcatctc

SEQ ID NO: 102356 - DNA, 20 bp, Artificial Sequence
  Description of Artificial Sequence: Synthetic oligonucleotide
  Target: LAMA2; (-) strand; PAM type: NRG; PAM sequence: GAG
tgtggtaaggtaggagaaat

SEQ ID NO: 102357 - DNA, 20 bp, Artificial Sequence
  Description of Artificial Sequence: Synthetic oligonucleotide
  Target: LAMA2; (-) strand; PAM type: NRG; PAM sequence: GAG
gttcaaatgtggtaaggtag

SEQ ID NO: 102358 - DNA, 20 bp, Artificial Sequence
  Description of Artificial Sequence: Synthetic oligonucleotide
  Target: LAMA2; (-) strand; PAM type: NRG; PAM sequence: AGG
tggttcaaatgtggtaaggt

SEQ ID NO: 102359 - DNA, 20 bp, Artificial Sequence
  Description of Artificial Sequence: Synthetic oligonucleotide
  Target: LAMA2; (-) strand; PAM type: NRG; PAM sequence: TAG
ctggttcaaatgtggtaagg

SEQ ID NO: 102360 - DNA, 20 bp, Artificial Sequence
  Description of Artificial Sequence: Synthetic oligonucleotide
  Target: LAMA2; (-) strand; PAM type: NRG; PAM sequence: AGG
tctctggttcaaatgtggta

SEQ ID NO: 102361 - DNA, 20 bp, Artificial Sequence
  Description of Artificial Sequence: Synthetic oligonucleotide
  Target: LAMA2; (-) strand; PAM type: NRG; PAM sequence: AAG
ctctctggttcaaatgtggt

SEQ ID NO: 102362 - DNA, 20 bp, Artificial Sequence
  Description of Artificial Sequence: Synthetic oligonucleotide
  Target: LAMA2; (-) strand; PAM type: NRG; PAM sequence: TGG
ggggctctctggttcaaatg

SEQ ID NO: 102363 - DNA, 20 bp, Artificial Sequence
  Description of Artificial Sequence: Synthetic oligonucleotide
  Target: LAMA2; (-) strand; PAM type: NRG; PAM sequence: TGG
accctttgtagggggctctc

SEQ ID NO: 102364 - DNA, 20 bp, Artificial Sequence
  Description of Artificial Sequence: Synthetic oligonucleotide
  Target: LAMA2; (-) strand; PAM type: NRG; PAM sequence: GGG
atttcaggaccctttgtagg

SEQ ID NO: 102365 - DNA, 20 bp, Artificial Sequence
  Description of Artificial Sequence: Synthetic oligonucleotide
  Target: LAMA2; (-) strand; PAM type: NRG; PAM sequence: GGG
catttcaggaccctttgtag

SEQ ID NO: 102366 - DNA, 20 bp, Artificial Sequence
  Description of Artificial Sequence: Synthetic oligonucleotide
  Target: LAMA2; (-) strand; PAM type: NRG; PAM sequence: GGG
tcatttcaggaccctttgta

SEQ ID NO: 102367 - DNA, 20 bp, Artificial Sequence
  Description of Artificial Sequence: Synthetic oligonucleotide
  Target: LAMA2; (-) strand; PAM type: NRG; PAM sequence: AGG
ttcatttcaggaccctttgt

SEQ ID NO: 102368 - DNA, 20 bp, Artificial Sequence
  Description of Artificial Sequence: Synthetic oligonucleotide
  Target: LAMA2; (-) strand; PAM type: NRG; PAM sequence: TAG
attcatttcaggaccctttg

SEQ ID NO: 102369 - DNA, 20 bp, Artificial Sequence
  Description of Artificial Sequence: Synthetic oligonucleotide
  Target: LAMA2; (-) strand; PAM type: NRG; PAM sequence: AGG
gtgatgctcacattcatttc

SEQ ID NO: 102370 - DNA, 20 bp, Artificial Sequence
  Description of Artificial Sequence: Synthetic oligonucleotide
  Target: LAMA2; (-) strand; PAM type: NRG; PAM sequence: CAG
agtgatgctcacattcattt

SEQ ID NO: 102371 - DNA, 20 bp, Artificial Sequence
  Description of Artificial Sequence: Synthetic oligonucleotide
  Target: LAMA2; (-) strand; PAM type: NRG; PAM sequence: AAG
gttagtcacataaacttgtc

SEQ ID NO: 102372 - DNA, 20 bp, Artificial Sequence
  Description of Artificial Sequence: Synthetic oligonucleotide
  Target: LAMA2; (-) strand; PAM type: NRG; PAM sequence: TAG
ctatggcagactgagcacgt

SEQ ID NO: 102373 - DNA, 20 bp, Artificial Sequence
  Description of Artificial Sequence: Synthetic oligonucleotide
  Target: LAMA2; (-) strand; PAM type: NRG; PAM sequence: GAG
gtttgagcctatggcagact

SEQ ID NO: 102374 - DNA, 20 bp, Artificial Sequence
  Description of Artificial Sequence: Synthetic oligonucleotide
  Target: LAMA2; (-) strand; PAM type: NRG; PAM sequence: CAG
ctgtgtgtttgagcctatgg

SEQ ID NO: 102375 - DNA, 20 bp, Artificial Sequence
  Description of Artificial Sequence: Synthetic oligonucleotide
  Target: LAMA2; (-) strand; PAM type: NRG; PAM sequence: TGG
tgcctgtgtgtttgagccta

SEQ ID NO: 102376 - DNA, 20 bp, Artificial Sequence
  Description of Artificial Sequence: Synthetic oligonucleotide
  Target: LAMA2; (-) strand; PAM type: NRG; PAM sequence: GAG
ctacatttgcctgtgtgttt

SEQ ID NO: 102377 - DNA, 20 bp, Artificial Sequence
  Description of Artificial Sequence: Synthetic oligonucleotide
  Target: LAMA2; (-) strand; PAM type: NRG; PAM sequence: CAG
tgaatatggccacctgatct

SEQ ID NO: 102378 - DNA, 20 bp, Artificial Sequence
  Description of Artificial Sequence: Synthetic oligonucleotide
  Target: LAMA2; (-) strand; PAM type: NRG; PAM sequence: TGG
aggcacctgagagatgaata

SEQ ID NO: 102379 - DNA, 20 bp, Artificial Sequence
  Description of Artificial Sequence: Synthetic oligonucleotide
  Target: LAMA2; (-) strand; PAM type: NRG; PAM sequence: GAG
atcccaggctaggcacctga

SEQ ID NO: 102380 - DNA, 20 bp, Artificial Sequence
  Description of Artificial Sequence: Synthetic oligonucleotide
  Target: LAMA2; (-) strand; PAM type: NRG; PAM sequence: GAG
ggatcccaggctaggcacct

SEQ ID NO: 102381 - DNA, 20 bp, Artificial Sequence
  Description of Artificial Sequence: Synthetic oligonucleotide
  Target: LAMA2; (-) strand; PAM type: NRG; PAM sequence: AGG
gcatttctggatcccaggct

SEQ ID NO: 102382 - DNA, 20 bp, Artificial Sequence
  Description of Artificial Sequence: Synthetic oligonucleotide
  Target: LAMA2; (-) strand; PAM type: NRG; PAM sequence: TAG
agcatttctggatcccaggc

SEQ ID NO: 102383 - DNA, 20 bp, Artificial Sequence
  Description of Artificial Sequence: Synthetic oligonucleotide
  Target: LAMA2; (-) strand; PAM type: NRG; PAM sequence: AGG
tgtaagcatttctggatccc

SEQ ID NO: 102384 - DNA, 20 bp, Artificial Sequence
  Description of Artificial Sequence: Synthetic oligonucleotide
  Target: LAMA2; (-) strand; PAM type: NRG; PAM sequence: CAG
atgtaagcatttctggatcc

SEQ ID NO: 102385 - DNA, 20 bp, Artificial Sequence
  Description of Artificial Sequence: Synthetic oligonucleotide
  Target: LAMA2; (-) strand; PAM type: NRG; PAM sequence: TGG
aatattaatgtaagcatttc

SEQ ID NO: 102386 - DNA, 20 bp, Artificial Sequence
  Description of Artificial Sequence: Synthetic oligonucleotide
  Target: LAMA2; (-) strand; PAM type: NRG; PAM sequence: AAG
ataaccttaaatattaatgt

SEQ ID NO: 102387 - DNA, 20 bp, Artificial Sequence
  Description of Artificial Sequence: Synthetic oligonucleotide
  Target: LAMA2; (-) strand; PAM type: NRG; PAM sequence: AAG
tagttctagctctttagtac

SEQ ID NO: 102388 - DNA, 20 bp, Artificial Sequence
  Description of Artificial Sequence: Synthetic oligonucleotide
  Target: LAMA2; (-) strand; PAM type: NRG; PAM sequence: TAG
gtctactagttctagctctt

SEQ ID NO: 102389 - DNA, 20 bp, Artificial Sequence
  Description of Artificial Sequence: Synthetic oligonucleotide
  Target: LAMA2; (-) strand; PAM type: NRG; PAM sequence: TAG
ttttaaaggtctactagttc

SEQ ID NO: 102390 - DNA, 20 bp, Artificial Sequence
  Description of Artificial Sequence: Synthetic oligonucleotide
  Target: LAMA2; (-) strand; PAM type: NRG; PAM sequence: TAG
aagaacttttaaaggtctac

SEQ ID NO: 102391 - DNA, 20 bp, Artificial Sequence
  Description of Artificial Sequence: Synthetic oligonucleotide
  Target: LAMA2; (-) strand; PAM type: NRG; PAM sequence: AGG
gcttgttgaagaacttttaa

SEQ ID NO: 102392 - DNA, 20 bp, Artificial Sequence
  Description of Artificial Sequence: Synthetic oligonucleotide
  Target: LAMA2; (-) strand; PAM type: NRG; PAM sequence: AAG
tgcttgttgaagaactttta

SEQ ID NO: 102393 - DNA, 20 bp, Artificial Sequence
  Description of Artificial Sequence: Synthetic oligonucleotide
  Target: LAMA2; (-) strand; PAM type: NRG; PAM sequence: AAG
tatcaaactggtgcttgttg

SEQ ID NO: 102394 - DNA, 20 bp, Artificial Sequence
  Description of Artificial Sequence: Synthetic oligonucleotide
  Target: LAMA2; (-) strand; PAM type: NRG; PAM sequence: TGG
tagaacagtgtttatcaaac

SEQ ID NO: 102395 - DNA, 20 bp, Artificial Sequence
  Description of Artificial Sequence: Synthetic oligonucleotide
  Target: LAMA2; (-) strand; PAM type: NRG; PAM sequence: CAG
gctttaaccacaatttagaa

SEQ ID NO: 102396 - DNA, 20 bp, Artificial Sequence
  Description of Artificial Sequence: Synthetic oligonucleotide
  Target: LAMA2; (-) strand; PAM type: NRG; PAM sequence: TAG
caaaagctttaaccacaatt

SEQ ID NO: 102397 - DNA, 20 bp, Artificial Sequence
  Description of Artificial Sequence: Synthetic oligonucleotide
  Target: LAMA2; (-) strand; PAM type: NRG; PAM sequence: AAG
cctacctcgttaactaccaa

SEQ ID NO: 102398 - DNA, 20 bp, Artificial Sequence
  Description of Artificial Sequence: Synthetic oligonucleotide
  Target: LAMA2; (-) strand; PAM type: NRG; PAM sequence: AGG
acctttcatctttttccatc

SEQ ID NO: 102399 - DNA, 20 bp, Artificial Sequence
  Description of Artificial Sequence: Synthetic oligonucleotide
  Target: LAMA2; (-) strand; PAM type: NRG; PAM sequence: CAG
cacctttcatctttttccat

SEQ ID NO: 102400 - DNA, 20 bp, Artificial Sequence
  Description of Artificial Sequence: Synthetic oligonucleotide
  Target: LAMA2; (-) strand; PAM type: NRG; PAM sequence: AAG
tctgataattgactgatagt

SEQ ID NO: 102401 - DNA, 20 bp, Artificial Sequence
  Description of Artificial Sequence: Synthetic oligonucleotide
  Target: LAMA2; (-) strand; PAM type: NRG; PAM sequence: TAG
aatatctgataattgactga

SEQ ID NO: 102402 - DNA, 20 bp, Artificial Sequence
  Description of Artificial Sequence: Synthetic oligonucleotide
  Target: LAMA2; (-) strand; PAM type: NRG; PAM sequence: AGG
gggaaccaagtgcaatgctg

SEQ ID NO: 102403 - DNA, 20 bp, Artificial Sequence
  Description of Artificial Sequence: Synthetic oligonucleotide
  Target: LAMA2; (-) strand; PAM type: NRG; PAM sequence: GAG
agggaaccaagtgcaatgct

SEQ ID NO: 102404 - DNA, 20 bp, Artificial Sequence
  Description of Artificial Sequence: Synthetic oligonucleotide
  Target: LAMA2; (-) strand; PAM type: NRG; PAM sequence: AAG
catgaaatccccagggaacc

SEQ ID NO: 102405 - DNA, 20 bp, Artificial Sequence
  Description of Artificial Sequence: Synthetic oligonucleotide
  Target: LAMA2; (-) strand; PAM type: NRG; PAM sequence: GGG
aaagagtcatgaaatcccca

SEQ ID NO: 102406 - DNA, 20 bp, Artificial Sequence
  Description of Artificial Sequence: Synthetic oligonucleotide
  Target: LAMA2; (-) strand; PAM type: NRG; PAM sequence: AGG
aaaagagtcatgaaatcccc

SEQ ID NO: 102407 - DNA, 20 bp, Artificial Sequence
  Description of Artificial Sequence: Synthetic oligonucleotide
  Target: LAMA2; (-) strand; PAM type: NRG; PAM sequence: CAG
taaaagagtcatgaaatccc

SEQ ID NO: 102408 - DNA, 20 bp, Artificial Sequence
  Description of Artificial Sequence: Synthetic oligonucleotide
  Target: LAMA2; (-) strand; PAM type: NRG; PAM sequence: GAG
gggtagtgaagatattaaaa

SEQ ID NO: 102409 - DNA, 20 bp, Artificial Sequence
  Description of Artificial Sequence: Synthetic oligonucleotide
  Target: LAMA2; (-) strand; PAM type: NRG; PAM sequence: AAG
aagggtagtgaagatattaa

SEQ ID NO: 102410 - DNA, 20 bp, Artificial Sequence
  Description of Artificial Sequence: Synthetic oligonucleotide
  Target: LAMA2; (-) strand; PAM type: NRG; PAM sequence: AAG
tacatttcctaagggtagtg

SEQ ID NO: 102411 - DNA, 20 bp, Artificial Sequence
  Description of Artificial Sequence: Synthetic oligonucleotide
  Target: LAMA2; (-) strand; PAM type: NRG; PAM sequence: TAG
gaatctacatttcctaaggg

SEQ ID NO: 102412 - DNA, 20 bp, Artificial Sequence
  Description of Artificial Sequence: Synthetic oligonucleotide
  Target: LAMA2; (-) strand; PAM type: NRG; PAM sequence: GGG
atagaatctacatttcctaa

SEQ ID NO: 102413 - DNA, 20 bp, Artificial Sequence
  Description of Artificial Sequence: Synthetic oligonucleotide
  Target: LAMA2; (-) strand; PAM type: NRG; PAM sequence: AGG
catagaatctacatttccta

SEQ ID NO: 102414 - DNA, 20 bp, Artificial Sequence
  Description of Artificial Sequence: Synthetic oligonucleotide
  Target: LAMA2; (-) strand; PAM type: NRG; PAM sequence: AAG
acatagaatctacatttcct

SEQ ID NO: 102415 - DNA, 20 bp, Artificial Sequence
  Description of Artificial Sequence: Synthetic oligonucleotide
  Target: LAMA2; (-) strand; PAM type: NRG; PAM sequence: TAG
atgattatttttaaagcaca

SEQ ID NO: 102416 - DNA, 20 bp, Artificial Sequence
  Description of Artificial Sequence: Synthetic oligonucleotide
  Target: LAMA2; (-) strand; PAM type: NRG; PAM sequence: AAG
ttgtttaatgattattttta

SEQ ID NO: 102417 - DNA, 20 bp, Artificial Sequence
  Description of Artificial Sequence: Synthetic oligonucleotide
  Target: LAMA2; (-) strand; PAM type: NRG; PAM sequence: TGG
ttgaatgtttgtaaaacaca

SEQ ID NO: 102418 - DNA, 20 bp, Artificial Sequence
  Description of Artificial Sequence: Synthetic oligonucleotide
  Target: LAMA2; (-) strand; PAM type: NRG; PAM sequence: CAG
ctgaatcttactgatttctc

SEQ ID NO: 102419 - DNA, 20 bp, Artificial Sequence
  Description of Artificial Sequence: Synthetic oligonucleotide
  Target: LAMA2; (-) strand; PAM type: NRG; PAM sequence: TGG
ctcagtaatggtacattctc

SEQ ID NO: 102420 - DNA, 20 bp, Artificial Sequence
  Description of Artificial Sequence: Synthetic oligonucleotide
  Target: LAMA2; (-) strand; PAM type: NRG; PAM sequence: TGG
agaaattatactctcagtaa

SEQ ID NO: 102421 - DNA, 20 bp, Artificial Sequence
  Description of Artificial Sequence: Synthetic oligonucleotide
  Target: LAMA2; (-) strand; PAM type: NRG; PAM sequence: CAG
tccaacagaaattatactct

SEQ ID NO: 102422 - DNA, 20 bp, Artificial Sequence
  Description of Artificial Sequence: Synthetic oligonucleotide
  Target: LAMA2; (-) strand; PAM type: NRG; PAM sequence: CAG
gtctacacttcaaattccaa

SEQ ID NO: 102423 - DNA, 20 bp, Artificial Sequence
  Description of Artificial Sequence: Synthetic oligonucleotide
  Target: LAMA2; (-) strand; PAM type: NRG; PAM sequence: AAG
atcttagatgccttcctcta

SEQ ID NO: 102424 - DNA, 20 bp, Artificial Sequence
  Description of Artificial Sequence: Synthetic oligonucleotide
  Target: LAMA2; (-) strand; PAM type: NRG; PAM sequence: TAG
aatgtgtagtgaataaatct

SEQ ID NO: 102425 - DNA, 20 bp, Artificial Sequence
  Description of Artificial Sequence: Synthetic oligonucleotide
  Target: LAMA2; (-) strand; PAM type: NRG; PAM sequence: TAG
aaagaatatctaccaatgtg

SEQ ID NO: 102426 - DNA, 20 bp, Artificial Sequence
  Description of Artificial Sequence: Synthetic oligonucleotide
  Target: LAMA2; (-) strand; PAM type: NRG; PAM sequence: AAG
ttaaagaatatatttcctaa

SEQ ID NO: 102427 - DNA, 20 bp, Artificial Sequence
  Description of Artificial Sequence: Synthetic oligonucleotide
  Target: LAMA2; (-) strand; PAM type: NRG; PAM sequence: AAG
aaaggttatggtcagaatta

SEQ ID NO: 102428 - DNA, 20 bp, Artificial Sequence
  Description of Artificial Sequence: Synthetic oligonucleotide
  Target: LAMA2; (-) strand; PAM type: NRG; PAM sequence: CAG
cttaccttaaaggttatggt

SEQ ID NO: 102429 - DNA, 20 bp, Artificial Sequence
  Description of Artificial Sequence: Synthetic oligonucleotide
  Target: LAMA2; (-) strand; PAM type: NRG; PAM sequence: TGG
aatacttaccttaaaggtta

SEQ ID NO: 102430 - DNA, 20 bp, Artificial Sequence
  Description of Artificial Sequence: Synthetic oligonucleotide
  Target: LAMA2; (-) strand; PAM type: NRG; PAM sequence: AGG
gataataatacttaccttaa

SEQ ID NO: 102431 - DNA, 20 bp, Artificial Sequence
  Description of Artificial Sequence: Synthetic oligonucleotide
  Target: LAMA2; (-) strand; PAM type: NRG; PAM sequence: AAG
ggataataatacttacctta

SEQ ID NO: 102432 - DNA, 20 bp, Artificial Sequence
  Description of Artificial Sequence: Synthetic oligonucleotide
  Target: LAMA2; (-) strand; PAM type: NRG; PAM sequence: GGG
gtttcttcttctggaaaata

SEQ ID NO: 102433 - DNA, 20 bp, Artificial Sequence
  Description of Artificial Sequence: Synthetic oligonucleotide
  Target: LAMA2; (-) strand; PAM type: NRG; PAM sequence: AGG
ggtttcttcttctggaaaat

SEQ ID NO: 102434 - DNA, 20 bp, Artificial Sequence
  Description of Artificial Sequence: Synthetic oligonucleotide
  Target: LAMA2; (-) strand; PAM type: NRG; PAM sequence: TAG
tggtttcttcttctggaaaa

SEQ ID NO: 102435 - DNA, 20 bp, Artificial Sequence
  Description of Artificial Sequence: Synthetic oligonucleotide
  Target: LAMA2; (-) strand; PAM type: NRG; PAM sequence: TGG
tcattattggtttcttcttc

SEQ ID NO: 102436 - DNA, 20 bp, Artificial Sequence
  Description of Artificial Sequence: Synthetic oligonucleotide
  Target: LAMA2; (-) strand; PAM type: NRG; PAM sequence: TGG
attcttgttatcatcattat

SEQ ID NO: 102437 - DNA, 20 bp, Artificial Sequence
  Description of Artificial Sequence: Synthetic oligonucleotide
  Target: LAMA2; (-) strand; PAM type: NRG; PAM sequence: TAG
cctagcttttcaataaatgt

SEQ ID NO: 102438 - DNA, 20 bp, Artificial Sequence
  Description of Artificial Sequence: Synthetic oligonucleotide
  Target: LAMA2; (-) strand; PAM type: NRG; PAM sequence: TAG
taagacttcagtcaattgcc

SEQ ID NO: 102439 - DNA, 20 bp, Artificial Sequence
  Description of Artificial Sequence: Synthetic oligonucleotide
  Target: LAMA2; (-) strand; PAM type: NRG; PAM sequence: CAG
tggtaatccatttaagactt

SEQ ID NO: 102440 - DNA, 20 bp, Artificial Sequence
  Description of Artificial Sequence: Synthetic oligonucleotide
  Target: LAMA2; (-) strand; PAM type: NRG; PAM sequence: AAG
ctatgtatggtaatccattt

SEQ ID NO: 102441 - DNA, 20 bp, Artificial Sequence
  Description of Artificial Sequence: Synthetic oligonucleotide
  Target: LAMA2; (-) strand; PAM type: NRG; PAM sequence: TGG
gtttctgtaaaagctatgta

SEQ ID NO: 102442 - DNA, 20 bp, Artificial Sequence
  Description of Artificial Sequence: Synthetic oligonucleotide
  Target: LAMA2; (-) strand; PAM type: NRG; PAM sequence: AAG
atttcttggagtttctgtaa

SEQ ID NO: 102443 - DNA, 20 bp, Artificial Sequence
  Description of Artificial Sequence: Synthetic oligonucleotide
  Target: LAMA2; (-) strand; PAM type: NRG; PAM sequence: GAG
aacttctttcctatttcttg

SEQ ID NO: 102444 - DNA, 20 bp, Artificial Sequence
  Description of Artificial Sequence: Synthetic oligonucleotide
  Target: LAMA2; (-) strand; PAM type: NRG; PAM sequence: TGG
acaacttctttcctatttct

SEQ ID NO: 102445 - DNA, 20 bp, Artificial Sequence
  Description of Artificial Sequence: Synthetic oligonucleotide
  Target: LAMA2; (-) strand; PAM type: NRG; PAM sequence: CAG
tttggggagatgtaaatatt

SEQ ID NO: 102446 - DNA, 20 bp, Artificial Sequence
  Description of Artificial Sequence: Synthetic oligonucleotide
  Target: LAMA2; (-) strand; PAM type: NRG; PAM sequence: GAG
tttcaacatataaatttggg

SEQ ID NO: 102447 - DNA, 20 bp, Artificial Sequence
  Description of Artificial Sequence: Synthetic oligonucleotide
  Target: LAMA2; (-) strand; PAM type: NRG; PAM sequence: GGG
actttcaacatataaatttg

SEQ ID NO: 102448 - DNA, 20 bp, Artificial Sequence
  Description of Artificial Sequence: Synthetic oligonucleotide
  Target: LAMA2; (-) strand; PAM type: NRG; PAM sequence: GGG
gactttcaacatataaattt

SEQ ID NO: 102449 - DNA, 20 bp, Artificial Sequence
  Description of Artificial Sequence: Synthetic oligonucleotide
  Target: LAMA2; (-) strand; PAM type: NRG; PAM sequence: TGG
agactttcaacatataaatt

SEQ ID NO: 102450 - DNA, 20 bp, Artificial Sequence
  Description of Artificial Sequence: Synthetic oligonucleotide
  Target: LAMA2; (-) strand; PAM type: NRG; PAM sequence: CAG
gcagctccaatggactgtga

SEQ ID NO: 102451 - DNA, 20 bp, Artificial Sequence
  Description of Artificial Sequence: Synthetic oligonucleotide
  Target: LAMA2; (-) strand; PAM type: NRG; PAM sequence: TGG
atttgtcacagcagctccaa

SEQ ID NO: 102452 - DNA, 20 bp, Artificial Sequence
  Description of Artificial Sequence: Synthetic oligonucleotide
  Target: LAMA2; (-) strand; PAM type: NRG; PAM sequence: CAG
gtttatggtatttgtcacag

SEQ ID NO: 102453 - DNA, 20 bp, Artificial Sequence
  Description of Artificial Sequence: Synthetic oligonucleotide
  Target: LAMA2; (-) strand; PAM type: NRG; PAM sequence: CAG
tcagtttatggtatttgtca

SEQ ID NO: 102454 - DNA, 20 bp, Artificial Sequence
  Description of Artificial Sequence: Synthetic oligonucleotide
  Target: LAMA2; (-) strand; PAM type: NRG; PAM sequence: TGG
tttataagctaatcagttta

SEQ ID NO: 102455 - DNA, 20 bp, Artificial Sequence
  Description of Artificial Sequence: Synthetic oligonucleotide
  Target: LAMA2; (-) strand; PAM type: NRG; PAM sequence: CAG
tctattgtttataagctaat

SEQ ID NO: 102456 - DNA, 20 bp, Artificial Sequence
  Description of Artificial Sequence: Synthetic oligonucleotide
  Target: LAMA2; (-) strand; PAM type: NRG; PAM sequence: AAG
gatatatttctattgtttat

SEQ ID NO: 102457 - DNA, 20 bp, Artificial Sequence
  Description of Artificial Sequence: Synthetic oligonucleotide
  Target: LAMA2; (-) strand; PAM type: NRG; PAM sequence: GAG
tcccagcctcagaactgtga

SEQ ID NO: 102458 - DNA, 20 bp, Artificial Sequence
  Description of Artificial Sequence: Synthetic oligonucleotide
  Target: LAMA2; (-) strand; PAM type: NRG; PAM sequence: GAG
cttcccagcctcagaactgt

SEQ ID NO: 102459 - DNA, 20 bp, Artificial Sequence
  Description of Artificial Sequence: Synthetic oligonucleotide
  Target: LAMA2; (-) strand; PAM type: NRG; PAM sequence: CAG
gatcttgggcttcccagcct

SEQ ID NO: 102460 - DNA, 20 bp, Artificial Sequence
  Description of Artificial Sequence: Synthetic oligonucleotide
  Target: LAMA2; (-) strand; PAM type: NRG; PAM sequence: CAG
taccttgatcttgggcttcc

SEQ ID NO: 102461 - DNA, 20 bp, Artificial Sequence
  Description of Artificial Sequence: Synthetic oligonucleotide
  Target: LAMA2; (-) strand; PAM type: NRG; PAM sequence: GGG
attgctggtaccttgatctt

SEQ ID NO: 102462 - DNA, 20 bp, Artificial Sequence
  Description of Artificial Sequence: Synthetic oligonucleotide
  Target: LAMA2; (-) strand; PAM type: NRG; PAM sequence: TGG
cattgctggtaccttgatct

SEQ ID NO: 102463 - DNA, 20 bp, Artificial Sequence
  Description of Artificial Sequence: Synthetic oligonucleotide
  Target: LAMA2; (-) strand; PAM type: NRG; PAM sequence: TGG
cactagacattgaacattgc

SEQ ID NO: 102464 - DNA, 20 bp, Artificial Sequence
  Description of Artificial Sequence: Synthetic oligonucleotide
  Target: LAMA2; (-) strand; PAM type: NRG; PAM sequence: TAG
tgtgaggaacaggccttcac

SEQ ID NO: 102465 - DNA, 20 bp, Artificial Sequence
  Description of Artificial Sequence: Synthetic oligonucleotide
  Target: LAMA2; (-) strand; PAM type: NRG; PAM sequence: AGG
agtcaccctctgtgaggaac

SEQ ID NO: 102466 - DNA, 20 bp, Artificial Sequence
  Description of Artificial Sequence: Synthetic oligonucleotide
  Target: LAMA2; (-) strand; PAM type: NRG; PAM sequence: CAG
aagtcaccctctgtgaggaa

SEQ ID NO: 102467 - DNA, 20 bp, Artificial Sequence
  Description of Artificial Sequence: Synthetic oligonucleotide
  Target: LAMA2; (-) strand; PAM type: NRG; PAM sequence: AGG
gcaagaagtcaccctctgtg

SEQ ID NO: 102468 - DNA, 20 bp, Artificial Sequence
  Description of Artificial Sequence: Synthetic oligonucleotide
  Target: LAMA2; (-) strand; PAM type: NRG; PAM sequence: GAG
agcaagaagtcaccctctgt

SEQ ID NO: 102469 - DNA, 20 bp, Artificial Sequence
  Description of Artificial Sequence: Synthetic oligonucleotide
  Target: LAMA2; (-) strand; PAM type: NRG; PAM sequence: AAG
aaatgtggggtcatagcaag

SEQ ID NO: 102470 - DNA, 20 bp, Artificial Sequence
  Description of Artificial Sequence: Synthetic oligonucleotide
  Target: LAMA2; (-) strand; PAM type: NRG; PAM sequence: AAG
attaaatgtggggtcatagc

SEQ ID NO: 102471 - DNA, 20 bp, Artificial Sequence
  Description of Artificial Sequence: Synthetic oligonucleotide
  Target: LAMA2; (-) strand; PAM type: NRG; PAM sequence: TAG
atgaattaaatgtggggtca

SEQ ID NO: 102472 - DNA, 20 bp, Artificial Sequence
  Description of Artificial Sequence: Synthetic oligonucleotide
  Target: LAMA2; (-) strand; PAM type: NRG; PAM sequence: GGG
tattaaatgaattaaatgtg

SEQ ID NO: 102473 - DNA, 20 bp, Artificial Sequence
  Description of Artificial Sequence: Synthetic oligonucleotide
  Target: LAMA2; (-) strand; PAM type: NRG; PAM sequence: GGG
atattaaatgaattaaatgt

SEQ ID NO: 102474 - DNA, 20 bp, Artificial Sequence
  Description of Artificial Sequence: Synthetic oligonucleotide
  Target: LAMA2; (-) strand; PAM type: NRG; PAM sequence: TGG
gatattaaatgaattaaatg

SEQ ID NO: 102475 - DNA, 20 bp, Artificial Sequence
  Description of Artificial Sequence: Synthetic oligonucleotide
  Target: LAMA2; (-) strand; PAM type: NRG; PAM sequence: CAG
ctatccttttcctcagtatc

SEQ ID NO: 102476 - DNA, 20 bp, Artificial Sequence
  Description of Artificial Sequence: Synthetic oligonucleotide
  Target: LAMA2; (-) strand; PAM type: NRG; PAM sequence: CAG
gagctagctatccttttcct

SEQ ID NO: 102477 - DNA, 20 bp, Artificial Sequence
  Description of Artificial Sequence: Synthetic oligonucleotide
  Target: LAMA2; (-) strand; PAM type: NRG; PAM sequence: TAG
ttaaagagaccccagagagc

SEQ ID NO: 102478 - DNA, 20 bp, Artificial Sequence
  Description of Artificial Sequence: Synthetic oligonucleotide
  Target: LAMA2; (-) strand; PAM type: NRG; PAM sequence: GAG
cttattaaagagaccccaga

SEQ ID NO: 102479 - DNA, 20 bp, Artificial Sequence
  Description of Artificial Sequence: Synthetic oligonucleotide
  Target: LAMA2; (-) strand; PAM type: NRG; PAM sequence: GAG
cccttattaaagagacccca

SEQ ID NO: 102480 - DNA, 20 bp, Artificial Sequence
  Description of Artificial Sequence: Synthetic oligonucleotide
  Target: LAMA2; (-) strand; PAM type: NRG; PAM sequence: CAG
tgcccttattaaagagaccc

SEQ ID NO: 102481 - DNA, 20 bp, Artificial Sequence
  Description of Artificial Sequence: Synthetic oligonucleotide
  Target: LAMA2; (-) strand; PAM type: NRG; PAM sequence: GAG
ggattagtgcccttattaaa

SEQ ID NO: 102482 - DNA, 20 bp, Artificial Sequence
  Description of Artificial Sequence: Synthetic oligonucleotide
  Target: LAMA2; (-) strand; PAM type: NRG; PAM sequence: AAG
tgggattagtgcccttatta

SEQ ID NO: 102483 - DNA, 20 bp, Artificial Sequence
  Description of Artificial Sequence: Synthetic oligonucleotide
  Target: LAMA2; (-) strand; PAM type: NRG; PAM sequence: TAG
gtagccttcatgattgggat

SEQ ID NO: 102484 - DNA, 20 bp, Artificial Sequence
  Description of Artificial Sequence: Synthetic oligonucleotide
  Target: LAMA2; (-) strand; PAM type: NRG; PAM sequence: GGG
agaatgtagccttcatgatt

SEQ ID NO: 102485 - DNA, 20 bp, Artificial Sequence
  Description of Artificial Sequence: Synthetic oligonucleotide
  Target: LAMA2; (-) strand; PAM type: NRG; PAM sequence: TGG
gagaatgtagccttcatgat

SEQ ID NO: 102486 - DNA, 20 bp, Artificial Sequence
  Description of Artificial Sequence: Synthetic oligonucleotide
  Target: LAMA2; (-) strand; PAM type: NRG; PAM sequence: TAG
gtgattgagtcatgagaatg

SEQ ID NO: 102487 - DNA, 20 bp, Artificial Sequence
  Description of Artificial Sequence: Synthetic oligonucleotide
  Target: LAMA2; (-) strand; PAM type: NRG; PAM sequence: GAG
ttgggaagtgattgagtcat

SEQ ID NO: 102488 - DNA, 20 bp, Artificial Sequence
  Description of Artificial Sequence: Synthetic oligonucleotide
  Target: LAMA2; (-) strand; PAM type: NRG; PAM sequence: GAG
ggagcctttgggaagtgatt

SEQ ID NO: 102489 - DNA, 20 bp, Artificial Sequence
  Description of Artificial Sequence: Synthetic oligonucleotide
  Target: LAMA2; (-) strand; PAM type: NRG; PAM sequence: AAG
taggaggtggagcctttggg

SEQ ID NO: 102490 - DNA, 20 bp, Artificial Sequence
  Description of Artificial Sequence: Synthetic oligonucleotide
  Target: LAMA2; (-) strand; PAM type: NRG; PAM sequence: GGG
tattaggaggtggagccttt

SEQ ID NO: 102491 - DNA, 20 bp, Artificial Sequence
  Description of Artificial Sequence: Synthetic oligonucleotide
  Target: LAMA2; (-) strand; PAM type: NRG; PAM sequence: TGG
atattaggaggtggagcctt

SEQ ID NO: 102492 - DNA, 20 bp, Artificial Sequence
  Description of Artificial Sequence: Synthetic oligonucleotide
  Target: LAMA2; (-) strand; PAM type: NRG; PAM sequence: GAG
tgtgatgatattaggaggtg

SEQ ID NO: 102493 - DNA, 20 bp, Artificial Sequence
  Description of Artificial Sequence: Synthetic oligonucleotide
  Target: LAMA2; (-) strand; PAM type: NRG; PAM sequence: TGG
aatgtgatgatattaggagg

SEQ ID NO: 102494 - DNA, 20 bp, Artificial Sequence
  Description of Artificial Sequence: Synthetic oligonucleotide
  Target: LAMA2; (-) strand; PAM type: NRG; PAM sequence: AGG
cccaatgtgatgatattagg

SEQ ID NO: 102495 - DNA, 20 bp, Artificial Sequence
  Description of Artificial Sequence: Synthetic oligonucleotide
  Target: LAMA2; (-) strand; PAM type: NRG; PAM sequence: GAG
tcccaatgtgatgatattag

SEQ ID NO: 102496 - DNA, 20 bp, Artificial Sequence
  Description of Artificial Sequence: Synthetic oligonucleotide
  Target: LAMA2; (-) strand; PAM type: NRG; PAM sequence: AGG
gttcccaatgtgatgatatt

SEQ ID NO: 102497 - DNA, 20 bp, Artificial Sequence
  Description of Artificial Sequence: Synthetic oligonucleotide
  Target: LAMA2; (-) strand; PAM type: NRG; PAM sequence: TAG
agttcccaatgtgatgatat

SEQ ID NO: 102498 - DNA, 20 bp, Artificial Sequence
  Description of Artificial Sequence: Synthetic oligonucleotide
  Target: LAMA2; (-) strand; PAM type: NRG; PAM sequence: TAG
atatccatgtgttgacatcc

SEQ ID NO: 102499 - DNA, 20 bp, Artificial Sequence
  Description of Artificial Sequence: Synthetic oligonucleotide
  Target: LAMA2; (-) strand; PAM type: NRG; PAM sequence: CAG
tgtcctcacacggcagaagg

SEQ ID NO: 102500 - DNA, 20 bp, Artificial Sequence
  Description of Artificial Sequence: Synthetic oligonucleotide
  Target: LAMA2; (-) strand; PAM type: NRG; PAM sequence: AGG
ctgtgtcctcacacggcaga

SEQ ID NO: 102501 - DNA, 20 bp, Artificial Sequence
  Description of Artificial Sequence: Synthetic oligonucleotide
  Target: LAMA2; (-) strand; PAM type: NRG; PAM sequence: AAG
cctgtgtcctcacacggcag

SEQ ID NO: 102502 - DNA, 20 bp, Artificial Sequence
  Description of Artificial Sequence: Synthetic oligonucleotide
  Target: LAMA2; (-) strand; PAM type: NRG; PAM sequence: CAG
ctccctgtgtcctcacacgg

SEQ ID NO: 102503 - DNA, 20 bp, Artificial Sequence
  Description of Artificial Sequence: Synthetic oligonucleotide
  Target: LAMA2; (-) strand; PAM type: NRG; PAM sequence: CGG
cttctccctgtgtcctcaca

SEQ ID NO: 102504 - DNA, 20 bp, Artificial Sequence
  Description of Artificial Sequence: Synthetic oligonucleotide
  Target: LAMA2; (-) strand; PAM type: NRG; PAM sequence: CAG
tcacatggctctgttaagca

SEQ ID NO: 102505 - DNA, 20 bp, Artificial Sequence
  Description of Artificial Sequence: Synthetic oligonucleotide
  Target: LAMA2; (-) strand; PAM type: NRG; PAM sequence: AAG
tctgctcacatggctctgtt

SEQ ID NO: 102506 - DNA, 20 bp, Artificial Sequence
  Description of Artificial Sequence: Synthetic oligonucleotide
  Target: LAMA2; (-) strand; PAM type: NRG; PAM sequence: TGG
caccactgcctctgctcaca

SEQ ID NO: 102507 - DNA, 20 bp, Artificial Sequence
  Description of Artificial Sequence: Synthetic oligonucleotide
  Target: LAMA2; (-) strand; PAM type: NRG; PAM sequence: CAG
gacttttaatatctgccaga

SEQ ID NO: 102508 - DNA, 20 bp, Artificial Sequence
  Description of Artificial Sequence: Synthetic oligonucleotide
  Target: LAMA2; (-) strand; PAM type: NRG; PAM sequence: CAG
gtctgacttttaatatctgc

SEQ ID NO: 102509 - DNA, 20 bp, Artificial Sequence
  Description of Artificial Sequence: Synthetic oligonucleotide
  Target: LAMA2; (-) strand; PAM type: NRG; PAM sequence: AGG
cagccttatctttcactagc

SEQ ID NO: 102510 - DNA, 20 bp, Artificial Sequence
  Description of Artificial Sequence: Synthetic oligonucleotide
  Target: LAMA2; (-) strand; PAM type: NRG; PAM sequence: CAG
ccagccttatctttcactag

SEQ ID NO: 102511 - DNA, 20 bp, Artificial Sequence
  Description of Artificial Sequence: Synthetic oligonucleotide
  Target: LAMA2; (-) strand; PAM type: NRG; PAM sequence: TAG
tctccagccttatctttcac

SEQ ID NO: 102512 - DNA, 20 bp, Artificial Sequence
  Description of Artificial Sequence: Synthetic oligonucleotide
  Target: LAMA2; (-) strand; PAM type: NRG; PAM sequence: CAG
ccctgcctcactgaagtctc

SEQ ID NO: 102513 - DNA, 20 bp, Artificial Sequence
  Description of Artificial Sequence: Synthetic oligonucleotide
  Target: LAMA2; (-) strand; PAM type: NRG; PAM sequence: AAG
catatcaccctgcctcactg

SEQ ID NO: 102514 - DNA, 20 bp, Artificial Sequence
  Description of Artificial Sequence: Synthetic oligonucleotide
  Target: LAMA2; (-) strand; PAM type: NRG; PAM sequence: AGG
gttcctctgcctggctttca

SEQ ID NO: 102515 - DNA, 20 bp, Artificial Sequence
  Description of Artificial Sequence: Synthetic oligonucleotide
  Target: LAMA2; (-) strand; PAM type: NRG; PAM sequence: AAG
ggttcctctgcctggctttc

SEQ ID NO: 102516 - DNA, 20 bp, Artificial Sequence
  Description of Artificial Sequence: Synthetic oligonucleotide
  Target: LAMA2; (-) strand; PAM type: NRG; PAM sequence: TGG
taaactcaggttcctctgcc

SEQ ID NO: 102517 - DNA, 20 bp, Artificial Sequence
  Description of Artificial Sequence: Synthetic oligonucleotide
  Target: LAMA2; (-) strand; PAM type: NRG; PAM sequence: AGG
caggaccacaaggtaaactc

SEQ ID NO: 102518 - DNA, 20 bp, Artificial Sequence
  Description of Artificial Sequence: Synthetic oligonucleotide
  Target: LAMA2; (-) strand; PAM type: NRG; PAM sequence: CAG
ccaggaccacaaggtaaact

SEQ ID NO: 102519 - DNA, 20 bp, Artificial Sequence
  Description of Artificial Sequence: Synthetic oligonucleotide
  Target: LAMA2; (-) strand; PAM type: NRG; PAM sequence: AGG
ccctgaataccaggaccaca

SEQ ID NO: 102520 - DNA, 20 bp, Artificial Sequence
  Description of Artificial Sequence: Synthetic oligonucleotide
  Target: LAMA2; (-) strand; PAM type: NRG; PAM sequence: AAG
tccctgaataccaggaccac

SEQ ID NO: 102521 - DNA, 20 bp, Artificial Sequence
  Description of Artificial Sequence: Synthetic oligonucleotide
  Target: LAMA2; (-) strand; PAM type: NRG; PAM sequence: AGG
tcttcacttccctgaatacc

SEQ ID NO: 102522 - DNA, 20 bp, Artificial Sequence
  Description of Artificial Sequence: Synthetic oligonucleotide
  Target: LAMA2; (-) strand; PAM type: NRG; PAM sequence: CAG
ctcttcacttccctgaatac

SEQ ID NO: 102523 - DNA, 20 bp, Artificial Sequence
  Description of Artificial Sequence: Synthetic oligonucleotide
  Target: LAMA2; (-) strand; PAM type: NRG; PAM sequence: CGG
atacaaggaaaataactgat

SEQ ID NO: 102524 - DNA, 20 bp, Artificial Sequence
  Description of Artificial Sequence: Synthetic oligonucleotide
  Target: LAMA2; (-) strand; PAM type: NRG; PAM sequence: AGG
ctgtattctctccatataca

SEQ ID NO: 102525 - DNA, 20 bp, Artificial Sequence
  Description of Artificial Sequence: Synthetic oligonucleotide
  Target: LAMA2; (-) strand; PAM type: NRG; PAM sequence: AAG
tctgtattctctccatatac

SEQ ID NO: 102526 - DNA, 20 bp, Artificial Sequence
  Description of Artificial Sequence: Synthetic oligonucleotide
  Target: LAMA2; (-) strand; PAM type: NRG; PAM sequence: TAG
aactaaaatgtttgcttttc

SEQ ID NO: 102527 - DNA, 20 bp, Artificial Sequence
  Description of Artificial Sequence: Synthetic oligonucleotide
  Target: LAMA2; (-) strand; PAM type: NRG; PAM sequence: TAG
atcatccattgcttaagtat

SEQ ID NO: 102528 - DNA, 20 bp, Artificial Sequence
  Description of Artificial Sequence: Synthetic oligonucleotide
  Target: LAMA2; (-) strand; PAM type: NRG; PAM sequence: AAG
tacttcatcatccattgctt

SEQ ID NO: 102529 - DNA, 20 bp, Artificial Sequence
  Description of Artificial Sequence: Synthetic oligonucleotide
  Target: LAMA2; (-) strand; PAM type: NRG; PAM sequence: AGG
caaattggagcctcttctat

SEQ ID NO: 102530 - DNA, 20 bp, Artificial Sequence
  Description of Artificial Sequence: Synthetic oligonucleotide
  Target: LAMA2; (-) strand; PAM type: NRG; PAM sequence: TAG
acaaattggagcctcttcta

SEQ ID NO: 102531 - DNA, 20 bp, Artificial Sequence
  Description of Artificial Sequence: Synthetic oligonucleotide
  Target: LAMA2; (-) strand; PAM type: NRG; PAM sequence: GAG
tagaagatgttcacaaattg

SEQ ID NO: 102532 - DNA, 20 bp, Artificial Sequence
  Description of Artificial Sequence: Synthetic oligonucleotide
  Target: LAMA2; (-) strand; PAM type: NRG; PAM sequence: TGG
cttagaagatgttcacaaat

SEQ ID NO: 102533 - DNA, 20 bp, Artificial Sequence
  Description of Artificial Sequence: Synthetic oligonucleotide
  Target: LAMA2; (-) strand; PAM type: NRG; PAM sequence: AAG
cactgaatcccttggcttag

SEQ ID NO: 102534 - DNA, 20 bp, Artificial Sequence
  Description of Artificial Sequence: Synthetic oligonucleotide
  Target: LAMA2; (-) strand; PAM type: NRG; PAM sequence: TAG
ggtcactgaatcccttggct

SEQ ID NO: 102535 - DNA, 20 bp, Artificial Sequence
  Description of Artificial Sequence: Synthetic oligonucleotide
  Target: LAMA2; (-) strand; PAM type: NRG; PAM sequence: TGG
ggatgggtcactgaatccct

SEQ ID NO: 102536 - DNA, 20 bp, Artificial Sequence
  Description of Artificial Sequence: Synthetic oligonucleotide
  Target: LAMA2; (-) strand; PAM type: NRG; PAM sequence: GGG
atatccagccagaagtggat

SEQ ID NO: 102537 - DNA, 20 bp, Artificial Sequence
  Description of Artificial Sequence: Synthetic oligonucleotide
  Target: LAMA2; (-) strand; PAM type: NRG; PAM sequence: TGG
aatatccagccagaagtgga

SEQ ID NO: 102538 - DNA, 20 bp, Artificial Sequence
  Description of Artificial Sequence: Synthetic oligonucleotide
  Target: LAMA2; (-) strand; PAM type: NRG; PAM sequence: TGG
gatcaatatccagccagaag

SEQ ID NO: 102539 - DNA, 20 bp, Artificial Sequence
  Description of Artificial Sequence: Synthetic oligonucleotide
  Target: LAMA2; (-) strand; PAM type: NRG; PAM sequence: AAG
ctggatcaatatccagccag

SEQ ID NO: 102540 - DNA, 20 bp, Artificial Sequence
  Description of Artificial Sequence: Synthetic oligonucleotide
  Target: LAMA2; (-) strand; PAM type: NRG; PAM sequence: CAG
catctggatcaatatccagc

SEQ ID NO: 102541 - DNA, 20 bp, Artificial Sequence
  Description of Artificial Sequence: Synthetic oligonucleotide
  Target: LAMA2; (-) strand; PAM type: NRG; PAM sequence: CAG
aggtcatctggatcaatatc

SEQ ID NO: 102542 - DNA, 20 bp, Artificial Sequence
  Description of Artificial Sequence: Synthetic oligonucleotide
  Target: LAMA2; (-) strand; PAM type: NRG; PAM sequence: TGG
taaggataatccaggtcatc

SEQ ID NO: 102543 - DNA, 20 bp, Artificial Sequence
  Description of Artificial Sequence: Synthetic oligonucleotide
  Target: LAMA2; (-) strand; PAM type: NRG; PAM sequence: AGG
ctagaatttaaggataatcc

SEQ ID NO: 102544 - DNA, 20 bp, Artificial Sequence
  Description of Artificial Sequence: Synthetic oligonucleotide
  Target: LAMA2; (-) strand; PAM type: NRG; PAM sequence: CAG
actagaatttaaggataatc

SEQ ID NO: 102545 - DNA, 20 bp, Artificial Sequence
  Description of Artificial Sequence: Synthetic oligonucleotide
  Target: LAMA2; (-) strand; PAM type: NRG; PAM sequence: AGG
tcaagaaagactagaattta

SEQ ID NO: 102546 - DNA, 20 bp, Artificial Sequence
  Description of Artificial Sequence: Synthetic oligonucleotide
  Target: LAMA2; (-) strand; PAM type: NRG; PAM sequence: AAG
atcaagaaagactagaattt

SEQ ID NO: 102547 - DNA, 20 bp, Artificial Sequence
  Description of Artificial Sequence: Synthetic oligonucleotide
  Target: LAMA2; (-) strand; PAM type: NRG; PAM sequence: TAG
aataaaaaatcaagaaagac

SEQ ID NO: 102548 - DNA, 20 bp, Artificial Sequence
  Description of Artificial Sequence: Synthetic oligonucleotide
  Target: LAMA2; (-) strand; PAM type: NRG; PAM sequence: AAG
aacaaaataaaaaatcaaga

SEQ ID NO: 102549 - DNA, 20 bp, Artificial Sequence
  Description of Artificial Sequence: Synthetic oligonucleotide
  Target: LAMA2; (-) strand; PAM type: NRG; PAM sequence: AAG
gaagaacaaaataaaaaatc

SEQ ID NO: 102550 - DNA, 20 bp, Artificial Sequence
  Description of Artificial Sequence: Synthetic oligonucleotide
  Target: LAMA2; (-) strand; PAM type: NRG; PAM sequence: AAG
tgtcaagtgaatgatggaag

SEQ ID NO: 102551 - DNA, 20 bp, Artificial Sequence
  Description of Artificial Sequence: Synthetic oligonucleotide
  Target: LAMA2; (-) strand; PAM type: NRG; PAM sequence: AAG
aaatgtcaagtgaatgatgg

SEQ ID NO: 102552 - DNA, 20 bp, Artificial Sequence
  Description of Artificial Sequence: Synthetic oligonucleotide
  Target: LAMA2; (-) strand; PAM type: NRG; PAM sequence: TGG
tacaaatgtcaagtgaatga

SEQ ID NO: 102553 - DNA, 20 bp, Artificial Sequence
  Description of Artificial Sequence: Synthetic oligonucleotide
  Target: LAMA2; (-) strand; PAM type: NRG; PAM sequence: AAG
atcctcagtatacaaatgtc

SEQ ID NO: 102554 - DNA, 20 bp, Artificial Sequence
  Description of Artificial Sequence: Synthetic oligonucleotide
  Target: LAMA2; (-) strand; PAM type: NRG; PAM sequence: CAG
taataccagaaggtgatcct

SEQ ID NO: 102555 - DNA, 20 bp, Artificial Sequence
  Description of Artificial Sequence: Synthetic oligonucleotide
  Target: LAMA2; (-) strand; PAM type: NRG; PAM sequence: AGG
taagtttttataataccaga

SEQ ID NO: 102556 - DNA, 20 bp, Artificial Sequence
  Description of Artificial Sequence: Synthetic oligonucleotide
  Target: LAMA2; (-) strand; PAM type: NRG; PAM sequence: AAG
ttaagtttttataataccag

SEQ ID NO: 102557 - DNA, 20 bp, Artificial Sequence
  Description of Artificial Sequence: Synthetic oligonucleotide
  Target: LAMA2; (-) strand; PAM type: NRG; PAM sequence: CAG
aacttaagtttttataatac

SEQ ID NO: 102558 - DNA, 20 bp, Artificial Sequence
  Description of Artificial Sequence: Synthetic oligonucleotide
  Target: LAMA2; (-) strand; PAM type: NRG; PAM sequence: AAG
gcaaagaggtgaaataactt

SEQ ID NO: 102559 - DNA, 20 bp, Artificial Sequence
  Description of Artificial Sequence: Synthetic oligonucleotide
  Target: LAMA2; (-) strand; PAM type: NRG; PAM sequence: AGG
gttaaagaaattgagcaaag

SEQ ID NO: 102560 - DNA, 20 bp, Artificial Sequence
  Description of Artificial Sequence: Synthetic oligonucleotide
  Target: LAMA2; (-) strand; PAM type: NRG; PAM sequence: GAG
agttaaagaaattgagcaaa

SEQ ID NO: 102561 - DNA, 20 bp, Artificial Sequence
  Description of Artificial Sequence: Synthetic oligonucleotide
  Target: LAMA2; (-) strand; PAM type: NRG; PAM sequence: AAG
atagttaaagaaattgagca

SEQ ID NO: 102562 - DNA, 20 bp, Artificial Sequence
  Description of Artificial Sequence: Synthetic oligonucleotide
  Target: LAMA2; (-) strand; PAM type: NRG; PAM sequence: GAG
ctgacatagttaaagaaatt

SEQ ID NO: 102563 - DNA, 20 bp, Artificial Sequence
  Description of Artificial Sequence: Synthetic oligonucleotide
  Target: LAMA2; (-) strand; PAM type: NRG; PAM sequence: AAG
ggggagcactgacatagtta

SEQ ID NO: 102564 - DNA, 20 bp, Artificial Sequence
  Description of Artificial Sequence: Synthetic oligonucleotide
  Target: LAMA2; (-) strand; PAM type: NRG; PAM sequence: TAG
aagcttggggagcactgaca

SEQ ID NO: 102565 - DNA, 20 bp, Artificial Sequence
  Description of Artificial Sequence: Synthetic oligonucleotide
  Target: LAMA2; (-) strand; PAM type: NRG; PAM sequence: GAG
gtctttggctgaagcttggg

SEQ ID NO: 102566 - DNA, 20 bp, Artificial Sequence
  Description of Artificial Sequence: Synthetic oligonucleotide
  Target: LAMA2; (-) strand; PAM type: NRG; PAM sequence: GGG
tggtctttggctgaagcttg

SEQ ID NO: 102567 - DNA, 20 bp, Artificial Sequence
  Description of Artificial Sequence: Synthetic oligonucleotide
  Target: LAMA2; (-) strand; PAM type: NRG; PAM sequence: GGG
atggtctttggctgaagctt

SEQ ID NO: 102568 - DNA, 20 bp, Artificial Sequence
  Description of Artificial Sequence: Synthetic oligonucleotide
  Target: LAMA2; (-) strand; PAM type: NRG; PAM sequence: TGG
gatggtctttggctgaagct

SEQ ID NO: 102569 - DNA, 20 bp, Artificial Sequence
  Description of Artificial Sequence: Synthetic oligonucleotide
  Target: LAMA2; (-) strand; PAM type: NRG; PAM sequence: AAG
tccttgatggtctttggctg

SEQ ID NO: 102570 - DNA, 20 bp, Artificial Sequence
  Description of Artificial Sequence: Synthetic oligonucleotide
  Target: LAMA2; (-) strand; PAM type: NRG; PAM sequence: TGG
tgtgtgtccttgatggtctt

SEQ ID NO: 102571 - DNA, 20 bp, Artificial Sequence
  Description of Artificial Sequence: Synthetic oligonucleotide
  Target: LAMA2; (-) strand; PAM type: NRG; PAM sequence: TGG
catcacatgtgtgtccttga

SEQ ID NO: 102572 - DNA, 20 bp, Artificial Sequence
  Description of Artificial Sequence: Synthetic oligonucleotide
  Target: LAMA2; (-) strand; PAM type: NRG; PAM sequence: AAG
tcagtgccccttgttgcaac

SEQ ID NO: 102573 - DNA, 20 bp, Artificial Sequence
  Description of Artificial Sequence: Synthetic oligonucleotide
  Target: LAMA2; (-) strand; PAM type: NRG; PAM sequence: CAG
cacaattcccccatggtgtt

SEQ ID NO: 102574 - DNA, 20 bp, Artificial Sequence
  Description of Artificial Sequence: Synthetic oligonucleotide
  Target: LAMA2; (-) strand; PAM type: NRG; PAM sequence: TGG
gacagcccacaattccccca

SEQ ID NO: 102575 - DNA, 20 bp, Artificial Sequence
  Description of Artificial Sequence: Synthetic oligonucleotide
  Target: LAMA2; (-) strand; PAM type: NRG; PAM sequence: CAG
ctaacaccttcttattgaga

SEQ ID NO: 102576 - DNA, 20 bp, Artificial Sequence
  Description of Artificial Sequence: Synthetic oligonucleotide
  Target: LAMA2; (-) strand; PAM type: NRG; PAM sequence: GAG
attcctaacaccttcttatt

SEQ ID NO: 102577 - DNA, 20 bp, Artificial Sequence
  Description of Artificial Sequence: Synthetic oligonucleotide
  Target: LAMA2; (-) strand; PAM type: NRG; PAM sequence: AAG
agcacagcctcaaatactag

SEQ ID NO: 102578 - DNA, 20 bp, Artificial Sequence
  Description of Artificial Sequence: Synthetic oligonucleotide
  Target: LAMA2; (-) strand; PAM type: NRG; PAM sequence: TAG
tctagcacagcctcaaatac

SEQ ID NO: 102579 - DNA, 20 bp, Artificial Sequence
  Description of Artificial Sequence: Synthetic oligonucleotide
  Target: LAMA2; (-) strand; PAM type: NRG; PAM sequence: CAG
taaccttaagttatctagca

SEQ ID NO: 102580 - DNA, 20 bp, Artificial Sequence
  Description of Artificial Sequence: Synthetic oligonucleotide
  Target: LAMA2; (-) strand; PAM type: NRG; PAM sequence: TAG
agtgctaaccttaagttatc

SEQ ID NO: 102581 - DNA, 20 bp, Artificial Sequence
  Description of Artificial Sequence: Synthetic oligonucleotide
  Target: LAMA2; (-) strand; PAM type: NRG; PAM sequence: AAG
cccagttgagtgctaacctt

SEQ ID NO: 102582 - DNA, 20 bp, Artificial Sequence
  Description of Artificial Sequence: Synthetic oligonucleotide
  Target: LAMA2; (-) strand; PAM type: NRG; PAM sequence: GAG
cttctgaatagcacccagtt

SEQ ID NO: 102583 - DNA, 20 bp, Artificial Sequence
  Description of Artificial Sequence: Synthetic oligonucleotide
  Target: LAMA2; (-) strand; PAM type: NRG; PAM sequence: CAG
tcccacttctgaatagcacc

SEQ ID NO: 102584 - DNA, 20 bp, Artificial Sequence
  Description of Artificial Sequence: Synthetic oligonucleotide
  Target: LAMA2; (-) strand; PAM type: NRG; PAM sequence: TAG
gaattactcccacttctgaa

SEQ ID NO: 102585 - DNA, 20 bp, Artificial Sequence
  Description of Artificial Sequence: Synthetic oligonucleotide
  Target: LAMA2; (-) strand; PAM type: NRG; PAM sequence: CAG
taggattcacaaaatactca

SEQ ID NO: 102586 - DNA, 20 bp, Artificial Sequence
  Description of Artificial Sequence: Synthetic oligonucleotide
  Target: LAMA2; (-) strand; PAM type: NRG; PAM sequence: AGG
gttcttccttccctctagat

SEQ ID NO: 102587 - DNA, 20 bp, Artificial Sequence
  Description of Artificial Sequence: Synthetic oligonucleotide
  Target: LAMA2; (-) strand; PAM type: NRG; PAM sequence: TAG
tgttcttccttccctctaga

SEQ ID NO: 102588 - DNA, 20 bp, Artificial Sequence
  Description of Artificial Sequence: Synthetic oligonucleotide
  Target: LAMA2; (-) strand; PAM type: NRG; PAM sequence: TAG
cctctgttcttccttccctc

SEQ ID NO: 102589 - DNA, 20 bp, Artificial Sequence
  Description of Artificial Sequence: Synthetic oligonucleotide
  Target: LAMA2; (-) strand; PAM type: NRG; PAM sequence: TAG
cactgcctccttattaatca

SEQ ID NO: 102590 - DNA, 20 bp, Artificial Sequence
  Description of Artificial Sequence: Synthetic oligonucleotide
  Target: LAMA2; (-) strand; PAM type: NRG; PAM sequence: TGG
taccccaacctcccatttcc

SEQ ID NO: 102591 - DNA, 20 bp, Artificial Sequence
  Description of Artificial Sequence: Synthetic oligonucleotide
  Target: LAMA2; (-) strand; PAM type: NRG; PAM sequence: TAG
aaaccatagcgggttttgtg

SEQ ID NO: 102592 - DNA, 20 bp, Artificial Sequence
  Description of Artificial Sequence: Synthetic oligonucleotide
  Target: LAMA2; (-) strand; PAM type: NRG; PAM sequence: GGG
agcgcagacaaaaccatagc

SEQ ID NO: 102593 - DNA, 20 bp, Artificial Sequence
  Description of Artificial Sequence: Synthetic oligonucleotide
  Target: LAMA2; (-) strand; PAM type: NRG; PAM sequence: CGG
aagcgcagacaaaaccatag

SEQ ID NO: 102594 - DNA, 20 bp, Artificial Sequence
  Description of Artificial Sequence: Synthetic oligonucleotide
  Target: LAMA2; (-) strand; PAM type: NRG; PAM sequence: TAG
tctaagcgcagacaaaacca

SEQ ID NO: 102595 - DNA, 20 bp, Artificial Sequence
  Description of Artificial Sequence: Synthetic oligonucleotide
  Target: LAMA2; (-) strand; PAM type: NRG; PAM sequence: CAG
taccctgtaatgtctaagcg

SEQ ID NO: 102596 - DNA, 20 bp, Artificial Sequence
  Description of Artificial Sequence: Synthetic oligonucleotide
  Target: LAMA2; (-) strand; PAM type: NRG; PAM sequence: AAG
gagactaccctgtaatgtct

SEQ ID NO: 102597 - DNA, 20 bp, Artificial Sequence
  Description of Artificial Sequence: Synthetic oligonucleotide
  Target: LAMA2; (-) strand; PAM type: NRG; PAM sequence: GAG
atgaatgaaacagaaaaaaa

SEQ ID NO: 102598 - DNA, 20 bp, Artificial Sequence
  Description of Artificial Sequence: Synthetic oligonucleotide
  Target: LAMA2; (-) strand; PAM type: NRG; PAM sequence: AAG
tgatgaatgaaacagaaaaa

SEQ ID NO: 102599 - DNA, 20 bp, Artificial Sequence
  Description of Artificial Sequence: Synthetic oligonucleotide
  Target: LAMA2; (-) strand; PAM type: NRG; PAM sequence: CAG
tgaaccagtgatgaatgaaa

SEQ ID NO: 102600 - DNA, 20 bp, Artificial Sequence
  Description of Artificial Sequence: Synthetic oligonucleotide
  Target: LAMA2; (-) strand; PAM type: NRG; PAM sequence: CAG
tagacaaggtcactctgaac

SEQ ID NO: 102601 - DNA, 20 bp, Artificial Sequence
  Description of Artificial Sequence: Synthetic oligonucleotide
  Target: LAMA2; (-) strand; PAM type: NRG; PAM sequence: AGG
ataggacactaaattagaca

SEQ ID NO: 102602 - DNA, 20 bp, Artificial Sequence
  Description of Artificial Sequence: Synthetic oligonucleotide
  Target: LAMA2; (-) strand; PAM type: NRG; PAM sequence: AAG
cataggacactaaattagac

SEQ ID NO: 102603 - DNA, 20 bp, Artificial Sequence
  Description of Artificial Sequence: Synthetic oligonucleotide
  Target: LAMA2; (-) strand; PAM type: NRG; PAM sequence: TAG
aatctcataggacactaaat

SEQ ID NO: 102604 - DNA, 20 bp, Artificial Sequence
  Description of Artificial Sequence: Synthetic oligonucleotide
  Target: LAMA2; (-) strand; PAM type: NRG; PAM sequence: AGG
tggaacataaataatctcat

SEQ ID NO: 102605 - DNA, 20 bp, Artificial Sequence
  Description of Artificial Sequence: Synthetic oligonucleotide
  Target: LAMA2; (-) strand; PAM type: NRG; PAM sequence: TAG
atggaacataaataatctca

SEQ ID NO: 102606 - DNA, 20 bp, Artificial Sequence
  Description of Artificial Sequence: Synthetic oligonucleotide
  Target: LAMA2; (-) strand; PAM type: NRG; PAM sequence: TGG
agggccatatttttttccta

SEQ ID NO: 102607 - DNA, 20 bp, Artificial Sequence
  Description of Artificial Sequence: Synthetic oligonucleotide
  Target: LAMA2; (-) strand; PAM type: NRG; PAM sequence: GGG
taggaactggcctaacagca

SEQ ID NO: 102608 - DNA, 20 bp, Artificial Sequence
  Description of Artificial Sequence: Synthetic oligonucleotide
  Target: LAMA2; (-) strand; PAM type: NRG; PAM sequence: AGG
ctaggaactggcctaacagc

SEQ ID NO: 102609 - DNA, 20 bp, Artificial Sequence
  Description of Artificial Sequence: Synthetic oligonucleotide
  Target: LAMA2; (-) strand; PAM type: NRG; PAM sequence: CAG
gctaggaactggcctaacag

SEQ ID NO: 102610 - DNA, 20 bp, Artificial Sequence
  Description of Artificial Sequence: Synthetic oligonucleotide
  Target: LAMA2; (-) strand; PAM type: NRG; PAM sequence: CAG
gttgctaggaactggcctaa

SEQ ID NO: 102611 - DNA, 20 bp, Artificial Sequence
  Description of Artificial Sequence: Synthetic oligonucleotide
  Target: LAMA2; (-) strand; PAM type: NRG; PAM sequence: TGG
tcctcggtgttgctaggaac

SEQ ID NO: 102612 - DNA, 20 bp, Artificial Sequence
  Description of Artificial Sequence: Synthetic oligonucleotide
  Target: LAMA2; (-) strand; PAM type: NRG; PAM sequence: AGG
ggcctgtcctcggtgttgct

SEQ ID NO: 102613 - DNA, 20 bp, Artificial Sequence
  Description of Artificial Sequence: Synthetic oligonucleotide
  Target: LAMA2; (-) strand; PAM type: NRG; PAM sequence: TAG
tggcctgtcctcggtgttgc

SEQ ID NO: 102614 - DNA, 20 bp, Artificial Sequence
  Description of Artificial Sequence: Synthetic oligonucleotide
  Target: LAMA2; (-) strand; PAM type: NRG; PAM sequence: CGG
ctaactaactggcctgtcct

SEQ ID NO: 102615 - DNA, 20 bp, Artificial Sequence
  Description of Artificial Sequence: Synthetic oligonucleotide
  Target: LAMA2; (-) strand; PAM type: NRG; PAM sequence: TGG
ctggctaggcgctaactaac

SEQ ID NO: 102616 - DNA, 20 bp, Artificial Sequence
  Description of Artificial Sequence: Synthetic oligonucleotide
  Target: LAMA2; (-) strand; PAM type: NRG; PAM sequence: AGG
cttaacatagagacctggct

SEQ ID NO: 102617 - DNA, 20 bp, Artificial Sequence
  Description of Artificial Sequence: Synthetic oligonucleotide
  Target: LAMA2; (-) strand; PAM type: NRG; PAM sequence: TAG
ccttaacatagagacctggc

SEQ ID NO: 102618 - DNA, 20 bp, Artificial Sequence
  Description of Artificial Sequence: Synthetic oligonucleotide
  Target: LAMA2; (-) strand; PAM type: NRG; PAM sequence: TGG
caggccttaacatagagacc

SEQ ID NO: 102619 - DNA, 20 bp, Artificial Sequence
  Description of Artificial Sequence: Synthetic oligonucleotide
  Target: LAMA2; (-) strand; PAM type: NRG; PAM sequence: GAG
gaacggcaggccttaacata

SEQ ID NO: 102620 - DNA, 20 bp, Artificial Sequence
  Description of Artificial Sequence: Synthetic oligonucleotide
  Target: LAMA2; (-) strand; PAM type: NRG; PAM sequence: TAG
gagaacggcaggccttaaca

SEQ ID NO: 102621 - DNA, 20 bp, Artificial Sequence
  Description of Artificial Sequence: Synthetic oligonucleotide
  Target: LAMA2; (-) strand; PAM type: NRG; PAM sequence: AGG
caggtaaaaaagagaacggc

SEQ ID NO: 102622 - DNA, 20 bp, Artificial Sequence
  Description of Artificial Sequence: Synthetic oligonucleotide
  Target: LAMA2; (-) strand; PAM type: NRG; PAM sequence: CAG
acaggtaaaaaagagaacgg

SEQ ID NO: 102623 - DNA, 20 bp, Artificial Sequence
  Description of Artificial Sequence: Synthetic oligonucleotide
  Target: LAMA2; (-) strand; PAM type: NRG; PAM sequence: CGG
atcacaggtaaaaaagagaa

SEQ ID NO: 102624 - DNA, 20 bp, Artificial Sequence
  Description of Artificial Sequence: Synthetic oligonucleotide
  Target: LAMA2; (-) strand; PAM type: NRG; PAM sequence: GAG
cacagatcacaggtaaaaaa

SEQ ID NO: 102625 - DNA, 20 bp, Artificial Sequence
  Description of Artificial Sequence: Synthetic oligonucleotide
  Target: LAMA2; (-) strand; PAM type: NRG; PAM sequence: AAG
gacacagatcacaggtaaaa

SEQ ID NO: 102626 - DNA, 20 bp, Artificial Sequence
  Description of Artificial Sequence: Synthetic oligonucleotide
  Target: LAMA2; (-) strand; PAM type: NRG; PAM sequence: AGG
ttaacagagacacagatcac

SEQ ID NO: 102627 - DNA, 20 bp, Artificial Sequence
  Description of Artificial Sequence: Synthetic oligonucleotide
  Target: LAMA2; (-) strand; PAM type: NRG; PAM sequence: CAG
attaacagagacacagatca

SEQ ID NO: 102628 - DNA, 20 bp, Artificial Sequence
  Description of Artificial Sequence: Synthetic oligonucleotide
  Target: LAMA2; (-) strand; PAM type: NRG; PAM sequence: CAG
cattccaattaacagagaca

SEQ ID NO: 102629 - DNA, 20 bp, Artificial Sequence
  Description of Artificial Sequence: Synthetic oligonucleotide
  Target: LAMA2; (-) strand; PAM type: NRG; PAM sequence: GAG
ggctcccattccaattaaca

SEQ ID NO: 102630 - DNA, 20 bp, Artificial Sequence
  Description of Artificial Sequence: Synthetic oligonucleotide
  Target: LAMA2; (-) strand; PAM type: NRG; PAM sequence: CAG
aaggctcccattccaattaa

SEQ ID NO: 102631 - DNA, 20 bp, Artificial Sequence
  Description of Artificial Sequence: Synthetic oligonucleotide
  Target: LAMA2; (-) strand; PAM type: NRG; PAM sequence: AGG
ctccttgcctggcccattta

SEQ ID NO: 102632 - DNA, 20 bp, Artificial Sequence
  Description of Artificial Sequence: Synthetic oligonucleotide
  Target: LAMA2; (-) strand; PAM type: NRG; PAM sequence: AAG
actccttgcctggcccattt

SEQ ID NO: 102633 - DNA, 20 bp, Artificial Sequence
  Description of Artificial Sequence: Synthetic oligonucleotide
  Target: LAMA2; (-) strand; PAM type: NRG; PAM sequence: TGG
gttaagataaactccttgcc

SEQ ID NO: 102634 - DNA, 20 bp, Artificial Sequence
  Description of Artificial Sequence: Synthetic oligonucleotide
  Target: LAMA2; (-) strand; PAM type: NRG; PAM sequence: AAG
agtcagtaaggggtagagtt

SEQ ID NO: 102635 - DNA, 20 bp, Artificial Sequence
  Description of Artificial Sequence: Synthetic oligonucleotide
  Target: LAMA2; (-) strand; PAM type: NRG; PAM sequence: GAG
cacacagtcagtaaggggta

SEQ ID NO: 102636 - DNA, 20 bp, Artificial Sequence
  Description of Artificial Sequence: Synthetic oligonucleotide
  Target: LAMA2; (-) strand; PAM type: NRG; PAM sequence: TAG
atcacacagtcagtaagggg

SEQ ID NO: 102637 - DNA, 20 bp, Artificial Sequence
  Description of Artificial Sequence: Synthetic oligonucleotide
  Target: LAMA2; (-) strand; PAM type: NRG; PAM sequence: GGG
gagatcacacagtcagtaag

SEQ ID NO: 102638 - DNA, 20 bp, Artificial Sequence
  Description of Artificial Sequence: Synthetic oligonucleotide
  Target: LAMA2; (-) strand; PAM type: NRG; PAM sequence: GGG
cgagatcacacagtcagtaa

SEQ ID NO: 102639 - DNA, 20 bp, Artificial Sequence
  Description of Artificial Sequence: Synthetic oligonucleotide
  Target: LAMA2; (-) strand; PAM type: NRG; PAM sequence: AGG
acgagatcacacagtcagta

SEQ ID NO: 102640 - DNA, 20 bp, Artificial Sequence
  Description of Artificial Sequence: Synthetic oligonucleotide
  Target: LAMA2; (-) strand; PAM type: NRG; PAM sequence: AAG
cacgagatcacacagtcagt

SEQ ID NO: 102641 - DNA, 20 bp, Artificial Sequence
  Description of Artificial Sequence: Synthetic oligonucleotide
  Target: LAMA2; (-) strand; PAM type: NRG; PAM sequence: CAG
tgtgcacgagatcacacagt

SEQ ID NO: 102642 - DNA, 20 bp, Artificial Sequence
  Description of Artificial Sequence: Synthetic oligonucleotide
  Target: LAMA2; (-) strand; PAM type: NRG; PAM sequence: CAG
aaaatgtgcacgagatcaca

SEQ ID NO: 102643 - DNA, 20 bp, Artificial Sequence
  Description of Artificial Sequence: Synthetic oligonucleotide
  Target: LAMA2; (-) strand; PAM type: NRG; PAM sequence: GAG
agacagttaaaaatgtgcac

SEQ ID NO: 102644 - DNA, 20 bp, Artificial Sequence
  Description of Artificial Sequence: Synthetic oligonucleotide
  Target: LAMA2; (-) strand; PAM type: NRG; PAM sequence: CAG
agagcaaactgtcttgaaga

SEQ ID NO: 102645 - DNA, 20 bp, Artificial Sequence
  Description of Artificial Sequence: Synthetic oligonucleotide
  Target: LAMA2; (-) strand; PAM type: NRG; PAM sequence: AAG
tgaaagagcaaactgtcttg

SEQ ID NO: 102646 - DNA, 20 bp, Artificial Sequence
  Description of Artificial Sequence: Synthetic oligonucleotide
  Target: LAMA2; (-) strand; PAM type: NRG; PAM sequence: GAG
cattattccatttcatgaaa

SEQ ID NO: 102647 - DNA, 20 bp, Artificial Sequence
  Description of Artificial Sequence: Synthetic oligonucleotide
  Target: LAMA2; (-) strand; PAM type: NRG; PAM sequence: AAG
agcattattccatttcatga

SEQ ID NO: 102648 - DNA, 20 bp, Artificial Sequence
  Description of Artificial Sequence: Synthetic oligonucleotide
  Target: LAMA2; (-) strand; PAM type: NRG; PAM sequence: AAG
acaacagctctatggggggt

SEQ ID NO: 102649 - DNA, 20 bp, Artificial Sequence
  Description of Artificial Sequence: Synthetic oligonucleotide
  Target: LAMA2; (-) strand; PAM type: NRG; PAM sequence: GGG
tttcacaacagctctatggg

SEQ ID NO: 102650 - DNA, 20 bp, Artificial Sequence
  Description of Artificial Sequence: Synthetic oligonucleotide
  Target: LAMA2; (-) strand; PAM type: NRG; PAM sequence: GGG
ttttcacaacagctctatgg

SEQ ID NO: 102651 - DNA, 20 bp, Artificial Sequence
  Description of Artificial Sequence: Synthetic oligonucleotide
  Target: LAMA2; (-) strand; PAM type: NRG; PAM sequence: GGG
attttcacaacagctctatg

SEQ ID NO: 102652 - DNA, 20 bp, Artificial Sequence
  Description of Artificial Sequence: Synthetic oligonucleotide
  Target: LAMA2; (-) strand; PAM type: NRG; PAM sequence: GGG
aattttcacaacagctctat

SEQ ID NO: 102653 - DNA, 20 bp, Artificial Sequence
  Description of Artificial Sequence: Synthetic oligonucleotide
  Target: LAMA2; (-) strand; PAM type: NRG; PAM sequence: TGG
taattttcacaacagctcta

SEQ ID NO: 102654 - DNA, 20 bp, Artificial Sequence
  Description of Artificial Sequence: Synthetic oligonucleotide
  Target: LAMA2; (-) strand; PAM type: NRG; PAM sequence: CAG
ttttcatttaattttcacaa

SEQ ID NO: 102655 - DNA, 20 bp, Artificial Sequence
  Description of Artificial Sequence: Synthetic oligonucleotide
  Target: LAMA2; (-) strand; PAM type: NRG; PAM sequence: AGG
ttgagaaattactatgtgcc

SEQ ID NO: 102656 - DNA, 20 bp, Artificial Sequence
  Description of Artificial Sequence: Synthetic oligonucleotide
  Target: LAMA2; (-) strand; PAM type: NRG; PAM sequence: CAG
attgagaaattactatgtgc

SEQ ID NO: 102657 - DNA, 20 bp, Artificial Sequence
  Description of Artificial Sequence: Synthetic oligonucleotide
  Target: LAMA2; (-) strand; PAM type: NRG; PAM sequence: GAG
aaaaattgcagtgacttatt

SEQ ID NO: 102658 - DNA, 20 bp, Artificial Sequence
  Description of Artificial Sequence: Synthetic oligonucleotide
  Target: LAMA2; (-) strand; PAM type: NRG; PAM sequence: CAG
caggcaaataataaaaattg

SEQ ID NO: 102659 - DNA, 20 bp, Artificial Sequence
  Description of Artificial Sequence: Synthetic oligonucleotide
  Target: LAMA2; (-) strand; PAM type: NRG; PAM sequence: AGG
gagtgtcatgccaaatattc

SEQ ID NO: 102660 - DNA, 20 bp, Artificial Sequence
  Description of Artificial Sequence: Synthetic oligonucleotide
  Target: LAMA2; (-) strand; PAM type: NRG; PAM sequence: CAG
tgagtgtcatgccaaatatt

SEQ ID NO: 102661 - DNA, 20 bp, Artificial Sequence
  Description of Artificial Sequence: Synthetic oligonucleotide
  Target: LAMA2; (-) strand; PAM type: NRG; PAM sequence: GAG
caactgggcacttacacatt

SEQ ID NO: 102662 - DNA, 20 bp, Artificial Sequence
  Description of Artificial Sequence: Synthetic oligonucleotide
  Target: LAMA2; (-) strand; PAM type: NRG; PAM sequence: GGG
ataaggaaactatttcaact

SEQ ID NO: 102663 - DNA, 20 bp, Artificial Sequence
  Description of Artificial Sequence: Synthetic oligonucleotide
  Target: LAMA2; (-) strand; PAM type: NRG; PAM sequence: TGG
gataaggaaactatttcaac

SEQ ID NO: 102664 - DNA, 20 bp, Artificial Sequence
  Description of Artificial Sequence: Synthetic oligonucleotide
  Target: LAMA2; (-) strand; PAM type: NRG; PAM sequence: AGG
tcaccttcaaagaaaagata

SEQ ID NO: 102665 - DNA, 20 bp, Artificial Sequence
  Description of Artificial Sequence: Synthetic oligonucleotide
  Target: LAMA2; (-) strand; PAM type: NRG; PAM sequence: AAG
ctcaccttcaaagaaaagat

SEQ ID NO: 102666 - DNA, 20 bp, Artificial Sequence
  Description of Artificial Sequence: Synthetic oligonucleotide
  Target: LAMA2; (-) strand; PAM type: NRG; PAM sequence: AAG
gccttctcaccttcaaagaa

SEQ ID NO: 102667 - DNA, 20 bp, Artificial Sequence
  Description of Artificial Sequence: Synthetic oligonucleotide
  Target: LAMA2; (-) strand; PAM type: NRG; PAM sequence: AAG
acttagccttctcaccttca

SEQ ID NO: 102668 - DNA, 20 bp, Artificial Sequence
  Description of Artificial Sequence: Synthetic oligonucleotide
  Target: LAMA2; (-) strand; PAM type: NRG; PAM sequence: TAG
ttttgtatataaaaggaact

SEQ ID NO: 102669 - DNA, 20 bp, Artificial Sequence
  Description of Artificial Sequence: Synthetic oligonucleotide
  Target: LAMA2; (-) strand; PAM type: NRG; PAM sequence: AGG
aacacatttttgtatataaa

SEQ ID NO: 102670 - DNA, 20 bp, Artificial Sequence
  Description of Artificial Sequence: Synthetic oligonucleotide
  Target: LAMA2; (-) strand; PAM type: NRG; PAM sequence: AAG
gaacacatttttgtatataa

SEQ ID NO: 102671 - DNA, 20 bp, Artificial Sequence
  Description of Artificial Sequence: Synthetic oligonucleotide
  Target: LAMA2; (-) strand; PAM type: NRG; PAM sequence: CAG
cttgcagtgatagtgttcga

SEQ ID NO: 102672 - DNA, 20 bp, Artificial Sequence
  Description of Artificial Sequence: Synthetic oligonucleotide
  Target: LAMA2; (-) strand; PAM type: NRG; PAM sequence: TAG
agtaaatggccttgcagtga

SEQ ID NO: 102673 - DNA, 20 bp, Artificial Sequence
  Description of Artificial Sequence: Synthetic oligonucleotide
  Target: LAMA2; (-) strand; PAM type: NRG; PAM sequence: CAG
atttttagtaaatggccttg

SEQ ID NO: 102674 - DNA, 20 bp, Artificial Sequence
  Description of Artificial Sequence: Synthetic oligonucleotide
  Target: LAMA2; (-) strand; PAM type: NRG; PAM sequence: TGG
ccataaacatttttagtaaa

SEQ ID NO: 102675 - DNA, 20 bp, Artificial Sequence
  Description of Artificial Sequence: Synthetic oligonucleotide
  Target: LAMA2; (-) strand; PAM type: NRG; PAM sequence: TAG
ttccatcccataaacatttt

SEQ ID NO: 102676 - DNA, 20 bp, Artificial Sequence
  Description of Artificial Sequence: Synthetic oligonucleotide
  Target: LAMA2; (-) strand; PAM type: NRG; PAM sequence: AAG
ggtgacagcaagtgctgaaa

SEQ ID NO: 102677 - DNA, 20 bp, Artificial Sequence
  Description of Artificial Sequence: Synthetic oligonucleotide
  Target: LAMA2; (-) strand; PAM type: NRG; PAM sequence: AAG
gggcccgctgaggtgacagc

SEQ ID NO: 102678 - DNA, 20 bp, Artificial Sequence
  Description of Artificial Sequence: Synthetic oligonucleotide
  Target: LAMA2; (-) strand; PAM type: NRG; PAM sequence: CAG
tctggggcccgctgaggtga

SEQ ID NO: 102679 - DNA, 20 bp, Artificial Sequence
  Description of Artificial Sequence: Synthetic oligonucleotide
  Target: LAMA2; (-) strand; PAM type: NRG; PAM sequence: AGG
agcctctctggggcccgctg

SEQ ID NO: 102680 - DNA, 20 bp, Artificial Sequence
  Description of Artificial Sequence: Synthetic oligonucleotide
  Target: LAMA2; (-) strand; PAM type: NRG; PAM sequence: GAG
aagcctctctggggcccgct

SEQ ID NO: 102681 - DNA, 20 bp, Artificial Sequence
  Description of Artificial Sequence: Synthetic oligonucleotide
  Target: LAMA2; (-) strand; PAM type: NRG; PAM sequence: GGG
cagctgaataagcctctctg

SEQ ID NO: 102682 - DNA, 20 bp, Artificial Sequence
  Description of Artificial Sequence: Synthetic oligonucleotide
  Target: LAMA2; (-) strand; PAM type: NRG; PAM sequence: GGG
ccagctgaataagcctctct

SEQ ID NO: 102683 - DNA, 20 bp, Artificial Sequence
  Description of Artificial Sequence: Synthetic oligonucleotide
  Target: LAMA2; (-) strand; PAM type: NRG; PAM sequence: TGG
gccagctgaataagcctctc

SEQ ID NO: 102684 - DNA, 20 bp, Artificial Sequence
  Description of Artificial Sequence: Synthetic oligonucleotide
  Target: LAMA2; (-) strand; PAM type: NRG; PAM sequence: AAG
ttgccctctgccagctgaat

SEQ ID NO: 102685 - DNA, 20 bp, Artificial Sequence
  Description of Artificial Sequence: Synthetic oligonucleotide
  Target: LAMA2; (-) strand; PAM type: NRG; PAM sequence: CAG
gtattcagattgccctctgc

SEQ ID NO: 102686 - DNA, 20 bp, Artificial Sequence
  Description of Artificial Sequence: Synthetic oligonucleotide
  Target: LAMA2; (-) strand; PAM type: NRG; PAM sequence: CAG
atttcggtcacgagtgtatt

SEQ ID NO: 102687 - DNA, 20 bp, Artificial Sequence
  Description of Artificial Sequence: Synthetic oligonucleotide
  Target: LAMA2; (-) strand; PAM type: NRG; PAM sequence: GAG
agctcgttcatttcggtcac

SEQ ID NO: 102688 - DNA, 20 bp, Artificial Sequence
  Description of Artificial Sequence: Synthetic oligonucleotide
  Target: LAMA2; (-) strand; PAM type: NRG; PAM sequence: CGG
ggtcagcagctcgttcattt

SEQ ID NO: 102689 - DNA, 20 bp, Artificial Sequence
  Description of Artificial Sequence: Synthetic oligonucleotide
  Target: LAMA2; (-) strand; PAM type: NRG; PAM sequence: CAG
tgccaccttaccctggtcag

SEQ ID NO: 102690 - DNA, 20 bp, Artificial Sequence
  Description of Artificial Sequence: Synthetic oligonucleotide
  Target: LAMA2; (-) strand; PAM type: NRG; PAM sequence: CAG
ttttgccaccttaccctggt

SEQ ID NO: 102691 - DNA, 20 bp, Artificial Sequence
  Description of Artificial Sequence: Synthetic oligonucleotide
  Target: LAMA2; (-) strand; PAM type: NRG; PAM sequence: TGG
ataattttgccaccttaccc

SEQ ID NO: 102692 - DNA, 20 bp, Artificial Sequence
  Description of Artificial Sequence: Synthetic oligonucleotide
  Target: LAMA2; (-) strand; PAM type: NRG; PAM sequence: AAG
cataatctatctgctttcag

SEQ ID NO: 102693 - DNA, 20 bp, Artificial Sequence
  Description of Artificial Sequence: Synthetic oligonucleotide
  Target: LAMA2; (-) strand; PAM type: NRG; PAM sequence: CAG
tgacataatctatctgcttt

SEQ ID NO: 102694 - DNA, 20 bp, Artificial Sequence
  Description of Artificial Sequence: Synthetic oligonucleotide
  Target: LAMA2; (-) strand; PAM type: NRG; PAM sequence: AAG
atttgcatttcagaactttg

SEQ ID NO: 102695 - DNA, 20 bp, Artificial Sequence
  Description of Artificial Sequence: Synthetic oligonucleotide
  Target: LAMA2; (-) strand; PAM type: NRG; PAM sequence: CAG
gaagaaggtgatttgcattt

SEQ ID NO: 102696 - DNA, 20 bp, Artificial Sequence
  Description of Artificial Sequence: Synthetic oligonucleotide
  Target: LAMA2; (-) strand; PAM type: NRG; PAM sequence: AGG
caaattgggaattaggaaga

SEQ ID NO: 102697 - DNA, 20 bp, Artificial Sequence
  Description of Artificial Sequence: Synthetic oligonucleotide
  Target: LAMA2; (-) strand; PAM type: NRG; PAM sequence: AAG
ccaaattgggaattaggaag

SEQ ID NO: 102698 - DNA, 20 bp, Artificial Sequence
  Description of Artificial Sequence: Synthetic oligonucleotide
  Target: LAMA2; (-) strand; PAM type: NRG; PAM sequence: AAG
ataccaaattgggaattagg

SEQ ID NO: 102699 - DNA, 20 bp, Artificial Sequence
  Description of Artificial Sequence: Synthetic oligonucleotide
  Target: LAMA2; (-) strand; PAM type: NRG; PAM sequence: AGG
tatataccaaattgggaatt

SEQ ID NO: 102700 - DNA, 20 bp, Artificial Sequence
  Description of Artificial Sequence: Synthetic oligonucleotide
  Target: LAMA2; (-) strand; PAM type: NRG; PAM sequence: TAG
ttatataccaaattgggaat

SEQ ID NO: 102701 - DNA, 20 bp, Artificial Sequence
  Description of Artificial Sequence: Synthetic oligonucleotide
  Target: LAMA2; (-) strand; PAM type: NRG; PAM sequence: GGG
tctattttatataccaaatt

SEQ ID NO: 102702 - DNA, 20 bp, Artificial Sequence
  Description of Artificial Sequence: Synthetic oligonucleotide
  Target: LAMA2; (-) strand; PAM type: NRG; PAM sequence: TGG
atctattttatataccaaat

SEQ ID NO: 102703 - DNA, 20 bp, Artificial Sequence
  Description of Artificial Sequence: Synthetic oligonucleotide
  Target: LAMA2; (-) strand; PAM type: NRG; PAM sequence: CAG
ttgaagcagaattagcaagt

SEQ ID NO: 102704 - DNA, 20 bp, Artificial Sequence
  Description of Artificial Sequence: Synthetic oligonucleotide
  Target: LAMA2; (-) strand; PAM type: NRG; PAM sequence: AAG
tgatttgaagcagaattagc

SEQ ID NO: 102705 - DNA, 20 bp, Artificial Sequence
  Description of Artificial Sequence: Synthetic oligonucleotide
  Target: LAMA2; (-) strand; PAM type: NRG; PAM sequence: TAG
gatttgatttgaagcagaat

SEQ ID NO: 102706 - DNA, 20 bp, Artificial Sequence
  Description of Artificial Sequence: Synthetic oligonucleotide
  Target: LAMA2; (-) strand; PAM type: NRG; PAM sequence: CAG
ttctatgatttgatttgaag

SEQ ID NO: 102707 - DNA, 20 bp, Artificial Sequence
  Description of Artificial Sequence: Synthetic oligonucleotide
  Target: LAMA2; (-) strand; PAM type: NRG; PAM sequence: AAG
gatttctatgatttgatttg

SEQ ID NO: 102708 - DNA, 20 bp, Artificial Sequence
  Description of Artificial Sequence: Synthetic oligonucleotide
  Target: LAMA2; (-) strand; PAM type: NRG; PAM sequence: AGG
tttagccattgacaatttcc

SEQ ID NO: 102709 - DNA, 20 bp, Artificial Sequence
  Description of Artificial Sequence: Synthetic oligonucleotide
  Target: LAMA2; (-) strand; PAM type: NRG; PAM sequence: CAG
ttttagccattgacaatttc

SEQ ID NO: 102710 - DNA, 20 bp, Artificial Sequence
  Description of Artificial Sequence: Synthetic oligonucleotide
  Target: LAMA2; (-) strand; PAM type: NRG; PAM sequence: TAG
cactgtcattctggactttt

SEQ ID NO: 102711 - DNA, 20 bp, Artificial Sequence
  Description of Artificial Sequence: Synthetic oligonucleotide
  Target: LAMA2; (-) strand; PAM type: NRG; PAM sequence: TGG
ctcaaaatacactgtcattc

SEQ ID NO: 102712 - DNA, 20 bp, Artificial Sequence
  Description of Artificial Sequence: Synthetic oligonucleotide
  Target: LAMA2; (-) strand; PAM type: NRG; PAM sequence: AAG
accacggaggctactgaata

SEQ ID NO: 102713 - DNA, 20 bp, Artificial Sequence
  Description of Artificial Sequence: Synthetic oligonucleotide
  Target: LAMA2; (-) strand; PAM type: NRG; PAM sequence: AGG
agatacaaactttaccacgg

SEQ ID NO: 102714 - DNA, 20 bp, Artificial Sequence
  Description of Artificial Sequence: Synthetic oligonucleotide
  Target: LAMA2; (-) strand; PAM type: NRG; PAM sequence: GAG
cagatacaaactttaccacg

SEQ ID NO: 102715 - DNA, 20 bp, Artificial Sequence
  Description of Artificial Sequence: Synthetic oligonucleotide
  Target: LAMA2; (-) strand; PAM type: NRG; PAM sequence: CGG
aacagatacaaactttacca

SEQ ID NO: 102716 - DNA, 20 bp, Artificial Sequence
  Description of Artificial Sequence: Synthetic oligonucleotide
  Target: LAMA2; (-) strand; PAM type: NRG; PAM sequence: CAG
agtgcttttggaaatcagaa

SEQ ID NO: 102717 - DNA, 20 bp, Artificial Sequence
  Description of Artificial Sequence: Synthetic oligonucleotide
  Target: LAMA2; (-) strand; PAM type: NRG; PAM sequence: CAG
aagatagtgcttttggaaat

SEQ ID NO: 102718 - DNA, 20 bp, Artificial Sequence
  Description of Artificial Sequence: Synthetic oligonucleotide
  Target: LAMA2; (-) strand; PAM type: NRG; PAM sequence: TGG
acaatcaaagatagtgcttt

SEQ ID NO: 102719 - DNA, 20 bp, Artificial Sequence
  Description of Artificial Sequence: Synthetic oligonucleotide
  Target: LAMA2; (-) strand; PAM type: NRG; PAM sequence: TAG
tctctttacacaatcaaaga

SEQ ID NO: 102720 - DNA, 20 bp, Artificial Sequence
  Description of Artificial Sequence: Synthetic oligonucleotide
  Target: LAMA2; (-) strand; PAM type: NRG; PAM sequence: AAG
tctttctctttacacaatca

SEQ ID NO: 102721 - DNA, 20 bp, Artificial Sequence
  Description of Artificial Sequence: Synthetic oligonucleotide
  Target: LAMA2; (-) strand; PAM type: NRG; PAM sequence: AAG
gatgagatgaaagagaccac

SEQ ID NO: 102722 - DNA, 20 bp, Artificial Sequence
  Description of Artificial Sequence: Synthetic oligonucleotide
  Target: LAMA2; (-) strand; PAM type: NRG; PAM sequence: GAG
aatcccacgatgagatgaaa

SEQ ID NO: 102723 - DNA, 20 bp, Artificial Sequence
  Description of Artificial Sequence: Synthetic oligonucleotide
  Target: LAMA2; (-) strand; PAM type: NRG; PAM sequence: AAG
aaaatcccacgatgagatga

SEQ ID NO: 102724 - DNA, 20 bp, Artificial Sequence
  Description of Artificial Sequence: Synthetic oligonucleotide
  Target: LAMA2; (-) strand; PAM type: NRG; PAM sequence: GAG
taatgcaaaaatcccacgat

SEQ ID NO: 102725 - DNA, 20 bp, Artificial Sequence
  Description of Artificial Sequence: Synthetic oligonucleotide
  Target: LAMA2; (-) strand; PAM type: NRG; PAM sequence: AAG
gatttcctcttttgtgtgga

SEQ ID NO: 102726 - DNA, 20 bp, Artificial Sequence
  Description of Artificial Sequence: Synthetic oligonucleotide
  Target: LAMA2; (-) strand; PAM type: NRG; PAM sequence: TGG
agaagatttcctcttttgtg

SEQ ID NO: 102727 - DNA, 20 bp, Artificial Sequence
  Description of Artificial Sequence: Synthetic oligonucleotide
  Target: LAMA2; (-) strand; PAM type: NRG; PAM sequence: AAG
tttggagtctcacaatagag

SEQ ID NO: 102728 - DNA, 20 bp, Artificial Sequence
  Description of Artificial Sequence: Synthetic oligonucleotide
  Target: LAMA2; (-) strand; PAM type: NRG; PAM sequence: GAG
cactttggagtctcacaata

SEQ ID NO: 102729 - DNA, 20 bp, Artificial Sequence
  Description of Artificial Sequence: Synthetic oligonucleotide
  Target: LAMA2; (-) strand; PAM type: NRG; PAM sequence: TAG
agcactttggagtctcacaa

SEQ ID NO: 102730 - DNA, 20 bp, Artificial Sequence
  Description of Artificial Sequence: Synthetic oligonucleotide
  Target: LAMA2; (-) strand; PAM type: NRG; PAM sequence: GAG
aaagtgtcttaagcactttg

SEQ ID NO: 102731 - DNA, 20 bp, Artificial Sequence
  Description of Artificial Sequence: Synthetic oligonucleotide
  Target: LAMA2; (-) strand; PAM type: NRG; PAM sequence: TGG
aaaaagtgtcttaagcactt

SEQ ID NO: 102732 - DNA, 20 bp, Artificial Sequence
  Description of Artificial Sequence: Synthetic oligonucleotide
  Target: LAMA2; (-) strand; PAM type: NRG; PAM sequence: AAG
ctgactttaaaaagtgtctt

SEQ ID NO: 102733 - DNA, 20 bp, Artificial Sequence
  Description of Artificial Sequence: Synthetic oligonucleotide
  Target: LAMA2; (-) strand; PAM type: NRG; PAM sequence: AAG
ctttacattctgactttaaa

SEQ ID NO: 102734 - DNA, 20 bp, Artificial Sequence
  Description of Artificial Sequence: Synthetic oligonucleotide
  Target: LAMA2; (-) strand; PAM type: NRG; PAM sequence: TGG
aaagcctgataaatgcaaca

SEQ ID NO: 102735 - DNA, 20 bp, Artificial Sequence
  Description of Artificial Sequence: Synthetic oligonucleotide
  Target: LAMA2; (-) strand; PAM type: NRG; PAM sequence: AAG
aaaatttccaattctttaaa

SEQ ID NO: 102736 - DNA, 20 bp, Artificial Sequence
  Description of Artificial Sequence: Synthetic oligonucleotide
  Target: LAMA2; (-) strand; PAM type: NRG; PAM sequence: CAG
aaaagtttttaataccatcg

SEQ ID NO: 102737 - DNA, 20 bp, Artificial Sequence
  Description of Artificial Sequence: Synthetic oligonucleotide
  Target: LAMA2; (-) strand; PAM type: NRG; PAM sequence: AAG
cttcattctctaactgcaaa

SEQ ID NO: 102738 - DNA, 20 bp, Artificial Sequence
  Description of Artificial Sequence: Synthetic oligonucleotide
  Target: LAMA2; (-) strand; PAM type: NRG; PAM sequence: GGG
atttctggccacaagatggc

SEQ ID NO: 102739 - DNA, 20 bp, Artificial Sequence
  Description of Artificial Sequence: Synthetic oligonucleotide
  Target: LAMA2; (-) strand; PAM type: NRG; PAM sequence: CGG
tatttctggccacaagatgg

SEQ ID NO: 102740 - DNA, 20 bp, Artificial Sequence
  Description of Artificial Sequence: Synthetic oligonucleotide
  Target: LAMA2; (-) strand; PAM type: NRG; PAM sequence: TGG
gcatatttctggccacaaga

SEQ ID NO: 102741 - DNA, 20 bp, Artificial Sequence
  Description of Artificial Sequence: Synthetic oligonucleotide
  Target: LAMA2; (-) strand; PAM type: NRG; PAM sequence: AAG
tcatgcatatttctggccac

SEQ ID NO: 102742 - DNA, 20 bp, Artificial Sequence
  Description of Artificial Sequence: Synthetic oligonucleotide
  Target: LAMA2; (-) strand; PAM type: NRG; PAM sequence: TGG
tctagcttcatgcatatttc

SEQ ID NO: 102743 - DNA, 20 bp, Artificial Sequence
  Description of Artificial Sequence: Synthetic oligonucleotide
  Target: LAMA2; (-) strand; PAM type: NRG; PAM sequence: TAG
gtactttgcagccccgtttc

SEQ ID NO: 102744 - DNA, 20 bp, Artificial Sequence
  Description of Artificial Sequence: Synthetic oligonucleotide
  Target: LAMA2; (-) strand; PAM type: NRG; PAM sequence: CAG
caaattaaatccgtactttg

SEQ ID NO: 102745 - DNA, 20 bp, Artificial Sequence
  Description of Artificial Sequence: Synthetic oligonucleotide
  Target: LAMA2; (-) strand; PAM type: NRG; PAM sequence: TAG
tctttatcatttaaagctct

SEQ ID NO: 102746 - DNA, 20 bp, Artificial Sequence
  Description of Artificial Sequence: Synthetic oligonucleotide
  Target: LAMA2; (-) strand; PAM type: NRG; PAM sequence: AAG
ccaatactctttatcattta

SEQ ID NO: 102747 - DNA, 20 bp, Artificial Sequence
  Description of Artificial Sequence: Synthetic oligonucleotide
  Target: LAMA2; (-) strand; PAM type: NRG; PAM sequence: TAG
gataatccccaggaaccttc

SEQ ID NO: 102748 - DNA, 20 bp, Artificial Sequence
  Description of Artificial Sequence: Synthetic oligonucleotide
  Target: LAMA2; (-) strand; PAM type: NRG; PAM sequence: AGG
aagtggactcgataatcccc

SEQ ID NO: 102749 - DNA, 20 bp, Artificial Sequence
  Description of Artificial Sequence: Synthetic oligonucleotide
  Target: LAMA2; (-) strand; PAM type: NRG; PAM sequence: CAG
aaagtggactcgataatccc

SEQ ID NO: 102750 - DNA, 20 bp, Artificial Sequence
  Description of Artificial Sequence: Synthetic oligonucleotide
  Target: LAMA2; (-) strand; PAM type: NRG; PAM sequence: TGG
ctcttctttaaaatacaaag

SEQ ID NO: 102751 - DNA, 20 bp, Artificial Sequence
  Description of Artificial Sequence: Synthetic oligonucleotide
  Target: LAMA2; (-) strand; PAM type: NRG; PAM sequence: AAG
cagctcttctttaaaataca

SEQ ID NO: 102752 - DNA, 20 bp, Artificial Sequence
  Description of Artificial Sequence: Synthetic oligonucleotide
  Target: LAMA2; (-) strand; PAM type: NRG; PAM sequence: CAG
ttcactgtcatggcccgagg

SEQ ID NO: 102753 - DNA, 20 bp, Artificial Sequence
  Description of Artificial Sequence: Synthetic oligonucleotide
  Target: LAMA2; (-) strand; PAM type: NRG; PAM sequence: AGG
cgtttcactgtcatggcccg

SEQ ID NO: 102754 - DNA, 20 bp, Artificial Sequence
  Description of Artificial Sequence: Synthetic oligonucleotide
  Target: LAMA2; (-) strand; PAM type: NRG; PAM sequence: GAG
tcgtttcactgtcatggccc

SEQ ID NO: 102755 - DNA, 20 bp, Artificial Sequence
  Description of Artificial Sequence: Synthetic oligonucleotide
  Target: LAMA2; (-) strand; PAM type: NRG; PAM sequence: TGG
gttaattcgtttcactgtca

SEQ ID NO: 102756 - DNA, 20 bp, Artificial Sequence
  Description of Artificial Sequence: Synthetic oligonucleotide
  Target: LAMA2; (-) strand; PAM type: NRG; PAM sequence: TGG
cctgagtttagcaaattgta

SEQ ID NO: 102757 - DNA, 20 bp, Artificial Sequence
  Description of Artificial Sequence: Synthetic oligonucleotide
  Target: LAMA2; (-) strand; PAM type: NRG; PAM sequence: TAG
ccagcttaagtccctgagtt

SEQ ID NO: 102758 - DNA, 20 bp, Artificial Sequence
  Description of Artificial Sequence: Synthetic oligonucleotide
  Target: LAMA2; (-) strand; PAM type: NRG; PAM sequence: GAG
tgggtccagcttaagtccct

SEQ ID NO: 102759 - DNA, 20 bp, Artificial Sequence
  Description of Artificial Sequence: Synthetic oligonucleotide
  Target: LAMA2; (-) strand; PAM type: NRG; PAM sequence: AAG
cttgagactgggtccagctt

SEQ ID NO: 102760 - DNA, 20 bp, Artificial Sequence
  Description of Artificial Sequence: Synthetic oligonucleotide
  Target: LAMA2; (-) strand; PAM type: NRG; PAM sequence: CAG
gggaatcttgagactgggtc

SEQ ID NO: 102761 - DNA, 20 bp, Artificial Sequence
  Description of Artificial Sequence: Synthetic oligonucleotide
  Target: LAMA2; (-) strand; PAM type: NRG; PAM sequence: GGG
ccagtgggaatcttgagact

SEQ ID NO: 102762 - DNA, 20 bp, Artificial Sequence
  Description of Artificial Sequence: Synthetic oligonucleotide
  Target: LAMA2; (-) strand; PAM type: NRG; PAM sequence: TGG
gccagtgggaatcttgagac

SEQ ID NO: 102763 - DNA, 20 bp, Artificial Sequence
  Description of Artificial Sequence: Synthetic oligonucleotide
  Target: LAMA2; (-) strand; PAM type: NRG; PAM sequence: GAG
actgggccagtgggaatctt

SEQ ID NO: 102764 - DNA, 20 bp, Artificial Sequence
  Description of Artificial Sequence: Synthetic oligonucleotide
  Target: LAMA2; (-) strand; PAM type: NRG; PAM sequence: GGG
agaaaaagtactgggccagt

SEQ ID NO: 102765 - DNA, 20 bp, Artificial Sequence
  Description of Artificial Sequence: Synthetic oligonucleotide
  Target: LAMA2; (-) strand; PAM type: NRG; PAM sequence: TGG
tagaaaaagtactgggccag

SEQ ID NO: 102766 - DNA, 20 bp, Artificial Sequence
  Description of Artificial Sequence: Synthetic oligonucleotide
  Target: LAMA2; (-) strand; PAM type: NRG; PAM sequence: CAG
atgtagaaaaagtactgggc

SEQ ID NO: 102767 - DNA, 20 bp, Artificial Sequence
  Description of Artificial Sequence: Synthetic oligonucleotide
  Target: LAMA2; (-) strand; PAM type: NRG; PAM sequence: GGG
ggctatgtagaaaaagtact

SEQ ID NO: 102768 - DNA, 20 bp, Artificial Sequence
  Description of Artificial Sequence: Synthetic oligonucleotide
  Target: LAMA2; (-) strand; PAM type: NRG; PAM sequence: TGG
aggctatgtagaaaaagtac

SEQ ID NO: 102769 - DNA, 20 bp, Artificial Sequence
  Description of Artificial Sequence: Synthetic oligonucleotide
  Target: LAMA2; (-) strand; PAM type: NRG; PAM sequence: AAG
gacagcaggctatgtagaaa

SEQ ID NO: 102770 - DNA, 20 bp, Artificial Sequence
  Description of Artificial Sequence: Synthetic oligonucleotide
  Target: LAMA2; (-) strand; PAM type: NRG; PAM sequence: TAG
taaaccgacagcaggctatg

SEQ ID NO: 102771 - DNA, 20 bp, Artificial Sequence
  Description of Artificial Sequence: Synthetic oligonucleotide
  Target: LAMA2; (-) strand; PAM type: NRG; PAM sequence: AGG
tattttcctaaaccgacagc

SEQ ID NO: 102772 - DNA, 20 bp, Artificial Sequence
  Description of Artificial Sequence: Synthetic oligonucleotide
  Target: LAMA2; (-) strand; PAM type: NRG; PAM sequence: CAG
atattttcctaaaccgacag

SEQ ID NO: 102773 - DNA, 20 bp, Artificial Sequence
  Description of Artificial Sequence: Synthetic oligonucleotide
  Target: LAMA2; (-) strand; PAM type: NRG; PAM sequence: CAG
tggatattttcctaaaccga

SEQ ID NO: 102774 - DNA, 20 bp, Artificial Sequence
  Description of Artificial Sequence: Synthetic oligonucleotide
  Target: LAMA2; (-) strand; PAM type: NRG; PAM sequence: TGG
aagcctatttgattttcctg

SEQ ID NO: 102775 - DNA, 20 bp, Artificial Sequence
  Description of Artificial Sequence: Synthetic oligonucleotide
  Target: LAMA2; (-) strand; PAM type: NRG; PAM sequence: AAG
gtttagcattatgtgctcag

SEQ ID NO: 102776 - DNA, 20 bp, Artificial Sequence
  Description of Artificial Sequence: Synthetic oligonucleotide
  Target: LAMA2; (-) strand; PAM type: NRG; PAM sequence: CAG
gttgtttagcattatgtgct

SEQ ID NO: 102777 - DNA, 20 bp, Artificial Sequence
  Description of Artificial Sequence: Synthetic oligonucleotide
  Target: LAMA2; (-) strand; PAM type: NRG; PAM sequence: TAG
gtaacatcagggccgttgtt

SEQ ID NO: 102778 - DNA, 20 bp, Artificial Sequence
  Description of Artificial Sequence: Synthetic oligonucleotide
  Target: LAMA2; (-) strand; PAM type: NRG; PAM sequence: GGG
agtatgctattgtaacatca

SEQ ID NO: 102779 - DNA, 20 bp, Artificial Sequence
  Description of Artificial Sequence: Synthetic oligonucleotide
  Target: LAMA2; (-) strand; PAM type: NRG; PAM sequence: AGG
tagtatgctattgtaacatc

SEQ ID NO: 102780 - DNA, 20 bp, Artificial Sequence
  Description of Artificial Sequence: Synthetic oligonucleotide
  Target: LAMA2; (-) strand; PAM type: NRG; PAM sequence: CAG
ttagtatgctattgtaacat

SEQ ID NO: 102781 - DNA, 20 bp, Artificial Sequence
  Description of Artificial Sequence: Synthetic oligonucleotide
  Target: LAMA2; (-) strand; PAM type: NRG; PAM sequence: TAG
tgagattctgaaaaagtgtt

SEQ ID NO: 102782 - DNA, 20 bp, Artificial Sequence
  Description of Artificial Sequence: Synthetic oligonucleotide
  Target: LAMA2; (-) strand; PAM type: NRG; PAM sequence: AAG
gttgctatgagattctgaaa

SEQ ID NO: 102783 - DNA, 20 bp, Artificial Sequence
  Description of Artificial Sequence: Synthetic oligonucleotide
  Target: LAMA2; (-) strand; PAM type: NRG; PAM sequence: GAG
acattctatattgttgctat

SEQ ID NO: 102784 - DNA, 20 bp, Artificial Sequence
  Description of Artificial Sequence: Synthetic oligonucleotide
  Target: LAMA2; (-) strand; PAM type: NRG; PAM sequence: AAG
aatgtctacatacatttggc

SEQ ID NO: 102785 - DNA, 20 bp, Artificial Sequence
  Description of Artificial Sequence: Synthetic oligonucleotide
  Target: LAMA2; (-) strand; PAM type: NRG; PAM sequence: TGG
atctaatgtctacatacatt

SEQ ID NO: 102786 - DNA, 20 bp, Artificial Sequence
  Description of Artificial Sequence: Synthetic oligonucleotide
  Target: LAMA2; (-) strand; PAM type: NRG; PAM sequence: GAG
atttcatattaaattaatat

SEQ ID NO: 102787 - DNA, 20 bp, Artificial Sequence
  Description of Artificial Sequence: Synthetic oligonucleotide
  Target: LAMA2; (-) strand; PAM type: NRG; PAM sequence: TAG
tttattctaccatgacctgt

SEQ ID NO: 102788 - DNA, 20 bp, Artificial Sequence
  Description of Artificial Sequence: Synthetic oligonucleotide
  Target: LAMA2; (-) strand; PAM type: NRG; PAM sequence: AGG
catctgccaacacgtaactt

SEQ ID NO: 102789 - DNA, 20 bp, Artificial Sequence
  Description of Artificial Sequence: Synthetic oligonucleotide
  Target: LAMA2; (-) strand; PAM type: NRG; PAM sequence: TAG
tcatctgccaacacgtaact

SEQ ID NO: 102790 - DNA, 20 bp, Artificial Sequence
  Description of Artificial Sequence: Synthetic oligonucleotide
  Target: LAMA2; (-) strand; PAM type: NRG; PAM sequence: GAG
aagttctttgaagacagatt

SEQ ID NO: 102791 - DNA, 20 bp, Artificial Sequence
  Description of Artificial Sequence: Synthetic oligonucleotide
  Target: LAMA2; (-) strand; PAM type: NRG; PAM sequence: CAG
atctcaaagttctttgaaga

SEQ ID NO: 102792 - DNA, 20 bp, Artificial Sequence
  Description of Artificial Sequence: Synthetic oligonucleotide
  Target: LAMA2; (-) strand; PAM type: NRG; PAM sequence: AAG
acacatctcaaagttctttg

SEQ ID NO: 102793 - DNA, 20 bp, Artificial Sequence
  Description of Artificial Sequence: Synthetic oligonucleotide
  Target: LAMA2; (-) strand; PAM type: NRG; PAM sequence: AAG
acacacacacacacatctca

SEQ ID NO: 102794 - DNA, 20 bp, Artificial Sequence
  Description of Artificial Sequence: Synthetic oligonucleotide
  Target: LAMA2; (-) strand; PAM type: NRG; PAM sequence: TGG
ctgcatgcagttgtctaata

SEQ ID NO: 102795 - DNA, 20 bp, Artificial Sequence
  Description of Artificial Sequence: Synthetic oligonucleotide
  Target: LAMA2; (-) strand; PAM type: NRG; PAM sequence: CAG
ttttattatatacctgcatg

SEQ ID NO: 102796 - DNA, 20 bp, Artificial Sequence
  Description of Artificial Sequence: Synthetic oligonucleotide
  Target: LAMA2; (-) strand; PAM type: NRG; PAM sequence: CAG
tctattattaaatatttctc

SEQ ID NO: 102797 - DNA, 20 bp, Artificial Sequence
  Description of Artificial Sequence: Synthetic oligonucleotide
  Target: LAMA2; (-) strand; PAM type: NRG; PAM sequence: CAG
tttttctaattacccctaag

SEQ ID NO: 102798 - DNA, 20 bp, Artificial Sequence
  Description of Artificial Sequence: Synthetic oligonucleotide
  Target: LAMA2; (-) strand; PAM type: NRG; PAM sequence: AAG
aattttttctaattacccct

SEQ ID NO: 102799 - DNA, 20 bp, Artificial Sequence
  Description of Artificial Sequence: Synthetic oligonucleotide
  Target: LAMA2; (-) strand; PAM type: NRG; PAM sequence: AAG
actcccaaaaagtattagtt

SEQ ID NO: 102800 - DNA, 20 bp, Artificial Sequence
  Description of Artificial Sequence: Synthetic oligonucleotide
  Target: LAMA2; (-) strand; PAM type: NRG; PAM sequence: TAG
gagagactcccaaaaagtat

SEQ ID NO: 102801 - DNA, 20 bp, Artificial Sequence
  Description of Artificial Sequence: Synthetic oligonucleotide
  Target: LAMA2; (-) strand; PAM type: NRG; PAM sequence: AAG
gaacatgagagactcccaaa

SEQ ID NO: 102802 - DNA, 20 bp, Artificial Sequence
  Description of Artificial Sequence: Synthetic oligonucleotide
  Target: LAMA2; (-) strand; PAM type: NRG; PAM sequence: GAG
tcataattcctagaacatga

SEQ ID NO: 102803 - DNA, 20 bp, Artificial Sequence
  Description of Artificial Sequence: Synthetic oligonucleotide
  Target: LAMA2; (-) strand; PAM type: NRG; PAM sequence: GAG
tgtcataattcctagaacat

SEQ ID NO: 102804 - DNA, 20 bp, Artificial Sequence
  Description of Artificial Sequence: Synthetic oligonucleotide
  Target: LAMA2; (-) strand; PAM type: NRG; PAM sequence: TAG
atccccagtgtcataattcc

SEQ ID NO: 102805 - DNA, 20 bp, Artificial Sequence
  Description of Artificial Sequence: Synthetic oligonucleotide
  Target: LAMA2; (-) strand; PAM type: NRG; PAM sequence: CAG
tttgctcacacttctatccc

SEQ ID NO: 102806 - DNA, 20 bp, Artificial Sequence
  Description of Artificial Sequence: Synthetic oligonucleotide
  Target: LAMA2; (-) strand; PAM type: NRG; PAM sequence: CAG
caatgagggcaaggactgcg

SEQ ID NO: 102807 - DNA, 20 bp, Artificial Sequence
  Description of Artificial Sequence: Synthetic oligonucleotide
  Target: LAMA2; (-) strand; PAM type: NRG; PAM sequence: AGG
atactaagccaatgagggca

SEQ ID NO: 102808 - DNA, 20 bp, Artificial Sequence
  Description of Artificial Sequence: Synthetic oligonucleotide
  Target: LAMA2; (-) strand; PAM type: NRG; PAM sequence: AAG
tatactaagccaatgagggc

SEQ ID NO: 102809 - DNA, 20 bp, Artificial Sequence
  Description of Artificial Sequence: Synthetic oligonucleotide
  Target: LAMA2; (-) strand; PAM type: NRG; PAM sequence: GGG
agactatactaagccaatga

SEQ ID NO: 102810 - DNA, 20 bp, Artificial Sequence
  Description of Artificial Sequence: Synthetic oligonucleotide
  Target: LAMA2; (-) strand; PAM type: NRG; PAM sequence: AGG
tagactatactaagccaatg

SEQ ID NO: 102811 - DNA, 20 bp, Artificial Sequence
  Description of Artificial Sequence: Synthetic oligonucleotide
  Target: LAMA2; (-) strand; PAM type: NRG; PAM sequence: GAG
ttagactatactaagccaat

SEQ ID NO: 102812 - DNA, 20 bp, Artificial Sequence
  Description of Artificial Sequence: Synthetic oligonucleotide
  Target: LAMA2; (-) strand; PAM type: NRG; PAM sequence: AAG
tcagatcattagactatact

SEQ ID NO: 102813 - DNA, 20 bp, Artificial Sequence
  Description of Artificial Sequence: Synthetic oligonucleotide
  Target: LAMA2; (-) strand; PAM type: NRG; PAM sequence: TAG
tgtctctaacgtcagatcat

SEQ ID NO: 102814 - DNA, 20 bp, Artificial Sequence
  Description of Artificial Sequence: Synthetic oligonucleotide
  Target: LAMA2; (-) strand; PAM type: NRG; PAM sequence: CAG
actttttgtgtctctaacgt

SEQ ID NO: 102815 - DNA, 20 bp, Artificial Sequence
  Description of Artificial Sequence: Synthetic oligonucleotide
  Target: LAMA2; (-) strand; PAM type: NRG; PAM sequence: AAG
gtctcaaaaaaaaaaaaaaa

SEQ ID NO: 102816 - DNA, 20 bp, Artificial Sequence
  Description of Artificial Sequence: Synthetic oligonucleotide
  Target: LAMA2; (-) strand; PAM type: NRG; PAM sequence: AAG
tccagcctcggcgacagagc

SEQ ID NO: 102817 - DNA, 20 bp, Artificial Sequence
  Description of Artificial Sequence: Synthetic oligonucleotide
  Target: LAMA2; (-) strand; PAM type: NRG; PAM sequence: GAG
gcactccagcctcggcgaca

SEQ ID NO: 102818 - DNA, 20 bp, Artificial Sequence
  Description of Artificial Sequence: Synthetic oligonucleotide
  Target: LAMA2; (-) strand; PAM type: NRG; PAM sequence: CAG
ctgcactccagcctcggcga

SEQ ID NO: 102819 - DNA, 20 bp, Artificial Sequence
  Description of Artificial Sequence: Synthetic oligonucleotide
  Target: LAMA2; (-) strand; PAM type: NRG; PAM sequence: CGG
gcaccactgcactccagcct

SEQ ID NO: 102820 - DNA, 20 bp, Artificial Sequence
  Description of Artificial Sequence: Synthetic oligonucleotide
  Target: LAMA2; (-) strand; PAM type: NRG; PAM sequence: CAG
aagatcgcaccactgcactc

SEQ ID NO: 102821 - DNA, 20 bp, Artificial Sequence
  Description of Artificial Sequence: Synthetic oligonucleotide
  Target: LAMA2; (-) strand; PAM type: NRG; PAM sequence: AAG
ggcggaggttgcagtgagcc

SEQ ID NO: 102822 - DNA, 20 bp, Artificial Sequence
  Description of Artificial Sequence: Synthetic oligonucleotide
  Target: LAMA2; (-) strand; PAM type: NRG; PAM sequence: GAG
cgggaggcggaggttgcagt

SEQ ID NO: 102823 - DNA, 20 bp, Artificial Sequence
  Description of Artificial Sequence: Synthetic oligonucleotide
  Target: LAMA2; (-) strand; PAM type: NRG; PAM sequence: CAG
aacccgggaggcggaggttg

SEQ ID NO: 102824 - DNA, 20 bp, Artificial Sequence
  Description of Artificial Sequence: Synthetic oligonucleotide
  Target: LAMA2; (-) strand; PAM type: NRG; PAM sequence: AGG
cacttgaacccgggaggcgg

SEQ ID NO: 102825 - DNA, 20 bp, Artificial Sequence
  Description of Artificial Sequence: Synthetic oligonucleotide
  Target: LAMA2; (-) strand; PAM type: NRG; PAM sequence: GAG
tcacttgaacccgggaggcg

SEQ ID NO: 102826 - DNA, 20 bp, Artificial Sequence
  Description of Artificial Sequence: Synthetic oligonucleotide
  Target: LAMA2; (-) strand; PAM type: NRG; PAM sequence: CGG
aatcacttgaacccgggagg

SEQ ID NO: 102827 - DNA, 20 bp, Artificial Sequence
  Description of Artificial Sequence: Synthetic oligonucleotide
  Target: LAMA2; (-) strand; PAM type: NRG; PAM sequence: AGG
gaaaatcacttgaacccggg

SEQ ID NO: 102828 - DNA, 20 bp, Artificial Sequence
  Description of Artificial Sequence: Synthetic oligonucleotide
  Target: LAMA2; (-) strand; PAM type: NRG; PAM sequence: GAG
ggaaaatcacttgaacccgg

SEQ ID NO: 102829 - DNA, 20 bp, Artificial Sequence
  Description of Artificial Sequence: Synthetic oligonucleotide
  Target: LAMA2; (-) strand; PAM type: NRG; PAM sequence: GGG
caggaaaatcacttgaaccc

SEQ ID NO: 102830 - DNA, 20 bp, Artificial Sequence
  Description of Artificial Sequence: Synthetic oligonucleotide
  Target: LAMA2; (-) strand; PAM type: NRG; PAM sequence: CGG
gcaggaaaatcacttgaacc

SEQ ID NO: 102831 - DNA, 20 bp, Artificial Sequence
  Description of Artificial Sequence: Synthetic oligonucleotide
  Target: LAMA2; (-) strand; PAM type: NRG; PAM sequence: AGG
gctacttgggaggctgaggc

SEQ ID NO: 102832 - DNA, 20 bp, Artificial Sequence
  Description of Artificial Sequence: Synthetic oligonucleotide
  Target: LAMA2; (-) strand; PAM type: NRG; PAM sequence: CAG
agctacttgggaggctgagg

SEQ ID NO: 102833 - DNA, 20 bp, Artificial Sequence
  Description of Artificial Sequence: Synthetic oligonucleotide
  Target: LAMA2; (-) strand; PAM type: NRG; PAM sequence: AGG
cccagctacttgggaggctg

SEQ ID NO: 102834 - DNA, 20 bp, Artificial Sequence
  Description of Artificial Sequence: Synthetic oligonucleotide
  Target: LAMA2; (-) strand; PAM type: NRG; PAM sequence: GAG
tcccagctacttgggaggct

SEQ ID NO: 102835 - DNA, 20 bp, Artificial Sequence
  Description of Artificial Sequence: Synthetic oligonucleotide
  Target: LAMA2; (-) strand; PAM type: NRG; PAM sequence: AGG
tgtaatcccagctacttggg

SEQ ID NO: 102836 - DNA, 20 bp, Artificial Sequence
  Description of Artificial Sequence: Synthetic oligonucleotide
  Target: LAMA2; (-) strand; PAM type: NRG; PAM sequence: GAG
ctgtaatcccagctacttgg

SEQ ID NO: 102837 - DNA, 20 bp, Artificial Sequence
  Description of Artificial Sequence: Synthetic oligonucleotide
  Target: LAMA2; (-) strand; PAM type: NRG; PAM sequence: GGG
acctgtaatcccagctactt

SEQ ID NO: 102838 - DNA, 20 bp, Artificial Sequence
  Description of Artificial Sequence: Synthetic oligonucleotide
  Target: LAMA2; (-) strand; PAM type: NRG; PAM sequence: TGG
cacctgtaatcccagctact

SEQ ID NO: 102839 - DNA, 20 bp, Artificial Sequence
  Description of Artificial Sequence: Synthetic oligonucleotide
  Target: LAMA2; (-) strand; PAM type: NRG; PAM sequence: CAG
gtggcacacacctgtaatcc

SEQ ID NO: 102840 - DNA, 20 bp, Artificial Sequence
  Description of Artificial Sequence: Synthetic oligonucleotide
  Target: LAMA2; (-) strand; PAM type: NRG; PAM sequence: TGG
aaaaaattagccaggtgtgg

SEQ ID NO: 102841 - DNA, 20 bp, Artificial Sequence
  Description of Artificial Sequence: Synthetic oligonucleotide
  Target: LAMA2; (-) strand; PAM type: NRG; PAM sequence: TGG
caaaaaaaattagccaggtg

SEQ ID NO: 102842 - DNA, 20 bp, Artificial Sequence
  Description of Artificial Sequence: Synthetic oligonucleotide
  Target: LAMA2; (-) strand; PAM type: NRG; PAM sequence: AGG
aaatacaaaaaaaattagcc

SEQ ID NO: 102843 - DNA, 20 bp, Artificial Sequence
  Description of Artificial Sequence: Synthetic oligonucleotide
  Target: LAMA2; (-) strand; PAM type: NRG; PAM sequence: CAG
aaaatacaaaaaaaattagc

SEQ ID NO: 102844 - DNA, 20 bp, Artificial Sequence
  Description of Artificial Sequence: Synthetic oligonucleotide
  Target: LAMA2; (-) strand; PAM type: NRG; PAM sequence: TAG
actaaaaatacaaaaaaaat

SEQ ID NO: 102845 - DNA, 20 bp, Artificial Sequence
  Description of Artificial Sequence: Synthetic oligonucleotide
  Target: LAMA2; (-) strand; PAM type: NRG; PAM sequence: TGG
caagaccagcctgacgaaca

SEQ ID NO: 102846 - DNA, 20 bp, Artificial Sequence
  Description of Artificial Sequence: Synthetic oligonucleotide
  Target: LAMA2; (-) strand; PAM type: NRG; PAM sequence: CAG
caaggtcaggagttcaagac

SEQ ID NO: 102847 - DNA, 20 bp, Artificial Sequence
  Description of Artificial Sequence: Synthetic oligonucleotide
  Target: LAMA2; (-) strand; PAM type: NRG; PAM sequence: AAG
aatcacaaggtcaggagttc

SEQ ID NO: 102848 - DNA, 20 bp, Artificial Sequence
  Description of Artificial Sequence: Synthetic oligonucleotide
  Target: LAMA2; (-) strand; PAM type: NRG; PAM sequence: GAG
caggcgaatcacaaggtcag

SEQ ID NO: 102849 - DNA, 20 bp, Artificial Sequence
  Description of Artificial Sequence: Synthetic oligonucleotide
  Target: LAMA2; (-) strand; PAM type: NRG; PAM sequence: AGG
ggcaggcgaatcacaaggtc

SEQ ID NO: 102850 - DNA, 20 bp, Artificial Sequence
  Description of Artificial Sequence: Synthetic oligonucleotide
  Target: LAMA2; (-) strand; PAM type: NRG; PAM sequence: CAG
aggcaggcgaatcacaaggt

SEQ ID NO: 102851 - DNA, 20 bp, Artificial Sequence
  Description of Artificial Sequence: Synthetic oligonucleotide
  Target: LAMA2; (-) strand; PAM type: NRG; PAM sequence: AGG
gccaaggcaggcgaatcaca

SEQ ID NO: 102852 - DNA, 20 bp, Artificial Sequence
  Description of Artificial Sequence: Synthetic oligonucleotide
  Target: LAMA2; (-) strand; PAM type: NRG; PAM sequence: AAG
ggccaaggcaggcgaatcac

SEQ ID NO: 102853 - DNA, 20 bp, Artificial Sequence
  Description of Artificial Sequence: Synthetic oligonucleotide
  Target: LAMA2; (-) strand; PAM type: NRG; PAM sequence: AGG
gcattttgggaggccaaggc

SEQ ID NO: 102854 - DNA, 20 bp, Artificial Sequence
  Description of Artificial Sequence: Synthetic oligonucleotide
  Target: LAMA2; (-) strand; PAM type: NRG; PAM sequence: CAG
agcattttgggaggccaagg

SEQ ID NO: 102855 - DNA, 20 bp, Artificial Sequence
  Description of Artificial Sequence: Synthetic oligonucleotide
  Target: LAMA2; (-) strand; PAM type: NRG; PAM sequence: AGG
cccagcattttgggaggcca

SEQ ID NO: 102856 - DNA, 20 bp, Artificial Sequence
  Description of Artificial Sequence: Synthetic oligonucleotide
  Target: LAMA2; (-) strand; PAM type: NRG; PAM sequence: AAG
tcccagcattttgggaggcc

SEQ ID NO: 102857 - DNA, 20 bp, Artificial Sequence
  Description of Artificial Sequence: Synthetic oligonucleotide
  Target: LAMA2; (-) strand; PAM type: NRG; PAM sequence: AGG
tgtaatcccagcattttggg

SEQ ID NO: 102858 - DNA, 20 bp, Artificial Sequence
  Description of Artificial Sequence: Synthetic oligonucleotide
  Target: LAMA2; (-) strand; PAM type: NRG; PAM sequence: GAG
ctgtaatcccagcattttgg

SEQ ID NO: 102859 - DNA, 20 bp, Artificial Sequence
  Description of Artificial Sequence: Synthetic oligonucleotide
  Target: LAMA2; (-) strand; PAM type: NRG; PAM sequence: GGG
gcctgtaatcccagcatttt

SEQ ID NO: 102860 - DNA, 20 bp, Artificial Sequence
  Description of Artificial Sequence: Synthetic oligonucleotide
  Target: LAMA2; (-) strand; PAM type: NRG; PAM sequence: TGG
tgcctgtaatcccagcattt

SEQ ID NO: 102861 - DNA, 20 bp, Artificial Sequence
  Description of Artificial Sequence: Synthetic oligonucleotide
  Target: LAMA2; (-) strand; PAM type: NRG; PAM sequence: CAG
gtggctcatgcctgtaatcc

SEQ ID NO: 102862 - DNA, 20 bp, Artificial Sequence
  Description of Artificial Sequence: Synthetic oligonucleotide
  Target: LAMA2; (-) strand; PAM type: NRG; PAM sequence: TGG
cttcttgtggccaggtgcgg

SEQ ID NO: 102863 - DNA, 20 bp, Artificial Sequence
  Description of Artificial Sequence: Synthetic oligonucleotide
  Target: LAMA2; (-) strand; PAM type: NRG; PAM sequence: CGG
atacttcttgtggccaggtg

SEQ ID NO: 102864 - DNA, 20 bp, Artificial Sequence
  Description of Artificial Sequence: Synthetic oligonucleotide
  Target: LAMA2; (-) strand; PAM type: NRG; PAM sequence: AGG
atgaaatacttcttgtggcc

SEQ ID NO: 102865 - DNA, 20 bp, Artificial Sequence
  Description of Artificial Sequence: Synthetic oligonucleotide
  Target: LAMA2; (-) strand; PAM type: NRG; PAM sequence: CAG
aatgaaatacttcttgtggc

SEQ ID NO: 102866 - DNA, 20 bp, Artificial Sequence
  Description of Artificial Sequence: Synthetic oligonucleotide
  Target: LAMA2; (-) strand; PAM type: NRG; PAM sequence: TGG
tcttaatgaaatacttcttg

SEQ ID NO: 102867 - DNA, 20 bp, Artificial Sequence
  Description of Artificial Sequence: Synthetic oligonucleotide
  Target: LAMA2; (-) strand; PAM type: NRG; PAM sequence: AAG
gtataggttgagacataata

SEQ ID NO: 102868 - DNA, 20 bp, Artificial Sequence
  Description of Artificial Sequence: Synthetic oligonucleotide
  Target: LAMA2; (-) strand; PAM type: NRG; PAM sequence: GAG
aagggtaaagagtataggtt

SEQ ID NO: 102869 - DNA, 20 bp, Artificial Sequence
  Description of Artificial Sequence: Synthetic oligonucleotide
  Target: LAMA2; (-) strand; PAM type: NRG; PAM sequence: AGG
ctggaaagggtaaagagtat

SEQ ID NO: 102870 - DNA, 20 bp, Artificial Sequence
  Description of Artificial Sequence: Synthetic oligonucleotide
  Target: LAMA2; (-) strand; PAM type: NRG; PAM sequence: TAG
gctggaaagggtaaagagta

SEQ ID NO: 102871 - DNA, 20 bp, Artificial Sequence
  Description of Artificial Sequence: Synthetic oligonucleotide
  Target: LAMA2; (-) strand; PAM type: NRG; PAM sequence: GAG
aatctgctggaaagggtaaa

SEQ ID NO: 102872 - DNA, 20 bp, Artificial Sequence
  Description of Artificial Sequence: Synthetic oligonucleotide
  Target: LAMA2; (-) strand; PAM type: NRG; PAM sequence: AAG
acaatctgctggaaagggta

SEQ ID NO: 102873 - DNA, 20 bp, Artificial Sequence
  Description of Artificial Sequence: Synthetic oligonucleotide
  Target: LAMA2; (-) strand; PAM type: NRG; PAM sequence: GGG
atgagacaatctgctggaaa

SEQ ID NO: 102874 - DNA, 20 bp, Artificial Sequence
  Description of Artificial Sequence: Synthetic oligonucleotide
  Target: LAMA2; (-) strand; PAM type: NRG; PAM sequence: AGG
catgagacaatctgctggaa

SEQ ID NO: 102875 - DNA, 20 bp, Artificial Sequence
  Description of Artificial Sequence: Synthetic oligonucleotide
  Target: LAMA2; (-) strand; PAM type: NRG; PAM sequence: AAG
gcatgagacaatctgctgga

SEQ ID NO: 102876 - DNA, 20 bp, Artificial Sequence
  Description of Artificial Sequence: Synthetic oligonucleotide
  Target: LAMA2; (-) strand; PAM type: NRG; PAM sequence: TGG
catagcatgagacaatctgc

SEQ ID NO: 102877 - DNA, 20 bp, Artificial Sequence
  Description of Artificial Sequence: Synthetic oligonucleotide
  Target: LAMA2; (-) strand; PAM type: NRG; PAM sequence: GAG
ctgtttaaaaaacatagcat

SEQ ID NO: 102878 - DNA, 20 bp, Artificial Sequence
  Description of Artificial Sequence: Synthetic oligonucleotide
  Target: LAMA2; (-) strand; PAM type: NRG; PAM sequence: TAG
taaagtctgtttaaaaaaca

SEQ ID NO: 102879 - DNA, 20 bp, Artificial Sequence
  Description of Artificial Sequence: Synthetic oligonucleotide
  Target: LAMA2; (-) strand; PAM type: NRG; PAM sequence: AAG
ttaagctgttctaaaaaata

SEQ ID NO: 102880 - DNA, 20 bp, Artificial Sequence
  Description of Artificial Sequence: Synthetic oligonucleotide
  Target: LAMA2; (-) strand; PAM type: NRG; PAM sequence: AAG
tcaatttttctttgaacttt

SEQ ID NO: 102881 - DNA, 20 bp, Artificial Sequence
  Description of Artificial Sequence: Synthetic oligonucleotide
  Target: LAMA2; (-) strand; PAM type: NRG; PAM sequence: GAG
tgggggcagggagtagatat

SEQ ID NO: 102882 - DNA, 20 bp, Artificial Sequence
  Description of Artificial Sequence: Synthetic oligonucleotide
  Target: LAMA2; (-) strand; PAM type: NRG; PAM sequence: TAG
aaggttgtgggggcagggag

SEQ ID NO: 102883 - DNA, 20 bp, Artificial Sequence
  Description of Artificial Sequence: Synthetic oligonucleotide
  Target: LAMA2; (-) strand; PAM type: NRG; PAM sequence: GAG
gggaaggttgtgggggcagg

SEQ ID NO: 102884 - DNA, 20 bp, Artificial Sequence
  Description of Artificial Sequence: Synthetic oligonucleotide
  Target: LAMA2; (-) strand; PAM type: NRG; PAM sequence: GGG
tggggaaggttgtgggggca

SEQ ID NO: 102885 - DNA, 20 bp, Artificial Sequence
  Description of Artificial Sequence: Synthetic oligonucleotide
  Target: LAMA2; (-) strand; PAM type: NRG; PAM sequence: AGG
gtggggaaggttgtgggggc

SEQ ID NO: 102886 - DNA, 20 bp, Artificial Sequence
  Description of Artificial Sequence: Synthetic oligonucleotide
  Target: LAMA2; (-) strand; PAM type: NRG; PAM sequence: CAG
ggtggggaaggttgtggggg

SEQ ID NO: 102887 - DNA, 20 bp, Artificial Sequence
  Description of Artificial Sequence: Synthetic oligonucleotide
  Target: LAMA2; (-) strand; PAM type: NRG; PAM sequence: GGG
tctggtggggaaggttgtgg

SEQ ID NO: 102888 - DNA, 20 bp, Artificial Sequence
  Description of Artificial Sequence: Synthetic oligonucleotide
  Target: LAMA2; (-) strand; PAM type: NRG; PAM sequence: GGG
ttctggtggggaaggttgtg

SEQ ID NO: 102889 - DNA, 20 bp, Artificial Sequence
  Description of Artificial Sequence: Synthetic oligonucleotide
  Target: LAMA2; (-) strand; PAM type: NRG; PAM sequence: GGG
attctggtggggaaggttgt

SEQ ID NO: 102890 - DNA, 20 bp, Artificial Sequence
  Description of Artificial Sequence: Synthetic oligonucleotide
  Target: LAMA2; (-) strand; PAM type: NRG; PAM sequence: TGG
cattctggtggggaaggttg

SEQ ID NO: 102891 - DNA, 20 bp, Artificial Sequence
  Description of Artificial Sequence: Synthetic oligonucleotide
  Target: LAMA2; (-) strand; PAM type: NRG; PAM sequence: AGG
atgtaccattctggtgggga

SEQ ID NO: 102892 - DNA, 20 bp, Artificial Sequence
  Description of Artificial Sequence: Synthetic oligonucleotide
  Target: LAMA2; (-) strand; PAM type: NRG; PAM sequence: AAG
aatgtaccattctggtgggg

SEQ ID NO: 102893 - DNA, 20 bp, Artificial Sequence
  Description of Artificial Sequence: Synthetic oligonucleotide
  Target: LAMA2; (-) strand; PAM type: NRG; PAM sequence: GGG
ataaatgtaccattctggtg

SEQ ID NO: 102894 - DNA, 20 bp, Artificial Sequence
  Description of Artificial Sequence: Synthetic oligonucleotide
  Target: LAMA2; (-) strand; PAM type: NRG; PAM sequence: GGG
aataaatgtaccattctggt

SEQ ID NO: 102895 - DNA, 20 bp, Artificial Sequence
  Description of Artificial Sequence: Synthetic oligonucleotide
  Target: LAMA2; (-) strand; PAM type: NRG; PAM sequence: TGG
taataaatgtaccattctgg

SEQ ID NO: 102896 - DNA, 20 bp, Artificial Sequence
  Description of Artificial Sequence: Synthetic oligonucleotide
  Target: LAMA2; (-) strand; PAM type: NRG; PAM sequence: TGG
ctataataaatgtaccattc

SEQ ID NO: 102897 - DNA, 20 bp, Artificial Sequence
  Description of Artificial Sequence: Synthetic oligonucleotide
  Target: LAMA2; (-) strand; PAM type: NRG; PAM sequence: AGG
tgatgaggaggtgtcaactt

SEQ ID NO: 102898 - DNA, 20 bp, Artificial Sequence
  Description of Artificial Sequence: Synthetic oligonucleotide
  Target: LAMA2; (-) strand; PAM type: NRG; PAM sequence: TAG
gtgatgaggaggtgtcaact

SEQ ID NO: 102899 - DNA, 20 bp, Artificial Sequence
  Description of Artificial Sequence: Synthetic oligonucleotide
  Target: LAMA2; (-) strand; PAM type: NRG; PAM sequence: AGG
atggactttgggtgatgagg

SEQ ID NO: 102900 - DNA, 20 bp, Artificial Sequence
  Description of Artificial Sequence: Synthetic oligonucleotide
  Target: LAMA2; (-) strand; PAM type: NRG; PAM sequence: GAG
tatggactttgggtgatgag

SEQ ID NO: 102901 - DNA, 20 bp, Artificial Sequence
  Description of Artificial Sequence: Synthetic oligonucleotide
  Target: LAMA2; (-) strand; PAM type: NRG; PAM sequence: AGG
actatggactttgggtgatg

SEQ ID NO: 102902 - DNA, 20 bp, Artificial Sequence
  Description of Artificial Sequence: Synthetic oligonucleotide
  Target: LAMA2; (-) strand; PAM type: NRG; PAM sequence: GAG
aactatggactttgggtgat

SEQ ID NO: 102903 - DNA, 20 bp, Artificial Sequence
  Description of Artificial Sequence: Synthetic oligonucleotide
  Target: LAMA2; (-) strand; PAM type: NRG; PAM sequence: GGG
taatgtaaactatggacttt

SEQ ID NO: 102904 - DNA, 20 bp, Artificial Sequence
  Description of Artificial Sequence: Synthetic oligonucleotide
  Target: LAMA2; (-) strand; PAM type: NRG; PAM sequence: TGG
ctaatgtaaactatggactt

SEQ ID NO: 102905 - DNA, 20 bp, Artificial Sequence
  Description of Artificial Sequence: Synthetic oligonucleotide
  Target: LAMA2; (-) strand; PAM type: NRG; PAM sequence: TGG
gggaaccctaatgtaaacta

SEQ ID NO: 102906 - DNA, 20 bp, Artificial Sequence
  Description of Artificial Sequence: Synthetic oligonucleotide
  Target: LAMA2; (-) strand; PAM type: NRG; PAM sequence: GGG
tagaatgtacaataccaaga

SEQ ID NO: 102907 - DNA, 20 bp, Artificial Sequence
  Description of Artificial Sequence: Synthetic oligonucleotide
  Target: LAMA2; (-) strand; PAM type: NRG; PAM sequence: AGG
atagaatgtacaataccaag

SEQ ID NO: 102908 - DNA, 20 bp, Artificial Sequence
  Description of Artificial Sequence: Synthetic oligonucleotide
  Target: LAMA2; (-) strand; PAM type: NRG; PAM sequence: GAG
catagaatgtacaataccaa

SEQ ID NO: 102909 - DNA, 20 bp, Artificial Sequence
  Description of Artificial Sequence: Synthetic oligonucleotide
  Target: LAMA2; (-) strand; PAM type: NRG; PAM sequence: AAG
cccatagaatgtacaatacc

SEQ ID NO: 102910 - DNA, 20 bp, Artificial Sequence
  Description of Artificial Sequence: Synthetic oligonucleotide
  Target: LAMA2; (-) strand; PAM type: NRG; PAM sequence: TAG
aatgcatttttccaaaccca

SEQ ID NO: 102911 - DNA, 20 bp, Artificial Sequence
  Description of Artificial Sequence: Synthetic oligonucleotide
  Target: LAMA2; (-) strand; PAM type: NRG; PAM sequence: TGG
tctatattttacaacaacgg

SEQ ID NO: 102912 - DNA, 20 bp, Artificial Sequence
  Description of Artificial Sequence: Synthetic oligonucleotide
  Target: LAMA2; (-) strand; PAM type: NRG; PAM sequence: CGG
ttttctatattttacaacaa

SEQ ID NO: 102913 - DNA, 20 bp, Artificial Sequence
  Description of Artificial Sequence: Synthetic oligonucleotide
  Target: LAMA2; (-) strand; PAM type: NRG; PAM sequence: CAG
agcatagaggagttttcggg

SEQ ID NO: 102914 - DNA, 20 bp, Artificial Sequence
  Description of Artificial Sequence: Synthetic oligonucleotide
  Target: LAMA2; (-) strand; PAM type: NRG; PAM sequence: GGG
tgaagcatagaggagttttc

SEQ ID NO: 102915 - DNA, 20 bp, Artificial Sequence
  Description of Artificial Sequence: Synthetic oligonucleotide
  Target: LAMA2; (-) strand; PAM type: NRG; PAM sequence: CGG
gtgaagcatagaggagtttt

SEQ ID NO: 102916 - DNA, 20 bp, Artificial Sequence
  Description of Artificial Sequence: Synthetic oligonucleotide
  Target: LAMA2; (-) strand; PAM type: NRG; PAM sequence: GAG
tgaataggtgaagcatagag

SEQ ID NO: 102917 - DNA, 20 bp, Artificial Sequence
  Description of Artificial Sequence: Synthetic oligonucleotide
  Target: LAMA2; (-) strand; PAM type: NRG; PAM sequence: AGG
tatgaataggtgaagcatag

SEQ ID NO: 102918 - DNA, 20 bp, Artificial Sequence
  Description of Artificial Sequence: Synthetic oligonucleotide
  Target: LAMA2; (-) strand; PAM type: NRG; PAM sequence: GAG
gtatgaataggtgaagcata

SEQ ID NO: 102919 - DNA, 20 bp, Artificial Sequence
  Description of Artificial Sequence: Synthetic oligonucleotide
  Target: LAMA2; (-) strand; PAM type: NRG; PAM sequence: TAG
aggtatgaataggtgaagca

SEQ ID NO: 102920 - DNA, 20 bp, Artificial Sequence
  Description of Artificial Sequence: Synthetic oligonucleotide
  Target: LAMA2; (-) strand; PAM type: NRG; PAM sequence: AAG
gagggaggtatgaataggtg

SEQ ID NO: 102921 - DNA, 20 bp, Artificial Sequence
  Description of Artificial Sequence: Synthetic oligonucleotide
  Target: LAMA2; (-) strand; PAM type: NRG; PAM sequence: AGG
aggaagagggaggtatgaat

SEQ ID NO: 102922 - DNA, 20 bp, Artificial Sequence
  Description of Artificial Sequence: Synthetic oligonucleotide
  Target: LAMA2; (-) strand; PAM type: NRG; PAM sequence: TAG
aaggaagagggaggtatgaa

SEQ ID NO: 102923 - DNA, 20 bp, Artificial Sequence
  Description of Artificial Sequence: Synthetic oligonucleotide
  Target: LAMA2; (-) strand; PAM type: NRG; PAM sequence: AGG
ccaggggtcaaggaagaggg

SEQ ID NO: 102924 - DNA, 20 bp, Artificial Sequence
  Description of Artificial Sequence: Synthetic oligonucleotide
  Target: LAMA2; (-) strand; PAM type: NRG; PAM sequence: GAG
gccaggggtcaaggaagagg

SEQ ID NO: 102925 - DNA, 20 bp, Artificial Sequence
  Description of Artificial Sequence: Synthetic oligonucleotide
  Target: LAMA2; (-) strand; PAM type: NRG; PAM sequence: GGG
ttgccaggggtcaaggaaga

SEQ ID NO: 102926 - DNA, 20 bp, Artificial Sequence
  Description of Artificial Sequence: Synthetic oligonucleotide
  Target: LAMA2; (-) strand; PAM type: NRG; PAM sequence: AGG
gttgccaggggtcaaggaag

SEQ ID NO: 102927 - DNA, 20 bp, Artificial Sequence
  Description of Artificial Sequence: Synthetic oligonucleotide
  Target: LAMA2; (-) strand; PAM type: NRG; PAM sequence: GAG
ggttgccaggggtcaaggaa

SEQ ID NO: 102928 - DNA, 20 bp, Artificial Sequence
  Description of Artificial Sequence: Synthetic oligonucleotide
  Target: LAMA2; (-) strand; PAM type: NRG; PAM sequence: AAG
gtggttgccaggggtcaagg

SEQ ID NO: 102929 - DNA, 20 bp, Artificial Sequence
  Description of Artificial Sequence: Synthetic oligonucleotide
  Target: LAMA2; (-) strand; PAM type: NRG; PAM sequence: AGG
tgagtggttgccaggggtca

SEQ ID NO: 102930 - DNA, 20 bp, Artificial Sequence
  Description of Artificial Sequence: Synthetic oligonucleotide
  Target: LAMA2; (-) strand; PAM type: NRG; PAM sequence: AAG
atgagtggttgccaggggtc

SEQ ID NO: 102931 - DNA, 20 bp, Artificial Sequence
  Description of Artificial Sequence: Synthetic oligonucleotide
  Target: LAMA2; (-) strand; PAM type: NRG; PAM sequence: GGG
aaaatatgagtggttgccag

SEQ ID NO: 102932 - DNA, 20 bp, Artificial Sequence
  Description of Artificial Sequence: Synthetic oligonucleotide
  Target: LAMA2; (-) strand; PAM type: NRG; PAM sequence: GGG
aaaaatatgagtggttgcca

SEQ ID NO: 102933 - DNA, 20 bp, Artificial Sequence
  Description of Artificial Sequence: Synthetic oligonucleotide
  Target: LAMA2; (-) strand; PAM type: NRG; PAM sequence: AGG
taaaaatatgagtggttgcc

SEQ ID NO: 102934 - DNA, 20 bp, Artificial Sequence
  Description of Artificial Sequence: Synthetic oligonucleotide
  Target: LAMA2; (-) strand; PAM type: NRG; PAM sequence: CAG
gtaaaaatatgagtggttgc

SEQ ID NO: 102935 - DNA, 20 bp, Artificial Sequence
  Description of Artificial Sequence: Synthetic oligonucleotide
  Target: LAMA2; (-) strand; PAM type: NRG; PAM sequence: TGG
ggatgtagtaaaaatatgag

SEQ ID NO: 102936 - DNA, 20 bp, Artificial Sequence
  Description of Artificial Sequence: Synthetic oligonucleotide
  Target: LAMA2; (-) strand; PAM type: NRG; PAM sequence: GAG
tatggatgtagtaaaaatat

SEQ ID NO: 102937 - DNA, 20 bp, Artificial Sequence
  Description of Artificial Sequence: Synthetic oligonucleotide
  Target: LAMA2; (-) strand; PAM type: NRG; PAM sequence: TAG
aaaaggcaaaactatggatg

SEQ ID NO: 102938 - DNA, 20 bp, Artificial Sequence
  Description of Artificial Sequence: Synthetic oligonucleotide
  Target: LAMA2; (-) strand; PAM type: NRG; PAM sequence: TGG
ttccaaaaaaggcaaaacta

SEQ ID NO: 102939 - DNA, 20 bp, Artificial Sequence
  Description of Artificial Sequence: Synthetic oligonucleotide
  Target: LAMA2; (-) strand; PAM type: NRG; PAM sequence: AGG
ccagctatatattccaaaaa

SEQ ID NO: 102940 - DNA, 20 bp, Artificial Sequence
  Description of Artificial Sequence: Synthetic oligonucleotide
  Target: LAMA2; (-) strand; PAM type: NRG; PAM sequence: AAG
tccagctatatattccaaaa

SEQ ID NO: 102941 - DNA, 20 bp, Artificial Sequence
  Description of Artificial Sequence: Synthetic oligonucleotide
  Target: LAMA2; (-) strand; PAM type: NRG; PAM sequence: CAG
agtaccacactgtatgattc

SEQ ID NO: 102942 - DNA, 20 bp, Artificial Sequence
  Description of Artificial Sequence: Synthetic oligonucleotide
  Target: LAMA2; (-) strand; PAM type: NRG; PAM sequence: AAG
ggaaagaagctaatatgaaa

SEQ ID NO: 102943 - DNA, 20 bp, Artificial Sequence
  Description of Artificial Sequence: Synthetic oligonucleotide
  Target: LAMA2; (-) strand; PAM type: NRG; PAM sequence: AAG
tgtatattaccaagggaaag

SEQ ID NO: 102944 - DNA, 20 bp, Artificial Sequence
  Description of Artificial Sequence: Synthetic oligonucleotide
  Target: LAMA2; (-) strand; PAM type: NRG; PAM sequence: AAG
aagtgtatattaccaaggga

SEQ ID NO: 102945 - DNA, 20 bp, Artificial Sequence
  Description of Artificial Sequence: Synthetic oligonucleotide
  Target: LAMA2; (-) strand; PAM type: NRG; PAM sequence: GGG
ccttaagtgtatattaccaa

SEQ ID NO: 102946 - DNA, 20 bp, Artificial Sequence
  Description of Artificial Sequence: Synthetic oligonucleotide
  Target: LAMA2; (-) strand; PAM type: NRG; PAM sequence: AGG
accttaagtgtatattacca

SEQ ID NO: 102947 - DNA, 20 bp, Artificial Sequence
  Description of Artificial Sequence: Synthetic oligonucleotide
  Target: LAMA2; (-) strand; PAM type: NRG; PAM sequence: AAG
aaccttaagtgtatattacc

SEQ ID NO: 102948 - DNA, 20 bp, Artificial Sequence
  Description of Artificial Sequence: Synthetic oligonucleotide
  Target: LAMA2; (-) strand; PAM type: NRG; PAM sequence: AAG
aaaaaatatggagaaacctt

SEQ ID NO: 102949 - DNA, 20 bp, Artificial Sequence
  Description of Artificial Sequence: Synthetic oligonucleotide
  Target: LAMA2; (-) strand; PAM type: NRG; PAM sequence: GAG
taaagtcatgaaaaaatatg

SEQ ID NO: 102950 - DNA, 20 bp, Artificial Sequence
  Description of Artificial Sequence: Synthetic oligonucleotide
  Target: LAMA2; (-) strand; PAM type: NRG; PAM sequence: TGG
tataaagtcatgaaaaaata

SEQ ID NO: 102951 - DNA, 20 bp, Artificial Sequence
  Description of Artificial Sequence: Synthetic oligonucleotide
  Target: LAMA2; (-) strand; PAM type: NRG; PAM sequence: AAG
ctacaaagaaatgagctata

SEQ ID NO: 102952 - DNA, 20 bp, Artificial Sequence
  Description of Artificial Sequence: Synthetic oligonucleotide
  Target: LAMA2; (-) strand; PAM type: NRG; PAM sequence: GAG
attcaacactacaaagaaat

SEQ ID NO: 102953 - DNA, 20 bp, Artificial Sequence
  Description of Artificial Sequence: Synthetic oligonucleotide
  Target: LAMA2; (-) strand; PAM type: NRG; PAM sequence: AAG
aaatattattcaacactaca

SEQ ID NO: 102954 - DNA, 20 bp, Artificial Sequence
  Description of Artificial Sequence: Synthetic oligonucleotide
  Target: LAMA2; (-) strand; PAM type: NRG; PAM sequence: CAG
taggggaatgaataagtaaa

SEQ ID NO: 102955 - DNA, 20 bp, Artificial Sequence
  Description of Artificial Sequence: Synthetic oligonucleotide
  Target: LAMA2; (-) strand; PAM type: NRG; PAM sequence: AAG
ccttcagtaggggaatgaat

SEQ ID NO: 102956 - DNA, 20 bp, Artificial Sequence
  Description of Artificial Sequence: Synthetic oligonucleotide
  Target: LAMA2; (-) strand; PAM type: NRG; PAM sequence: GGG
accaagatgtccttcagtag

SEQ ID NO: 102957 - DNA, 20 bp, Artificial Sequence
  Description of Artificial Sequence: Synthetic oligonucleotide
  Target: LAMA2; (-) strand; PAM type: NRG; PAM sequence: GGG
aaccaagatgtccttcagta

SEQ ID NO: 102958 - DNA, 20 bp, Artificial Sequence
  Description of Artificial Sequence: Synthetic oligonucleotide
  Target: LAMA2; (-) strand; PAM type: NRG; PAM sequence: AGG
caaccaagatgtccttcagt

SEQ ID NO: 102959 - DNA, 20 bp, Artificial Sequence
  Description of Artificial Sequence: Synthetic oligonucleotide
  Target: LAMA2; (-) strand; PAM type: NRG; PAM sequence: TAG
gcaaccaagatgtccttcag

SEQ ID NO: 102960 - DNA, 20 bp, Artificial Sequence
  Description of Artificial Sequence: Synthetic oligonucleotide
  Target: LAMA2; (-) strand; PAM type: NRG; PAM sequence: CAG
gaagcaaccaagatgtcctt

SEQ ID NO: 102961 - DNA, 20 bp, Artificial Sequence
  Description of Artificial Sequence: Synthetic oligonucleotide
  Target: LAMA2; (-) strand; PAM type: NRG; PAM sequence: AAG
gccaaaatttggaagcaacc

SEQ ID NO: 102962 - DNA, 20 bp, Artificial Sequence
  Description of Artificial Sequence: Synthetic oligonucleotide
  Target: LAMA2; (-) strand; PAM type: NRG; PAM sequence: AAG
ttcatgctgccaaaatttgg

SEQ ID NO: 102963 - DNA, 20 bp, Artificial Sequence
  Description of Artificial Sequence: Synthetic oligonucleotide
  Target: LAMA2; (-) strand; PAM type: NRG; PAM sequence: TGG
tgattcatgctgccaaaatt

SEQ ID NO: 102964 - DNA, 20 bp, Artificial Sequence
  Description of Artificial Sequence: Synthetic oligonucleotide
  Target: LAMA2; (-) strand; PAM type: NRG; PAM sequence: CAG
agtctgcacaaagatgttta

SEQ ID NO: 102965 - DNA, 20 bp, Artificial Sequence
  Description of Artificial Sequence: Synthetic oligonucleotide
  Target: LAMA2; (-) strand; PAM type: NRG; PAM sequence: AAG
tccacacaaaagtctgcaca

SEQ ID NO: 102966 - DNA, 20 bp, Artificial Sequence
  Description of Artificial Sequence: Synthetic oligonucleotide
  Target: LAMA2; (-) strand; PAM type: NRG; PAM sequence: AAG
gaaaacttaagtccacacaa

SEQ ID NO: 102967 - DNA, 20 bp, Artificial Sequence
  Description of Artificial Sequence: Synthetic oligonucleotide
  Target: LAMA2; (-) strand; PAM type: NRG; PAM sequence: AAG
cccaaataggttgaaaactt

SEQ ID NO: 102968 - DNA, 20 bp, Artificial Sequence
  Description of Artificial Sequence: Synthetic oligonucleotide
  Target: LAMA2; (-) strand; PAM type: NRG; PAM sequence: AGG
tcctttatattcacccaaat

SEQ ID NO: 102969 - DNA, 20 bp, Artificial Sequence
  Description of Artificial Sequence: Synthetic oligonucleotide
  Target: LAMA2; (-) strand; PAM type: NRG; PAM sequence: TAG
ctcctttatattcacccaaa

SEQ ID NO: 102970 - DNA, 20 bp, Artificial Sequence
  Description of Artificial Sequence: Synthetic oligonucleotide
  Target: LAMA2; (-) strand; PAM type: NRG; PAM sequence: CAG
tatactcttaccataccatc

SEQ ID NO: 102971 - DNA, 20 bp, Artificial Sequence
  Description of Artificial Sequence: Synthetic oligonucleotide
  Target: LAMA2; (-) strand; PAM type: NRG; PAM sequence: TGG
agaccatttggaatacattt

SEQ ID NO: 102972 - DNA, 20 bp, Artificial Sequence
  Description of Artificial Sequence: Synthetic oligonucleotide
  Target: LAMA2; (-) strand; PAM type: NRG; PAM sequence: TGG
gcaaaatagaaaagaccatt

SEQ ID NO: 102973 - DNA, 20 bp, Artificial Sequence
  Description of Artificial Sequence: Synthetic oligonucleotide
  Target: LAMA2; (-) strand; PAM type: NRG; PAM sequence: AAG
ggtgggaatgcaaaatagaa

SEQ ID NO: 102974 - DNA, 20 bp, Artificial Sequence
  Description of Artificial Sequence: Synthetic oligonucleotide
  Target: LAMA2; (-) strand; PAM type: NRG; PAM sequence: TAG
ttgccggtgggaatgcaaaa

SEQ ID NO: 102975 - DNA, 20 bp, Artificial Sequence
  Description of Artificial Sequence: Synthetic oligonucleotide
  Target: LAMA2; (-) strand; PAM type: NRG; PAM sequence: GGG
aactctcatttattgccggt

SEQ ID NO: 102976 - DNA, 20 bp, Artificial Sequence
  Description of Artificial Sequence: Synthetic oligonucleotide
  Target: LAMA2; (-) strand; PAM type: NRG; PAM sequence: TGG
aaactctcatttattgccgg

SEQ ID NO: 102977 - DNA, 20 bp, Artificial Sequence
  Description of Artificial Sequence: Synthetic oligonucleotide
  Target: LAMA2; (-) strand; PAM type: NRG; PAM sequence: CGG
cagaaactctcatttattgc

SEQ ID NO: 102978 - DNA, 20 bp, Artificial Sequence
  Description of Artificial Sequence: Synthetic oligonucleotide
  Target: LAMA2; (-) strand; PAM type: NRG; PAM sequence: CAG
ctattgaggatgtggagcaa

SEQ ID NO: 102979 - DNA, 20 bp, Artificial Sequence
  Description of Artificial Sequence: Synthetic oligonucleotide
  Target: LAMA2; (-) strand; PAM type: NRG; PAM sequence: GAG
caaatgctattgaggatgtg

SEQ ID NO: 102980 - DNA, 20 bp, Artificial Sequence
  Description of Artificial Sequence: Synthetic oligonucleotide
  Target: LAMA2; (-) strand; PAM type: NRG; PAM sequence: TGG
accaaatgctattgaggatg

SEQ ID NO: 102981 - DNA, 20 bp, Artificial Sequence
  Description of Artificial Sequence: Synthetic oligonucleotide
  Target: LAMA2; (-) strand; PAM type: NRG; PAM sequence: AGG
aaaaacaccaaatgctattg

SEQ ID NO: 102982 - DNA, 20 bp, Artificial Sequence
  Description of Artificial Sequence: Synthetic oligonucleotide
  Target: LAMA2; (-) strand; PAM type: NRG; PAM sequence: GAG
taaaaacaccaaatgctatt

SEQ ID NO: 102983 - DNA, 20 bp, Artificial Sequence
  Description of Artificial Sequence: Synthetic oligonucleotide
  Target: LAMA2; (-) strand; PAM type: NRG; PAM sequence: TAG
gagataccatacacacttat

SEQ ID NO: 102984 - DNA, 20 bp, Artificial Sequence
  Description of Artificial Sequence: Synthetic oligonucleotide
  Target: LAMA2; (-) strand; PAM type: NRG; PAM sequence: GAG
ttgcaaactaaaacaagaat

SEQ ID NO: 102985 - DNA, 20 bp, Artificial Sequence
  Description of Artificial Sequence: Synthetic oligonucleotide
  Target: LAMA2; (-) strand; PAM type: NRG; PAM sequence: AAG
aaggaattgcaaactaaaac

SEQ ID NO: 102986 - DNA, 20 bp, Artificial Sequence
  Description of Artificial Sequence: Synthetic oligonucleotide
  Target: LAMA2; (-) strand; PAM type: NRG; PAM sequence: AGG
ctcgacatcatatgtcatta

SEQ ID NO: 102987 - DNA, 20 bp, Artificial Sequence
  Description of Artificial Sequence: Synthetic oligonucleotide
  Target: LAMA2; (-) strand; PAM type: NRG; PAM sequence: AAG
gctcgacatcatatgtcatt

SEQ ID NO: 102988 - DNA, 20 bp, Artificial Sequence
  Description of Artificial Sequence: Synthetic oligonucleotide
  Target: LAMA2; (-) strand; PAM type: NRG; PAM sequence: AAG
atggcaaataagcatatgaa

SEQ ID NO: 102989 - DNA, 20 bp, Artificial Sequence
  Description of Artificial Sequence: Synthetic oligonucleotide
  Target: LAMA2; (-) strand; PAM type: NRG; PAM sequence: AAG
aagatatacagatggcaaat

SEQ ID NO: 102990 - DNA, 20 bp, Artificial Sequence
  Description of Artificial Sequence: Synthetic oligonucleotide
  Target: LAMA2; (-) strand; PAM type: NRG; PAM sequence: TGG
taccaaagaagatatacaga

SEQ ID NO: 102991 - DNA, 20 bp, Artificial Sequence
  Description of Artificial Sequence: Synthetic oligonucleotide
  Target: LAMA2; (-) strand; PAM type: NRG; PAM sequence: CAG
accttaccaaagaagatata

SEQ ID NO: 102992 - DNA, 20 bp, Artificial Sequence
  Description of Artificial Sequence: Synthetic oligonucleotide
  Target: LAMA2; (-) strand; PAM type: NRG; PAM sequence: AAG
aaatagacaccttaccaaag

SEQ ID NO: 102993 - DNA, 20 bp, Artificial Sequence
  Description of Artificial Sequence: Synthetic oligonucleotide
  Target: LAMA2; (-) strand; PAM type: NRG; PAM sequence: AAG
cctaaatagacaccttacca

SEQ ID NO: 102994 - DNA, 20 bp, Artificial Sequence
  Description of Artificial Sequence: Synthetic oligonucleotide
  Target: LAMA2; (-) strand; PAM type: NRG; PAM sequence: TAG
aaaatggaaaaagacctaaa

SEQ ID NO: 102995 - DNA, 20 bp, Artificial Sequence
  Description of Artificial Sequence: Synthetic oligonucleotide
  Target: LAMA2; (-) strand; PAM type: NRG; PAM sequence: AAG
acccaatgaaaaaatggaaa

SEQ ID NO: 102996 - DNA, 20 bp, Artificial Sequence
  Description of Artificial Sequence: Synthetic oligonucleotide
  Target: LAMA2; (-) strand; PAM type: NRG; PAM sequence: TGG
aaaacaacccaatgaaaaaa

SEQ ID NO: 102997 - DNA, 20 bp, Artificial Sequence
  Description of Artificial Sequence: Synthetic oligonucleotide
  Target: LAMA2; (-) strand; PAM type: NRG; PAM sequence: AAG
caaaaaactctgaattcgac

SEQ ID NO: 102998 - DNA, 20 bp, Artificial Sequence
  Description of Artificial Sequence: Synthetic oligonucleotide
  Target: LAMA2; (-) strand; PAM type: NRG; PAM sequence: AGG
gcaaaagacatatctgataa

SEQ ID NO: 102999 - DNA, 20 bp, Artificial Sequence
  Description of Artificial Sequence: Synthetic oligonucleotide
  Target: LAMA2; (-) strand; PAM type: NRG; PAM sequence: AAG
ggcaaaagacatatctgata

SEQ ID NO: 103000 - DNA, 20 bp, Artificial Sequence
  Description of Artificial Sequence: Synthetic oligonucleotide
  Target: LAMA2; (-) strand; PAM type: NRG; PAM sequence: AAG
ggggaagcaaataatggcaa

SEQ ID NO: 103001 - DNA, 20 bp, Artificial Sequence
  Description of Artificial Sequence: Synthetic oligonucleotide
  Target: LAMA2; (-) strand; PAM type: NRG; PAM sequence: TGG
cacagaggggaagcaaataa

SEQ ID NO: 103002 - DNA, 20 bp, Artificial Sequence
  Description of Artificial Sequence: Synthetic oligonucleotide
  Target: LAMA2; (-) strand; PAM type: NRG; PAM sequence: AAG
caagacaagccacagagggg

SEQ ID NO: 103003 - DNA, 20 bp, Artificial Sequence
  Description of Artificial Sequence: Synthetic oligonucleotide
  Target: LAMA2; (-) strand; PAM type: NRG; PAM sequence: GGG
gaacaagacaagccacagag

SEQ ID NO: 103004 - DNA, 20 bp, Artificial Sequence
  Description of Artificial Sequence: Synthetic oligonucleotide
  Target: LAMA2; (-) strand; PAM type: NRG; PAM sequence: GGG
agaacaagacaagccacaga

SEQ ID NO: 103005 - DNA, 20 bp, Artificial Sequence
  Description of Artificial Sequence: Synthetic oligonucleotide
  Target: LAMA2; (-) strand; PAM type: NRG; PAM sequence: AGG
gagaacaagacaagccacag

SEQ ID NO: 103006 - DNA, 20 bp, Artificial Sequence
  Description of Artificial Sequence: Synthetic oligonucleotide
  Target: LAMA2; (-) strand; PAM type: NRG; PAM sequence: GAG
agagaacaagacaagccaca

SEQ ID NO: 103007 - DNA, 20 bp, Artificial Sequence
  Description of Artificial Sequence: Synthetic oligonucleotide
  Target: LAMA2; (-) strand; PAM type: NRG; PAM sequence: CAG
caagagaacaagacaagcca

SEQ ID NO: 103008 - DNA, 20 bp, Artificial Sequence
  Description of Artificial Sequence: Synthetic oligonucleotide
  Target: LAMA2; (-) strand; PAM type: NRG; PAM sequence: AAG
acttctcaagagaacaagac

SEQ ID NO: 103009 - DNA, 20 bp, Artificial Sequence
  Description of Artificial Sequence: Synthetic oligonucleotide
  Target: LAMA2; (-) strand; PAM type: NRG; PAM sequence: AAG
aagacacttctcaagagaac

SEQ ID NO: 103010 - DNA, 20 bp, Artificial Sequence
  Description of Artificial Sequence: Synthetic oligonucleotide
  Target: LAMA2; (-) strand; PAM type: NRG; PAM sequence: GAG
ctgtgaaagacacttctcaa

SEQ ID NO: 103011 - DNA, 20 bp, Artificial Sequence
  Description of Artificial Sequence: Synthetic oligonucleotide
  Target: LAMA2; (-) strand; PAM type: NRG; PAM sequence: AAG
ctctgtgaaagacacttctc

SEQ ID NO: 103012 - DNA, 20 bp, Artificial Sequence
  Description of Artificial Sequence: Synthetic oligonucleotide
  Target: LAMA2; (-) strand; PAM type: NRG; PAM sequence: AAG
taaaaacttctgctctgtga

SEQ ID NO: 103013 - DNA, 20 bp, Artificial Sequence
  Description of Artificial Sequence: Synthetic oligonucleotide
  Target: LAMA2; (-) strand; PAM type: NRG; PAM sequence: GGG
agaaacctaattgataagct

SEQ ID NO: 103014 - DNA, 20 bp, Artificial Sequence
  Description of Artificial Sequence: Synthetic oligonucleotide
  Target: LAMA2; (-) strand; PAM type: NRG; PAM sequence: TGG
gagaaacctaattgataagc

SEQ ID NO: 103015 - DNA, 20 bp, Artificial Sequence
  Description of Artificial Sequence: Synthetic oligonucleotide
  Target: LAMA2; (-) strand; PAM type: NRG; PAM sequence: AAG
caaggagaaacctaattgat

SEQ ID NO: 103016 - DNA, 20 bp, Artificial Sequence
  Description of Artificial Sequence: Synthetic oligonucleotide
  Target: LAMA2; (-) strand; PAM type: NRG; PAM sequence: GAG
aacaccaaaggctcaacaag

SEQ ID NO: 103017 - DNA, 20 bp, Artificial Sequence
  Description of Artificial Sequence: Synthetic oligonucleotide
  Target: LAMA2; (-) strand; PAM type: NRG; PAM sequence: AGG
acaacaccaaaggctcaaca

SEQ ID NO: 103018 - DNA, 20 bp, Artificial Sequence
  Description of Artificial Sequence: Synthetic oligonucleotide
  Target: LAMA2; (-) strand; PAM type: NRG; PAM sequence: AAG
tacaacaccaaaggctcaac

SEQ ID NO: 103019 - DNA, 20 bp, Artificial Sequence
  Description of Artificial Sequence: Synthetic oligonucleotide
  Target: LAMA2; (-) strand; PAM type: NRG; PAM sequence: AGG
gtctttagatacaacaccaa

SEQ ID NO: 103020 - DNA, 20 bp, Artificial Sequence
  Description of Artificial Sequence: Synthetic oligonucleotide
  Target: LAMA2; (-) strand; PAM type: NRG; PAM sequence: AAG
agtctttagatacaacacca

SEQ ID NO: 103021 - DNA, 20 bp, Artificial Sequence
  Description of Artificial Sequence: Synthetic oligonucleotide
  Target: LAMA2; (-) strand; PAM type: NRG; PAM sequence: TAG
tggatatggcaatgagtctt

SEQ ID NO: 103022 - DNA, 20 bp, Artificial Sequence
  Description of Artificial Sequence: Synthetic oligonucleotide
  Target: LAMA2; (-) strand; PAM type: NRG; PAM sequence: GAG
atgaccgtggatatggcaat

SEQ ID NO: 103023 - DNA, 20 bp, Artificial Sequence
  Description of Artificial Sequence: Synthetic oligonucleotide
  Target: LAMA2; (-) strand; PAM type: NRG; PAM sequence: TGG
aatctagatgaccgtggata

SEQ ID NO: 103024 - DNA, 20 bp, Artificial Sequence
  Description of Artificial Sequence: Synthetic oligonucleotide
  Target: LAMA2; (-) strand; PAM type: NRG; PAM sequence: TGG
ggagaaaatctagatgaccg

SEQ ID NO: 103025 - DNA, 20 bp, Artificial Sequence
  Description of Artificial Sequence: Synthetic oligonucleotide
  Target: LAMA2; (-) strand; PAM type: NRG; PAM sequence: TAG
agatagcataggagaaaatc

SEQ ID NO: 103026 - DNA, 20 bp, Artificial Sequence
  Description of Artificial Sequence: Synthetic oligonucleotide
  Target: LAMA2; (-) strand; PAM type: NRG; PAM sequence: GAG
gctcctagaagatagcatag

SEQ ID NO: 103027 - DNA, 20 bp, Artificial Sequence
  Description of Artificial Sequence: Synthetic oligonucleotide
  Target: LAMA2; (-) strand; PAM type: NRG; PAM sequence: AGG
acgctcctagaagatagcat

SEQ ID NO: 103028 - DNA, 20 bp, Artificial Sequence
  Description of Artificial Sequence: Synthetic oligonucleotide
  Target: LAMA2; (-) strand; PAM type: NRG; PAM sequence: TAG
aacgctcctagaagatagca

SEQ ID NO: 103029 - DNA, 20 bp, Artificial Sequence
  Description of Artificial Sequence: Synthetic oligonucleotide
  Target: LAMA2; (-) strand; PAM type: NRG; PAM sequence: TAG
actgtaacgctcctagaaga

SEQ ID NO: 103030 - DNA, 20 bp, Artificial Sequence
  Description of Artificial Sequence: Synthetic oligonucleotide
  Target: LAMA2; (-) strand; PAM type: NRG; PAM sequence: AAG
caaaactgtaacgctcctag

SEQ ID NO: 103031 - DNA, 20 bp, Artificial Sequence
  Description of Artificial Sequence: Synthetic oligonucleotide
  Target: LAMA2; (-) strand; PAM type: NRG; PAM sequence: TAG
atgcaaaactgtaacgctcc

SEQ ID NO: 103032 - DNA, 20 bp, Artificial Sequence
  Description of Artificial Sequence: Synthetic oligonucleotide
  Target: LAMA2; (-) strand; PAM type: NRG; PAM sequence: AAG
taaaaatggattatagacct

SEQ ID NO: 103033 - DNA, 20 bp, Artificial Sequence
  Description of Artificial Sequence: Synthetic oligonucleotide
  Target: LAMA2; (-) strand; PAM type: NRG; PAM sequence: TAG
aattaactaaaaatggatta

SEQ ID NO: 103034 - DNA, 20 bp, Artificial Sequence
  Description of Artificial Sequence: Synthetic oligonucleotide
  Target: LAMA2; (-) strand; PAM type: NRG; PAM sequence: TGG
gtattggaattaactaaaaa

SEQ ID NO: 103035 - DNA, 20 bp, Artificial Sequence
  Description of Artificial Sequence: Synthetic oligonucleotide
  Target: LAMA2; (-) strand; PAM type: NRG; PAM sequence: TGG
agtttattttaaaatagtat

SEQ ID NO: 103036 - DNA, 20 bp, Artificial Sequence
  Description of Artificial Sequence: Synthetic oligonucleotide
  Target: LAMA2; (-) strand; PAM type: NRG; PAM sequence: TAG
gtaaaaagtttattttaaaa

SEQ ID NO: 103037 - DNA, 20 bp, Artificial Sequence
  Description of Artificial Sequence: Synthetic oligonucleotide
  Target: LAMA2; (-) strand; PAM type: NRG; PAM sequence: AAG
taaaactactgtaaagtaaa

SEQ ID NO: 103038 - DNA, 20 bp, Artificial Sequence
  Description of Artificial Sequence: Synthetic oligonucleotide
  Target: LAMA2; (-) strand; PAM type: NRG; PAM sequence: AAG
tgaaatctaaaactactgta

SEQ ID NO: 103039 - DNA, 20 bp, Artificial Sequence
  Description of Artificial Sequence: Synthetic oligonucleotide
  Target: LAMA2; (-) strand; PAM type: NRG; PAM sequence: AAG
gctcttggtactctctttgc

SEQ ID NO: 103040 - DNA, 20 bp, Artificial Sequence
  Description of Artificial Sequence: Synthetic oligonucleotide
  Target: LAMA2; (-) strand; PAM type: NRG; PAM sequence: TGG
atggagtatgtgaaggctct

SEQ ID NO: 103041 - DNA, 20 bp, Artificial Sequence
  Description of Artificial Sequence: Synthetic oligonucleotide
  Target: LAMA2; (-) strand; PAM type: NRG; PAM sequence: AGG
actgggaatggagtatgtga

SEQ ID NO: 103042 - DNA, 20 bp, Artificial Sequence
  Description of Artificial Sequence: Synthetic oligonucleotide
  Target: LAMA2; (-) strand; PAM type: NRG; PAM sequence: AAG
gactgggaatggagtatgtg

SEQ ID NO: 103043 - DNA, 20 bp, Artificial Sequence
  Description of Artificial Sequence: Synthetic oligonucleotide
  Target: LAMA2; (-) strand; PAM type: NRG; PAM sequence: GAG
caatggggagactgggaatg

SEQ ID NO: 103044 - DNA, 20 bp, Artificial Sequence
  Description of Artificial Sequence: Synthetic oligonucleotide
  Target: LAMA2; (-) strand; PAM type: NRG; PAM sequence: TGG
aacaatggggagactgggaa

SEQ ID NO: 103045 - DNA, 20 bp, Artificial Sequence
  Description of Artificial Sequence: Synthetic oligonucleotide
  Target: LAMA2; (-) strand; PAM type: NRG; PAM sequence: GGG
atgttaacaatggggagact

SEQ ID NO: 103046 - DNA, 20 bp, Artificial Sequence
  Description of Artificial Sequence: Synthetic oligonucleotide
  Target: LAMA2; (-) strand; PAM type: NRG; PAM sequence: TGG
gatgttaacaatggggagac

SEQ ID NO: 103047 - DNA, 20 bp, Artificial Sequence
  Description of Artificial Sequence: Synthetic oligonucleotide
  Target: LAMA2; (-) strand; PAM type: NRG; PAM sequence: GAG
tgtaagatgttaacaatggg

SEQ ID NO: 103048 - DNA, 20 bp, Artificial Sequence
  Description of Artificial Sequence: Synthetic oligonucleotide
  Target: LAMA2; (-) strand; PAM type: NRG; PAM sequence: GGG
aatgtaagatgttaacaatg

SEQ ID NO: 103049 - DNA, 20 bp, Artificial Sequence
  Description of Artificial Sequence: Synthetic oligonucleotide
  Target: LAMA2; (-) strand; PAM type: NRG; PAM sequence: GGG
taatgtaagatgttaacaat

SEQ ID NO: 103050 - DNA, 20 bp, Artificial Sequence
  Description of Artificial Sequence: Synthetic oligonucleotide
  Target: LAMA2; (-) strand; PAM type: NRG; PAM sequence: TGG
ctaatgtaagatgttaacaa

SEQ ID NO: 103051 - DNA, 20 bp, Artificial Sequence
  Description of Artificial Sequence: Synthetic oligonucleotide
  Target: LAMA2; (-) strand; PAM type: NRG; PAM sequence: AAG
cacatgtaccatgctaatgt

SEQ ID NO: 103052 - DNA, 20 bp, Artificial Sequence
  Description of Artificial Sequence: Synthetic oligonucleotide
  Target: LAMA2; (-) strand; PAM type: NRG; PAM sequence: GAG
tattattagctcatgtatat

SEQ ID NO: 103053 - DNA, 20 bp, Artificial Sequence
  Description of Artificial Sequence: Synthetic oligonucleotide
  Target: LAMA2; (-) strand; PAM type: NRG; PAM sequence: TAG
tggtaatatttcaatattat

SEQ ID NO: 103054 - DNA, 20 bp, Artificial Sequence
  Description of Artificial Sequence: Synthetic oligonucleotide
  Target: LAMA2; (-) strand; PAM type: NRG; PAM sequence: TGG
tgaatacagtcttgggttaa

SEQ ID NO: 103055 - DNA, 20 bp, Artificial Sequence
  Description of Artificial Sequence: Synthetic oligonucleotide
  Target: LAMA2; (-) strand; PAM type: NRG; PAM sequence: GGG
aaaaatatgaatacagtctt

SEQ ID NO: 103056 - DNA, 20 bp, Artificial Sequence
  Description of Artificial Sequence: Synthetic oligonucleotide
  Target: LAMA2; (-) strand; PAM type: NRG; PAM sequence: TGG
aaaaaatatgaatacagtct

SEQ ID NO: 103057 - DNA, 20 bp, Artificial Sequence
  Description of Artificial Sequence: Synthetic oligonucleotide
  Target: LAMA2; (-) strand; PAM type: NRG; PAM sequence: CAG
acactgaaaaaatatgaata

SEQ ID NO: 103058 - DNA, 20 bp, Artificial Sequence
  Description of Artificial Sequence: Synthetic oligonucleotide
  Target: LAMA2; (-) strand; PAM type: NRG; PAM sequence: CAG
tgaaacagtaaaaaaacatt

SEQ ID NO: 103059 - DNA, 20 bp, Artificial Sequence
  Description of Artificial Sequence: Synthetic oligonucleotide
  Target: LAMA2; (-) strand; PAM type: NRG; PAM sequence: CAG
tcctgcatgggatcctgaaa

SEQ ID NO: 103060 - DNA, 20 bp, Artificial Sequence
  Description of Artificial Sequence: Synthetic oligonucleotide
  Target: LAMA2; (-) strand; PAM type: NRG; PAM sequence: GGG
tgtaatgtagtatcctgcat

SEQ ID NO: 103061 - DNA, 20 bp, Artificial Sequence
  Description of Artificial Sequence: Synthetic oligonucleotide
  Target: LAMA2; (-) strand; PAM type: NRG; PAM sequence: TGG
atgtaatgtagtatcctgca

SEQ ID NO: 103062 - DNA, 20 bp, Artificial Sequence
  Description of Artificial Sequence: Synthetic oligonucleotide
  Target: LAMA2; (-) strand; PAM type: NRG; PAM sequence: TAG
cacaatggctaaatgtaatg

SEQ ID NO: 103063 - DNA, 20 bp, Artificial Sequence
  Description of Artificial Sequence: Synthetic oligonucleotide
  Target: LAMA2; (-) strand; PAM type: NRG; PAM sequence: TGG
ggaaccctaagaagacacaa

SEQ ID NO: 103064 - DNA, 20 bp, Artificial Sequence
  Description of Artificial Sequence: Synthetic oligonucleotide
  Target: LAMA2; (-) strand; PAM type: NRG; PAM sequence: AAG
cagtctagaggaaccctaag

SEQ ID NO: 103065 - DNA, 20 bp, Artificial Sequence
  Description of Artificial Sequence: Synthetic oligonucleotide
  Target: LAMA2; (-) strand; PAM type: NRG; PAM sequence: AAG
tcacagtctagaggaaccct

SEQ ID NO: 103066 - DNA, 20 bp, Artificial Sequence
  Description of Artificial Sequence: Synthetic oligonucleotide
  Target: LAMA2; (-) strand; PAM type: NRG; PAM sequence: AGG
acagtgtcgtcacagtctag

SEQ ID NO: 103067 - DNA, 20 bp, Artificial Sequence
  Description of Artificial Sequence: Synthetic oligonucleotide
  Target: LAMA2; (-) strand; PAM type: NRG; PAM sequence: GAG
gacagtgtcgtcacagtcta

SEQ ID NO: 103068 - DNA, 20 bp, Artificial Sequence
  Description of Artificial Sequence: Synthetic oligonucleotide
  Target: LAMA2; (-) strand; PAM type: NRG; PAM sequence: TAG
ttgacagtgtcgtcacagtc

SEQ ID NO: 103069 - DNA, 20 bp, Artificial Sequence
  Description of Artificial Sequence: Synthetic oligonucleotide
  Target: LAMA2; (-) strand; PAM type: NRG; PAM sequence: CAG
tatttttgacagtgtcgtca

SEQ ID NO: 103070 - DNA, 20 bp, Artificial Sequence
  Description of Artificial Sequence: Synthetic oligonucleotide
  Target: LAMA2; (-) strand; PAM type: NRG; PAM sequence: CAG
cactgttacagtatttttga

SEQ ID NO: 103071 - DNA, 20 bp, Artificial Sequence
  Description of Artificial Sequence: Synthetic oligonucleotide
  Target: LAMA2; (-) strand; PAM type: NRG; PAM sequence: CAG
agtcatcagaaacactgtta

SEQ ID NO: 103072 - DNA, 20 bp, Artificial Sequence
  Description of Artificial Sequence: Synthetic oligonucleotide
  Target: LAMA2; (-) strand; PAM type: NRG; PAM sequence: CAG
gtccaaactctcaaagtcat

SEQ ID NO: 103073 - DNA, 20 bp, Artificial Sequence
  Description of Artificial Sequence: Synthetic oligonucleotide
  Target: LAMA2; (-) strand; PAM type: NRG; PAM sequence: AAG
tgaacctgtccaaactctca

SEQ ID NO: 103074 - DNA, 20 bp, Artificial Sequence
  Description of Artificial Sequence: Synthetic oligonucleotide
  Target: LAMA2; (-) strand; PAM type: NRG; PAM sequence: CAG
ggcaaaccccaattgaggga

SEQ ID NO: 103075 - DNA, 20 bp, Artificial Sequence
  Description of Artificial Sequence: Synthetic oligonucleotide
  Target: LAMA2; (-) strand; PAM type: NRG; PAM sequence: GGG
atgaggcaaaccccaattga

SEQ ID NO: 103076 - DNA, 20 bp, Artificial Sequence
  Description of Artificial Sequence: Synthetic oligonucleotide
  Target: LAMA2; (-) strand; PAM type: NRG; PAM sequence: AGG
tatgaggcaaaccccaattg

SEQ ID NO: 103077 - DNA, 20 bp, Artificial Sequence
  Description of Artificial Sequence: Synthetic oligonucleotide
  Target: LAMA2; (-) strand; PAM type: NRG; PAM sequence: GAG
atatgaggcaaaccccaatt

SEQ ID NO: 103078 - DNA, 20 bp, Artificial Sequence
  Description of Artificial Sequence: Synthetic oligonucleotide
  Target: LAMA2; (-) strand; PAM type: NRG; PAM sequence: AGG
ctaatcatgagaaagatatg

SEQ ID NO: 103079 - DNA, 20 bp, Artificial Sequence
  Description of Artificial Sequence: Synthetic oligonucleotide
  Target: LAMA2; (-) strand; PAM type: NRG; PAM sequence: GAG
tctaatcatgagaaagatat

SEQ ID NO: 103080 - DNA, 20 bp, Artificial Sequence
  Description of Artificial Sequence: Synthetic oligonucleotide
  Target: LAMA2; (-) strand; PAM type: NRG; PAM sequence: AAG
attccattctaatcatgaga

SEQ ID NO: 103081 - DNA, 20 bp, Artificial Sequence
  Description of Artificial Sequence: Synthetic oligonucleotide
  Target: LAMA2; (-) strand; PAM type: NRG; PAM sequence: GAG
cataattccattctaatcat

SEQ ID NO: 103082 - DNA, 20 bp, Artificial Sequence
  Description of Artificial Sequence: Synthetic oligonucleotide
  Target: LAMA2; (-) strand; PAM type: NRG; PAM sequence: AAG
aaaatggtactttacctctg

SEQ ID NO: 103083 - DNA, 20 bp, Artificial Sequence
  Description of Artificial Sequence: Synthetic oligonucleotide
  Target: LAMA2; (-) strand; PAM type: NRG; PAM sequence: TGG
ggttcttgatgtgatgaaaa

SEQ ID NO: 103084 - DNA, 20 bp, Artificial Sequence
  Description of Artificial Sequence: Synthetic oligonucleotide
  Target: LAMA2; (-) strand; PAM type: NRG; PAM sequence: GGG
ataagtcatattggtcacat

SEQ ID NO: 103085 - DNA, 20 bp, Artificial Sequence
  Description of Artificial Sequence: Synthetic oligonucleotide
  Target: LAMA2; (-) strand; PAM type: NRG; PAM sequence: TGG
aataagtcatattggtcaca

SEQ ID NO: 103086 - DNA, 20 bp, Artificial Sequence
  Description of Artificial Sequence: Synthetic oligonucleotide
  Target: LAMA2; (-) strand; PAM type: NRG; PAM sequence: TGG
tccacagtaataagtcatat

SEQ ID NO: 103087 - DNA, 20 bp, Artificial Sequence
  Description of Artificial Sequence: Synthetic oligonucleotide
  Target: LAMA2; (-) strand; PAM type: NRG; PAM sequence: AAG
gggtcaatatccacagtaat

SEQ ID NO: 103088 - DNA, 20 bp, Artificial Sequence
  Description of Artificial Sequence: Synthetic oligonucleotide
  Target: LAMA2; (-) strand; PAM type: NRG; PAM sequence: CAG
gtgatcagggtcaatatcca

SEQ ID NO: 103089 - DNA, 20 bp, Artificial Sequence
  Description of Artificial Sequence: Synthetic oligonucleotide
  Target: LAMA2; (-) strand; PAM type: NRG; PAM sequence: GGG
ctatgttagtcaggtgatca

SEQ ID NO: 103090 - DNA, 20 bp, Artificial Sequence
  Description of Artificial Sequence: Synthetic oligonucleotide
  Target: LAMA2; (-) strand; PAM type: NRG; PAM sequence: AGG
actatgttagtcaggtgatc

SEQ ID NO: 103091 - DNA, 20 bp, Artificial Sequence
  Description of Artificial Sequence: Synthetic oligonucleotide
  Target: LAMA2; (-) strand; PAM type: NRG; PAM sequence: CAG
cactatgttagtcaggtgat

SEQ ID NO: 103092 - DNA, 20 bp, Artificial Sequence
  Description of Artificial Sequence: Synthetic oligonucleotide
  Target: LAMA2; (-) strand; PAM type: NRG; PAM sequence: AGG
tggcaaacactatgttagtc

SEQ ID NO: 103093 - DNA, 20 bp, Artificial Sequence
  Description of Artificial Sequence: Synthetic oligonucleotide
  Target: LAMA2; (-) strand; PAM type: NRG; PAM sequence: CAG
ctggcaaacactatgttagt

SEQ ID NO: 103094 - DNA, 20 bp, Artificial Sequence
  Description of Artificial Sequence: Synthetic oligonucleotide
  Target: LAMA2; (-) strand; PAM type: NRG; PAM sequence: TAG
aaatctggcaaacactatgt

SEQ ID NO: 103095 - DNA, 20 bp, Artificial Sequence
  Description of Artificial Sequence: Synthetic oligonucleotide
  Target: LAMA2; (-) strand; PAM type: NRG; PAM sequence: TGG
aactttacagtggaaaaatc

SEQ ID NO: 103096 - DNA, 20 bp, Artificial Sequence
  Description of Artificial Sequence: Synthetic oligonucleotide
  Target: LAMA2; (-) strand; PAM type: NRG; PAM sequence: TGG
ataaaagagtaactttacag

SEQ ID NO: 103097 - DNA, 20 bp, Artificial Sequence
  Description of Artificial Sequence: Synthetic oligonucleotide
  Target: LAMA2; (-) strand; PAM type: NRG; PAM sequence: CAG
ggcataaaagagtaacttta

SEQ ID NO: 103098 - DNA, 20 bp, Artificial Sequence
  Description of Artificial Sequence: Synthetic oligonucleotide
  Target: LAMA2; (-) strand; PAM type: NRG; PAM sequence: GAG
agtatgaaaagggcataaaa

SEQ ID NO: 103099 - DNA, 20 bp, Artificial Sequence
  Description of Artificial Sequence: Synthetic oligonucleotide
  Target: LAMA2; (-) strand; PAM type: NRG; PAM sequence: AAG
agagtatgaaaagggcataa

SEQ ID NO: 103100 - DNA, 20 bp, Artificial Sequence
  Description of Artificial Sequence: Synthetic oligonucleotide
  Target: LAMA2; (-) strand; PAM type: NRG; PAM sequence: GGG
atagtattagagtatgaaaa

SEQ ID NO: 103101 - DNA, 20 bp, Artificial Sequence
  Description of Artificial Sequence: Synthetic oligonucleotide
  Target: LAMA2; (-) strand; PAM type: NRG; PAM sequence: AGG
aatagtattagagtatgaaa

SEQ ID NO: 103102 - DNA, 20 bp, Artificial Sequence
  Description of Artificial Sequence: Synthetic oligonucleotide
  Target: LAMA2; (-) strand; PAM type: NRG; PAM sequence: AAG
aaatagtattagagtatgaa

SEQ ID NO: 103103 - DNA, 20 bp, Artificial Sequence
  Description of Artificial Sequence: Synthetic oligonucleotide
  Target: LAMA2; (-) strand; PAM type: NRG; PAM sequence: GAG
ggcagataaaaatagtatta

SEQ ID NO: 103104 - DNA, 20 bp, Artificial Sequence
  Description of Artificial Sequence: Synthetic oligonucleotide
  Target: LAMA2; (-) strand; PAM type: NRG; PAM sequence: TAG
tgggcagataaaaatagtat

SEQ ID NO: 103105 - DNA, 20 bp, Artificial Sequence
  Description of Artificial Sequence: Synthetic oligonucleotide
  Target: LAMA2; (-) strand; PAM type: NRG; PAM sequence: TAG
gaagaatgggcagataaaaa

SEQ ID NO: 103106 - DNA, 20 bp, Artificial Sequence
  Description of Artificial Sequence: Synthetic oligonucleotide
  Target: LAMA2; (-) strand; PAM type: NRG; PAM sequence: CAG
tactgaatctgaagaatggg

SEQ ID NO: 103107 - DNA, 20 bp, Artificial Sequence
  Description of Artificial Sequence: Synthetic oligonucleotide
  Target: LAMA2; (-) strand; PAM type: NRG; PAM sequence: GGG
tgttactgaatctgaagaat

SEQ ID NO: 103108 - DNA, 20 bp, Artificial Sequence
  Description of Artificial Sequence: Synthetic oligonucleotide
  Target: LAMA2; (-) strand; PAM type: NRG; PAM sequence: TGG
atgttactgaatctgaagaa

SEQ ID NO: 103109 - DNA, 20 bp, Artificial Sequence
  Description of Artificial Sequence: Synthetic oligonucleotide
  Target: LAMA2; (-) strand; PAM type: NRG; PAM sequence: AAG
cttttatgttactgaatctg

SEQ ID NO: 103110 - DNA, 20 bp, Artificial Sequence
  Description of Artificial Sequence: Synthetic oligonucleotide
  Target: LAMA2; (-) strand; PAM type: NRG; PAM sequence: TAG
aaagtgatctttgctttcag

SEQ ID NO: 103111 - DNA, 20 bp, Artificial Sequence
  Description of Artificial Sequence: Synthetic oligonucleotide
  Target: LAMA2; (-) strand; PAM type: NRG; PAM sequence: CAG
atcaaagtgatctttgcttt

SEQ ID NO: 103112 - DNA, 20 bp, Artificial Sequence
  Description of Artificial Sequence: Synthetic oligonucleotide
  Target: LAMA2; (-) strand; PAM type: NRG; PAM sequence: AAG
tcccccttctcaacccatca

SEQ ID NO: 103113 - DNA, 20 bp, Artificial Sequence
  Description of Artificial Sequence: Synthetic oligonucleotide
  Target: LAMA2; (-) strand; PAM type: NRG; PAM sequence: GAG
gtaggaaaaaagtaattaat

SEQ ID NO: 103114 - DNA, 20 bp, Artificial Sequence
  Description of Artificial Sequence: Synthetic oligonucleotide
  Target: LAMA2; (-) strand; PAM type: NRG; PAM sequence: AAG
ttataaatatggtaggaaaa

SEQ ID NO: 103115 - DNA, 20 bp, Artificial Sequence
  Description of Artificial Sequence: Synthetic oligonucleotide
  Target: LAMA2; (-) strand; PAM type: NRG; PAM sequence: AGG
tttgtaattataaatatggt

SEQ ID NO: 103116 - DNA, 20 bp, Artificial Sequence
  Description of Artificial Sequence: Synthetic oligonucleotide
  Target: LAMA2; (-) strand; PAM type: NRG; PAM sequence: TAG
atttgtaattataaatatgg

SEQ ID NO: 103117 - DNA, 20 bp, Artificial Sequence
  Description of Artificial Sequence: Synthetic oligonucleotide
  Target: LAMA2; (-) strand; PAM type: NRG; PAM sequence: TGG
tatatttgtaattataaata

SEQ ID NO: 103118 - DNA, 20 bp, Artificial Sequence
  Description of Artificial Sequence: Synthetic oligonucleotide
  Target: LAMA2; (-) strand; PAM type: NRG; PAM sequence: AAG
agtatttatggtctgcatgg

SEQ ID NO: 103119 - DNA, 20 bp, Artificial Sequence
  Description of Artificial Sequence: Synthetic oligonucleotide
  Target: LAMA2; (-) strand; PAM type: NRG; PAM sequence: TGG
ttgagtatttatggtctgca

SEQ ID NO: 103120 - DNA, 20 bp, Artificial Sequence
  Description of Artificial Sequence: Synthetic oligonucleotide
  Target: LAMA2; (-) strand; PAM type: NRG; PAM sequence: TGG
catgttgacttgagtattta

SEQ ID NO: 103121 - DNA, 20 bp, Artificial Sequence
  Description of Artificial Sequence: Synthetic oligonucleotide
  Target: LAMA2; (-) strand; PAM type: NRG; PAM sequence: GAG
agaattggtcatgttgactt

SEQ ID NO: 103122 - DNA, 20 bp, Artificial Sequence
  Description of Artificial Sequence: Synthetic oligonucleotide
  Target: LAMA2; (-) strand; PAM type: NRG; PAM sequence: TGG
accacagggaaagagagaat

SEQ ID NO: 103123 - DNA, 20 bp, Artificial Sequence
  Description of Artificial Sequence: Synthetic oligonucleotide
  Target: LAMA2; (-) strand; PAM type: NRG; PAM sequence: GAG
agcttgaccacagggaaaga

SEQ ID NO: 103124 - DNA, 20 bp, Artificial Sequence
  Description of Artificial Sequence: Synthetic oligonucleotide
  Target: LAMA2; (-) strand; PAM type: NRG; PAM sequence: GAG
gcagcttgaccacagggaaa

SEQ ID NO: 103125 - DNA, 20 bp, Artificial Sequence
  Description of Artificial Sequence: Synthetic oligonucleotide
  Target: LAMA2; (-) strand; PAM type: NRG; PAM sequence: AAG
atgcagcttgaccacaggga

SEQ ID NO: 103126 - DNA, 20 bp, Artificial Sequence
  Description of Artificial Sequence: Synthetic oligonucleotide
  Target: LAMA2; (-) strand; PAM type: NRG; PAM sequence: GGG
tgtcatgcagcttgaccaca

SEQ ID NO: 103127 - DNA, 20 bp, Artificial Sequence
  Description of Artificial Sequence: Synthetic oligonucleotide
  Target: LAMA2; (-) strand; PAM type: NRG; PAM sequence: AGG
ttgtcatgcagcttgaccac

SEQ ID NO: 103128 - DNA, 20 bp, Artificial Sequence
  Description of Artificial Sequence: Synthetic oligonucleotide
  Target: LAMA2; (-) strand; PAM type: NRG; PAM sequence: CAG
attgtcatgcagcttgacca

SEQ ID NO: 103129 - DNA, 20 bp, Artificial Sequence
  Description of Artificial Sequence: Synthetic oligonucleotide
  Target: LAMA2; (-) strand; PAM type: NRG; PAM sequence: CAG
ttcaccttttgattgtcatg

SEQ ID NO: 103130 - DNA, 20 bp, Artificial Sequence
  Description of Artificial Sequence: Synthetic oligonucleotide
  Target: LAMA2; (-) strand; PAM type: NRG; PAM sequence: TGG
tagcgtgcttagcctgattt

SEQ ID NO: 103131 - DNA, 20 bp, Artificial Sequence
  Description of Artificial Sequence: Synthetic oligonucleotide
  Target: LAMA2; (-) strand; PAM type: NRG; PAM sequence: TAG
gatagaggcattagcgtgct

SEQ ID NO: 103132 - DNA, 20 bp, Artificial Sequence
  Description of Artificial Sequence: Synthetic oligonucleotide
  Target: LAMA2; (-) strand; PAM type: NRG; PAM sequence: TAG
tgactctgagatagaggcat

SEQ ID NO: 103133 - DNA, 20 bp, Artificial Sequence
  Description of Artificial Sequence: Synthetic oligonucleotide
  Target: LAMA2; (-) strand; PAM type: NRG; PAM sequence: AGG
cattcatgactctgagatag

SEQ ID NO: 103134 - DNA, 20 bp, Artificial Sequence
  Description of Artificial Sequence: Synthetic oligonucleotide
  Target: LAMA2; (-) strand; PAM type: NRG; PAM sequence: GAG
tcattcatgactctgagata

SEQ ID NO: 103135 - DNA, 20 bp, Artificial Sequence
  Description of Artificial Sequence: Synthetic oligonucleotide
  Target: LAMA2; (-) strand; PAM type: NRG; PAM sequence: TAG
gatcattcatgactctgaga

SEQ ID NO: 103136 - DNA, 20 bp, Artificial Sequence
  Description of Artificial Sequence: Synthetic oligonucleotide
  Target: LAMA2; (-) strand; PAM type: NRG; PAM sequence: GAG
gcaggatcattcatgactct

SEQ ID NO: 103137 - DNA, 20 bp, Artificial Sequence
  Description of Artificial Sequence: Synthetic oligonucleotide
  Target: LAMA2; (-) strand; PAM type: NRG; PAM sequence: AGG
cataccctggtcacaactgc

SEQ ID NO: 103138 - DNA, 20 bp, Artificial Sequence
  Description of Artificial Sequence: Synthetic oligonucleotide
  Target: LAMA2; (-) strand; PAM type: NRG; PAM sequence: CAG
tcataccctggtcacaactg

SEQ ID NO: 103139 - DNA, 20 bp, Artificial Sequence
  Description of Artificial Sequence: Synthetic oligonucleotide
  Target: LAMA2; (-) strand; PAM type: NRG; PAM sequence: TGG
ccactgcatttctcataccc

SEQ ID NO: 103140 - DNA, 20 bp, Artificial Sequence
  Description of Artificial Sequence: Synthetic oligonucleotide
  Target: LAMA2; (-) strand; PAM type: NRG; PAM sequence: TGG
tcatgggtaattggaagttg

SEQ ID NO: 103141 - DNA, 20 bp, Artificial Sequence
  Description of Artificial Sequence: Synthetic oligonucleotide
  Target: LAMA2; (-) strand; PAM type: NRG; PAM sequence: AAG
atgtagtcatgggtaattgg

SEQ ID NO: 103142 - DNA, 20 bp, Artificial Sequence
  Description of Artificial Sequence: Synthetic oligonucleotide
  Target: LAMA2; (-) strand; PAM type: NRG; PAM sequence: TGG
ctaatgtagtcatgggtaat

SEQ ID NO: 103143 - DNA, 20 bp, Artificial Sequence
  Description of Artificial Sequence: Synthetic oligonucleotide
  Target: LAMA2; (-) strand; PAM type: NRG; PAM sequence: GGG
gtctcctctaatgtagtcat

SEQ ID NO: 103144 - DNA, 20 bp, Artificial Sequence
  Description of Artificial Sequence: Synthetic oligonucleotide
  Target: LAMA2; (-) strand; PAM type: NRG; PAM sequence: TGG
tgtctcctctaatgtagtca

SEQ ID NO: 103145 - DNA, 20 bp, Artificial Sequence
  Description of Artificial Sequence: Synthetic oligonucleotide
  Target: LAMA2; (-) strand; PAM type: NRG; PAM sequence: TAG
gagcactgtctcctctaatg

SEQ ID NO: 103146 - DNA, 20 bp, Artificial Sequence
  Description of Artificial Sequence: Synthetic oligonucleotide
  Target: LAMA2; (-) strand; PAM type: NRG; PAM sequence: GAG
caatgtgcagtcctagtcta

SEQ ID NO: 103147 - DNA, 20 bp, Artificial Sequence
  Description of Artificial Sequence: Synthetic oligonucleotide
  Target: LAMA2; (-) strand; PAM type: NRG; PAM sequence: TAG
tccaatgtgcagtcctagtc

SEQ ID NO: 103148 - DNA, 20 bp, Artificial Sequence
  Description of Artificial Sequence: Synthetic oligonucleotide
  Target: LAMA2; (-) strand; PAM type: NRG; PAM sequence: TAG
gtaattccaatgtgcagtcc

SEQ ID NO: 103149 - DNA, 20 bp, Artificial Sequence
  Description of Artificial Sequence: Synthetic oligonucleotide
  Target: LAMA2; (-) strand; PAM type: NRG; PAM sequence: CAG
ctcctggtaattccaatgtg

SEQ ID NO: 103150 - DNA, 20 bp, Artificial Sequence
  Description of Artificial Sequence: Synthetic oligonucleotide
  Target: LAMA2; (-) strand; PAM type: NRG; PAM sequence: TGG
tgggtgtgagatagggctcc

SEQ ID NO: 103151 - DNA, 20 bp, Artificial Sequence
  Description of Artificial Sequence: Synthetic oligonucleotide
  Target: LAMA2; (-) strand; PAM type: NRG; PAM sequence: GGG
caacctatgggtgtgagata

SEQ ID NO: 103152 - DNA, 20 bp, Artificial Sequence
  Description of Artificial Sequence: Synthetic oligonucleotide
  Target: LAMA2; (-) strand; PAM type: NRG; PAM sequence: AGG
acaacctatgggtgtgagat

SEQ ID NO: 103153 - DNA, 20 bp, Artificial Sequence
  Description of Artificial Sequence: Synthetic oligonucleotide
  Target: LAMA2; (-) strand; PAM type: NRG; PAM sequence: TAG
cacaacctatgggtgtgaga

SEQ ID NO: 103154 - DNA, 20 bp, Artificial Sequence
  Description of Artificial Sequence: Synthetic oligonucleotide
  Target: LAMA2; (-) strand; PAM type: NRG; PAM sequence: GAG
gcatcacaacctatgggtgt

SEQ ID NO: 103155 - DNA, 20 bp, Artificial Sequence
  Description of Artificial Sequence: Synthetic oligonucleotide
  Target: LAMA2; (-) strand; PAM type: NRG; PAM sequence: GGG
ccaactgcatcacaacctat

SEQ ID NO: 103156 - DNA, 20 bp, Artificial Sequence
  Description of Artificial Sequence: Synthetic oligonucleotide
  Target: LAMA2; (-) strand; PAM type: NRG; PAM sequence: TGG
accaactgcatcacaaccta

SEQ ID NO: 103157 - DNA, 20 bp, Artificial Sequence
  Description of Artificial Sequence: Synthetic oligonucleotide
  Target: LAMA2; (-) strand; PAM type: NRG; PAM sequence: CAG
ccagtggtctgactctaccc

SEQ ID NO: 103158 - DNA, 20 bp, Artificial Sequence
  Description of Artificial Sequence: Synthetic oligonucleotide
  Target: LAMA2; (-) strand; PAM type: NRG; PAM sequence: TGG
ggagttcttgaatatcccag

SEQ ID NO: 103159 - DNA, 20 bp, Artificial Sequence
  Description of Artificial Sequence: Synthetic oligonucleotide
  Target: LAMA2; (-) strand; PAM type: NRG; PAM sequence: CAG
tggggagttcttgaatatcc

SEQ ID NO: 103160 - DNA, 20 bp, Artificial Sequence
  Description of Artificial Sequence: Synthetic oligonucleotide
  Target: LAMA2; (-) strand; PAM type: NRG; PAM sequence: GAG
ctttatcagtataatctggg

SEQ ID NO: 103161 - DNA, 20 bp, Artificial Sequence
  Description of Artificial Sequence: Synthetic oligonucleotide
  Target: LAMA2; (-) strand; PAM type: NRG; PAM sequence: GGG
ttctttatcagtataatctg

SEQ ID NO: 103162 - DNA, 20 bp, Artificial Sequence
  Description of Artificial Sequence: Synthetic oligonucleotide
  Target: LAMA2; (-) strand; PAM type: NRG; PAM sequence: GGG
attctttatcagtataatct

SEQ ID NO: 103163 - DNA, 20 bp, Artificial Sequence
  Description of Artificial Sequence: Synthetic oligonucleotide
  Target: LAMA2; (-) strand; PAM type: NRG; PAM sequence: TGG
aattctttatcagtataatc

SEQ ID NO: 103164 - DNA, 20 bp, Artificial Sequence
  Description of Artificial Sequence: Synthetic oligonucleotide
  Target: LAMA2; (-) strand; PAM type: NRG; PAM sequence: CAG
ggatcacagtaattctttat

SEQ ID NO: 103165 - DNA, 20 bp, Artificial Sequence
  Description of Artificial Sequence: Synthetic oligonucleotide
  Target: LAMA2; (-) strand; PAM type: NRG; PAM sequence: CAG
attaggtaactacaggatca

SEQ ID NO: 103166 - DNA, 20 bp, Artificial Sequence
  Description of Artificial Sequence: Synthetic oligonucleotide
  Target: LAMA2; (-) strand; PAM type: NRG; PAM sequence: AGG
cttagctattaggtaactac

SEQ ID NO: 103167 - DNA, 20 bp, Artificial Sequence
  Description of Artificial Sequence: Synthetic oligonucleotide
  Target: LAMA2; (-) strand; PAM type: NRG; PAM sequence: CAG
tcttagctattaggtaacta

SEQ ID NO: 103168 - DNA, 20 bp, Artificial Sequence
  Description of Artificial Sequence: Synthetic oligonucleotide
  Target: LAMA2; (-) strand; PAM type: NRG; PAM sequence: AGG
ggaagagagtcttagctatt

SEQ ID NO: 103169 - DNA, 20 bp, Artificial Sequence
  Description of Artificial Sequence: Synthetic oligonucleotide
  Target: LAMA2; (-) strand; PAM type: NRG; PAM sequence: TAG
gggaagagagtcttagctat

SEQ ID NO: 103170 - DNA, 20 bp, Artificial Sequence
  Description of Artificial Sequence: Synthetic oligonucleotide
  Target: LAMA2; (-) strand; PAM type: NRG; PAM sequence: TAG
ttccagagggaagagagtct

SEQ ID NO: 103171 - DNA, 20 bp, Artificial Sequence
  Description of Artificial Sequence: Synthetic oligonucleotide
  Target: LAMA2; (-) strand; PAM type: NRG; PAM sequence: GAG
ggcattttccagagggaaga

SEQ ID NO: 103172 - DNA, 20 bp, Artificial Sequence
  Description of Artificial Sequence: Synthetic oligonucleotide
  Target: LAMA2; (-) strand; PAM type: NRG; PAM sequence: GAG
aaggcattttccagagggaa

SEQ ID NO: 103173 - DNA, 20 bp, Artificial Sequence
  Description of Artificial Sequence: Synthetic oligonucleotide
  Target: LAMA2; (-) strand; PAM type: NRG; PAM sequence: AAG
ttaaggcattttccagaggg

SEQ ID NO: 103174 - DNA, 20 bp, Artificial Sequence
  Description of Artificial Sequence: Synthetic oligonucleotide
  Target: LAMA2; (-) strand; PAM type: NRG; PAM sequence: GGG
caattaaggcattttccaga

SEQ ID NO: 103175 - DNA, 20 bp, Artificial Sequence
  Description of Artificial Sequence: Synthetic oligonucleotide
  Target: LAMA2; (-) strand; PAM type: NRG; PAM sequence: AGG
ccaattaaggcattttccag

SEQ ID NO: 103176 - DNA, 20 bp, Artificial Sequence
  Description of Artificial Sequence: Synthetic oligonucleotide
  Target: LAMA2; (-) strand; PAM type: NRG; PAM sequence: GAG
accaattaaggcattttcca

SEQ ID NO: 103177 - DNA, 20 bp, Artificial Sequence
  Description of Artificial Sequence: Synthetic oligonucleotide
  Target: LAMA2; (-) strand; PAM type: NRG; PAM sequence: CAG
gtaccaattaaggcattttc

SEQ ID NO: 103178 - DNA, 20 bp, Artificial Sequence
  Description of Artificial Sequence: Synthetic oligonucleotide
  Target: LAMA2; (-) strand; PAM type: NRG; PAM sequence: AGG
aagattggcagtaccaatta

SEQ ID NO: 103179 - DNA, 20 bp, Artificial Sequence
  Description of Artificial Sequence: Synthetic oligonucleotide
  Target: LAMA2; (-) strand; PAM type: NRG; PAM sequence: AAG
aaagattggcagtaccaatt

SEQ ID NO: 103180 - DNA, 20 bp, Artificial Sequence
  Description of Artificial Sequence: Synthetic oligonucleotide
  Target: LAMA2; (-) strand; PAM type: NRG; PAM sequence: CAG
aaaaaaaaaaaaaagattgg

SEQ ID NO: 103181 - DNA, 20 bp, Artificial Sequence
  Description of Artificial Sequence: Synthetic oligonucleotide
  Target: LAMA2; (-) strand; PAM type: NRG; PAM sequence: TGG
taaaaaaaaaaaaaaaagat

SEQ ID NO: 103182 - DNA, 20 bp, Artificial Sequence
  Description of Artificial Sequence: Synthetic oligonucleotide
  Target: LAMA2; (-) strand; PAM type: NRG; PAM sequence: AAG
ctgtttaaaaaaaaaaaaaa

SEQ ID NO: 103183 - DNA, 20 bp, Artificial Sequence
  Description of Artificial Sequence: Synthetic oligonucleotide
  Target: LAMA2; (-) strand; PAM type: NRG; PAM sequence: GGG
tactccagcctggacaacaa

SEQ ID NO: 103184 - DNA, 20 bp, Artificial Sequence
  Description of Artificial Sequence: Synthetic oligonucleotide
  Target: LAMA2; (-) strand; PAM type: NRG; PAM sequence: AGG
gtactccagcctggacaaca

SEQ ID NO: 103185 - DNA, 20 bp, Artificial Sequence
  Description of Artificial Sequence: Synthetic oligonucleotide
  Target: LAMA2; (-) strand; PAM type: NRG; PAM sequence: AAG
tgtactccagcctggacaac

SEQ ID NO: 103186 - DNA, 20 bp, Artificial Sequence
  Description of Artificial Sequence: Synthetic oligonucleotide
  Target: LAMA2; (-) strand; PAM type: NRG; PAM sequence: TGG
cacaccattgtactccagcc

SEQ ID NO: 103187 - DNA, 20 bp, Artificial Sequence
  Description of Artificial Sequence: Synthetic oligonucleotide
  Target: LAMA2; (-) strand; PAM type: NRG; PAM sequence: CAG
gagttcacaccattgtactc

SEQ ID NO: 103188 - DNA, 20 bp, Artificial Sequence
  Description of Artificial Sequence: Synthetic oligonucleotide
  Target: LAMA2; (-) strand; PAM type: NRG; PAM sequence: GAG
ggtggaggttgcagtgagct

SEQ ID NO: 103189 - DNA, 20 bp, Artificial Sequence
  Description of Artificial Sequence: Synthetic oligonucleotide
  Target: LAMA2; (-) strand; PAM type: NRG; PAM sequence: GAG
taggaggtggaggttgcagt

SEQ ID NO: 103190 - DNA, 20 bp, Artificial Sequence
  Description of Artificial Sequence: Synthetic oligonucleotide
  Target: LAMA2; (-) strand; PAM type: NRG; PAM sequence: CAG
aacctaggaggtggaggttg

SEQ ID NO: 103191 - DNA, 20 bp, Artificial Sequence
  Description of Artificial Sequence: Synthetic oligonucleotide
  Target: LAMA2; (-) strand; PAM type: NRG; PAM sequence: AGG
tgcttgaacctaggaggtgg

SEQ ID NO: 103192 - DNA, 20 bp, Artificial Sequence
  Description of Artificial Sequence: Synthetic oligonucleotide
  Target: LAMA2; (-) strand; PAM type: NRG; PAM sequence: GAG
ttgcttgaacctaggaggtg

SEQ ID NO: 103193 - DNA, 20 bp, Artificial Sequence
  Description of Artificial Sequence: Synthetic oligonucleotide
  Target: LAMA2; (-) strand; PAM type: NRG; PAM sequence: TGG
aattgcttgaacctaggagg

SEQ ID NO: 103194 - DNA, 20 bp, Artificial Sequence
  Description of Artificial Sequence: Synthetic oligonucleotide
  Target: LAMA2; (-) strand; PAM type: NRG; PAM sequence: AGG
gagaattgcttgaacctagg

SEQ ID NO: 103195 - DNA, 20 bp, Artificial Sequence
  Description of Artificial Sequence: Synthetic oligonucleotide
  Target: LAMA2; (-) strand; PAM type: NRG; PAM sequence: GAG
ggagaattgcttgaacctag

SEQ ID NO: 103196 - DNA, 20 bp, Artificial Sequence
  Description of Artificial Sequence: Synthetic oligonucleotide
  Target: LAMA2; (-) strand; PAM type: NRG; PAM sequence: AGG
caggagaattgcttgaacct

SEQ ID NO: 103197 - DNA, 20 bp, Artificial Sequence
  Description of Artificial Sequence: Synthetic oligonucleotide
  Target: LAMA2; (-) strand; PAM type: NRG; PAM sequence: TAG
gcaggagaattgcttgaacc

SEQ ID NO: 103198 - DNA, 20 bp, Artificial Sequence
  Description of Artificial Sequence: Synthetic oligonucleotide
  Target: LAMA2; (-) strand; PAM type: NRG; PAM sequence: GAG
tacttgggaggctgaagcag

SEQ ID NO: 103199 - DNA, 20 bp, Artificial Sequence
  Description of Artificial Sequence: Synthetic oligonucleotide
  Target: LAMA2; (-) strand; PAM type: NRG; PAM sequence: AGG
gctacttgggaggctgaagc

SEQ ID NO: 103200 - DNA, 20 bp, Artificial Sequence
  Description of Artificial Sequence: Synthetic oligonucleotide
  Target: LAMA2; (-) strand; PAM type: NRG; PAM sequence: CAG
agctacttgggaggctgaag

SEQ ID NO: 103201 - DNA, 20 bp, Artificial Sequence
  Description of Artificial Sequence: Synthetic oligonucleotide
  Target: LAMA2; (-) strand; PAM type: NRG; PAM sequence: AAG
cccagctacttgggaggctg

SEQ ID NO: 103202 - DNA, 20 bp, Artificial Sequence
  Description of Artificial Sequence: Synthetic oligonucleotide
  Target: LAMA2; (-) strand; PAM type: NRG; PAM sequence: AGG
tgcaatcccagctacttggg

SEQ ID NO: 103203 - DNA, 20 bp, Artificial Sequence
  Description of Artificial Sequence: Synthetic oligonucleotide
  Target: LAMA2; (-) strand; PAM type: NRG; PAM sequence: GAG
ctgcaatcccagctacttgg

SEQ ID NO: 103204 - DNA, 20 bp, Artificial Sequence
  Description of Artificial Sequence: Synthetic oligonucleotide
  Target: LAMA2; (-) strand; PAM type: NRG; PAM sequence: GGG
gcctgcaatcccagctactt

SEQ ID NO: 103205 - DNA, 20 bp, Artificial Sequence
  Description of Artificial Sequence: Synthetic oligonucleotide
  Target: LAMA2; (-) strand; PAM type: NRG; PAM sequence: TGG
tgcctgcaatcccagctact

SEQ ID NO: 103206 - DNA, 20 bp, Artificial Sequence
  Description of Artificial Sequence: Synthetic oligonucleotide
  Target: LAMA2; (-) strand; PAM type: NRG; PAM sequence: CAG
gtagcaggtgcctgcaatcc

SEQ ID NO: 103207 - DNA, 20 bp, Artificial Sequence
  Description of Artificial Sequence: Synthetic oligonucleotide
  Target: LAMA2; (-) strand; PAM type: NRG; PAM sequence: AGG
aattagctgggcatggtagc

SEQ ID NO: 103208 - DNA, 20 bp, Artificial Sequence
  Description of Artificial Sequence: Synthetic oligonucleotide
  Target: LAMA2; (-) strand; PAM type: NRG; PAM sequence: CAG
aaattagctgggcatggtag

SEQ ID NO: 103209 - DNA, 20 bp, Artificial Sequence
  Description of Artificial Sequence: Synthetic oligonucleotide
  Target: LAMA2; (-) strand; PAM type: NRG; PAM sequence: TAG
aaaaaattagctgggcatgg

SEQ ID NO: 103210 - DNA, 20 bp, Artificial Sequence
  Description of Artificial Sequence: Synthetic oligonucleotide
  Target: LAMA2; (-) strand; PAM type: NRG; PAM sequence: TGG
aaaaaaaaattagctgggca

SEQ ID NO: 103211 - DNA, 20 bp, Artificial Sequence
  Description of Artificial Sequence: Synthetic oligonucleotide
  Target: LAMA2; (-) strand; PAM type: NRG; PAM sequence: GGG
aaaaaaaaaaaaaattagct

SEQ ID NO: 103212 - DNA, 20 bp, Artificial Sequence
  Description of Artificial Sequence: Synthetic oligonucleotide
  Target: LAMA2; (-) strand; PAM type: NRG; PAM sequence: TGG
aaaaaaaaaaaaaaattagc

SEQ ID NO: 103213 - DNA, 20 bp, Artificial Sequence
  Description of Artificial Sequence: Synthetic oligonucleotide
  Target: LAMA2; (-) strand; PAM type: NRG; PAM sequence: TAG
aaaaaaaaaaaaaaaaaaat

SEQ ID NO: 103214 - DNA, 20 bp, Artificial Sequence
  Description of Artificial Sequence: Synthetic oligonucleotide
  Target: LAMA2; (-) strand; PAM type: NRG; PAM sequence: TGG
tcaggggttcgagaccagcc

SEQ ID NO: 103215 - DNA, 20 bp, Artificial Sequence
  Description of Artificial Sequence: Synthetic oligonucleotide
  Target: LAMA2; (-) strand; PAM type: NRG; PAM sequence: CAG
cgaggtcaggggttcgagac

SEQ ID NO: 103216 - DNA, 20 bp, Artificial Sequence
  Description of Artificial Sequence: Synthetic oligonucleotide
  Target: LAMA2; (-) strand; PAM type: NRG; PAM sequence: GAG
tcacccgaggtcaggggttc

SEQ ID NO: 103217 - DNA, 20 bp, Artificial Sequence
  Description of Artificial Sequence: Synthetic oligonucleotide
  Target: LAMA2; (-) strand; PAM type: NRG; PAM sequence: GGG
ggtggatcacccgaggtcag

SEQ ID NO: 103218 - DNA, 20 bp, Artificial Sequence
  Description of Artificial Sequence: Synthetic oligonucleotide
  Target: LAMA2; (-) strand; PAM type: NRG; PAM sequence: GGG
gggtggatcacccgaggtca

SEQ ID NO: 103219 - DNA, 20 bp, Artificial Sequence
  Description of Artificial Sequence: Synthetic oligonucleotide
  Target: LAMA2; (-) strand; PAM type: NRG; PAM sequence: AGG
cgggtggatcacccgaggtc

SEQ ID NO: 103220 - DNA, 20 bp, Artificial Sequence
  Description of Artificial Sequence: Synthetic oligonucleotide
  Target: LAMA2; (-) strand; PAM type: NRG; PAM sequence: CAG
gcgggtggatcacccgaggt

SEQ ID NO: 103221 - DNA, 20 bp, Artificial Sequence
  Description of Artificial Sequence: Synthetic oligonucleotide
  Target: LAMA2; (-) strand; PAM type: NRG; PAM sequence: AGG
tgaggcgggtggatcacccg

SEQ ID NO: 103222 - DNA, 20 bp, Artificial Sequence
  Description of Artificial Sequence: Synthetic oligonucleotide
  Target: LAMA2; (-) strand; PAM type: NRG; PAM sequence: GAG
ctgaggcgggtggatcaccc

SEQ ID NO: 103223 - DNA, 20 bp, Artificial Sequence
  Description of Artificial Sequence: Synthetic oligonucleotide
  Target: LAMA2; (-) strand; PAM type: NRG; PAM sequence: TGG
ctttgggaggctgaggcggg

SEQ ID NO: 103224 - DNA, 20 bp, Artificial Sequence
  Description of Artificial Sequence: Synthetic oligonucleotide
  Target: LAMA2; (-) strand; PAM type: NRG; PAM sequence: GGG
gcactttgggaggctgaggc

SEQ ID NO: 103225 - DNA, 20 bp, Artificial Sequence
  Description of Artificial Sequence: Synthetic oligonucleotide
  Target: LAMA2; (-) strand; PAM type: NRG; PAM sequence: CGG
agcactttgggaggctgagg

SEQ ID NO: 103226 - DNA, 20 bp, Artificial Sequence
  Description of Artificial Sequence: Synthetic oligonucleotide
  Target: LAMA2; (-) strand; PAM type: NRG; PAM sequence: AGG
cccagcactttgggaggctg

SEQ ID NO: 103227 - DNA, 20 bp, Artificial Sequence
  Description of Artificial Sequence: Synthetic oligonucleotide
  Target: LAMA2; (-) strand; PAM type: NRG; PAM sequence: GAG
tcccagcactttgggaggct

SEQ ID NO: 103228 - DNA, 20 bp, Artificial Sequence
  Description of Artificial Sequence: Synthetic oligonucleotide
  Target: LAMA2; (-) strand; PAM type: NRG; PAM sequence: AGG
tgtaatcccagcactttggg

SEQ ID NO: 103229 - DNA, 20 bp, Artificial Sequence
  Description of Artificial Sequence: Synthetic oligonucleotide
  Target: LAMA2; (-) strand; PAM type: NRG; PAM sequence: GAG
ctgtaatcccagcactttgg

SEQ ID NO: 103230 - DNA, 20 bp, Artificial Sequence
  Description of Artificial Sequence: Synthetic oligonucleotide
  Target: LAMA2; (-) strand; PAM type: NRG; PAM sequence: GGG
gcctgtaatcccagcacttt

SEQ ID NO: 103231 - DNA, 20 bp, Artificial Sequence
  Description of Artificial Sequence: Synthetic oligonucleotide
  Target: LAMA2; (-) strand; PAM type: NRG; PAM sequence: TGG
cgcctgtaatcccagcactt

SEQ ID NO: 103232 - DNA, 20 bp, Artificial Sequence
  Description of Artificial Sequence: Synthetic oligonucleotide
  Target: LAMA2; (-) strand; PAM type: NRG; PAM sequence: CAG
gtggctcacgcctgtaatcc

SEQ ID NO: 103233 - DNA, 20 bp, Artificial Sequence
  Description of Artificial Sequence: Synthetic oligonucleotide
  Target: LAMA2; (-) strand; PAM type: NRG; PAM sequence: TGG
ggcagtagtgctgggcatgg

SEQ ID NO: 103234 - DNA, 20 bp, Artificial Sequence
  Description of Artificial Sequence: Synthetic oligonucleotide
  Target: LAMA2; (-) strand; PAM type: NRG; PAM sequence: TGG
attggcagtagtgctgggca

SEQ ID NO: 103235 - DNA, 20 bp, Artificial Sequence
  Description of Artificial Sequence: Synthetic oligonucleotide
  Target: LAMA2; (-) strand; PAM type: NRG; PAM sequence: GGG
caaagattggcagtagtgct

SEQ ID NO: 103236 - DNA, 20 bp, Artificial Sequence
  Description of Artificial Sequence: Synthetic oligonucleotide
  Target: LAMA2; (-) strand; PAM type: NRG; PAM sequence: TGG
acaaagattggcagtagtgc

SEQ ID NO: 103237 - DNA, 20 bp, Artificial Sequence
  Description of Artificial Sequence: Synthetic oligonucleotide
  Target: LAMA2; (-) strand; PAM type: NRG; PAM sequence: TAG
agcataacaaagattggcag

SEQ ID NO: 103238 - DNA, 20 bp, Artificial Sequence
  Description of Artificial Sequence: Synthetic oligonucleotide
  Target: LAMA2; (-) strand; PAM type: NRG; PAM sequence: CAG
aggagcataacaaagattgg

SEQ ID NO: 103239 - DNA, 20 bp, Artificial Sequence
  Description of Artificial Sequence: Synthetic oligonucleotide
  Target: LAMA2; (-) strand; PAM type: NRG; PAM sequence: TGG
aaaaggagcataacaaagat

SEQ ID NO: 103240 - DNA, 20 bp, Artificial Sequence
  Description of Artificial Sequence: Synthetic oligonucleotide
  Target: LAMA2; (-) strand; PAM type: NRG; PAM sequence: AAG
agagaaaaaggagcataaca

SEQ ID NO: 103241 - DNA, 20 bp, Artificial Sequence
  Description of Artificial Sequence: Synthetic oligonucleotide
  Target: LAMA2; (-) strand; PAM type: NRG; PAM sequence: GAG
ccaaccaagcagagaaaaag

SEQ ID NO: 103242 - DNA, 20 bp, Artificial Sequence
  Description of Artificial Sequence: Synthetic oligonucleotide
  Target: LAMA2; (-) strand; PAM type: NRG; PAM sequence: AGG
agccaaccaagcagagaaaa

SEQ ID NO: 103243 - DNA, 20 bp, Artificial Sequence
  Description of Artificial Sequence: Synthetic oligonucleotide
  Target: LAMA2; (-) strand; PAM type: NRG; PAM sequence: AAG
gagccaaccaagcagagaaa

SEQ ID NO: 103244 - DNA, 20 bp, Artificial Sequence
  Description of Artificial Sequence: Synthetic oligonucleotide
  Target: LAMA2; (-) strand; PAM type: NRG; PAM sequence: GAG
actggtgagccaaccaagca

SEQ ID NO: 103245 - DNA, 20 bp, Artificial Sequence
  Description of Artificial Sequence: Synthetic oligonucleotide
  Target: LAMA2; (-) strand; PAM type: NRG; PAM sequence: CAG
tgactggtgagccaaccaag

SEQ ID NO: 103246 - DNA, 20 bp, Artificial Sequence
  Description of Artificial Sequence: Synthetic oligonucleotide
  Target: LAMA2; (-) strand; PAM type: NRG; PAM sequence: AAG
aagtgactggtgagccaacc

SEQ ID NO: 103247 - DNA, 20 bp, Artificial Sequence
  Description of Artificial Sequence: Synthetic oligonucleotide
  Target: LAMA2; (-) strand; PAM type: NRG; PAM sequence: GAG
gactgtatcaagtgactggt

SEQ ID NO: 103248 - DNA, 20 bp, Artificial Sequence
  Description of Artificial Sequence: Synthetic oligonucleotide
  Target: LAMA2; (-) strand; PAM type: NRG; PAM sequence: TGG
taaagactgtatcaagtgac

SEQ ID NO: 103249 - DNA, 20 bp, Artificial Sequence
  Description of Artificial Sequence: Synthetic oligonucleotide
  Target: LAMA2; (-) strand; PAM type: NRG; PAM sequence: AAG
ttaaatctaaagactgtatc

SEQ ID NO: 103250 - DNA, 20 bp, Artificial Sequence
  Description of Artificial Sequence: Synthetic oligonucleotide
  Target: LAMA2; (-) strand; PAM type: NRG; PAM sequence: AAG
gacatgtgctcttaaatcta

SEQ ID NO: 103251 - DNA, 20 bp, Artificial Sequence
  Description of Artificial Sequence: Synthetic oligonucleotide
  Target: LAMA2; (-) strand; PAM type: NRG; PAM sequence: AGG
agctcctacagcagtcatgc

SEQ ID NO: 103252 - DNA, 20 bp, Artificial Sequence
  Description of Artificial Sequence: Synthetic oligonucleotide
  Target: LAMA2; (-) strand; PAM type: NRG; PAM sequence: CAG
tagctcctacagcagtcatg

SEQ ID NO: 103253 - DNA, 20 bp, Artificial Sequence
  Description of Artificial Sequence: Synthetic oligonucleotide
  Target: LAMA2; (-) strand; PAM type: NRG; PAM sequence: CAG
agagagggtagctcctacag

SEQ ID NO: 103254 - DNA, 20 bp, Artificial Sequence
  Description of Artificial Sequence: Synthetic oligonucleotide
  Target: LAMA2; (-) strand; PAM type: NRG; PAM sequence: CAG
agaagagagggtagctccta

SEQ ID NO: 103255 - DNA, 20 bp, Artificial Sequence
  Description of Artificial Sequence: Synthetic oligonucleotide
  Target: LAMA2; (-) strand; PAM type: NRG; PAM sequence: TAG
agcccttaaagaagagaggg

SEQ ID NO: 103256 - DNA, 20 bp, Artificial Sequence
  Description of Artificial Sequence: Synthetic oligonucleotide
  Target: LAMA2; (-) strand; PAM type: NRG; PAM sequence: GGG
aaaagcccttaaagaagaga

SEQ ID NO: 103257 - DNA, 20 bp, Artificial Sequence
  Description of Artificial Sequence: Synthetic oligonucleotide
  Target: LAMA2; (-) strand; PAM type: NRG; PAM sequence: AGG
taaaagcccttaaagaagag

SEQ ID NO: 103258 - DNA, 20 bp, Artificial Sequence
  Description of Artificial Sequence: Synthetic oligonucleotide
  Target: LAMA2; (-) strand; PAM type: NRG; PAM sequence: GAG
ataaaagcccttaaagaaga

SEQ ID NO: 103259 - DNA, 20 bp, Artificial Sequence
  Description of Artificial Sequence: Synthetic oligonucleotide
  Target: LAMA2; (-) strand; PAM type: NRG; PAM sequence: GAG
atataaaagcccttaaagaa

SEQ ID NO: 103260 - DNA, 20 bp, Artificial Sequence
  Description of Artificial Sequence: Synthetic oligonucleotide
  Target: LAMA2; (-) strand; PAM type: NRG; PAM sequence: AAG
aaatataaaagcccttaaag

SEQ ID NO: 103261 - DNA, 20 bp, Artificial Sequence
  Description of Artificial Sequence: Synthetic oligonucleotide
  Target: LAMA2; (-) strand; PAM type: NRG; PAM sequence: AAG
ataaaatataaaagccctta

SEQ ID NO: 103262 - DNA, 20 bp, Artificial Sequence
  Description of Artificial Sequence: Synthetic oligonucleotide
  Target: LAMA2; (-) strand; PAM type: NRG; PAM sequence: AAG
acaatgagtataaaatataa

SEQ ID NO: 103263 - DNA, 20 bp, Artificial Sequence
  Description of Artificial Sequence: Synthetic oligonucleotide
  Target: LAMA2; (-) strand; PAM type: NRG; PAM sequence: GAG
tttctccatttaaaaacaat

SEQ ID NO: 103264 - DNA, 20 bp, Artificial Sequence
  Description of Artificial Sequence: Synthetic oligonucleotide
  Target: LAMA2; (-) strand; PAM type: NRG; PAM sequence: TAG
acccagggatattagggaat

SEQ ID NO: 103265 - DNA, 20 bp, Artificial Sequence
  Description of Artificial Sequence: Synthetic oligonucleotide
  Target: LAMA2; (-) strand; PAM type: NRG; PAM sequence: GGG
ttctttacccagggatatta

SEQ ID NO: 103266 - DNA, 20 bp, Artificial Sequence
  Description of Artificial Sequence: Synthetic oligonucleotide
  Target: LAMA2; (-) strand; PAM type: NRG; PAM sequence: AGG
cttctttacccagggatatt

SEQ ID NO: 103267 - DNA, 20 bp, Artificial Sequence
  Description of Artificial Sequence: Synthetic oligonucleotide
  Target: LAMA2; (-) strand; PAM type: NRG; PAM sequence: TAG
tcttctttacccagggatat

SEQ ID NO: 103268 - DNA, 20 bp, Artificial Sequence
  Description of Artificial Sequence: Synthetic oligonucleotide
  Target: LAMA2; (-) strand; PAM type: NRG; PAM sequence: GGG
aataatgtcttctttaccca

SEQ ID NO: 103269 - DNA, 20 bp, Artificial Sequence
  Description of Artificial Sequence: Synthetic oligonucleotide
  Target: LAMA2; (-) strand; PAM type: NRG; PAM sequence: AGG
gaataatgtcttctttaccc

SEQ ID NO: 103270 - DNA, 20 bp, Artificial Sequence
  Description of Artificial Sequence: Synthetic oligonucleotide
  Target: LAMA2; (-) strand; PAM type: NRG; PAM sequence: CAG
ggaataatgtcttctttacc

SEQ ID NO: 103271 - DNA, 20 bp, Artificial Sequence
  Description of Artificial Sequence: Synthetic oligonucleotide
  Target: LAMA2; (-) strand; PAM type: NRG; PAM sequence: TGG
tttaaatatgagttcttggg

SEQ ID NO: 103272 - DNA, 20 bp, Artificial Sequence
  Description of Artificial Sequence: Synthetic oligonucleotide
  Target: LAMA2; (-) strand; PAM type: NRG; PAM sequence: GGG
cattttaaatatgagttctt

SEQ ID NO: 103273 - DNA, 20 bp, Artificial Sequence
  Description of Artificial Sequence: Synthetic oligonucleotide
  Target: LAMA2; (-) strand; PAM type: NRG; PAM sequence: TGG
acattttaaatatgagttct

SEQ ID NO: 103274 - DNA, 20 bp, Artificial Sequence
  Description of Artificial Sequence: Synthetic oligonucleotide
  Target: LAMA2; (-) strand; PAM type: NRG; PAM sequence: GAG
tcaaaatacattttaaatat

SEQ ID NO: 103275 - DNA, 20 bp, Artificial Sequence
  Description of Artificial Sequence: Synthetic oligonucleotide
  Target: LAMA2; (-) strand; PAM type: NRG; PAM sequence: GAG
caaatcaaaatgcattgaaa

SEQ ID NO: 103276 - DNA, 20 bp, Artificial Sequence
  Description of Artificial Sequence: Synthetic oligonucleotide
  Target: LAMA2; (-) strand; PAM type: NRG; PAM sequence: AAG
aacaaatcaaaatgcattga

SEQ ID NO: 103277 - DNA, 20 bp, Artificial Sequence
  Description of Artificial Sequence: Synthetic oligonucleotide
  Target: LAMA2; (-) strand; PAM type: NRG; PAM sequence: TGG
ttccagtgagtaaaataaaa

SEQ ID NO: 103278 - DNA, 20 bp, Artificial Sequence
  Description of Artificial Sequence: Synthetic oligonucleotide
  Target: LAMA2; (-) strand; PAM type: NRG; PAM sequence: GAG
ggaacttgggttcttccagt

SEQ ID NO: 103279 - DNA, 20 bp, Artificial Sequence
  Description of Artificial Sequence: Synthetic oligonucleotide
  Target: LAMA2; (-) strand; PAM type: NRG; PAM sequence: CAG
gtgaggaacttgggttcttc

SEQ ID NO: 103280 - DNA, 20 bp, Artificial Sequence
  Description of Artificial Sequence: Synthetic oligonucleotide
  Target: LAMA2; (-) strand; PAM type: NRG; PAM sequence: GGG
ttctcatatgtgaggaactt

SEQ ID NO: 103281 - DNA, 20 bp, Artificial Sequence
  Description of Artificial Sequence: Synthetic oligonucleotide
  Target: LAMA2; (-) strand; PAM type: NRG; PAM sequence: TGG
attctcatatgtgaggaact

SEQ ID NO: 103282 - DNA, 20 bp, Artificial Sequence
  Description of Artificial Sequence: Synthetic oligonucleotide
  Target: LAMA2; (-) strand; PAM type: NRG; PAM sequence: AGG
aaacatgattctcatatgtg

SEQ ID NO: 103283 - DNA, 20 bp, Artificial Sequence
  Description of Artificial Sequence: Synthetic oligonucleotide
  Target: LAMA2; (-) strand; PAM type: NRG; PAM sequence: GAG
taaacatgattctcatatgt

SEQ ID NO: 103284 - DNA, 20 bp, Artificial Sequence
  Description of Artificial Sequence: Synthetic oligonucleotide
  Target: LAMA2; (-) strand; PAM type: NRG; PAM sequence: CAG
atttcacacatactgtaggg

SEQ ID NO: 103285 - DNA, 20 bp, Artificial Sequence
  Description of Artificial Sequence: Synthetic oligonucleotide
  Target: LAMA2; (-) strand; PAM type: NRG; PAM sequence: GGG
aatatttcacacatactgta

SEQ ID NO: 103286 - DNA, 20 bp, Artificial Sequence
  Description of Artificial Sequence: Synthetic oligonucleotide
  Target: LAMA2; (-) strand; PAM type: NRG; PAM sequence: AGG
taatatttcacacatactgt

SEQ ID NO: 103287 - DNA, 20 bp, Artificial Sequence
  Description of Artificial Sequence: Synthetic oligonucleotide
  Target: LAMA2; (-) strand; PAM type: NRG; PAM sequence: TAG
ttaatatttcacacatactg

SEQ ID NO: 103288 - DNA, 20 bp, Artificial Sequence
  Description of Artificial Sequence: Synthetic oligonucleotide
  Target: LAMA2; (-) strand; PAM type: NRG; PAM sequence: AAG
taagtagagtcatcatcaaa

SEQ ID NO: 103289 - DNA, 20 bp, Artificial Sequence
  Description of Artificial Sequence: Synthetic oligonucleotide
  Target: LAMA2; (-) strand; PAM type: NRG; PAM sequence: GAG
aatagctatagaggtaagta

SEQ ID NO: 103290 - DNA, 20 bp, Artificial Sequence
  Description of Artificial Sequence: Synthetic oligonucleotide
  Target: LAMA2; (-) strand; PAM type: NRG; PAM sequence: TAG
acaatagctatagaggtaag

SEQ ID NO: 103291 - DNA, 20 bp, Artificial Sequence
  Description of Artificial Sequence: Synthetic oligonucleotide
  Target: LAMA2; (-) strand; PAM type: NRG; PAM sequence: AAG
aggacaatagctatagaggt

SEQ ID NO: 103292 - DNA, 20 bp, Artificial Sequence
  Description of Artificial Sequence: Synthetic oligonucleotide
  Target: LAMA2; (-) strand; PAM type: NRG; PAM sequence: AGG
gctaaggacaatagctatag

SEQ ID NO: 103293 - DNA, 20 bp, Artificial Sequence
  Description of Artificial Sequence: Synthetic oligonucleotide
  Target: LAMA2; (-) strand; PAM type: NRG; PAM sequence: GAG
agctaaggacaatagctata

SEQ ID NO: 103294 - DNA, 20 bp, Artificial Sequence
  Description of Artificial Sequence: Synthetic oligonucleotide
  Target: LAMA2; (-) strand; PAM type: NRG; PAM sequence: TAG
ggagctaaggacaatagcta

SEQ ID NO: 103295 - DNA, 20 bp, Artificial Sequence
  Description of Artificial Sequence: Synthetic oligonucleotide
  Target: LAMA2; (-) strand; PAM type: NRG; PAM sequence: TAG
aagaaaggagctaaggacaa

SEQ ID NO: 103296 - DNA, 20 bp, Artificial Sequence
  Description of Artificial Sequence: Synthetic oligonucleotide
  Target: LAMA2; (-) strand; PAM type: NRG; PAM sequence: AGG
ctgaaaaaagaaaggagcta

SEQ ID NO: 103297 - DNA, 20 bp, Artificial Sequence
  Description of Artificial Sequence: Synthetic oligonucleotide
  Target: LAMA2; (-) strand; PAM type: NRG; PAM sequence: AAG
tctgaaaaaagaaaggagct

SEQ ID NO: 103298 - DNA, 20 bp, Artificial Sequence
  Description of Artificial Sequence: Synthetic oligonucleotide
  Target: LAMA2; (-) strand; PAM type: NRG; PAM sequence: GAG
ttggctctgaaaaaagaaag

SEQ ID NO: 103299 - DNA, 20 bp, Artificial Sequence
  Description of Artificial Sequence: Synthetic oligonucleotide
  Target: LAMA2; (-) strand; PAM type: NRG; PAM sequence: AGG
ttttggctctgaaaaaagaa

SEQ ID NO: 103300 - DNA, 20 bp, Artificial Sequence
  Description of Artificial Sequence: Synthetic oligonucleotide
  Target: LAMA2; (-) strand; PAM type: NRG; PAM sequence: AAG
attttggctctgaaaaaaga

SEQ ID NO: 103301 - DNA, 20 bp, Artificial Sequence
  Description of Artificial Sequence: Synthetic oligonucleotide
  Target: LAMA2; (-) strand; PAM type: NRG; PAM sequence: AAG
aaaaattttggctctgaaaa

SEQ ID NO: 103302 - DNA, 20 bp, Artificial Sequence
  Description of Artificial Sequence: Synthetic oligonucleotide
  Target: LAMA2; (-) strand; PAM type: NRG; PAM sequence: TGG
tccaagtctttaaaaaattt

SEQ ID NO: 103303 - DNA, 20 bp, Artificial Sequence
  Description of Artificial Sequence: Synthetic oligonucleotide
  Target: LAMA2; (-) strand; PAM type: NRG; PAM sequence: AAG
ataaatacagacttgtctcc

SEQ ID NO: 103304 - DNA, 20 bp, Artificial Sequence
  Description of Artificial Sequence: Synthetic oligonucleotide
  Target: LAMA2; (-) strand; PAM type: NRG; PAM sequence: CAG
agtggagtgagaaataaata

SEQ ID NO: 103305 - DNA, 20 bp, Artificial Sequence
  Description of Artificial Sequence: Synthetic oligonucleotide
  Target: LAMA2; (-) strand; PAM type: NRG; PAM sequence: GAG
aatccaggcagcagtggagt

SEQ ID NO: 103306 - DNA, 20 bp, Artificial Sequence
  Description of Artificial Sequence: Synthetic oligonucleotide
  Target: LAMA2; (-) strand; PAM type: NRG; PAM sequence: GAG
tgaaaatccaggcagcagtg

SEQ ID NO: 103307 - DNA, 20 bp, Artificial Sequence
  Description of Artificial Sequence: Synthetic oligonucleotide
  Target: LAMA2; (-) strand; PAM type: NRG; PAM sequence: TGG
agtgaaaatccaggcagcag

SEQ ID NO: 103308 - DNA, 20 bp, Artificial Sequence
  Description of Artificial Sequence: Synthetic oligonucleotide
  Target: LAMA2; (-) strand; PAM type: NRG; PAM sequence: CAG
gggagtgaaaatccaggcag

SEQ ID NO: 103309 - DNA, 20 bp, Artificial Sequence
  Description of Artificial Sequence: Synthetic oligonucleotide
  Target: LAMA2; (-) strand; PAM type: NRG; PAM sequence: CAG
gctgggagtgaaaatccagg

SEQ ID NO: 103310 - DNA, 20 bp, Artificial Sequence
  Description of Artificial Sequence: Synthetic oligonucleotide
  Target: LAMA2; (-) strand; PAM type: NRG; PAM sequence: AGG
tgggctgggagtgaaaatcc

SEQ ID NO: 103311 - DNA, 20 bp, Artificial Sequence
  Description of Artificial Sequence: Synthetic oligonucleotide
  Target: LAMA2; (-) strand; PAM type: NRG; PAM sequence: CAG
gtgggctgggagtgaaaatc

SEQ ID NO: 103312 - DNA, 20 bp, Artificial Sequence
  Description of Artificial Sequence: Synthetic oligonucleotide
  Target: LAMA2; (-) strand; PAM type: NRG; PAM sequence: GAG
cagtttcagtagtgggctgg

SEQ ID NO: 103313 - DNA, 20 bp, Artificial Sequence
  Description of Artificial Sequence: Synthetic oligonucleotide
  Target: LAMA2; (-) strand; PAM type: NRG; PAM sequence: GGG
aacagtttcagtagtgggct

SEQ ID NO: 103314 - DNA, 20 bp, Artificial Sequence
  Description of Artificial Sequence: Synthetic oligonucleotide
  Target: LAMA2; (-) strand; PAM type: NRG; PAM sequence: TGG
aaacagtttcagtagtgggc

SEQ ID NO: 103315 - DNA, 20 bp, Artificial Sequence
  Description of Artificial Sequence: Synthetic oligonucleotide
  Target: LAMA2; (-) strand; PAM type: NRG; PAM sequence: GGG
ataaaaacagtttcagtagt

SEQ ID NO: 103316 - DNA, 20 bp, Artificial Sequence
  Description of Artificial Sequence: Synthetic oligonucleotide
  Target: LAMA2; (-) strand; PAM type: NRG; PAM sequence: TGG
tataaaaacagtttcagtag

SEQ ID NO: 103317 - DNA, 20 bp, Artificial Sequence
  Description of Artificial Sequence: Synthetic oligonucleotide
  Target: LAMA2; (-) strand; PAM type: NRG; PAM sequence: TAG
tcttataaaaacagtttcag

SEQ ID NO: 103318 - DNA, 20 bp, Artificial Sequence
  Description of Artificial Sequence: Synthetic oligonucleotide
  Target: LAMA2; (-) strand; PAM type: NRG; PAM sequence: CAG
ttatcttataaaaacagttt

SEQ ID NO: 103319 - DNA, 20 bp, Artificial Sequence
  Description of Artificial Sequence: Synthetic oligonucleotide
  Target: LAMA2; (-) strand; PAM type: NRG; PAM sequence: CAG
cattggttatcttataaaaa

SEQ ID NO: 103320 - DNA, 20 bp, Artificial Sequence
  Description of Artificial Sequence: Synthetic oligonucleotide
  Target: LAMA2; (-) strand; PAM type: NRG; PAM sequence: TGG
tttagttaccagattgtcat

SEQ ID NO: 103321 - DNA, 20 bp, Artificial Sequence
  Description of Artificial Sequence: Synthetic oligonucleotide
  Target: LAMA2; (-) strand; PAM type: NRG; PAM sequence: CAG
tatccagtggatttagttac

SEQ ID NO: 103322 - DNA, 20 bp, Artificial Sequence
  Description of Artificial Sequence: Synthetic oligonucleotide
  Target: LAMA2; (-) strand; PAM type: NRG; PAM sequence: TAG
taataagtatccagtggatt

SEQ ID NO: 103323 - DNA, 20 bp, Artificial Sequence
  Description of Artificial Sequence: Synthetic oligonucleotide
  Target: LAMA2; (-) strand; PAM type: NRG; PAM sequence: TGG
taaaattaataagtatccag

SEQ ID NO: 103324 - DNA, 20 bp, Artificial Sequence
  Description of Artificial Sequence: Synthetic oligonucleotide
  Target: LAMA2; (-) strand; PAM type: NRG; PAM sequence: CAG
aagtaaaattaataagtatc

SEQ ID NO: 103325 - DNA, 20 bp, Artificial Sequence
  Description of Artificial Sequence: Synthetic oligonucleotide
  Target: LAMA2; (-) strand; PAM type: NRG; PAM sequence: AAG
agatttcaagtaaaattaat

SEQ ID NO: 103326 - DNA, 20 bp, Artificial Sequence
  Description of Artificial Sequence: Synthetic oligonucleotide
  Target: LAMA2; (-) strand; PAM type: NRG; PAM sequence: AAG
atcaaagctgcagagatttc

SEQ ID NO: 103327 - DNA, 20 bp, Artificial Sequence
  Description of Artificial Sequence: Synthetic oligonucleotide
  Target: LAMA2; (-) strand; PAM type: NRG; PAM sequence: GAG
aaggaaagatcaaagctgca

SEQ ID NO: 103328 - DNA, 20 bp, Artificial Sequence
  Description of Artificial Sequence: Synthetic oligonucleotide
  Target: LAMA2; (-) strand; PAM type: NRG; PAM sequence: CAG
ggaaggaaagatcaaagctg

SEQ ID NO: 103329 - DNA, 20 bp, Artificial Sequence
  Description of Artificial Sequence: Synthetic oligonucleotide
  Target: LAMA2; (-) strand; PAM type: NRG; PAM sequence: AAG
taagaaggaaggaaagatca

SEQ ID NO: 103330 - DNA, 20 bp, Artificial Sequence
  Description of Artificial Sequence: Synthetic oligonucleotide
  Target: LAMA2; (-) strand; PAM type: NRG; PAM sequence: AAG
agtatgttaagaaggaagga

SEQ ID NO: 103331 - DNA, 20 bp, Artificial Sequence
  Description of Artificial Sequence: Synthetic oligonucleotide
  Target: LAMA2; (-) strand; PAM type: NRG; PAM sequence: AGG
ggacagtatgttaagaagga

SEQ ID NO: 103332 - DNA, 20 bp, Artificial Sequence
  Description of Artificial Sequence: Synthetic oligonucleotide
  Target: LAMA2; (-) strand; PAM type: NRG; PAM sequence: AAG
aggacagtatgttaagaagg

SEQ ID NO: 103333 - DNA, 20 bp, Artificial Sequence
  Description of Artificial Sequence: Synthetic oligonucleotide
  Target: LAMA2; (-) strand; PAM type: NRG; PAM sequence: AGG
gagaggacagtatgttaaga

SEQ ID NO: 103334 - DNA, 20 bp, Artificial Sequence
  Description of Artificial Sequence: Synthetic oligonucleotide
  Target: LAMA2; (-) strand; PAM type: NRG; PAM sequence: AAG
agagaggacagtatgttaag

SEQ ID NO: 103335 - DNA, 20 bp, Artificial Sequence
  Description of Artificial Sequence: Synthetic oligonucleotide
  Target: LAMA2; (-) strand; PAM type: NRG; PAM sequence: AAG
cagagagaggacagtatgtt

SEQ ID NO: 103336 - DNA, 20 bp, Artificial Sequence
  Description of Artificial Sequence: Synthetic oligonucleotide
  Target: LAMA2; (-) strand; PAM type: NRG; PAM sequence: CAG
agagaaaaacagagagagga

SEQ ID NO: 103337 - DNA, 20 bp, Artificial Sequence
  Description of Artificial Sequence: Synthetic oligonucleotide
  Target: LAMA2; (-) strand; PAM type: NRG; PAM sequence: AGG
attaagagaaaaacagagag

SEQ ID NO: 103338 - DNA, 20 bp, Artificial Sequence
  Description of Artificial Sequence: Synthetic oligonucleotide
  Target: LAMA2; (-) strand; PAM type: NRG; PAM sequence: GAG
aattaagagaaaaacagaga

SEQ ID NO: 103339 - DNA, 20 bp, Artificial Sequence
  Description of Artificial Sequence: Synthetic oligonucleotide
  Target: LAMA2; (-) strand; PAM type: NRG; PAM sequence: GAG
agaattaagagaaaaacaga

SEQ ID NO: 103340 - DNA, 20 bp, Artificial Sequence
  Description of Artificial Sequence: Synthetic oligonucleotide
  Target: LAMA2; (-) strand; PAM type: NRG; PAM sequence: GAG
ggagaattaagagaaaaaca

SEQ ID NO: 103341 - DNA, 20 bp, Artificial Sequence
  Description of Artificial Sequence: Synthetic oligonucleotide
  Target: LAMA2; (-) strand; PAM type: NRG; PAM sequence: CAG
ttggagaattaagagaaaaa

SEQ ID NO: 103342 - DNA, 20 bp, Artificial Sequence
  Description of Artificial Sequence: Synthetic oligonucleotide
  Target: LAMA2; (-) strand; PAM type: NRG; PAM sequence: GAG
atgaaaggttggagaattaa

SEQ ID NO: 103343 - DNA, 20 bp, Artificial Sequence
  Description of Artificial Sequence: Synthetic oligonucleotide
  Target: LAMA2; (-) strand; PAM type: NRG; PAM sequence: AAG
gaatgaaaggttggagaatt

SEQ ID NO: 103344 - DNA, 20 bp, Artificial Sequence
  Description of Artificial Sequence: Synthetic oligonucleotide
  Target: LAMA2; (-) strand; PAM type: NRG; PAM sequence: GAG
agccttagaatgaaaggttg

SEQ ID NO: 103345 - DNA, 20 bp, Artificial Sequence
  Description of Artificial Sequence: Synthetic oligonucleotide
  Target: LAMA2; (-) strand; PAM type: NRG; PAM sequence: TGG
agagccttagaatgaaaggt

SEQ ID NO: 103346 - DNA, 20 bp, Artificial Sequence
  Description of Artificial Sequence: Synthetic oligonucleotide
  Target: LAMA2; (-) strand; PAM type: NRG; PAM sequence: AGG
aggaagagccttagaatgaa

SEQ ID NO: 103347 - DNA, 20 bp, Artificial Sequence
  Description of Artificial Sequence: Synthetic oligonucleotide
  Target: LAMA2; (-) strand; PAM type: NRG; PAM sequence: AAG
gaggaagagccttagaatga

SEQ ID NO: 103348 - DNA, 20 bp, Artificial Sequence
  Description of Artificial Sequence: Synthetic oligonucleotide
  Target: LAMA2; (-) strand; PAM type: NRG; PAM sequence: TAG
gatgatgagaggaagagcct

SEQ ID NO: 103349 - DNA, 20 bp, Artificial Sequence
  Description of Artificial Sequence: Synthetic oligonucleotide
  Target: LAMA2; (-) strand; PAM type: NRG; PAM sequence: GAG
tgaagggatgatgagaggaa

SEQ ID NO: 103350 - DNA, 20 bp, Artificial Sequence
  Description of Artificial Sequence: Synthetic oligonucleotide
  Target: LAMA2; (-) strand; PAM type: NRG; PAM sequence: AAG
tttgaagggatgatgagagg

SEQ ID NO: 103351 - DNA, 20 bp, Artificial Sequence
  Description of Artificial Sequence: Synthetic oligonucleotide
  Target: LAMA2; (-) strand; PAM type: NRG; PAM sequence: AGG
gactttgaagggatgatgag

SEQ ID NO: 103352 - DNA, 20 bp, Artificial Sequence
  Description of Artificial Sequence: Synthetic oligonucleotide
  Target: LAMA2; (-) strand; PAM type: NRG; PAM sequence: GAG
cgactttgaagggatgatga

SEQ ID NO: 103353 - DNA, 20 bp, Artificial Sequence
  Description of Artificial Sequence: Synthetic oligonucleotide
  Target: LAMA2; (-) strand; PAM type: NRG; PAM sequence: GAG
accgactttgaagggatgat

SEQ ID NO: 103354 - DNA, 20 bp, Artificial Sequence
  Description of Artificial Sequence: Synthetic oligonucleotide
  Target: LAMA2; (-) strand; PAM type: NRG; PAM sequence: GGG
caaggaacaccgactttgaa

SEQ ID NO: 103355 - DNA, 20 bp, Artificial Sequence
  Description of Artificial Sequence: Synthetic oligonucleotide
  Target: LAMA2; (-) strand; PAM type: NRG; PAM sequence: AGG
ccaaggaacaccgactttga

SEQ ID NO: 103356 - DNA, 20 bp, Artificial Sequence
  Description of Artificial Sequence: Synthetic oligonucleotide
  Target: LAMA2; (-) strand; PAM type: NRG; PAM sequence: AAG
cccaaggaacaccgactttg

SEQ ID NO: 103357 - DNA, 20 bp, Artificial Sequence
  Description of Artificial Sequence: Synthetic oligonucleotide
  Target: LAMA2; (-) strand; PAM type: NRG; PAM sequence: AGG
ggactgaggcctagtcccca

SEQ ID NO: 103358 - DNA, 20 bp, Artificial Sequence
  Description of Artificial Sequence: Synthetic oligonucleotide
  Target: LAMA2; (-) strand; PAM type: NRG; PAM sequence: AAG
tggactgaggcctagtcccc

SEQ ID NO: 103359 - DNA, 20 bp, Artificial Sequence
  Description of Artificial Sequence: Synthetic oligonucleotide
  Target: LAMA2; (-) strand; PAM type: NRG; PAM sequence: TAG
ggaaaacatggactgaggcc

SEQ ID NO: 103360 - DNA, 20 bp, Artificial Sequence
  Description of Artificial Sequence: Synthetic oligonucleotide
  Target: LAMA2; (-) strand; PAM type: NRG; PAM sequence: AGG
gtgagggaaaacatggactg

SEQ ID NO: 103361 - DNA, 20 bp, Artificial Sequence
  Description of Artificial Sequence: Synthetic oligonucleotide
  Target: LAMA2; (-) strand; PAM type: NRG; PAM sequence: GAG
agtgagggaaaacatggact

SEQ ID NO: 103362 - DNA, 20 bp, Artificial Sequence
  Description of Artificial Sequence: Synthetic oligonucleotide
  Target: LAMA2; (-) strand; PAM type: NRG; PAM sequence: TGG
ttatacagtgagggaaaaca

SEQ ID NO: 103363 - DNA, 20 bp, Artificial Sequence
  Description of Artificial Sequence: Synthetic oligonucleotide
  Target: LAMA2; (-) strand; PAM type: NRG; PAM sequence: GGG
aagaaagtgttatacagtga

SEQ ID NO: 103364 - DNA, 20 bp, Artificial Sequence
  Description of Artificial Sequence: Synthetic oligonucleotide
  Target: LAMA2; (-) strand; PAM type: NRG; PAM sequence: AGG
aaagaaagtgttatacagtg

SEQ ID NO: 103365 - DNA, 20 bp, Artificial Sequence
  Description of Artificial Sequence: Synthetic oligonucleotide
  Target: LAMA2; (-) strand; PAM type: NRG; PAM sequence: GAG
caaagaaagtgttatacagt

SEQ ID NO: 103366 - DNA, 20 bp, Artificial Sequence
  Description of Artificial Sequence: Synthetic oligonucleotide
  Target: LAMA2; (-) strand; PAM type: NRG; PAM sequence: CAG
agaccaaagaaagtgttata

SEQ ID NO: 103367 - DNA, 20 bp, Artificial Sequence
  Description of Artificial Sequence: Synthetic oligonucleotide
  Target: LAMA2; (-) strand; PAM type: NRG; PAM sequence: AAG
tggcaattgaagaccaaaga

SEQ ID NO: 103368 - DNA, 20 bp, Artificial Sequence
  Description of Artificial Sequence: Synthetic oligonucleotide
  Target: LAMA2; (-) strand; PAM type: NRG; PAM sequence: AAG
tacatggcaattgaagacca

SEQ ID NO: 103369 - DNA, 20 bp, Artificial Sequence
  Description of Artificial Sequence: Synthetic oligonucleotide
  Target: LAMA2; (-) strand; PAM type: NRG; PAM sequence: AAG
cagcttgtacatggcaattg

SEQ ID NO: 103370 - DNA, 20 bp, Artificial Sequence
  Description of Artificial Sequence: Synthetic oligonucleotide
  Target: LAMA2; (-) strand; PAM type: NRG; PAM sequence: TGG
atgaattaacagcttgtaca

SEQ ID NO: 103371 - DNA, 20 bp, Artificial Sequence
  Description of Artificial Sequence: Synthetic oligonucleotide
  Target: LAMA2; (-) strand; PAM type: NRG; PAM sequence: CAG
aatatagatttatgaattaa

SEQ ID NO: 103372 - DNA, 20 bp, Artificial Sequence
  Description of Artificial Sequence: Synthetic oligonucleotide
  Target: LAMA2; (-) strand; PAM type: NRG; PAM sequence: TAG
tgaagtcagccttgaaaata

SEQ ID NO: 103373 - DNA, 20 bp, Artificial Sequence
  Description of Artificial Sequence: Synthetic oligonucleotide
  Target: LAMA2; (-) strand; PAM type: NRG; PAM sequence: CAG
ccaaagcatgagaatgaagt

SEQ ID NO: 103374 - DNA, 20 bp, Artificial Sequence
  Description of Artificial Sequence: Synthetic oligonucleotide
  Target: LAMA2; (-) strand; PAM type: NRG; PAM sequence: AAG
aggaccaaagcatgagaatg

SEQ ID NO: 103375 - DNA, 20 bp, Artificial Sequence
  Description of Artificial Sequence: Synthetic oligonucleotide
  Target: LAMA2; (-) strand; PAM type: NRG; PAM sequence: GAG
ggcacataggaccaaagcat

SEQ ID NO: 103376 - DNA, 20 bp, Artificial Sequence
  Description of Artificial Sequence: Synthetic oligonucleotide
  Target: LAMA2; (-) strand; PAM type: NRG; PAM sequence: AAG
tagtaaggcacataggacca

SEQ ID NO: 103377 - DNA, 20 bp, Artificial Sequence
  Description of Artificial Sequence: Synthetic oligonucleotide
  Target: LAMA2; (-) strand; PAM type: NRG; PAM sequence: AGG
caatccatagtaaggcacat

SEQ ID NO: 103378 - DNA, 20 bp, Artificial Sequence
  Description of Artificial Sequence: Synthetic oligonucleotide
  Target: LAMA2; (-) strand; PAM type: NRG; PAM sequence: TAG
ccaatccatagtaaggcaca

SEQ ID NO: 103379 - DNA, 20 bp, Artificial Sequence
  Description of Artificial Sequence: Synthetic oligonucleotide
  Target: LAMA2; (-) strand; PAM type: NRG; PAM sequence: AGG
gagatgtccaatccatagta

SEQ ID NO: 103380 - DNA, 20 bp, Artificial Sequence
  Description of Artificial Sequence: Synthetic oligonucleotide
  Target: LAMA2; (-) strand; PAM type: NRG; PAM sequence: AAG
tgagatgtccaatccatagt

SEQ ID NO: 103381 - DNA, 20 bp, Artificial Sequence
  Description of Artificial Sequence: Synthetic oligonucleotide
  Target: LAMA2; (-) strand; PAM type: NRG; PAM sequence: TAG
agtttgagatgtccaatcca

SEQ ID NO: 103382 - DNA, 20 bp, Artificial Sequence
  Description of Artificial Sequence: Synthetic oligonucleotide
  Target: LAMA2; (-) strand; PAM type: NRG; PAM sequence: GAG
ggaaatgatgagtttagttt

SEQ ID NO: 103383 - DNA, 20 bp, Artificial Sequence
  Description of Artificial Sequence: Synthetic oligonucleotide
  Target: LAMA2; (-) strand; PAM type: NRG; PAM sequence: TAG
ttaagaggaaatgatgagtt

SEQ ID NO: 103384 - DNA, 20 bp, Artificial Sequence
  Description of Artificial Sequence: Synthetic oligonucleotide
  Target: LAMA2; (-) strand; PAM type: NRG; PAM sequence: GAG
gggctttaagaggaaatgat

SEQ ID NO: 103385 - DNA, 20 bp, Artificial Sequence
  Description of Artificial Sequence: Synthetic oligonucleotide
  Target: LAMA2; (-) strand; PAM type: NRG; PAM sequence: AGG
gagaaataatgggctttaag

SEQ ID NO: 103386 - DNA, 20 bp, Artificial Sequence
  Description of Artificial Sequence: Synthetic oligonucleotide
  Target: LAMA2; (-) strand; PAM type: NRG; PAM sequence: GAG
ggagaaataatgggctttaa

SEQ ID NO: 103387 - DNA, 20 bp, Artificial Sequence
  Description of Artificial Sequence: Synthetic oligonucleotide
  Target: LAMA2; (-) strand; PAM type: NRG; PAM sequence: AAG
caggagaaataatgggcttt

SEQ ID NO: 103388 - DNA, 20 bp, Artificial Sequence
  Description of Artificial Sequence: Synthetic oligonucleotide
  Target: LAMA2; (-) strand; PAM type: NRG; PAM sequence: GGG
ttctacacaggagaaataat

SEQ ID NO: 103389 - DNA, 20 bp, Artificial Sequence
  Description of Artificial Sequence: Synthetic oligonucleotide
  Target: LAMA2; (-) strand; PAM type: NRG; PAM sequence: TGG
gttctacacaggagaaataa

SEQ ID NO: 103390 - DNA, 20 bp, Artificial Sequence
  Description of Artificial Sequence: Synthetic oligonucleotide
  Target: LAMA2; (-) strand; PAM type: NRG; PAM sequence: GAG
cactgagatgttctacacag

SEQ ID NO: 103391 - DNA, 20 bp, Artificial Sequence
  Description of Artificial Sequence: Synthetic oligonucleotide
  Target: LAMA2; (-) strand; PAM type: NRG; PAM sequence: AGG
aacactgagatgttctacac

SEQ ID NO: 103392 - DNA, 20 bp, Artificial Sequence
  Description of Artificial Sequence: Synthetic oligonucleotide
  Target: LAMA2; (-) strand; PAM type: NRG; PAM sequence: CAG
aaacactgagatgttctaca

SEQ ID NO: 103393 - DNA, 20 bp, Artificial Sequence
  Description of Artificial Sequence: Synthetic oligonucleotide
  Target: LAMA2; (-) strand; PAM type: NRG; PAM sequence: GAG
atactggcggataaaacact

SEQ ID NO: 103394 - DNA, 20 bp, Artificial Sequence
  Description of Artificial Sequence: Synthetic oligonucleotide
  Target: LAMA2; (-) strand; PAM type: NRG; PAM sequence: CGG
ggagactgggcatatactgg

SEQ ID NO: 103395 - DNA, 20 bp, Artificial Sequence
  Description of Artificial Sequence: Synthetic oligonucleotide
  Target: LAMA2; (-) strand; PAM type: NRG; PAM sequence: TGG
ttgggagactgggcatatac

SEQ ID NO: 103396 - DNA, 20 bp, Artificial Sequence
  Description of Artificial Sequence: Synthetic oligonucleotide
  Target: LAMA2; (-) strand; PAM type: NRG; PAM sequence: GGG
taatttctctttgggagact

SEQ ID NO: 103397 - DNA, 20 bp, Artificial Sequence
  Description of Artificial Sequence: Synthetic oligonucleotide
  Target: LAMA2; (-) strand; PAM type: NRG; PAM sequence: TGG
ctaatttctctttgggagac

SEQ ID NO: 103398 - DNA, 20 bp, Artificial Sequence
  Description of Artificial Sequence: Synthetic oligonucleotide
  Target: LAMA2; (-) strand; PAM type: NRG; PAM sequence: GAG
acctgctaatttctctttgg

SEQ ID NO: 103399 - DNA, 20 bp, Artificial Sequence
  Description of Artificial Sequence: Synthetic oligonucleotide
  Target: LAMA2; (-) strand; PAM type: NRG; PAM sequence: GGG
caacctgctaatttctcttt

SEQ ID NO: 103400 - DNA, 20 bp, Artificial Sequence
  Description of Artificial Sequence: Synthetic oligonucleotide
  Target: LAMA2; (-) strand; PAM type: NRG; PAM sequence: TGG
gcaacctgctaatttctctt

SEQ ID NO: 103401 - DNA, 20 bp, Artificial Sequence
  Description of Artificial Sequence: Synthetic oligonucleotide
  Target: LAMA2; (-) strand; PAM type: NRG; PAM sequence: GGG
gaaagagggagtagagtgaa

SEQ ID NO: 103402 - DNA, 20 bp, Artificial Sequence
  Description of Artificial Sequence: Synthetic oligonucleotide
  Target: LAMA2; (-) strand; PAM type: NRG; PAM sequence: AGG
tgaaagagggagtagagtga

SEQ ID NO: 103403 - DNA, 20 bp, Artificial Sequence
  Description of Artificial Sequence: Synthetic oligonucleotide
  Target: LAMA2; (-) strand; PAM type: NRG; PAM sequence: AAG
atgaaagagggagtagagtg

SEQ ID NO: 103404 - DNA, 20 bp, Artificial Sequence
  Description of Artificial Sequence: Synthetic oligonucleotide
  Target: LAMA2; (-) strand; PAM type: NRG; PAM sequence: GAG
gaaggatgaaagagggagta

SEQ ID NO: 103405 - DNA, 20 bp, Artificial Sequence
  Description of Artificial Sequence: Synthetic oligonucleotide
  Target: LAMA2; (-) strand; PAM type: NRG; PAM sequence: TAG
atgaaggatgaaagagggag

SEQ ID NO: 103406 - DNA, 20 bp, Artificial Sequence
  Description of Artificial Sequence: Synthetic oligonucleotide
  Target: LAMA2; (-) strand; PAM type: NRG; PAM sequence: GAG
ttgatgaaggatgaaagagg

SEQ ID NO: 103407 - DNA, 20 bp, Artificial Sequence
  Description of Artificial Sequence: Synthetic oligonucleotide
  Target: LAMA2; (-) strand; PAM type: NRG; PAM sequence: GGG
atttgatgaaggatgaaaga

SEQ ID NO: 103408 - DNA, 20 bp, Artificial Sequence
  Description of Artificial Sequence: Synthetic oligonucleotide
  Target: LAMA2; (-) strand; PAM type: NRG; PAM sequence: AGG
aatttgatgaaggatgaaag

SEQ ID NO: 103409 - DNA, 20 bp, Artificial Sequence
  Description of Artificial Sequence: Synthetic oligonucleotide
  Target: LAMA2; (-) strand; PAM type: NRG; PAM sequence: GAG
gaatttgatgaaggatgaaa

SEQ ID NO: 103410 - DNA, 20 bp, Artificial Sequence
  Description of Artificial Sequence: Synthetic oligonucleotide
  Target: LAMA2; (-) strand; PAM type: NRG; PAM sequence: AAG
ctgaatttgatgaaggatga

SEQ ID NO: 103411 - DNA, 20 bp, Artificial Sequence
  Description of Artificial Sequence: Synthetic oligonucleotide
  Target: LAMA2; (-) strand; PAM type: NRG; PAM sequence: AGG
aaggaaactgaatttgatga

SEQ ID NO: 103412 - DNA, 20 bp, Artificial Sequence
  Description of Artificial Sequence: Synthetic oligonucleotide
  Target: LAMA2; (-) strand; PAM type: NRG; PAM sequence: AAG
gaaggaaactgaatttgatg

SEQ ID NO: 103413 - DNA, 20 bp, Artificial Sequence
  Description of Artificial Sequence: Synthetic oligonucleotide
  Target: LAMA2; (-) strand; PAM type: NRG; PAM sequence: AGG
ttacaaagagtcaccataga

SEQ ID NO: 103414 - DNA, 20 bp, Artificial Sequence
  Description of Artificial Sequence: Synthetic oligonucleotide
  Target: LAMA2; (-) strand; PAM type: NRG; PAM sequence: AAG
cttacaaagagtcaccatag

SEQ ID NO: 103415 - DNA, 20 bp, Artificial Sequence
  Description of Artificial Sequence: Synthetic oligonucleotide
  Target: LAMA2; (-) strand; PAM type: NRG; PAM sequence: TAG
aggcttacaaagagtcacca

SEQ ID NO: 103416 - DNA, 20 bp, Artificial Sequence
  Description of Artificial Sequence: Synthetic oligonucleotide
  Target: LAMA2; (-) strand; PAM type: NRG; PAM sequence: GAG
agttggataaggcttacaaa

SEQ ID NO: 103417 - DNA, 20 bp, Artificial Sequence
  Description of Artificial Sequence: Synthetic oligonucleotide
  Target: LAMA2; (-) strand; PAM type: NRG; PAM sequence: AAG
agagttggataaggcttaca

SEQ ID NO: 103418 - DNA, 20 bp, Artificial Sequence
  Description of Artificial Sequence: Synthetic oligonucleotide
  Target: LAMA2; (-) strand; PAM type: NRG; PAM sequence: AGG
caacaggttagagttggata

SEQ ID NO: 103419 - DNA, 20 bp, Artificial Sequence
  Description of Artificial Sequence: Synthetic oligonucleotide
  Target: LAMA2; (-) strand; PAM type: NRG; PAM sequence: AAG
acaacaggttagagttggat

SEQ ID NO: 103420 - DNA, 20 bp, Artificial Sequence
  Description of Artificial Sequence: Synthetic oligonucleotide
  Target: LAMA2; (-) strand; PAM type: NRG; PAM sequence: TGG
aaataacaacaggttagagt

SEQ ID NO: 103421 - DNA, 20 bp, Artificial Sequence
  Description of Artificial Sequence: Synthetic oligonucleotide
  Target: LAMA2; (-) strand; PAM type: NRG; PAM sequence: GAG
atataaataacaacaggtta

SEQ ID NO: 103422 - DNA, 20 bp, Artificial Sequence
  Description of Artificial Sequence: Synthetic oligonucleotide
  Target: LAMA2; (-) strand; PAM type: NRG; PAM sequence: TAG
ccatataaataacaacaggt

SEQ ID NO: 103423 - DNA, 20 bp, Artificial Sequence
  Description of Artificial Sequence: Synthetic oligonucleotide
  Target: LAMA2; (-) strand; PAM type: NRG; PAM sequence: AGG
tctgccatataaataacaac

SEQ ID NO: 103424 - DNA, 20 bp, Artificial Sequence
  Description of Artificial Sequence: Synthetic oligonucleotide
  Target: LAMA2; (-) strand; PAM type: NRG; PAM sequence: CAG
ctctgccatataaataacaa

SEQ ID NO: 103425 - DNA, 20 bp, Artificial Sequence
  Description of Artificial Sequence: Synthetic oligonucleotide
  Target: LAMA2; (-) strand; PAM type: NRG; PAM sequence: TAG
acatgataggatctgcaatt

SEQ ID NO: 103426 - DNA, 20 bp, Artificial Sequence
  Description of Artificial Sequence: Synthetic oligonucleotide
  Target: LAMA2; (-) strand; PAM type: NRG; PAM sequence: AGG
aaggaagagaatgacatgat

SEQ ID NO: 103427 - DNA, 20 bp, Artificial Sequence
  Description of Artificial Sequence: Synthetic oligonucleotide
  Target: LAMA2; (-) strand; PAM type: NRG; PAM sequence: TAG
taaggaagagaatgacatga

SEQ ID NO: 103428 - DNA, 20 bp, Artificial Sequence
  Description of Artificial Sequence: Synthetic oligonucleotide
  Target: LAMA2; (-) strand; PAM type: NRG; PAM sequence: GAG
ccatagtacaatttaaggaa

SEQ ID NO: 103429 - DNA, 20 bp, Artificial Sequence
  Description of Artificial Sequence: Synthetic oligonucleotide
  Target: LAMA2; (-) strand; PAM type: NRG; PAM sequence: AAG
agccatagtacaatttaagg

SEQ ID NO: 103430 - DNA, 20 bp, Artificial Sequence
  Description of Artificial Sequence: Synthetic oligonucleotide
  Target: LAMA2; (-) strand; PAM type: NRG; PAM sequence: AGG
gaaagccatagtacaattta

SEQ ID NO: 103431 - DNA, 20 bp, Artificial Sequence
  Description of Artificial Sequence: Synthetic oligonucleotide
  Target: LAMA2; (-) strand; PAM type: NRG; PAM sequence: AAG
ggaaagccatagtacaattt

SEQ ID NO: 103432 - DNA, 20 bp, Artificial Sequence
  Description of Artificial Sequence: Synthetic oligonucleotide
  Target: LAMA2; (-) strand; PAM type: NRG; PAM sequence: TAG
ctgaaaaaagtggaaagcca

SEQ ID NO: 103433 - DNA, 20 bp, Artificial Sequence
  Description of Artificial Sequence: Synthetic oligonucleotide
  Target: LAMA2; (-) strand; PAM type: NRG; PAM sequence: AAG
gtcatcctgaaaaaagtgga

SEQ ID NO: 103434 - DNA, 20 bp, Artificial Sequence
  Description of Artificial Sequence: Synthetic oligonucleotide
  Target: LAMA2; (-) strand; PAM type: NRG; PAM sequence: TGG
gtatgtcatcctgaaaaaag

SEQ ID NO: 103435 - DNA, 20 bp, Artificial Sequence
  Description of Artificial Sequence: Synthetic oligonucleotide
  Target: LAMA2; (-) strand; PAM type: NRG; PAM sequence: AAG
actgtatgtcatcctgaaaa

SEQ ID NO: 103436 - DNA, 20 bp, Artificial Sequence
  Description of Artificial Sequence: Synthetic oligonucleotide
  Target: LAMA2; (-) strand; PAM type: NRG; PAM sequence: GAG
gagattagatcatggtggga

SEQ ID NO: 103437 - DNA, 20 bp, Artificial Sequence
  Description of Artificial Sequence: Synthetic oligonucleotide
  Target: LAMA2; (-) strand; PAM type: NRG; PAM sequence: GAG
cagagattagatcatggtgg

SEQ ID NO: 103438 - DNA, 20 bp, Artificial Sequence
  Description of Artificial Sequence: Synthetic oligonucleotide
  Target: LAMA2; (-) strand; PAM type: NRG; PAM sequence: GGG
agcagagattagatcatggt

SEQ ID NO: 103439 - DNA, 20 bp, Artificial Sequence
  Description of Artificial Sequence: Synthetic oligonucleotide
  Target: LAMA2; (-) strand; PAM type: NRG; PAM sequence: TGG
aagcagagattagatcatgg

SEQ ID NO: 103440 - DNA, 20 bp, Artificial Sequence
  Description of Artificial Sequence: Synthetic oligonucleotide
  Target: LAMA2; (-) strand; PAM type: NRG; PAM sequence: TGG
gagaagcagagattagatca

SEQ ID NO: 103441 - DNA, 20 bp, Artificial Sequence
  Description of Artificial Sequence: Synthetic oligonucleotide
  Target: LAMA2; (-) strand; PAM type: NRG; PAM sequence: TAG
gatgagagagaagcagagat

SEQ ID NO: 103442 - DNA, 20 bp, Artificial Sequence
  Description of Artificial Sequence: Synthetic oligonucleotide
  Target: LAMA2; (-) strand; PAM type: NRG; PAM sequence: GAG
ggagagatgagagagaagca

SEQ ID NO: 103443 - DNA, 20 bp, Artificial Sequence
  Description of Artificial Sequence: Synthetic oligonucleotide
  Target: LAMA2; (-) strand; PAM type: NRG; PAM sequence: CAG
ggggagagatgagagagaag

SEQ ID NO: 103444 - DNA, 20 bp, Artificial Sequence
  Description of Artificial Sequence: Synthetic oligonucleotide
  Target: LAMA2; (-) strand; PAM type: NRG; PAM sequence: AAG
agtggggagagatgagagag

SEQ ID NO: 103445 - DNA, 20 bp, Artificial Sequence
  Description of Artificial Sequence: Synthetic oligonucleotide
  Target: LAMA2; (-) strand; PAM type: NRG; PAM sequence: GAG
agtagtggggagagatgaga

SEQ ID NO: 103446 - DNA, 20 bp, Artificial Sequence
  Description of Artificial Sequence: Synthetic oligonucleotide
  Target: LAMA2; (-) strand; PAM type: NRG; PAM sequence: GAG
tgagtagtggggagagatga

SEQ ID NO: 103447 - DNA, 20 bp, Artificial Sequence
  Description of Artificial Sequence: Synthetic oligonucleotide
  Target: LAMA2; (-) strand; PAM type: NRG; PAM sequence: GAG
catgagtagtggggagagat

SEQ ID NO: 103448 - DNA, 20 bp, Artificial Sequence
  Description of Artificial Sequence: Synthetic oligonucleotide
  Target: LAMA2; (-) strand; PAM type: NRG; PAM sequence: GAG
cagaccatgagtagtgggga

SEQ ID NO: 103449 - DNA, 20 bp, Artificial Sequence
  Description of Artificial Sequence: Synthetic oligonucleotide
  Target: LAMA2; (-) strand; PAM type: NRG; PAM sequence: GAG
accagaccatgagtagtggg

SEQ ID NO: 103450 - DNA, 20 bp, Artificial Sequence
  Description of Artificial Sequence: Synthetic oligonucleotide
  Target: LAMA2; (-) strand; PAM type: NRG; PAM sequence: GGG
tgaccagaccatgagtagtg

SEQ ID NO: 103451 - DNA, 20 bp, Artificial Sequence
  Description of Artificial Sequence: Synthetic oligonucleotide
  Target: LAMA2; (-) strand; PAM type: NRG; PAM sequence: GGG
atgaccagaccatgagtagt

SEQ ID NO: 103452 - DNA, 20 bp, Artificial Sequence
  Description of Artificial Sequence: Synthetic oligonucleotide
  Target: LAMA2; (-) strand; PAM type: NRG; PAM sequence: TGG
gatgaccagaccatgagtag

SEQ ID NO: 103453 - DNA, 20 bp, Artificial Sequence
  Description of Artificial Sequence: Synthetic oligonucleotide
  Target: LAMA2; (-) strand; PAM type: NRG; PAM sequence: TAG
ccagatgaccagaccatgag

SEQ ID NO: 103454 - DNA, 20 bp, Artificial Sequence
  Description of Artificial Sequence: Synthetic oligonucleotide
  Target: LAMA2; (-) strand; PAM type: NRG; PAM sequence: GAG
ggtccagatgaccagaccat

SEQ ID NO: 103455 - DNA, 20 bp, Artificial Sequence
  Description of Artificial Sequence: Synthetic oligonucleotide
  Target: LAMA2; (-) strand; PAM type: NRG; PAM sequence: CAG
tccgtaggggtccagatgac

SEQ ID NO: 103456 - DNA, 20 bp, Artificial Sequence
  Description of Artificial Sequence: Synthetic oligonucleotide
  Target: LAMA2; (-) strand; PAM type: NRG; PAM sequence: CAG
accctcaatccgtaggggtc

SEQ ID NO: 103457 - DNA, 20 bp, Artificial Sequence
  Description of Artificial Sequence: Synthetic oligonucleotide
  Target: LAMA2; (-) strand; PAM type: NRG; PAM sequence: GGG
cttataccctcaatccgtag

SEQ ID NO: 103458 - DNA, 20 bp, Artificial Sequence
  Description of Artificial Sequence: Synthetic oligonucleotide
  Target: LAMA2; (-) strand; PAM type: NRG; PAM sequence: GGG
gcttataccctcaatccgta

SEQ ID NO: 103459 - DNA, 20 bp, Artificial Sequence
  Description of Artificial Sequence: Synthetic oligonucleotide
  Target: LAMA2; (-) strand; PAM type: NRG; PAM sequence: AGG
ggcttataccctcaatccgt

SEQ ID NO: 103460 - DNA, 20 bp, Artificial Sequence
  Description of Artificial Sequence: Synthetic oligonucleotide
  Target: LAMA2; (-) strand; PAM type: NRG; PAM sequence: TAG
tggcttataccctcaatccg

SEQ ID NO: 103461 - DNA, 20 bp, Artificial Sequence
  Description of Artificial Sequence: Synthetic oligonucleotide
  Target: LAMA2; (-) strand; PAM type: NRG; PAM sequence: TGG
aaagaaaatttgtaggtttc

SEQ ID NO: 103462 - DNA, 20 bp, Artificial Sequence
  Description of Artificial Sequence: Synthetic oligonucleotide
  Target: LAMA2; (-) strand; PAM type: NRG; PAM sequence: AGG
aggcaccaaagaaaatttgt

SEQ ID NO: 103463 - DNA, 20 bp, Artificial Sequence
  Description of Artificial Sequence: Synthetic oligonucleotide
  Target: LAMA2; (-) strand; PAM type: NRG; PAM sequence: TAG
gaggcaccaaagaaaatttg

SEQ ID NO: 103464 - DNA, 20 bp, Artificial Sequence
  Description of Artificial Sequence: Synthetic oligonucleotide
  Target: LAMA2; (-) strand; PAM type: NRG; PAM sequence: AAG
tgaggaagaaagaggcacca

SEQ ID NO: 103465 - DNA, 20 bp, Artificial Sequence
  Description of Artificial Sequence: Synthetic oligonucleotide
  Target: LAMA2; (-) strand; PAM type: NRG; PAM sequence: AGG
gagcatcatgaggaagaaag

SEQ ID NO: 103466 - DNA, 20 bp, Artificial Sequence
  Description of Artificial Sequence: Synthetic oligonucleotide
  Target: LAMA2; (-) strand; PAM type: NRG; PAM sequence: GAG
ggagcatcatgaggaagaaa

SEQ ID NO: 103467 - DNA, 20 bp, Artificial Sequence
  Description of Artificial Sequence: Synthetic oligonucleotide
  Target: LAMA2; (-) strand; PAM type: NRG; PAM sequence: AAG
caggagcatcatgaggaaga

SEQ ID NO: 103468 - DNA, 20 bp, Artificial Sequence
  Description of Artificial Sequence: Synthetic oligonucleotide
  Target: LAMA2; (-) strand; PAM type: NRG; PAM sequence: AAG
taagcaggagcatcatgagg

SEQ ID NO: 103469 - DNA, 20 bp, Artificial Sequence
  Description of Artificial Sequence: Synthetic oligonucleotide
  Target: LAMA2; (-) strand; PAM type: NRG; PAM sequence: AGG
ggataagcaggagcatcatg

SEQ ID NO: 103470 - DNA, 20 bp, Artificial Sequence
  Description of Artificial Sequence: Synthetic oligonucleotide
  Target: LAMA2; (-) strand; PAM type: NRG; PAM sequence: GAG
tggataagcaggagcatcat

SEQ ID NO: 103471 - DNA, 20 bp, Artificial Sequence
  Description of Artificial Sequence: Synthetic oligonucleotide
  Target: LAMA2; (-) strand; PAM type: NRG; PAM sequence: GAG
gtaatgaattggataagcag

SEQ ID NO: 103472 - DNA, 20 bp, Artificial Sequence
  Description of Artificial Sequence: Synthetic oligonucleotide
  Target: LAMA2; (-) strand; PAM type: NRG; PAM sequence: AGG
tggtaatgaattggataagc

SEQ ID NO: 103473 - DNA, 20 bp, Artificial Sequence
  Description of Artificial Sequence: Synthetic oligonucleotide
  Target: LAMA2; (-) strand; PAM type: NRG; PAM sequence: CAG
gtggtaatgaattggataag

SEQ ID NO: 103474 - DNA, 20 bp, Artificial Sequence
  Description of Artificial Sequence: Synthetic oligonucleotide
  Target: LAMA2; (-) strand; PAM type: NRG; PAM sequence: AAG
tgtgtggtaatgaattggat

SEQ ID NO: 103475 - DNA, 20 bp, Artificial Sequence
  Description of Artificial Sequence: Synthetic oligonucleotide
  Target: LAMA2; (-) strand; PAM type: NRG; PAM sequence: TGG
cccagtgtgtggtaatgaat

SEQ ID NO: 103476 - DNA, 20 bp, Artificial Sequence
  Description of Artificial Sequence: Synthetic oligonucleotide
  Target: LAMA2; (-) strand; PAM type: NRG; PAM sequence: TGG
acaagtggaagcccagtgtg

SEQ ID NO: 103477 - DNA, 20 bp, Artificial Sequence
  Description of Artificial Sequence: Synthetic oligonucleotide
  Target: LAMA2; (-) strand; PAM type: NRG; PAM sequence: CAG
catacacacaagtggaagcc

SEQ ID NO: 103478 - DNA, 20 bp, Artificial Sequence
  Description of Artificial Sequence: Synthetic oligonucleotide
  Target: LAMA2; (-) strand; PAM type: NRG; PAM sequence: AAG
aatgccatacacacaagtgg

SEQ ID NO: 103479 - DNA, 20 bp, Artificial Sequence
  Description of Artificial Sequence: Synthetic oligonucleotide
  Target: LAMA2; (-) strand; PAM type: NRG; PAM sequence: TGG
atgaatgccatacacacaag

SEQ ID NO: 103480 - DNA, 20 bp, Artificial Sequence
  Description of Artificial Sequence: Synthetic oligonucleotide
  Target: LAMA2; (-) strand; PAM type: NRG; PAM sequence: AAG
gagatgaatgccatacacac

SEQ ID NO: 103481 - DNA, 20 bp, Artificial Sequence
  Description of Artificial Sequence: Synthetic oligonucleotide
  Target: LAMA2; (-) strand; PAM type: NRG; PAM sequence: GAG
tggatgagagtggggtagta

SEQ ID NO: 103482 - DNA, 20 bp, Artificial Sequence
  Description of Artificial Sequence: Synthetic oligonucleotide
  Target: LAMA2; (-) strand; PAM type: NRG; PAM sequence: TAG
attggatgagagtggggtag

SEQ ID NO: 103483 - DNA, 20 bp, Artificial Sequence
  Description of Artificial Sequence: Synthetic oligonucleotide
  Target: LAMA2; (-) strand; PAM type: NRG; PAM sequence: TAG
gagattggatgagagtgggg

SEQ ID NO: 103484 - DNA, 20 bp, Artificial Sequence
  Description of Artificial Sequence: Synthetic oligonucleotide
  Target: LAMA2; (-) strand; PAM type: NRG; PAM sequence: GGG
tatgagattggatgagagtg

SEQ ID NO: 103485 - DNA, 20 bp, Artificial Sequence
  Description of Artificial Sequence: Synthetic oligonucleotide
  Target: LAMA2; (-) strand; PAM type: NRG; PAM sequence: GGG
atatgagattggatgagagt

SEQ ID NO: 103486 - DNA, 20 bp, Artificial Sequence
  Description of Artificial Sequence: Synthetic oligonucleotide
  Target: LAMA2; (-) strand; PAM type: NRG; PAM sequence: TGG
aatatgagattggatgagag

SEQ ID NO: 103487 - DNA, 20 bp, Artificial Sequence
  Description of Artificial Sequence: Synthetic oligonucleotide
  Target: LAMA2; (-) strand; PAM type: NRG; PAM sequence: GAG
cacaatatgagattggatga

SEQ ID NO: 103488 - DNA, 20 bp, Artificial Sequence
  Description of Artificial Sequence: Synthetic oligonucleotide
  Target: LAMA2; (-) strand; PAM type: NRG; PAM sequence: GAG
tacacaatatgagattggat

SEQ ID NO: 103489 - DNA, 20 bp, Artificial Sequence
  Description of Artificial Sequence: Synthetic oligonucleotide
  Target: LAMA2; (-) strand; PAM type: NRG; PAM sequence: TGG
caaactacacaatatgagat

SEQ ID NO: 103490 - DNA, 20 bp, Artificial Sequence
  Description of Artificial Sequence: Synthetic oligonucleotide
  Target: LAMA2; (-) strand; PAM type: NRG; PAM sequence: GAG
aatcccaaactacacaatat

SEQ ID NO: 103491 - DNA, 20 bp, Artificial Sequence
  Description of Artificial Sequence: Synthetic oligonucleotide
  Target: LAMA2; (-) strand; PAM type: NRG; PAM sequence: TGG
gaccagctaaaaaacaaatg

SEQ ID NO: 103492 - DNA, 20 bp, Artificial Sequence
  Description of Artificial Sequence: Synthetic oligonucleotide
  Target: LAMA2; (-) strand; PAM type: NRG; PAM sequence: CAG
aagagtaaaagcagagagac

SEQ ID NO: 103493 - DNA, 20 bp, Artificial Sequence
  Description of Artificial Sequence: Synthetic oligonucleotide
  Target: LAMA2; (-) strand; PAM type: NRG; PAM sequence: GAG
agaacaagagtaaaagcaga

SEQ ID NO: 103494 - DNA, 20 bp, Artificial Sequence
  Description of Artificial Sequence: Synthetic oligonucleotide
  Target: LAMA2; (-) strand; PAM type: NRG; PAM sequence: GAG
ggagaacaagagtaaaagca

SEQ ID NO: 103495 - DNA, 20 bp, Artificial Sequence
  Description of Artificial Sequence: Synthetic oligonucleotide
  Target: LAMA2; (-) strand; PAM type: NRG; PAM sequence: CAG
gaggagaacaagagtaaaag

SEQ ID NO: 103496 - DNA, 20 bp, Artificial Sequence
  Description of Artificial Sequence: Synthetic oligonucleotide
  Target: LAMA2; (-) strand; PAM type: NRG; PAM sequence: AAG
ttggaggagaacaagagtaa

SEQ ID NO: 103497 - DNA, 20 bp, Artificial Sequence
  Description of Artificial Sequence: Synthetic oligonucleotide
  Target: LAMA2; (-) strand; PAM type: NRG; PAM sequence: GAG
acagatttggaggagaacaa

SEQ ID NO: 103498 - DNA, 20 bp, Artificial Sequence
  Description of Artificial Sequence: Synthetic oligonucleotide
  Target: LAMA2; (-) strand; PAM type: NRG; PAM sequence: AAG
gaacagatttggaggagaac

SEQ ID NO: 103499 - DNA, 20 bp, Artificial Sequence
  Description of Artificial Sequence: Synthetic oligonucleotide
  Target: LAMA2; (-) strand; PAM type: NRG; PAM sequence: GAG
tacggagaacagatttggag

SEQ ID NO: 103500 - DNA, 20 bp, Artificial Sequence
  Description of Artificial Sequence: Synthetic oligonucleotide
  Target: LAMA2; (-) strand; PAM type: NRG; PAM sequence: AGG
gttacggagaacagatttgg

SEQ ID NO: 103501 - DNA, 20 bp, Artificial Sequence
  Description of Artificial Sequence: Synthetic oligonucleotide
  Target: LAMA2; (-) strand; PAM type: NRG; PAM sequence: GAG
cgttacggagaacagatttg

SEQ ID NO: 103502 - DNA, 20 bp, Artificial Sequence
  Description of Artificial Sequence: Synthetic oligonucleotide
  Target: LAMA2; (-) strand; PAM type: NRG; PAM sequence: TGG
tacgttacggagaacagatt

SEQ ID NO: 103503 - DNA, 20 bp, Artificial Sequence
  Description of Artificial Sequence: Synthetic oligonucleotide
  Target: LAMA2; (-) strand; PAM type: NRG; PAM sequence: CAG
tctggctacgttacggagaa

SEQ ID NO: 103504 - DNA, 20 bp, Artificial Sequence
  Description of Artificial Sequence: Synthetic oligonucleotide
  Target: LAMA2; (-) strand; PAM type: NRG; PAM sequence: GAG
ttcattctggctacgttacg

SEQ ID NO: 103505 - DNA, 20 bp, Artificial Sequence
  Description of Artificial Sequence: Synthetic oligonucleotide
  Target: LAMA2; (-) strand; PAM type: NRG; PAM sequence: CGG
cattcattctggctacgtta

SEQ ID NO: 103506 - DNA, 20 bp, Artificial Sequence
  Description of Artificial Sequence: Synthetic oligonucleotide
  Target: LAMA2; (-) strand; PAM type: NRG; PAM sequence: TGG
ggaatagcaaacattcattc

SEQ ID NO: 103507 - DNA, 20 bp, Artificial Sequence
  Description of Artificial Sequence: Synthetic oligonucleotide
  Target: LAMA2; (-) strand; PAM type: NRG; PAM sequence: TAG
tgacgtattcacatttggaa

SEQ ID NO: 103508 - DNA, 20 bp, Artificial Sequence
  Description of Artificial Sequence: Synthetic oligonucleotide
  Target: LAMA2; (-) strand; PAM type: NRG; PAM sequence: TGG
tgcgatgacgtattcacatt

SEQ ID NO: 103509 - DNA, 20 bp, Artificial Sequence
  Description of Artificial Sequence: Synthetic oligonucleotide
  Target: LAMA2; (-) strand; PAM type: NRG; PAM sequence: AAG
aagtcaggggaagagtttgt

SEQ ID NO: 103510 - DNA, 20 bp, Artificial Sequence
  Description of Artificial Sequence: Synthetic oligonucleotide
  Target: LAMA2; (-) strand; PAM type: NRG; PAM sequence: GAG
cctaagggaagtcaggggaa

SEQ ID NO: 103511 - DNA, 20 bp, Artificial Sequence
  Description of Artificial Sequence: Synthetic oligonucleotide
  Target: LAMA2; (-) strand; PAM type: NRG; PAM sequence: AAG
agcctaagggaagtcagggg

SEQ ID NO: 103512 - DNA, 20 bp, Artificial Sequence
  Description of Artificial Sequence: Synthetic oligonucleotide
  Target: LAMA2; (-) strand; PAM type: NRG; PAM sequence: GGG
acgagcctaagggaagtcag

SEQ ID NO: 103513 - DNA, 20 bp, Artificial Sequence
  Description of Artificial Sequence: Synthetic oligonucleotide
  Target: LAMA2; (-) strand; PAM type: NRG; PAM sequence: GGG
tacgagcctaagggaagtca

SEQ ID NO: 103514 - DNA, 20 bp, Artificial Sequence
  Description of Artificial Sequence: Synthetic oligonucleotide
  Target: LAMA2; (-) strand; PAM type: NRG; PAM sequence: AGG
ctacgagcctaagggaagtc

SEQ ID NO: 103515 - DNA, 20 bp, Artificial Sequence
  Description of Artificial Sequence: Synthetic oligonucleotide
  Target: LAMA2; (-) strand; PAM type: NRG; PAM sequence: CAG
cctacgagcctaagggaagt

SEQ ID NO: 103516 - DNA, 20 bp, Artificial Sequence
  Description of Artificial Sequence: Synthetic oligonucleotide
  Target: LAMA2; (-) strand; PAM type: NRG; PAM sequence: AAG
ttatcctacgagcctaaggg

SEQ ID NO: 103517 - DNA, 20 bp, Artificial Sequence
  Description of Artificial Sequence: Synthetic oligonucleotide
  Target: LAMA2; (-) strand; PAM type: NRG; PAM sequence: GGG
tctttatcctacgagcctaa

SEQ ID NO: 103518 - DNA, 20 bp, Artificial Sequence
  Description of Artificial Sequence: Synthetic oligonucleotide
  Target: LAMA2; (-) strand; PAM type: NRG; PAM sequence: AGG
gtctttatcctacgagccta

SEQ ID NO: 103519 - DNA, 20 bp, Artificial Sequence
  Description of Artificial Sequence: Synthetic oligonucleotide
  Target: LAMA2; (-) strand; PAM type: NRG; PAM sequence: AAG
ggtctttatcctacgagcct

SEQ ID NO: 103520 - DNA, 20 bp, Artificial Sequence
  Description of Artificial Sequence: Synthetic oligonucleotide
  Target: LAMA2; (-) strand; PAM type: NRG; PAM sequence: GAG
aattttggtctttatcctac

SEQ ID NO: 103521 - DNA, 20 bp, Artificial Sequence
  Description of Artificial Sequence: Synthetic oligonucleotide
  Target: LAMA2; (-) strand; PAM type: NRG; PAM sequence: TGG
tgtggccaaggggagaattt

SEQ ID NO: 103522 - DNA, 20 bp, Artificial Sequence
  Description of Artificial Sequence: Synthetic oligonucleotide
  Target: LAMA2; (-) strand; PAM type: NRG; PAM sequence: GAG
atgggagatgtggccaaggg

SEQ ID NO: 103523 - DNA, 20 bp, Artificial Sequence
  Description of Artificial Sequence: Synthetic oligonucleotide
  Target: LAMA2; (-) strand; PAM type: NRG; PAM sequence: GGG
tgatgggagatgtggccaag

SEQ ID NO: 103524 - DNA, 20 bp, Artificial Sequence
  Description of Artificial Sequence: Synthetic oligonucleotide
  Target: LAMA2; (-) strand; PAM type: NRG; PAM sequence: GGG
gtgatgggagatgtggccaa

SEQ ID NO: 103525 - DNA, 20 bp, Artificial Sequence
  Description of Artificial Sequence: Synthetic oligonucleotide
  Target: LAMA2; (-) strand; PAM type: NRG; PAM sequence: AGG
agtgatgggagatgtggcca

SEQ ID NO: 103526 - DNA, 20 bp, Artificial Sequence
  Description of Artificial Sequence: Synthetic oligonucleotide
  Target: LAMA2; (-) strand; PAM type: NRG; PAM sequence: AAG
aagtgatgggagatgtggcc

SEQ ID NO: 103527 - DNA, 20 bp, Artificial Sequence
  Description of Artificial Sequence: Synthetic oligonucleotide
  Target: LAMA2; (-) strand; PAM type: NRG; PAM sequence: TGG
ggcacaagtgatgggagatg

SEQ ID NO: 103528 - DNA, 20 bp, Artificial Sequence
  Description of Artificial Sequence: Synthetic oligonucleotide
  Target: LAMA2; (-) strand; PAM type: NRG; PAM sequence: GAG
gccaggggcacaagtgatgg

SEQ ID NO: 103529 - DNA, 20 bp, Artificial Sequence
  Description of Artificial Sequence: Synthetic oligonucleotide
  Target: LAMA2; (-) strand; PAM type: NRG; PAM sequence: GGG
tggccaggggcacaagtgat

SEQ ID NO: 103530 - DNA, 20 bp, Artificial Sequence
  Description of Artificial Sequence: Synthetic oligonucleotide
  Target: LAMA2; (-) strand; PAM type: NRG; PAM sequence: TGG
atggccaggggcacaagtga

SEQ ID NO: 103531 - DNA, 20 bp, Artificial Sequence
  Description of Artificial Sequence: Synthetic oligonucleotide
  Target: LAMA2; (-) strand; PAM type: NRG; PAM sequence: AAG
gtgcagatggccaggggcac

SEQ ID NO: 103532 - DNA, 20 bp, Artificial Sequence
  Description of Artificial Sequence: Synthetic oligonucleotide
  Target: LAMA2; (-) strand; PAM type: NRG; PAM sequence: GGG
gctggagtgcagatggccag

SEQ ID NO: 103533 - DNA, 20 bp, Artificial Sequence
  Description of Artificial Sequence: Synthetic oligonucleotide
  Target: LAMA2; (-) strand; PAM type: NRG; PAM sequence: GGG
ggctggagtgcagatggcca

SEQ ID NO: 103534 - DNA, 20 bp, Artificial Sequence
  Description of Artificial Sequence: Synthetic oligonucleotide
  Target: LAMA2; (-) strand; PAM type: NRG; PAM sequence: AGG
tggctggagtgcagatggcc

SEQ ID NO: 103535 - DNA, 20 bp, Artificial Sequence
  Description of Artificial Sequence: Synthetic oligonucleotide
  Target: LAMA2; (-) strand; PAM type: NRG; PAM sequence: CAG
atggctggagtgcagatggc

SEQ ID NO: 103536 - DNA, 20 bp, Artificial Sequence
  Description of Artificial Sequence: Synthetic oligonucleotide
  Target: LAMA2; (-) strand; PAM type: NRG; PAM sequence: TGG
cagtatggctggagtgcaga

SEQ ID NO: 103537 - DNA, 20 bp, Artificial Sequence
  Description of Artificial Sequence: Synthetic oligonucleotide
  Target: LAMA2; (-) strand; PAM type: NRG; PAM sequence: CAG
gggacagtatggctggagtg

SEQ ID NO: 103538 - DNA, 20 bp, Artificial Sequence
  Description of Artificial Sequence: Synthetic oligonucleotide
  Target: LAMA2; (-) strand; PAM type: NRG; PAM sequence: GAG
gctgggggacagtatggctg

SEQ ID NO: 103539 - DNA, 20 bp, Artificial Sequence
  Description of Artificial Sequence: Synthetic oligonucleotide
  Target: LAMA2; (-) strand; PAM type: NRG; PAM sequence: TGG
tggctgggggacagtatggc

SEQ ID NO: 103540 - DNA, 20 bp, Artificial Sequence
  Description of Artificial Sequence: Synthetic oligonucleotide
  Target: LAMA2; (-) strand; PAM type: NRG; PAM sequence: TGG
aaagtggctgggggacagta

SEQ ID NO: 103541 - DNA, 20 bp, Artificial Sequence
  Description of Artificial Sequence: Synthetic oligonucleotide
  Target: LAMA2; (-) strand; PAM type: NRG; PAM sequence: CAG
gggacaaagtggctggggga

SEQ ID NO: 103542 - DNA, 20 bp, Artificial Sequence
  Description of Artificial Sequence: Synthetic oligonucleotide
  Target: LAMA2; (-) strand; PAM type: NRG; PAM sequence: GGG
tggtgggacaaagtggctgg

SEQ ID NO: 103543 - DNA, 20 bp, Artificial Sequence
  Description of Artificial Sequence: Synthetic oligonucleotide
  Target: LAMA2; (-) strand; PAM type: NRG; PAM sequence: GGG
gtggtgggacaaagtggctg

SEQ ID NO: 103544 - DNA, 20 bp, Artificial Sequence
  Description of Artificial Sequence: Synthetic oligonucleotide
  Target: LAMA2; (-) strand; PAM type: NRG; PAM sequence: GGG
tgtggtgggacaaagtggct

SEQ ID NO: 103545 - DNA, 20 bp, Artificial Sequence
  Description of Artificial Sequence: Synthetic oligonucleotide
  Target: LAMA2; (-) strand; PAM type: NRG; PAM sequence: TGG
ttgtggtgggacaaagtggc

SEQ ID NO: 103546 - DNA, 20 bp, Artificial Sequence
  Description of Artificial Sequence: Synthetic oligonucleotide
  Target: LAMA2; (-) strand; PAM type: NRG; PAM sequence: TGG
tgctttgtggtgggacaaag

SEQ ID NO: 103547 - DNA, 20 bp, Artificial Sequence
  Description of Artificial Sequence: Synthetic oligonucleotide
  Target: LAMA2; (-) strand; PAM type: NRG; PAM sequence: AAG
caatgctttgtggtgggaca

SEQ ID NO: 103548 - DNA, 20 bp, Artificial Sequence
  Description of Artificial Sequence: Synthetic oligonucleotide
  Target: LAMA2; (-) strand; PAM type: NRG; PAM sequence: GGG
gtgtggcaatgctttgtggt

SEQ ID NO: 103549 - DNA, 20 bp, Artificial Sequence
  Description of Artificial Sequence: Synthetic oligonucleotide
  Target: LAMA2; (-) strand; PAM type: NRG; PAM sequence: TGG
tgtgtggcaatgctttgtgg

SEQ ID NO: 103550 - DNA, 20 bp, Artificial Sequence
  Description of Artificial Sequence: Synthetic oligonucleotide
  Target: LAMA2; (-) strand; PAM type: NRG; PAM sequence: TGG
aaatgtgtggcaatgctttg

SEQ ID NO: 103551 - DNA, 20 bp, Artificial Sequence
  Description of Artificial Sequence: Synthetic oligonucleotide
  Target: LAMA2; (-) strand; PAM type: NRG; PAM sequence: TGG
aggcaaaataaagaaatgtg

SEQ ID NO: 103552 - DNA, 20 bp, Artificial Sequence
  Description of Artificial Sequence: Synthetic oligonucleotide
  Target: LAMA2; (-) strand; PAM type: NRG; PAM sequence: AAG
attacctttaaggcaaaata

SEQ ID NO: 103553 - DNA, 20 bp, Artificial Sequence
  Description of Artificial Sequence: Synthetic oligonucleotide
  Target: LAMA2; (-) strand; PAM type: NRG; PAM sequence: AGG
ggagaggtagattaccttta

SEQ ID NO: 103554 - DNA, 20 bp, Artificial Sequence
  Description of Artificial Sequence: Synthetic oligonucleotide
  Target: LAMA2; (-) strand; PAM type: NRG; PAM sequence: AAG
gggagaggtagattaccttt

SEQ ID NO: 103555 - DNA, 20 bp, Artificial Sequence
  Description of Artificial Sequence: Synthetic oligonucleotide
  Target: LAMA2; (-) strand; PAM type: NRG; PAM sequence: TAG
taacaaaatgtagggagagg

SEQ ID NO: 103556 - DNA, 20 bp, Artificial Sequence
  Description of Artificial Sequence: Synthetic oligonucleotide
  Target: LAMA2; (-) strand; PAM type: NRG; PAM sequence: AGG
aattaacaaaatgtagggag

SEQ ID NO: 103557 - DNA, 20 bp, Artificial Sequence
  Description of Artificial Sequence: Synthetic oligonucleotide
  Target: LAMA2; (-) strand; PAM type: NRG; PAM sequence: GAG
aaattaacaaaatgtaggga

SEQ ID NO: 103558 - DNA, 20 bp, Artificial Sequence
  Description of Artificial Sequence: Synthetic oligonucleotide
  Target: LAMA2; (-) strand; PAM type: NRG; PAM sequence: GAG
agaaattaacaaaatgtagg

SEQ ID NO: 103559 - DNA, 20 bp, Artificial Sequence
  Description of Artificial Sequence: Synthetic oligonucleotide
  Target: LAMA2; (-) strand; PAM type: NRG; PAM sequence: GGG
acagaaattaacaaaatgta

SEQ ID NO: 103560 - DNA, 20 bp, Artificial Sequence
  Description of Artificial Sequence: Synthetic oligonucleotide
  Target: LAMA2; (-) strand; PAM type: NRG; PAM sequence: AGG
aacagaaattaacaaaatgt

SEQ ID NO: 103561 - DNA, 20 bp, Artificial Sequence
  Description of Artificial Sequence: Synthetic oligonucleotide
  Target: LAMA2; (-) strand; PAM type: NRG; PAM sequence: TAG
taacagaaattaacaaaatg

SEQ ID NO: 103562 - DNA, 20 bp, Artificial Sequence
  Description of Artificial Sequence: Synthetic oligonucleotide
  Target: LAMA2; (-) strand; PAM type: NRG; PAM sequence: CAG
gaaaggtaaattggagttaa

SEQ ID NO: 103563 - DNA, 20 bp, Artificial Sequence
  Description of Artificial Sequence: Synthetic oligonucleotide
  Target: LAMA2; (-) strand; PAM type: NRG; PAM sequence: GAG
gagatttgaaaggtaaattg

SEQ ID NO: 103564 - DNA, 20 bp, Artificial Sequence
  Description of Artificial Sequence: Synthetic oligonucleotide
  Target: LAMA2; (-) strand; PAM type: NRG; PAM sequence: TGG
ctgagatttgaaaggtaaat

SEQ ID NO: 103565 - DNA, 20 bp, Artificial Sequence
  Description of Artificial Sequence: Synthetic oligonucleotide
  Target: LAMA2; (-) strand; PAM type: NRG; PAM sequence: AGG
ttcacgagctgagatttgaa

SEQ ID NO: 103566 - DNA, 20 bp, Artificial Sequence
  Description of Artificial Sequence: Synthetic oligonucleotide
  Target: LAMA2; (-) strand; PAM type: NRG; PAM sequence: AAG
tttcacgagctgagatttga

SEQ ID NO: 103567 - DNA, 20 bp, Artificial Sequence
  Description of Artificial Sequence: Synthetic oligonucleotide
  Target: LAMA2; (-) strand; PAM type: NRG; PAM sequence: GAG
acagagggctttcacgagct

SEQ ID NO: 103568 - DNA, 20 bp, Artificial Sequence
  Description of Artificial Sequence: Synthetic oligonucleotide
  Target: LAMA2; (-) strand; PAM type: NRG; PAM sequence: GAG
atggcacagagggctttcac

SEQ ID NO: 103569 - DNA, 20 bp, Artificial Sequence
  Description of Artificial Sequence: Synthetic oligonucleotide
  Target: LAMA2; (-) strand; PAM type: NRG; PAM sequence: GGG
aacccctgcgatggcacaga

SEQ ID NO: 103570 - DNA, 20 bp, Artificial Sequence
  Description of Artificial Sequence: Synthetic oligonucleotide
  Target: LAMA2; (-) strand; PAM type: NRG; PAM sequence: AGG
gaacccctgcgatggcacag

SEQ ID NO: 103571 - DNA, 20 bp, Artificial Sequence
  Description of Artificial Sequence: Synthetic oligonucleotide
  Target: LAMA2; (-) strand; PAM type: NRG; PAM sequence: GAG
ggaacccctgcgatggcaca

SEQ ID NO: 103572 - DNA, 20 bp, Artificial Sequence
  Description of Artificial Sequence: Synthetic oligonucleotide
  Target: LAMA2; (-) strand; PAM type: NRG; PAM sequence: CAG
ttggaacccctgcgatggca

SEQ ID NO: 103573 - DNA, 20 bp, Artificial Sequence
  Description of Artificial Sequence: Synthetic oligonucleotide
  Target: LAMA2; (-) strand; PAM type: NRG; PAM sequence: TGG
gaatcttggaacccctgcga

SEQ ID NO: 103574 - DNA, 20 bp, Artificial Sequence
  Description of Artificial Sequence: Synthetic oligonucleotide
  Target: LAMA2; (-) strand; PAM type: NRG; PAM sequence: TGG
gataagcacaggaggaatct

SEQ ID NO: 103575 - DNA, 20 bp, Artificial Sequence
  Description of Artificial Sequence: Synthetic oligonucleotide
  Target: LAMA2; (-) strand; PAM type: NRG; PAM sequence: AGG
tggtataagataagcacagg

SEQ ID NO: 103576 - DNA, 20 bp, Artificial Sequence
  Description of Artificial Sequence: Synthetic oligonucleotide
  Target: LAMA2; (-) strand; PAM type: NRG; PAM sequence: GAG
gtggtataagataagcacag

SEQ ID NO: 103577 - DNA, 20 bp, Artificial Sequence
  Description of Artificial Sequence: Synthetic oligonucleotide
  Target: LAMA2; (-) strand; PAM type: NRG; PAM sequence: AGG
tagtggtataagataagcac

SEQ ID NO: 103578 - DNA, 20 bp, Artificial Sequence
  Description of Artificial Sequence: Synthetic oligonucleotide
  Target: LAMA2; (-) strand; PAM type: NRG; PAM sequence: CAG
atagtggtataagataagca

SEQ ID NO: 103579 - DNA, 20 bp, Artificial Sequence
  Description of Artificial Sequence: Synthetic oligonucleotide
  Target: LAMA2; (-) strand; PAM type: NRG; PAM sequence: AAG
gaaaaatagtggtataagat

SEQ ID NO: 103580 - DNA, 20 bp, Artificial Sequence
  Description of Artificial Sequence: Synthetic oligonucleotide
  Target: LAMA2; (-) strand; PAM type: NRG; PAM sequence: AAG
tagaggaaaaatagtggtat

SEQ ID NO: 103581 - DNA, 20 bp, Artificial Sequence
  Description of Artificial Sequence: Synthetic oligonucleotide
  Target: LAMA2; (-) strand; PAM type: NRG; PAM sequence: TGG
acaaactagaggaaaaatag

SEQ ID NO: 103582 - DNA, 20 bp, Artificial Sequence
  Description of Artificial Sequence: Synthetic oligonucleotide
  Target: LAMA2; (-) strand; PAM type: NRG; PAM sequence: TAG
actacaaactagaggaaaaa

SEQ ID NO: 103583 - DNA, 20 bp, Artificial Sequence
  Description of Artificial Sequence: Synthetic oligonucleotide
  Target: LAMA2; (-) strand; PAM type: NRG; PAM sequence: AGG
aatttataactacaaactag

SEQ ID NO: 103584 - DNA, 20 bp, Artificial Sequence
  Description of Artificial Sequence: Synthetic oligonucleotide
  Target: LAMA2; (-) strand; PAM type: NRG; PAM sequence: GAG
aaatttataactacaaacta

SEQ ID NO: 103585 - DNA, 20 bp, Artificial Sequence
  Description of Artificial Sequence: Synthetic oligonucleotide
  Target: LAMA2; (-) strand; PAM type: NRG; PAM sequence: TAG
ataaatttataactacaaac

SEQ ID NO: 103586 - DNA, 20 bp, Artificial Sequence
  Description of Artificial Sequence: Synthetic oligonucleotide
  Target: LAMA2; (-) strand; PAM type: NRG; PAM sequence: TAG
ttatttgtcaaatgatcatg

SEQ ID NO: 103587 - DNA, 20 bp, Artificial Sequence
  Description of Artificial Sequence: Synthetic oligonucleotide
  Target: LAMA2; (-) strand; PAM type: NRG; PAM sequence: TAG
ctatagtctggtggactata

SEQ ID NO: 103588 - DNA, 20 bp, Artificial Sequence
  Description of Artificial Sequence: Synthetic oligonucleotide
  Target: LAMA2; (-) strand; PAM type: NRG; PAM sequence: TGG
atttggagtctatagtctgg

SEQ ID NO: 103589 - DNA, 20 bp, Artificial Sequence
  Description of Artificial Sequence: Synthetic oligonucleotide
  Target: LAMA2; (-) strand; PAM type: NRG; PAM sequence: TGG
cccatttggagtctatagtc

SEQ ID NO: 103590 - DNA, 20 bp, Artificial Sequence
  Description of Artificial Sequence: Synthetic oligonucleotide
  Target: LAMA2; (-) strand; PAM type: NRG; PAM sequence: TAG
tcttgcccatttggagtcta

SEQ ID NO: 103591 - DNA, 20 bp, Artificial Sequence
  Description of Artificial Sequence: Synthetic oligonucleotide
  Target: LAMA2; (-) strand; PAM type: NRG; PAM sequence: GAG
aaaggtttcttgcccatttg

SEQ ID NO: 103592 - DNA, 20 bp, Artificial Sequence
  Description of Artificial Sequence: Synthetic oligonucleotide
  Target: LAMA2; (-) strand; PAM type: NRG; PAM sequence: TGG
aaaaaggtttcttgcccatt

SEQ ID NO: 103593 - DNA, 20 bp, Artificial Sequence
  Description of Artificial Sequence: Synthetic oligonucleotide
  Target: LAMA2; (-) strand; PAM type: NRG; PAM sequence: AGG
tactgtggtaagaaacaaaa

SEQ ID NO: 103594 - DNA, 20 bp, Artificial Sequence
  Description of Artificial Sequence: Synthetic oligonucleotide
  Target: LAMA2; (-) strand; PAM type: NRG; PAM sequence: AAG
atactgtggtaagaaacaaa

SEQ ID NO: 103595 - DNA, 20 bp, Artificial Sequence
  Description of Artificial Sequence: Synthetic oligonucleotide
  Target: LAMA2; (-) strand; PAM type: NRG; PAM sequence: AAG
aatattggtgatactgtggt

SEQ ID NO: 103596 - DNA, 20 bp, Artificial Sequence
  Description of Artificial Sequence: Synthetic oligonucleotide
  Target: LAMA2; (-) strand; PAM type: NRG; PAM sequence: TGG
gtacaatattggtgatactg

SEQ ID NO: 103597 - DNA, 20 bp, Artificial Sequence
  Description of Artificial Sequence: Synthetic oligonucleotide
  Target: LAMA2; (-) strand; PAM type: NRG; PAM sequence: TGG
acctattatgtgtacaatat

SEQ ID NO: 103598 - DNA, 20 bp, Artificial Sequence
  Description of Artificial Sequence: Synthetic oligonucleotide
  Target: LAMA2; (-) strand; PAM type: NRG; PAM sequence: GGG
gcaaaataaatgtttatttt

SEQ ID NO: 103599 - DNA, 20 bp, Artificial Sequence
  Description of Artificial Sequence: Synthetic oligonucleotide
  Target: LAMA2; (-) strand; PAM type: NRG; PAM sequence: TGG
tgcaaaataaatgtttattt

SEQ ID NO: 103600 - DNA, 20 bp, Artificial Sequence
  Description of Artificial Sequence: Synthetic oligonucleotide
  Target: LAMA2; (-) strand; PAM type: NRG; PAM sequence: GAG
tgattttaacacattttaaa

SEQ ID NO: 103601 - DNA, 20 bp, Artificial Sequence
  Description of Artificial Sequence: Synthetic oligonucleotide
  Target: LAMA2; (-) strand; PAM type: NRG; PAM sequence: AAG
cctgattttaacacatttta

SEQ ID NO: 103602 - DNA, 20 bp, Artificial Sequence
  Description of Artificial Sequence: Synthetic oligonucleotide
  Target: LAMA2; (-) strand; PAM type: NRG; PAM sequence: AGG
acagaatataaatagttaag

SEQ ID NO: 103603 - DNA, 20 bp, Artificial Sequence
  Description of Artificial Sequence: Synthetic oligonucleotide
  Target: LAMA2; (-) strand; PAM type: NRG; PAM sequence: GAG
tacagaatataaatagttaa

SEQ ID NO: 103604 - DNA, 20 bp, Artificial Sequence
  Description of Artificial Sequence: Synthetic oligonucleotide
  Target: LAMA2; (-) strand; PAM type: NRG; PAM sequence: AAG
cttacagaatataaatagtt

SEQ ID NO: 103605 - DNA, 20 bp, Artificial Sequence
  Description of Artificial Sequence: Synthetic oligonucleotide
  Target: LAMA2; (-) strand; PAM type: NRG; PAM sequence: TAG
ctccccttacagaatataaa

SEQ ID NO: 103606 - DNA, 20 bp, Artificial Sequence
  Description of Artificial Sequence: Synthetic oligonucleotide
  Target: LAMA2; (-) strand; PAM type: NRG; PAM sequence: CAG
tacatagcattctcccctta

SEQ ID NO: 103607 - DNA, 20 bp, Artificial Sequence
  Description of Artificial Sequence: Synthetic oligonucleotide
  Target: LAMA2; (-) strand; PAM type: NRG; PAM sequence: TAG
atacagttcaatctactaca

SEQ ID NO: 103608 - DNA, 20 bp, Artificial Sequence
  Description of Artificial Sequence: Synthetic oligonucleotide
  Target: LAMA2; (-) strand; PAM type: NRG; PAM sequence: CAG
caaaattttaatattttata

SEQ ID NO: 103609 - DNA, 20 bp, Artificial Sequence
  Description of Artificial Sequence: Synthetic oligonucleotide
  Target: LAMA2; (-) strand; PAM type: NRG; PAM sequence: AAG
taggcaataaaatacaatat

SEQ ID NO: 103610 - DNA, 20 bp, Artificial Sequence
  Description of Artificial Sequence: Synthetic oligonucleotide
  Target: LAMA2; (-) strand; PAM type: NRG; PAM sequence: AGG
cattaaatttgatattcaat

SEQ ID NO: 103611 - DNA, 20 bp, Artificial Sequence
  Description of Artificial Sequence: Synthetic oligonucleotide
  Target: LAMA2; (-) strand; PAM type: NRG; PAM sequence: TAG
tcattaaatttgatattcaa

SEQ ID NO: 103612 - DNA, 20 bp, Artificial Sequence
  Description of Artificial Sequence: Synthetic oligonucleotide
  Target: LAMA2; (-) strand; PAM type: NRG; PAM sequence: TGG
aaaaactagtttcatccttt

SEQ ID NO: 103613 - DNA, 20 bp, Artificial Sequence
  Description of Artificial Sequence: Synthetic oligonucleotide
  Target: LAMA2; (-) strand; PAM type: NRG; PAM sequence: TAG
cacttaaatcgtttaaaaac

SEQ ID NO: 103614 - DNA, 20 bp, Artificial Sequence
  Description of Artificial Sequence: Synthetic oligonucleotide
  Target: LAMA2; (-) strand; PAM type: NRG; PAM sequence: TGG
atcttgtaaacttataatat

SEQ ID NO: 103615 - DNA, 20 bp, Artificial Sequence
  Description of Artificial Sequence: Synthetic oligonucleotide
  Target: LAMA2; (-) strand; PAM type: NRG; PAM sequence: CAG
gaaataaaaaacactgttag

SEQ ID NO: 103616 - DNA, 20 bp, Artificial Sequence
  Description of Artificial Sequence: Synthetic oligonucleotide
  Target: LAMA2; (-) strand; PAM type: NRG; PAM sequence: TAG
ggagaaataaaaaacactgt

SEQ ID NO: 103617 - DNA, 20 bp, Artificial Sequence
  Description of Artificial Sequence: Synthetic oligonucleotide
  Target: LAMA2; (-) strand; PAM type: NRG; PAM sequence: GAG
atcttttaaaaatataaaag

SEQ ID NO: 103618 - DNA, 20 bp, Artificial Sequence
  Description of Artificial Sequence: Synthetic oligonucleotide
  Target: LAMA2; (-) strand; PAM type: NRG; PAM sequence: AGG
atatcttttaaaaatataaa

SEQ ID NO: 103619 - DNA, 20 bp, Artificial Sequence
  Description of Artificial Sequence: Synthetic oligonucleotide
  Target: LAMA2; (-) strand; PAM type: NRG; PAM sequence: AAG
tatatcttttaaaaatataa

SEQ ID NO: 103620 - DNA, 20 bp, Artificial Sequence
  Description of Artificial Sequence: Synthetic oligonucleotide
  Target: LAMA2; (-) strand; PAM type: NRG; PAM sequence: AAG
tttaaaagttccaaaccaaa

SEQ ID NO: 103621 - DNA, 20 bp, Artificial Sequence
  Description of Artificial Sequence: Synthetic oligonucleotide
  Target: LAMA2; (-) strand; PAM type: NRG; PAM sequence: AAG
atttcacgtgccaattttaa

SEQ ID NO: 103622 - DNA, 20 bp, Artificial Sequence
  Description of Artificial Sequence: Synthetic oligonucleotide
  Target: LAMA2; (-) strand; PAM type: NRG; PAM sequence: TGG
gacaatgagccagttccatg

SEQ ID NO: 103623 - DNA, 20 bp, Artificial Sequence
  Description of Artificial Sequence: Synthetic oligonucleotide
  Target: LAMA2; (-) strand; PAM type: NRG; PAM sequence: CAG
cccgtggaatgacaatgagc

SEQ ID NO: 103624 - DNA, 20 bp, Artificial Sequence
  Description of Artificial Sequence: Synthetic oligonucleotide
  Target: LAMA2; (-) strand; PAM type: NRG; PAM sequence: GAG
tgaccccgtggaatgacaat

SEQ ID NO: 103625 - DNA, 20 bp, Artificial Sequence
  Description of Artificial Sequence: Synthetic oligonucleotide
  Target: LAMA2; (-) strand; PAM type: NRG; PAM sequence: TGG
ggagcaaccagctgaccccg

SEQ ID NO: 103626 - DNA, 20 bp, Artificial Sequence
  Description of Artificial Sequence: Synthetic oligonucleotide
  Target: LAMA2; (-) strand; PAM type: NRG; PAM sequence: CAG
acaaggaaagaaggagcaac

SEQ ID NO: 103627 - DNA, 20 bp, Artificial Sequence
  Description of Artificial Sequence: Synthetic oligonucleotide
  Target: LAMA2; (-) strand; PAM type: NRG; PAM sequence: GAG
acaacacacaaggaaagaag

SEQ ID NO: 103628 - DNA, 20 bp, Artificial Sequence
  Description of Artificial Sequence: Synthetic oligonucleotide
  Target: LAMA2; (-) strand; PAM type: NRG; PAM sequence: AGG
caacaacacacaaggaaaga

SEQ ID NO: 103629 - DNA, 20 bp, Artificial Sequence
  Description of Artificial Sequence: Synthetic oligonucleotide
  Target: LAMA2; (-) strand; PAM type: NRG; PAM sequence: AAG
ccaacaacacacaaggaaag

SEQ ID NO: 103630 - DNA, 20 bp, Artificial Sequence
  Description of Artificial Sequence: Synthetic oligonucleotide
  Target: LAMA2; (-) strand; PAM type: NRG; PAM sequence: AAG
ggaccaacaacacacaagga

SEQ ID NO: 103631 - DNA, 20 bp, Artificial Sequence
  Description of Artificial Sequence: Synthetic oligonucleotide
  Target: LAMA2; (-) strand; PAM type: NRG; PAM sequence: AGG
ataaggaccaacaacacaca

SEQ ID NO: 103632 - DNA, 20 bp, Artificial Sequence
  Description of Artificial Sequence: Synthetic oligonucleotide
  Target: LAMA2; (-) strand; PAM type: NRG; PAM sequence: AAG
cataaggaccaacaacacac

SEQ ID NO: 103633 - DNA, 20 bp, Artificial Sequence
  Description of Artificial Sequence: Synthetic oligonucleotide
  Target: LAMA2; (-) strand; PAM type: NRG; PAM sequence: AGG
cactcatcaggcaagccata

SEQ ID NO: 103634 - DNA, 20 bp, Artificial Sequence
  Description of Artificial Sequence: Synthetic oligonucleotide
  Target: LAMA2; (-) strand; PAM type: NRG; PAM sequence: AAG
gcactcatcaggcaagccat

SEQ ID NO: 103635 - DNA, 20 bp, Artificial Sequence
  Description of Artificial Sequence: Synthetic oligonucleotide
  Target: LAMA2; (-) strand; PAM type: NRG; PAM sequence: AAG
tagtgaagcactcatcaggc

SEQ ID NO: 103636 - DNA, 20 bp, Artificial Sequence
  Description of Artificial Sequence: Synthetic oligonucleotide
  Target: LAMA2; (-) strand; PAM type: NRG; PAM sequence: AGG
gtggtagtgaagcactcatc

SEQ ID NO: 103637 - DNA, 20 bp, Artificial Sequence
  Description of Artificial Sequence: Synthetic oligonucleotide
  Target: LAMA2; (-) strand; PAM type: NRG; PAM sequence: CAG
agtggtagtgaagcactcat

SEQ ID NO: 103638 - DNA, 20 bp, Artificial Sequence
  Description of Artificial Sequence: Synthetic oligonucleotide
  Target: LAMA2; (-) strand; PAM type: NRG; PAM sequence: AAG
catatgtctaagtggtagtg

SEQ ID NO: 103639 - DNA, 20 bp, Artificial Sequence
  Description of Artificial Sequence: Synthetic oligonucleotide
  Target: LAMA2; (-) strand; PAM type: NRG; PAM sequence: TAG
agctccatatgtctaagtgg

SEQ ID NO: 103640 - DNA, 20 bp, Artificial Sequence
  Description of Artificial Sequence: Synthetic oligonucleotide
  Target: LAMA2; (-) strand; PAM type: NRG; PAM sequence: TGG
accagctccatatgtctaag

SEQ ID NO: 103641 - DNA, 20 bp, Artificial Sequence
  Description of Artificial Sequence: Synthetic oligonucleotide
  Target: LAMA2; (-) strand; PAM type: NRG; PAM sequence: AAG
attaccagctccatatgtct

SEQ ID NO: 103642 - DNA, 20 bp, Artificial Sequence
  Description of Artificial Sequence: Synthetic oligonucleotide
  Target: LAMA2; (-) strand; PAM type: NRG; PAM sequence: CAG
gggtcatcttccaatattac

SEQ ID NO: 103643 - DNA, 20 bp, Artificial Sequence
  Description of Artificial Sequence: Synthetic oligonucleotide
  Target: LAMA2; (-) strand; PAM type: NRG; PAM sequence: GGG
catttatatgatactctcaa

SEQ ID NO: 103644 - DNA, 20 bp, Artificial Sequence
  Description of Artificial Sequence: Synthetic oligonucleotide
  Target: LAMA2; (-) strand; PAM type: NRG; PAM sequence: AGG
tcatttatatgatactctca

SEQ ID NO: 103645 - DNA, 20 bp, Artificial Sequence
  Description of Artificial Sequence: Synthetic oligonucleotide
  Target: LAMA2; (-) strand; PAM type: NRG; PAM sequence: AAG
atcatttatatgatactctc

SEQ ID NO: 103646 - DNA, 20 bp, Artificial Sequence
  Description of Artificial Sequence: Synthetic oligonucleotide
  Target: LAMA2; (-) strand; PAM type: NRG; PAM sequence: CAG
ttcctgctaaaattagattt

SEQ ID NO: 103647 - DNA, 20 bp, Artificial Sequence
  Description of Artificial Sequence: Synthetic oligonucleotide
  Target: LAMA2; (-) strand; PAM type: NRG; PAM sequence: TAG
atatggtttcctgctaaaat

SEQ ID NO: 103648 - DNA, 20 bp, Artificial Sequence
  Description of Artificial Sequence: Synthetic oligonucleotide
  Target: LAMA2; (-) strand; PAM type: NRG; PAM sequence: TGG
tttgcatttgtggactcata

SEQ ID NO: 103649 - DNA, 20 bp, Artificial Sequence
  Description of Artificial Sequence: Synthetic oligonucleotide
  Target: LAMA2; (-) strand; PAM type: NRG; PAM sequence: TGG
actgtctacctttgcatttg

SEQ ID NO: 103650 - DNA, 20 bp, Artificial Sequence
  Description of Artificial Sequence: Synthetic oligonucleotide
  Target: LAMA2; (-) strand; PAM type: NRG; PAM sequence: TAG
actgaatagataacattgct

SEQ ID NO: 103651 - DNA, 20 bp, Artificial Sequence
  Description of Artificial Sequence: Synthetic oligonucleotide
  Target: LAMA2; (-) strand; PAM type: NRG; PAM sequence: TAG
gagcaaacctaactactgaa

SEQ ID NO: 103652 - DNA, 20 bp, Artificial Sequence
  Description of Artificial Sequence: Synthetic oligonucleotide
  Target: LAMA2; (-) strand; PAM type: NRG; PAM sequence: GAG
gttaaaactagaatctaatg

SEQ ID NO: 103653 - DNA, 20 bp, Artificial Sequence
  Description of Artificial Sequence: Synthetic oligonucleotide
  Target: LAMA2; (-) strand; PAM type: NRG; PAM sequence: TGG
atgttaaaactagaatctaa

SEQ ID NO: 103654 - DNA, 20 bp, Artificial Sequence
  Description of Artificial Sequence: Synthetic oligonucleotide
  Target: LAMA2; (-) strand; PAM type: NRG; PAM sequence: TAG
tgccttctttatgttaaaac

SEQ ID NO: 103655 - DNA, 20 bp, Artificial Sequence
  Description of Artificial Sequence: Synthetic oligonucleotide
  Target: LAMA2; (-) strand; PAM type: NRG; PAM sequence: CAG
ttttcttggttggatatgac

SEQ ID NO: 103656 - DNA, 20 bp, Artificial Sequence
  Description of Artificial Sequence: Synthetic oligonucleotide
  Target: LAMA2; (-) strand; PAM type: NRG; PAM sequence: TGG
ctgcacataattttcttggt

SEQ ID NO: 103657 - DNA, 20 bp, Artificial Sequence
  Description of Artificial Sequence: Synthetic oligonucleotide
  Target: LAMA2; (-) strand; PAM type: NRG; PAM sequence: TGG
aaatctgcacataattttct

SEQ ID NO: 103658 - DNA, 20 bp, Artificial Sequence
  Description of Artificial Sequence: Synthetic oligonucleotide
  Target: LAMA2; (-) strand; PAM type: NRG; PAM sequence: CAG
ctttcctgctttagctcaag

SEQ ID NO: 103659 - DNA, 20 bp, Artificial Sequence
  Description of Artificial Sequence: Synthetic oligonucleotide
  Target: LAMA2; (-) strand; PAM type: NRG; PAM sequence: AAG
ttactttcctgctttagctc

SEQ ID NO: 103660 - DNA, 20 bp, Artificial Sequence
  Description of Artificial Sequence: Synthetic oligonucleotide
  Target: LAMA2; (-) strand; PAM type: NRG; PAM sequence: TAG
tagctgttactttcctgctt

SEQ ID NO: 103661 - DNA, 20 bp, Artificial Sequence
  Description of Artificial Sequence: Synthetic oligonucleotide
  Target: LAMA2; (-) strand; PAM type: NRG; PAM sequence: TAG
taatttacttctgaacaatg

SEQ ID NO: 103662 - DNA, 20 bp, Artificial Sequence
  Description of Artificial Sequence: Synthetic oligonucleotide
  Target: LAMA2; (-) strand; PAM type: NRG; PAM sequence: AGG
aggcagcatgcattaccatt

SEQ ID NO: 103663 - DNA, 20 bp, Artificial Sequence
  Description of Artificial Sequence: Synthetic oligonucleotide
  Target: LAMA2; (-) strand; PAM type: NRG; PAM sequence: TAG
taggcagcatgcattaccat

SEQ ID NO: 103664 - DNA, 20 bp, Artificial Sequence
  Description of Artificial Sequence: Synthetic oligonucleotide
  Target: LAMA2; (-) strand; PAM type: NRG; PAM sequence: CAG
ttagagtatttatgtctagg

SEQ ID NO: 103665 - DNA, 20 bp, Artificial Sequence
  Description of Artificial Sequence: Synthetic oligonucleotide
  Target: LAMA2; (-) strand; PAM type: NRG; PAM sequence: AGG
tttttagagtatttatgtct

SEQ ID NO: 103666 - DNA, 20 bp, Artificial Sequence
  Description of Artificial Sequence: Synthetic oligonucleotide
  Target: LAMA2; (-) strand; PAM type: NRG; PAM sequence: TAG
ttttttagagtatttatgtc

SEQ ID NO: 103667 - DNA, 20 bp, Artificial Sequence
  Description of Artificial Sequence: Synthetic oligonucleotide
  Target: LAMA2; (-) strand; PAM type: NRG; PAM sequence: GAG
ttttcttgttttgtttttta

SEQ ID NO: 103668 - DNA, 20 bp, Artificial Sequence
  Description of Artificial Sequence: Synthetic oligonucleotide
  Target: LAMA2; (-) strand; PAM type: NRG; PAM sequence: TAG
ttttttcttgttttgttttt

SEQ ID NO: 103669 - DNA, 20 bp, Artificial Sequence
  Description of Artificial Sequence: Synthetic oligonucleotide
  Target: LAMA2; (-) strand; PAM type: NRG; PAM sequence: AGG
atgttgacattcactcaact

SEQ ID NO: 103670 - DNA, 20 bp, Artificial Sequence
  Description of Artificial Sequence: Synthetic oligonucleotide
  Target: LAMA2; (-) strand; PAM type: NRG; PAM sequence: TAG
tatgttgacattcactcaac

SEQ ID NO: 103671 - DNA, 20 bp, Artificial Sequence
  Description of Artificial Sequence: Synthetic oligonucleotide
  Target: LAMA2; (-) strand; PAM type: NRG; PAM sequence: CAG
tttgtaaatgatgccttaca

SEQ ID NO: 103672 - DNA, 20 bp, Artificial Sequence
  Description of Artificial Sequence: Synthetic oligonucleotide
  Target: LAMA2; (-) strand; PAM type: NRG; PAM sequence: CAG
cctctattctgcaatcttta

SEQ ID NO: 103673 - DNA, 20 bp, Artificial Sequence
  Description of Artificial Sequence: Synthetic oligonucleotide
  Target: LAMA2; (-) strand; PAM type: NRG; PAM sequence: TGG
cttcctttcattctctatct

SEQ ID NO: 103674 - DNA, 20 bp, Artificial Sequence
  Description of Artificial Sequence: Synthetic oligonucleotide
  Target: LAMA2; (-) strand; PAM type: NRG; PAM sequence: GAG
tcactattatcttgtccttt

SEQ ID NO: 103675 - DNA, 20 bp, Artificial Sequence
  Description of Artificial Sequence: Synthetic oligonucleotide
  Target: LAMA2; (-) strand; PAM type: NRG; PAM sequence: TAG
aaattaccatctccatctct

SEQ ID NO: 103676 - DNA, 20 bp, Artificial Sequence
  Description of Artificial Sequence: Synthetic oligonucleotide
  Target: LAMA2; (-) strand; PAM type: NRG; PAM sequence: TGG
actatctgtctgattcagtt

SEQ ID NO: 103677 - DNA, 20 bp, Artificial Sequence
  Description of Artificial Sequence: Synthetic oligonucleotide
  Target: LAMA2; (-) strand; PAM type: NRG; PAM sequence: CAG
taggaactatctgtctgatt

SEQ ID NO: 103678 - DNA, 20 bp, Artificial Sequence
  Description of Artificial Sequence: Synthetic oligonucleotide
  Target: LAMA2; (-) strand; PAM type: NRG; PAM sequence: AGG
aatgctaaatactacatgat

SEQ ID NO: 103679 - DNA, 20 bp, Artificial Sequence
  Description of Artificial Sequence: Synthetic oligonucleotide
  Target: LAMA2; (-) strand; PAM type: NRG; PAM sequence: TAG
gaatgctaaatactacatga

SEQ ID NO: 103680 - DNA, 20 bp, Artificial Sequence
  Description of Artificial Sequence: Synthetic oligonucleotide
  Target: LAMA2; (-) strand; PAM type: NRG; PAM sequence: AGG
aaatcaatctcacccaggac

SEQ ID NO: 103681 - DNA, 20 bp, Artificial Sequence
  Description of Artificial Sequence: Synthetic oligonucleotide
  Target: LAMA2; (-) strand; PAM type: NRG; PAM sequence: CAG
aaaatcaatctcacccagga

SEQ ID NO: 103682 - DNA, 20 bp, Artificial Sequence
  Description of Artificial Sequence: Synthetic oligonucleotide
  Target: LAMA2; (-) strand; PAM type: NRG; PAM sequence: AGG
cacaaaaatcaatctcaccc

SEQ ID NO: 103683 - DNA, 20 bp, Artificial Sequence
  Description of Artificial Sequence: Synthetic oligonucleotide
  Target: LAMA2; (-) strand; PAM type: NRG; PAM sequence: CAG
tcacaaaaatcaatctcacc

SEQ ID NO: 103684 - DNA, 20 bp, Artificial Sequence
  Description of Artificial Sequence: Synthetic oligonucleotide
  Target: LAMA2; (-) strand; PAM type: NRG; PAM sequence: AAG
agatagtggtatcactgcca

SEQ ID NO: 103685 - DNA, 20 bp, Artificial Sequence
  Description of Artificial Sequence: Synthetic oligonucleotide
  Target: LAMA2; (-) strand; PAM type: NRG; PAM sequence: TGG
tgggtagtggtgatagatag

SEQ ID NO: 103686 - DNA, 20 bp, Artificial Sequence
  Description of Artificial Sequence: Synthetic oligonucleotide
  Target: LAMA2; (-) strand; PAM type: NRG; PAM sequence: TAG
ctatgggtagtggtgataga

SEQ ID NO: 103687 - DNA, 20 bp, Artificial Sequence
  Description of Artificial Sequence: Synthetic oligonucleotide
  Target: LAMA2; (-) strand; PAM type: NRG; PAM sequence: TAG
tcacctatgggtagtggtga

SEQ ID NO: 103688 - DNA, 20 bp, Artificial Sequence
  Description of Artificial Sequence: Synthetic oligonucleotide
  Target: LAMA2; (-) strand; PAM type: NRG; PAM sequence: TGG
gcactatcacctatgggtag

SEQ ID NO: 103689 - DNA, 20 bp, Artificial Sequence
  Description of Artificial Sequence: Synthetic oligonucleotide
  Target: LAMA2; (-) strand; PAM type: NRG; PAM sequence: TAG
aatgcactatcacctatggg

SEQ ID NO: 103690 - DNA, 20 bp, Artificial Sequence
  Description of Artificial Sequence: Synthetic oligonucleotide
  Target: LAMA2; (-) strand; PAM type: NRG; PAM sequence: GGG
acaaatgcactatcacctat

SEQ ID NO: 103691 - DNA, 20 bp, Artificial Sequence
  Description of Artificial Sequence: Synthetic oligonucleotide
  Target: LAMA2; (-) strand; PAM type: NRG; PAM sequence: TGG
gacaaatgcactatcaccta

SEQ ID NO: 103692 - DNA, 20 bp, Artificial Sequence
  Description of Artificial Sequence: Synthetic oligonucleotide
  Target: LAMA2; (-) strand; PAM type: NRG; PAM sequence: AAG
ccacgagagacttcataaag

SEQ ID NO: 103693 - DNA, 20 bp, Artificial Sequence
  Description of Artificial Sequence: Synthetic oligonucleotide
  Target: LAMA2; (-) strand; PAM type: NRG; PAM sequence: AAG
tacccacgagagacttcata

SEQ ID NO: 103694 - DNA, 20 bp, Artificial Sequence
  Description of Artificial Sequence: Synthetic oligonucleotide
  Target: LAMA2; (-) strand; PAM type: NRG; PAM sequence: GAG
ctggtcaaaaatacccacga

SEQ ID NO: 103695 - DNA, 20 bp, Artificial Sequence
  Description of Artificial Sequence: Synthetic oligonucleotide
  Target: LAMA2; (-) strand; PAM type: NRG; PAM sequence: GAG
ccctggtcaaaaatacccac

SEQ ID NO: 103696 - DNA, 20 bp, Artificial Sequence
  Description of Artificial Sequence: Synthetic oligonucleotide
  Target: LAMA2; (-) strand; PAM type: NRG; PAM sequence: TGG
attaagttgaagattcaccc

SEQ ID NO: 103697 - DNA, 20 bp, Artificial Sequence
  Description of Artificial Sequence: Synthetic oligonucleotide
  Target: LAMA2; (-) strand; PAM type: NRG; PAM sequence: AAG
attacacagtaattaagttg

SEQ ID NO: 103698 - DNA, 20 bp, Artificial Sequence
  Description of Artificial Sequence: Synthetic oligonucleotide
  Target: LAMA2; (-) strand; PAM type: NRG; PAM sequence: AAG
tgtctcattacacagtaatt

SEQ ID NO: 103699 - DNA, 20 bp, Artificial Sequence
  Description of Artificial Sequence: Synthetic oligonucleotide
  Target: LAMA2; (-) strand; PAM type: NRG; PAM sequence: CAG
aaaaatcatgtctcattaca

SEQ ID NO: 103700 - DNA, 20 bp, Artificial Sequence
  Description of Artificial Sequence: Synthetic oligonucleotide
  Target: LAMA2; (-) strand; PAM type: NRG; PAM sequence: TAG
aatcatatcagaacatcatc

SEQ ID NO: 103701 - DNA, 20 bp, Artificial Sequence
  Description of Artificial Sequence: Synthetic oligonucleotide
  Target: LAMA2; (-) strand; PAM type: NRG; PAM sequence: CAG
aacacatttcaaaatcatat

SEQ ID NO: 103702 - DNA, 20 bp, Artificial Sequence
  Description of Artificial Sequence: Synthetic oligonucleotide
  Target: LAMA2; (-) strand; PAM type: NRG; PAM sequence: CAG
agtatataagttttgacttt

SEQ ID NO: 103703 - DNA, 20 bp, Artificial Sequence
  Description of Artificial Sequence: Synthetic oligonucleotide
  Target: LAMA2; (-) strand; PAM type: NRG; PAM sequence: AAG
aatgtatactttaagtatat

SEQ ID NO: 103704 - DNA, 20 bp, Artificial Sequence
  Description of Artificial Sequence: Synthetic oligonucleotide
  Target: LAMA2; (-) strand; PAM type: NRG; PAM sequence: AAG
ctccagttaatgtatacttt

SEQ ID NO: 103705 - DNA, 20 bp, Artificial Sequence
  Description of Artificial Sequence: Synthetic oligonucleotide
  Target: LAMA2; (-) strand; PAM type: NRG; PAM sequence: CAG
gtgagtggaggacactgctc

SEQ ID NO: 103706 - DNA, 20 bp, Artificial Sequence
  Description of Artificial Sequence: Synthetic oligonucleotide
  Target: LAMA2; (-) strand; PAM type: NRG; PAM sequence: AGG
ggagtattctaggtgagtgg

SEQ ID NO: 103707 - DNA, 20 bp, Artificial Sequence
  Description of Artificial Sequence: Synthetic oligonucleotide
  Target: LAMA2; (-) strand; PAM type: NRG; PAM sequence: GAG
tggagtattctaggtgagtg

SEQ ID NO: 103708 - DNA, 20 bp, Artificial Sequence
  Description of Artificial Sequence: Synthetic oligonucleotide
  Target: LAMA2; (-) strand; PAM type: NRG; PAM sequence: TGG
actggagtattctaggtgag

SEQ ID NO: 103709 - DNA, 20 bp, Artificial Sequence
  Description of Artificial Sequence: Synthetic oligonucleotide
  Target: LAMA2; (-) strand; PAM type: NRG; PAM sequence: GAG
aaaactggagtattctaggt

SEQ ID NO: 103710 - DNA, 20 bp, Artificial Sequence
  Description of Artificial Sequence: Synthetic oligonucleotide
  Target: LAMA2; (-) strand; PAM type: NRG; PAM sequence: AGG
atgaaaaactggagtattct

SEQ ID NO: 103711 - DNA, 20 bp, Artificial Sequence
  Description of Artificial Sequence: Synthetic oligonucleotide
  Target: LAMA2; (-) strand; PAM type: NRG; PAM sequence: TAG
catgaaaaactggagtattc

SEQ ID NO: 103712 - DNA, 20 bp, Artificial Sequence
  Description of Artificial Sequence: Synthetic oligonucleotide
  Target: LAMA2; (-) strand; PAM type: NRG; PAM sequence: GAG
gtaaaatacatgaaaaactg

SEQ ID NO: 103713 - DNA, 20 bp, Artificial Sequence
  Description of Artificial Sequence: Synthetic oligonucleotide
  Target: LAMA2; (-) strand; PAM type: NRG; PAM sequence: TGG
tagtaaaatacatgaaaaac

SEQ ID NO: 103714 - DNA, 20 bp, Artificial Sequence
  Description of Artificial Sequence: Synthetic oligonucleotide
  Target: LAMA2; (-) strand; PAM type: NRG; PAM sequence: TAG
tggctaacatccagaaagag

SEQ ID NO: 103715 - DNA, 20 bp, Artificial Sequence
  Description of Artificial Sequence: Synthetic oligonucleotide
  Target: LAMA2; (-) strand; PAM type: NRG; PAM sequence: GAG
gtttggctaacatccagaaa

SEQ ID NO: 103716 - DNA, 20 bp, Artificial Sequence
  Description of Artificial Sequence: Synthetic oligonucleotide
  Target: LAMA2; (-) strand; PAM type: NRG; PAM sequence: AAG
gtgtttggctaacatccaga

SEQ ID NO: 103717 - DNA, 20 bp, Artificial Sequence
  Description of Artificial Sequence: Synthetic oligonucleotide
  Target: LAMA2; (-) strand; PAM type: NRG; PAM sequence: CAG
ttttgtgtttggctaacatc

SEQ ID NO: 103718 - DNA, 20 bp, Artificial Sequence
  Description of Artificial Sequence: Synthetic oligonucleotide
  Target: LAMA2; (-) strand; PAM type: NRG; PAM sequence: TGG
acccaacactattttgtgtt

SEQ ID NO: 103719 - DNA, 20 bp, Artificial Sequence
  Description of Artificial Sequence: Synthetic oligonucleotide
  Target: LAMA2; (-) strand; PAM type: NRG; PAM sequence: CAG
tacactttttttttgtctca

SEQ ID NO: 103720 - DNA, 20 bp, Artificial Sequence
  Description of Artificial Sequence: Synthetic oligonucleotide
  Target: LAMA2; (-) strand; PAM type: NRG; PAM sequence: GAG
cttacatgtacagggaattg

SEQ ID NO: 103721 - DNA, 20 bp, Artificial Sequence
  Description of Artificial Sequence: Synthetic oligonucleotide
  Target: LAMA2; (-) strand; PAM type: NRG; PAM sequence: TGG
aacttacatgtacagggaat

SEQ ID NO: 103722 - DNA, 20 bp, Artificial Sequence
  Description of Artificial Sequence: Synthetic oligonucleotide
  Target: LAMA2; (-) strand; PAM type: NRG; PAM sequence: GGG
tatctgaacttacatgtaca

SEQ ID NO: 103723 - DNA, 20 bp, Artificial Sequence
  Description of Artificial Sequence: Synthetic oligonucleotide
  Target: LAMA2; (-) strand; PAM type: NRG; PAM sequence: AGG
ttatctgaacttacatgtac

SEQ ID NO: 103724 - DNA, 20 bp, Artificial Sequence
  Description of Artificial Sequence: Synthetic oligonucleotide
  Target: LAMA2; (-) strand; PAM type: NRG; PAM sequence: CAG
cttatctgaacttacatgta

SEQ ID NO: 103725 - DNA, 20 bp, Artificial Sequence
  Description of Artificial Sequence: Synthetic oligonucleotide
  Target: LAMA2; (-) strand; PAM type: NRG; PAM sequence: AAG
aaggaaggtatgaggaggtt

SEQ ID NO: 103726 - DNA, 20 bp, Artificial Sequence
  Description of Artificial Sequence: Synthetic oligonucleotide
  Target: LAMA2; (-) strand; PAM type: NRG; PAM sequence: AGG
gtgaaaaggaaggtatgagg

SEQ ID NO: 103727 - DNA, 20 bp, Artificial Sequence
  Description of Artificial Sequence: Synthetic oligonucleotide
  Target: LAMA2; (-) strand; PAM type: NRG; PAM sequence: GAG
ggtgaaaaggaaggtatgag

SEQ ID NO: 103728 - DNA, 20 bp, Artificial Sequence
  Description of Artificial Sequence: Synthetic oligonucleotide
  Target: LAMA2; (-) strand; PAM type: NRG; PAM sequence: AGG
caggtgaaaaggaaggtatg

SEQ ID NO: 103729 - DNA, 20 bp, Artificial Sequence
  Description of Artificial Sequence: Synthetic oligonucleotide
  Target: LAMA2; (-) strand; PAM type: NRG; PAM sequence: GAG
acaggtgaaaaggaaggtat

SEQ ID NO: 103730 - DNA, 20 bp, Artificial Sequence
  Description of Artificial Sequence: Synthetic oligonucleotide
  Target: LAMA2; (-) strand; PAM type: NRG; PAM sequence: AGG
ttttacacaggtgaaaagga

SEQ ID NO: 103731 - DNA, 20 bp, Artificial Sequence
  Description of Artificial Sequence: Synthetic oligonucleotide
  Target: LAMA2; (-) strand; PAM type: NRG; PAM sequence: AAG
tttttacacaggtgaaaagg

SEQ ID NO: 103732 - DNA, 20 bp, Artificial Sequence
  Description of Artificial Sequence: Synthetic oligonucleotide
  Target: LAMA2; (-) strand; PAM type: NRG; PAM sequence: AGG
ctctttttacacaggtgaaa

SEQ ID NO: 103733 - DNA, 20 bp, Artificial Sequence
  Description of Artificial Sequence: Synthetic oligonucleotide
  Target: LAMA2; (-) strand; PAM type: NRG; PAM sequence: AAG
cctctttttacacaggtgaa

SEQ ID NO: 103734 - DNA, 20 bp, Artificial Sequence
  Description of Artificial Sequence: Synthetic oligonucleotide
  Target: LAMA2; (-) strand; PAM type: NRG; PAM sequence: AGG
catcatccctctttttacac

SEQ ID NO: 103735 - DNA, 20 bp, Artificial Sequence
  Description of Artificial Sequence: Synthetic oligonucleotide
  Target: LAMA2; (-) strand; PAM type: NRG; PAM sequence: CAG
gcatcatccctctttttaca

SEQ ID NO: 103736 - DNA, 20 bp, Artificial Sequence
  Description of Artificial Sequence: Synthetic oligonucleotide
  Target: LAMA2; (-) strand; PAM type: NRG; PAM sequence: AGG
tgaatttagagatatataga

SEQ ID NO: 103737 - DNA, 20 bp, Artificial Sequence
  Description of Artificial Sequence: Synthetic oligonucleotide
  Target: LAMA2; (-) strand; PAM type: NRG; PAM sequence: AAG
ctgaatttagagatatatag

SEQ ID NO: 103738 - DNA, 20 bp, Artificial Sequence
  Description of Artificial Sequence: Synthetic oligonucleotide
  Target: LAMA2; (-) strand; PAM type: NRG; PAM sequence: TAG
ttcctgaatttagagatata

SEQ ID NO: 103739 - DNA, 20 bp, Artificial Sequence
  Description of Artificial Sequence: Synthetic oligonucleotide
  Target: LAMA2; (-) strand; PAM type: NRG; PAM sequence: GAG
acttactcttcctgaattta

SEQ ID NO: 103740 - DNA, 20 bp, Artificial Sequence
  Description of Artificial Sequence: Synthetic oligonucleotide
  Target: LAMA2; (-) strand; PAM type: NRG; PAM sequence: TAG
tcacttactcttcctgaatt

SEQ ID NO: 103741 - DNA, 20 bp, Artificial Sequence
  Description of Artificial Sequence: Synthetic oligonucleotide
  Target: LAMA2; (-) strand; PAM type: NRG; PAM sequence: CAG
tacatgtttgcaaaggctta

SEQ ID NO: 103742 - DNA, 20 bp, Artificial Sequence
  Description of Artificial Sequence: Synthetic oligonucleotide
  Target: LAMA2; (-) strand; PAM type: NRG; PAM sequence: AGG
atttatatacatgtttgcaa

SEQ ID NO: 103743 - DNA, 20 bp, Artificial Sequence
  Description of Artificial Sequence: Synthetic oligonucleotide
  Target: LAMA2; (-) strand; PAM type: NRG; PAM sequence: AAG
aatttatatacatgtttgca

SEQ ID NO: 103744 - DNA, 20 bp, Artificial Sequence
  Description of Artificial Sequence: Synthetic oligonucleotide
  Target: LAMA2; (-) strand; PAM type: NRG; PAM sequence: TAG
catgtctttgctattgtgaa

SEQ ID NO: 103745 - DNA, 20 bp, Artificial Sequence
  Description of Artificial Sequence: Synthetic oligonucleotide
  Target: LAMA2; (-) strand; PAM type: NRG; PAM sequence: AGG
tctattattgatgggcactt

SEQ ID NO: 103746 - DNA, 20 bp, Artificial Sequence
  Description of Artificial Sequence: Synthetic oligonucleotide
  Target: LAMA2; (-) strand; PAM type: NRG; PAM sequence: TAG
gtctattattgatgggcact

SEQ ID NO: 103747 - DNA, 20 bp, Artificial Sequence
  Description of Artificial Sequence: Synthetic oligonucleotide
  Target: LAMA2; (-) strand; PAM type: NRG; PAM sequence: GGG
ttagccagtctattattgat

SEQ ID NO: 103748 - DNA, 20 bp, Artificial Sequence
  Description of Artificial Sequence: Synthetic oligonucleotide
  Target: LAMA2; (-) strand; PAM type: NRG; PAM sequence: TGG
tttagccagtctattattga

SEQ ID NO: 103749 - DNA, 20 bp, Artificial Sequence
  Description of Artificial Sequence: Synthetic oligonucleotide
  Target: LAMA2; (-) strand; PAM type: NRG; PAM sequence: CAG
tgtaccacattttctttagc

SEQ ID NO: 103750 - DNA, 20 bp, Artificial Sequence
  Description of Artificial Sequence: Synthetic oligonucleotide
  Target: LAMA2; (-) strand; PAM type: NRG; PAM sequence: TAG
tgtatgtaccacattttctt

SEQ ID NO: 103751 - DNA, 20 bp, Artificial Sequence
  Description of Artificial Sequence: Synthetic oligonucleotide
  Target: LAMA2; (-) strand; PAM type: NRG; PAM sequence: TGG
tatggctgcatagtattcca

SEQ ID NO: 103752 - DNA, 20 bp, Artificial Sequence
  Description of Artificial Sequence: Synthetic oligonucleotide
  Target: LAMA2; (-) strand; PAM type: NRG; PAM sequence: TAG
cattcttttttatggctgca

SEQ ID NO: 103753 - DNA, 20 bp, Artificial Sequence
  Description of Artificial Sequence: Synthetic oligonucleotide
  Target: LAMA2; (-) strand; PAM type: NRG; PAM sequence: TGG
catgaactcattctttttta

SEQ ID NO: 103754 - DNA, 20 bp, Artificial Sequence
  Description of Artificial Sequence: Synthetic oligonucleotide
  Target: LAMA2; (-) strand; PAM type: NRG; PAM sequence: AGG
ctccatccatgtccctgcaa

SEQ ID NO: 103755 - DNA, 20 bp, Artificial Sequence
  Description of Artificial Sequence: Synthetic oligonucleotide
  Target: LAMA2; (-) strand; PAM type: NRG; PAM sequence: AAG
gctccatccatgtccctgca

SEQ ID NO: 103756 - DNA, 20 bp, Artificial Sequence
  Description of Artificial Sequence: Synthetic oligonucleotide
  Target: LAMA2; (-) strand; PAM type: NRG; PAM sequence: CAG
ttgctaagggtaatgtcctc

SEQ ID NO: 103757 - DNA, 20 bp, Artificial Sequence
  Description of Artificial Sequence: Synthetic oligonucleotide
  Target: LAMA2; (-) strand; PAM type: NRG; PAM sequence: GGG
ttcctgtgttagtttgctaa

SEQ ID NO: 103758 - DNA, 20 bp, Artificial Sequence
  Description of Artificial Sequence: Synthetic oligonucleotide
  Target: LAMA2; (-) strand; PAM type: NRG; PAM sequence: AGG
gttcctgtgttagtttgcta

SEQ ID NO: 103759 - DNA, 20 bp, Artificial Sequence
  Description of Artificial Sequence: Synthetic oligonucleotide
  Target: LAMA2; (-) strand; PAM type: NRG; PAM sequence: AAG
tgttcctgtgttagtttgct

SEQ ID NO: 103760 - DNA, 20 bp, Artificial Sequence
  Description of Artificial Sequence: Synthetic oligonucleotide
  Target: LAMA2; (-) strand; PAM type: NRG; PAM sequence: TAG
ttgattttctgttcctgtgt

SEQ ID NO: 103761 - DNA, 20 bp, Artificial Sequence
  Description of Artificial Sequence: Synthetic oligonucleotide
  Target: LAMA2; (-) strand; PAM type: NRG; PAM sequence: CAG
ccatttataagtgggacata

SEQ ID NO: 103762 - DNA, 20 bp, Artificial Sequence
  Description of Artificial Sequence: Synthetic oligonucleotide
  Target: LAMA2; (-) strand; PAM type: NRG; PAM sequence: GGG
tttaactcccatttataagt

SEQ ID NO: 103763 - DNA, 20 bp, Artificial Sequence
  Description of Artificial Sequence: Synthetic oligonucleotide
  Target: LAMA2; (-) strand; PAM type: NRG; PAM sequence: TGG
atttaactcccatttataag

SEQ ID NO: 103764 - DNA, 20 bp, Artificial Sequence
  Description of Artificial Sequence: Synthetic oligonucleotide
  Target: LAMA2; (-) strand; PAM type: NRG; PAM sequence: AAG
atcatttaactcccatttat

SEQ ID NO: 103765 - DNA, 20 bp, Artificial Sequence
  Description of Artificial Sequence: Synthetic oligonucleotide
  Target: LAMA2; (-) strand; PAM type: NRG; PAM sequence: CAG
ctccgccctctggtaggccc

SEQ ID NO: 103766 - DNA, 20 bp, Artificial Sequence
  Description of Artificial Sequence: Synthetic oligonucleotide
  Target: LAMA2; (-) strand; PAM type: NRG; PAM sequence: AGG
cccatcctccgccctctggt

SEQ ID NO: 103767 - DNA, 20 bp, Artificial Sequence
  Description of Artificial Sequence: Synthetic oligonucleotide
  Target: LAMA2; (-) strand; PAM type: NRG; PAM sequence: TAG
tcccatcctccgccctctgg

SEQ ID NO: 103768 - DNA, 20 bp, Artificial Sequence
  Description of Artificial Sequence: Synthetic oligonucleotide
  Target: LAMA2; (-) strand; PAM type: NRG; PAM sequence: TGG
ccttcccatcctccgccctc

SEQ ID NO: 103769 - DNA, 20 bp, Artificial Sequence
  Description of Artificial Sequence: Synthetic oligonucleotide
  Target: LAMA2; (-) strand; PAM type: NRG; PAM sequence: AAG
gtattaagcccagtgcccat

SEQ ID NO: 103770 - DNA, 20 bp, Artificial Sequence
  Description of Artificial Sequence: Synthetic oligonucleotide
  Target: LAMA2; (-) strand; PAM type: NRG; PAM sequence: CAG
catcacccaggtattaagcc

SEQ ID NO: 103771 - DNA, 20 bp, Artificial Sequence
  Description of Artificial Sequence: Synthetic oligonucleotide
  Target: LAMA2; (-) strand; PAM type: NRG; PAM sequence: AAG
tatttcatcacccaggtatt

SEQ ID NO: 103772 - DNA, 20 bp, Artificial Sequence
  Description of Artificial Sequence: Synthetic oligonucleotide
  Target: LAMA2; (-) strand; PAM type: NRG; PAM sequence: AGG
cacagattatttcatcaccc

SEQ ID NO: 103773 - DNA, 20 bp, Artificial Sequence
  Description of Artificial Sequence: Synthetic oligonucleotide
  Target: LAMA2; (-) strand; PAM type: NRG; PAM sequence: CAG
gcacagattatttcatcacc

SEQ ID NO: 103774 - DNA, 20 bp, Artificial Sequence
  Description of Artificial Sequence: Synthetic oligonucleotide
  Target: LAMA2; (-) strand; PAM type: NRG; PAM sequence: CAG
gcataatggggtttgttgca

SEQ ID NO: 103775 - DNA, 20 bp, Artificial Sequence
  Description of Artificial Sequence: Synthetic oligonucleotide
  Target: LAMA2; (-) strand; PAM type: NRG; PAM sequence: GGG
aaaaaaacccatgcataatg

SEQ ID NO: 103776 - DNA, 20 bp, Artificial Sequence
  Description of Artificial Sequence: Synthetic oligonucleotide
  Target: LAMA2; (-) strand; PAM type: NRG; PAM sequence: GGG
aaaaaaaacccatgcataat

SEQ ID NO: 103777 - DNA, 20 bp, Artificial Sequence
  Description of Artificial Sequence: Synthetic oligonucleotide
  Target: LAMA2; (-) strand; PAM type: NRG; PAM sequence: TGG
aaaaaaaaacccatgcataa

SEQ ID NO: 103778 - DNA, 20 bp, Artificial Sequence
  Description of Artificial Sequence: Synthetic oligonucleotide
  Target: LAMA2; (-) strand; PAM type: NRG; PAM sequence: AGG
gatgtgcagatttgttacac

SEQ ID NO: 103779 - DNA, 20 bp, Artificial Sequence
  Description of Artificial Sequence: Synthetic oligonucleotide
  Target: LAMA2; (-) strand; PAM type: NRG; PAM sequence: CAG
ggatgtgcagatttgttaca

SEQ ID NO: 103780 - DNA, 20 bp, Artificial Sequence
  Description of Artificial Sequence: Synthetic oligonucleotide
  Target: LAMA2; (-) strand; PAM type: NRG; PAM sequence: CAG
ggatacatgtgcaggatgtg

SEQ ID NO: 103781 - DNA, 20 bp, Artificial Sequence
  Description of Artificial Sequence: Synthetic oligonucleotide
  Target: LAMA2; (-) strand; PAM type: NRG; PAM sequence: AGG
aagttcagggatacatgtgc

SEQ ID NO: 103782 - DNA, 20 bp, Artificial Sequence
  Description of Artificial Sequence: Synthetic oligonucleotide
  Target: LAMA2; (-) strand; PAM type: NRG; PAM sequence: CAG
taagttcagggatacatgtg

SEQ ID NO: 103783 - DNA, 20 bp, Artificial Sequence
  Description of Artificial Sequence: Synthetic oligonucleotide
  Target: LAMA2; (-) strand; PAM type: NRG; PAM sequence: GGG
ttttttaacttttaagttca

SEQ ID NO: 103784 - DNA, 20 bp, Artificial Sequence
  Description of Artificial Sequence: Synthetic oligonucleotide
  Target: LAMA2; (-) strand; PAM type: NRG; PAM sequence: AGG
tttttttaacttttaagttc

SEQ ID NO: 103785 - DNA, 20 bp, Artificial Sequence
  Description of Artificial Sequence: Synthetic oligonucleotide
  Target: LAMA2; (-) strand; PAM type: NRG; PAM sequence: CAG
atttttttaacttttaagtt

SEQ ID NO: 103786 - DNA, 20 bp, Artificial Sequence
  Description of Artificial Sequence: Synthetic oligonucleotide
  Target: LAMA2; (-) strand; PAM type: NRG; PAM sequence: AAG
tttatatttttttaactttt

SEQ ID NO: 103787 - DNA, 20 bp, Artificial Sequence
  Description of Artificial Sequence: Synthetic oligonucleotide
  Target: LAMA2; (-) strand; PAM type: NRG; PAM sequence: CAG
agtcaggctcatctgtacct

SEQ ID NO: 103788 - DNA, 20 bp, Artificial Sequence
  Description of Artificial Sequence: Synthetic oligonucleotide
  Target: LAMA2; (-) strand; PAM type: NRG; PAM sequence: AGG
aaaggatgagttacacagtc

SEQ ID NO: 103789 - DNA, 20 bp, Artificial Sequence
  Description of Artificial Sequence: Synthetic oligonucleotide
  Target: LAMA2; (-) strand; PAM type: NRG; PAM sequence: CAG
taaaggatgagttacacagt

SEQ ID NO: 103790 - DNA, 20 bp, Artificial Sequence
  Description of Artificial Sequence: Synthetic oligonucleotide
  Target: LAMA2; (-) strand; PAM type: NRG; PAM sequence: CAG
atgctaaaggatgagttaca

SEQ ID NO: 103791 - DNA, 20 bp, Artificial Sequence
  Description of Artificial Sequence: Synthetic oligonucleotide
  Target: LAMA2; (-) strand; PAM type: NRG; PAM sequence: GAG
gggttagcatgctaaaggat

SEQ ID NO: 103792 - DNA, 20 bp, Artificial Sequence
  Description of Artificial Sequence: Synthetic oligonucleotide
  Target: LAMA2; (-) strand; PAM type: NRG; PAM sequence: AGG
aatgcgggttagcatgctaa

SEQ ID NO: 103793 - DNA, 20 bp, Artificial Sequence
  Description of Artificial Sequence: Synthetic oligonucleotide
  Target: LAMA2; (-) strand; PAM type: NRG; PAM sequence: AAG
taatgcgggttagcatgcta

SEQ ID NO: 103794 - DNA, 20 bp, Artificial Sequence
  Description of Artificial Sequence: Synthetic oligonucleotide
  Target: LAMA2; (-) strand; PAM type: NRG; PAM sequence: TAG
agcatcaacttaatgcgggt

SEQ ID NO: 103795 - DNA, 20 bp, Artificial Sequence
  Description of Artificial Sequence: Synthetic oligonucleotide
  Target: LAMA2; (-) strand; PAM type: NRG; PAM sequence: GGG
caaaagcatcaacttaatgc

SEQ ID NO: 103796 - DNA, 20 bp, Artificial Sequence
  Description of Artificial Sequence: Synthetic oligonucleotide
  Target: LAMA2; (-) strand; PAM type: NRG; PAM sequence: CGG
ccaaaagcatcaacttaatg

SEQ ID NO: 103797 - DNA, 20 bp, Artificial Sequence
  Description of Artificial Sequence: Synthetic oligonucleotide
  Target: LAMA2; (-) strand; PAM type: NRG; PAM sequence: AAG
cgtgaggttcccggcaccaa

SEQ ID NO: 103798 - DNA, 20 bp, Artificial Sequence
  Description of Artificial Sequence: Synthetic oligonucleotide
  Target: LAMA2; (-) strand; PAM type: NRG; PAM sequence: CGG
aggaggagacgtgaggttcc

SEQ ID NO: 103799 - DNA, 20 bp, Artificial Sequence
  Description of Artificial Sequence: Synthetic oligonucleotide
  Target: LAMA2; (-) strand; PAM type: NRG; PAM sequence: AGG
ccagaagaggaggagacgtg

SEQ ID NO: 103800 - DNA, 20 bp, Artificial Sequence
  Description of Artificial Sequence: Synthetic oligonucleotide
  Target: LAMA2; (-) strand; PAM type: NRG; PAM sequence: GAG
tccagaagaggaggagacgt

SEQ ID NO: 103801 - DNA, 20 bp, Artificial Sequence
  Description of Artificial Sequence: Synthetic oligonucleotide
  Target: LAMA2; (-) strand; PAM type: NRG; PAM sequence: GAG
aggctattccagaagaggag

SEQ ID NO: 103802 - DNA, 20 bp, Artificial Sequence
  Description of Artificial Sequence: Synthetic oligonucleotide
  Target: LAMA2; (-) strand; PAM type: NRG; PAM sequence: AGG
ctaggctattccagaagagg

SEQ ID NO: 103803 - DNA, 20 bp, Artificial Sequence
  Description of Artificial Sequence: Synthetic oligonucleotide
  Target: LAMA2; (-) strand; PAM type: NRG; PAM sequence: GAG
tctaggctattccagaagag

SEQ ID NO: 103804 - DNA, 20 bp, Artificial Sequence
  Description of Artificial Sequence: Synthetic oligonucleotide
  Target: LAMA2; (-) strand; PAM type: NRG; PAM sequence: AGG
tctctaggctattccagaag

SEQ ID NO: 103805 - DNA, 20 bp, Artificial Sequence
  Description of Artificial Sequence: Synthetic oligonucleotide
  Target: LAMA2; (-) strand; PAM type: NRG; PAM sequence: GAG
ctctctaggctattccagaa

SEQ ID NO: 103806 - DNA, 20 bp, Artificial Sequence
  Description of Artificial Sequence: Synthetic oligonucleotide
  Target: LAMA2; (-) strand; PAM type: NRG; PAM sequence: AAG
tcctctctaggctattccag

SEQ ID NO: 103807 - DNA, 20 bp, Artificial Sequence
  Description of Artificial Sequence: Synthetic oligonucleotide
  Target: LAMA2; (-) strand; PAM type: NRG; PAM sequence: CAG
gcttcctctctaggctattc

SEQ ID NO: 103808 - DNA, 20 bp, Artificial Sequence
  Description of Artificial Sequence: Synthetic oligonucleotide
  Target: LAMA2; (-) strand; PAM type: NRG; PAM sequence: AGG
agaagaagagcttcctctct

SEQ ID NO: 103809 - DNA, 20 bp, Artificial Sequence
  Description of Artificial Sequence: Synthetic oligonucleotide
  Target: LAMA2; (-) strand; PAM type: NRG; PAM sequence: TAG
cagaagaagagcttcctctc

SEQ ID NO: 103810 - DNA, 20 bp, Artificial Sequence
  Description of Artificial Sequence: Synthetic oligonucleotide
  Target: LAMA2; (-) strand; PAM type: NRG; PAM sequence: GAG
tccctctaaacacagaagaa

SEQ ID NO: 103811 - DNA, 20 bp, Artificial Sequence
  Description of Artificial Sequence: Synthetic oligonucleotide
  Target: LAMA2; (-) strand; PAM type: NRG; PAM sequence: AAG
cttccctctaaacacagaag

SEQ ID NO: 103812 - DNA, 20 bp, Artificial Sequence
  Description of Artificial Sequence: Synthetic oligonucleotide
  Target: LAMA2; (-) strand; PAM type: NRG; PAM sequence: AAG
taccttccctctaaacacag

SEQ ID NO: 103813 - DNA, 20 bp, Artificial Sequence
  Description of Artificial Sequence: Synthetic oligonucleotide
  Target: LAMA2; (-) strand; PAM type: NRG; PAM sequence: CAG
agataccttccctctaaaca

SEQ ID NO: 103814 - DNA, 20 bp, Artificial Sequence
  Description of Artificial Sequence: Synthetic oligonucleotide
  Target: LAMA2; (-) strand; PAM type: NRG; PAM sequence: GAG
cagcacagtgcttactgaag

SEQ ID NO: 103815 - DNA, 20 bp, Artificial Sequence
  Description of Artificial Sequence: Synthetic oligonucleotide
  Target: LAMA2; (-) strand; PAM type: NRG; PAM sequence: AGG
gccagcacagtgcttactga

SEQ ID NO: 103816 - DNA, 20 bp, Artificial Sequence
  Description of Artificial Sequence: Synthetic oligonucleotide
  Target: LAMA2; (-) strand; PAM type: NRG; PAM sequence: AAG
ggccagcacagtgcttactg

SEQ ID NO: 103817 - DNA, 20 bp, Artificial Sequence
  Description of Artificial Sequence: Synthetic oligonucleotide
  Target: LAMA2; (-) strand; PAM type: NRG; PAM sequence: CAG
aagactcttcagggccagca

SEQ ID NO: 103818 - DNA, 20 bp, Artificial Sequence
  Description of Artificial Sequence: Synthetic oligonucleotide
  Target: LAMA2; (-) strand; PAM type: NRG; PAM sequence: CAG
gtaggaagactcttcagggc

SEQ ID NO: 103819 - DNA, 20 bp, Artificial Sequence
  Description of Artificial Sequence: Synthetic oligonucleotide
  Target: LAMA2; (-) strand; PAM type: NRG; PAM sequence: GGG
gagggtaggaagactcttca

SEQ ID NO: 103820 - DNA, 20 bp, Artificial Sequence
  Description of Artificial Sequence: Synthetic oligonucleotide
  Target: LAMA2; (-) strand; PAM type: NRG; PAM sequence: AGG
agagggtaggaagactcttc

SEQ ID NO: 103821 - DNA, 20 bp, Artificial Sequence
  Description of Artificial Sequence: Synthetic oligonucleotide
  Target: LAMA2; (-) strand; PAM type: NRG; PAM sequence: CAG
aagagggtaggaagactctt

SEQ ID NO: 103822 - DNA, 20 bp, Artificial Sequence
  Description of Artificial Sequence: Synthetic oligonucleotide
  Target: LAMA2; (-) strand; PAM type: NRG; PAM sequence: AAG
gggggcaggaagagggtagg

SEQ ID NO: 103823 - DNA, 20 bp, Artificial Sequence
  Description of Artificial Sequence: Synthetic oligonucleotide
  Target: LAMA2; (-) strand; PAM type: NRG; PAM sequence: AGG
gtagggggcaggaagagggt

SEQ ID NO: 103824 - DNA, 20 bp, Artificial Sequence
  Description of Artificial Sequence: Synthetic oligonucleotide
  Target: LAMA2; (-) strand; PAM type: NRG; PAM sequence: TAG
agtagggggcaggaagaggg

SEQ ID NO: 103825 - DNA, 20 bp, Artificial Sequence
  Description of Artificial Sequence: Synthetic oligonucleotide
  Target: LAMA2; (-) strand; PAM type: NRG; PAM sequence: GGG
ggcagtagggggcaggaaga

SEQ ID NO: 103826 - DNA, 20 bp, Artificial Sequence
  Description of Artificial Sequence: Synthetic oligonucleotide
  Target: LAMA2; (-) strand; PAM type: NRG; PAM sequence: AGG
tggcagtagggggcaggaag

SEQ ID NO: 103827 - DNA, 20 bp, Artificial Sequence
  Description of Artificial Sequence: Synthetic oligonucleotide
  Target: LAMA2; (-) strand; PAM type: NRG; PAM sequence: GAG
gtggcagtagggggcaggaa

SEQ ID NO: 103828 - DNA, 20 bp, Artificial Sequence
  Description of Artificial Sequence: Synthetic oligonucleotide
  Target: LAMA2; (-) strand; PAM type: NRG; PAM sequence: AAG
gagtggcagtagggggcagg

SEQ ID NO: 103829 - DNA, 20 bp, Artificial Sequence
  Description of Artificial Sequence: Synthetic oligonucleotide
  Target: LAMA2; (-) strand; PAM type: NRG; PAM sequence: AGG
tgggagtggcagtagggggc

SEQ ID NO: 103830 - DNA, 20 bp, Artificial Sequence
  Description of Artificial Sequence: Synthetic oligonucleotide
  Target: LAMA2; (-) strand; PAM type: NRG; PAM sequence: CAG
gtgggagtggcagtaggggg

SEQ ID NO: 103831 - DNA, 20 bp, Artificial Sequence
  Description of Artificial Sequence: Synthetic oligonucleotide
  Target: LAMA2; (-) strand; PAM type: NRG; PAM sequence: GGG
ggggtgggagtggcagtagg

SEQ ID NO: 103832 - DNA, 20 bp, Artificial Sequence
  Description of Artificial Sequence: Synthetic oligonucleotide
  Target: LAMA2; (-) strand; PAM type: NRG; PAM sequence: GGG
tggggtgggagtggcagtag

SEQ ID NO: 103833 - DNA, 20 bp, Artificial Sequence
  Description of Artificial Sequence: Synthetic oligonucleotide
  Target: LAMA2; (-) strand; PAM type: NRG; PAM sequence: GGG
gtggggtgggagtggcagta

SEQ ID NO: 103834 - DNA, 20 bp, Artificial Sequence
  Description of Artificial Sequence: Synthetic oligonucleotide
  Target: LAMA2; (-) strand; PAM type: NRG; PAM sequence: AGG
ggtggggtgggagtggcagt

SEQ ID NO: 103835 - DNA, 20 bp, Artificial Sequence
  Description of Artificial Sequence: Synthetic oligonucleotide
  Target: LAMA2; (-) strand; PAM type: NRG; PAM sequence: TAG
tggtggggtgggagtggcag

SEQ ID NO: 103836 - DNA, 20 bp, Artificial Sequence
  Description of Artificial Sequence: Synthetic oligonucleotide
  Target: LAMA2; (-) strand; PAM type: NRG; PAM sequence: CAG
cgctggtggggtgggagtgg

SEQ ID NO: 103837 - DNA, 20 bp, Artificial Sequence
  Description of Artificial Sequence: Synthetic oligonucleotide
  Target: LAMA2; (-) strand; PAM type: NRG; PAM sequence: TGG
ccacgctggtggggtgggag

SEQ ID NO: 103838 - DNA, 20 bp, Artificial Sequence
  Description of Artificial Sequence: Synthetic oligonucleotide
  Target: LAMA2; (-) strand; PAM type: NRG; PAM sequence: GAG
gttccacgctggtggggtgg

SEQ ID NO: 103839 - DNA, 20 bp, Artificial Sequence
  Description of Artificial Sequence: Synthetic oligonucleotide
  Target: LAMA2; (-) strand; PAM type: NRG; PAM sequence: GGG
aagttccacgctggtggggt

SEQ ID NO: 103840 - DNA, 20 bp, Artificial Sequence
  Description of Artificial Sequence: Synthetic oligonucleotide
  Target: LAMA2; (-) strand; PAM type: NRG; PAM sequence: TGG
gaagttccacgctggtgggg

SEQ ID NO: 103841 - DNA, 20 bp, Artificial Sequence
  Description of Artificial Sequence: Synthetic oligonucleotide
  Target: LAMA2; (-) strand; PAM type: NRG; PAM sequence: GGG
cacgaagttccacgctggtg

SEQ ID NO: 103842 - DNA, 20 bp, Artificial Sequence
  Description of Artificial Sequence: Synthetic oligonucleotide
  Target: LAMA2; (-) strand; PAM type: NRG; PAM sequence: GGG
acacgaagttccacgctggt

SEQ ID NO: 103843 - DNA, 20 bp, Artificial Sequence
  Description of Artificial Sequence: Synthetic oligonucleotide
  Target: LAMA2; (-) strand; PAM type: NRG; PAM sequence: TGG
cacacgaagttccacgctgg

SEQ ID NO: 103844 - DNA, 20 bp, Artificial Sequence
  Description of Artificial Sequence: Synthetic oligonucleotide
  Target: LAMA2; (-) strand; PAM type: NRG; PAM sequence: TGG
atacacacgaagttccacgc

SEQ ID NO: 103845 - DNA, 20 bp, Artificial Sequence
  Description of Artificial Sequence: Synthetic oligonucleotide
  Target: LAMA2; (-) strand; PAM type: NRG; PAM sequence: AAG
tggacctttgaatacacacg

SEQ ID NO: 103846 - DNA, 20 bp, Artificial Sequence
  Description of Artificial Sequence: Synthetic oligonucleotide
  Target: LAMA2; (-) strand; PAM type: NRG; PAM sequence: TGG
ggcctcacagtaattcaaac

SEQ ID NO: 103847 - DNA, 20 bp, Artificial Sequence
  Description of Artificial Sequence: Synthetic oligonucleotide
  Target: LAMA2; (-) strand; PAM type: NRG; PAM sequence: CAG
ctttctagccactggcctca

SEQ ID NO: 103848 - DNA, 20 bp, Artificial Sequence
  Description of Artificial Sequence: Synthetic oligonucleotide
  Target: LAMA2; (-) strand; PAM type: NRG; PAM sequence: TGG
ctacactgctttctagccac

SEQ ID NO: 103849 - DNA, 20 bp, Artificial Sequence
  Description of Artificial Sequence: Synthetic oligonucleotide
  Target: LAMA2; (-) strand; PAM type: NRG; PAM sequence: TAG
gtcccaactacactgctttc

SEQ ID NO: 103850 - DNA, 20 bp, Artificial Sequence
  Description of Artificial Sequence: Synthetic oligonucleotide
  Target: LAMA2; (-) strand; PAM type: NRG; PAM sequence: CAG
gagccaggcatgtgaatctc

SEQ ID NO: 103851 - DNA, 20 bp, Artificial Sequence
  Description of Artificial Sequence: Synthetic oligonucleotide
  Target: LAMA2; (-) strand; PAM type: NRG; PAM sequence: AGG
tgaagcttgggagaagagcc

SEQ ID NO: 103852 - DNA, 20 bp, Artificial Sequence
  Description of Artificial Sequence: Synthetic oligonucleotide
  Target: LAMA2; (-) strand; PAM type: NRG; PAM sequence: CAG
ttgaagcttgggagaagagc

SEQ ID NO: 103853 - DNA, 20 bp, Artificial Sequence
  Description of Artificial Sequence: Synthetic oligonucleotide
  Target: LAMA2; (-) strand; PAM type: NRG; PAM sequence: GAG
acagttgaagcttgggagaa

SEQ ID NO: 103854 - DNA, 20 bp, Artificial Sequence
  Description of Artificial Sequence: Synthetic oligonucleotide
  Target: LAMA2; (-) strand; PAM type: NRG; PAM sequence: AAG
ctacagttgaagcttgggag

SEQ ID NO: 103855 - DNA, 20 bp, Artificial Sequence
  Description of Artificial Sequence: Synthetic oligonucleotide
  Target: LAMA2; (-) strand; PAM type: NRG; PAM sequence: GAG
gagctacagttgaagcttgg

SEQ ID NO: 103856 - DNA, 20 bp, Artificial Sequence
  Description of Artificial Sequence: Synthetic oligonucleotide
  Target: LAMA2; (-) strand; PAM type: NRG; PAM sequence: GGG
aagagctacagttgaagctt

SEQ ID NO: 103857 - DNA, 20 bp, Artificial Sequence
  Description of Artificial Sequence: Synthetic oligonucleotide
  Target: LAMA2; (-) strand; PAM type: NRG; PAM sequence: TGG
caagagctacagttgaagct

SEQ ID NO: 103858 - DNA, 20 bp, Artificial Sequence
  Description of Artificial Sequence: Synthetic oligonucleotide
  Target: LAMA2; (-) strand; PAM type: NRG; PAM sequence: AAG
ctgctcaagagctacagttg

SEQ ID NO: 103859 - DNA, 20 bp, Artificial Sequence
  Description of Artificial Sequence: Synthetic oligonucleotide
  Target: LAMA2; (-) strand; PAM type: NRG; PAM sequence: CAG
aagctgctgctcaagagcta

SEQ ID NO: 103860 - DNA, 20 bp, Artificial Sequence
  Description of Artificial Sequence: Synthetic oligonucleotide
  Target: LAMA2; (-) strand; PAM type: NRG; PAM sequence: GAG
cagaggaagctgctgctcaa

SEQ ID NO: 103861 - DNA, 20 bp, Artificial Sequence
  Description of Artificial Sequence: Synthetic oligonucleotide
  Target: LAMA2; (-) strand; PAM type: NRG; PAM sequence: AAG
ctcagaggaagctgctgctc

SEQ ID NO: 103862 - DNA, 20 bp, Artificial Sequence
  Description of Artificial Sequence: Synthetic oligonucleotide
  Target: LAMA2; (-) strand; PAM type: NRG; PAM sequence: AAG
attttttagaagctcagagg

SEQ ID NO: 103863 - DNA, 20 bp, Artificial Sequence
  Description of Artificial Sequence: Synthetic oligonucleotide
  Target: LAMA2; (-) strand; PAM type: NRG; PAM sequence: AGG
ggcattttttagaagctcag

SEQ ID NO: 103864 - DNA, 20 bp, Artificial Sequence
  Description of Artificial Sequence: Synthetic oligonucleotide
  Target: LAMA2; (-) strand; PAM type: NRG; PAM sequence: GAG
gggcattttttagaagctca

SEQ ID NO: 103865 - DNA, 20 bp, Artificial Sequence
  Description of Artificial Sequence: Synthetic oligonucleotide
  Target: LAMA2; (-) strand; PAM type: NRG; PAM sequence: CAG
ctgggcattttttagaagct

SEQ ID NO: 103866 - DNA, 20 bp, Artificial Sequence
  Description of Artificial Sequence: Synthetic oligonucleotide
  Target: LAMA2; (-) strand; PAM type: NRG; PAM sequence: AAG
attttctgggcattttttag

SEQ ID NO: 103867 - DNA, 20 bp, Artificial Sequence
  Description of Artificial Sequence: Synthetic oligonucleotide
  Target: LAMA2; (-) strand; PAM type: NRG; PAM sequence: TAG
gcaattttctgggcattttt

SEQ ID NO: 103868 - DNA, 20 bp, Artificial Sequence
  Description of Artificial Sequence: Synthetic oligonucleotide
  Target: LAMA2; (-) strand; PAM type: NRG; PAM sequence: GGG
ggttggctgggcaattttct

SEQ ID NO: 103869 - DNA, 20 bp, Artificial Sequence
  Description of Artificial Sequence: Synthetic oligonucleotide
  Target: LAMA2; (-) strand; PAM type: NRG; PAM sequence: TGG
tggttggctgggcaattttc

SEQ ID NO: 103870 - DNA, 20 bp, Artificial Sequence
  Description of Artificial Sequence: Synthetic oligonucleotide
  Target: LAMA2; (-) strand; PAM type: NRG; PAM sequence: GGG
gccaggaaatgtggttggct

SEQ ID NO: 103871 - DNA, 20 bp, Artificial Sequence
  Description of Artificial Sequence: Synthetic oligonucleotide
  Target: LAMA2; (-) strand; PAM type: NRG; PAM sequence: TGG
tgccaggaaatgtggttggc

SEQ ID NO: 103872 - DNA, 20 bp, Artificial Sequence
  Description of Artificial Sequence: Synthetic oligonucleotide
  Target: LAMA2; (-) strand; PAM type: NRG; PAM sequence: TGG
tgcttgccaggaaatgtggt

SEQ ID NO: 103873 - DNA, 20 bp, Artificial Sequence
  Description of Artificial Sequence: Synthetic oligonucleotide
  Target: LAMA2; (-) strand; PAM type: NRG; PAM sequence: TGG
gctatgcttgccaggaaatg

SEQ ID NO: 103874 - DNA, 20 bp, Artificial Sequence
  Description of Artificial Sequence: Synthetic oligonucleotide
  Target: LAMA2; (-) strand; PAM type: NRG; PAM sequence: AGG
tgcctggtgctatgcttgcc

SEQ ID NO: 103875 - DNA, 20 bp, Artificial Sequence
  Description of Artificial Sequence: Synthetic oligonucleotide
  Target: LAMA2; (-) strand; PAM type: NRG; PAM sequence: CAG
atgcctggtgctatgcttgc

SEQ ID NO: 103876 - DNA, 20 bp, Artificial Sequence
  Description of Artificial Sequence: Synthetic oligonucleotide
  Target: LAMA2; (-) strand; PAM type: NRG; PAM sequence: TGG
actcaaactgaccatatgcc

SEQ ID NO: 103877 - DNA, 20 bp, Artificial Sequence
  Description of Artificial Sequence: Synthetic oligonucleotide
  Target: LAMA2; (-) strand; PAM type: NRG; PAM sequence: TAG
aagttctaaagcctatctaa

SEQ ID NO: 103878 - DNA, 20 bp, Artificial Sequence
  Description of Artificial Sequence: Synthetic oligonucleotide
  Target: LAMA2; (-) strand; PAM type: NRG; PAM sequence: AAG
atgatcccttggaagttcta

SEQ ID NO: 103879 - DNA, 20 bp, Artificial Sequence
  Description of Artificial Sequence: Synthetic oligonucleotide
  Target: LAMA2; (-) strand; PAM type: NRG; PAM sequence: AAG
tcaaaccaatgatcccttgg

SEQ ID NO: 103880 - DNA, 20 bp, Artificial Sequence
  Description of Artificial Sequence: Synthetic oligonucleotide
  Target: LAMA2; (-) strand; PAM type: NRG; PAM sequence: TGG
caatcaaaccaatgatccct

SEQ ID NO: 103881 - DNA, 20 bp, Artificial Sequence
  Description of Artificial Sequence: Synthetic oligonucleotide
  Target: LAMA2; (-) strand; PAM type: NRG; PAM sequence: TGG
catagatgttgggtgattgg

SEQ ID NO: 103882 - DNA, 20 bp, Artificial Sequence
  Description of Artificial Sequence: Synthetic oligonucleotide
  Target: LAMA2; (-) strand; PAM type: NRG; PAM sequence: TGG
ggtcatagatgttgggtgat

SEQ ID NO: 103883 - DNA, 20 bp, Artificial Sequence
  Description of Artificial Sequence: Synthetic oligonucleotide
  Target: LAMA2; (-) strand; PAM type: NRG; PAM sequence: GGG
tgtcgtgggtcatagatgtt

SEQ ID NO: 103884 - DNA, 20 bp, Artificial Sequence
  Description of Artificial Sequence: Synthetic oligonucleotide
  Target: LAMA2; (-) strand; PAM type: NRG; PAM sequence: TGG
ttgtcgtgggtcatagatgt

SEQ ID NO: 103885 - DNA, 20 bp, Artificial Sequence
  Description of Artificial Sequence: Synthetic oligonucleotide
  Target: LAMA2; (-) strand; PAM type: NRG; PAM sequence: TAG
tggcaaattgtcgtgggtca

SEQ ID NO: 103886 - DNA, 20 bp, Artificial Sequence
  Description of Artificial Sequence: Synthetic oligonucleotide
  Target: LAMA2; (-) strand; PAM type: NRG; PAM sequence: GGG
agtgtctggcaaattgtcgt

SEQ ID NO: 103887 - DNA, 20 bp, Artificial Sequence
  Description of Artificial Sequence: Synthetic oligonucleotide
  Target: LAMA2; (-) strand; PAM type: NRG; PAM sequence: TGG
tagtgtctggcaaattgtcg

SEQ ID NO: 103888 - DNA, 20 bp, Artificial Sequence
  Description of Artificial Sequence: Synthetic oligonucleotide
  Target: LAMA2; (-) strand; PAM type: NRG; PAM sequence: TGG
agagtgccaagcatagtgtc

SEQ ID NO: 103889 - DNA, 20 bp, Artificial Sequence
  Description of Artificial Sequence: Synthetic oligonucleotide
  Target: LAMA2; (-) strand; PAM type: NRG; PAM sequence: TAG
attcctcagagtgccaagca

SEQ ID NO: 103890 - DNA, 20 bp, Artificial Sequence
  Description of Artificial Sequence: Synthetic oligonucleotide
  Target: LAMA2; (-) strand; PAM type: NRG; PAM sequence: AAG
tttttattcctcagagtgcc

SEQ ID NO: 103891 - DNA, 20 bp, Artificial Sequence
  Description of Artificial Sequence: Synthetic oligonucleotide
  Target: LAMA2; (-) strand; PAM type: NRG; PAM sequence: GAG
cttactctttttattcctca

SEQ ID NO: 103892 - DNA, 20 bp, Artificial Sequence
  Description of Artificial Sequence: Synthetic oligonucleotide
  Target: LAMA2; (-) strand; PAM type: NRG; PAM sequence: CAG
gtcttactctttttattcct

SEQ ID NO: 103893 - DNA, 20 bp, Artificial Sequence
  Description of Artificial Sequence: Synthetic oligonucleotide
  Target: LAMA2; (-) strand; PAM type: NRG; PAM sequence: GGG
agatagattagaaaaggcta

SEQ ID NO: 103894 - DNA, 20 bp, Artificial Sequence
  Description of Artificial Sequence: Synthetic oligonucleotide
  Target: LAMA2; (-) strand; PAM type: NRG; PAM sequence: AGG
tagatagattagaaaaggct

SEQ ID NO: 103895 - DNA, 20 bp, Artificial Sequence
  Description of Artificial Sequence: Synthetic oligonucleotide
  Target: LAMA2; (-) strand; PAM type: NRG; PAM sequence: TAG
atagatagattagaaaaggc

SEQ ID NO: 103896 - DNA, 20 bp, Artificial Sequence
  Description of Artificial Sequence: Synthetic oligonucleotide
  Target: LAMA2; (-) strand; PAM type: NRG; PAM sequence: AGG
ttagatagatagattagaaa

SEQ ID NO: 103897 - DNA, 20 bp, Artificial Sequence
  Description of Artificial Sequence: Synthetic oligonucleotide
  Target: LAMA2; (-) strand; PAM type: NRG; PAM sequence: AAG
attagatagatagattagaa

SEQ ID NO: 103898 - DNA, 20 bp, Artificial Sequence
  Description of Artificial Sequence: Synthetic oligonucleotide
  Target: LAMA2; (-) strand; PAM type: NRG; PAM sequence: TAG
tctccattagatagatagat

SEQ ID NO: 103899 - DNA, 20 bp, Artificial Sequence
  Description of Artificial Sequence: Synthetic oligonucleotide
  Target: LAMA2; (-) strand; PAM type: NRG; PAM sequence: TAG
ccatatctccattagataga

SEQ ID NO: 103900 - DNA, 20 bp, Artificial Sequence
  Description of Artificial Sequence: Synthetic oligonucleotide
  Target: LAMA2; (-) strand; PAM type: NRG; PAM sequence: TAG
tttgccatatctccattaga

SEQ ID NO: 103901 - DNA, 20 bp, Artificial Sequence
  Description of Artificial Sequence: Synthetic oligonucleotide
  Target: LAMA2; (-) strand; PAM type: NRG; PAM sequence: TAG
gtgctttgccatatctccat

SEQ ID NO: 103902 - DNA, 20 bp, Artificial Sequence
  Description of Artificial Sequence: Synthetic oligonucleotide
  Target: LAMA2; (-) strand; PAM type: NRG; PAM sequence: AGG
taatgggtagtgactttgtt

SEQ ID NO: 103903 - DNA, 20 bp, Artificial Sequence
  Description of Artificial Sequence: Synthetic oligonucleotide
  Target: LAMA2; (-) strand; PAM type: NRG; PAM sequence: TAG
ctaatgggtagtgactttgt

SEQ ID NO: 103904 - DNA, 20 bp, Artificial Sequence
  Description of Artificial Sequence: Synthetic oligonucleotide
  Target: LAMA2; (-) strand; PAM type: NRG; PAM sequence: TAG
ctattcacaactctaatggg

SEQ ID NO: 103905 - DNA, 20 bp, Artificial Sequence
  Description of Artificial Sequence: Synthetic oligonucleotide
  Target: LAMA2; (-) strand; PAM type: NRG; PAM sequence: GGG
ccactattcacaactctaat

SEQ ID NO: 103906 - DNA, 20 bp, Artificial Sequence
  Description of Artificial Sequence: Synthetic oligonucleotide
  Target: LAMA2; (-) strand; PAM type: NRG; PAM sequence: TGG
accactattcacaactctaa

SEQ ID NO: 103907 - DNA, 20 bp, Artificial Sequence
  Description of Artificial Sequence: Synthetic oligonucleotide
  Target: LAMA2; (-) strand; PAM type: NRG; PAM sequence: TAG
tagcacatgctctcttttct

SEQ ID NO: 103908 - DNA, 20 bp, Artificial Sequence
  Description of Artificial Sequence: Synthetic oligonucleotide
  Target: LAMA2; (-) strand; PAM type: NRG; PAM sequence: TAG
gaagccctccttacctattc

SEQ ID NO: 103909 - DNA, 20 bp, Artificial Sequence
  Description of Artificial Sequence: Synthetic oligonucleotide
  Target: LAMA2; (-) strand; PAM type: NRG; PAM sequence: AAG
ccaactccatcttctcagtg

SEQ ID NO: 103910 - DNA, 20 bp, Artificial Sequence
  Description of Artificial Sequence: Synthetic oligonucleotide
  Target: LAMA2; (-) strand; PAM type: NRG; PAM sequence: CAG
caattccaactccatcttct

SEQ ID NO: 103911 - DNA, 20 bp, Artificial Sequence
  Description of Artificial Sequence: Synthetic oligonucleotide
  Target: LAMA2; (-) strand; PAM type: NRG; PAM sequence: GAG
ccaaaacaaatccagctttc

SEQ ID NO: 103912 - DNA, 20 bp, Artificial Sequence
  Description of Artificial Sequence: Synthetic oligonucleotide
  Target: LAMA2; (-) strand; PAM type: NRG; PAM sequence: CAG
ctacttatccaaaacaaatc

SEQ ID NO: 103913 - DNA, 20 bp, Artificial Sequence
  Description of Artificial Sequence: Synthetic oligonucleotide
  Target: LAMA2; (-) strand; PAM type: NRG; PAM sequence: AAG
ttttggaacattctcaaaaa

SEQ ID NO: 103914 - DNA, 20 bp, Artificial Sequence
  Description of Artificial Sequence: Synthetic oligonucleotide
  Target: LAMA2; (-) strand; PAM type: NRG; PAM sequence: TGG
tcttcttgcctacttccttt

SEQ ID NO: 103915 - DNA, 20 bp, Artificial Sequence
  Description of Artificial Sequence: Synthetic oligonucleotide
  Target: LAMA2; (-) strand; PAM type: NRG; PAM sequence: AGG
tctctaaagttgttatatac

SEQ ID NO: 103916 - DNA, 20 bp, Artificial Sequence
  Description of Artificial Sequence: Synthetic oligonucleotide
  Target: LAMA2; (-) strand; PAM type: NRG; PAM sequence: CAG
ttctctaaagttgttatata

SEQ ID NO: 103917 - DNA, 20 bp, Artificial Sequence
  Description of Artificial Sequence: Synthetic oligonucleotide
  Target: LAMA2; (-) strand; PAM type: NRG; PAM sequence: AAG
cttatagtaaatattctcta

SEQ ID NO: 103918 - DNA, 20 bp, Artificial Sequence
  Description of Artificial Sequence: Synthetic oligonucleotide
  Target: LAMA2; (-) strand; PAM type: NRG; PAM sequence: TAG
ctagtatgatgcctaactta

SEQ ID NO: 103919 - DNA, 20 bp, Artificial Sequence
  Description of Artificial Sequence: Synthetic oligonucleotide
  Target: LAMA2; (-) strand; PAM type: NRG; PAM sequence: TAG
tttatcatatatccagctcc

SEQ ID NO: 103920 - DNA, 20 bp, Artificial Sequence
  Description of Artificial Sequence: Synthetic oligonucleotide
  Target: LAMA2; (-) strand; PAM type: NRG; PAM sequence: CAG
tgttttgtttatcatatatc

SEQ ID NO: 103921 - DNA, 20 bp, Artificial Sequence
  Description of Artificial Sequence: Synthetic oligonucleotide
  Target: LAMA2; (-) strand; PAM type: NRG; PAM sequence: TGG
gctctaagggggtgagaact

SEQ ID NO: 103922 - DNA, 20 bp, Artificial Sequence
  Description of Artificial Sequence: Synthetic oligonucleotide
  Target: LAMA2; (-) strand; PAM type: NRG; PAM sequence: GAG
aaggtaagctctaagggggt

SEQ ID NO: 103923 - DNA, 20 bp, Artificial Sequence
  Description of Artificial Sequence: Synthetic oligonucleotide
  Target: LAMA2; (-) strand; PAM type: NRG; PAM sequence: GGG
ctgtaaggtaagctctaagg

SEQ ID NO: 103924 - DNA, 20 bp, Artificial Sequence
  Description of Artificial Sequence: Synthetic oligonucleotide
  Target: LAMA2; (-) strand; PAM type: NRG; PAM sequence: GGG
actgtaaggtaagctctaag

SEQ ID NO: 103925 - DNA, 20 bp, Artificial Sequence
  Description of Artificial Sequence: Synthetic oligonucleotide
  Target: LAMA2; (-) strand; PAM type: NRG; PAM sequence: GGG
aactgtaaggtaagctctaa

SEQ ID NO: 103926 - DNA, 20 bp, Artificial Sequence
  Description of Artificial Sequence: Synthetic oligonucleotide
  Target: LAMA2; (-) strand; PAM type: NRG; PAM sequence: AGG
caactgtaaggtaagctcta

SEQ ID NO: 103927 - DNA, 20 bp, Artificial Sequence
  Description of Artificial Sequence: Synthetic oligonucleotide
  Target: LAMA2; (-) strand; PAM type: NRG; PAM sequence: AAG
ccaactgtaaggtaagctct

SEQ ID NO: 103928 - DNA, 20 bp, Artificial Sequence
  Description of Artificial Sequence: Synthetic oligonucleotide
  Target: LAMA2; (-) strand; PAM type: NRG; PAM sequence: AAG
aacctctccaactgtaaggt

SEQ ID NO: 103929 - DNA, 20 bp, Artificial Sequence
  Description of Artificial Sequence: Synthetic oligonucleotide
  Target: LAMA2; (-) strand; PAM type: NRG; PAM sequence: AGG
tgacaacctctccaactgta

SEQ ID NO: 103930 - DNA, 20 bp, Artificial Sequence
  Description of Artificial Sequence: Synthetic oligonucleotide
  Target: LAMA2; (-) strand; PAM type: NRG; PAM sequence: AAG
ttgacaacctctccaactgt

SEQ ID NO: 103931 - DNA, 20 bp, Artificial Sequence
  Description of Artificial Sequence: Synthetic oligonucleotide
  Target: LAMA2; (-) strand; PAM type: NRG; PAM sequence: TGG
tttgagaattacttagtaat

SEQ ID NO: 103932 - DNA, 20 bp, Artificial Sequence
  Description of Artificial Sequence: Synthetic oligonucleotide
  Target: LAMA2; (-) strand; PAM type: NRG; PAM sequence: TAG
ccatggatttgagaattact

SEQ ID NO: 103933 - DNA, 20 bp, Artificial Sequence
  Description of Artificial Sequence: Synthetic oligonucleotide
  Target: LAMA2; (-) strand; PAM type: NRG; PAM sequence: GAG
cttcatagcaccatggattt

SEQ ID NO: 103934 - DNA, 20 bp, Artificial Sequence
  Description of Artificial Sequence: Synthetic oligonucleotide
  Target: LAMA2; (-) strand; PAM type: NRG; PAM sequence: TGG
acgtttccttcatagcacca

SEQ ID NO: 103935 - DNA, 20 bp, Artificial Sequence
  Description of Artificial Sequence: Synthetic oligonucleotide
  Target: LAMA2; (-) strand; PAM type: NRG; PAM sequence: TAG
gcagcaggacgtttccttca

SEQ ID NO: 103936 - DNA, 20 bp, Artificial Sequence
  Description of Artificial Sequence: Synthetic oligonucleotide
  Target: LAMA2; (-) strand; PAM type: NRG; PAM sequence: AGG
gtttccacacttcctgcagc

SEQ ID NO: 103937 - DNA, 20 bp, Artificial Sequence
  Description of Artificial Sequence: Synthetic oligonucleotide
  Target: LAMA2; (-) strand; PAM type: NRG; PAM sequence: CAG
ggtttccacacttcctgcag

SEQ ID NO: 103938 - DNA, 20 bp, Artificial Sequence
  Description of Artificial Sequence: Synthetic oligonucleotide
  Target: LAMA2; (-) strand; PAM type: NRG; PAM sequence: CAG
ctaggtttccacacttcctg

SEQ ID NO: 103939 - DNA, 20 bp, Artificial Sequence
  Description of Artificial Sequence: Synthetic oligonucleotide
  Target: LAMA2; (-) strand; PAM type: NRG; PAM sequence: AGG
ccattcccagggtgctacct

SEQ ID NO: 103940 - DNA, 20 bp, Artificial Sequence
  Description of Artificial Sequence: Synthetic oligonucleotide
  Target: LAMA2; (-) strand; PAM type: NRG; PAM sequence: TAG
gccattcccagggtgctacc

SEQ ID NO: 103941 - DNA, 20 bp, Artificial Sequence
  Description of Artificial Sequence: Synthetic oligonucleotide
  Target: LAMA2; (-) strand; PAM type: NRG; PAM sequence: GGG
ccttagcgtggccattccca

SEQ ID NO: 103942 - DNA, 20 bp, Artificial Sequence
  Description of Artificial Sequence: Synthetic oligonucleotide
  Target: LAMA2; (-) strand; PAM type: NRG; PAM sequence: AGG
tccttagcgtggccattccc

SEQ ID NO: 103943 - DNA, 20 bp, Artificial Sequence
  Description of Artificial Sequence: Synthetic oligonucleotide
  Target: LAMA2; (-) strand; PAM type: NRG; PAM sequence: CAG
ctccttagcgtggccattcc

SEQ ID NO: 103944 - DNA, 20 bp, Artificial Sequence
  Description of Artificial Sequence: Synthetic oligonucleotide
  Target: LAMA2; (-) strand; PAM type: NRG; PAM sequence: TGG
ttaagtgcttctccttagcg

SEQ ID NO: 103945 - DNA, 20 bp, Artificial Sequence
  Description of Artificial Sequence: Synthetic oligonucleotide
  Target: LAMA2; (-) strand; PAM type: NRG; PAM sequence: TAG
tcagtttaagtgcttctcct

SEQ ID NO: 103946 - DNA, 20 bp, Artificial Sequence
  Description of Artificial Sequence: Synthetic oligonucleotide
  Target: LAMA2; (-) strand; PAM type: NRG; PAM sequence: AAG
tacccatcagctttcagttt

SEQ ID NO: 103947 - DNA, 20 bp, Artificial Sequence
  Description of Artificial Sequence: Synthetic oligonucleotide
  Target: LAMA2; (-) strand; PAM type: NRG; PAM sequence: CAG
ccttgttacccatcagcttt

SEQ ID NO: 103948 - DNA, 20 bp, Artificial Sequence
  Description of Artificial Sequence: Synthetic oligonucleotide
  Target: LAMA2; (-) strand; PAM type: NRG; PAM sequence: CAG
actgggtccttgttacccat

SEQ ID NO: 103949 - DNA, 20 bp, Artificial Sequence
  Description of Artificial Sequence: Synthetic oligonucleotide
  Target: LAMA2; (-) strand; PAM type: NRG; PAM sequence: GGG
cctcaacacctgtaaagact

SEQ ID NO: 103950 - DNA, 20 bp, Artificial Sequence
  Description of Artificial Sequence: Synthetic oligonucleotide
  Target: LAMA2; (-) strand; PAM type: NRG; PAM sequence: TGG
tcctcaacacctgtaaagac

SEQ ID NO: 103951 - DNA, 20 bp, Artificial Sequence
  Description of Artificial Sequence: Synthetic oligonucleotide
  Target: LAMA2; (-) strand; PAM type: NRG; PAM sequence: AAG
gcttctcctcaacacctgta

SEQ ID NO: 103952 - DNA, 20 bp, Artificial Sequence
  Description of Artificial Sequence: Synthetic oligonucleotide
  Target: LAMA2; (-) strand; PAM type: NRG; PAM sequence: GAG
ccattgtctttacctagaat

SEQ ID NO: 103953 - DNA, 20 bp, Artificial Sequence
  Description of Artificial Sequence: Synthetic oligonucleotide
  Target: LAMA2; (-) strand; PAM type: NRG; PAM sequence: TAG
tgtatcccattgtctttacc

SEQ ID NO: 103954 - DNA, 20 bp, Artificial Sequence
  Description of Artificial Sequence: Synthetic oligonucleotide
  Target: LAMA2; (-) strand; PAM type: NRG; PAM sequence: TAG
atgcaaaactcatcccttct

SEQ ID NO: 103955 - DNA, 20 bp, Artificial Sequence
  Description of Artificial Sequence: Synthetic oligonucleotide
  Target: LAMA2; (-) strand; PAM type: NRG; PAM sequence: TAG
caacctccctggcatagttt

SEQ ID NO: 103956 - DNA, 20 bp, Artificial Sequence
  Description of Artificial Sequence: Synthetic oligonucleotide
  Target: LAMA2; (-) strand; PAM type: NRG; PAM sequence: TAG
tgcaatcaacctccctggca

SEQ ID NO: 103957 - DNA, 20 bp, Artificial Sequence
  Description of Artificial Sequence: Synthetic oligonucleotide
  Target: LAMA2; (-) strand; PAM type: NRG; PAM sequence: TGG
ccctatgcaatcaacctccc

SEQ ID NO: 103958 - DNA, 20 bp, Artificial Sequence
  Description of Artificial Sequence: Synthetic oligonucleotide
  Target: LAMA2; (-) strand; PAM type: NRG; PAM sequence: AAG
aagttaaaacaattagcact

SEQ ID NO: 103959 - DNA, 20 bp, Artificial Sequence
  Description of Artificial Sequence: Synthetic oligonucleotide
  Target: LAMA2; (-) strand; PAM type: NRG; PAM sequence: TAG
aagaaagaagttaaaacaat

SEQ ID NO: 103960 - DNA, 20 bp, Artificial Sequence
  Description of Artificial Sequence: Synthetic oligonucleotide
  Target: LAMA2; (-) strand; PAM type: NRG; PAM sequence: AAG
caaactccatgataagaaag

SEQ ID NO: 103961 - DNA, 20 bp, Artificial Sequence
  Description of Artificial Sequence: Synthetic oligonucleotide
  Target: LAMA2; (-) strand; PAM type: NRG; PAM sequence: AAG
ctacaaactccatgataaga

SEQ ID NO: 103962 - DNA, 20 bp, Artificial Sequence
  Description of Artificial Sequence: Synthetic oligonucleotide
  Target: LAMA2; (-) strand; PAM type: NRG; PAM sequence: AAG
aatcctacaaactccatgat

SEQ ID NO: 103963 - DNA, 20 bp, Artificial Sequence
  Description of Artificial Sequence: Synthetic oligonucleotide
  Target: LAMA2; (-) strand; PAM type: NRG; PAM sequence: AAG
tacttcaatactaaattgtc

SEQ ID NO: 103964 - DNA, 20 bp, Artificial Sequence
  Description of Artificial Sequence: Synthetic oligonucleotide
  Target: LAMA2; (-) strand; PAM type: NRG; PAM sequence: TAG
attcacatgcattttattct

SEQ ID NO: 103965 - DNA, 20 bp, Artificial Sequence
  Description of Artificial Sequence: Synthetic oligonucleotide
  Target: LAMA2; (-) strand; PAM type: NRG; PAM sequence: GAG
atttacgtagtaatgtgtaa

SEQ ID NO: 103966 - DNA, 20 bp, Artificial Sequence
  Description of Artificial Sequence: Synthetic oligonucleotide
  Target: LAMA2; (-) strand; PAM type: NRG; PAM sequence: AAG
tcatttacgtagtaatgtgt

SEQ ID NO: 103967 - DNA, 20 bp, Artificial Sequence
  Description of Artificial Sequence: Synthetic oligonucleotide
  Target: LAMA2; (-) strand; PAM type: NRG; PAM sequence: TAG
tacaggttatttcatttacg

SEQ ID NO: 103968 - DNA, 20 bp, Artificial Sequence
  Description of Artificial Sequence: Synthetic oligonucleotide
  Target: LAMA2; (-) strand; PAM type: NRG; PAM sequence: AGG
tggcttatgatctgttgtac

SEQ ID NO: 103969 - DNA, 20 bp, Artificial Sequence
  Description of Artificial Sequence: Synthetic oligonucleotide
  Target: LAMA2; (-) strand; PAM type: NRG; PAM sequence: CAG
ctggcttatgatctgttgta

SEQ ID NO: 103970 - DNA, 20 bp, Artificial Sequence
  Description of Artificial Sequence: Synthetic oligonucleotide
  Target: LAMA2; (-) strand; PAM type: NRG; PAM sequence: TGG
ttcattgtcttaacttcctc

SEQ ID NO: 103971 - DNA, 20 bp, Artificial Sequence
  Description of Artificial Sequence: Synthetic oligonucleotide
  Target: LAMA2; (-) strand; PAM type: NRG; PAM sequence: AAG
cttttaaattctggatgatc

SEQ ID NO: 103972 - DNA, 20 bp, Artificial Sequence
  Description of Artificial Sequence: Synthetic oligonucleotide
  Target: LAMA2; (-) strand; PAM type: NRG; PAM sequence: TGG
acactgtctcttttaaattc

SEQ ID NO: 103973 - DNA, 20 bp, Artificial Sequence
  Description of Artificial Sequence: Synthetic oligonucleotide
  Target: LAMA2; (-) strand; PAM type: NRG; PAM sequence: AAG
caaagtgtctaaattttaaa

SEQ ID NO: 103974 - DNA, 20 bp, Artificial Sequence
  Description of Artificial Sequence: Synthetic oligonucleotide
  Target: LAMA2; (-) strand; PAM type: NRG; PAM sequence: AAG
caattcttatttataactca

SEQ ID NO: 103975 - DNA, 20 bp, Artificial Sequence
  Description of Artificial Sequence: Synthetic oligonucleotide
  Target: LAMA2; (-) strand; PAM type: NRG; PAM sequence: TGG
gatcataatttcacaccaag

SEQ ID NO: 103976 - DNA, 20 bp, Artificial Sequence
  Description of Artificial Sequence: Synthetic oligonucleotide
  Target: LAMA2; (-) strand; PAM type: NRG; PAM sequence: AAG
aaagatcataatttcacacc

SEQ ID NO: 103977 - DNA, 20 bp, Artificial Sequence
  Description of Artificial Sequence: Synthetic oligonucleotide
  Target: LAMA2; (-) strand; PAM type: NRG; PAM sequence: AAG
tatattttctgtattaccaa

SEQ ID NO: 103978 - DNA, 20 bp, Artificial Sequence
  Description of Artificial Sequence: Synthetic oligonucleotide
  Target: LAMA2; (-) strand; PAM type: NRG; PAM sequence: CAG
cactagtgtctcttatggta

SEQ ID NO: 103979 - DNA, 20 bp, Artificial Sequence
  Description of Artificial Sequence: Synthetic oligonucleotide
  Target: LAMA2; (-) strand; PAM type: NRG; PAM sequence: TGG
aataccactagtgtctctta

SEQ ID NO: 103980 - DNA, 20 bp, Artificial Sequence
  Description of Artificial Sequence: Synthetic oligonucleotide
  Target: LAMA2; (-) strand; PAM type: NRG; PAM sequence: TAG
gattaatgtatcaataccac

SEQ ID NO: 103981 - DNA, 20 bp, Artificial Sequence
  Description of Artificial Sequence: Synthetic oligonucleotide
  Target: LAMA2; (-) strand; PAM type: NRG; PAM sequence: CGG
tcttccaatatcttacctta

SEQ ID NO: 103982 - DNA, 20 bp, Artificial Sequence
  Description of Artificial Sequence: Synthetic oligonucleotide
  Target: LAMA2; (-) strand; PAM type: NRG; PAM sequence: TGG
aaggaacttgatctatattt

SEQ ID NO: 103983 - DNA, 20 bp, Artificial Sequence
  Description of Artificial Sequence: Synthetic oligonucleotide
  Target: LAMA2; (-) strand; PAM type: NRG; PAM sequence: AGG
tattactgaacaccataata

SEQ ID NO: 103984 - DNA, 20 bp, Artificial Sequence
  Description of Artificial Sequence: Synthetic oligonucleotide
  Target: LAMA2; (-) strand; PAM type: NRG; PAM sequence: AAG
atattactgaacaccataat

SEQ ID NO: 103985 - DNA, 20 bp, Artificial Sequence
  Description of Artificial Sequence: Synthetic oligonucleotide
  Target: LAMA2; (-) strand; PAM type: NRG; PAM sequence: TGG
ctagacttgactgaacttta

SEQ ID NO: 103986 - DNA, 20 bp, Artificial Sequence
  Description of Artificial Sequence: Synthetic oligonucleotide
  Target: LAMA2; (-) strand; PAM type: NRG; PAM sequence: TAG
ctttggatatttttctagtc

SEQ ID NO: 103987 - DNA, 20 bp, Artificial Sequence
  Description of Artificial Sequence: Synthetic oligonucleotide
  Target: LAMA2; (-) strand; PAM type: NRG; PAM sequence: TAG
aactgctttggatatttttc

SEQ ID NO: 103988 - DNA, 20 bp, Artificial Sequence
  Description of Artificial Sequence: Synthetic oligonucleotide
  Target: LAMA2; (-) strand; PAM type: NRG; PAM sequence: TGG
gttcgtagtctaaactgctt

SEQ ID NO: 103989 - DNA, 20 bp, Artificial Sequence
  Description of Artificial Sequence: Synthetic oligonucleotide
  Target: LAMA2; (-) strand; PAM type: NRG; PAM sequence: TAG
aagaaaaaaaaagatgttcg

SEQ ID NO: 103990 - DNA, 20 bp, Artificial Sequence
  Description of Artificial Sequence: Synthetic oligonucleotide
  Target: LAMA2; (-) strand; PAM type: NRG; PAM sequence: AAG
aagaaaagaaaagaaaaaaa

SEQ ID NO: 103991 - DNA, 20 bp, Artificial Sequence
  Description of Artificial Sequence: Synthetic oligonucleotide
  Target: LAMA2; (-) strand; PAM type: NRG; PAM sequence: AAG
ctcaaaaaaaaagaaaagaa

SEQ ID NO: 103992 - DNA, 20 bp, Artificial Sequence
  Description of Artificial Sequence: Synthetic oligonucleotide
  Target: LAMA2; (-) strand; PAM type: NRG; PAM sequence: AAG
tctgtctcaaaaaaaaagaa

SEQ ID NO: 103993 - DNA, 20 bp, Artificial Sequence
  Description of Artificial Sequence: Synthetic oligonucleotide
  Target: LAMA2; (-) strand; PAM type: NRG; PAM sequence: AAG
gagcctctgtctcaaaaaaa

SEQ ID NO: 103994 - DNA, 20 bp, Artificial Sequence
  Description of Artificial Sequence: Synthetic oligonucleotide
  Target: LAMA2; (-) strand; PAM type: NRG; PAM sequence: GAG
ctccagcctggcgacagagc

SEQ ID NO: 103995 - DNA, 20 bp, Artificial Sequence
  Description of Artificial Sequence: Synthetic oligonucleotide
  Target: LAMA2; (-) strand; PAM type: NRG; PAM sequence: GAG
tgcactccagcctggcgaca

SEQ ID NO: 103996 - DNA, 20 bp, Artificial Sequence
  Description of Artificial Sequence: Synthetic oligonucleotide
  Target: LAMA2; (-) strand; PAM type: NRG; PAM sequence: CAG
actgcactccagcctggcga

SEQ ID NO: 103997 - DNA, 20 bp, Artificial Sequence
  Description of Artificial Sequence: Synthetic oligonucleotide
  Target: LAMA2; (-) strand; PAM type: NRG; PAM sequence: TGG
cacgccactgcactccagcc

SEQ ID NO: 103998 - DNA, 20 bp, Artificial Sequence
  Description of Artificial Sequence: Synthetic oligonucleotide
  Target: LAMA2; (-) strand; PAM type: NRG; PAM sequence: CAG
gagatcacgccactgcactc

SEQ ID NO: 103999 - DNA, 20 bp, Artificial Sequence
  Description of Artificial Sequence: Synthetic oligonucleotide
  Target: LAMA2; (-) strand; PAM type: NRG; PAM sequence: GAG
caacagcttggcagtgagcc

SEQ ID NO: 104000 - DNA, 20 bp, Artificial Sequence
  Description of Artificial Sequence: Synthetic oligonucleotide
  Target: LAMA2; (-) strand; PAM type: NRG; PAM sequence: GAG
aaggtcaacagcttggcagt

SEQ ID NO: 104001 - DNA, 20 bp, Artificial Sequence
  Description of Artificial Sequence: Synthetic oligonucleotide
  Target: LAMA2; (-) strand; PAM type: NRG; PAM sequence: CAG
aactaaggtcaacagcttgg

SEQ ID NO: 104002 - DNA, 20 bp, Artificial Sequence
  Description of Artificial Sequence: Synthetic oligonucleotide
  Target: LAMA2; (-) strand; PAM type: NRG; PAM sequence: TGG
actaactaaggtcaacagct

SEQ ID NO: 104003 - DNA, 20 bp, Artificial Sequence
  Description of Artificial Sequence: Synthetic oligonucleotide
  Target: LAMA2; (-) strand; PAM type: NRG; PAM sequence: CAG
gaatcactaactaaggtcaa

SEQ ID NO: 104004 - DNA, 20 bp, Artificial Sequence
  Description of Artificial Sequence: Synthetic oligonucleotide
  Target: LAMA2; (-) strand; PAM type: NRG; PAM sequence: AGG
tacttctgaatcactaacta

SEQ ID NO: 104005 - DNA, 20 bp, Artificial Sequence
  Description of Artificial Sequence: Synthetic oligonucleotide
  Target: LAMA2; (-) strand; PAM type: NRG; PAM sequence: AAG
ttacttctgaatcactaact

SEQ ID NO: 104006 - DNA, 20 bp, Artificial Sequence
  Description of Artificial Sequence: Synthetic oligonucleotide
  Target: LAMA2; (-) strand; PAM type: NRG; PAM sequence: CAG
gtcaaataactttttacaca

SEQ ID NO: 104007 - DNA, 20 bp, Artificial Sequence
  Description of Artificial Sequence: Synthetic oligonucleotide
  Target: LAMA2; (-) strand; PAM type: NRG; PAM sequence: GGG
tttgcactcaaaggtctgat

SEQ ID NO: 104008 - DNA, 20 bp, Artificial Sequence
  Description of Artificial Sequence: Synthetic oligonucleotide
  Target: LAMA2; (-) strand; PAM type: NRG; PAM sequence: TGG
gtttgcactcaaaggtctga

SEQ ID NO: 104009 - DNA, 20 bp, Artificial Sequence
  Description of Artificial Sequence: Synthetic oligonucleotide
  Target: LAMA2; (-) strand; PAM type: NRG; PAM sequence: AGG
ctgcacgtgtttgcactcaa

SEQ ID NO: 104010 - DNA, 20 bp, Artificial Sequence
  Description of Artificial Sequence: Synthetic oligonucleotide
  Target: LAMA2; (-) strand; PAM type: NRG; PAM sequence: AAG
cctgcacgtgtttgcactca

SEQ ID NO: 104011 - DNA, 20 bp, Artificial Sequence
  Description of Artificial Sequence: Synthetic oligonucleotide
  Target: LAMA2; (-) strand; PAM type: NRG; PAM sequence: TGG
tccattaatttccttaaact

SEQ ID NO: 104012 - DNA, 20 bp, Artificial Sequence
  Description of Artificial Sequence: Synthetic oligonucleotide
  Target: LAMA2; (-) strand; PAM type: NRG; PAM sequence: GAG
caaatccttgcttttctggt

SEQ ID NO: 104013 - DNA, 20 bp, Artificial Sequence
  Description of Artificial Sequence: Synthetic oligonucleotide
  Target: LAMA2; (-) strand; PAM type: NRG; PAM sequence: TGG
tactcaaatccttgcttttc

SEQ ID NO: 104014 - DNA, 20 bp, Artificial Sequence
  Description of Artificial Sequence: Synthetic oligonucleotide
  Target: LAMA2; (-) strand; PAM type: NRG; PAM sequence: AGG
aaactgtgcatccagtccct

SEQ ID NO: 104015 - DNA, 20 bp, Artificial Sequence
  Description of Artificial Sequence: Synthetic oligonucleotide
  Target: LAMA2; (-) strand; PAM type: NRG; PAM sequence: TAG
taaactgtgcatccagtccc

SEQ ID NO: 104016 - DNA, 20 bp, Artificial Sequence
  Description of Artificial Sequence: Synthetic oligonucleotide
  Target: LAMA2; (-) strand; PAM type: NRG; PAM sequence: CAG
tttgggataaactgtgcatc

SEQ ID NO: 104017 - DNA, 20 bp, Artificial Sequence
  Description of Artificial Sequence: Synthetic oligonucleotide
  Target: LAMA2; (-) strand; PAM type: NRG; PAM sequence: GGG
ttggatttaaaaattttttt

SEQ ID NO: 104018 - DNA, 20 bp, Artificial Sequence
  Description of Artificial Sequence: Synthetic oligonucleotide
  Target: LAMA2; (-) strand; PAM type: NRG; PAM sequence: TGG
tttggatttaaaaatttttt

SEQ ID NO: 104019 - DNA, 20 bp, Artificial Sequence
  Description of Artificial Sequence: Synthetic oligonucleotide
  Target: LAMA2; (-) strand; PAM type: NRG; PAM sequence: TGG
aatggaattattttcacttt

SEQ ID NO: 104020 - DNA, 20 bp, Artificial Sequence
  Description of Artificial Sequence: Synthetic oligonucleotide
  Target: LAMA2; (-) strand; PAM type: NRG; PAM sequence: TGG
ttcttctaaaacattaataa

SEQ ID NO: 104021 - DNA, 20 bp, Artificial Sequence
  Description of Artificial Sequence: Synthetic oligonucleotide
  Target: LAMA2; (-) strand; PAM type: NRG; PAM sequence: TGG
accaaagtattataatgctc

SEQ ID NO: 104022 - DNA, 20 bp, Artificial Sequence
  Description of Artificial Sequence: Synthetic oligonucleotide
  Target: LAMA2; (-) strand; PAM type: NRG; PAM sequence: AAG
aatttggagagtattaacca

SEQ ID NO: 104023 - DNA, 20 bp, Artificial Sequence
  Description of Artificial Sequence: Synthetic oligonucleotide
  Target: LAMA2; (-) strand; PAM type: NRG; PAM sequence: GAG
catatacacaataatttgga

SEQ ID NO: 104024 - DNA, 20 bp, Artificial Sequence
  Description of Artificial Sequence: Synthetic oligonucleotide
  Target: LAMA2; (-) strand; PAM type: NRG; PAM sequence: GAG
tacatatacacaataatttg

SEQ ID NO: 104025 - DNA, 20 bp, Artificial Sequence
  Description of Artificial Sequence: Synthetic oligonucleotide
  Target: LAMA2; (-) strand; PAM type: NRG; PAM sequence: TGG
agtacatatacacaataatt

SEQ ID NO: 104026 - DNA, 20 bp, Artificial Sequence
  Description of Artificial Sequence: Synthetic oligonucleotide
  Target: LAMA2; (-) strand; PAM type: NRG; PAM sequence: CAG
atttttttctgtataatttg

SEQ ID NO: 104027 - DNA, 20 bp, Artificial Sequence
  Description of Artificial Sequence: Synthetic oligonucleotide
  Target: LAMA2; (-) strand; PAM type: NRG; PAM sequence: TGG
atgaaaggataagaatccat

SEQ ID NO: 104028 - DNA, 20 bp, Artificial Sequence
  Description of Artificial Sequence: Synthetic oligonucleotide
  Target: LAMA2; (-) strand; PAM type: NRG; PAM sequence: AAG
aaatgaaaggatgaaaggat

SEQ ID NO: 104029 - DNA, 20 bp, Artificial Sequence
  Description of Artificial Sequence: Synthetic oligonucleotide
  Target: LAMA2; (-) strand; PAM type: NRG; PAM sequence: AGG
atcacaaatgaaaggatgaa

SEQ ID NO: 104030 - DNA, 20 bp, Artificial Sequence
  Description of Artificial Sequence: Synthetic oligonucleotide
  Target: LAMA2; (-) strand; PAM type: NRG; PAM sequence: AAG
catcacaaatgaaaggatga

SEQ ID NO: 104031 - DNA, 20 bp, Artificial Sequence
  Description of Artificial Sequence: Synthetic oligonucleotide
  Target: LAMA2; (-) strand; PAM type: NRG; PAM sequence: AGG
gtgttaacatcacaaatgaa

SEQ ID NO: 104032 - DNA, 20 bp, Artificial Sequence
  Description of Artificial Sequence: Synthetic oligonucleotide
  Target: LAMA2; (-) strand; PAM type: NRG; PAM sequence: AAG
agtgttaacatcacaaatga

SEQ ID NO: 104033 - DNA, 20 bp, Artificial Sequence
  Description of Artificial Sequence: Synthetic oligonucleotide
  Target: LAMA2; (-) strand; PAM type: NRG; PAM sequence: AAG
catctaacttctcatcctgc

SEQ ID NO: 104034 - DNA, 20 bp, Artificial Sequence
  Description of Artificial Sequence: Synthetic oligonucleotide
  Target: LAMA2; (-) strand; PAM type: NRG; PAM sequence: AAG
tgcacaaatgaaggaatata

SEQ ID NO: 104035 - DNA, 20 bp, Artificial Sequence
  Description of Artificial Sequence: Synthetic oligonucleotide
  Target: LAMA2; (-) strand; PAM type: NRG; PAM sequence: AGG
tcaaggttttgcacaaatga

SEQ ID NO: 104036 - DNA, 20 bp, Artificial Sequence
  Description of Artificial Sequence: Synthetic oligonucleotide
  Target: LAMA2; (-) strand; PAM type: NRG; PAM sequence: AAG
ttcaaggttttgcacaaatg

SEQ ID NO: 104037 - DNA, 20 bp, Artificial Sequence
  Description of Artificial Sequence: Synthetic oligonucleotide
  Target: LAMA2; (-) strand; PAM type: NRG; PAM sequence: AGG
ttaatttatgaaagttttca

SEQ ID NO: 104038 - DNA, 20 bp, Artificial Sequence
  Description of Artificial Sequence: Synthetic oligonucleotide
  Target: LAMA2; (-) strand; PAM type: NRG; PAM sequence: AAG
tttaatttatgaaagttttc

SEQ ID NO: 104039 - DNA, 20 bp, Artificial Sequence
  Description of Artificial Sequence: Synthetic oligonucleotide
  Target: LAMA2; (-) strand; PAM type: NRG; PAM sequence: AAG
gcaagaggtttaatttatga

SEQ ID NO: 104040 - DNA, 20 bp, Artificial Sequence
  Description of Artificial Sequence: Synthetic oligonucleotide
  Target: LAMA2; (-) strand; PAM type: NRG; PAM sequence: AGG
gattttccaagggcagcaag

SEQ ID NO: 104041 - DNA, 20 bp, Artificial Sequence
  Description of Artificial Sequence: Synthetic oligonucleotide
  Target: LAMA2; (-) strand; PAM type: NRG; PAM sequence: GAG
tgattttccaagggcagcaa

SEQ ID NO: 104042 - DNA, 20 bp, Artificial Sequence
  Description of Artificial Sequence: Synthetic oligonucleotide
  Target: LAMA2; (-) strand; PAM type: NRG; PAM sequence: AAG
tgtgattttccaagggcagc

SEQ ID NO: 104043 - DNA, 20 bp, Artificial Sequence
  Description of Artificial Sequence: Synthetic oligonucleotide
  Target: LAMA2; (-) strand; PAM type: NRG; PAM sequence: CAG
attttgtgattttccaaggg

SEQ ID NO: 104044 - DNA, 20 bp, Artificial Sequence
  Description of Artificial Sequence: Synthetic oligonucleotide
  Target: LAMA2; (-) strand; PAM type: NRG; PAM sequence: GGG
tgcattttgtgattttccaa

SEQ ID NO: 104045 - DNA, 20 bp, Artificial Sequence
  Description of Artificial Sequence: Synthetic oligonucleotide
  Target: LAMA2; (-) strand; PAM type: NRG; PAM sequence: AGG
ctgcattttgtgattttcca

SEQ ID NO: 104046 - DNA, 20 bp, Artificial Sequence
  Description of Artificial Sequence: Synthetic oligonucleotide
  Target: LAMA2; (-) strand; PAM type: NRG; PAM sequence: AAG
actgcattttgtgattttcc

SEQ ID NO: 104047 - DNA, 20 bp, Artificial Sequence
  Description of Artificial Sequence: Synthetic oligonucleotide
  Target: LAMA2; (-) strand; PAM type: NRG; PAM sequence: AGG
aacatggtaaaagacgctag

SEQ ID NO: 104048 - DNA, 20 bp, Artificial Sequence
  Description of Artificial Sequence: Synthetic oligonucleotide
  Target: LAMA2; (-) strand; PAM type: NRG; PAM sequence: GAG
gaacatggtaaaagacgcta

SEQ ID NO: 104049 - DNA, 20 bp, Artificial Sequence
  Description of Artificial Sequence: Synthetic oligonucleotide
  Target: LAMA2; (-) strand; PAM type: NRG; PAM sequence: TAG
cagaacatggtaaaagacgc

SEQ ID NO: 104050 - DNA, 20 bp, Artificial Sequence
  Description of Artificial Sequence: Synthetic oligonucleotide
  Target: LAMA2; (-) strand; PAM type: NRG; PAM sequence: AAG
gccagcacagaacatggtaa

SEQ ID NO: 104051 - DNA, 20 bp, Artificial Sequence
  Description of Artificial Sequence: Synthetic oligonucleotide
  Target: LAMA2; (-) strand; PAM type: NRG; PAM sequence: TGG
tgtctggccagcacagaaca

SEQ ID NO: 104052 - DNA, 20 bp, Artificial Sequence
  Description of Artificial Sequence: Synthetic oligonucleotide
  Target: LAMA2; (-) strand; PAM type: NRG; PAM sequence: CAG
aactaaatgtctggccagca

SEQ ID NO: 104053 - DNA, 20 bp, Artificial Sequence
  Description of Artificial Sequence: Synthetic oligonucleotide
  Target: LAMA2; (-) strand; PAM type: NRG; PAM sequence: CAG
aatagaactaaatgtctggc

SEQ ID NO: 104054 - DNA, 20 bp, Artificial Sequence
  Description of Artificial Sequence: Synthetic oligonucleotide
  Target: LAMA2; (-) strand; PAM type: NRG; PAM sequence: TGG
tttaaatagaactaaatgtc

SEQ ID NO: 104055 - DNA, 20 bp, Artificial Sequence
  Description of Artificial Sequence: Synthetic oligonucleotide
  Target: LAMA2; (-) strand; PAM type: NRG; PAM sequence: TAG
atacgtaagtggattttaaa

SEQ ID NO: 104056 - DNA, 20 bp, Artificial Sequence
  Description of Artificial Sequence: Synthetic oligonucleotide
  Target: LAMA2; (-) strand; PAM type: NRG; PAM sequence: TGG
atatttaaaatatacgtaag

SEQ ID NO: 104057 - DNA, 20 bp, Artificial Sequence
  Description of Artificial Sequence: Synthetic oligonucleotide
  Target: LAMA2; (-) strand; PAM type: NRG; PAM sequence: AAG
ttaatatttaaaatatacgt

SEQ ID NO: 104058 - DNA, 20 bp, Artificial Sequence
  Description of Artificial Sequence: Synthetic oligonucleotide
  Target: LAMA2; (-) strand; PAM type: NRG; PAM sequence: GAG
ttgcatactaggcatggcca

SEQ ID NO: 104059 - DNA, 20 bp, Artificial Sequence
  Description of Artificial Sequence: Synthetic oligonucleotide
  Target: LAMA2; (-) strand; PAM type: NRG; PAM sequence: CAG
gcttgcatactaggcatggc

SEQ ID NO: 104060 - DNA, 20 bp, Artificial Sequence
  Description of Artificial Sequence: Synthetic oligonucleotide
  Target: LAMA2; (-) strand; PAM type: NRG; PAM sequence: TGG
gagtgcttgcatactaggca

SEQ ID NO: 104061 - DNA, 20 bp, Artificial Sequence
  Description of Artificial Sequence: Synthetic oligonucleotide
  Target: LAMA2; (-) strand; PAM type: NRG; PAM sequence: AGG
taccagagtgcttgcatact

SEQ ID NO: 104062 - DNA, 20 bp, Artificial Sequence
  Description of Artificial Sequence: Synthetic oligonucleotide
  Target: LAMA2; (-) strand; PAM type: NRG; PAM sequence: TAG
gtaccagagtgcttgcatac

SEQ ID NO: 104063 - DNA, 20 bp, Artificial Sequence
  Description of Artificial Sequence: Synthetic oligonucleotide
  Target: LAMA2; (-) strand; PAM type: NRG; PAM sequence: GAG
cactctagaatcttgtacca

SEQ ID NO: 104064 - DNA, 20 bp, Artificial Sequence
  Description of Artificial Sequence: Synthetic oligonucleotide
  Target: LAMA2; (-) strand; PAM type: NRG; PAM sequence: CAG
aacactctagaatcttgtac

SEQ ID NO: 104065 - DNA, 20 bp, Artificial Sequence
  Description of Artificial Sequence: Synthetic oligonucleotide
  Target: LAMA2; (-) strand; PAM type: NRG; PAM sequence: TAG
ttggcagcatattaacactc

SEQ ID NO: 104066 - DNA, 20 bp, Artificial Sequence
  Description of Artificial Sequence: Synthetic oligonucleotide
  Target: LAMA2; (-) strand; PAM type: NRG; PAM sequence: CAG
ttgaataaggtccaagttgg

SEQ ID NO: 104067 - DNA, 20 bp, Artificial Sequence
  Description of Artificial Sequence: Synthetic oligonucleotide
  Target: LAMA2; (-) strand; PAM type: NRG; PAM sequence: TGG
gttttgaataaggtccaagt

SEQ ID NO: 104068 - DNA, 20 bp, Artificial Sequence
  Description of Artificial Sequence: Synthetic oligonucleotide
  Target: LAMA2; (-) strand; PAM type: NRG; PAM sequence: AAG
tatagttttgaataaggtcc

SEQ ID NO: 104069 - DNA, 20 bp, Artificial Sequence
  Description of Artificial Sequence: Synthetic oligonucleotide
  Target: LAMA2; (-) strand; PAM type: NRG; PAM sequence: AGG
tctcaatatagttttgaata

SEQ ID NO: 104070 - DNA, 20 bp, Artificial Sequence
  Description of Artificial Sequence: Synthetic oligonucleotide
  Target: LAMA2; (-) strand; PAM type: NRG; PAM sequence: AAG
gtctcaatatagttttgaat

SEQ ID NO: 104071 - DNA, 20 bp, Artificial Sequence
  Description of Artificial Sequence: Synthetic oligonucleotide
  Target: LAMA2; (-) strand; PAM type: NRG; PAM sequence: TAG
aatcacaaactgtctcaata

SEQ ID NO: 104072 - DNA, 20 bp, Artificial Sequence
  Description of Artificial Sequence: Synthetic oligonucleotide
  Target: LAMA2; (-) strand; PAM type: NRG; PAM sequence: GAG
taactacagataatgaatta

SEQ ID NO: 104073 - DNA, 20 bp, Artificial Sequence
  Description of Artificial Sequence: Synthetic oligonucleotide
  Target: LAMA2; (-) strand; PAM type: NRG; PAM sequence: TAG
tctaactacagataatgaat

SEQ ID NO: 104074 - DNA, 20 bp, Artificial Sequence
  Description of Artificial Sequence: Synthetic oligonucleotide
  Target: LAMA2; (-) strand; PAM type: NRG; PAM sequence: CAG
agatatggatagtctaacta

SEQ ID NO: 104075 - DNA, 20 bp, Artificial Sequence
  Description of Artificial Sequence: Synthetic oligonucleotide
  Target: LAMA2; (-) strand; PAM type: NRG; PAM sequence: TAG
ttttactaaaaagatatgga

SEQ ID NO: 104076 - DNA, 20 bp, Artificial Sequence
  Description of Artificial Sequence: Synthetic oligonucleotide
  Target: LAMA2; (-) strand; PAM type: NRG; PAM sequence: TGG
tctcttttactaaaaagata

SEQ ID NO: 104077 - DNA, 20 bp, Artificial Sequence
  Description of Artificial Sequence: Synthetic oligonucleotide
  Target: LAMA2; (-) strand; PAM type: NRG; PAM sequence: AAG
ccttcttctcttttactaaa

SEQ ID NO: 104078 - DNA, 20 bp, Artificial Sequence
  Description of Artificial Sequence: Synthetic oligonucleotide
  Target: LAMA2; (-) strand; PAM type: NRG; PAM sequence: AAG
tgttgcatatgctaatatat

SEQ ID NO: 104079 - DNA, 20 bp, Artificial Sequence
  Description of Artificial Sequence: Synthetic oligonucleotide
  Target: LAMA2; (-) strand; PAM type: NRG; PAM sequence: AGG
aaggtttagagtaccctgaa

SEQ ID NO: 104080 - DNA, 20 bp, Artificial Sequence
  Description of Artificial Sequence: Synthetic oligonucleotide
  Target: LAMA2; (-) strand; PAM type: NRG; PAM sequence: AAG
caaggtttagagtaccctga

SEQ ID NO: 104081 - DNA, 20 bp, Artificial Sequence
  Description of Artificial Sequence: Synthetic oligonucleotide
  Target: LAMA2; (-) strand; PAM type: NRG; PAM sequence: GAG
tttaaaaattacaaggttta

SEQ ID NO: 104082 - DNA, 20 bp, Artificial Sequence
  Description of Artificial Sequence: Synthetic oligonucleotide
  Target: LAMA2; (-) strand; PAM type: NRG; PAM sequence: TAG
tctttaaaaattacaaggtt

SEQ ID NO: 104083 - DNA, 20 bp, Artificial Sequence
  Description of Artificial Sequence: Synthetic oligonucleotide
  Target: LAMA2; (-) strand; PAM type: NRG; PAM sequence: AGG
ttgtttctttaaaaattaca

SEQ ID NO: 104084 - DNA, 20 bp, Artificial Sequence
  Description of Artificial Sequence: Synthetic oligonucleotide
  Target: LAMA2; (-) strand; PAM type: NRG; PAM sequence: AAG
attgtttctttaaaaattac

SEQ ID NO: 104085 - DNA, 20 bp, Artificial Sequence
  Description of Artificial Sequence: Synthetic oligonucleotide
  Target: LAMA2; (-) strand; PAM type: NRG; PAM sequence: TGG
catatttagtcaaacaaaaa

SEQ ID NO: 104086 - DNA, 20 bp, Artificial Sequence
  Description of Artificial Sequence: Synthetic oligonucleotide
  Target: LAMA2; (-) strand; PAM type: NRG; PAM sequence: TAG
cggttaaaatataccatatt

SEQ ID NO: 104087 - DNA, 20 bp, Artificial Sequence
  Description of Artificial Sequence: Synthetic oligonucleotide
  Target: LAMA2; (-) strand; PAM type: NRG; PAM sequence: CGG
gaatgcattcaacgtgttca

SEQ ID NO: 104088 - DNA, 20 bp, Artificial Sequence
  Description of Artificial Sequence: Synthetic oligonucleotide
  Target: LAMA2; (-) strand; PAM type: NRG; PAM sequence: TGG
taaaatatcatttgacacac

SEQ ID NO: 104089 - DNA, 20 bp, Artificial Sequence
  Description of Artificial Sequence: Synthetic oligonucleotide
  Target: LAMA2; (-) strand; PAM type: NRG; PAM sequence: AGG
acctcccaaagagtattctc

SEQ ID NO: 104090 - DNA, 20 bp, Artificial Sequence
  Description of Artificial Sequence: Synthetic oligonucleotide
  Target: LAMA2; (-) strand; PAM type: NRG; PAM sequence: CAG
cacctcccaaagagtattct

SEQ ID NO: 104091 - DNA, 20 bp, Artificial Sequence
  Description of Artificial Sequence: Synthetic oligonucleotide
  Target: LAMA2; (-) strand; PAM type: NRG; PAM sequence: GAG
aaacagccccacctcccaaa

SEQ ID NO: 104092 - DNA, 20 bp, Artificial Sequence
  Description of Artificial Sequence: Synthetic oligonucleotide
  Target: LAMA2; (-) strand; PAM type: NRG; PAM sequence: AAG
caaaacagccccacctccca

SEQ ID NO: 104093 - DNA, 20 bp, Artificial Sequence
  Description of Artificial Sequence: Synthetic oligonucleotide
  Target: LAMA2; (-) strand; PAM type: NRG; PAM sequence: CAG
agtaaaacagaaccccaaaa

SEQ ID NO: 104094 - DNA, 20 bp, Artificial Sequence
  Description of Artificial Sequence: Synthetic oligonucleotide
  Target: LAMA2; (-) strand; PAM type: NRG; PAM sequence: CAG
gcagtgtcagcaaagtaaaa

SEQ ID NO: 104095 - DNA, 20 bp, Artificial Sequence
  Description of Artificial Sequence: Synthetic oligonucleotide
  Target: LAMA2; (-) strand; PAM type: NRG; PAM sequence: AAG
atcatgcagcagtgtcagca

SEQ ID NO: 104096 - DNA, 20 bp, Artificial Sequence
  Description of Artificial Sequence: Synthetic oligonucleotide
  Target: LAMA2; (-) strand; PAM type: NRG; PAM sequence: CAG
acagaatcatgcagcagtgt

SEQ ID NO: 104097 - DNA, 20 bp, Artificial Sequence
  Description of Artificial Sequence: Synthetic oligonucleotide
  Target: LAMA2; (-) strand; PAM type: NRG; PAM sequence: CAG
ttaatcacagaatcatgcag

SEQ ID NO: 104098 - DNA, 20 bp, Artificial Sequence
  Description of Artificial Sequence: Synthetic oligonucleotide
  Target: LAMA2; (-) strand; PAM type: NRG; PAM sequence: CAG
ttgttaatcacagaatcatg

SEQ ID NO: 104099 - DNA, 20 bp, Artificial Sequence
  Description of Artificial Sequence: Synthetic oligonucleotide
  Target: LAMA2; (-) strand; PAM type: NRG; PAM sequence: CAG
agaaatatgcttgttaatca

SEQ ID NO: 104100 - DNA, 20 bp, Artificial Sequence
  Description of Artificial Sequence: Synthetic oligonucleotide
  Target: LAMA2; (-) strand; PAM type: NRG; PAM sequence: CAG
acttttccatatgatagcac

SEQ ID NO: 104101 - DNA, 20 bp, Artificial Sequence
  Description of Artificial Sequence: Synthetic oligonucleotide
  Target: LAMA2; (-) strand; PAM type: NRG; PAM sequence: TAG
atgctaacttttccatatga

SEQ ID NO: 104102 - DNA, 20 bp, Artificial Sequence
  Description of Artificial Sequence: Synthetic oligonucleotide
  Target: LAMA2; (-) strand; PAM type: NRG; PAM sequence: GAG
atgccaataaaatgttaagg

SEQ ID NO: 104103 - DNA, 20 bp, Artificial Sequence
  Description of Artificial Sequence: Synthetic oligonucleotide
  Target: LAMA2; (-) strand; PAM type: NRG; PAM sequence: GGG
agatgccaataaaatgttaa

SEQ ID NO: 104104 - DNA, 20 bp, Artificial Sequence
  Description of Artificial Sequence: Synthetic oligonucleotide
  Target: LAMA2; (-) strand; PAM type: NRG; PAM sequence: AGG
aagatgccaataaaatgtta

SEQ ID NO: 104105 - DNA, 20 bp, Artificial Sequence
  Description of Artificial Sequence: Synthetic oligonucleotide
  Target: LAMA2; (-) strand; PAM type: NRG; PAM sequence: AAG
aaagatgccaataaaatgtt

SEQ ID NO: 104106 - DNA, 20 bp, Artificial Sequence
  Description of Artificial Sequence: Synthetic oligonucleotide
  Target: LAMA2; (-) strand; PAM type: NRG; PAM sequence: AAG
gcctgttttataacacatca

SEQ ID NO: 104107 - DNA, 20 bp, Artificial Sequence
  Description of Artificial Sequence: Synthetic oligonucleotide
  Target: LAMA2; (-) strand; PAM type: NRG; PAM sequence: TAG
agaaatgcttagctactcag

SEQ ID NO: 104108 - DNA, 20 bp, Artificial Sequence
  Description of Artificial Sequence: Synthetic oligonucleotide
  Target: LAMA2; (-) strand; PAM type: NRG; PAM sequence: CAG
gggagaaatgcttagctact

SEQ ID NO: 104109 - DNA, 20 bp, Artificial Sequence
  Description of Artificial Sequence: Synthetic oligonucleotide
  Target: LAMA2; (-) strand; PAM type: NRG; PAM sequence: TAG
aacaaagagggagaaatgct

SEQ ID NO: 104110 - DNA, 20 bp, Artificial Sequence
  Description of Artificial Sequence: Synthetic oligonucleotide
  Target: LAMA2; (-) strand; PAM type: NRG; PAM sequence: GAG
taattaaagaaacaaagagg

SEQ ID NO: 104111 - DNA, 20 bp, Artificial Sequence
  Description of Artificial Sequence: Synthetic oligonucleotide
  Target: LAMA2; (-) strand; PAM type: NRG; PAM sequence: GGG
gttaattaaagaaacaaaga

SEQ ID NO: 104112 - DNA, 20 bp, Artificial Sequence
  Description of Artificial Sequence: Synthetic oligonucleotide
  Target: LAMA2; (-) strand; PAM type: NRG; PAM sequence: AGG
cgttaattaaagaaacaaag

SEQ ID NO: 104113 - DNA, 20 bp, Artificial Sequence
  Description of Artificial Sequence: Synthetic oligonucleotide
  Target: LAMA2; (-) strand; PAM type: NRG; PAM sequence: GAG
acgttaattaaagaaacaaa

SEQ ID NO: 104114 - DNA, 20 bp, Artificial Sequence
  Description of Artificial Sequence: Synthetic oligonucleotide
  Target: LAMA2; (-) strand; PAM type: NRG; PAM sequence: AAG
atacgttaattaaagaaaca

SEQ ID NO: 104115 - DNA, 20 bp, Artificial Sequence
  Description of Artificial Sequence: Synthetic oligonucleotide
  Target: LAMA2; (-) strand; PAM type: NRG; PAM sequence: AAG
ttagatcaatacgttaatta

SEQ ID NO: 104116 - DNA, 20 bp, Artificial Sequence
  Description of Artificial Sequence: Synthetic oligonucleotide
  Target: LAMA2; (-) strand; PAM type: NRG; PAM sequence: TAG
ttgatcctatagatttgttt

SEQ ID NO: 104117 - DNA, 20 bp, Artificial Sequence
  Description of Artificial Sequence: Synthetic oligonucleotide
  Target: LAMA2; (-) strand; PAM type: NRG; PAM sequence: TAG
cctcaataagcttgatccta

SEQ ID NO: 104118 - DNA, 20 bp, Artificial Sequence
  Description of Artificial Sequence: Synthetic oligonucleotide
  Target: LAMA2; (-) strand; PAM type: NRG; PAM sequence: AAG
aacaggctgtctgcctcaat

SEQ ID NO: 104119 - DNA, 20 bp, Artificial Sequence
  Description of Artificial Sequence: Synthetic oligonucleotide
  Target: LAMA2; (-) strand; PAM type: NRG; PAM sequence: AGG
tgatctcttgagagacaaac

SEQ ID NO: 104120 - DNA, 20 bp, Artificial Sequence
  Description of Artificial Sequence: Synthetic oligonucleotide
  Target: LAMA2; (-) strand; PAM type: NRG; PAM sequence: CAG
atgatctcttgagagacaaa

SEQ ID NO: 104121 - DNA, 20 bp, Artificial Sequence
  Description of Artificial Sequence: Synthetic oligonucleotide
  Target: LAMA2; (-) strand; PAM type: NRG; PAM sequence: GAG
gtgcagcaatgatctcttga

SEQ ID NO: 104122 - DNA, 20 bp, Artificial Sequence
  Description of Artificial Sequence: Synthetic oligonucleotide
  Target: LAMA2; (-) strand; PAM type: NRG; PAM sequence: GAG
gagtgcagcaatgatctctt

SEQ ID NO: 104123 - DNA, 20 bp, Artificial Sequence
  Description of Artificial Sequence: Synthetic oligonucleotide
  Target: LAMA2; (-) strand; PAM type: NRG; PAM sequence: CAG
ctgaaaaagtgtgtggagtg

SEQ ID NO: 104124 - DNA, 20 bp, Artificial Sequence
  Description of Artificial Sequence: Synthetic oligonucleotide
  Target: LAMA2; (-) strand; PAM type: NRG; PAM sequence: GAG
atttactgaaaaagtgtgtg

SEQ ID NO: 104125 - DNA, 20 bp, Artificial Sequence
  Description of Artificial Sequence: Synthetic oligonucleotide
  Target: LAMA2; (-) strand; PAM type: NRG; PAM sequence: TGG
ttatttactgaaaaagtgtg

SEQ ID NO: 104126 - DNA, 20 bp, Artificial Sequence
  Description of Artificial Sequence: Synthetic oligonucleotide
  Target: LAMA2; (-) strand; PAM type: NRG; PAM sequence: AAG
ccatattttatttactgaaa

SEQ ID NO: 104127 - DNA, 20 bp, Artificial Sequence
  Description of Artificial Sequence: Synthetic oligonucleotide
  Target: LAMA2; (-) strand; PAM type: NRG; PAM sequence: CAG
tcttcagcctccacatgttg

SEQ ID NO: 104128 - DNA, 20 bp, Artificial Sequence
  Description of Artificial Sequence: Synthetic oligonucleotide
  Target: LAMA2; (-) strand; PAM type: NRG; PAM sequence: CAG
aaagtccttaatggaatctt

SEQ ID NO: 104129 - DNA, 20 bp, Artificial Sequence
  Description of Artificial Sequence: Synthetic oligonucleotide
  Target: LAMA2; (-) strand; PAM type: NRG; PAM sequence: TGG
cagatgccaaaagtccttaa

SEQ ID NO: 104130 - DNA, 20 bp, Artificial Sequence
  Description of Artificial Sequence: Synthetic oligonucleotide
  Target: LAMA2; (-) strand; PAM type: NRG; PAM sequence: AAG
ctttaaggtacagatgccaa

SEQ ID NO: 104131 - DNA, 20 bp, Artificial Sequence
  Description of Artificial Sequence: Synthetic oligonucleotide
  Target: LAMA2; (-) strand; PAM type: NRG; PAM sequence: CAG
tttgaaatatctttaaggta

SEQ ID NO: 104132 - DNA, 20 bp, Artificial Sequence
  Description of Artificial Sequence: Synthetic oligonucleotide
  Target: LAMA2; (-) strand; PAM type: NRG; PAM sequence: AGG
ttatttttgaaatatcttta

SEQ ID NO: 104133 - DNA, 20 bp, Artificial Sequence
  Description of Artificial Sequence: Synthetic oligonucleotide
  Target: LAMA2; (-) strand; PAM type: NRG; PAM sequence: AAG
attatttttgaaatatcttt

SEQ ID NO: 104134 - DNA, 20 bp, Artificial Sequence
  Description of Artificial Sequence: Synthetic oligonucleotide
  Target: LAMA2; (-) strand; PAM type: NRG; PAM sequence: AAG
atggcagagaagaagcaata

SEQ ID NO: 104135 - DNA, 20 bp, Artificial Sequence
  Description of Artificial Sequence: Synthetic oligonucleotide
  Target: LAMA2; (-) strand; PAM type: NRG; PAM sequence: AAG
tatatgctatggcagagaag

SEQ ID NO: 104136 - DNA, 20 bp, Artificial Sequence
  Description of Artificial Sequence: Synthetic oligonucleotide
  Target: LAMA2; (-) strand; PAM type: NRG; PAM sequence: AAG
tgttatatgctatggcagag

SEQ ID NO: 104137 - DNA, 20 bp, Artificial Sequence
  Description of Artificial Sequence: Synthetic oligonucleotide
  Target: LAMA2; (-) strand; PAM type: NRG; PAM sequence: GAG
gcttgttatatgctatggca

SEQ ID NO: 104138 - DNA, 20 bp, Artificial Sequence
  Description of Artificial Sequence: Synthetic oligonucleotide
  Target: LAMA2; (-) strand; PAM type: NRG; PAM sequence: CAG
acgcttgttatatgctatgg

SEQ ID NO: 104139 - DNA, 20 bp, Artificial Sequence
  Description of Artificial Sequence: Synthetic oligonucleotide
  Target: LAMA2; (-) strand; PAM type: NRG; PAM sequence: TGG
aaaacgcttgttatatgcta

SEQ ID NO: 104140 - DNA, 20 bp, Artificial Sequence
  Description of Artificial Sequence: Synthetic oligonucleotide
  Target: LAMA2; (-) strand; PAM type: NRG; PAM sequence: TGG
ggaaatcagagagctgtatt

SEQ ID NO: 104141 - DNA, 20 bp, Artificial Sequence
  Description of Artificial Sequence: Synthetic oligonucleotide
  Target: LAMA2; (-) strand; PAM type: NRG; PAM sequence: GAG
tccattaaatggaaatcaga

SEQ ID NO: 104142 - DNA, 20 bp, Artificial Sequence
  Description of Artificial Sequence: Synthetic oligonucleotide
  Target: LAMA2; (-) strand; PAM type: NRG; PAM sequence: GAG
cttccattaaatggaaatca

SEQ ID NO: 104143 - DNA, 20 bp, Artificial Sequence
  Description of Artificial Sequence: Synthetic oligonucleotide
  Target: LAMA2; (-) strand; PAM type: NRG; PAM sequence: CAG
ttcttccattaaatggaaat

SEQ ID NO: 104144 - DNA, 20 bp, Artificial Sequence
  Description of Artificial Sequence: Synthetic oligonucleotide
  Target: LAMA2; (-) strand; PAM type: NRG; PAM sequence: TGG
ttattacttcttccattaaa

SEQ ID NO: 104145 - DNA, 20 bp, Artificial Sequence
  Description of Artificial Sequence: Synthetic oligonucleotide
  Target: LAMA2; (-) strand; PAM type: NRG; PAM sequence: CAG
gcaatcgatgaattattgat

SEQ ID NO: 104146 - DNA, 20 bp, Artificial Sequence
  Description of Artificial Sequence: Synthetic oligonucleotide
  Target: LAMA2; (-) strand; PAM type: NRG; PAM sequence: CGG
caaatattactttgagccaa

SEQ ID NO: 104147 - DNA, 20 bp, Artificial Sequence
  Description of Artificial Sequence: Synthetic oligonucleotide
  Target: LAMA2; (-) strand; PAM type: NRG; PAM sequence: GAG
tttctttcaaatattacttt

SEQ ID NO: 104148 - DNA, 20 bp, Artificial Sequence
  Description of Artificial Sequence: Synthetic oligonucleotide
  Target: LAMA2; (-) strand; PAM type: NRG; PAM sequence: TGG
acagctagataagctcccac

SEQ ID NO: 104149 - DNA, 20 bp, Artificial Sequence
  Description of Artificial Sequence: Synthetic oligonucleotide
  Target: LAMA2; (-) strand; PAM type: NRG; PAM sequence: AAG
tgatgaagctacagctagat

SEQ ID NO: 104150 - DNA, 20 bp, Artificial Sequence
  Description of Artificial Sequence: Synthetic oligonucleotide
  Target: LAMA2; (-) strand; PAM type: NRG; PAM sequence: TAG
agagatgatgaagctacagc

SEQ ID NO: 104151 - DNA, 20 bp, Artificial Sequence
  Description of Artificial Sequence: Synthetic oligonucleotide
  Target: LAMA2; (-) strand; PAM type: NRG; PAM sequence: CAG
taatagagatgatgaagcta

SEQ ID NO: 104152 - DNA, 20 bp, Artificial Sequence
  Description of Artificial Sequence: Synthetic oligonucleotide
  Target: LAMA2; (-) strand; PAM type: NRG; PAM sequence: AAG
cataattaatagagatgatg

SEQ ID NO: 104153 - DNA, 20 bp, Artificial Sequence
  Description of Artificial Sequence: Synthetic oligonucleotide
  Target: LAMA2; (-) strand; PAM type: NRG; PAM sequence: GAG
cgggaaacacataattaata

SEQ ID NO: 104154 - DNA, 20 bp, Artificial Sequence
  Description of Artificial Sequence: Synthetic oligonucleotide
  Target: LAMA2; (-) strand; PAM type: NRG; PAM sequence: TAG
ttcgggaaacacataattaa

SEQ ID NO: 104155 - DNA, 20 bp, Artificial Sequence
  Description of Artificial Sequence: Synthetic oligonucleotide
  Target: LAMA2; (-) strand; PAM type: NRG; PAM sequence: GGG
tagcctaatgatccaaattc

SEQ ID NO: 104156 - DNA, 20 bp, Artificial Sequence
  Description of Artificial Sequence: Synthetic oligonucleotide
  Target: LAMA2; (-) strand; PAM type: NRG; PAM sequence: CGG
gtagcctaatgatccaaatt

SEQ ID NO: 104157 - DNA, 20 bp, Artificial Sequence
  Description of Artificial Sequence: Synthetic oligonucleotide
  Target: LAMA2; (-) strand; PAM type: NRG; PAM sequence: TAG
gccatctgctgtcactttgg

SEQ ID NO: 104158 - DNA, 20 bp, Artificial Sequence
  Description of Artificial Sequence: Synthetic oligonucleotide
  Target: LAMA2; (-) strand; PAM type: NRG; PAM sequence: TGG
ctcgccatctgctgtcactt

SEQ ID NO: 104159 - DNA, 20 bp, Artificial Sequence
  Description of Artificial Sequence: Synthetic oligonucleotide
  Target: LAMA2; (-) strand; PAM type: NRG; PAM sequence: CGG
ggtcctctcagcatcctgtc

SEQ ID NO: 104160 - DNA, 20 bp, Artificial Sequence
  Description of Artificial Sequence: Synthetic oligonucleotide
  Target: LAMA2; (-) strand; PAM type: NRG; PAM sequence: CAG
tgctcttgtgttggtcctct

SEQ ID NO: 104161 - DNA, 20 bp, Artificial Sequence
  Description of Artificial Sequence: Synthetic oligonucleotide
  Target: LAMA2; (-) strand; PAM type: NRG; PAM sequence: TGG
cagggactttgctcttgtgt

SEQ ID NO: 104162 - DNA, 20 bp, Artificial Sequence
  Description of Artificial Sequence: Synthetic oligonucleotide
  Target: LAMA2; (-) strand; PAM type: NRG; PAM sequence: GGG
ctccttaatgaattctccca

SEQ ID NO: 104163 - DNA, 20 bp, Artificial Sequence
  Description of Artificial Sequence: Synthetic oligonucleotide
  Target: LAMA2; (-) strand; PAM type: NRG; PAM sequence: AGG
gctccttaatgaattctccc

SEQ ID NO: 104164 - DNA, 20 bp, Artificial Sequence
  Description of Artificial Sequence: Synthetic oligonucleotide
  Target: LAMA2; (-) strand; PAM type: NRG; PAM sequence: CAG
agctccttaatgaattctcc

SEQ ID NO: 104165 - DNA, 20 bp, Artificial Sequence
  Description of Artificial Sequence: Synthetic oligonucleotide
  Target: LAMA2; (-) strand; PAM type: NRG; PAM sequence: AAG
ataccttctgcatcccgggc

SEQ ID NO: 104166 - DNA, 20 bp, Artificial Sequence
  Description of Artificial Sequence: Synthetic oligonucleotide
  Target: LAMA2; (-) strand; PAM type: NRG; PAM sequence: GGG
tctaataccttctgcatccc

SEQ ID NO: 104167 - DNA, 20 bp, Artificial Sequence
  Description of Artificial Sequence: Synthetic oligonucleotide
  Target: LAMA2; (-) strand; PAM type: NRG; PAM sequence: CGG
ttctaataccttctgcatcc

SEQ ID NO: 104168 - DNA, 20 bp, Artificial Sequence
  Description of Artificial Sequence: Synthetic oligonucleotide
  Target: LAMA2; (-) strand; PAM type: NRG; PAM sequence: GAG
tttctgtgtttttctgttgg

SEQ ID NO: 104169 - DNA, 20 bp, Artificial Sequence
  Description of Artificial Sequence: Synthetic oligonucleotide
  Target: LAMA2; (-) strand; PAM type: NRG; PAM sequence: GGG
cctttctgtgtttttctgtt

SEQ ID NO: 104170 - DNA, 20 bp, Artificial Sequence
  Description of Artificial Sequence: Synthetic oligonucleotide
  Target: LAMA2; (-) strand; PAM type: NRG; PAM sequence: TGG
ccctttctgtgtttttctgt

SEQ ID NO: 104171 - DNA, 20 bp, Artificial Sequence
  Description of Artificial Sequence: Synthetic oligonucleotide
  Target: LAMA2; (-) strand; PAM type: NRG; PAM sequence: CAG
acttataacaagagaaattc

SEQ ID NO: 104172 - DNA, 20 bp, Artificial Sequence
  Description of Artificial Sequence: Synthetic oligonucleotide
  Target: LAMA2; (-) strand; PAM type: NRG; PAM sequence: GAG
acagatgtcacttataacaa

SEQ ID NO: 104173 - DNA, 20 bp, Artificial Sequence
  Description of Artificial Sequence: Synthetic oligonucleotide
  Target: LAMA2; (-) strand; PAM type: NRG; PAM sequence: AAG
ttacagatgtcacttataac

SEQ ID NO: 104174 - DNA, 20 bp, Artificial Sequence
  Description of Artificial Sequence: Synthetic oligonucleotide
  Target: LAMA2; (-) strand; PAM type: NRG; PAM sequence: CAG
aaactctacctttgatttta

SEQ ID NO: 104175 - DNA, 20 bp, Artificial Sequence
  Description of Artificial Sequence: Synthetic oligonucleotide
  Target: LAMA2; (-) strand; PAM type: NRG; PAM sequence: CAG
tgcaggtcacaggttctcag

SEQ ID NO: 104176 - DNA, 20 bp, Artificial Sequence
  Description of Artificial Sequence: Synthetic oligonucleotide
  Target: LAMA2; (-) strand; PAM type: NRG; PAM sequence: CAG
cactgcaggtcacaggttct

SEQ ID NO: 104177 - DNA, 20 bp, Artificial Sequence
  Description of Artificial Sequence: Synthetic oligonucleotide
  Target: LAMA2; (-) strand; PAM type: NRG; PAM sequence: AGG
aatttaacactgcaggtcac

SEQ ID NO: 104178 - DNA, 20 bp, Artificial Sequence
  Description of Artificial Sequence: Synthetic oligonucleotide
  Target: LAMA2; (-) strand; PAM type: NRG; PAM sequence: CAG
taatttaacactgcaggtca

SEQ ID NO: 104179 - DNA, 20 bp, Artificial Sequence
  Description of Artificial Sequence: Synthetic oligonucleotide
  Target: LAMA2; (-) strand; PAM type: NRG; PAM sequence: AGG
tgtcgctaatttaacactgc

SEQ ID NO: 104180 - DNA, 20 bp, Artificial Sequence
  Description of Artificial Sequence: Synthetic oligonucleotide
  Target: LAMA2; (-) strand; PAM type: NRG; PAM sequence: CAG
ttgtcgctaatttaacactg

SEQ ID NO: 104181 - DNA, 20 bp, Artificial Sequence
  Description of Artificial Sequence: Synthetic oligonucleotide
  Target: LAMA2; (-) strand; PAM type: NRG; PAM sequence: AAG
aattataatagccatgttac

SEQ ID NO: 104182 - DNA, 20 bp, Artificial Sequence
  Description of Artificial Sequence: Synthetic oligonucleotide
  Target: LAMA2; (-) strand; PAM type: NRG; PAM sequence: TAG
ctattcttatgtaattataa

SEQ ID NO: 104183 - DNA, 20 bp, Artificial Sequence
  Description of Artificial Sequence: Synthetic oligonucleotide
  Target: LAMA2; (-) strand; PAM type: NRG; PAM sequence: AAG
taaaaacaataacaaaacaa

SEQ ID NO: 104184 - DNA, 20 bp, Artificial Sequence
  Description of Artificial Sequence: Synthetic oligonucleotide
  Target: LAMA2; (-) strand; PAM type: NRG; PAM sequence: TAG
atcaagtggaatgatgacat

SEQ ID NO: 104185 - DNA, 20 bp, Artificial Sequence
  Description of Artificial Sequence: Synthetic oligonucleotide
  Target: LAMA2; (-) strand; PAM type: NRG; PAM sequence: TGG
tgctgctttaatgtatcaag

SEQ ID NO: 104186 - DNA, 20 bp, Artificial Sequence
  Description of Artificial Sequence: Synthetic oligonucleotide
  Target: LAMA2; (-) strand; PAM type: NRG; PAM sequence: AAG
aagtgctgctttaatgtatc

SEQ ID NO: 104187 - DNA, 20 bp, Artificial Sequence
  Description of Artificial Sequence: Synthetic oligonucleotide
  Target: LAMA2; (-) strand; PAM type: NRG; PAM sequence: AAG
aaagccatttggagaaacta

SEQ ID NO: 104188 - DNA, 20 bp, Artificial Sequence
  Description of Artificial Sequence: Synthetic oligonucleotide
  Target: LAMA2; (-) strand; PAM type: NRG; PAM sequence: GAG
agtatttgaaaagccatttg

SEQ ID NO: 104189 - DNA, 20 bp, Artificial Sequence
  Description of Artificial Sequence: Synthetic oligonucleotide
  Target: LAMA2; (-) strand; PAM type: NRG; PAM sequence: TGG
ccagtatttgaaaagccatt

SEQ ID NO: 104190 - DNA, 20 bp, Artificial Sequence
  Description of Artificial Sequence: Synthetic oligonucleotide
  Target: LAMA2; (-) strand; PAM type: NRG; PAM sequence: AAG
accagtccccagtatttgaa

SEQ ID NO: 104191 - DNA, 20 bp, Artificial Sequence
  Description of Artificial Sequence: Synthetic oligonucleotide
  Target: LAMA2; (-) strand; PAM type: NRG; PAM sequence: CAG
gttcattaaaaaccagtccc

SEQ ID NO: 104192 - DNA, 20 bp, Artificial Sequence
  Description of Artificial Sequence: Synthetic oligonucleotide
  Target: LAMA2; (-) strand; PAM type: NRG; PAM sequence: CAG
aacagatgttcattaaaaac

SEQ ID NO: 104193 - DNA, 20 bp, Artificial Sequence
  Description of Artificial Sequence: Synthetic oligonucleotide
  Target: LAMA2; (-) strand; PAM type: NRG; PAM sequence: CAG
cacatccaaatcccaagcaa

SEQ ID NO: 104194 - DNA, 20 bp, Artificial Sequence
  Description of Artificial Sequence: Synthetic oligonucleotide
  Target: LAMA2; (-) strand; PAM type: NRG; PAM sequence: AAG
aagtagcacatccaaatccc

SEQ ID NO: 104195 - DNA, 20 bp, Artificial Sequence
  Description of Artificial Sequence: Synthetic oligonucleotide
  Target: LAMA2; (-) strand; PAM type: NRG; PAM sequence: TAG
caccagagcttctcataaag

SEQ ID NO: 104196 - DNA, 20 bp, Artificial Sequence
  Description of Artificial Sequence: Synthetic oligonucleotide
  Target: LAMA2; (-) strand; PAM type: NRG; PAM sequence: AAG
atgcaccagagcttctcata

SEQ ID NO: 104197 - DNA, 20 bp, Artificial Sequence
  Description of Artificial Sequence: Synthetic oligonucleotide
  Target: LAMA2; (-) strand; PAM type: NRG; PAM sequence: GAG
attgtgagctaaatgcacca

SEQ ID NO: 104198 - DNA, 20 bp, Artificial Sequence
  Description of Artificial Sequence: Synthetic oligonucleotide
  Target: LAMA2; (-) strand; PAM type: NRG; PAM sequence: CAG
gaattgtgagctaaatgcac

SEQ ID NO: 104199 - DNA, 20 bp, Artificial Sequence
  Description of Artificial Sequence: Synthetic oligonucleotide
  Target: LAMA2; (-) strand; PAM type: NRG; PAM sequence: GAG
actaactcctagagaattgt

SEQ ID NO: 104200 - DNA, 20 bp, Artificial Sequence
  Description of Artificial Sequence: Synthetic oligonucleotide
  Target: LAMA2; (-) strand; PAM type: NRG; PAM sequence: GAG
atggcaagaactaactccta

SEQ ID NO: 104201 - DNA, 20 bp, Artificial Sequence
  Description of Artificial Sequence: Synthetic oligonucleotide
  Target: LAMA2; (-) strand; PAM type: NRG; PAM sequence: TAG
agatggcaagaactaactcc

SEQ ID NO: 104202 - DNA, 20 bp, Artificial Sequence
  Description of Artificial Sequence: Synthetic oligonucleotide
  Target: LAMA2; (-) strand; PAM type: NRG; PAM sequence: AAG
cattcatgttagtagatggc

SEQ ID NO: 104203 - DNA, 20 bp, Artificial Sequence
  Description of Artificial Sequence: Synthetic oligonucleotide
  Target: LAMA2; (-) strand; PAM type: NRG; PAM sequence: TGG
ttctcattcatgttagtaga

SEQ ID NO: 104204 - DNA, 20 bp, Artificial Sequence
  Description of Artificial Sequence: Synthetic oligonucleotide
  Target: LAMA2; (-) strand; PAM type: NRG; PAM sequence: TAG
cactttctcattcatgttag

SEQ ID NO: 104205 - DNA, 20 bp, Artificial Sequence
  Description of Artificial Sequence: Synthetic oligonucleotide
  Target: LAMA2; (-) strand; PAM type: NRG; PAM sequence: TAG
ttccactttctcattcatgt

SEQ ID NO: 104206 - DNA, 20 bp, Artificial Sequence
  Description of Artificial Sequence: Synthetic oligonucleotide
  Target: LAMA2; (-) strand; PAM type: NRG; PAM sequence: TGG
tttgggcttttgccaaaaaa

SEQ ID NO: 104207 - DNA, 20 bp, Artificial Sequence
  Description of Artificial Sequence: Synthetic oligonucleotide
  Target: LAMA2; (-) strand; PAM type: NRG; PAM sequence: GGG
ttctttaagtttcttaattt

SEQ ID NO: 104208 - DNA, 20 bp, Artificial Sequence
  Description of Artificial Sequence: Synthetic oligonucleotide
  Target: LAMA2; (-) strand; PAM type: NRG; PAM sequence: TGG
attctttaagtttcttaatt

SEQ ID NO: 104209 - DNA, 20 bp, Artificial Sequence
  Description of Artificial Sequence: Synthetic oligonucleotide
  Target: LAMA2; (-) strand; PAM type: NRG; PAM sequence: AAG
gggcattatctgtattcttt

SEQ ID NO: 104210 - DNA, 20 bp, Artificial Sequence
  Description of Artificial Sequence: Synthetic oligonucleotide
  Target: LAMA2; (-) strand; PAM type: NRG; PAM sequence: GGG
ttggggggcgagtgcggatg

SEQ ID NO: 104211 - DNA, 20 bp, Artificial Sequence
  Description of Artificial Sequence: Synthetic oligonucleotide
  Target: LAMA2; (-) strand; PAM type: NRG; PAM sequence: GGG
tttggggggcgagtgcggat

SEQ ID NO: 104212 - DNA, 20 bp, Artificial Sequence
  Description of Artificial Sequence: Synthetic oligonucleotide
  Target: LAMA2; (-) strand; PAM type: NRG; PAM sequence: TGG
ttttggggggcgagtgcgga

SEQ ID NO: 104213 - DNA, 20 bp, Artificial Sequence
  Description of Artificial Sequence: Synthetic oligonucleotide
  Target: LAMA2; (-) strand; PAM type: NRG; PAM sequence: CGG
gtttttttggggggcgagtg

SEQ ID NO: 104214 - DNA, 20 bp, Artificial Sequence
  Description of Artificial Sequence: Synthetic oligonucleotide
  Target: LAMA2; (-) strand; PAM type: NRG; PAM sequence: GAG
actaggtttttttggggggc

SEQ ID NO: 104215 - DNA, 20 bp, Artificial Sequence
  Description of Artificial Sequence: Synthetic oligonucleotide
  Target: LAMA2; (-) strand; PAM type: NRG; PAM sequence: GGG
aaggactaggtttttttggg

SEQ ID NO: 104216 - DNA, 20 bp, Artificial Sequence
  Description of Artificial Sequence: Synthetic oligonucleotide
  Target: LAMA2; (-) strand; PAM type: NRG; PAM sequence: GGG
taaggactaggtttttttgg

SEQ ID NO: 104217 - DNA, 20 bp, Artificial Sequence
  Description of Artificial Sequence: Synthetic oligonucleotide
  Target: LAMA2; (-) strand; PAM type: NRG; PAM sequence: GGG
ttaaggactaggtttttttg

SEQ ID NO: 104218 - DNA, 20 bp, Artificial Sequence
  Description of Artificial Sequence: Synthetic oligonucleotide
  Target: LAMA2; (-) strand; PAM type: NRG; PAM sequence: GGG
tttaaggactaggttttttt

SEQ ID NO: 104219 - DNA, 20 bp, Artificial Sequence
  Description of Artificial Sequence: Synthetic oligonucleotide
  Target: LAMA2; (-) strand; PAM type: NRG; PAM sequence: TGG
atttaaggactaggtttttt

SEQ ID NO: 104220 - DNA, 20 bp, Artificial Sequence
  Description of Artificial Sequence: Synthetic oligonucleotide
  Target: LAMA2; (-) strand; PAM type: NRG; PAM sequence: AGG
ttaacagatatttaaggact

SEQ ID NO: 104221 - DNA, 20 bp, Artificial Sequence
  Description of Artificial Sequence: Synthetic oligonucleotide
  Target: LAMA2; (-) strand; PAM type: NRG; PAM sequence: TAG
tttaacagatatttaaggac

SEQ ID NO: 104222 - DNA, 20 bp, Artificial Sequence
  Description of Artificial Sequence: Synthetic oligonucleotide
  Target: LAMA2; (-) strand; PAM type: NRG; PAM sequence: AGG
tatattttaacagatattta

SEQ ID NO: 104223 - DNA, 20 bp, Artificial Sequence
  Description of Artificial Sequence: Synthetic oligonucleotide
  Target: LAMA2; (-) strand; PAM type: NRG; PAM sequence: AAG
ttatattttaacagatattt

SEQ ID NO: 104224 - DNA, 20 bp, Artificial Sequence
  Description of Artificial Sequence: Synthetic oligonucleotide
  Target: LAMA2; (-) strand; PAM type: NRG; PAM sequence: CAG
gcacgtttattatattttaa

SEQ ID NO: 104225 - DNA, 20 bp, Artificial Sequence
  Description of Artificial Sequence: Synthetic oligonucleotide
  Target: LAMA2; (-) strand; PAM type: NRG; PAM sequence: AAG
ttcaagcaaaaaacaacaaa

SEQ ID NO: 104226 - DNA, 20 bp, Artificial Sequence
  Description of Artificial Sequence: Synthetic oligonucleotide
  Target: LAMA2; (-) strand; PAM type: NRG; PAM sequence: AAG
gaaaaatgttttactgcttc

SEQ ID NO: 104227 - DNA, 20 bp, Artificial Sequence
  Description of Artificial Sequence: Synthetic oligonucleotide
  Target: LAMA2; (-) strand; PAM type: NRG; PAM sequence: AAG
aatgcataatattgcagagc

SEQ ID NO: 104228 - DNA, 20 bp, Artificial Sequence
  Description of Artificial Sequence: Synthetic oligonucleotide
  Target: LAMA2; (-) strand; PAM type: NRG; PAM sequence: GAG
ctaaaatgcataatattgca

SEQ ID NO: 104229 - DNA, 20 bp, Artificial Sequence
  Description of Artificial Sequence: Synthetic oligonucleotide
  Target: LAMA2; (-) strand; PAM type: NRG; PAM sequence: CAG
atctaaaatgcataatattg

SEQ ID NO: 104230 - DNA, 20 bp, Artificial Sequence
  Description of Artificial Sequence: Synthetic oligonucleotide
  Target: LAMA2; (-) strand; PAM type: NRG; PAM sequence: AAG
tttggctacattatgaagca

SEQ ID NO: 104231 - DNA, 20 bp, Artificial Sequence
  Description of Artificial Sequence: Synthetic oligonucleotide
  Target: LAMA2; (-) strand; PAM type: NRG; PAM sequence: AAG
atttatttggctacattatg

SEQ ID NO: 104232 - DNA, 20 bp, Artificial Sequence
  Description of Artificial Sequence: Synthetic oligonucleotide
  Target: LAMA2; (-) strand; PAM type: NRG; PAM sequence: TGG
atctcacatccttatttatt

SEQ ID NO: 104233 - DNA, 20 bp, Artificial Sequence
  Description of Artificial Sequence: Synthetic oligonucleotide
  Target: LAMA2; (-) strand; PAM type: NRG; PAM sequence: AAG
atcagtcagaatctgccttg

SEQ ID NO: 104234 - DNA, 20 bp, Artificial Sequence
  Description of Artificial Sequence: Synthetic oligonucleotide
  Target: LAMA2; (-) strand; PAM type: NRG; PAM sequence: CAG
gatgcctaagaattatcagt

SEQ ID NO: 104235 - DNA, 20 bp, Artificial Sequence
  Description of Artificial Sequence: Synthetic oligonucleotide
  Target: LAMA2; (-) strand; PAM type: NRG; PAM sequence: CAG
cagtgatgcctaagaattat

SEQ ID NO: 104236 - DNA, 20 bp, Artificial Sequence
  Description of Artificial Sequence: Synthetic oligonucleotide
  Target: LAMA2; (-) strand; PAM type: NRG; PAM sequence: AAG
cttcttggccagtgatgcct

SEQ ID NO: 104237 - DNA, 20 bp, Artificial Sequence
  Description of Artificial Sequence: Synthetic oligonucleotide
  Target: LAMA2; (-) strand; PAM type: NRG; PAM sequence: CAG
ggagtttgtctcttcttggc

SEQ ID NO: 104238 - DNA, 20 bp, Artificial Sequence
  Description of Artificial Sequence: Synthetic oligonucleotide
  Target: LAMA2; (-) strand; PAM type: NRG; PAM sequence: TGG
tttgggagtttgtctcttct

SEQ ID NO: 104239 - DNA, 20 bp, Artificial Sequence
  Description of Artificial Sequence: Synthetic oligonucleotide
  Target: LAMA2; (-) strand; PAM type: NRG; PAM sequence: GAG
ttgcagtggtgaacatttgg

SEQ ID NO: 104240 - DNA, 20 bp, Artificial Sequence
  Description of Artificial Sequence: Synthetic oligonucleotide
  Target: LAMA2; (-) strand; PAM type: NRG; PAM sequence: GGG
tcttgcagtggtgaacattt

SEQ ID NO: 104241 - DNA, 20 bp, Artificial Sequence
  Description of Artificial Sequence: Synthetic oligonucleotide
  Target: LAMA2; (-) strand; PAM type: NRG; PAM sequence: TGG
ttcttgcagtggtgaacatt

SEQ ID NO: 104242 - DNA, 20 bp, Artificial Sequence
  Description of Artificial Sequence: Synthetic oligonucleotide
  Target: LAMA2; (-) strand; PAM type: NRG; PAM sequence: TGG
aaccctgttgcttcttgcag

SEQ ID NO: 104243 - DNA, 20 bp, Artificial Sequence
  Description of Artificial Sequence: Synthetic oligonucleotide
  Target: LAMA2; (-) strand; PAM type: NRG; PAM sequence: CAG
taaaaccctgttgcttcttg

SEQ ID NO: 104244 - DNA, 20 bp, Artificial Sequence
  Description of Artificial Sequence: Synthetic oligonucleotide
  Target: LAMA2; (-) strand; PAM type: NRG; PAM sequence: TAG
ctcacacctttgcctcaaat

SEQ ID NO: 104245 - DNA, 20 bp, Artificial Sequence
  Description of Artificial Sequence: Synthetic oligonucleotide
  Target: LAMA2; (-) strand; PAM type: NRG; PAM sequence: CAG
ggcagaaataatttctgttt

SEQ ID NO: 104246 - DNA, 20 bp, Artificial Sequence
  Description of Artificial Sequence: Synthetic oligonucleotide
  Target: LAMA2; (-) strand; PAM type: NRG; PAM sequence: CAG
attaactgagatttttctgg

SEQ ID NO: 104247 - DNA, 20 bp, Artificial Sequence
  Description of Artificial Sequence: Synthetic oligonucleotide
  Target: LAMA2; (-) strand; PAM type: NRG; PAM sequence: TGG
tgaattaactgagatttttc

SEQ ID NO: 104248 - DNA, 20 bp, Artificial Sequence
  Description of Artificial Sequence: Synthetic oligonucleotide
  Target: LAMA2; (-) strand; PAM type: NRG; PAM sequence: GAG
taaaccacaatgaattaact

SEQ ID NO: 104249 - DNA, 20 bp, Artificial Sequence
  Description of Artificial Sequence: Synthetic oligonucleotide
  Target: LAMA2; (-) strand; PAM type: NRG; PAM sequence: AGG
acaacagcttcatctagcag

SEQ ID NO: 104250 - DNA, 20 bp, Artificial Sequence
  Description of Artificial Sequence: Synthetic oligonucleotide
  Target: LAMA2; (-) strand; PAM type: NRG; PAM sequence: GAG
tacaacagcttcatctagca

SEQ ID NO: 104251 - DNA, 20 bp, Artificial Sequence
  Description of Artificial Sequence: Synthetic oligonucleotide
  Target: LAMA2; (-) strand; PAM type: NRG; PAM sequence: CAG
agtacaacagcttcatctag

SEQ ID NO: 104252 - DNA, 20 bp, Artificial Sequence
  Description of Artificial Sequence: Synthetic oligonucleotide
  Target: LAMA2; (-) strand; PAM type: NRG; PAM sequence: TAG
gaaagtacaacagcttcatc

SEQ ID NO: 104253 - DNA, 20 bp, Artificial Sequence
  Description of Artificial Sequence: Synthetic oligonucleotide
  Target: LAMA2; (-) strand; PAM type: NRG; PAM sequence: CAG
taatactagggaaagtacaa

SEQ ID NO: 104254 - DNA, 20 bp, Artificial Sequence
  Description of Artificial Sequence: Synthetic oligonucleotide
  Target: LAMA2; (-) strand; PAM type: NRG; PAM sequence: AAG
atggaaaataatactaggga

SEQ ID NO: 104255 - DNA, 20 bp, Artificial Sequence
  Description of Artificial Sequence: Synthetic oligonucleotide
  Target: LAMA2; (-) strand; PAM type: NRG; PAM sequence: GGG
attaatggaaaataatacta

SEQ ID NO: 104256 - DNA, 20 bp, Artificial Sequence
  Description of Artificial Sequence: Synthetic oligonucleotide
  Target: LAMA2; (-) strand; PAM type: NRG; PAM sequence: AGG
cattaatggaaaataatact

SEQ ID NO: 104257 - DNA, 20 bp, Artificial Sequence
  Description of Artificial Sequence: Synthetic oligonucleotide
  Target: LAMA2; (-) strand; PAM type: NRG; PAM sequence: TAG
gcattaatggaaaataatac

SEQ ID NO: 104258 - DNA, 20 bp, Artificial Sequence
  Description of Artificial Sequence: Synthetic oligonucleotide
  Target: LAMA2; (-) strand; PAM type: NRG; PAM sequence: TGG
gacacttcaagtagcattaa

SEQ ID NO: 104259 - DNA, 20 bp, Artificial Sequence
  Description of Artificial Sequence: Synthetic oligonucleotide
  Target: LAMA2; (-) strand; PAM type: NRG; PAM sequence: TAG
ttggagggggacacttcaag

SEQ ID NO: 104260 - DNA, 20 bp, Artificial Sequence
  Description of Artificial Sequence: Synthetic oligonucleotide
  Target: LAMA2; (-) strand; PAM type: NRG; PAM sequence: AAG
gggttggagggggacacttc

SEQ ID NO: 104261 - DNA, 20 bp, Artificial Sequence
  Description of Artificial Sequence: Synthetic oligonucleotide
  Target: LAMA2; (-) strand; PAM type: NRG; PAM sequence: GGG
ttgttgttttgggttggagg

SEQ ID NO: 104262 - DNA, 20 bp, Artificial Sequence
  Description of Artificial Sequence: Synthetic oligonucleotide
  Target: LAMA2; (-) strand; PAM type: NRG; PAM sequence: GGG
gttgttgttttgggttggag

SEQ ID NO: 104263 - DNA, 20 bp, Artificial Sequence
  Description of Artificial Sequence: Synthetic oligonucleotide
  Target: LAMA2; (-) strand; PAM type: NRG; PAM sequence: GGG
tgttgttgttttgggttgga

SEQ ID NO: 104264 - DNA, 20 bp, Artificial Sequence
  Description of Artificial Sequence: Synthetic oligonucleotide
  Target: LAMA2; (-) strand; PAM type: NRG; PAM sequence: AGG
ttgttgttgttttgggttgg

SEQ ID NO: 104265 - DNA, 20 bp, Artificial Sequence
  Description of Artificial Sequence: Synthetic oligonucleotide
  Target: LAMA2; (-) strand; PAM type: NRG; PAM sequence: GAG
gttgttgttgttttgggttg

SEQ ID NO: 104266 - DNA, 20 bp, Artificial Sequence
  Description of Artificial Sequence: Synthetic oligonucleotide
  Target: LAMA2; (-) strand; PAM type: NRG; PAM sequence: TGG
ttgttgttgttgttttgggt

SEQ ID NO: 104267 - DNA, 20 bp, Artificial Sequence
  Description of Artificial Sequence: Synthetic oligonucleotide
  Target: LAMA2; (-) strand; PAM type: NRG; PAM sequence: GGG
tttgttgttgttgttgtttt

SEQ ID NO: 104268 - DNA, 20 bp, Artificial Sequence
  Description of Artificial Sequence: Synthetic oligonucleotide
  Target: LAMA2; (-) strand; PAM type: NRG; PAM sequence: TGG
atttgttgttgttgttgttt

SEQ ID NO: 104269 - DNA, 20 bp, Artificial Sequence
  Description of Artificial Sequence: Synthetic oligonucleotide
  Target: LAMA2; (-) strand; PAM type: NRG; PAM sequence: GGG
gaaggtgctctacctgcagt

SEQ ID NO: 104270 - DNA, 20 bp, Artificial Sequence
  Description of Artificial Sequence: Synthetic oligonucleotide
  Target: LAMA2; (-) strand; PAM type: NRG; PAM sequence: TGG
tgaaggtgctctacctgcag

SEQ ID NO: 104271 - DNA, 20 bp, Artificial Sequence
  Description of Artificial Sequence: Synthetic oligonucleotide
  Target: LAMA2; (-) strand; PAM type: NRG; PAM sequence: CAG
gagtgaaggtgctctacctg

SEQ ID NO: 104272 - DNA, 20 bp, Artificial Sequence
  Description of Artificial Sequence: Synthetic oligonucleotide
  Target: LAMA2; (-) strand; PAM type: NRG; PAM sequence: AGG
tggggatccgctcagagtga

SEQ ID NO: 104273 - DNA, 20 bp, Artificial Sequence
  Description of Artificial Sequence: Synthetic oligonucleotide
  Target: LAMA2; (-) strand; PAM type: NRG; PAM sequence: AAG
ttggggatccgctcagagtg

SEQ ID NO: 104274 - DNA, 20 bp, Artificial Sequence
  Description of Artificial Sequence: Synthetic oligonucleotide
  Target: LAMA2; (-) strand; PAM type: NRG; PAM sequence: GAG
ggcctttggggatccgctca

SEQ ID NO: 104275 - DNA, 20 bp, Artificial Sequence
  Description of Artificial Sequence: Synthetic oligonucleotide
  Target: LAMA2; (-) strand; PAM type: NRG; PAM sequence: CAG
agggcctttggggatccgct

SEQ ID NO: 104276 - DNA, 20 bp, Artificial Sequence
  Description of Artificial Sequence: Synthetic oligonucleotide
  Target: LAMA2; (-) strand; PAM type: NRG; PAM sequence: GGG
agcattgactagggcctttg

SEQ ID NO: 104277 - DNA, 20 bp, Artificial Sequence
  Description of Artificial Sequence: Synthetic oligonucleotide
  Target: LAMA2; (-) strand; PAM type: NRG; PAM sequence: GGG
gagcattgactagggccttt

SEQ ID NO: 104278 - DNA, 20 bp, Artificial Sequence
  Description of Artificial Sequence: Synthetic oligonucleotide
  Target: LAMA2; (-) strand; PAM type: NRG; PAM sequence: TGG
ggagcattgactagggcctt

SEQ ID NO: 104279 - DNA, 20 bp, Artificial Sequence
  Description of Artificial Sequence: Synthetic oligonucleotide
  Target: LAMA2; (-) strand; PAM type: NRG; PAM sequence: GGG
agttcctggagcattgacta

SEQ ID NO: 104280 - DNA, 20 bp, Artificial Sequence
  Description of Artificial Sequence: Synthetic oligonucleotide
  Target: LAMA2; (-) strand; PAM type: NRG; PAM sequence: AGG
aagttcctggagcattgact

SEQ ID NO: 104281 - DNA, 20 bp, Artificial Sequence
  Description of Artificial Sequence: Synthetic oligonucleotide
  Target: LAMA2; (-) strand; PAM type: NRG; PAM sequence: TAG
aaagttcctggagcattgac

SEQ ID NO: 104282 - DNA, 20 bp, Artificial Sequence
  Description of Artificial Sequence: Synthetic oligonucleotide
  Target: LAMA2; (-) strand; PAM type: NRG; PAM sequence: GAG
aaagaaaaggaaagttcctg

SEQ ID NO: 104283 - DNA, 20 bp, Artificial Sequence
  Description of Artificial Sequence: Synthetic oligonucleotide
  Target: LAMA2; (-) strand; PAM type: NRG; PAM sequence: TGG
ggaaagaaaaggaaagttcc

SEQ ID NO: 104284 - DNA, 20 bp, Artificial Sequence
  Description of Artificial Sequence: Synthetic oligonucleotide
  Target: LAMA2; (-) strand; PAM type: NRG; PAM sequence: AAG
tgtcaatggaaagaaaagga

SEQ ID NO: 104285 - DNA, 20 bp, Artificial Sequence
  Description of Artificial Sequence: Synthetic oligonucleotide
  Target: LAMA2; (-) strand; PAM type: NRG; PAM sequence: AGG
gaaatgtcaatggaaagaaa

SEQ ID NO: 104286 - DNA, 20 bp, Artificial Sequence
  Description of Artificial Sequence: Synthetic oligonucleotide
  Target: LAMA2; (-) strand; PAM type: NRG; PAM sequence: AAG
tgaaatgtcaatggaaagaa

SEQ ID NO: 104287 - DNA, 20 bp, Artificial Sequence
  Description of Artificial Sequence: Synthetic oligonucleotide
  Target: LAMA2; (-) strand; PAM type: NRG; PAM sequence: AAG
gtgtttgaaatgtcaatgga

SEQ ID NO: 104288 - DNA, 20 bp, Artificial Sequence
  Description of Artificial Sequence: Synthetic oligonucleotide
  Target: LAMA2; (-) strand; PAM type: NRG; PAM sequence: TGG
ttgggtgtttgaaatgtcaa

SEQ ID NO: 104289 - DNA, 20 bp, Artificial Sequence
  Description of Artificial Sequence: Synthetic oligonucleotide
  Target: LAMA2; (-) strand; PAM type: NRG; PAM sequence: GGG
aggatgggctgctaggtgtt

SEQ ID NO: 104290 - DNA, 20 bp, Artificial Sequence
  Description of Artificial Sequence: Synthetic oligonucleotide
  Target: LAMA2; (-) strand; PAM type: NRG; PAM sequence: TGG
caggatgggctgctaggtgt

SEQ ID NO: 104291 - DNA, 20 bp, Artificial Sequence
  Description of Artificial Sequence: Synthetic oligonucleotide
  Target: LAMA2; (-) strand; PAM type: NRG; PAM sequence: AGG
agtccccaggatgggctgct

SEQ ID NO: 104292 - DNA, 20 bp, Artificial Sequence
  Description of Artificial Sequence: Synthetic oligonucleotide
  Target: LAMA2; (-) strand; PAM type: NRG; PAM sequence: TAG
gagtccccaggatgggctgc

SEQ ID NO: 104293 - DNA, 20 bp, Artificial Sequence
  Description of Artificial Sequence: Synthetic oligonucleotide
  Target: LAMA2; (-) strand; PAM type: NRG; PAM sequence: GGG
tgaaaatgagtccccaggat

SEQ ID NO: 104294 - DNA, 20 bp, Artificial Sequence
  Description of Artificial Sequence: Synthetic oligonucleotide
  Target: LAMA2; (-) strand; PAM type: NRG; PAM sequence: TGG
ttgaaaatgagtccccagga

SEQ ID NO: 104295 - DNA, 20 bp, Artificial Sequence
  Description of Artificial Sequence: Synthetic oligonucleotide
  Target: LAMA2; (-) strand; PAM type: NRG; PAM sequence: AGG
caaattgaaaatgagtcccc

SEQ ID NO: 104296 - DNA, 20 bp, Artificial Sequence
  Description of Artificial Sequence: Synthetic oligonucleotide
  Target: LAMA2; (-) strand; PAM type: NRG; PAM sequence: CAG
acaaattgaaaatgagtccc

SEQ ID NO: 104297 - DNA, 20 bp, Artificial Sequence
  Description of Artificial Sequence: Synthetic oligonucleotide
  Target: LAMA2; (-) strand; PAM type: NRG; PAM sequence: GAG
gattgaaacaaattgaaaat

SEQ ID NO: 104298 - DNA, 20 bp, Artificial Sequence
  Description of Artificial Sequence: Synthetic oligonucleotide
  Target: LAMA2; (-) strand; PAM type: NRG; PAM sequence: CAG
gctagcatttattctcatac

SEQ ID NO: 104299 - DNA, 20 bp, Artificial Sequence
  Description of Artificial Sequence: Synthetic oligonucleotide
  Target: LAMA2; (-) strand; PAM type: NRG; PAM sequence: TAG
ggatctactaaaacatatgc

SEQ ID NO: 104300 - DNA, 20 bp, Artificial Sequence
  Description of Artificial Sequence: Synthetic oligonucleotide
  Target: LAMA2; (-) strand; PAM type: NRG; PAM sequence: AGG
aagtaagcagtgttgataat

SEQ ID NO: 104301 - DNA, 20 bp, Artificial Sequence
  Description of Artificial Sequence: Synthetic oligonucleotide
  Target: LAMA2; (-) strand; PAM type: NRG; PAM sequence: TAG
aaagtaagcagtgttgataa

SEQ ID NO: 104302 - DNA, 20 bp, Artificial Sequence
  Description of Artificial Sequence: Synthetic oligonucleotide
  Target: LAMA2; (-) strand; PAM type: NRG; PAM sequence: CAG
attgcagagaacaaagtaag

SEQ ID NO: 104303 - DNA, 20 bp, Artificial Sequence
  Description of Artificial Sequence: Synthetic oligonucleotide
  Target: LAMA2; (-) strand; PAM type: NRG; PAM sequence: AAG
ttcattgcagagaacaaagt

SEQ ID NO: 104304 - DNA, 20 bp, Artificial Sequence
  Description of Artificial Sequence: Synthetic oligonucleotide
  Target: LAMA2; (-) strand; PAM type: NRG; PAM sequence: AAG
aaggttcattgcagagaaca

SEQ ID NO: 104305 - DNA, 20 bp, Artificial Sequence
  Description of Artificial Sequence: Synthetic oligonucleotide
  Target: LAMA2; (-) strand; PAM type: NRG; PAM sequence: GAG
gagatggaaggttcattgca

SEQ ID NO: 104306 - DNA, 20 bp, Artificial Sequence
  Description of Artificial Sequence: Synthetic oligonucleotide
  Target: LAMA2; (-) strand; PAM type: NRG; PAM sequence: CAG
gggagatggaaggttcattg

SEQ ID NO: 104307 - DNA, 20 bp, Artificial Sequence
  Description of Artificial Sequence: Synthetic oligonucleotide
  Target: LAMA2; (-) strand; PAM type: NRG; PAM sequence: AGG
tctctttggtgggagatgga

SEQ ID NO: 104308 - DNA, 20 bp, Artificial Sequence
  Description of Artificial Sequence: Synthetic oligonucleotide
  Target: LAMA2; (-) strand; PAM type: NRG; PAM sequence: AAG
ctctctttggtgggagatgg

SEQ ID NO: 104309 - DNA, 20 bp, Artificial Sequence
  Description of Artificial Sequence: Synthetic oligonucleotide
  Target: LAMA2; (-) strand; PAM type: NRG; PAM sequence: TGG
catctctctttggtgggaga

SEQ ID NO: 104310 - DNA, 20 bp, Artificial Sequence
  Description of Artificial Sequence: Synthetic oligonucleotide
  Target: LAMA2; (-) strand; PAM type: NRG; PAM sequence: GAG
tatgcatctctctttggtgg

SEQ ID NO: 104311 - DNA, 20 bp, Artificial Sequence
  Description of Artificial Sequence: Synthetic oligonucleotide
  Target: LAMA2; (-) strand; PAM type: NRG; PAM sequence: GGG
aatatgcatctctctttggt

SEQ ID NO: 104312 - DNA, 20 bp, Artificial Sequence
  Description of Artificial Sequence: Synthetic oligonucleotide
  Target: LAMA2; (-) strand; PAM type: NRG; PAM sequence: TGG
gaatatgcatctctctttgg

SEQ ID NO: 104313 - DNA, 20 bp, Artificial Sequence
  Description of Artificial Sequence: Synthetic oligonucleotide
  Target: LAMA2; (-) strand; PAM type: NRG; PAM sequence: TGG
catgaatatgcatctctctt

SEQ ID NO: 104314 - DNA, 20 bp, Artificial Sequence
  Description of Artificial Sequence: Synthetic oligonucleotide
  Target: LAMA2; (-) strand; PAM type: NRG; PAM sequence: AGG
aatattcatattgaccaaag

SEQ ID NO: 104315 - DNA, 20 bp, Artificial Sequence
  Description of Artificial Sequence: Synthetic oligonucleotide
  Target: LAMA2; (-) strand; PAM type: NRG; PAM sequence: GAG
aaatattcatattgaccaaa

SEQ ID NO: 104316 - DNA, 20 bp, Artificial Sequence
  Description of Artificial Sequence: Synthetic oligonucleotide
  Target: LAMA2; (-) strand; PAM type: NRG; PAM sequence: AAG
gcaaatattcatattgacca

SEQ ID NO: 104317 - DNA, 20 bp, Artificial Sequence
  Description of Artificial Sequence: Synthetic oligonucleotide
  Target: LAMA2; (-) strand; PAM type: NRG; PAM sequence: AAG
aggccctaggcacccagaag

SEQ ID NO: 104318 - DNA, 20 bp, Artificial Sequence
  Description of Artificial Sequence: Synthetic oligonucleotide
  Target: LAMA2; (-) strand; PAM type: NRG; PAM sequence: AAG
tagaggccctaggcacccag

SEQ ID NO: 104319 - DNA, 20 bp, Artificial Sequence
  Description of Artificial Sequence: Synthetic oligonucleotide
  Target: LAMA2; (-) strand; PAM type: NRG; PAM sequence: CAG
acctagaggccctaggcacc

SEQ ID NO: 104320 - DNA, 20 bp, Artificial Sequence
  Description of Artificial Sequence: Synthetic oligonucleotide
  Target: LAMA2; (-) strand; PAM type: NRG; PAM sequence: AGG
aaatagtacctagaggccct

SEQ ID NO: 104321 - DNA, 20 bp, Artificial Sequence
  Description of Artificial Sequence: Synthetic oligonucleotide
  Target: LAMA2; (-) strand; PAM type: NRG; PAM sequence: TAG
caaatagtacctagaggccc

SEQ ID NO: 104322 - DNA, 20 bp, Artificial Sequence
  Description of Artificial Sequence: Synthetic oligonucleotide
  Target: LAMA2; (-) strand; PAM type: NRG; PAM sequence: AGG
attgtacaaatagtacctag

SEQ ID NO: 104323 - DNA, 20 bp, Artificial Sequence
  Description of Artificial Sequence: Synthetic oligonucleotide
  Target: LAMA2; (-) strand; PAM type: NRG; PAM sequence: GAG
aattgtacaaatagtaccta

SEQ ID NO: 104324 - DNA, 20 bp, Artificial Sequence
  Description of Artificial Sequence: Synthetic oligonucleotide
  Target: LAMA2; (-) strand; PAM type: NRG; PAM sequence: TAG
caaattgtacaaatagtacc

SEQ ID NO: 104325 - DNA, 20 bp, Artificial Sequence
  Description of Artificial Sequence: Synthetic oligonucleotide
  Target: LAMA2; (-) strand; PAM type: NRG; PAM sequence: TAG
tggtccacaaattgtacaaa

SEQ ID NO: 104326 - DNA, 20 bp, Artificial Sequence
  Description of Artificial Sequence: Synthetic oligonucleotide
  Target: LAMA2; (-) strand; PAM type: NRG; PAM sequence: TGG
catctccagtctacccctgt

SEQ ID NO: 104327 - DNA, 20 bp, Artificial Sequence
  Description of Artificial Sequence: Synthetic oligonucleotide
  Target: LAMA2; (-) strand; PAM type: NRG; PAM sequence: CAG
ctgggataaatctccatctc

SEQ ID NO: 104328 - DNA, 20 bp, Artificial Sequence
  Description of Artificial Sequence: Synthetic oligonucleotide
  Target: LAMA2; (-) strand; PAM type: NRG; PAM sequence: GGG
ttggggtggtgagcaagcct

SEQ ID NO: 104329 - DNA, 20 bp, Artificial Sequence
  Description of Artificial Sequence: Synthetic oligonucleotide
  Target: LAMA2; (-) strand; PAM type: NRG; PAM sequence: TGG
tttggggtggtgagcaagcc

SEQ ID NO: 104330 - DNA, 20 bp, Artificial Sequence
  Description of Artificial Sequence: Synthetic oligonucleotide
  Target: LAMA2; (-) strand; PAM type: NRG; PAM sequence: AAG
tgggatttggggtggtgagc

SEQ ID NO: 104331 - DNA, 20 bp, Artificial Sequence
  Description of Artificial Sequence: Synthetic oligonucleotide
  Target: LAMA2; (-) strand; PAM type: NRG; PAM sequence: GAG
gacgtgggatttggggtggt

SEQ ID NO: 104332 - DNA, 20 bp, Artificial Sequence
  Description of Artificial Sequence: Synthetic oligonucleotide
  Target: LAMA2; (-) strand; PAM type: NRG; PAM sequence: TGG
tatagacgtgggatttgggg

SEQ ID NO: 104333 - DNA, 20 bp, Artificial Sequence
  Description of Artificial Sequence: Synthetic oligonucleotide
  Target: LAMA2; (-) strand; PAM type: NRG; PAM sequence: GGG
gtgtatagacgtgggatttg

SEQ ID NO: 104334 - DNA, 20 bp, Artificial Sequence
  Description of Artificial Sequence: Synthetic oligonucleotide
  Target: LAMA2; (-) strand; PAM type: NRG; PAM sequence: GGG
ggtgtatagacgtgggattt

SEQ ID NO: 104335 - DNA, 20 bp, Artificial Sequence
  Description of Artificial Sequence: Synthetic oligonucleotide
  Target: LAMA2; (-) strand; PAM type: NRG; PAM sequence: TGG
tggtgtatagacgtgggatt

SEQ ID NO: 104336 - DNA, 20 bp, Artificial Sequence
  Description of Artificial Sequence: Synthetic oligonucleotide
  Target: LAMA2; (-) strand; PAM type: NRG; PAM sequence: GGG
tttctctggtgtatagacgt

SEQ ID NO: 104337 - DNA, 20 bp, Artificial Sequence
  Description of Artificial Sequence: Synthetic oligonucleotide
  Target: LAMA2; (-) strand; PAM type: NRG; PAM sequence: TGG
ctttctctggtgtatagacg

SEQ ID NO: 104338 - DNA, 20 bp, Artificial Sequence
  Description of Artificial Sequence: Synthetic oligonucleotide
  Target: LAMA2; (-) strand; PAM type: NRG; PAM sequence: TAG
gtaatcctttctctggtgta

SEQ ID NO: 104339 - DNA, 20 bp, Artificial Sequence
  Description of Artificial Sequence: Synthetic oligonucleotide
  Target: LAMA2; (-) strand; PAM type: NRG; PAM sequence: TGG
gtgatgggtaatcctttctc

SEQ ID NO: 104340 - DNA, 20 bp, Artificial Sequence
  Description of Artificial Sequence: Synthetic oligonucleotide
  Target: LAMA2; (-) strand; PAM type: NRG; PAM sequence: GGG
cgagagacacctttggtgat

SEQ ID NO: 104341 - DNA, 20 bp, Artificial Sequence
  Description of Artificial Sequence: Synthetic oligonucleotide
  Target: LAMA2; (-) strand; PAM type: NRG; PAM sequence: TGG
acgagagacacctttggtga

SEQ ID NO: 104342 - DNA, 20 bp, Artificial Sequence
  Description of Artificial Sequence: Synthetic oligonucleotide
  Target: LAMA2; (-) strand; PAM type: NRG; PAM sequence: TGG
tagggaacgagagacacctt

SEQ ID NO: 104343 - DNA, 20 bp, Artificial Sequence
  Description of Artificial Sequence: Synthetic oligonucleotide
  Target: LAMA2; (-) strand; PAM type: NRG; PAM sequence: GAG
atgcataatttagggaacga

SEQ ID NO: 104344 - DNA, 20 bp, Artificial Sequence
  Description of Artificial Sequence: Synthetic oligonucleotide
  Target: LAMA2; (-) strand; PAM type: NRG; PAM sequence: GAG
ctatgcataatttagggaac

SEQ ID NO: 104345 - DNA, 20 bp, Artificial Sequence
  Description of Artificial Sequence: Synthetic oligonucleotide
  Target: LAMA2; (-) strand; PAM type: NRG; PAM sequence: GGG
cctgatctatgcataattta

SEQ ID NO: 104346 - DNA, 20 bp, Artificial Sequence
  Description of Artificial Sequence: Synthetic oligonucleotide
  Target: LAMA2; (-) strand; PAM type: NRG; PAM sequence: AGG
acctgatctatgcataattt

SEQ ID NO: 104347 - DNA, 20 bp, Artificial Sequence
  Description of Artificial Sequence: Synthetic oligonucleotide
  Target: LAMA2; (-) strand; PAM type: NRG; PAM sequence: TAG
cacctgatctatgcataatt

SEQ ID NO: 104348 - DNA, 20 bp, Artificial Sequence
  Description of Artificial Sequence: Synthetic oligonucleotide
  Target: LAMA2; (-) strand; PAM type: NRG; PAM sequence: CAG
cctatctggacagacacaat

SEQ ID NO: 104349 - DNA, 20 bp, Artificial Sequence
  Description of Artificial Sequence: Synthetic oligonucleotide
  Target: LAMA2; (-) strand; PAM type: NRG; PAM sequence: CAG
aaaagggtgccctatctgga

SEQ ID NO: 104350 - DNA, 20 bp, Artificial Sequence
  Description of Artificial Sequence: Synthetic oligonucleotide
  Target: LAMA2; (-) strand; PAM type: NRG; PAM sequence: TGG
ttagaaaagggtgccctatc

SEQ ID NO: 104351 - DNA, 20 bp, Artificial Sequence
  Description of Artificial Sequence: Synthetic oligonucleotide
  Target: LAMA2; (-) strand; PAM type: NRG; PAM sequence: GGG
acttcacataaattagaaaa

SEQ ID NO: 104352 - DNA, 20 bp, Artificial Sequence
  Description of Artificial Sequence: Synthetic oligonucleotide
  Target: LAMA2; (-) strand; PAM type: NRG; PAM sequence: AGG
cacttcacataaattagaaa

SEQ ID NO: 104353 - DNA, 20 bp, Artificial Sequence
  Description of Artificial Sequence: Synthetic oligonucleotide
  Target: LAMA2; (-) strand; PAM type: NRG; PAM sequence: AAG
gcacttcacataaattagaa

SEQ ID NO: 104354 - DNA, 20 bp, Artificial Sequence
  Description of Artificial Sequence: Synthetic oligonucleotide
  Target: LAMA2; (-) strand; PAM type: NRG; PAM sequence: TAG
acatggcacttcacataaat

SEQ ID NO: 104355 - DNA, 20 bp, Artificial Sequence
  Description of Artificial Sequence: Synthetic oligonucleotide
  Target: LAMA2; (-) strand; PAM type: NRG; PAM sequence: TGG
taaagtatagctatcccaca

SEQ ID NO: 104356 - DNA, 20 bp, Artificial Sequence
  Description of Artificial Sequence: Synthetic oligonucleotide
  Target: LAMA2; (-) strand; PAM type: NRG; PAM sequence: TAG
gttcttatttccctaaagta

SEQ ID NO: 104357 - DNA, 20 bp, Artificial Sequence
  Description of Artificial Sequence: Synthetic oligonucleotide
  Target: LAMA2; (-) strand; PAM type: NRG; PAM sequence: AAG
gtggtgttcttatttcccta

SEQ ID NO: 104358 - DNA, 20 bp, Artificial Sequence
  Description of Artificial Sequence: Synthetic oligonucleotide
  Target: LAMA2; (-) strand; PAM type: NRG; PAM sequence: TGG
tgcctgcaggcaaaagtgag

SEQ ID NO: 104359 - DNA, 20 bp, Artificial Sequence
  Description of Artificial Sequence: Synthetic oligonucleotide
  Target: LAMA2; (-) strand; PAM type: NRG; PAM sequence: GAG
tagtgcctgcaggcaaaagt

SEQ ID NO: 104360 - DNA, 20 bp, Artificial Sequence
  Description of Artificial Sequence: Synthetic oligonucleotide
  Target: LAMA2; (-) strand; PAM type: NRG; PAM sequence: AAG
caaatagtgcctgcaggcaa

SEQ ID NO: 104361 - DNA, 20 bp, Artificial Sequence
  Description of Artificial Sequence: Synthetic oligonucleotide
  Target: LAMA2; (-) strand; PAM type: NRG; PAM sequence: AGG
ttctaccaaatagtgcctgc

SEQ ID NO: 104362 - DNA, 20 bp, Artificial Sequence
  Description of Artificial Sequence: Synthetic oligonucleotide
  Target: LAMA2; (-) strand; PAM type: NRG; PAM sequence: CAG
attctaccaaatagtgcctg

SEQ ID NO: 104363 - DNA, 20 bp, Artificial Sequence
  Description of Artificial Sequence: Synthetic oligonucleotide
  Target: LAMA2; (-) strand; PAM type: NRG; PAM sequence: TAG
gttggattaattctaccaaa

SEQ ID NO: 104364 - DNA, 20 bp, Artificial Sequence
  Description of Artificial Sequence: Synthetic oligonucleotide
  Target: LAMA2; (-) strand; PAM type: NRG; PAM sequence: TGG
tttcattcaattttaacagt

SEQ ID NO: 104365 - DNA, 20 bp, Artificial Sequence
  Description of Artificial Sequence: Synthetic oligonucleotide
  Target: LAMA2; (-) strand; PAM type: NRG; PAM sequence: CAG
gacctttcattcaattttaa

SEQ ID NO: 104366 - DNA, 20 bp, Artificial Sequence
  Description of Artificial Sequence: Synthetic oligonucleotide
  Target: LAMA2; (-) strand; PAM type: NRG; PAM sequence: TGG
atgaacatttagtgttgctc

SEQ ID NO: 104367 - DNA, 20 bp, Artificial Sequence
  Description of Artificial Sequence: Synthetic oligonucleotide
  Target: LAMA2; (-) strand; PAM type: NRG; PAM sequence: TAG
attacatctcaatgaacatt

SEQ ID NO: 104368 - DNA, 20 bp, Artificial Sequence
  Description of Artificial Sequence: Synthetic oligonucleotide
  Target: LAMA2; (-) strand; PAM type: NRG; PAM sequence: AAG
tttttctccattaaactgcc

SEQ ID NO: 104369 - DNA, 20 bp, Artificial Sequence
  Description of Artificial Sequence: Synthetic oligonucleotide
  Target: LAMA2; (-) strand; PAM type: NRG; PAM sequence: GAG
cctactttaaagcctttggt

SEQ ID NO: 104370 - DNA, 20 bp, Artificial Sequence
  Description of Artificial Sequence: Synthetic oligonucleotide
  Target: LAMA2; (-) strand; PAM type: NRG; PAM sequence: TGG
ataacctactttaaagcctt

SEQ ID NO: 104371 - DNA, 20 bp, Artificial Sequence
  Description of Artificial Sequence: Synthetic oligonucleotide
  Target: LAMA2; (-) strand; PAM type: NRG; PAM sequence: AAG
atacagtataacctacttta

SEQ ID NO: 104372 - DNA, 20 bp, Artificial Sequence
  Description of Artificial Sequence: Synthetic oligonucleotide
  Target: LAMA2; (-) strand; PAM type: NRG; PAM sequence: CAG
gaaaaagaggtgtggatata

SEQ ID NO: 104373 - DNA, 20 bp, Artificial Sequence
  Description of Artificial Sequence: Synthetic oligonucleotide
  Target: LAMA2; (-) strand; PAM type: NRG; PAM sequence: TGG
gagagagagaaaaagaggtg

SEQ ID NO: 104374 - DNA, 20 bp, Artificial Sequence
  Description of Artificial Sequence: Synthetic oligonucleotide
  Target: LAMA2; (-) strand; PAM type: NRG; PAM sequence: AGG
gtttagagagagagaaaaag

SEQ ID NO: 104375 - DNA, 20 bp, Artificial Sequence
  Description of Artificial Sequence: Synthetic oligonucleotide
  Target: LAMA2; (-) strand; PAM type: NRG; PAM sequence: GAG
agtttagagagagagaaaaa

SEQ ID NO: 104376 - DNA, 20 bp, Artificial Sequence
  Description of Artificial Sequence: Synthetic oligonucleotide
  Target: LAMA2; (-) strand; PAM type: NRG; PAM sequence: AAG
atagtttagagagagagaaa

SEQ ID NO: 104377 - DNA, 20 bp, Artificial Sequence
  Description of Artificial Sequence: Synthetic oligonucleotide
  Target: LAMA2; (-) strand; PAM type: NRG; PAM sequence: GAG
attattatagtttagagaga

SEQ ID NO: 104378 - DNA, 20 bp, Artificial Sequence
  Description of Artificial Sequence: Synthetic oligonucleotide
  Target: LAMA2; (-) strand; PAM type: NRG; PAM sequence: GAG
tcattattatagtttagaga

SEQ ID NO: 104379 - DNA, 20 bp, Artificial Sequence
  Description of Artificial Sequence: Synthetic oligonucleotide
  Target: LAMA2; (-) strand; PAM type: NRG; PAM sequence: GAG
cctcattattatagtttaga

SEQ ID NO: 104380 - DNA, 20 bp, Artificial Sequence
  Description of Artificial Sequence: Synthetic oligonucleotide
  Target: LAMA2; (-) strand; PAM type: NRG; PAM sequence: GAG
tccctcattattatagttta

SEQ ID NO: 104381 - DNA, 20 bp, Artificial Sequence
  Description of Artificial Sequence: Synthetic oligonucleotide
  Target: LAMA2; (-) strand; PAM type: NRG; PAM sequence: TAG
tatccctcattattatagtt

SEQ ID NO: 104382 - DNA, 20 bp, Artificial Sequence
  Description of Artificial Sequence: Synthetic oligonucleotide
  Target: LAMA2; (-) strand; PAM type: NRG; PAM sequence: TAG
atggttatccctcattatta

SEQ ID NO: 104383 - DNA, 20 bp, Artificial Sequence
  Description of Artificial Sequence: Synthetic oligonucleotide
  Target: LAMA2; (-) strand; PAM type: NRG; PAM sequence: TGG
caaaaatgtaaaagtactga

SEQ ID NO: 104384 - DNA, 20 bp, Artificial Sequence
  Description of Artificial Sequence: Synthetic oligonucleotide
  Target: LAMA2; (-) strand; PAM type: NRG; PAM sequence: AAG
actgacaaacaaaaatgtaa

SEQ ID NO: 104385 - DNA, 20 bp, Artificial Sequence
  Description of Artificial Sequence: Synthetic oligonucleotide
  Target: LAMA2; (-) strand; PAM type: NRG; PAM sequence: CAG
tgaagcatttacttttccca

SEQ ID NO: 104386 - DNA, 20 bp, Artificial Sequence
  Description of Artificial Sequence: Synthetic oligonucleotide
  Target: LAMA2; (-) strand; PAM type: NRG; PAM sequence: AAG
aatagataaatgtcagtctg

SEQ ID NO: 104387 - DNA, 20 bp, Artificial Sequence
  Description of Artificial Sequence: Synthetic oligonucleotide
  Target: LAMA2; (-) strand; PAM type: NRG; PAM sequence: CAG
aagctgaaatagataaatgt

SEQ ID NO: 104388 - DNA, 20 bp, Artificial Sequence
  Description of Artificial Sequence: Synthetic oligonucleotide
  Target: LAMA2; (-) strand; PAM type: NRG; PAM sequence: TAG
atccaaacataaagctgaaa

SEQ ID NO: 104389 - DNA, 20 bp, Artificial Sequence
  Description of Artificial Sequence: Synthetic oligonucleotide
  Target: LAMA2; (-) strand; PAM type: NRG; PAM sequence: AAG
agtacatctatccaaacata

SEQ ID NO: 104390 - DNA, 20 bp, Artificial Sequence
  Description of Artificial Sequence: Synthetic oligonucleotide
  Target: LAMA2; (-) strand; PAM type: NRG; PAM sequence: TAG
ataatgaaagataggatgaa

SEQ ID NO: 104391 - DNA, 20 bp, Artificial Sequence
  Description of Artificial Sequence: Synthetic oligonucleotide
  Target: LAMA2; (-) strand; PAM type: NRG; PAM sequence: AGG
catgactcataatgaaagat

SEQ ID NO: 104392 - DNA, 20 bp, Artificial Sequence
  Description of Artificial Sequence: Synthetic oligonucleotide
  Target: LAMA2; (-) strand; PAM type: NRG; PAM sequence: TAG
tcatgactcataatgaaaga

SEQ ID NO: 104393 - DNA, 20 bp, Artificial Sequence
  Description of Artificial Sequence: Synthetic oligonucleotide
  Target: LAMA2; (-) strand; PAM type: NRG; PAM sequence: AAG
gaggtcatgactcataatga

SEQ ID NO: 104394 - DNA, 20 bp, Artificial Sequence
  Description of Artificial Sequence: Synthetic oligonucleotide
  Target: LAMA2; (-) strand; PAM type: NRG; PAM sequence: AGG
gaaggtgattatctataacg

SEQ ID NO: 104395 - DNA, 20 bp, Artificial Sequence
  Description of Artificial Sequence: Synthetic oligonucleotide
  Target: LAMA2; (-) strand; PAM type: NRG; PAM sequence: GAG
agaaggtgattatctataac

SEQ ID NO: 104396 - DNA, 20 bp, Artificial Sequence
  Description of Artificial Sequence: Synthetic oligonucleotide
  Target: LAMA2; (-) strand; PAM type: NRG; PAM sequence: AGG
gaatgccttagatgaataga

SEQ ID NO: 104397 - DNA, 20 bp, Artificial Sequence
  Description of Artificial Sequence: Synthetic oligonucleotide
  Target: LAMA2; (-) strand; PAM type: NRG; PAM sequence: AAG
agaatgccttagatgaatag

SEQ ID NO: 104398 - DNA, 20 bp, Artificial Sequence
  Description of Artificial Sequence: Synthetic oligonucleotide
  Target: LAMA2; (-) strand; PAM type: NRG; PAM sequence: TAG
ataagaatgccttagatgaa

SEQ ID NO: 104399 - DNA, 20 bp, Artificial Sequence
  Description of Artificial Sequence: Synthetic oligonucleotide
  Target: LAMA2; (-) strand; PAM type: NRG; PAM sequence: TAG
atagtgagataagaatgcct

SEQ ID NO: 104400 - DNA, 20 bp, Artificial Sequence
  Description of Artificial Sequence: Synthetic oligonucleotide
  Target: LAMA2; (-) strand; PAM type: NRG; PAM sequence: AAG
ttataaaattatagtgagat

SEQ ID NO: 104401 - DNA, 20 bp, Artificial Sequence
  Description of Artificial Sequence: Synthetic oligonucleotide
  Target: LAMA2; (-) strand; PAM type: NRG; PAM sequence: GAG
agatattataaaattatagt

SEQ ID NO: 104402 - DNA, 20 bp, Artificial Sequence
  Description of Artificial Sequence: Synthetic oligonucleotide
  Target: LAMA2; (-) strand; PAM type: NRG; PAM sequence: TAG
cggtagatattataaaatta

SEQ ID NO: 104403 - DNA, 20 bp, Artificial Sequence
  Description of Artificial Sequence: Synthetic oligonucleotide
  Target: LAMA2; (-) strand; PAM type: NRG; PAM sequence: TAG
aatcaggagtcatagcacgg

SEQ ID NO: 104404 - DNA, 20 bp, Artificial Sequence
  Description of Artificial Sequence: Synthetic oligonucleotide
  Target: LAMA2; (-) strand; PAM type: NRG; PAM sequence: CGG
actaatcaggagtcatagca

SEQ ID NO: 104405 - DNA, 20 bp, Artificial Sequence
  Description of Artificial Sequence: Synthetic oligonucleotide
  Target: LAMA2; (-) strand; PAM type: NRG; PAM sequence: TAG
tatgaactaatcaggagtca

SEQ ID NO: 104406 - DNA, 20 bp, Artificial Sequence
  Description of Artificial Sequence: Synthetic oligonucleotide
  Target: LAMA2; (-) strand; PAM type: NRG; PAM sequence: GAG
tttatttatgaactaatcag

SEQ ID NO: 104407 - DNA, 20 bp, Artificial Sequence
  Description of Artificial Sequence: Synthetic oligonucleotide
  Target: LAMA2; (-) strand; PAM type: NRG; PAM sequence: AGG
agtttatttatgaactaatc

SEQ ID NO: 104408 - DNA, 20 bp, Artificial Sequence
  Description of Artificial Sequence: Synthetic oligonucleotide
  Target: LAMA2; (-) strand; PAM type: NRG; PAM sequence: CAG
cagtttatttatgaactaat

SEQ ID NO: 104409 - DNA, 20 bp, Artificial Sequence
  Description of Artificial Sequence: Synthetic oligonucleotide
  Target: LAMA2; (-) strand; PAM type: NRG; PAM sequence: CAG
taataatgcgtggaataaaa

SEQ ID NO: 104410 - DNA, 20 bp, Artificial Sequence
  Description of Artificial Sequence: Synthetic oligonucleotide
  Target: LAMA2; (-) strand; PAM type: NRG; PAM sequence: TGG
tcattaattctaataatgcg

SEQ ID NO: 104411 - DNA, 20 bp, Artificial Sequence
  Description of Artificial Sequence: Synthetic oligonucleotide
  Target: LAMA2; (-) strand; PAM type: NRG; PAM sequence: GGG
gtcaggaaataaacactaat

SEQ ID NO: 104412 - DNA, 20 bp, Artificial Sequence
  Description of Artificial Sequence: Synthetic oligonucleotide
  Target: LAMA2; (-) strand; PAM type: NRG; PAM sequence: TGG
tgtcaggaaataaacactaa

SEQ ID NO: 104413 - DNA, 20 bp, Artificial Sequence
  Description of Artificial Sequence: Synthetic oligonucleotide
  Target: LAMA2; (-) strand; PAM type: NRG; PAM sequence: AGG
attaagtcctattgtatgtc

SEQ ID NO: 104414 - DNA, 20 bp, Artificial Sequence
  Description of Artificial Sequence: Synthetic oligonucleotide
  Target: LAMA2; (-) strand; PAM type: NRG; PAM sequence: CAG
gattaagtcctattgtatgt

SEQ ID NO: 104415 - DNA, 20 bp, Artificial Sequence
  Description of Artificial Sequence: Synthetic oligonucleotide
  Target: LAMA2; (-) strand; PAM type: NRG; PAM sequence: AAG
aaaggtgtctatcattgatt

SEQ ID NO: 104416 - DNA, 20 bp, Artificial Sequence
  Description of Artificial Sequence: Synthetic oligonucleotide
  Target: LAMA2; (-) strand; PAM type: NRG; PAM sequence: AGG
atctgagaaacaggaaggaa

SEQ ID NO: 104417 - DNA, 20 bp, Artificial Sequence
  Description of Artificial Sequence: Synthetic oligonucleotide
  Target: LAMA2; (-) strand; PAM type: NRG; PAM sequence: AAG
gatctgagaaacaggaagga

SEQ ID NO: 104418 - DNA, 20 bp, Artificial Sequence
  Description of Artificial Sequence: Synthetic oligonucleotide
  Target: LAMA2; (-) strand; PAM type: NRG; PAM sequence: AGG
ctctgatctgagaaacagga

SEQ ID NO: 104419 - DNA, 20 bp, Artificial Sequence
  Description of Artificial Sequence: Synthetic oligonucleotide
  Target: LAMA2; (-) strand; PAM type: NRG; PAM sequence: AAG
actctgatctgagaaacagg

SEQ ID NO: 104420 - DNA, 20 bp, Artificial Sequence
  Description of Artificial Sequence: Synthetic oligonucleotide
  Target: LAMA2; (-) strand; PAM type: NRG; PAM sequence: AGG
aatactctgatctgagaaac

SEQ ID NO: 104421 - DNA, 20 bp, Artificial Sequence
  Description of Artificial Sequence: Synthetic oligonucleotide
  Target: LAMA2; (-) strand; PAM type: NRG; PAM sequence: CAG
taatactctgatctgagaaa

SEQ ID NO: 104422 - DNA, 20 bp, Artificial Sequence
  Description of Artificial Sequence: Synthetic oligonucleotide
  Target: LAMA2; (-) strand; PAM type: NRG; PAM sequence: GAG
agaaagtaatactctgatct

SEQ ID NO: 104423 - DNA, 20 bp, Artificial Sequence
  Description of Artificial Sequence: Synthetic oligonucleotide
  Target: LAMA2; (-) strand; PAM type: NRG; PAM sequence: AAG
gtaaatttattaagaataga

SEQ ID NO: 104424 - DNA, 20 bp, Artificial Sequence
  Description of Artificial Sequence: Synthetic oligonucleotide
  Target: LAMA2; (-) strand; PAM type: NRG; PAM sequence: TAG
atgggtaaatttattaagaa

SEQ ID NO: 104425 - DNA, 20 bp, Artificial Sequence
  Description of Artificial Sequence: Synthetic oligonucleotide
  Target: LAMA2; (-) strand; PAM type: NRG; PAM sequence: AAG
ctctgatgggtaaatttatt

SEQ ID NO: 104426 - DNA, 20 bp, Artificial Sequence
  Description of Artificial Sequence: Synthetic oligonucleotide
  Target: LAMA2; (-) strand; PAM type: NRG; PAM sequence: GGG
tgaaaacaaaatcctctgat

SEQ ID NO: 104427 - DNA, 20 bp, Artificial Sequence
  Description of Artificial Sequence: Synthetic oligonucleotide
  Target: LAMA2; (-) strand; PAM type: NRG; PAM sequence: TGG
ctgaaaacaaaatcctctga

SEQ ID NO: 104428 - DNA, 20 bp, Artificial Sequence
  Description of Artificial Sequence: Synthetic oligonucleotide
  Target: LAMA2; (-) strand; PAM type: NRG; PAM sequence: AAG
agcaaaactgttttcatact

SEQ ID NO: 104429 - DNA, 20 bp, Artificial Sequence
  Description of Artificial Sequence: Synthetic oligonucleotide
  Target: LAMA2; (-) strand; PAM type: NRG; PAM sequence: AAG
aagtaaaaattcctcaggag

SEQ ID NO: 104430 - DNA, 20 bp, Artificial Sequence
  Description of Artificial Sequence: Synthetic oligonucleotide
  Target: LAMA2; (-) strand; PAM type: NRG; PAM sequence: GAG
ggtaagtaaaaattcctcag

SEQ ID NO: 104431 - DNA, 20 bp, Artificial Sequence
  Description of Artificial Sequence: Synthetic oligonucleotide
  Target: LAMA2; (-) strand; PAM type: NRG; PAM sequence: AGG
aaggtaagtaaaaattcctc

SEQ ID NO: 104432 - DNA, 20 bp, Artificial Sequence
  Description of Artificial Sequence: Synthetic oligonucleotide
  Target: LAMA2; (-) strand; PAM type: NRG; PAM sequence: CAG
aaaggtaagtaaaaattcct

SEQ ID NO: 104433 - DNA, 20 bp, Artificial Sequence
  Description of Artificial Sequence: Synthetic oligonucleotide
  Target: LAMA2; (-) strand; PAM type: NRG; PAM sequence: AAG
catacagtatctataaaggt

SEQ ID NO: 104434 - DNA, 20 bp, Artificial Sequence
  Description of Artificial Sequence: Synthetic oligonucleotide
  Target: LAMA2; (-) strand; PAM type: NRG; PAM sequence: AGG
gaggcatacagtatctataa

SEQ ID NO: 104435 - DNA, 20 bp, Artificial Sequence
  Description of Artificial Sequence: Synthetic oligonucleotide
  Target: LAMA2; (-) strand; PAM type: NRG; PAM sequence: AAG
agaggcatacagtatctata

SEQ ID NO: 104436 - DNA, 20 bp, Artificial Sequence
  Description of Artificial Sequence: Synthetic oligonucleotide
  Target: LAMA2; (-) strand; PAM type: NRG; PAM sequence: CAG
taggattcttaagaggcata

SEQ ID NO: 104437 - DNA, 20 bp, Artificial Sequence
  Description of Artificial Sequence: Synthetic oligonucleotide
  Target: LAMA2; (-) strand; PAM type: NRG; PAM sequence: AGG
atacaaataggattcttaag

SEQ ID NO: 104438 - DNA, 20 bp, Artificial Sequence
  Description of Artificial Sequence: Synthetic oligonucleotide
  Target: LAMA2; (-) strand; PAM type: NRG; PAM sequence: GAG
aatacaaataggattcttaa

SEQ ID NO: 104439 - DNA, 20 bp, Artificial Sequence
  Description of Artificial Sequence: Synthetic oligonucleotide
  Target: LAMA2; (-) strand; PAM type: NRG; PAM sequence: AAG
ggaatacaaataggattctt

SEQ ID NO: 104440 - DNA, 20 bp, Artificial Sequence
  Description of Artificial Sequence: Synthetic oligonucleotide
  Target: LAMA2; (-) strand; PAM type: NRG; PAM sequence: AGG
gcgtagcagggaatacaaat

SEQ ID NO: 104441 - DNA, 20 bp, Artificial Sequence
  Description of Artificial Sequence: Synthetic oligonucleotide
  Target: LAMA2; (-) strand; PAM type: NRG; PAM sequence: TAG
cgcgtagcagggaatacaaa

SEQ ID NO: 104442 - DNA, 20 bp, Artificial Sequence
  Description of Artificial Sequence: Synthetic oligonucleotide
  Target: LAMA2; (-) strand; PAM type: NRG; PAM sequence: GGG
ttagtagactacgcgtagca

SEQ ID NO: 104443 - DNA, 20 bp, Artificial Sequence
  Description of Artificial Sequence: Synthetic oligonucleotide
  Target: LAMA2; (-) strand; PAM type: NRG; PAM sequence: AGG
cttagtagactacgcgtagc

SEQ ID NO: 104444 - DNA, 20 bp, Artificial Sequence
  Description of Artificial Sequence: Synthetic oligonucleotide
  Target: LAMA2; (-) strand; PAM type: NRG; PAM sequence: CAG
tcttagtagactacgcgtag

SEQ ID NO: 104445 - DNA, 20 bp, Artificial Sequence
  Description of Artificial Sequence: Synthetic oligonucleotide
  Target: LAMA2; (-) strand; PAM type: NRG; PAM sequence: TAG
gcatcttagtagactacgcg

SEQ ID NO: 104446 - DNA, 20 bp, Artificial Sequence
  Description of Artificial Sequence: Synthetic oligonucleotide
  Target: LAMA2; (-) strand; PAM type: NRG; PAM sequence: TAG
tccactactaagcatcttag

SEQ ID NO: 104447 - DNA, 20 bp, Artificial Sequence
  Description of Artificial Sequence: Synthetic oligonucleotide
  Target: LAMA2; (-) strand; PAM type: NRG; PAM sequence: TAG
aagtccactactaagcatct

SEQ ID NO: 104448 - DNA, 20 bp, Artificial Sequence
  Description of Artificial Sequence: Synthetic oligonucleotide
  Target: LAMA2; (-) strand; PAM type: NRG; PAM sequence: AAG
tgcatcctaagtccactact

SEQ ID NO: 104449 - DNA, 20 bp, Artificial Sequence
  Description of Artificial Sequence: Synthetic oligonucleotide
  Target: LAMA2; (-) strand; PAM type: NRG; PAM sequence: AAG
cgttcaatgcagtgcatcct

SEQ ID NO: 104450 - DNA, 20 bp, Artificial Sequence
  Description of Artificial Sequence: Synthetic oligonucleotide
  Target: LAMA2; (-) strand; PAM type: NRG; PAM sequence: CAG
ccatgccataacgttcaatg

SEQ ID NO: 104451 - DNA, 20 bp, Artificial Sequence
  Description of Artificial Sequence: Synthetic oligonucleotide
  Target: LAMA2; (-) strand; PAM type: NRG; PAM sequence: CAG
ttagggaaagaattagtaga

SEQ ID NO: 104452 - DNA, 20 bp, Artificial Sequence
  Description of Artificial Sequence: Synthetic oligonucleotide
  Target: LAMA2; (-) strand; PAM type: NRG; PAM sequence: TAG
taaattagggaaagaattag

SEQ ID NO: 104453 - DNA, 20 bp, Artificial Sequence
  Description of Artificial Sequence: Synthetic oligonucleotide
  Target: LAMA2; (-) strand; PAM type: NRG; PAM sequence: TAG
gtataaattagggaaagaat

SEQ ID NO: 104454 - DNA, 20 bp, Artificial Sequence
  Description of Artificial Sequence: Synthetic oligonucleotide
  Target: LAMA2; (-) strand; PAM type: NRG; PAM sequence: AAG
aaagttgtataaattaggga

SEQ ID NO: 104455 - DNA, 20 bp, Artificial Sequence
  Description of Artificial Sequence: Synthetic oligonucleotide
  Target: LAMA2; (-) strand; PAM type: NRG; PAM sequence: GGG
aaaaaaagttgtataaatta

SEQ ID NO: 104456 - DNA, 20 bp, Artificial Sequence
  Description of Artificial Sequence: Synthetic oligonucleotide
  Target: LAMA2; (-) strand; PAM type: NRG; PAM sequence: AGG
aaaaaaaagttgtataaatt

SEQ ID NO: 104457 - DNA, 20 bp, Artificial Sequence
  Description of Artificial Sequence: Synthetic oligonucleotide
  Target: LAMA2; (-) strand; PAM type: NRG; PAM sequence: TAG
aaaaaaaaagttgtataaat

SEQ ID NO: 104458 - DNA, 20 bp, Artificial Sequence
  Description of Artificial Sequence: Synthetic oligonucleotide
  Target: LAMA2; (-) strand; PAM type: NRG; PAM sequence: AAG
agcactacaggtaaaaaaaa

SEQ ID NO: 104459 - DNA, 20 bp, Artificial Sequence
  Description of Artificial Sequence: Synthetic oligonucleotide
  Target: LAMA2; (-) strand; PAM type: NRG; PAM sequence: AGG
ataaaaggaaatagcactac

SEQ ID NO: 104460 - DNA, 20 bp, Artificial Sequence
  Description of Artificial Sequence: Synthetic oligonucleotide
  Target: LAMA2; (-) strand; PAM type: NRG; PAM sequence: CAG
aataaaaggaaatagcacta

SEQ ID NO: 104461 - DNA, 20 bp, Artificial Sequence
  Description of Artificial Sequence: Synthetic oligonucleotide
  Target: LAMA2; (-) strand; PAM type: NRG; PAM sequence: TAG
aaaattaaaataaaaggaaa

SEQ ID NO: 104462 - DNA, 20 bp, Artificial Sequence
  Description of Artificial Sequence: Synthetic oligonucleotide
  Target: LAMA2; (-) strand; PAM type: NRG; PAM sequence: AGG
tcagataaaattaaaataaa

SEQ ID NO: 104463 - DNA, 20 bp, Artificial Sequence
  Description of Artificial Sequence: Synthetic oligonucleotide
  Target: LAMA2; (-) strand; PAM type: NRG; PAM sequence: AAG
atcagataaaattaaaataa

SEQ ID NO: 104464 - DNA, 20 bp, Artificial Sequence
  Description of Artificial Sequence: Synthetic oligonucleotide
  Target: LAMA2; (-) strand; PAM type: NRG; PAM sequence: CAG
ttttttaaaaatcctaatat

SEQ ID NO: 104465 - DNA, 20 bp, Artificial Sequence
  Description of Artificial Sequence: Synthetic oligonucleotide
  Target: LAMA2; (-) strand; PAM type: NRG; PAM sequence: AGG
cttaattcaaaggaggattt

SEQ ID NO: 104466 - DNA, 20 bp, Artificial Sequence
  Description of Artificial Sequence: Synthetic oligonucleotide
  Target: LAMA2; (-) strand; PAM type: NRG; PAM sequence: TAG
acttaattcaaaggaggatt

SEQ ID NO: 104467 - DNA, 20 bp, Artificial Sequence
  Description of Artificial Sequence: Synthetic oligonucleotide
  Target: LAMA2; (-) strand; PAM type: NRG; PAM sequence: AGG
tttccaacttaattcaaagg

SEQ ID NO: 104468 - DNA, 20 bp, Artificial Sequence
  Description of Artificial Sequence: Synthetic oligonucleotide
  Target: LAMA2; (-) strand; PAM type: NRG; PAM sequence: GAG
atttccaacttaattcaaag

SEQ ID NO: 104469 - DNA, 20 bp, Artificial Sequence
  Description of Artificial Sequence: Synthetic oligonucleotide
  Target: LAMA2; (-) strand; PAM type: NRG; PAM sequence: AGG
ttatttccaacttaattcaa

SEQ ID NO: 104470 - DNA, 20 bp, Artificial Sequence
  Description of Artificial Sequence: Synthetic oligonucleotide
  Target: LAMA2; (-) strand; PAM type: NRG; PAM sequence: AAG
tttatttccaacttaattca

SEQ ID NO: 104471 - DNA, 20 bp, Artificial Sequence
  Description of Artificial Sequence: Synthetic oligonucleotide
  Target: LAMA2; (-) strand; PAM type: NRG; PAM sequence: TGG
gattgtaaaagatgtatctt

SEQ ID NO: 104472 - DNA, 20 bp, Artificial Sequence
  Description of Artificial Sequence: Synthetic oligonucleotide
  Target: LAMA2; (-) strand; PAM type: NRG; PAM sequence: AAG
agtattgaaaatgattgtaa

SEQ ID NO: 104473 - DNA, 20 bp, Artificial Sequence
  Description of Artificial Sequence: Synthetic oligonucleotide
  Target: LAMA2; (-) strand; PAM type: NRG; PAM sequence: CAG
tcaatatattttctttccca

SEQ ID NO: 104474 - DNA, 20 bp, Artificial Sequence
  Description of Artificial Sequence: Synthetic oligonucleotide
  Target: LAMA2; (-) strand; PAM type: NRG; PAM sequence: AAG
gtttttcatctcttattcaa

SEQ ID NO: 104475 - DNA, 20 bp, Artificial Sequence
  Description of Artificial Sequence: Synthetic oligonucleotide
  Target: LAMA2; (-) strand; PAM type: NRG; PAM sequence: AAG
aacttctctgagcattctta

SEQ ID NO: 104476 - DNA, 20 bp, Artificial Sequence
  Description of Artificial Sequence: Synthetic oligonucleotide
  Target: LAMA2; (-) strand; PAM type: NRG; PAM sequence: GAG
ataggatctggaacttctct

SEQ ID NO: 104477 - DNA, 20 bp, Artificial Sequence
  Description of Artificial Sequence: Synthetic oligonucleotide
  Target: LAMA2; (-) strand; PAM type: NRG; PAM sequence: TGG
tcctatgtataaataggatc

SEQ ID NO: 104478 - DNA, 20 bp, Artificial Sequence
  Description of Artificial Sequence: Synthetic oligonucleotide
  Target: LAMA2; (-) strand; PAM type: NRG; PAM sequence: AGG
tccagatcctatgtataaat

SEQ ID NO: 104479 - DNA, 20 bp, Artificial Sequence
  Description of Artificial Sequence: Synthetic oligonucleotide
  Target: LAMA2; (-) strand; PAM type: NRG; PAM sequence: TAG
ttccagatcctatgtataaa

SEQ ID NO: 104480 - DNA, 20 bp, Artificial Sequence
  Description of Artificial Sequence: Synthetic oligonucleotide
  Target: LAMA2; (-) strand; PAM type: NRG; PAM sequence: CAG
tatatacatatatatagttc

SEQ ID NO: 104481 - DNA, 20 bp, Artificial Sequence
  Description of Artificial Sequence: Synthetic oligonucleotide
  Target: LAMA2; (-) strand; PAM type: NRG; PAM sequence: TAG
tatgtttatatacatatata

SEQ ID NO: 104482 - DNA, 20 bp, Artificial Sequence
  Description of Artificial Sequence: Synthetic oligonucleotide
  Target: LAMA2; (-) strand; PAM type: NRG; PAM sequence: CAG
tatagacatatataaacata

SEQ ID NO: 104483 - DNA, 20 bp, Artificial Sequence
  Description of Artificial Sequence: Synthetic oligonucleotide
  Target: LAMA2; (-) strand; PAM type: NRG; PAM sequence: TAG
gaagtctgtttcactcttta

SEQ ID NO: 104484 - DNA, 20 bp, Artificial Sequence
  Description of Artificial Sequence: Synthetic oligonucleotide
  Target: LAMA2; (-) strand; PAM type: NRG; PAM sequence: AAG
aggaagcatcattttaatag

SEQ ID NO: 104485 - DNA, 20 bp, Artificial Sequence
  Description of Artificial Sequence: Synthetic oligonucleotide
  Target: LAMA2; (-) strand; PAM type: NRG; PAM sequence: TAG
gaaaggaagcatcattttaa

SEQ ID NO: 104486 - DNA, 20 bp, Artificial Sequence
  Description of Artificial Sequence: Synthetic oligonucleotide
  Target: LAMA2; (-) strand; PAM type: NRG; PAM sequence: AAG
ccccaccaaaaaaggaaagg

SEQ ID NO: 104487 - DNA, 20 bp, Artificial Sequence
  Description of Artificial Sequence: Synthetic oligonucleotide
  Target: LAMA2; (-) strand; PAM type: NRG; PAM sequence: AGG
ctcccccaccaaaaaaggaa

SEQ ID NO: 104488 - DNA, 20 bp, Artificial Sequence
  Description of Artificial Sequence: Synthetic oligonucleotide
  Target: LAMA2; (-) strand; PAM type: NRG; PAM sequence: AAG
tctcccccaccaaaaaagga

SEQ ID NO: 104489 - DNA, 20 bp, Artificial Sequence
  Description of Artificial Sequence: Synthetic oligonucleotide
  Target: LAMA2; (-) strand; PAM type: NRG; PAM sequence: AGG
gaaatctcccccaccaaaaa

SEQ ID NO: 104490 - DNA, 20 bp, Artificial Sequence
  Description of Artificial Sequence: Synthetic oligonucleotide
  Target: LAMA2; (-) strand; PAM type: NRG; PAM sequence: AAG
agaaatctcccccaccaaaa

SEQ ID NO: 104491 - DNA, 20 bp, Artificial Sequence
  Description of Artificial Sequence: Synthetic oligonucleotide
  Target: LAMA2; (-) strand; PAM type: NRG; PAM sequence: TAG
gctaggcaatatgattttct

SEQ ID NO: 104492 - DNA, 20 bp, Artificial Sequence
  Description of Artificial Sequence: Synthetic oligonucleotide
  Target: LAMA2; (-) strand; PAM type: NRG; PAM sequence: AGG
ataggcatctatcacttgct

SEQ ID NO: 104493 - DNA, 20 bp, Artificial Sequence
  Description of Artificial Sequence: Synthetic oligonucleotide
  Target: LAMA2; (-) strand; PAM type: NRG; PAM sequence: TAG
cataggcatctatcacttgc

SEQ ID NO: 104494 - DNA, 20 bp, Artificial Sequence
  Description of Artificial Sequence: Synthetic oligonucleotide
  Target: LAMA2; (-) strand; PAM type: NRG; PAM sequence: AGG
tcattttccatttctctcat

SEQ ID NO: 104495 - DNA, 20 bp, Artificial Sequence
  Description of Artificial Sequence: Synthetic oligonucleotide
  Target: LAMA2; (-) strand; PAM type: NRG; PAM sequence: TAG
gtcattttccatttctctca

SEQ ID NO: 104496 - DNA, 20 bp, Artificial Sequence
  Description of Artificial Sequence: Synthetic oligonucleotide
  Target: LAMA2; (-) strand; PAM type: NRG; PAM sequence: AAG
ttccattatttttctactga

SEQ ID NO: 104497 - DNA, 20 bp, Artificial Sequence
  Description of Artificial Sequence: Synthetic oligonucleotide
  Target: LAMA2; (-) strand; PAM type: NRG; PAM sequence: TAG
tttttgtatggtgaactgtc

SEQ ID NO: 104498 - DNA, 20 bp, Artificial Sequence
  Description of Artificial Sequence: Synthetic oligonucleotide
  Target: LAMA2; (-) strand; PAM type: NRG; PAM sequence: TGG
catttaacattatttttgta

SEQ ID NO: 104499 - DNA, 20 bp, Artificial Sequence
  Description of Artificial Sequence: Synthetic oligonucleotide
  Target: LAMA2; (-) strand; PAM type: NRG; PAM sequence: CAG
aaagttttatagttattttc

SEQ ID NO: 104500 - DNA, 20 bp, Artificial Sequence
  Description of Artificial Sequence: Synthetic oligonucleotide
  Target: LAMA2; (-) strand; PAM type: NRG; PAM sequence: TAG
attagtgttttaaagtttta

SEQ ID NO: 104501 - DNA, 20 bp, Artificial Sequence
  Description of Artificial Sequence: Synthetic oligonucleotide
  Target: LAMA2; (-) strand; PAM type: NRG; PAM sequence: AAG
tatttattattagtgtttta

SEQ ID NO: 104502 - DNA, 20 bp, Artificial Sequence
  Description of Artificial Sequence: Synthetic oligonucleotide
  Target: LAMA2; (-) strand; PAM type: NRG; PAM sequence: TAG
ggataacatttatttattat

SEQ ID NO: 104503 - DNA, 20 bp, Artificial Sequence
  Description of Artificial Sequence: Synthetic oligonucleotide
  Target: LAMA2; (-) strand; PAM type: NRG; PAM sequence: TGG
taaaacttgccagtttaatt

SEQ ID NO: 104504 - DNA, 20 bp, Artificial Sequence
  Description of Artificial Sequence: Synthetic oligonucleotide
  Target: LAMA2; (-) strand; PAM type: NRG; PAM sequence: CAG
catggcccattaaaacttgc

SEQ ID NO: 104505 - DNA, 20 bp, Artificial Sequence
  Description of Artificial Sequence: Synthetic oligonucleotide
  Target: LAMA2; (-) strand; PAM type: NRG; PAM sequence: TGG
ggacacagataaattacaca

SEQ ID NO: 104506 - DNA, 20 bp, Artificial Sequence
  Description of Artificial Sequence: Synthetic oligonucleotide
  Target: LAMA2; (-) strand; PAM type: NRG; PAM sequence: CAG
aatatggcctcatcgggaca

SEQ ID NO: 104507 - DNA, 20 bp, Artificial Sequence
  Description of Artificial Sequence: Synthetic oligonucleotide
  Target: LAMA2; (-) strand; PAM type: NRG; PAM sequence: GGG
gagaaaaatatggcctcatc

SEQ ID NO: 104508 - DNA, 20 bp, Artificial Sequence
  Description of Artificial Sequence: Synthetic oligonucleotide
  Target: LAMA2; (-) strand; PAM type: NRG; PAM sequence: CGG
ggagaaaaatatggcctcat

SEQ ID NO: 104509 - DNA, 20 bp, Artificial Sequence
  Description of Artificial Sequence: Synthetic oligonucleotide
  Target: LAMA2; (-) strand; PAM type: NRG; PAM sequence: TGG
atgggttttggagaaaaata

SEQ ID NO: 104510 - DNA, 20 bp, Artificial Sequence
  Description of Artificial Sequence: Synthetic oligonucleotide
  Target: LAMA2; (-) strand; PAM type: NRG; PAM sequence: GAG
aattttagatatgggttttg

SEQ ID NO: 104511 - DNA, 20 bp, Artificial Sequence
  Description of Artificial Sequence: Synthetic oligonucleotide
  Target: LAMA2; (-) strand; PAM type: NRG; PAM sequence: TGG
caaattttagatatgggttt

SEQ ID NO: 104512 - DNA, 20 bp, Artificial Sequence
  Description of Artificial Sequence: Synthetic oligonucleotide
  Target: LAMA2; (-) strand; PAM type: NRG; PAM sequence: GGG
gaaaaacaaattttagatat

SEQ ID NO: 104513 - DNA, 20 bp, Artificial Sequence
  Description of Artificial Sequence: Synthetic oligonucleotide
  Target: LAMA2; (-) strand; PAM type: NRG; PAM sequence: TGG
tgaaaaacaaattttagata

SEQ ID NO: 104514 - DNA, 20 bp, Artificial Sequence
  Description of Artificial Sequence: Synthetic oligonucleotide
  Target: LAMA2; (-) strand; PAM type: NRG; PAM sequence: TAG
tcattatgaaaaacaaattt

SEQ ID NO: 104515 - DNA, 20 bp, Artificial Sequence
  Description of Artificial Sequence: Synthetic oligonucleotide
  Target: LAMA2; (-) strand; PAM type: NRG; PAM sequence: TGG
gcatctttcaaatgggtttt

SEQ ID NO: 104516 - DNA, 20 bp, Artificial Sequence
  Description of Artificial Sequence: Synthetic oligonucleotide
  Target: LAMA2; (-) strand; PAM type: NRG; PAM sequence: GGG
aatgagagcatctttcaaat

SEQ ID NO: 104517 - DNA, 20 bp, Artificial Sequence
  Description of Artificial Sequence: Synthetic oligonucleotide
  Target: LAMA2; (-) strand; PAM type: NRG; PAM sequence: TGG
aaatgagagcatctttcaaa

SEQ ID NO: 104518 - DNA, 20 bp, Artificial Sequence
  Description of Artificial Sequence: Synthetic oligonucleotide
  Target: LAMA2; (-) strand; PAM type: NRG; PAM sequence: GAG
tatctttttggattaaatga

SEQ ID NO: 104519 - DNA, 20 bp, Artificial Sequence
  Description of Artificial Sequence: Synthetic oligonucleotide
  Target: LAMA2; (-) strand; PAM type: NRG; PAM sequence: GAG
agtatctttttggattaaat

SEQ ID NO: 104520 - DNA, 20 bp, Artificial Sequence
  Description of Artificial Sequence: Synthetic oligonucleotide
  Target: LAMA2; (-) strand; PAM type: NRG; PAM sequence: TGG
atgggccttcagtatctttt

SEQ ID NO: 104521 - DNA, 20 bp, Artificial Sequence
  Description of Artificial Sequence: Synthetic oligonucleotide
  Target: LAMA2; (-) strand; PAM type: NRG; PAM sequence: CAG
ccaaaatggacatgggcctt

SEQ ID NO: 104522 - DNA, 20 bp, Artificial Sequence
  Description of Artificial Sequence: Synthetic oligonucleotide
  Target: LAMA2; (-) strand; PAM type: NRG; PAM sequence: GGG
aagctccccaaaatggacat

SEQ ID NO: 104523 - DNA, 20 bp, Artificial Sequence
  Description of Artificial Sequence: Synthetic oligonucleotide
  Target: LAMA2; (-) strand; PAM type: NRG; PAM sequence: TGG
caagctccccaaaatggaca

SEQ ID NO: 104524 - DNA, 20 bp, Artificial Sequence
  Description of Artificial Sequence: Synthetic oligonucleotide
  Target: LAMA2; (-) strand; PAM type: NRG; PAM sequence: TGG
aaaatacaagctccccaaaa

SEQ ID NO: 104525 - DNA, 20 bp, Artificial Sequence
  Description of Artificial Sequence: Synthetic oligonucleotide
  Target: LAMA2; (-) strand; PAM type: NRG; PAM sequence: AAG
atgttatgtaaaaaaaatac

SEQ ID NO: 104526 - DNA, 20 bp, Artificial Sequence
  Description of Artificial Sequence: Synthetic oligonucleotide
  Target: LAMA2; (-) strand; PAM type: NRG; PAM sequence: CAG
ataaactgctattccatggc

SEQ ID NO: 104527 - DNA, 20 bp, Artificial Sequence
  Description of Artificial Sequence: Synthetic oligonucleotide
  Target: LAMA2; (-) strand; PAM type: NRG; PAM sequence: TGG
tggaataaactgctattcca

SEQ ID NO: 104528 - DNA, 20 bp, Artificial Sequence
  Description of Artificial Sequence: Synthetic oligonucleotide
  Target: LAMA2; (-) strand; PAM type: NRG; PAM sequence: TGG
gcaaatatattggctgctta

SEQ ID NO: 104529 - DNA, 20 bp, Artificial Sequence
  Description of Artificial Sequence: Synthetic oligonucleotide
  Target: LAMA2; (-) strand; PAM type: NRG; PAM sequence: TGG
aaacattttagcaaatatat

SEQ ID NO: 104530 - DNA, 20 bp, Artificial Sequence
  Description of Artificial Sequence: Synthetic oligonucleotide
  Target: LAMA2; (-) strand; PAM type: NRG; PAM sequence: TAG
gaccaaaagaacaaacattt

SEQ ID NO: 104531 - DNA, 20 bp, Artificial Sequence
  Description of Artificial Sequence: Synthetic oligonucleotide
  Target: LAMA2; (-) strand; PAM type: NRG; PAM sequence: AAG
ttcaatgtggttaggaccaa

SEQ ID NO: 104532 - DNA, 20 bp, Artificial Sequence
  Description of Artificial Sequence: Synthetic oligonucleotide
  Target: LAMA2; (-) strand; PAM type: NRG; PAM sequence: AGG
cagaagatttcaatgtggtt

SEQ ID NO: 104533 - DNA, 20 bp, Artificial Sequence
  Description of Artificial Sequence: Synthetic oligonucleotide
  Target: LAMA2; (-) strand; PAM type: NRG; PAM sequence: TAG
ccagaagatttcaatgtggt

SEQ ID NO: 104534 - DNA, 20 bp, Artificial Sequence
  Description of Artificial Sequence: Synthetic oligonucleotide
  Target: LAMA2; (-) strand; PAM type: NRG; PAM sequence: TGG
agtcccagaagatttcaatg

SEQ ID NO: 104535 - DNA, 20 bp, Artificial Sequence
  Description of Artificial Sequence: Synthetic oligonucleotide
  Target: LAMA2; (-) strand; PAM type: NRG; PAM sequence: AAG
tgttattgaaatagtcccag

SEQ ID NO: 104536 - DNA, 20 bp, Artificial Sequence
  Description of Artificial Sequence: Synthetic oligonucleotide
  Target: LAMA2; (-) strand; PAM type: NRG; PAM sequence: CAG
tactgttattgaaatagtcc

SEQ ID NO: 104537 - DNA, 20 bp, Artificial Sequence
  Description of Artificial Sequence: Synthetic oligonucleotide
  Target: LAMA2; (-) strand; PAM type: NRG; PAM sequence: TAG
tgcaattactgttattgaaa

SEQ ID NO: 104538 - DNA, 20 bp, Artificial Sequence
  Description of Artificial Sequence: Synthetic oligonucleotide
  Target: LAMA2; (-) strand; PAM type: NRG; PAM sequence: TGG
gttgtttttttttttccagt

SEQ ID NO: 104539 - DNA, 20 bp, Artificial Sequence
  Description of Artificial Sequence: Synthetic oligonucleotide
  Target: LAMA2; (-) strand; PAM type: NRG; PAM sequence: CAG
tgaggttgtttttttttttc

SEQ ID NO: 104540 - DNA, 20 bp, Artificial Sequence
  Description of Artificial Sequence: Synthetic oligonucleotide
  Target: LAMA2; (-) strand; PAM type: NRG; PAM sequence: AGG
cactgtgcagctcagtcatg

SEQ ID NO: 104541 - DNA, 20 bp, Artificial Sequence
  Description of Artificial Sequence: Synthetic oligonucleotide
  Target: LAMA2; (-) strand; PAM type: NRG; PAM sequence: GAG
tcactgtgcagctcagtcat

SEQ ID NO: 104542 - DNA, 20 bp, Artificial Sequence
  Description of Artificial Sequence: Synthetic oligonucleotide
  Target: LAMA2; (-) strand; PAM type: NRG; PAM sequence: CAG
taggacatcactgtgcagct

SEQ ID NO: 104543 - DNA, 20 bp, Artificial Sequence
  Description of Artificial Sequence: Synthetic oligonucleotide
  Target: LAMA2; (-) strand; PAM type: NRG; PAM sequence: CAG
ttctataggacatcactgtg

SEQ ID NO: 104544 - DNA, 20 bp, Artificial Sequence
  Description of Artificial Sequence: Synthetic oligonucleotide
  Target: LAMA2; (-) strand; PAM type: NRG; PAM sequence: AGG
ataccccataaagtttctat

SEQ ID NO: 104545 - DNA, 20 bp, Artificial Sequence
  Description of Artificial Sequence: Synthetic oligonucleotide
  Target: LAMA2; (-) strand; PAM type: NRG; PAM sequence: TAG
cataccccataaagtttcta

SEQ ID NO: 104546 - DNA, 20 bp, Artificial Sequence
  Description of Artificial Sequence: Synthetic oligonucleotide
  Target: LAMA2; (-) strand; PAM type: NRG; PAM sequence: AAG
catataacacataccccata

SEQ ID NO: 104547 - DNA, 20 bp, Artificial Sequence
  Description of Artificial Sequence: Synthetic oligonucleotide
  Target: LAMA2; (-) strand; PAM type: NRG; PAM sequence: AAG
aaaaacatgagaataaaaaa

SEQ ID NO: 104548 - DNA, 20 bp, Artificial Sequence
  Description of Artificial Sequence: Synthetic oligonucleotide
  Target: LAMA2; (-) strand; PAM type: NRG; PAM sequence: GAG
aaaaaggaaaataaaaacat

SEQ ID NO: 104549 - DNA, 20 bp, Artificial Sequence
  Description of Artificial Sequence: Synthetic oligonucleotide
  Target: LAMA2; (-) strand; PAM type: NRG; PAM sequence: AGG
tcccagaacttaaagtaaaa

SEQ ID NO: 104550 - DNA, 20 bp, Artificial Sequence
  Description of Artificial Sequence: Synthetic oligonucleotide
  Target: LAMA2; (-) strand; PAM type: NRG; PAM sequence: AAG
atcccagaacttaaagtaaa

SEQ ID NO: 104551 - DNA, 20 bp, Artificial Sequence
  Description of Artificial Sequence: Synthetic oligonucleotide
  Target: LAMA2; (-) strand; PAM type: NRG; PAM sequence: AAG
tgcatgcatcccagaactta

SEQ ID NO: 104552 - DNA, 20 bp, Artificial Sequence
  Description of Artificial Sequence: Synthetic oligonucleotide
  Target: LAMA2; (-) strand; PAM type: NRG; PAM sequence: CAG
aacattctgtgcatgcatcc

SEQ ID NO: 104553 - DNA, 20 bp, Artificial Sequence
  Description of Artificial Sequence: Synthetic oligonucleotide
  Target: LAMA2; (-) strand; PAM type: NRG; PAM sequence: AGG
gcagcaaaccaccatggcac

SEQ ID NO: 104554 - DNA, 20 bp, Artificial Sequence
  Description of Artificial Sequence: Synthetic oligonucleotide
  Target: LAMA2; (-) strand; PAM type: NRG; PAM sequence: CAG
tgcagcaaaccaccatggca

SEQ ID NO: 104555 - DNA, 20 bp, Artificial Sequence
  Description of Artificial Sequence: Synthetic oligonucleotide
  Target: LAMA2; (-) strand; PAM type: NRG; PAM sequence: TGG
ataggtgcagcaaaccacca

SEQ ID NO: 104556 - DNA, 20 bp, Artificial Sequence
  Description of Artificial Sequence: Synthetic oligonucleotide
  Target: LAMA2; (-) strand; PAM type: NRG; PAM sequence: CAG
ttttgatgggttgataggtg

SEQ ID NO: 104557 - DNA, 20 bp, Artificial Sequence
  Description of Artificial Sequence: Synthetic oligonucleotide
  Target: LAMA2; (-) strand; PAM type: NRG; PAM sequence: AGG
tcttcttttgatgggttgat

SEQ ID NO: 104558 - DNA, 20 bp, Artificial Sequence
  Description of Artificial Sequence: Synthetic oligonucleotide
  Target: LAMA2; (-) strand; PAM type: NRG; PAM sequence: TAG
gtcttcttttgatgggttga

SEQ ID NO: 104559 - DNA, 20 bp, Artificial Sequence
  Description of Artificial Sequence: Synthetic oligonucleotide
  Target: LAMA2; (-) strand; PAM type: NRG; PAM sequence: GGG
cataaatgtcttcttttgat

SEQ ID NO: 104560 - DNA, 20 bp, Artificial Sequence
  Description of Artificial Sequence: Synthetic oligonucleotide
  Target: LAMA2; (-) strand; PAM type: NRG; PAM sequence: TGG
gcataaatgtcttcttttga

SEQ ID NO: 104561 - DNA, 20 bp, Artificial Sequence
  Description of Artificial Sequence: Synthetic oligonucleotide
  Target: LAMA2; (-) strand; PAM type: NRG; PAM sequence: TGG
agcttttttcatatgtttgt

SEQ ID NO: 104562 - DNA, 20 bp, Artificial Sequence
  Description of Artificial Sequence: Synthetic oligonucleotide
  Target: LAMA2; (-) strand; PAM type: NRG; PAM sequence: GAG
ctctaatgatcagtggtgat

SEQ ID NO: 104563 - DNA, 20 bp, Artificial Sequence
  Description of Artificial Sequence: Synthetic oligonucleotide
  Target: LAMA2; (-) strand; PAM type: NRG; PAM sequence: TGG
tgcatttctctaatgatcag

SEQ ID NO: 104564 - DNA, 20 bp, Artificial Sequence
  Description of Artificial Sequence: Synthetic oligonucleotide
  Target: LAMA2; (-) strand; PAM type: NRG; PAM sequence: CAG
acttgcatttctctaatgat

SEQ ID NO: 104565 - DNA, 20 bp, Artificial Sequence
  Description of Artificial Sequence: Synthetic oligonucleotide
  Target: LAMA2; (-) strand; PAM type: NRG; PAM sequence: TGG
tgtcatatgttatctcattg

SEQ ID NO: 104566 - DNA, 20 bp, Artificial Sequence
  Description of Artificial Sequence: Synthetic oligonucleotide
  Target: LAMA2; (-) strand; PAM type: NRG; PAM sequence: TGG
ttaataattaccaatctgac

SEQ ID NO: 104567 - DNA, 20 bp, Artificial Sequence
  Description of Artificial Sequence: Synthetic oligonucleotide
  Target: LAMA2; (-) strand; PAM type: NRG; PAM sequence: CAG
ctacttctccacagccttgc

SEQ ID NO: 104568 - DNA, 20 bp, Artificial Sequence
  Description of Artificial Sequence: Synthetic oligonucleotide
  Target: LAMA2; (-) strand; PAM type: NRG; PAM sequence: CAG
aaagtgtttctacttctcca

SEQ ID NO: 104569 - DNA, 20 bp, Artificial Sequence
  Description of Artificial Sequence: Synthetic oligonucleotide
  Target: LAMA2; (-) strand; PAM type: NRG; PAM sequence: AAG
cattcccaccaacagtgtaa

SEQ ID NO: 104570 - DNA, 20 bp, Artificial Sequence
  Description of Artificial Sequence: Synthetic oligonucleotide
  Target: LAMA2; (-) strand; PAM type: NRG; PAM sequence: CAG
ctaatttacattcccaccaa

SEQ ID NO: 104571 - DNA, 20 bp, Artificial Sequence
  Description of Artificial Sequence: Synthetic oligonucleotide
  Target: LAMA2; (-) strand; PAM type: NRG; PAM sequence: TGG
cgccacactgtcttccacaa

SEQ ID NO: 104572 - DNA, 20 bp, Artificial Sequence
  Description of Artificial Sequence: Synthetic oligonucleotide
  Target: LAMA2; (-) strand; PAM type: NRG; PAM sequence: AGG
tttctggttctggatccttg

SEQ ID NO: 104573 - DNA, 20 bp, Artificial Sequence
  Description of Artificial Sequence: Synthetic oligonucleotide
  Target: LAMA2; (-) strand; PAM type: NRG; PAM sequence: GAG
atttctggttctggatcctt

SEQ ID NO: 104574 - DNA, 20 bp, Artificial Sequence
  Description of Artificial Sequence: Synthetic oligonucleotide
  Target: LAMA2; (-) strand; PAM type: NRG; PAM sequence: TGG
tcaaatggtatttctggttc

SEQ ID NO: 104575 - DNA, 20 bp, Artificial Sequence
  Description of Artificial Sequence: Synthetic oligonucleotide
  Target: LAMA2; (-) strand; PAM type: NRG; PAM sequence: TGG
gctgggtcaaatggtatttc

SEQ ID NO: 104576 - DNA, 20 bp, Artificial Sequence
  Description of Artificial Sequence: Synthetic oligonucleotide
  Target: LAMA2; (-) strand; PAM type: NRG; PAM sequence: TGG
tatggggttgctgggtcaaa

SEQ ID NO: 104577 - DNA, 20 bp, Artificial Sequence
  Description of Artificial Sequence: Synthetic oligonucleotide
  Target: LAMA2; (-) strand; PAM type: NRG; PAM sequence: GGG
tacccagttatggggttgct

SEQ ID NO: 104578 - DNA, 20 bp, Artificial Sequence
  Description of Artificial Sequence: Synthetic oligonucleotide
  Target: LAMA2; (-) strand; PAM type: NRG; PAM sequence: TGG
atacccagttatggggttgc

SEQ ID NO: 104579 - DNA, 20 bp, Artificial Sequence
  Description of Artificial Sequence: Synthetic oligonucleotide
  Target: LAMA2; (-) strand; PAM type: NRG; PAM sequence: GGG
tgggtatatacccagttatg

SEQ ID NO: 104580 - DNA, 20 bp, Artificial Sequence
  Description of Artificial Sequence: Synthetic oligonucleotide
  Target: LAMA2; (-) strand; PAM type: NRG; PAM sequence: GGG
ttgggtatatacccagttat

SEQ ID NO: 104581 - DNA, 20 bp, Artificial Sequence
  Description of Artificial Sequence: Synthetic oligonucleotide
  Target: LAMA2; (-) strand; PAM type: NRG; PAM sequence: TGG
tttgggtatatacccagtta

SEQ ID NO: 104582 - DNA, 20 bp, Artificial Sequence
  Description of Artificial Sequence: Synthetic oligonucleotide
  Target: LAMA2; (-) strand; PAM type: NRG; PAM sequence: CAG
tattcctttgggtatatacc

SEQ ID NO: 104583 - DNA, 20 bp, Artificial Sequence
  Description of Artificial Sequence: Synthetic oligonucleotide
  Target: LAMA2; (-) strand; PAM type: NRG; PAM sequence: GGG
agaatgatttatattccttt

SEQ ID NO: 104584 - DNA, 20 bp, Artificial Sequence
  Description of Artificial Sequence: Synthetic oligonucleotide
  Target: LAMA2; (-) strand; PAM type: NRG; PAM sequence: TGG
tagaatgatttatattcctt

SEQ ID NO: 104585 - DNA, 20 bp, Artificial Sequence
  Description of Artificial Sequence: Synthetic oligonucleotide
  Target: LAMA2; (-) strand; PAM type: NRG; PAM sequence: TAG
ctgtatatgtgtctttagag

SEQ ID NO: 104586 - DNA, 20 bp, Artificial Sequence
  Description of Artificial Sequence: Synthetic oligonucleotide
  Target: LAMA2; (-) strand; PAM type: NRG; PAM sequence: GAG
atactgtatatgtgtcttta

SEQ ID NO: 104587 - DNA, 20 bp, Artificial Sequence
  Description of Artificial Sequence: Synthetic oligonucleotide
  Target: LAMA2; (-) strand; PAM type: NRG; PAM sequence: TAG
acatactgtatatgtgtctt

SEQ ID NO: 104588 - DNA, 20 bp, Artificial Sequence
  Description of Artificial Sequence: Synthetic oligonucleotide
  Target: LAMA2; (-) strand; PAM type: NRG; PAM sequence: TAG
gttccatctctttgcataaa

SEQ ID NO: 104589 - DNA, 20 bp, Artificial Sequence
  Description of Artificial Sequence: Synthetic oligonucleotide
  Target: LAMA2; (-) strand; PAM type: NRG; PAM sequence: TGG
tcattgatgggcatttgggt

SEQ ID NO: 104590 - DNA, 20 bp, Artificial Sequence
  Description of Artificial Sequence: Synthetic oligonucleotide
  Target: LAMA2; (-) strand; PAM type: NRG; PAM sequence: GGG
tctatcattgatgggcattt

SEQ ID NO: 104591 - DNA, 20 bp, Artificial Sequence
  Description of Artificial Sequence: Synthetic oligonucleotide
  Target: LAMA2; (-) strand; PAM type: NRG; PAM sequence: TGG
atctatcattgatgggcatt

SEQ ID NO: 104592 - DNA, 20 bp, Artificial Sequence
  Description of Artificial Sequence: Synthetic oligonucleotide
  Target: LAMA2; (-) strand; PAM type: NRG; PAM sequence: GGG
ttacctaatctatcattgat

SEQ ID NO: 104593 - DNA, 20 bp, Artificial Sequence
  Description of Artificial Sequence: Synthetic oligonucleotide
  Target: LAMA2; (-) strand; PAM type: NRG; PAM sequence: TGG
tttacctaatctatcattga

SEQ ID NO: 104594 - DNA, 20 bp, Artificial Sequence
  Description of Artificial Sequence: Synthetic oligonucleotide
  Target: LAMA2; (-) strand; PAM type: NRG; PAM sequence: TGG
tatggctgcatagtattcca

SEQ ID NO: 104595 - DNA, 20 bp, Artificial Sequence
  Description of Artificial Sequence: Synthetic oligonucleotide
  Target: LAMA2; (-) strand; PAM type: NRG; PAM sequence: TAG
cattcttttttatggctgca

SEQ ID NO: 104596 - DNA, 20 bp, Artificial Sequence
  Description of Artificial Sequence: Synthetic oligonucleotide
  Target: LAMA2; (-) strand; PAM type: NRG; PAM sequence: TGG
catgatatcattctttttta

SEQ ID NO: 104597 - DNA, 20 bp, Artificial Sequence
  Description of Artificial Sequence: Synthetic oligonucleotide
  Target: LAMA2; (-) strand; PAM type: NRG; PAM sequence: AGG
cttcatccatatccctgcaa

SEQ ID NO: 104598 - DNA, 20 bp, Artificial Sequence
  Description of Artificial Sequence: Synthetic oligonucleotide
  Target: LAMA2; (-) strand; PAM type: NRG; PAM sequence: AAG
gcttcatccatatccctgca

SEQ ID NO: 104599 - DNA, 20 bp, Artificial Sequence
  Description of Artificial Sequence: Synthetic oligonucleotide
  Target: LAMA2; (-) strand; PAM type: NRG; PAM sequence: CAG
gctgaggatgctgaagcttt

SEQ ID NO: 104600 - DNA, 20 bp, Artificial Sequence
  Description of Artificial Sequence: Synthetic oligonucleotide
  Target: LAMA2; (-) strand; PAM type: NRG; PAM sequence: AAG
ttagtttgctgaggatgctg

SEQ ID NO: 104601 - DNA, 20 bp, Artificial Sequence
  Description of Artificial Sequence: Synthetic oligonucleotide
  Target: LAMA2; (-) strand; PAM type: NRG; PAM sequence: AGG
attcctggattagtttgctg

SEQ ID NO: 104602 - DNA, 20 bp, Artificial Sequence
  Description of Artificial Sequence: Synthetic oligonucleotide
  Target: LAMA2; (-) strand; PAM type: NRG; PAM sequence: GAG
cattcctggattagtttgct

SEQ ID NO: 104603 - DNA, 20 bp, Artificial Sequence
  Description of Artificial Sequence: Synthetic oligonucleotide
  Target: LAMA2; (-) strand; PAM type: NRG; PAM sequence: TAG
ttggttttccattcctggat

SEQ ID NO: 104604 - DNA, 20 bp, Artificial Sequence
  Description of Artificial Sequence: Synthetic oligonucleotide
  Target: LAMA2; (-) strand; PAM type: NRG; PAM sequence: TGG
ggtgtttggttttccattcc

SEQ ID NO: 104605 - DNA, 20 bp, Artificial Sequence
  Description of Artificial Sequence: Synthetic oligonucleotide
  Target: LAMA2; (-) strand; PAM type: NRG; PAM sequence: TGG
gagcgagaacatgtggtgtt

SEQ ID NO: 104606 - DNA, 20 bp, Artificial Sequence
  Description of Artificial Sequence: Synthetic oligonucleotide
  Target: LAMA2; (-) strand; PAM type: NRG; PAM sequence: TGG
cacttatgagcgagaacatg

SEQ ID NO: 104607 - DNA, 20 bp, Artificial Sequence
  Description of Artificial Sequence: Synthetic oligonucleotide
  Target: LAMA2; (-) strand; PAM type: NRG; PAM sequence: GAG
ttcaactcccacttatgagc

SEQ ID NO: 104608 - DNA, 20 bp, Artificial Sequence
  Description of Artificial Sequence: Synthetic oligonucleotide
  Target: LAMA2; (-) strand; PAM type: NRG; PAM sequence: GAG
actgttcaactcccacttat

SEQ ID NO: 104609 - DNA, 20 bp, Artificial Sequence
  Description of Artificial Sequence: Synthetic oligonucleotide
  Target: LAMA2; (-) strand; PAM type: NRG; PAM sequence: CAG
ccacaacccccaatagactc

SEQ ID NO: 104610 - DNA, 20 bp, Artificial Sequence
  Description of Artificial Sequence: Synthetic oligonucleotide
  Target: LAMA2; (-) strand; PAM type: NRG; PAM sequence: TAG
cctctccccacaacccccaa

SEQ ID NO: 104611 - DNA, 20 bp, Artificial Sequence
  Description of Artificial Sequence: Synthetic oligonucleotide
  Target: LAMA2; (-) strand; PAM type: NRG; PAM sequence: AAG
agcccatcatctaggtttta

SEQ ID NO: 104612 - DNA, 20 bp, Artificial Sequence
  Description of Artificial Sequence: Synthetic oligonucleotide
  Target: LAMA2; (-) strand; PAM type: NRG; PAM sequence: AGG
ccacgcccagcccatcatct

SEQ ID NO: 104613 - DNA, 20 bp, Artificial Sequence
  Description of Artificial Sequence: Synthetic oligonucleotide
  Target: LAMA2; (-) strand; PAM type: NRG; PAM sequence: TAG
accacgcccagcccatcatc

SEQ ID NO: 104614 - DNA, 20 bp, Artificial Sequence
  Description of Artificial Sequence: Synthetic oligonucleotide
  Target: LAMA2; (-) strand; PAM type: NRG; PAM sequence: CAG
caggagtgagccaccacgcc

SEQ ID NO: 104615 - DNA, 20 bp, Artificial Sequence
  Description of Artificial Sequence: Synthetic oligonucleotide
  Target: LAMA2; (-) strand; PAM type: NRG; PAM sequence: GAG
agtactgggattacaggagt

SEQ ID NO: 104616 - DNA, 20 bp, Artificial Sequence
  Description of Artificial Sequence: Synthetic oligonucleotide
  Target: LAMA2; (-) strand; PAM type: NRG; PAM sequence: GAG
tcaaagtactgggattacag

SEQ ID NO: 104617 - DNA, 20 bp, Artificial Sequence
  Description of Artificial Sequence: Synthetic oligonucleotide
  Target: LAMA2; (-) strand; PAM type: NRG; PAM sequence: AGG
tctcaaagtactgggattac

SEQ ID NO: 104618 - DNA, 20 bp, Artificial Sequence
  Description of Artificial Sequence: Synthetic oligonucleotide
  Target: LAMA2; (-) strand; PAM type: NRG; PAM sequence: CAG
ctctcaaagtactgggatta

SEQ ID NO: 104619 - DNA, 20 bp, Artificial Sequence
  Description of Artificial Sequence: Synthetic oligonucleotide
  Target: LAMA2; (-) strand; PAM type: NRG; PAM sequence: GGG
ccttggcctctcaaagtact

SEQ ID NO: 104620 - DNA, 20 bp, Artificial Sequence
  Description of Artificial Sequence: Synthetic oligonucleotide
  Target: LAMA2; (-) strand; PAM type: NRG; PAM sequence: TGG
gccttggcctctcaaagtac

SEQ ID NO: 104621 - DNA, 20 bp, Artificial Sequence
  Description of Artificial Sequence: Synthetic oligonucleotide
  Target: LAMA2; (-) strand; PAM type: NRG; PAM sequence: AAG
ctgcctgccttggcctctca

SEQ ID NO: 104622 - DNA, 20 bp, Artificial Sequence
  Description of Artificial Sequence: Synthetic oligonucleotide
  Target: LAMA2; (-) strand; PAM type: NRG; PAM sequence: TGG
ctcaggtgatctgcctgcct

SEQ ID NO: 104623 - DNA, 20 bp, Artificial Sequence
  Description of Artificial Sequence: Synthetic oligonucleotide
  Target: LAMA2; (-) strand; PAM type: NRG; PAM sequence: AGG
ggtcttgaacgcctgacctc

SEQ ID NO: 104624 - DNA, 20 bp, Artificial Sequence
  Description of Artificial Sequence: Synthetic oligonucleotide
  Target: LAMA2; (-) strand; PAM type: NRG; PAM sequence: CAG
tggtcttgaacgcctgacct

SEQ ID NO: 104625 - DNA, 20 bp, Artificial Sequence
  Description of Artificial Sequence: Synthetic oligonucleotide
  Target: LAMA2; (-) strand; PAM type: NRG; PAM sequence: TGG
ttttgccatgttggccaggc

SEQ ID NO: 104626 - DNA, 20 bp, Artificial Sequence
  Description of Artificial Sequence: Synthetic oligonucleotide
  Target: LAMA2; (-) strand; PAM type: NRG; PAM sequence: AGG
ggggttttgccatgttggcc

SEQ ID NO: 104627 - DNA, 20 bp, Artificial Sequence
  Description of Artificial Sequence: Synthetic oligonucleotide
  Target: LAMA2; (-) strand; PAM type: NRG; PAM sequence: CAG
tggggttttgccatgttggc

SEQ ID NO: 104628 - DNA, 20 bp, Artificial Sequence
  Description of Artificial Sequence: Synthetic oligonucleotide
  Target: LAMA2; (-) strand; PAM type: NRG; PAM sequence: TGG
gagatggggttttgccatgt

SEQ ID NO: 104629 - DNA, 20 bp, Artificial Sequence
  Description of Artificial Sequence: Synthetic oligonucleotide
  Target: LAMA2; (-) strand; PAM type: NRG; PAM sequence: GGG
ttgtatttttagtagagatg

SEQ ID NO: 104630 - DNA, 20 bp, Artificial Sequence
  Description of Artificial Sequence: Synthetic oligonucleotide
  Target: LAMA2; (-) strand; PAM type: NRG; PAM sequence: GGG
tttgtatttttagtagagat

SEQ ID NO: 104631 - DNA, 20 bp, Artificial Sequence
  Description of Artificial Sequence: Synthetic oligonucleotide
  Target: LAMA2; (-) strand; PAM type: NRG; PAM sequence: TGG
ttttgtatttttagtagaga

SEQ ID NO: 104632 - DNA, 20 bp, Artificial Sequence
  Description of Artificial Sequence: Synthetic oligonucleotide
  Target: LAMA2; (-) strand; PAM type: NRG; PAM sequence: GAG
tgatttttgtatttttagta

SEQ ID NO: 104633 - DNA, 20 bp, Artificial Sequence
  Description of Artificial Sequence: Synthetic oligonucleotide
  Target: LAMA2; (-) strand; PAM type: NRG; PAM sequence: TAG
gctgatttttgtatttttag

SEQ ID NO: 104634 - DNA, 20 bp, Artificial Sequence
  Description of Artificial Sequence: Synthetic oligonucleotide
  Target: LAMA2; (-) strand; PAM type: NRG; PAM sequence: TAG
ccagctgatttttgtatttt

SEQ ID NO: 104635 - DNA, 20 bp, Artificial Sequence
  Description of Artificial Sequence: Synthetic oligonucleotide
  Target: LAMA2; (-) strand; PAM type: NRG; PAM sequence: CAG
atagcgcatgccaccgtgcc

SEQ ID NO: 104636 - DNA, 20 bp, Artificial Sequence
  Description of Artificial Sequence: Synthetic oligonucleotide
  Target: LAMA2; (-) strand; PAM type: NRG; PAM sequence: TAG
ctcccgagtagctggaatta

SEQ ID NO: 104637 - DNA, 20 bp, Artificial Sequence
  Description of Artificial Sequence: Synthetic oligonucleotide
  Target: LAMA2; (-) strand; PAM type: NRG; PAM sequence: TGG
gtctcagcctcccgagtagc

SEQ ID NO: 104638 - DNA, 20 bp, Artificial Sequence
  Description of Artificial Sequence: Synthetic oligonucleotide
  Target: LAMA2; (-) strand; PAM type: NRG; PAM sequence: TAG
tactgtctcagcctcccgag

SEQ ID NO: 104639 - DNA, 20 bp, Artificial Sequence
  Description of Artificial Sequence: Synthetic oligonucleotide
  Target: LAMA2; (-) strand; PAM type: NRG; PAM sequence: GAG
ttctactgtctcagcctccc

SEQ ID NO: 104640 - DNA, 20 bp, Artificial Sequence
  Description of Artificial Sequence: Synthetic oligonucleotide
  Target: LAMA2; (-) strand; PAM type: NRG; PAM sequence: CAG
ttcaagcgattctactgtct

SEQ ID NO: 104641 - DNA, 20 bp, Artificial Sequence
  Description of Artificial Sequence: Synthetic oligonucleotide
  Target: LAMA2; (-) strand; PAM type: NRG; PAM sequence: AAG
cgaccgcacctcctgggttc

SEQ ID NO: 104642 - DNA, 20 bp, Artificial Sequence
  Description of Artificial Sequence: Synthetic oligonucleotide
  Target: LAMA2; (-) strand; PAM type: NRG; PAM sequence: GGG
tcactgcgaccgcacctcct

SEQ ID NO: 104643 - DNA, 20 bp, Artificial Sequence
  Description of Artificial Sequence: Synthetic oligonucleotide
  Target: LAMA2; (-) strand; PAM type: NRG; PAM sequence: TGG
ctcactgcgaccgcacctcc

SEQ ID NO: 104644 - DNA, 20 bp, Artificial Sequence
  Description of Artificial Sequence: Synthetic oligonucleotide
  Target: LAMA2; (-) strand; PAM type: NRG; PAM sequence: TGG
ttgcccaggctggagtgcag

SEQ ID NO: 104645 - DNA, 20 bp, Artificial Sequence
  Description of Artificial Sequence: Synthetic oligonucleotide
  Target: LAMA2; (-) strand; PAM type: NRG; PAM sequence: CAG
ctgttgcccaggctggagtg

SEQ ID NO: 104646 - DNA, 20 bp, Artificial Sequence
  Description of Artificial Sequence: Synthetic oligonucleotide
  Target: LAMA2; (-) strand; PAM type: NRG; PAM sequence: GAG
ttgctctgttgcccaggctg

SEQ ID NO: 104647 - DNA, 20 bp, Artificial Sequence
  Description of Artificial Sequence: Synthetic oligonucleotide
  Target: LAMA2; (-) strand; PAM type: NRG; PAM sequence: TGG
tcttgctctgttgcccaggc

SEQ ID NO: 104648 - DNA, 20 bp, Artificial Sequence
  Description of Artificial Sequence: Synthetic oligonucleotide
  Target: LAMA2; (-) strand; PAM type: NRG; PAM sequence: AGG
ggagtcttgctctgttgccc

SEQ ID NO: 104649 - DNA, 20 bp, Artificial Sequence
  Description of Artificial Sequence: Synthetic oligonucleotide
  Target: LAMA2; (-) strand; PAM type: NRG; PAM sequence: CAG
tggagtcttgctctgttgcc

SEQ ID NO: 104650 - DNA, 20 bp, Artificial Sequence
  Description of Artificial Sequence: Synthetic oligonucleotide
  Target: LAMA2; (-) strand; PAM type: NRG; PAM sequence: GAG
gtttttttttttttgagatg

SEQ ID NO: 104651 - DNA, 20 bp, Artificial Sequence
  Description of Artificial Sequence: Synthetic oligonucleotide
  Target: LAMA2; (-) strand; PAM type: NRG; PAM sequence: TGG
ttgtttttttttttttgaga

SEQ ID NO: 104652 - DNA, 20 bp, Artificial Sequence
  Description of Artificial Sequence: Synthetic oligonucleotide
  Target: LAMA2; (-) strand; PAM type: NRG; PAM sequence: GAG
gtttttgttttttttttttt

SEQ ID NO: 104653 - DNA, 20 bp, Artificial Sequence
  Description of Artificial Sequence: Synthetic oligonucleotide
  Target: LAMA2; (-) strand; PAM type: NRG; PAM sequence: CAG
gcacctatcaacccgtcaac

SEQ ID NO: 104654 - DNA, 20 bp, Artificial Sequence
  Description of Artificial Sequence: Synthetic oligonucleotide
  Target: LAMA2; (-) strand; PAM type: NRG; PAM sequence: TGG
taggaatacatatgccatgg

SEQ ID NO: 104655 - DNA, 20 bp, Artificial Sequence
  Description of Artificial Sequence: Synthetic oligonucleotide
  Target: LAMA2; (-) strand; PAM type: NRG; PAM sequence: TGG
acataggaatacatatgcca

SEQ ID NO: 104656 - DNA, 20 bp, Artificial Sequence
  Description of Artificial Sequence: Synthetic oligonucleotide
  Target: LAMA2; (-) strand; PAM type: NRG; PAM sequence: AGG
gaaagcaagctttgttacat

SEQ ID NO: 104657 - DNA, 20 bp, Artificial Sequence
  Description of Artificial Sequence: Synthetic oligonucleotide
  Target: LAMA2; (-) strand; PAM type: NRG; PAM sequence: TAG
agaaagcaagctttgttaca

SEQ ID NO: 104658 - DNA, 20 bp, Artificial Sequence
  Description of Artificial Sequence: Synthetic oligonucleotide
  Target: LAMA2; (-) strand; PAM type: NRG; PAM sequence: AAG
tgatcatgtattaagaaagc

SEQ ID NO: 104659 - DNA, 20 bp, Artificial Sequence
  Description of Artificial Sequence: Synthetic oligonucleotide
  Target: LAMA2; (-) strand; PAM type: NRG; PAM sequence: AAG
aaaatgatcatgtattaaga

SEQ ID NO: 104660 - DNA, 20 bp, Artificial Sequence
  Description of Artificial Sequence: Synthetic oligonucleotide
  Target: LAMA2; (-) strand; PAM type: NRG; PAM sequence: AAG
tagcaaaatgatcatgtatt

SEQ ID NO: 104661 - DNA, 20 bp, Artificial Sequence
  Description of Artificial Sequence: Synthetic oligonucleotide
  Target: LAMA2; (-) strand; PAM type: NRG; PAM sequence: TAG
aaggtgcacaaaaatgactt

SEQ ID NO: 104662 - DNA, 20 bp, Artificial Sequence
  Description of Artificial Sequence: Synthetic oligonucleotide
  Target: LAMA2; (-) strand; PAM type: NRG; PAM sequence: AGG
taaacaagaagcaatcatta

SEQ ID NO: 104663 - DNA, 20 bp, Artificial Sequence
  Description of Artificial Sequence: Synthetic oligonucleotide
  Target: LAMA2; (-) strand; PAM type: NRG; PAM sequence: AAG
gtaaacaagaagcaatcatt

SEQ ID NO: 104664 - DNA, 20 bp, Artificial Sequence
  Description of Artificial Sequence: Synthetic oligonucleotide
  Target: LAMA2; (-) strand; PAM type: NRG; PAM sequence: AAG
taaaaccatttgtaaacaag

SEQ ID NO: 104665 - DNA, 20 bp, Artificial Sequence
  Description of Artificial Sequence: Synthetic oligonucleotide
  Target: LAMA2; (-) strand; PAM type: NRG; PAM sequence: AAG
aattaaaaccatttgtaaac

SEQ ID NO: 104666 - DNA, 20 bp, Artificial Sequence
  Description of Artificial Sequence: Synthetic oligonucleotide
  Target: LAMA2; (-) strand; PAM type: NRG; PAM sequence: TGG
atatggctgtatcttttgga

SEQ ID NO: 104667 - DNA, 20 bp, Artificial Sequence
  Description of Artificial Sequence: Synthetic oligonucleotide
  Target: LAMA2; (-) strand; PAM type: NRG; PAM sequence: TGG
gcaaatatggctgtatcttt

SEQ ID NO: 104668 - DNA, 20 bp, Artificial Sequence
  Description of Artificial Sequence: Synthetic oligonucleotide
  Target: LAMA2; (-) strand; PAM type: NRG; PAM sequence: TGG
agaaagggaaaaggcaaata

SEQ ID NO: 104669 - DNA, 20 bp, Artificial Sequence
  Description of Artificial Sequence: Synthetic oligonucleotide
  Target: LAMA2; (-) strand; PAM type: NRG; PAM sequence: AGG
aacagatagagaaagggaaa

SEQ ID NO: 104670 - DNA, 20 bp, Artificial Sequence
  Description of Artificial Sequence: Synthetic oligonucleotide
  Target: LAMA2; (-) strand; PAM type: NRG; PAM sequence: AAG
caacagatagagaaagggaa

SEQ ID NO: 104671 - DNA, 20 bp, Artificial Sequence
  Description of Artificial Sequence: Synthetic oligonucleotide
  Target: LAMA2; (-) strand; PAM type: NRG; PAM sequence: GGG
aatgacaacagatagagaaa

SEQ ID NO: 104672 - DNA, 20 bp, Artificial Sequence
  Description of Artificial Sequence: Synthetic oligonucleotide
  Target: LAMA2; (-) strand; PAM type: NRG; PAM sequence: AGG
gaatgacaacagatagagaa

SEQ ID NO: 104673 - DNA, 20 bp, Artificial Sequence
  Description of Artificial Sequence: Synthetic oligonucleotide
  Target: LAMA2; (-) strand; PAM type: NRG; PAM sequence: AAG
agaatgacaacagatagaga

SEQ ID NO: 104674 - DNA, 20 bp, Artificial Sequence
  Description of Artificial Sequence: Synthetic oligonucleotide
  Target: LAMA2; (-) strand; PAM type: NRG; PAM sequence: GAG
aaaaagaatgacaacagata

SEQ ID NO: 104675 - DNA, 20 bp, Artificial Sequence
  Description of Artificial Sequence: Synthetic oligonucleotide
  Target: LAMA2; (-) strand; PAM type: NRG; PAM sequence: TAG
ggaaaaagaatgacaacaga

SEQ ID NO: 104676 - DNA, 20 bp, Artificial Sequence
  Description of Artificial Sequence: Synthetic oligonucleotide
  Target: LAMA2; (-) strand; PAM type: NRG; PAM sequence: CAG
tggtggaaaaagaatgacaa

SEQ ID NO: 104677 - DNA, 20 bp, Artificial Sequence
  Description of Artificial Sequence: Synthetic oligonucleotide
  Target: LAMA2; (-) strand; PAM type: NRG; PAM sequence: AAG
agagaagaatctggtggaaa

SEQ ID NO: 104678 - DNA, 20 bp, Artificial Sequence
  Description of Artificial Sequence: Synthetic oligonucleotide
  Target: LAMA2; (-) strand; PAM type: NRG; PAM sequence: TGG
ttctgcagagaagaatctgg

SEQ ID NO: 104679 - DNA, 20 bp, Artificial Sequence
  Description of Artificial Sequence: Synthetic oligonucleotide
  Target: LAMA2; (-) strand; PAM type: NRG; PAM sequence: TGG
aacttctgcagagaagaatc

SEQ ID NO: 104680 - DNA, 20 bp, Artificial Sequence
  Description of Artificial Sequence: Synthetic oligonucleotide
  Target: LAMA2; (-) strand; PAM type: NRG; PAM sequence: AAG
aaagctaaacttctgcagag

SEQ ID NO: 104681 - DNA, 20 bp, Artificial Sequence
  Description of Artificial Sequence: Synthetic oligonucleotide
  Target: LAMA2; (-) strand; PAM type: NRG; PAM sequence: GAG
ctcaaagctaaacttctgca

SEQ ID NO: 104682 - DNA, 20 bp, Artificial Sequence
  Description of Artificial Sequence: Synthetic oligonucleotide
  Target: LAMA2; (-) strand; PAM type: NRG; PAM sequence: CAG
gtctcaaagctaaacttctg

SEQ ID NO: 104683 - DNA, 20 bp, Artificial Sequence
  Description of Artificial Sequence: Synthetic oligonucleotide
  Target: LAMA2; (-) strand; PAM type: NRG; PAM sequence: AAG
tctcttgtgctctggtctca

SEQ ID NO: 104684 - DNA, 20 bp, Artificial Sequence
  Description of Artificial Sequence: Synthetic oligonucleotide
  Target: LAMA2; (-) strand; PAM type: NRG; PAM sequence: TGG
tcactatttctcttgtgctc

SEQ ID NO: 104685 - DNA, 20 bp, Artificial Sequence
  Description of Artificial Sequence: Synthetic oligonucleotide
  Target: LAMA2; (-) strand; PAM type: NRG; PAM sequence: GAG
gaagggaaaaatgagagaca

SEQ ID NO: 104686 - DNA, 20 bp, Artificial Sequence
  Description of Artificial Sequence: Synthetic oligonucleotide
  Target: LAMA2; (-) strand; PAM type: NRG; PAM sequence: CAG
aggaagggaaaaatgagaga

SEQ ID NO: 104687 - DNA, 20 bp, Artificial Sequence
  Description of Artificial Sequence: Synthetic oligonucleotide
  Target: LAMA2; (-) strand; PAM type: NRG; PAM sequence: GAG
atagaggaagggaaaaatga

SEQ ID NO: 104688 - DNA, 20 bp, Artificial Sequence
  Description of Artificial Sequence: Synthetic oligonucleotide
  Target: LAMA2; (-) strand; PAM type: NRG; PAM sequence: GAG
gtatagaggaagggaaaaat

SEQ ID NO: 104689 - DNA, 20 bp, Artificial Sequence
  Description of Artificial Sequence: Synthetic oligonucleotide
  Target: LAMA2; (-) strand; PAM type: NRG; PAM sequence: GGG
gcctaggcagtatagaggaa

SEQ ID NO: 104690 - DNA, 20 bp, Artificial Sequence
  Description of Artificial Sequence: Synthetic oligonucleotide
  Target: LAMA2; (-) strand; PAM type: NRG; PAM sequence: AGG
ggcctaggcagtatagagga

SEQ ID NO: 104691 - DNA, 20 bp, Artificial Sequence
  Description of Artificial Sequence: Synthetic oligonucleotide
  Target: LAMA2; (-) strand; PAM type: NRG; PAM sequence: AAG
gggcctaggcagtatagagg

SEQ ID NO: 104692 - DNA, 20 bp, Artificial Sequence
  Description of Artificial Sequence: Synthetic oligonucleotide
  Target: LAMA2; (-) strand; PAM type: NRG; PAM sequence: AGG
tctgggcctaggcagtatag

SEQ ID NO: 104693 - DNA, 20 bp, Artificial Sequence
  Description of Artificial Sequence: Synthetic oligonucleotide
  Target: LAMA2; (-) strand; PAM type: NRG; PAM sequence: GAG
ttctgggcctaggcagtata

SEQ ID NO: 104694 - DNA, 20 bp, Artificial Sequence
  Description of Artificial Sequence: Synthetic oligonucleotide
  Target: LAMA2; (-) strand; PAM type: NRG; PAM sequence: TAG
gattctgggcctaggcagta

SEQ ID NO: 104695 - DNA, 20 bp, Artificial Sequence
  Description of Artificial Sequence: Synthetic oligonucleotide
  Target: LAMA2; (-) strand; PAM type: NRG; PAM sequence: CAG
atttagattctgggcctagg

SEQ ID NO: 104696 - DNA, 20 bp, Artificial Sequence
  Description of Artificial Sequence: Synthetic oligonucleotide
  Target: LAMA2; (-) strand; PAM type: NRG; PAM sequence: AGG
ctaatttagattctgggcct

SEQ ID NO: 104697 - DNA, 20 bp, Artificial Sequence
  Description of Artificial Sequence: Synthetic oligonucleotide
  Target: LAMA2; (-) strand; PAM type: NRG; PAM sequence: TAG
tctaatttagattctgggcc

SEQ ID NO: 104698 - DNA, 20 bp, Artificial Sequence
  Description of Artificial Sequence: Synthetic oligonucleotide
  Target: LAMA2; (-) strand; PAM type: NRG; PAM sequence: GGG
tttgatctaatttagattct

SEQ ID NO: 104699 - DNA, 20 bp, Artificial Sequence
  Description of Artificial Sequence: Synthetic oligonucleotide
  Target: LAMA2; (-) strand; PAM type: NRG; PAM sequence: TGG
atttgatctaatttagattc

SEQ ID NO: 104700 - DNA, 20 bp, Artificial Sequence
  Description of Artificial Sequence: Synthetic oligonucleotide
  Target: LAMA2; (-) strand; PAM type: NRG; PAM sequence: TAG
ttttgaaatttgatctaatt

SEQ ID NO: 104701 - DNA, 20 bp, Artificial Sequence
  Description of Artificial Sequence: Synthetic oligonucleotide
  Target: LAMA2; (-) strand; PAM type: NRG; PAM sequence: AAG
gtgtataaatcagctttcat

SEQ ID NO: 104702 - DNA, 20 bp, Artificial Sequence
  Description of Artificial Sequence: Synthetic oligonucleotide
  Target: LAMA2; (-) strand; PAM type: NRG; PAM sequence: CAG
gtgtgtgtgcgtgtataaat

SEQ ID NO: 104703 - DNA, 20 bp, Artificial Sequence
  Description of Artificial Sequence: Synthetic oligonucleotide
  Target: LAMA2; (-) strand; PAM type: NRG; PAM sequence: AAG
tgccacttcccaacctgcta

SEQ ID NO: 104704 - DNA, 20 bp, Artificial Sequence
  Description of Artificial Sequence: Synthetic oligonucleotide
  Target: LAMA2; (-) strand; PAM type: NRG; PAM sequence: AAG
tgtactcactttttaaaatg

SEQ ID NO: 104705 - DNA, 20 bp, Artificial Sequence
  Description of Artificial Sequence: Synthetic oligonucleotide
  Target: LAMA2; (-) strand; PAM type: NRG; PAM sequence: AAG
tttaaccaattgtagcatgt

SEQ ID NO: 104706 - DNA, 20 bp, Artificial Sequence
  Description of Artificial Sequence: Synthetic oligonucleotide
  Target: LAMA2; (-) strand; PAM type: NRG; PAM sequence: TAG
tagctgactttaaccaattg

SEQ ID NO: 104707 - DNA, 20 bp, Artificial Sequence
  Description of Artificial Sequence: Synthetic oligonucleotide
  Target: LAMA2; (-) strand; PAM type: NRG; PAM sequence: TAG
ctgagtgcatgctatctgta

SEQ ID NO: 104708 - DNA, 20 bp, Artificial Sequence
  Description of Artificial Sequence: Synthetic oligonucleotide
  Target: LAMA2; (-) strand; PAM type: NRG; PAM sequence: GAG
actatctcatcctttagtct

SEQ ID NO: 104709 - DNA, 20 bp, Artificial Sequence
  Description of Artificial Sequence: Synthetic oligonucleotide
  Target: LAMA2; (-) strand; PAM type: NRG; PAM sequence: TAG
tatggtactatctcatcctt

SEQ ID NO: 104710 - DNA, 20 bp, Artificial Sequence
  Description of Artificial Sequence: Synthetic oligonucleotide
  Target: LAMA2; (-) strand; PAM type: NRG; PAM sequence: TGG
agcagatttggctctaccta

SEQ ID NO: 104711 - DNA, 20 bp, Artificial Sequence
  Description of Artificial Sequence: Synthetic oligonucleotide
  Target: LAMA2; (-) strand; PAM type: NRG; PAM sequence: TGG
caagaaagcagtagcagatt

SEQ ID NO: 104712 - DNA, 20 bp, Artificial Sequence
  Description of Artificial Sequence: Synthetic oligonucleotide
  Target: LAMA2; (-) strand; PAM type: NRG; PAM sequence: CAG
agatttcaagaaagcagtag

SEQ ID NO: 104713 - DNA, 20 bp, Artificial Sequence
  Description of Artificial Sequence: Synthetic oligonucleotide
  Target: LAMA2; (-) strand; PAM type: NRG; PAM sequence: TAG
cttagatttcaagaaagcag

SEQ ID NO: 104714 - DNA, 20 bp, Artificial Sequence
  Description of Artificial Sequence: Synthetic oligonucleotide
  Target: LAMA2; (-) strand; PAM type: NRG; PAM sequence: CAG
cttcttagatttcaagaaag

SEQ ID NO: 104715 - DNA, 20 bp, Artificial Sequence
  Description of Artificial Sequence: Synthetic oligonucleotide
  Target: LAMA2; (-) strand; PAM type: NRG; PAM sequence: AAG
ctgcttcttagatttcaaga

SEQ ID NO: 104716 - DNA, 20 bp, Artificial Sequence
  Description of Artificial Sequence: Synthetic oligonucleotide
  Target: LAMA2; (-) strand; PAM type: NRG; PAM sequence: AAG
ctttctgcttcttagatttc

SEQ ID NO: 104717 - DNA, 20 bp, Artificial Sequence
  Description of Artificial Sequence: Synthetic oligonucleotide
  Target: LAMA2; (-) strand; PAM type: NRG; PAM sequence: TAG
gtaagaagctttctgcttct

SEQ ID NO: 104718 - DNA, 20 bp, Artificial Sequence
  Description of Artificial Sequence: Synthetic oligonucleotide
  Target: LAMA2; (-) strand; PAM type: NRG; PAM sequence: AAG
taccaatgattaaatgtaag

SEQ ID NO: 104719 - DNA, 20 bp, Artificial Sequence
  Description of Artificial Sequence: Synthetic oligonucleotide
  Target: LAMA2; (-) strand; PAM type: NRG; PAM sequence: AAG
gagtaccaatgattaaatgt

SEQ ID NO: 104720 - DNA, 20 bp, Artificial Sequence
  Description of Artificial Sequence: Synthetic oligonucleotide
  Target: LAMA2; (-) strand; PAM type: NRG; PAM sequence: GAG
actaggtgggaagccttcca

SEQ ID NO: 104721 - DNA, 20 bp, Artificial Sequence
  Description of Artificial Sequence: Synthetic oligonucleotide
  Target: LAMA2; (-) strand; PAM type: NRG; PAM sequence: CAG
aaactaggtgggaagccttc

SEQ ID NO: 104722 - DNA, 20 bp, Artificial Sequence
  Description of Artificial Sequence: Synthetic oligonucleotide
  Target: LAMA2; (-) strand; PAM type: NRG; PAM sequence: AAG
ggtccagcaaactaggtggg

SEQ ID NO: 104723 - DNA, 20 bp, Artificial Sequence
  Description of Artificial Sequence: Synthetic oligonucleotide
  Target: LAMA2; (-) strand; PAM type: NRG; PAM sequence: GGG
cctggtccagcaaactaggt

SEQ ID NO: 104724 - DNA, 20 bp, Artificial Sequence
  Description of Artificial Sequence: Synthetic oligonucleotide
  Target: LAMA2; (-) strand; PAM type: NRG; PAM sequence: TGG
ccctggtccagcaaactagg

SEQ ID NO: 104725 - DNA, 20 bp, Artificial Sequence
  Description of Artificial Sequence: Synthetic oligonucleotide
  Target: LAMA2; (-) strand; PAM type: NRG; PAM sequence: AGG
gctccctggtccagcaaact

SEQ ID NO: 104726 - DNA, 20 bp, Artificial Sequence
  Description of Artificial Sequence: Synthetic oligonucleotide
  Target: LAMA2; (-) strand; PAM type: NRG; PAM sequence: TAG
agctccctggtccagcaaac

SEQ ID NO: 104727 - DNA, 20 bp, Artificial Sequence
  Description of Artificial Sequence: Synthetic oligonucleotide
  Target: LAMA2; (-) strand; PAM type: NRG; PAM sequence: CAG
agtttgaaagctccctggtc

SEQ ID NO: 104728 - DNA, 20 bp, Artificial Sequence
  Description of Artificial Sequence: Synthetic oligonucleotide
  Target: LAMA2; (-) strand; PAM type: NRG; PAM sequence: TGG
tgattagtttgaaagctccc

SEQ ID NO: 104729 - DNA, 20 bp, Artificial Sequence
  Description of Artificial Sequence: Synthetic oligonucleotide
  Target: LAMA2; (-) strand; PAM type: NRG; PAM sequence: AAG
ccataggctgattagtttga

SEQ ID NO: 104730 - DNA, 20 bp, Artificial Sequence
  Description of Artificial Sequence: Synthetic oligonucleotide
  Target: LAMA2; (-) strand; PAM type: NRG; PAM sequence: TAG
cacagtaaccataggctgat

SEQ ID NO: 104731 - DNA, 20 bp, Artificial Sequence
  Description of Artificial Sequence: Synthetic oligonucleotide
  Target: LAMA2; (-) strand; PAM type: NRG; PAM sequence: AGG
tacagaatcacagtaaccat

SEQ ID NO: 104732 - DNA, 20 bp, Artificial Sequence
  Description of Artificial Sequence: Synthetic oligonucleotide
  Target: LAMA2; (-) strand; PAM type: NRG; PAM sequence: TAG
ttacagaatcacagtaacca

SEQ ID NO: 104733 - DNA, 20 bp, Artificial Sequence
  Description of Artificial Sequence: Synthetic oligonucleotide
  Target: LAMA2; (-) strand; PAM type: NRG; PAM sequence: CAG
tcaattttgttacagaatca

SEQ ID NO: 104734 - DNA, 20 bp, Artificial Sequence
  Description of Artificial Sequence: Synthetic oligonucleotide
  Target: LAMA2; (-) strand; PAM type: NRG; PAM sequence: CAG
gctgtgtctcaattttgtta

SEQ ID NO: 104735 - DNA, 20 bp, Artificial Sequence
  Description of Artificial Sequence: Synthetic oligonucleotide
  Target: LAMA2; (-) strand; PAM type: NRG; PAM sequence: AGG
gtcagtaagatacatcacct

SEQ ID NO: 104736 - DNA, 20 bp, Artificial Sequence
  Description of Artificial Sequence: Synthetic oligonucleotide
  Target: LAMA2; (-) strand; PAM type: NRG; PAM sequence: TAG
tgtcagtaagatacatcacc

SEQ ID NO: 104737 - DNA, 20 bp, Artificial Sequence
  Description of Artificial Sequence: Synthetic oligonucleotide
  Target: LAMA2; (-) strand; PAM type: NRG; PAM sequence: AAG
atttcaccactattgtcagt

SEQ ID NO: 104738 - DNA, 20 bp, Artificial Sequence
  Description of Artificial Sequence: Synthetic oligonucleotide
  Target: LAMA2; (-) strand; PAM type: NRG; PAM sequence: CAG
caatatttcaccactattgt

SEQ ID NO: 104739 - DNA, 20 bp, Artificial Sequence
  Description of Artificial Sequence: Synthetic oligonucleotide
  Target: LAMA2; (-) strand; PAM type: NRG; PAM sequence: AAG
ttataccttgacatatgcca

SEQ ID NO: 104740 - DNA, 20 bp, Artificial Sequence
  Description of Artificial Sequence: Synthetic oligonucleotide
  Target: LAMA2; (-) strand; PAM type: NRG; PAM sequence: CAG
tttcttgacccactgcctaa

SEQ ID NO: 104741 - DNA, 20 bp, Artificial Sequence
  Description of Artificial Sequence: Synthetic oligonucleotide
  Target: LAMA2; (-) strand; PAM type: NRG; PAM sequence: TGG
ttcctagaagttagtgaggg

SEQ ID NO: 104742 - DNA, 20 bp, Artificial Sequence
  Description of Artificial Sequence: Synthetic oligonucleotide
  Target: LAMA2; (-) strand; PAM type: NRG; PAM sequence: GGG
gtattcctagaagttagtga

SEQ ID NO: 104743 - DNA, 20 bp, Artificial Sequence
  Description of Artificial Sequence: Synthetic oligonucleotide
  Target: LAMA2; (-) strand; PAM type: NRG; PAM sequence: AGG
tgtattcctagaagttagtg

SEQ ID NO: 104744 - DNA, 20 bp, Artificial Sequence
  Description of Artificial Sequence: Synthetic oligonucleotide
  Target: LAMA2; (-) strand; PAM type: NRG; PAM sequence: GAG
ctgtattcctagaagttagt

SEQ ID NO: 104745 - DNA, 20 bp, Artificial Sequence
  Description of Artificial Sequence: Synthetic oligonucleotide
  Target: LAMA2; (-) strand; PAM type: NRG; PAM sequence: TAG
ggtgctgtattcctagaagt

SEQ ID NO: 104746 - DNA, 20 bp, Artificial Sequence
  Description of Artificial Sequence: Synthetic oligonucleotide
  Target: LAMA2; (-) strand; PAM type: NRG; PAM sequence: AAG
gtcaggtgctgtattcctag

SEQ ID NO: 104747 - DNA, 20 bp, Artificial Sequence
  Description of Artificial Sequence: Synthetic oligonucleotide
  Target: LAMA2; (-) strand; PAM type: NRG; PAM sequence: TAG
attgtcaggtgctgtattcc

SEQ ID NO: 104748 - DNA, 20 bp, Artificial Sequence
  Description of Artificial Sequence: Synthetic oligonucleotide
  Target: LAMA2; (-) strand; PAM type: NRG; PAM sequence: AGG
ctgtggtagaagttattgtc

SEQ ID NO: 104749 - DNA, 20 bp, Artificial Sequence
  Description of Artificial Sequence: Synthetic oligonucleotide
  Target: LAMA2; (-) strand; PAM type: NRG; PAM sequence: CAG
cctgtggtagaagttattgt

SEQ ID NO: 104750 - DNA, 20 bp, Artificial Sequence
  Description of Artificial Sequence: Synthetic oligonucleotide
  Target: LAMA2; (-) strand; PAM type: NRG; PAM sequence: AAG
cattcctagccctgtggtag

SEQ ID NO: 104751 - DNA, 20 bp, Artificial Sequence
  Description of Artificial Sequence: Synthetic oligonucleotide
  Target: LAMA2; (-) strand; PAM type: NRG; PAM sequence: TAG
ggccattcctagccctgtgg

SEQ ID NO: 104752 - DNA, 20 bp, Artificial Sequence
  Description of Artificial Sequence: Synthetic oligonucleotide
  Target: LAMA2; (-) strand; PAM type: NRG; PAM sequence: TGG
tatggccattcctagccctg

SEQ ID NO: 104753 - DNA, 20 bp, Artificial Sequence
  Description of Artificial Sequence: Synthetic oligonucleotide
  Target: LAMA2; (-) strand; PAM type: NRG; PAM sequence: TAG
agaacaaatatggccattcc

SEQ ID NO: 104754 - DNA, 20 bp, Artificial Sequence
  Description of Artificial Sequence: Synthetic oligonucleotide
  Target: LAMA2; (-) strand; PAM type: NRG; PAM sequence: TGG
catgtcttaaagaacaaata

SEQ ID NO: 104755 - DNA, 20 bp, Artificial Sequence
  Description of Artificial Sequence: Synthetic oligonucleotide
  Target: LAMA2; (-) strand; PAM type: NRG; PAM sequence: AAG
tatttgaatcacatgtctta

SEQ ID NO: 104756 - DNA, 20 bp, Artificial Sequence
  Description of Artificial Sequence: Synthetic oligonucleotide
  Target: LAMA2; (-) strand; PAM type: NRG; PAM sequence: CAG
gacagccatggtttaattag

SEQ ID NO: 104757 - DNA, 20 bp, Artificial Sequence
  Description of Artificial Sequence: Synthetic oligonucleotide
  Target: LAMA2; (-) strand; PAM type: NRG; PAM sequence: TAG
taagacagccatggtttaat

SEQ ID NO: 104758 - DNA, 20 bp, Artificial Sequence
  Description of Artificial Sequence: Synthetic oligonucleotide
  Target: LAMA2; (-) strand; PAM type: NRG; PAM sequence: TGG
caaatgggctaagacagcca

SEQ ID NO: 104759 - DNA, 20 bp, Artificial Sequence
  Description of Artificial Sequence: Synthetic oligonucleotide
  Target: LAMA2; (-) strand; PAM type: NRG; PAM sequence: CAG
gcagcccaaatgggctaaga

SEQ ID NO: 104760 - DNA, 20 bp, Artificial Sequence
  Description of Artificial Sequence: Synthetic oligonucleotide
  Target: LAMA2; (-) strand; PAM type: NRG; PAM sequence: AAG
tatagcagcccaaatgggct

SEQ ID NO: 104761 - DNA, 20 bp, Artificial Sequence
  Description of Artificial Sequence: Synthetic oligonucleotide
  Target: LAMA2; (-) strand; PAM type: NRG; PAM sequence: GGG
ttcattatagcagcccaaat

SEQ ID NO: 104762 - DNA, 20 bp, Artificial Sequence
  Description of Artificial Sequence: Synthetic oligonucleotide
  Target: LAMA2; (-) strand; PAM type: NRG; PAM sequence: TGG
tttcattatagcagcccaaa

SEQ ID NO: 104763 - DNA, 20 bp, Artificial Sequence
  Description of Artificial Sequence: Synthetic oligonucleotide
  Target: LAMA2; (-) strand; PAM type: NRG; PAM sequence: CAG
ctatgatattttcattatag

SEQ ID NO: 104764 - DNA, 20 bp, Artificial Sequence
  Description of Artificial Sequence: Synthetic oligonucleotide
  Target: LAMA2; (-) strand; PAM type: NRG; PAM sequence: TAG
aatctatgatattttcatta

SEQ ID NO: 104765 - DNA, 20 bp, Artificial Sequence
  Description of Artificial Sequence: Synthetic oligonucleotide
  Target: LAMA2; (-) strand; PAM type: NRG; PAM sequence: AGG
agaaatgcatttcagttata

SEQ ID NO: 104766 - DNA, 20 bp, Artificial Sequence
  Description of Artificial Sequence: Synthetic oligonucleotide
  Target: LAMA2; (-) strand; PAM type: NRG; PAM sequence: AAG
gagaaatgcatttcagttat

SEQ ID NO: 104767 - DNA, 20 bp, Artificial Sequence
  Description of Artificial Sequence: Synthetic oligonucleotide
  Target: LAMA2; (-) strand; PAM type: NRG; PAM sequence: CAG
cacaaatgagaaatgcattt

SEQ ID NO: 104768 - DNA, 20 bp, Artificial Sequence
  Description of Artificial Sequence: Synthetic oligonucleotide
  Target: LAMA2; (-) strand; PAM type: NRG; PAM sequence: GAG
acctctcagccttcacaaat

SEQ ID NO: 104769 - DNA, 20 bp, Artificial Sequence
  Description of Artificial Sequence: Synthetic oligonucleotide
  Target: LAMA2; (-) strand; PAM type: NRG; PAM sequence: CAG
caccttgatcttggacctct

SEQ ID NO: 104770 - DNA, 20 bp, Artificial Sequence
  Description of Artificial Sequence: Synthetic oligonucleotide
  Target: LAMA2; (-) strand; PAM type: NRG; PAM sequence: TGG
accagccagcaccttgatct

SEQ ID NO: 104771 - DNA, 20 bp, Artificial Sequence
  Description of Artificial Sequence: Synthetic oligonucleotide
  Target: LAMA2; (-) strand; PAM type: NRG; PAM sequence: CAG
ttaccaggcaccaaaccagc

SEQ ID NO: 104772 - DNA, 20 bp, Artificial Sequence
  Description of Artificial Sequence: Synthetic oligonucleotide
  Target: LAMA2; (-) strand; PAM type: NRG; PAM sequence: CAG
ctccttaccaggcaccaaac

SEQ ID NO: 104773 - DNA, 20 bp, Artificial Sequence
  Description of Artificial Sequence: Synthetic oligonucleotide
  Target: LAMA2; (-) strand; PAM type: NRG; PAM sequence: AGG
ccaggaagcagctccttacc

SEQ ID NO: 104774 - DNA, 20 bp, Artificial Sequence
  Description of Artificial Sequence: Synthetic oligonucleotide
  Target: LAMA2; (-) strand; PAM type: NRG; PAM sequence: CAG
accaggaagcagctccttac

SEQ ID NO: 104775 - DNA, 20 bp, Artificial Sequence
  Description of Artificial Sequence: Synthetic oligonucleotide
  Target: LAMA2; (-) strand; PAM type: NRG; PAM sequence: CAG
gccatctctgaaccaggaag

SEQ ID NO: 104776 - DNA, 20 bp, Artificial Sequence
  Description of Artificial Sequence: Synthetic oligonucleotide
  Target: LAMA2; (-) strand; PAM type: NRG; PAM sequence: AAG
acagccatctctgaaccagg

SEQ ID NO: 104777 - DNA, 20 bp, Artificial Sequence
  Description of Artificial Sequence: Synthetic oligonucleotide
  Target: LAMA2; (-) strand; PAM type: NRG; PAM sequence: AGG
gagacagccatctctgaacc

SEQ ID NO: 104778 - DNA, 20 bp, Artificial Sequence
  Description of Artificial Sequence: Synthetic oligonucleotide
  Target: LAMA2; (-) strand; PAM type: NRG; PAM sequence: CAG
ggagacagccatctctgaac

SEQ ID NO: 104779 - DNA, 20 bp, Artificial Sequence
  Description of Artificial Sequence: Synthetic oligonucleotide
  Target: LAMA2; (-) strand; PAM type: NRG; PAM sequence: CAG
atgaaactataacaaggaga

SEQ ID NO: 104780 - DNA, 20 bp, Artificial Sequence
  Description of Artificial Sequence: Synthetic oligonucleotide
  Target: LAMA2; (-) strand; PAM type: NRG; PAM sequence: GAG
ccacatgaaactataacaag

SEQ ID NO: 104781 - DNA, 20 bp, Artificial Sequence
  Description of Artificial Sequence: Synthetic oligonucleotide
  Target: LAMA2; (-) strand; PAM type: NRG; PAM sequence: AGG
taccacatgaaactataaca

SEQ ID NO: 104782 - DNA, 20 bp, Artificial Sequence
  Description of Artificial Sequence: Synthetic oligonucleotide
  Target: LAMA2; (-) strand; PAM type: NRG; PAM sequence: AAG
ctaccacatgaaactataac

SEQ ID NO: 104783 - DNA, 20 bp, Artificial Sequence
  Description of Artificial Sequence: Synthetic oligonucleotide
  Target: LAMA2; (-) strand; PAM type: NRG; PAM sequence: CAG
tgctcttataaaagggatgc

SEQ ID NO: 104784 - DNA, 20 bp, Artificial Sequence
  Description of Artificial Sequence: Synthetic oligonucleotide
  Target: LAMA2; (-) strand; PAM type: NRG; PAM sequence: GGG
aaattagtgctcttataaaa

SEQ ID NO: 104785 - DNA, 20 bp, Artificial Sequence
  Description of Artificial Sequence: Synthetic oligonucleotide
  Target: LAMA2; (-) strand; PAM type: NRG; PAM sequence: AGG
gaaattagtgctcttataaa

SEQ ID NO: 104786 - DNA, 20 bp, Artificial Sequence
  Description of Artificial Sequence: Synthetic oligonucleotide
  Target: LAMA2; (-) strand; PAM type: NRG; PAM sequence: AAG
tgaaattagtgctcttataa

SEQ ID NO: 104787 - DNA, 20 bp, Artificial Sequence
  Description of Artificial Sequence: Synthetic oligonucleotide
  Target: LAMA2; (-) strand; PAM type: NRG; PAM sequence: TAG
cataagggcaagaatgaaat

SEQ ID NO: 104788 - DNA, 20 bp, Artificial Sequence
  Description of Artificial Sequence: Synthetic oligonucleotide
  Target: LAMA2; (-) strand; PAM type: NRG; PAM sequence: AAG
ggagattaggtcataagggc

SEQ ID NO: 104789 - DNA, 20 bp, Artificial Sequence
  Description of Artificial Sequence: Synthetic oligonucleotide
  Target: LAMA2; (-) strand; PAM type: NRG; PAM sequence: GGG
gagaggagattaggtcataa

SEQ ID NO: 104790 - DNA, 20 bp, Artificial Sequence
  Description of Artificial Sequence: Synthetic oligonucleotide
  Target: LAMA2; (-) strand; PAM type: NRG; PAM sequence: AGG
tgagaggagattaggtcata

SEQ ID NO: 104791 - DNA, 20 bp, Artificial Sequence
  Description of Artificial Sequence: Synthetic oligonucleotide
  Target: LAMA2; (-) strand; PAM type: NRG; PAM sequence: AAG
ttgagaggagattaggtcat

SEQ ID NO: 104792 - DNA, 20 bp, Artificial Sequence
  Description of Artificial Sequence: Synthetic oligonucleotide
  Target: LAMA2; (-) strand; PAM type: NRG; PAM sequence: AGG
agagcctttgagaggagatt

SEQ ID NO: 104793 - DNA, 20 bp, Artificial Sequence
  Description of Artificial Sequence: Synthetic oligonucleotide
  Target: LAMA2; (-) strand; PAM type: NRG; PAM sequence: TAG
cagagcctttgagaggagat

SEQ ID NO: 104794 - DNA, 20 bp, Artificial Sequence
  Description of Artificial Sequence: Synthetic oligonucleotide
  Target: LAMA2; (-) strand; PAM type: NRG; PAM sequence: GAG
taatacagagcctttgagag

SEQ ID NO: 104795 - DNA, 20 bp, Artificial Sequence
  Description of Artificial Sequence: Synthetic oligonucleotide
  Target: LAMA2; (-) strand; PAM type: NRG; PAM sequence: AGG
attaatacagagcctttgag

SEQ ID NO: 104796 - DNA, 20 bp, Artificial Sequence
  Description of Artificial Sequence: Synthetic oligonucleotide
  Target: LAMA2; (-) strand; PAM type: NRG; PAM sequence: GAG
gattaatacagagcctttga

SEQ ID NO: 104797 - DNA, 20 bp, Artificial Sequence
  Description of Artificial Sequence: Synthetic oligonucleotide
  Target: LAMA2; (-) strand; PAM type: NRG; PAM sequence: GAG
gagattaatacagagccttt

SEQ ID NO: 104798 - DNA, 20 bp, Artificial Sequence
  Description of Artificial Sequence: Synthetic oligonucleotide
  Target: LAMA2; (-) strand; PAM type: NRG; PAM sequence: GAG
cgtgagaagagattaataca

SEQ ID NO: 104799 - DNA, 20 bp, Artificial Sequence
  Description of Artificial Sequence: Synthetic oligonucleotide
  Target: LAMA2; (-) strand; PAM type: NRG; PAM sequence: CAG
agcgtgagaagagattaata

SEQ ID NO: 104800 - DNA, 20 bp, Artificial Sequence
  Description of Artificial Sequence: Synthetic oligonucleotide
  Target: LAMA2; (-) strand; PAM type: NRG; PAM sequence: GAG
tctttatagcagcgtgagaa

SEQ ID NO: 104801 - DNA, 20 bp, Artificial Sequence
  Description of Artificial Sequence: Synthetic oligonucleotide
  Target: LAMA2; (-) strand; PAM type: NRG; PAM sequence: AAG
gttctttatagcagcgtgag

SEQ ID NO: 104802 - DNA, 20 bp, Artificial Sequence
  Description of Artificial Sequence: Synthetic oligonucleotide
  Target: LAMA2; (-) strand; PAM type: NRG; PAM sequence: GAG
gtagttctttatagcagcgt

SEQ ID NO: 104803 - DNA, 20 bp, Artificial Sequence
  Description of Artificial Sequence: Synthetic oligonucleotide
  Target: LAMA2; (-) strand; PAM type: NRG; PAM sequence: CAG
tctcaggtagttctttatag

SEQ ID NO: 104804 - DNA, 20 bp, Artificial Sequence
  Description of Artificial Sequence: Synthetic oligonucleotide
  Target: LAMA2; (-) strand; PAM type: NRG; PAM sequence: TAG
cagtctcaggtagttcttta

SEQ ID NO: 104805 - DNA, 20 bp, Artificial Sequence
  Description of Artificial Sequence: Synthetic oligonucleotide
  Target: LAMA2; (-) strand; PAM type: NRG; PAM sequence: TAG
ataagttacccagtctcagg

SEQ ID NO: 104806 - DNA, 20 bp, Artificial Sequence
  Description of Artificial Sequence: Synthetic oligonucleotide
  Target: LAMA2; (-) strand; PAM type: NRG; PAM sequence: AGG
ttcataagttacccagtctc

SEQ ID NO: 104807 - DNA, 20 bp, Artificial Sequence
  Description of Artificial Sequence: Synthetic oligonucleotide
  Target: LAMA2; (-) strand; PAM type: NRG; PAM sequence: CAG
cttcataagttacccagtct

SEQ ID NO: 104808 - DNA, 20 bp, Artificial Sequence
  Description of Artificial Sequence: Synthetic oligonucleotide
  Target: LAMA2; (-) strand; PAM type: NRG; PAM sequence: CAG
tcttttcttcataagttacc

SEQ ID NO: 104809 - DNA, 20 bp, Artificial Sequence
  Description of Artificial Sequence: Synthetic oligonucleotide
  Target: LAMA2; (-) strand; PAM type: NRG; PAM sequence: AAG
tttatacgtcttttcttcat

SEQ ID NO: 104810 - DNA, 20 bp, Artificial Sequence
  Description of Artificial Sequence: Synthetic oligonucleotide
  Target: LAMA2; (-) strand; PAM type: NRG; PAM sequence: TGG
ttgttaagcctgcagaactg

SEQ ID NO: 104811 - DNA, 20 bp, Artificial Sequence
  Description of Artificial Sequence: Synthetic oligonucleotide
  Target: LAMA2; (-) strand; PAM type: NRG; PAM sequence: CAG
catgcttcttgttaagcctg

SEQ ID NO: 104812 - DNA, 20 bp, Artificial Sequence
  Description of Artificial Sequence: Synthetic oligonucleotide
  Target: LAMA2; (-) strand; PAM type: NRG; PAM sequence: AAG
tcctagtcatgcttcttgtt

SEQ ID NO: 104813 - DNA, 20 bp, Artificial Sequence
  Description of Artificial Sequence: Synthetic oligonucleotide
  Target: LAMA2; (-) strand; PAM type: NRG; PAM sequence: TAG
gtaaatttcctgaggcctcc

SEQ ID NO: 104814 - DNA, 20 bp, Artificial Sequence
  Description of Artificial Sequence: Synthetic oligonucleotide
  Target: LAMA2; (-) strand; PAM type: NRG; PAM sequence: AGG
ccatgatcgtaaatttcctg

SEQ ID NO: 104815 - DNA, 20 bp, Artificial Sequence
  Description of Artificial Sequence: Synthetic oligonucleotide
  Target: LAMA2; (-) strand; PAM type: NRG; PAM sequence: GAG
gccatgatcgtaaatttcct

SEQ ID NO: 104816 - DNA, 20 bp, Artificial Sequence
  Description of Artificial Sequence: Synthetic oligonucleotide
  Target: LAMA2; (-) strand; PAM type: NRG; PAM sequence: AGG
ttcctgccactatgtgaaga

SEQ ID NO: 104817 - DNA, 20 bp, Artificial Sequence
  Description of Artificial Sequence: Synthetic oligonucleotide
  Target: LAMA2; (-) strand; PAM type: NRG; PAM sequence: AAG
tttcctgccactatgtgaag

SEQ ID NO: 104818 - DNA, 20 bp, Artificial Sequence
  Description of Artificial Sequence: Synthetic oligonucleotide
  Target: LAMA2; (-) strand; PAM type: NRG; PAM sequence: AAG
ctctttcctgccactatgtg

SEQ ID NO: 104819 - DNA, 20 bp, Artificial Sequence
  Description of Artificial Sequence: Synthetic oligonucleotide
  Target: LAMA2; (-) strand; PAM type: NRG; PAM sequence: TGG
tcaggttgttcgaaggtatg

SEQ ID NO: 104820 - DNA, 20 bp, Artificial Sequence
  Description of Artificial Sequence: Synthetic oligonucleotide
  Target: LAMA2; (-) strand; PAM type: NRG; PAM sequence: AGG
cacaagatcaggttgttcga

SEQ ID NO: 104821 - DNA, 20 bp, Artificial Sequence
  Description of Artificial Sequence: Synthetic oligonucleotide
  Target: LAMA2; (-) strand; PAM type: NRG; PAM sequence: AAG
tcacaagatcaggttgttcg

SEQ ID NO: 104822 - DNA, 20 bp, Artificial Sequence
  Description of Artificial Sequence: Synthetic oligonucleotide
  Target: LAMA2; (-) strand; PAM type: NRG; PAM sequence: AGG
gaataaattctcacaagatc

SEQ ID NO: 104823 - DNA, 20 bp, Artificial Sequence
  Description of Artificial Sequence: Synthetic oligonucleotide
  Target: LAMA2; (-) strand; PAM type: NRG; PAM sequence: CAG
tgaataaattctcacaagat

SEQ ID NO: 104824 - DNA, 20 bp, Artificial Sequence
  Description of Artificial Sequence: Synthetic oligonucleotide
  Target: LAMA2; (-) strand; PAM type: NRG; PAM sequence: AAG
gatagtgaataaattctcac

SEQ ID NO: 104825 - DNA, 20 bp, Artificial Sequence
  Description of Artificial Sequence: Synthetic oligonucleotide
  Target: LAMA2; (-) strand; PAM type: NRG; PAM sequence: TAG
cccccttgctgttcttgtga

SEQ ID NO: 104826 - DNA, 20 bp, Artificial Sequence
  Description of Artificial Sequence: Synthetic oligonucleotide
  Target: LAMA2; (-) strand; PAM type: NRG; PAM sequence: GAG
gggtggtgactgaatcatgg

SEQ ID NO: 104827 - DNA, 20 bp, Artificial Sequence
  Description of Artificial Sequence: Synthetic oligonucleotide
  Target: LAMA2; (-) strand; PAM type: NRG; PAM sequence: GGG
gtgggtggtgactgaatcat

SEQ ID NO: 104828 - DNA, 20 bp, Artificial Sequence
  Description of Artificial Sequence: Synthetic oligonucleotide
  Target: LAMA2; (-) strand; PAM type: NRG; PAM sequence: TGG
ggtgggtggtgactgaatca

SEQ ID NO: 104829 - DNA, 20 bp, Artificial Sequence
  Description of Artificial Sequence: Synthetic oligonucleotide
  Target: LAMA2; (-) strand; PAM type: NRG; PAM sequence: TGG
tgagggaggggcctggtggg

SEQ ID NO: 104830 - DNA, 20 bp, Artificial Sequence
  Description of Artificial Sequence: Synthetic oligonucleotide
  Target: LAMA2; (-) strand; PAM type: NRG; PAM sequence: GGG
tgttgagggaggggcctggt

SEQ ID NO: 104831 - DNA, 20 bp, Artificial Sequence
  Description of Artificial Sequence: Synthetic oligonucleotide
  Target: LAMA2; (-) strand; PAM type: NRG; PAM sequence: TGG
atgttgagggaggggcctgg

SEQ ID NO: 104832 - DNA, 20 bp, Artificial Sequence
  Description of Artificial Sequence: Synthetic oligonucleotide
  Target: LAMA2; (-) strand; PAM type: NRG; PAM sequence: TGG
cacatgttgagggaggggcc

SEQ ID NO: 104833 - DNA, 20 bp, Artificial Sequence
  Description of Artificial Sequence: Synthetic oligonucleotide
  Target: LAMA2; (-) strand; PAM type: NRG; PAM sequence: GGG
atacccacatgttgagggag

SEQ ID NO: 104834 - DNA, 20 bp, Artificial Sequence
  Description of Artificial Sequence: Synthetic oligonucleotide
  Target: LAMA2; (-) strand; PAM type: NRG; PAM sequence: GGG
aatacccacatgttgaggga

SEQ ID NO: 104835 - DNA, 20 bp, Artificial Sequence
  Description of Artificial Sequence: Synthetic oligonucleotide
  Target: LAMA2; (-) strand; PAM type: NRG; PAM sequence: AGG
taatacccacatgttgaggg

SEQ ID NO: 104836 - DNA, 20 bp, Artificial Sequence
  Description of Artificial Sequence: Synthetic oligonucleotide
  Target: LAMA2; (-) strand; PAM type: NRG; PAM sequence: GAG
gtaatacccacatgttgagg

SEQ ID NO: 104837 - DNA, 20 bp, Artificial Sequence
  Description of Artificial Sequence: Synthetic oligonucleotide
  Target: LAMA2; (-) strand; PAM type: NRG; PAM sequence: GGG
ttgtaatacccacatgttga

SEQ ID NO: 104838 - DNA, 20 bp, Artificial Sequence
  Description of Artificial Sequence: Synthetic oligonucleotide
  Target: LAMA2; (-) strand; PAM type: NRG; PAM sequence: AGG
gttgtaatacccacatgttg

SEQ ID NO: 104839 - DNA, 20 bp, Artificial Sequence
  Description of Artificial Sequence: Synthetic oligonucleotide
  Target: LAMA2; (-) strand; PAM type: NRG; PAM sequence: GAG
agttgtaatacccacatgtt

SEQ ID NO: 104840 - DNA, 20 bp, Artificial Sequence
  Description of Artificial Sequence: Synthetic oligonucleotide
  Target: LAMA2; (-) strand; PAM type: NRG; PAM sequence: AAG
accacctcaaatctcatctc

SEQ ID NO: 104841 - DNA, 20 bp, Artificial Sequence
  Description of Artificial Sequence: Synthetic oligonucleotide
  Target: LAMA2; (-) strand; PAM type: NRG; PAM sequence: TGG
tttggaggcagagcctgata

SEQ ID NO: 104842 - DNA, 20 bp, Artificial Sequence
  Description of Artificial Sequence: Synthetic oligonucleotide
  Target: LAMA2; (-) strand; PAM type: NRG; PAM sequence: GAG
tgtgatggtatttggaggca

SEQ ID NO: 104843 - DNA, 20 bp, Artificial Sequence
  Description of Artificial Sequence: Synthetic oligonucleotide
  Target: LAMA2; (-) strand; PAM type: NRG; PAM sequence: CAG
aatgtgatggtatttggagg

SEQ ID NO: 104844 - DNA, 20 bp, Artificial Sequence
  Description of Artificial Sequence: Synthetic oligonucleotide
  Target: LAMA2; (-) strand; PAM type: NRG; PAM sequence: AGG
cccaatgtgatggtatttgg

SEQ ID NO: 104845 - DNA, 20 bp, Artificial Sequence
  Description of Artificial Sequence: Synthetic oligonucleotide
  Target: LAMA2; (-) strand; PAM type: NRG; PAM sequence: GAG
tcccaatgtgatggtatttg

SEQ ID NO: 104846 - DNA, 20 bp, Artificial Sequence
  Description of Artificial Sequence: Synthetic oligonucleotide
  Target: LAMA2; (-) strand; PAM type: NRG; PAM sequence: TGG
attcccaatgtgatggtatt

SEQ ID NO: 104847 - DNA, 20 bp, Artificial Sequence
  Description of Artificial Sequence: Synthetic oligonucleotide
  Target: LAMA2; (-) strand; PAM type: NRG; PAM sequence: TGG
aaacctaattcccaatgtga

SEQ ID NO: 104848 - DNA, 20 bp, Artificial Sequence
  Description of Artificial Sequence: Synthetic oligonucleotide
  Target: LAMA2; (-) strand; PAM type: NRG; PAM sequence: TAG
aaccctgatagccaatgctg

SEQ ID NO: 104849 - DNA, 20 bp, Artificial Sequence
  Description of Artificial Sequence: Synthetic oligonucleotide
  Target: LAMA2; (-) strand; PAM type: NRG; PAM sequence: TAG
agtcagtactttaaccctga

SEQ ID NO: 104850 - DNA, 20 bp, Artificial Sequence
  Description of Artificial Sequence: Synthetic oligonucleotide
  Target: LAMA2; (-) strand; PAM type: NRG; PAM sequence: CAG
ggtttaaaagttcctgtagt

SEQ ID NO: 104851 - DNA, 20 bp, Artificial Sequence
  Description of Artificial Sequence: Synthetic oligonucleotide
  Target: LAMA2; (-) strand; PAM type: NRG; PAM sequence: TAG
ctttggtttaaaagttcctg

SEQ ID NO: 104852 - DNA, 20 bp, Artificial Sequence
  Description of Artificial Sequence: Synthetic oligonucleotide
  Target: LAMA2; (-) strand; PAM type: NRG; PAM sequence: AAG
tatatatgtctttggtttaa

SEQ ID NO: 104853 - DNA, 20 bp, Artificial Sequence
  Description of Artificial Sequence: Synthetic oligonucleotide
  Target: LAMA2; (-) strand; PAM type: NRG; PAM sequence: TGG
tttttcgttatatatgtctt

SEQ ID NO: 104854 - DNA, 20 bp, Artificial Sequence
  Description of Artificial Sequence: Synthetic oligonucleotide
  Target: LAMA2; (-) strand; PAM type: NRG; PAM sequence: GAG
ctgggatagtagaaagaatt

SEQ ID NO: 104855 - DNA, 20 bp, Artificial Sequence
  Description of Artificial Sequence: Synthetic oligonucleotide
  Target: LAMA2; (-) strand; PAM type: NRG; PAM sequence: AAG
agaaacactgggatagtaga

SEQ ID NO: 104856 - DNA, 20 bp, Artificial Sequence
  Description of Artificial Sequence: Synthetic oligonucleotide
  Target: LAMA2; (-) strand; PAM type: NRG; PAM sequence: TAG
cttgagaaacactgggatag

SEQ ID NO: 104857 - DNA, 20 bp, Artificial Sequence
  Description of Artificial Sequence: Synthetic oligonucleotide
  Target: LAMA2; (-) strand; PAM type: NRG; PAM sequence: TAG
gagcttgagaaacactggga

SEQ ID NO: 104858 - DNA, 20 bp, Artificial Sequence
  Description of Artificial Sequence: Synthetic oligonucleotide
  Target: LAMA2; (-) strand; PAM type: NRG; PAM sequence: GGG
cctagagcttgagaaacact

SEQ ID NO: 104859 - DNA, 20 bp, Artificial Sequence
  Description of Artificial Sequence: Synthetic oligonucleotide
  Target: LAMA2; (-) strand; PAM type: NRG; PAM sequence: TGG
ccctagagcttgagaaacac

SEQ ID NO: 104860 - DNA, 20 bp, Artificial Sequence
  Description of Artificial Sequence: Synthetic oligonucleotide
  Target: LAMA2; (-) strand; PAM type: NRG; PAM sequence: GAG
tctgatgtaccctagagctt

SEQ ID NO: 104861 - DNA, 20 bp, Artificial Sequence
  Description of Artificial Sequence: Synthetic oligonucleotide
  Target: LAMA2; (-) strand; PAM type: NRG; PAM sequence: GAG
agagcttctgatgtacccta

SEQ ID NO: 104862 - DNA, 20 bp, Artificial Sequence
  Description of Artificial Sequence: Synthetic oligonucleotide
  Target: LAMA2; (-) strand; PAM type: NRG; PAM sequence: TAG
tcagagcttctgatgtaccc

SEQ ID NO: 104863 - DNA, 20 bp, Artificial Sequence
  Description of Artificial Sequence: Synthetic oligonucleotide
  Target: LAMA2; (-) strand; PAM type: NRG; PAM sequence: GAG
ggctttaacaagccttctca

SEQ ID NO: 104864 - DNA, 20 bp, Artificial Sequence
  Description of Artificial Sequence: Synthetic oligonucleotide
  Target: LAMA2; (-) strand; PAM type: NRG; PAM sequence: CAG
tgggctttaacaagccttct

SEQ ID NO: 104865 - DNA, 20 bp, Artificial Sequence
  Description of Artificial Sequence: Synthetic oligonucleotide
  Target: LAMA2; (-) strand; PAM type: NRG; PAM sequence: AAG
ccagcaatctgggctttaac

SEQ ID NO: 104866 - DNA, 20 bp, Artificial Sequence
  Description of Artificial Sequence: Synthetic oligonucleotide
  Target: LAMA2; (-) strand; PAM type: NRG; PAM sequence: GGG
ggggtgaggaccagcaatct

SEQ ID NO: 104867 - DNA, 20 bp, Artificial Sequence
  Description of Artificial Sequence: Synthetic oligonucleotide
  Target: LAMA2; (-) strand; PAM type: NRG; PAM sequence: TGG
gggggtgaggaccagcaatc

SEQ ID NO: 104868 - DNA, 20 bp, Artificial Sequence
  Description of Artificial Sequence: Synthetic oligonucleotide
  Target: LAMA2; (-) strand; PAM type: NRG; PAM sequence: CAG
gaaattctgggggtgaggac

SEQ ID NO: 104869 - DNA, 20 bp, Artificial Sequence
  Description of Artificial Sequence: Synthetic oligonucleotide
  Target: LAMA2; (-) strand; PAM type: NRG; PAM sequence: AGG
actcagaaattctgggggtg

SEQ ID NO: 104870 - DNA, 20 bp, Artificial Sequence
  Description of Artificial Sequence: Synthetic oligonucleotide
  Target: LAMA2; (-) strand; PAM type: NRG; PAM sequence: GAG
gactcagaaattctgggggt

SEQ ID NO: 104871 - DNA, 20 bp, Artificial Sequence
  Description of Artificial Sequence: Synthetic oligonucleotide
  Target: LAMA2; (-) strand; PAM type: NRG; PAM sequence: GGG
tacagactcagaaattctgg

SEQ ID NO: 104872 - DNA, 20 bp, Artificial Sequence
  Description of Artificial Sequence: Synthetic oligonucleotide
  Target: LAMA2; (-) strand; PAM type: NRG; PAM sequence: GGG
ctacagactcagaaattctg

SEQ ID NO: 104873 - DNA, 20 bp, Artificial Sequence
  Description of Artificial Sequence: Synthetic oligonucleotide
  Target: LAMA2; (-) strand; PAM type: NRG; PAM sequence: GGG
cctacagactcagaaattct

SEQ ID NO: 104874 - DNA, 20 bp, Artificial Sequence
  Description of Artificial Sequence: Synthetic oligonucleotide
  Target: LAMA2; (-) strand; PAM type: NRG; PAM sequence: TGG
acctacagactcagaaattc

SEQ ID NO: 104875 - DNA, 20 bp, Artificial Sequence
  Description of Artificial Sequence: Synthetic oligonucleotide
  Target: LAMA2; (-) strand; PAM type: NRG; PAM sequence: CAG
ctgccacaaacctacagact

SEQ ID NO: 104876 - DNA, 20 bp, Artificial Sequence
  Description of Artificial Sequence: Synthetic oligonucleotide
  Target: LAMA2; (-) strand; PAM type: NRG; PAM sequence: CAG
caggccctgccacaaaccta

SEQ ID NO: 104877 - DNA, 20 bp, Artificial Sequence
  Description of Artificial Sequence: Synthetic oligonucleotide
  Target: LAMA2; (-) strand; PAM type: NRG; PAM sequence: AGG
cattagaaatgcagattctc

SEQ ID NO: 104878 - DNA, 20 bp, Artificial Sequence
  Description of Artificial Sequence: Synthetic oligonucleotide
  Target: LAMA2; (-) strand; PAM type: NRG; PAM sequence: CAG
ccattagaaatgcagattct

SEQ ID NO: 104879 - DNA, 20 bp, Artificial Sequence
  Description of Artificial Sequence: Synthetic oligonucleotide
  Target: LAMA2; (-) strand; PAM type: NRG; PAM sequence: CAG
cttggagcccattagaaatg

SEQ ID NO: 104880 - DNA, 20 bp, Artificial Sequence
  Description of Artificial Sequence: Synthetic oligonucleotide
  Target: LAMA2; (-) strand; PAM type: NRG; PAM sequence: TAG
atcaccaccttggagcccat

SEQ ID NO: 104881 - DNA, 20 bp, Artificial Sequence
  Description of Artificial Sequence: Synthetic oligonucleotide
  Target: LAMA2; (-) strand; PAM type: NRG; PAM sequence: GAG
gcagcagcatcaccaccttg

SEQ ID NO: 104882 - DNA, 20 bp, Artificial Sequence
  Description of Artificial Sequence: Synthetic oligonucleotide
  Target: LAMA2; (-) strand; PAM type: NRG; PAM sequence: TGG
cagcagcagcatcaccacct

SEQ ID NO: 104883 - DNA, 20 bp, Artificial Sequence
  Description of Artificial Sequence: Synthetic oligonucleotide
  Target: LAMA2; (-) strand; PAM type: NRG; PAM sequence: CAG
tggtcccctataagcagcag

SEQ ID NO: 104884 - DNA, 20 bp, Artificial Sequence
  Description of Artificial Sequence: Synthetic oligonucleotide
  Target: LAMA2; (-) strand; PAM type: NRG; PAM sequence: CAG
atgtggtcccctataagcag

SEQ ID NO: 104885 - DNA, 20 bp, Artificial Sequence
  Description of Artificial Sequence: Synthetic oligonucleotide
  Target: LAMA2; (-) strand; PAM type: NRG; PAM sequence: CAG
aaaatgtggtcccctataag

SEQ ID NO: 104886 - DNA, 20 bp, Artificial Sequence
  Description of Artificial Sequence: Synthetic oligonucleotide
  Target: LAMA2; (-) strand; PAM type: NRG; PAM sequence: AAG
tctaaaatgtggtcccctat

SEQ ID NO: 104887 - DNA, 20 bp, Artificial Sequence
  Description of Artificial Sequence: Synthetic oligonucleotide
  Target: LAMA2; (-) strand; PAM type: NRG; PAM sequence: TGG
agtacagtggttctaaaatg

SEQ ID NO: 104888 - DNA, 20 bp, Artificial Sequence
  Description of Artificial Sequence: Synthetic oligonucleotide
  Target: LAMA2; (-) strand; PAM type: NRG; PAM sequence: TGG
gagaaggtgggtcagtacag

SEQ ID NO: 104889 - DNA, 20 bp, Artificial Sequence
  Description of Artificial Sequence: Synthetic oligonucleotide
  Target: LAMA2; (-) strand; PAM type: NRG; PAM sequence: CAG
tgtgagaaggtgggtcagta

SEQ ID NO: 104890 - DNA, 20 bp, Artificial Sequence
  Description of Artificial Sequence: Synthetic oligonucleotide
  Target: LAMA2; (-) strand; PAM type: NRG; PAM sequence: CAG
gggtatgtgagaaggtgggt

SEQ ID NO: 104891 - DNA, 20 bp, Artificial Sequence
  Description of Artificial Sequence: Synthetic oligonucleotide
  Target: LAMA2; (-) strand; PAM type: NRG; PAM sequence: GGG
agaggggtatgtgagaaggt

SEQ ID NO: 104892 - DNA, 20 bp, Artificial Sequence
  Description of Artificial Sequence: Synthetic oligonucleotide
  Target: LAMA2; (-) strand; PAM type: NRG; PAM sequence: TGG
cagaggggtatgtgagaagg

SEQ ID NO: 104893 - DNA, 20 bp, Artificial Sequence
  Description of Artificial Sequence: Synthetic oligonucleotide
  Target: LAMA2; (-) strand; PAM type: NRG; PAM sequence: AGG
aggcagaggggtatgtgaga

SEQ ID NO: 104894 - DNA, 20 bp, Artificial Sequence
  Description of Artificial Sequence: Synthetic oligonucleotide
  Target: LAMA2; (-) strand; PAM type: NRG; PAM sequence: AAG
caggcagaggggtatgtgag

SEQ ID NO: 104895 - DNA, 20 bp, Artificial Sequence
  Description of Artificial Sequence: Synthetic oligonucleotide
  Target: LAMA2; (-) strand; PAM type: NRG; PAM sequence: GAG
gagcaggcagaggggtatgt

SEQ ID NO: 104896 - DNA, 20 bp, Artificial Sequence
  Description of Artificial Sequence: Synthetic oligonucleotide
  Target: LAMA2; (-) strand; PAM type: NRG; PAM sequence: GGG
gacaagcagagcaggcagag

SEQ ID NO: 104897 - DNA, 20 bp, Artificial Sequence
  Description of Artificial Sequence: Synthetic oligonucleotide
  Target: LAMA2; (-) strand; PAM type: NRG; PAM sequence: GGG
ggacaagcagagcaggcaga

SEQ ID NO: 104898 - DNA, 20 bp, Artificial Sequence
  Description of Artificial Sequence: Synthetic oligonucleotide
  Target: LAMA2; (-) strand; PAM type: NRG; PAM sequence: AGG
aggacaagcagagcaggcag

SEQ ID NO: 104899 - DNA, 20 bp, Artificial Sequence
  Description of Artificial Sequence: Synthetic oligonucleotide
  Target: LAMA2; (-) strand; PAM type: NRG; PAM sequence: GAG
caggacaagcagagcaggca

SEQ ID NO: 104900 - DNA, 20 bp, Artificial Sequence
  Description of Artificial Sequence: Synthetic oligonucleotide
  Target: LAMA2; (-) strand; PAM type: NRG; PAM sequence: CAG
gtcaggacaagcagagcagg

SEQ ID NO: 104901 - DNA, 20 bp, Artificial Sequence
  Description of Artificial Sequence: Synthetic oligonucleotide
  Target: LAMA2; (-) strand; PAM type: NRG; PAM sequence: AGG
atagtcaggacaagcagagc

SEQ ID NO: 104902 - DNA, 20 bp, Artificial Sequence
  Description of Artificial Sequence: Synthetic oligonucleotide
  Target: LAMA2; (-) strand; PAM type: NRG; PAM sequence: CAG
catagtcaggacaagcagag

SEQ ID NO: 104903 - DNA, 20 bp, Artificial Sequence
  Description of Artificial Sequence: Synthetic oligonucleotide
  Target: LAMA2; (-) strand; PAM type: NRG; PAM sequence: GAG
gtacatagtcaggacaagca

SEQ ID NO: 104904 - DNA, 20 bp, Artificial Sequence
  Description of Artificial Sequence: Synthetic oligonucleotide
  Target: LAMA2; (-) strand; PAM type: NRG; PAM sequence: CAG
gtgtacatagtcaggacaag

SEQ ID NO: 104905 - DNA, 20 bp, Artificial Sequence
  Description of Artificial Sequence: Synthetic oligonucleotide
  Target: LAMA2; (-) strand; PAM type: NRG; PAM sequence: AAG
caggtgtacatagtcaggac

SEQ ID NO: 104906 - DNA, 20 bp, Artificial Sequence
  Description of Artificial Sequence: Synthetic oligonucleotide
  Target: LAMA2; (-) strand; PAM type: NRG; PAM sequence: AGG
tgaaacaggtgtacatagtc

SEQ ID NO: 104907 - DNA, 20 bp, Artificial Sequence
  Description of Artificial Sequence: Synthetic oligonucleotide
  Target: LAMA2; (-) strand; PAM type: NRG; PAM sequence: CAG
ctgaaacaggtgtacatagt

SEQ ID NO: 104908 - DNA, 20 bp, Artificial Sequence
  Description of Artificial Sequence: Synthetic oligonucleotide
  Target: LAMA2; (-) strand; PAM type: NRG; PAM sequence: TAG
gctcctgaaacaggtgtaca

SEQ ID NO: 104909 - DNA, 20 bp, Artificial Sequence
  Description of Artificial Sequence: Synthetic oligonucleotide
  Target: LAMA2; (-) strand; PAM type: NRG; PAM sequence: AGG
ctgggcagagctcctgaaac

SEQ ID NO: 104910 - DNA, 20 bp, Artificial Sequence
  Description of Artificial Sequence: Synthetic oligonucleotide
  Target: LAMA2; (-) strand; PAM type: NRG; PAM sequence: CAG
actgggcagagctcctgaaa

SEQ ID NO: 104911 - DNA, 20 bp, Artificial Sequence
  Description of Artificial Sequence: Synthetic oligonucleotide
  Target: LAMA2; (-) strand; PAM type: NRG; PAM sequence: GAG
agagagttttgcactgggca

SEQ ID NO: 104912 - DNA, 20 bp, Artificial Sequence
  Description of Artificial Sequence: Synthetic oligonucleotide
  Target: LAMA2; (-) strand; PAM type: NRG; PAM sequence: CAG
ggagagagttttgcactggg

SEQ ID NO: 104913 - DNA, 20 bp, Artificial Sequence
  Description of Artificial Sequence: Synthetic oligonucleotide
  Target: LAMA2; (-) strand; PAM type: NRG; PAM sequence: GGG
cttggagagagttttgcact

SEQ ID NO: 104914 - DNA, 20 bp, Artificial Sequence
  Description of Artificial Sequence: Synthetic oligonucleotide
  Target: LAMA2; (-) strand; PAM type: NRG; PAM sequence: TGG
tcttggagagagttttgcac

SEQ ID NO: 104915 - DNA, 20 bp, Artificial Sequence
  Description of Artificial Sequence: Synthetic oligonucleotide
  Target: LAMA2; (-) strand; PAM type: NRG; PAM sequence: GAG
ttaatttctattcttggaga

SEQ ID NO: 104916 - DNA, 20 bp, Artificial Sequence
  Description of Artificial Sequence: Synthetic oligonucleotide
  Target: LAMA2; (-) strand; PAM type: NRG; PAM sequence: GAG
aattaatttctattcttgga

SEQ ID NO: 104917 - DNA, 20 bp, Artificial Sequence
  Description of Artificial Sequence: Synthetic oligonucleotide
  Target: LAMA2; (-) strand; PAM type: NRG; PAM sequence: GAG
aaaattaatttctattcttg

SEQ ID NO: 104918 - DNA, 20 bp, Artificial Sequence
  Description of Artificial Sequence: Synthetic oligonucleotide
  Target: LAMA2; (-) strand; PAM type: NRG; PAM sequence: TGG
tgaaaattaatttctattct

SEQ ID NO: 104919 - DNA, 20 bp, Artificial Sequence
  Description of Artificial Sequence: Synthetic oligonucleotide
  Target: LAMA2; (-) strand; PAM type: NRG; PAM sequence: GAG
gaagatctccttatgacata

SEQ ID NO: 104920 - DNA, 20 bp, Artificial Sequence
  Description of Artificial Sequence: Synthetic oligonucleotide
  Target: LAMA2; (-) strand; PAM type: NRG; PAM sequence: TAG
ccgaagatctccttatgaca

SEQ ID NO: 104921 - DNA, 20 bp, Artificial Sequence
  Description of Artificial Sequence: Synthetic oligonucleotide
  Target: LAMA2; (-) strand; PAM type: NRG; PAM sequence: AAG
accattcaagggtgtatccg

SEQ ID NO: 104922 - DNA, 20 bp, Artificial Sequence
  Description of Artificial Sequence: Synthetic oligonucleotide
  Target: LAMA2; (-) strand; PAM type: NRG; PAM sequence: GGG
aggcattttctaccattcaa

SEQ ID NO: 104923 - DNA, 20 bp, Artificial Sequence
  Description of Artificial Sequence: Synthetic oligonucleotide
  Target: LAMA2; (-) strand; PAM type: NRG; PAM sequence: AGG
gaggcattttctaccattca

SEQ ID NO: 104924 - DNA, 20 bp, Artificial Sequence
  Description of Artificial Sequence: Synthetic oligonucleotide
  Target: LAMA2; (-) strand; PAM type: NRG; PAM sequence: AAG
agaggcattttctaccattc

SEQ ID NO: 104925 - DNA, 20 bp, Artificial Sequence
  Description of Artificial Sequence: Synthetic oligonucleotide
  Target: LAMA2; (-) strand; PAM type: NRG; PAM sequence: AGG
aggggtctcggttggccaag

SEQ ID NO: 104926 - DNA, 20 bp, Artificial Sequence
  Description of Artificial Sequence: Synthetic oligonucleotide
  Target: LAMA2; (-) strand; PAM type: NRG; PAM sequence: GAG
gaggggtctcggttggccaa

SEQ ID NO: 104927 - DNA, 20 bp, Artificial Sequence
  Description of Artificial Sequence: Synthetic oligonucleotide
  Target: LAMA2; (-) strand; PAM type: NRG; PAM sequence: AAG
atgaggggtctcggttggcc

SEQ ID NO: 104928 - DNA, 20 bp, Artificial Sequence
  Description of Artificial Sequence: Synthetic oligonucleotide
  Target: LAMA2; (-) strand; PAM type: NRG; PAM sequence: TGG
ctagaatgaggggtctcggt

SEQ ID NO: 104929 - DNA, 20 bp, Artificial Sequence
  Description of Artificial Sequence: Synthetic oligonucleotide
  Target: LAMA2; (-) strand; PAM type: NRG; PAM sequence: CGG
actcctagaatgaggggtct

SEQ ID NO: 104930 - DNA, 20 bp, Artificial Sequence
  Description of Artificial Sequence: Synthetic oligonucleotide
  Target: LAMA2; (-) strand; PAM type: NRG; PAM sequence: GGG
ttgaaaactcctagaatgag

SEQ ID NO: 104931 - DNA, 20 bp, Artificial Sequence
  Description of Artificial Sequence: Synthetic oligonucleotide
  Target: LAMA2; (-) strand; PAM type: NRG; PAM sequence: GGG
tttgaaaactcctagaatga

SEQ ID NO: 104932 - DNA, 20 bp, Artificial Sequence
  Description of Artificial Sequence: Synthetic oligonucleotide
  Target: LAMA2; (-) strand; PAM type: NRG; PAM sequence: AGG
ctttgaaaactcctagaatg

SEQ ID NO: 104933 - DNA, 20 bp, Artificial Sequence
  Description of Artificial Sequence: Synthetic oligonucleotide
  Target: LAMA2; (-) strand; PAM type: NRG; PAM sequence: GAG
cctttgaaaactcctagaat

SEQ ID NO: 104934 - DNA, 20 bp, Artificial Sequence
  Description of Artificial Sequence: Synthetic oligonucleotide
  Target: LAMA2; (-) strand; PAM type: NRG; PAM sequence: TAG
atattacctttgaaaactcc

SEQ ID NO: 104935 - DNA, 20 bp, Artificial Sequence
  Description of Artificial Sequence: Synthetic oligonucleotide
  Target: LAMA2; (-) strand; PAM type: NRG; PAM sequence: CAG
gttttctcaaactcttttgt

SEQ ID NO: 104936 - DNA, 20 bp, Artificial Sequence
  Description of Artificial Sequence: Synthetic oligonucleotide
  Target: LAMA2; (-) strand; PAM type: NRG; PAM sequence: GAG
tttttttggtgaatttaaga

SEQ ID NO: 104937 - DNA, 20 bp, Artificial Sequence
  Description of Artificial Sequence: Synthetic oligonucleotide
  Target: LAMA2; (-) strand; PAM type: NRG; PAM sequence: GAG
catttttttggtgaatttaa

SEQ ID NO: 104938 - DNA, 20 bp, Artificial Sequence
  Description of Artificial Sequence: Synthetic oligonucleotide
  Target: LAMA2; (-) strand; PAM type: NRG; PAM sequence: AAG
gacatttttttggtgaattt

SEQ ID NO: 104939 - DNA, 20 bp, Artificial Sequence
  Description of Artificial Sequence: Synthetic oligonucleotide
  Target: LAMA2; (-) strand; PAM type: NRG; PAM sequence: TGG
tgttctataggacatttttt

SEQ ID NO: 104940 - DNA, 20 bp, Artificial Sequence
  Description of Artificial Sequence: Synthetic oligonucleotide
  Target: LAMA2; (-) strand; PAM type: NRG; PAM sequence: AGG
tttcctggagtgtgttctat

SEQ ID NO: 104941 - DNA, 20 bp, Artificial Sequence
  Description of Artificial Sequence: Synthetic oligonucleotide
  Target: LAMA2; (-) strand; PAM type: NRG; PAM sequence: TAG
gtttcctggagtgtgttcta

SEQ ID NO: 104942 - DNA, 20 bp, Artificial Sequence
  Description of Artificial Sequence: Synthetic oligonucleotide
  Target: LAMA2; (-) strand; PAM type: NRG; PAM sequence: GAG
ttttagactaaagtttcctg

SEQ ID NO: 104943 - DNA, 20 bp, Artificial Sequence
  Description of Artificial Sequence: Synthetic oligonucleotide
  Target: LAMA2; (-) strand; PAM type: NRG; PAM sequence: TGG
agttttagactaaagtttcc

SEQ ID NO: 104944 - DNA, 20 bp, Artificial Sequence
  Description of Artificial Sequence: Synthetic oligonucleotide
  Target: LAMA2; (-) strand; PAM type: NRG; PAM sequence: AAG
atattattagttttagacta

SEQ ID NO: 104945 - DNA, 20 bp, Artificial Sequence
  Description of Artificial Sequence: Synthetic oligonucleotide
  Target: LAMA2; (-) strand; PAM type: NRG; PAM sequence: TAG
cacagttatattattagttt

SEQ ID NO: 104946 - DNA, 20 bp, Artificial Sequence
  Description of Artificial Sequence: Synthetic oligonucleotide
  Target: LAMA2; (-) strand; PAM type: NRG; PAM sequence: TAG
catttacacagttatattat

SEQ ID NO: 104947 - DNA, 20 bp, Artificial Sequence
  Description of Artificial Sequence: Synthetic oligonucleotide
  Target: LAMA2; (-) strand; PAM type: NRG; PAM sequence: CAG
ggtgaattgaaacatttaca

SEQ ID NO: 104948 - DNA, 20 bp, Artificial Sequence
  Description of Artificial Sequence: Synthetic oligonucleotide
  Target: LAMA2; (-) strand; PAM type: NRG; PAM sequence: TGG
cgtcaaataaaagtttaaaa

SEQ ID NO: 104949 - DNA, 20 bp, Artificial Sequence
  Description of Artificial Sequence: Synthetic oligonucleotide
  Target: LAMA2; (-) strand; PAM type: NRG; PAM sequence: AAG
aagaattctacgtcaaataa

SEQ ID NO: 104950 - DNA, 20 bp, Artificial Sequence
  Description of Artificial Sequence: Synthetic oligonucleotide
  Target: LAMA2; (-) strand; PAM type: NRG; PAM sequence: AAG
ggcaggatttcatttgagaa

SEQ ID NO: 104951 - DNA, 20 bp, Artificial Sequence
  Description of Artificial Sequence: Synthetic oligonucleotide
  Target: LAMA2; (-) strand; PAM type: NRG; PAM sequence: GAG
ttctgggcaggatttcattt

SEQ ID NO: 104952 - DNA, 20 bp, Artificial Sequence
  Description of Artificial Sequence: Synthetic oligonucleotide
  Target: LAMA2; (-) strand; PAM type: NRG; PAM sequence: AGG
tataggctgatgttctgggc

SEQ ID NO: 104953 - DNA, 20 bp, Artificial Sequence
  Description of Artificial Sequence: Synthetic oligonucleotide
  Target: LAMA2; (-) strand; PAM type: NRG; PAM sequence: CAG
ttataggctgatgttctggg

SEQ ID NO: 104954 - DNA, 20 bp, Artificial Sequence
  Description of Artificial Sequence: Synthetic oligonucleotide
  Target: LAMA2; (-) strand; PAM type: NRG; PAM sequence: GGG
gctttataggctgatgttct

SEQ ID NO: 104955 - DNA, 20 bp, Artificial Sequence
  Description of Artificial Sequence: Synthetic oligonucleotide
  Target: LAMA2; (-) strand; PAM type: NRG; PAM sequence: TGG
tgctttataggctgatgttc

SEQ ID NO: 104956 - DNA, 20 bp, Artificial Sequence
  Description of Artificial Sequence: Synthetic oligonucleotide
  Target: LAMA2; (-) strand; PAM type: NRG; PAM sequence: AGG
ctgccaagagtctgctttat

SEQ ID NO: 104957 - DNA, 20 bp, Artificial Sequence
  Description of Artificial Sequence: Synthetic oligonucleotide
  Target: LAMA2; (-) strand; PAM type: NRG; PAM sequence: TAG
tctgccaagagtctgcttta

SEQ ID NO: 104958 - DNA, 20 bp, Artificial Sequence
  Description of Artificial Sequence: Synthetic oligonucleotide
  Target: LAMA2; (-) strand; PAM type: NRG; PAM sequence: GAG
aatgatgtctattctgccaa

SEQ ID NO: 104959 - DNA, 20 bp, Artificial Sequence
  Description of Artificial Sequence: Synthetic oligonucleotide
  Target: LAMA2; (-) strand; PAM type: NRG; PAM sequence: AAG
caaatgatgtctattctgcc

SEQ ID NO: 104960 - DNA, 20 bp, Artificial Sequence
  Description of Artificial Sequence: Synthetic oligonucleotide
  Target: LAMA2; (-) strand; PAM type: NRG; PAM sequence: AGG
taggattctccaggtgcttc

SEQ ID NO: 104961 - DNA, 20 bp, Artificial Sequence
  Description of Artificial Sequence: Synthetic oligonucleotide
  Target: LAMA2; (-) strand; PAM type: NRG; PAM sequence: CAG
gtaggattctccaggtgctt

SEQ ID NO: 104962 - DNA, 20 bp, Artificial Sequence
  Description of Artificial Sequence: Synthetic oligonucleotide
  Target: LAMA2; (-) strand; PAM type: NRG; PAM sequence: AGG
ttggaatcgtaggattctcc

SEQ ID NO: 104963 - DNA, 20 bp, Artificial Sequence
  Description of Artificial Sequence: Synthetic oligonucleotide
  Target: LAMA2; (-) strand; PAM type: NRG; PAM sequence: CAG
cttggaatcgtaggattctc

SEQ ID NO: 104964 - DNA, 20 bp, Artificial Sequence
  Description of Artificial Sequence: Synthetic oligonucleotide
  Target: LAMA2; (-) strand; PAM type: NRG; PAM sequence: AGG
actgtactccttggaatcgt

SEQ ID NO: 104965 - DNA, 20 bp, Artificial Sequence
  Description of Artificial Sequence: Synthetic oligonucleotide
  Target: LAMA2; (-) strand; PAM type: NRG; PAM sequence: TAG
aactgtactccttggaatcg

SEQ ID NO: 104966 - DNA, 20 bp, Artificial Sequence
  Description of Artificial Sequence: Synthetic oligonucleotide
  Target: LAMA2; (-) strand; PAM type: NRG; PAM sequence: TGG
gggtttcaaactgtactcct

SEQ ID NO: 104967 - DNA, 20 bp, Artificial Sequence
  Description of Artificial Sequence: Synthetic oligonucleotide
  Target: LAMA2; (-) strand; PAM type: NRG; PAM sequence: GGG
tgtttattatgcattaaatg

SEQ ID NO: 104968 - DNA, 20 bp, Artificial Sequence
  Description of Artificial Sequence: Synthetic oligonucleotide
  Target: LAMA2; (-) strand; PAM type: NRG; PAM sequence: GGG
gtgtttattatgcattaaat

SEQ ID NO: 104969 - DNA, 20 bp, Artificial Sequence
  Description of Artificial Sequence: Synthetic oligonucleotide
  Target: LAMA2; (-) strand; PAM type: NRG; PAM sequence: TGG
tgtgtttattatgcattaaa

SEQ ID NO: 104970 - DNA, 20 bp, Artificial Sequence
  Description of Artificial Sequence: Synthetic oligonucleotide
  Target: LAMA2; (-) strand; PAM type: NRG; PAM sequence: GGG
agcaatagcatccttcacaa

SEQ ID NO: 104971 - DNA, 20 bp, Artificial Sequence
  Description of Artificial Sequence: Synthetic oligonucleotide
  Target: LAMA2; (-) strand; PAM type: NRG; PAM sequence: AGG
cagcaatagcatccttcaca

SEQ ID NO: 104972 - DNA, 20 bp, Artificial Sequence
  Description of Artificial Sequence: Synthetic oligonucleotide
  Target: LAMA2; (-) strand; PAM type: NRG; PAM sequence: AAG
ccagcaatagcatccttcac

SEQ ID NO: 104973 - DNA, 20 bp, Artificial Sequence
  Description of Artificial Sequence: Synthetic oligonucleotide
  Target: LAMA2; (-) strand; PAM type: NRG; PAM sequence: TAG
tcaaggacactttccagcaa

SEQ ID NO: 104974 - DNA, 20 bp, Artificial Sequence
  Description of Artificial Sequence: Synthetic oligonucleotide
  Target: LAMA2; (-) strand; PAM type: NRG; PAM sequence: CAG
taggcttcaaggacactttc

SEQ ID NO: 104975 - DNA, 20 bp, Artificial Sequence
  Description of Artificial Sequence: Synthetic oligonucleotide
  Target: LAMA2; (-) strand; PAM type: NRG; PAM sequence: AGG
gggttataaattaggcttca

SEQ ID NO: 104976 - DNA, 20 bp, Artificial Sequence
  Description of Artificial Sequence: Synthetic oligonucleotide
  Target: LAMA2; (-) strand; PAM type: NRG; PAM sequence: AAG
agggttataaattaggcttc

SEQ ID NO: 104977 - DNA, 20 bp, Artificial Sequence
  Description of Artificial Sequence: Synthetic oligonucleotide
  Target: LAMA2; (-) strand; PAM type: NRG; PAM sequence: AGG
taggagaagggttataaatt

SEQ ID NO: 104978 - DNA, 20 bp, Artificial Sequence
  Description of Artificial Sequence: Synthetic oligonucleotide
  Target: LAMA2; (-) strand; PAM type: NRG; PAM sequence: TAG
ctaggagaagggttataaat

SEQ ID NO: 104979 - DNA, 20 bp, Artificial Sequence
  Description of Artificial Sequence: Synthetic oligonucleotide
  Target: LAMA2; (-) strand; PAM type: NRG; PAM sequence: GGG
ttataacccttctaggagaa

SEQ ID NO: 104980 - DNA, 20 bp, Artificial Sequence
  Description of Artificial Sequence: Synthetic oligonucleotide
  Target: LAMA2; (-) strand; PAM type: NRG; PAM sequence: AGG
cttataacccttctaggaga

SEQ ID NO: 104981 - DNA, 20 bp, Artificial Sequence
  Description of Artificial Sequence: Synthetic oligonucleotide
  Target: LAMA2; (-) strand; PAM type: NRG; PAM sequence: AAG
acttataacccttctaggag

SEQ ID NO: 104982 - DNA, 20 bp, Artificial Sequence
  Description of Artificial Sequence: Synthetic oligonucleotide
  Target: LAMA2; (-) strand; PAM type: NRG; PAM sequence: GAG
tagacttataacccttctag

SEQ ID NO: 104983 - DNA, 20 bp, Artificial Sequence
  Description of Artificial Sequence: Synthetic oligonucleotide
  Target: LAMA2; (-) strand; PAM type: NRG; PAM sequence: AGG
tctagacttataacccttct

SEQ ID NO: 104984 - DNA, 20 bp, Artificial Sequence
  Description of Artificial Sequence: Synthetic oligonucleotide
  Target: LAMA2; (-) strand; PAM type: NRG; PAM sequence: TAG
gtctagacttataacccttc

SEQ ID NO: 104985 - DNA, 20 bp, Artificial Sequence
  Description of Artificial Sequence: Synthetic oligonucleotide
  Target: LAMA2; (-) strand; PAM type: NRG; PAM sequence: TAG
tgaagaaagaagcactggtc

SEQ ID NO: 104986 - DNA, 20 bp, Artificial Sequence
  Description of Artificial Sequence: Synthetic oligonucleotide
  Target: LAMA2; (-) strand; PAM type: NRG; PAM sequence: TGG
aggagtgaagaaagaagcac

SEQ ID NO: 104987 - DNA, 20 bp, Artificial Sequence
  Description of Artificial Sequence: Synthetic oligonucleotide
  Target: LAMA2; (-) strand; PAM type: NRG; PAM sequence: AAG
ttttaaaggagtgaagaaag

SEQ ID NO: 104988 - DNA, 20 bp, Artificial Sequence
  Description of Artificial Sequence: Synthetic oligonucleotide
  Target: LAMA2; (-) strand; PAM type: NRG; PAM sequence: AAG
attttttaaaggagtgaaga

SEQ ID NO: 104989 - DNA, 20 bp, Artificial Sequence
  Description of Artificial Sequence: Synthetic oligonucleotide
  Target: LAMA2; (-) strand; PAM type: NRG; PAM sequence: AAG
gttcattttttaaaggagtg

SEQ ID NO: 104990 - DNA, 20 bp, Artificial Sequence
  Description of Artificial Sequence: Synthetic oligonucleotide
  Target: LAMA2; (-) strand; PAM type: NRG; PAM sequence: GAG
cctgtgttcattttttaaag

SEQ ID NO: 104991 - DNA, 20 bp, Artificial Sequence
  Description of Artificial Sequence: Synthetic oligonucleotide
  Target: LAMA2; (-) strand; PAM type: NRG; PAM sequence: AGG
ctcctgtgttcattttttaa

SEQ ID NO: 104992 - DNA, 20 bp, Artificial Sequence
  Description of Artificial Sequence: Synthetic oligonucleotide
  Target: LAMA2; (-) strand; PAM type: NRG; PAM sequence: AAG
tctcctgtgttcatttttta

SEQ ID NO: 104993 - DNA, 20 bp, Artificial Sequence
  Description of Artificial Sequence: Synthetic oligonucleotide
  Target: LAMA2; (-) strand; PAM type: NRG; PAM sequence: TAG
cctgcccttgtatttccaca

SEQ ID NO: 104994 - DNA, 20 bp, Artificial Sequence
  Description of Artificial Sequence: Synthetic oligonucleotide
  Target: LAMA2; (-) strand; PAM type: NRG; PAM sequence: GAG
gtggaaatacactcagtgat

SEQ ID NO: 104995 - DNA, 20 bp, Artificial Sequence
  Description of Artificial Sequence: Synthetic oligonucleotide
  Target: LAMA2; (-) strand; PAM type: NRG; PAM sequence: CAG
actgagtgtggaaatacact

SEQ ID NO: 104996 - DNA, 20 bp, Artificial Sequence
  Description of Artificial Sequence: Synthetic oligonucleotide
  Target: LAMA2; (-) strand; PAM type: NRG; PAM sequence: TGG
cagtttaaaaatactgagtg

SEQ ID NO: 104997 - DNA, 20 bp, Artificial Sequence
  Description of Artificial Sequence: Synthetic oligonucleotide
  Target: LAMA2; (-) strand; PAM type: NRG; PAM sequence: GAG
tcagtcagtttaaaaatact

SEQ ID NO: 104998 - DNA, 20 bp, Artificial Sequence
  Description of Artificial Sequence: Synthetic oligonucleotide
  Target: LAMA2; (-) strand; PAM type: NRG; PAM sequence: CAG
tcatagcagtggctatcagt

SEQ ID NO: 104999 - DNA, 20 bp, Artificial Sequence
  Description of Artificial Sequence: Synthetic oligonucleotide
  Target: LAMA2; (-) strand; PAM type: NRG; PAM sequence: CAG
atagtcatagcagtggctat

SEQ ID NO: 105000 - DNA, 20 bp, Artificial Sequence
  Description of Artificial Sequence: Synthetic oligonucleotide
  Target: LAMA2; (-) strand; PAM type: NRG; PAM sequence: TGG
tgataagatagtcatagcag

SEQ ID NO: 105001 - DNA, 20 bp, Artificial Sequence
  Description of Artificial Sequence: Synthetic oligonucleotide
  Target: LAMA2; (-) strand; PAM type: NRG; PAM sequence: CAG
tgctgataagatagtcatag

SEQ ID NO: 105002 - DNA, 20 bp, Artificial Sequence
  Description of Artificial Sequence: Synthetic oligonucleotide
  Target: LAMA2; (-) strand; PAM type: NRG; PAM sequence: TAG
cattgctgataagatagtca

SEQ ID NO: 105003 - DNA, 20 bp, Artificial Sequence
  Description of Artificial Sequence: Synthetic oligonucleotide
  Target: LAMA2; (-) strand; PAM type: NRG; PAM sequence: TAG
gctctgcattgctgataaga

SEQ ID NO: 105004 - DNA, 20 bp, Artificial Sequence
  Description of Artificial Sequence: Synthetic oligonucleotide
  Target: LAMA2; (-) strand; PAM type: NRG; PAM sequence: AAG
gcaagctctgcattgctgat

SEQ ID NO: 105005 - DNA, 20 bp, Artificial Sequence
  Description of Artificial Sequence: Synthetic oligonucleotide
  Target: LAMA2; (-) strand; PAM type: NRG; PAM sequence: AAG
cacttggaggctggaaacgc

SEQ ID NO: 105006 - DNA, 20 bp, Artificial Sequence
  Description of Artificial Sequence: Synthetic oligonucleotide
  Target: LAMA2; (-) strand; PAM type: NRG; PAM sequence: TGG
gtagcataacacttggaggc

SEQ ID NO: 105007 - DNA, 20 bp, Artificial Sequence
  Description of Artificial Sequence: Synthetic oligonucleotide
  Target: LAMA2; (-) strand; PAM type: NRG; PAM sequence: AGG
acctgtagcataacacttgg

SEQ ID NO: 105008 - DNA, 20 bp, Artificial Sequence
  Description of Artificial Sequence: Synthetic oligonucleotide
  Target: LAMA2; (-) strand; PAM type: NRG; PAM sequence: GAG
gacctgtagcataacacttg

SEQ ID NO: 105009 - DNA, 20 bp, Artificial Sequence
  Description of Artificial Sequence: Synthetic oligonucleotide
  Target: LAMA2; (-) strand; PAM type: NRG; PAM sequence: TGG
gtgacctgtagcataacact

SEQ ID NO: 105010 - DNA, 20 bp, Artificial Sequence
  Description of Artificial Sequence: Synthetic oligonucleotide
  Target: LAMA2; (-) strand; PAM type: NRG; PAM sequence: TAG
ttaaaaaaaacagtgacctg

SEQ ID NO: 105011 - DNA, 20 bp, Artificial Sequence
  Description of Artificial Sequence: Synthetic oligonucleotide
  Target: LAMA2; (-) strand; PAM type: NRG; PAM sequence: CAG
aggtaagagtttaaaaaaaa

SEQ ID NO: 105012 - DNA, 20 bp, Artificial Sequence
  Description of Artificial Sequence: Synthetic oligonucleotide
  Target: LAMA2; (-) strand; PAM type: NRG; PAM sequence: GAG
gtcgaagcatactcaggtaa

SEQ ID NO: 105013 - DNA, 20 bp, Artificial Sequence
  Description of Artificial Sequence: Synthetic oligonucleotide
  Target: LAMA2; (-) strand; PAM type: NRG; PAM sequence: AAG
aggtcgaagcatactcaggt

SEQ ID NO: 105014 - DNA, 20 bp, Artificial Sequence
  Description of Artificial Sequence: Synthetic oligonucleotide
  Target: LAMA2; (-) strand; PAM type: NRG; PAM sequence: AGG
aagtaggtcgaagcatactc

SEQ ID NO: 105015 - DNA, 20 bp, Artificial Sequence
  Description of Artificial Sequence: Synthetic oligonucleotide
  Target: LAMA2; (-) strand; PAM type: NRG; PAM sequence: CAG
gaagtaggtcgaagcatact

SEQ ID NO: 105016 - DNA, 20 bp, Artificial Sequence
  Description of Artificial Sequence: Synthetic oligonucleotide
  Target: LAMA2; (-) strand; PAM type: NRG; PAM sequence: AAG
taaaataaagaagtaggtcg

SEQ ID NO: 105017 - DNA, 20 bp, Artificial Sequence
  Description of Artificial Sequence: Synthetic oligonucleotide
  Target: LAMA2; (-) strand; PAM type: NRG; PAM sequence: AGG
aagaattaaaataaagaagt

SEQ ID NO: 105018 - DNA, 20 bp, Artificial Sequence
  Description of Artificial Sequence: Synthetic oligonucleotide
  Target: LAMA2; (-) strand; PAM type: NRG; PAM sequence: TAG
aaagaattaaaataaagaag

SEQ ID NO: 105019 - DNA, 20 bp, Artificial Sequence
  Description of Artificial Sequence: Synthetic oligonucleotide
  Target: LAMA2; (-) strand; PAM type: NRG; PAM sequence: AAG
aagaaagaattaaaataaag

SEQ ID NO: 105020 - DNA, 20 bp, Artificial Sequence
  Description of Artificial Sequence: Synthetic oligonucleotide
  Target: LAMA2; (-) strand; PAM type: NRG; PAM sequence: AAG
agaaagaaagaattaaaata

SEQ ID NO: 105021 - DNA, 20 bp, Artificial Sequence
  Description of Artificial Sequence: Synthetic oligonucleotide
  Target: LAMA2; (-) strand; PAM type: NRG; PAM sequence: AAG
ttctaacctcaaaagaaaga

SEQ ID NO: 105022 - DNA, 20 bp, Artificial Sequence
  Description of Artificial Sequence: Synthetic oligonucleotide
  Target: LAMA2; (-) strand; PAM type: NRG; PAM sequence: AAG
gtgtttctaacctcaaaaga

SEQ ID NO: 105023 - DNA, 20 bp, Artificial Sequence
  Description of Artificial Sequence: Synthetic oligonucleotide
  Target: LAMA2; (-) strand; PAM type: NRG; PAM sequence: AAG
catggtgtttctaacctcaa

SEQ ID NO: 105024 - DNA, 20 bp, Artificial Sequence
  Description of Artificial Sequence: Synthetic oligonucleotide
  Target: LAMA2; (-) strand; PAM type: NRG; PAM sequence: TGG
gggttacagcaattaaagca

SEQ ID NO: 105025 - DNA, 20 bp, Artificial Sequence
  Description of Artificial Sequence: Synthetic oligonucleotide
  Target: LAMA2; (-) strand; PAM type: NRG; PAM sequence: AAG
tttgggggttacagcaatta

SEQ ID NO: 105026 - DNA, 20 bp, Artificial Sequence
  Description of Artificial Sequence: Synthetic oligonucleotide
  Target: LAMA2; (-) strand; PAM type: NRG; PAM sequence: CAG
tatatttcttttgggggtta

SEQ ID NO: 105027 - DNA, 20 bp, Artificial Sequence
  Description of Artificial Sequence: Synthetic oligonucleotide
  Target: LAMA2; (-) strand; PAM type: NRG; PAM sequence: GGG
caatattatatttcttttgg

SEQ ID NO: 105028 - DNA, 20 bp, Artificial Sequence
  Description of Artificial Sequence: Synthetic oligonucleotide
  Target: LAMA2; (-) strand; PAM type: NRG; PAM sequence: GGG
tcaatattatatttcttttg

SEQ ID NO: 105029 - DNA, 20 bp, Artificial Sequence
  Description of Artificial Sequence: Synthetic oligonucleotide
  Target: LAMA2; (-) strand; PAM type: NRG; PAM sequence: GGG
ctcaatattatatttctttt

SEQ ID NO: 105030 - DNA, 20 bp, Artificial Sequence
  Description of Artificial Sequence: Synthetic oligonucleotide
  Target: LAMA2; (-) strand; PAM type: NRG; PAM sequence: TGG
tctcaatattatatttcttt

SEQ ID NO: 105031 - DNA, 20 bp, Artificial Sequence
  Description of Artificial Sequence: Synthetic oligonucleotide
  Target: LAMA2; (-) strand; PAM type: NRG; PAM sequence: GGG
acaacaatcagtaacaaaca

SEQ ID NO: 105032 - DNA, 20 bp, Artificial Sequence
  Description of Artificial Sequence: Synthetic oligonucleotide
  Target: LAMA2; (-) strand; PAM type: NRG; PAM sequence: AGG
gacaacaatcagtaacaaac

SEQ ID NO: 105033 - DNA, 20 bp, Artificial Sequence
  Description of Artificial Sequence: Synthetic oligonucleotide
  Target: LAMA2; (-) strand; PAM type: NRG; PAM sequence: CAG
agacaacaatcagtaacaaa

SEQ ID NO: 105034 - DNA, 20 bp, Artificial Sequence
  Description of Artificial Sequence: Synthetic oligonucleotide
  Target: LAMA2; (-) strand; PAM type: NRG; PAM sequence: CAG
gaggcagttaagacaacaat

SEQ ID NO: 105035 - DNA, 20 bp, Artificial Sequence
  Description of Artificial Sequence: Synthetic oligonucleotide
  Target: LAMA2; (-) strand; PAM type: NRG; PAM sequence: AAG
tgggaaccacagaggcagtt

SEQ ID NO: 105036 - DNA, 20 bp, Artificial Sequence
  Description of Artificial Sequence: Synthetic oligonucleotide
  Target: LAMA2; (-) strand; PAM type: NRG; PAM sequence: CAG
cctgctgggaaccacagagg

SEQ ID NO: 105037 - DNA, 20 bp, Artificial Sequence
  Description of Artificial Sequence: Synthetic oligonucleotide
  Target: LAMA2; (-) strand; PAM type: NRG; PAM sequence: AGG
gttcctgctgggaaccacag

SEQ ID NO: 105038 - DNA, 20 bp, Artificial Sequence
  Description of Artificial Sequence: Synthetic oligonucleotide
  Target: LAMA2; (-) strand; PAM type: NRG; PAM sequence: GAG
tgttcctgctgggaaccaca

SEQ ID NO: 105039 - DNA, 20 bp, Artificial Sequence
  Description of Artificial Sequence: Synthetic oligonucleotide
  Target: LAMA2; (-) strand; PAM type: NRG; PAM sequence: CAG
agtgttcctgctgggaacca

SEQ ID NO: 105040 - DNA, 20 bp, Artificial Sequence
  Description of Artificial Sequence: Synthetic oligonucleotide
  Target: LAMA2; (-) strand; PAM type: NRG; PAM sequence: GGG
ttgccgtgagtgttcctgct

SEQ ID NO: 105041 - DNA, 20 bp, Artificial Sequence
  Description of Artificial Sequence: Synthetic oligonucleotide
  Target: LAMA2; (-) strand; PAM type: NRG; PAM sequence: TGG
tttgccgtgagtgttcctgc

SEQ ID NO: 105042 - DNA, 20 bp, Artificial Sequence
  Description of Artificial Sequence: Synthetic oligonucleotide
  Target: LAMA2; (-) strand; PAM type: NRG; PAM sequence: GAG
aatgaagagtattttgccgt

SEQ ID NO: 105043 - DNA, 20 bp, Artificial Sequence
  Description of Artificial Sequence: Synthetic oligonucleotide
  Target: LAMA2; (-) strand; PAM type: NRG; PAM sequence: GAG
caccaccatctccaaatgaa

SEQ ID NO: 105044 - DNA, 20 bp, Artificial Sequence
  Description of Artificial Sequence: Synthetic oligonucleotide
  Target: LAMA2; (-) strand; PAM type: NRG; PAM sequence: AAG
ggcaccaccatctccaaatg

SEQ ID NO: 105045 - DNA, 20 bp, Artificial Sequence
  Description of Artificial Sequence: Synthetic oligonucleotide
  Target: LAMA2; (-) strand; PAM type: NRG; PAM sequence: GGG
catggtattcagcatctgct

SEQ ID NO: 105046 - DNA, 20 bp, Artificial Sequence
  Description of Artificial Sequence: Synthetic oligonucleotide
  Target: LAMA2; (-) strand; PAM type: NRG; PAM sequence: TGG
acatggtattcagcatctgc

SEQ ID NO: 105047 - DNA, 20 bp, Artificial Sequence
  Description of Artificial Sequence: Synthetic oligonucleotide
  Target: LAMA2; (-) strand; PAM type: NRG; PAM sequence: CAG
ccacatgaaaacatggtatt

SEQ ID NO: 105048 - DNA, 20 bp, Artificial Sequence
  Description of Artificial Sequence: Synthetic oligonucleotide
  Target: LAMA2; (-) strand; PAM type: NRG; PAM sequence: TGG
aaacatgccacatgaaaaca

SEQ ID NO: 105049 - DNA, 20 bp, Artificial Sequence
  Description of Artificial Sequence: Synthetic oligonucleotide
  Target: LAMA2; (-) strand; PAM type: NRG; PAM sequence: TAG
gtaaaacaaattttgtaaat

SEQ ID NO: 105050 - DNA, 20 bp, Artificial Sequence
  Description of Artificial Sequence: Synthetic oligonucleotide
  Target: LAMA2; (-) strand; PAM type: NRG; PAM sequence: GGG
ttttcatttacagctgcagg

SEQ ID NO: 105051 - DNA, 20 bp, Artificial Sequence
  Description of Artificial Sequence: Synthetic oligonucleotide
  Target: LAMA2; (-) strand; PAM type: NRG; PAM sequence: GGG
tttttcatttacagctgcag

SEQ ID NO: 105052 - DNA, 20 bp, Artificial Sequence
  Description of Artificial Sequence: Synthetic oligonucleotide
  Target: LAMA2; (-) strand; PAM type: NRG; PAM sequence: GGG
ctttttcatttacagctgca

SEQ ID NO: 105053 - DNA, 20 bp, Artificial Sequence
  Description of Artificial Sequence: Synthetic oligonucleotide
  Target: LAMA2; (-) strand; PAM type: NRG; PAM sequence: AGG
gctttttcatttacagctgc

SEQ ID NO: 105054 - DNA, 20 bp, Artificial Sequence
  Description of Artificial Sequence: Synthetic oligonucleotide
  Target: LAMA2; (-) strand; PAM type: NRG; PAM sequence: CAG
agctttttcatttacagctg

SEQ ID NO: 105055 - DNA, 20 bp, Artificial Sequence
  Description of Artificial Sequence: Synthetic oligonucleotide
  Target: LAMA2; (-) strand; PAM type: NRG; PAM sequence: CAG
ttttatagctttttcattta

SEQ ID NO: 105056 - DNA, 20 bp, Artificial Sequence
  Description of Artificial Sequence: Synthetic oligonucleotide
  Target: LAMA2; (-) strand; PAM type: NRG; PAM sequence: TAG
tagagtttcatttagtttta

SEQ ID NO: 105057 - DNA, 20 bp, Artificial Sequence
  Description of Artificial Sequence: Synthetic oligonucleotide
  Target: LAMA2; (-) strand; PAM type: NRG; PAM sequence: TAG
cgagttcctagagtttcatt

SEQ ID NO: 105058 - DNA, 20 bp, Artificial Sequence
  Description of Artificial Sequence: Synthetic oligonucleotide
  Target: LAMA2; (-) strand; PAM type: NRG; PAM sequence: GAG
ggcctcgtctcgagttccta

SEQ ID NO: 105059 - DNA, 20 bp, Artificial Sequence
  Description of Artificial Sequence: Synthetic oligonucleotide
  Target: LAMA2; (-) strand; PAM type: NRG; PAM sequence: TAG
aaggcctcgtctcgagttcc

SEQ ID NO: 105060 - DNA, 20 bp, Artificial Sequence
  Description of Artificial Sequence: Synthetic oligonucleotide
  Target: LAMA2; (-) strand; PAM type: NRG; PAM sequence: GAG
tctctcaaaggcctcgtctc

SEQ ID NO: 105061 - DNA, 20 bp, Artificial Sequence
  Description of Artificial Sequence: Synthetic oligonucleotide
  Target: LAMA2; (-) strand; PAM type: NRG; PAM sequence: AGG
cccttccaaatttctctcaa

SEQ ID NO: 105062 - DNA, 20 bp, Artificial Sequence
  Description of Artificial Sequence: Synthetic oligonucleotide
  Target: LAMA2; (-) strand; PAM type: NRG; PAM sequence: AAG
gcccttccaaatttctctca

SEQ ID NO: 105063 - DNA, 20 bp, Artificial Sequence
  Description of Artificial Sequence: Synthetic oligonucleotide
  Target: LAMA2; (-) strand; PAM type: NRG; PAM sequence: AAG
atctggtcaatctctttctg

SEQ ID NO: 105064 - DNA, 20 bp, Artificial Sequence
  Description of Artificial Sequence: Synthetic oligonucleotide
  Target: LAMA2; (-) strand; PAM type: NRG; PAM sequence: TGG
tcctcagttctttaatcatc

SEQ ID NO: 105065 - DNA, 20 bp, Artificial Sequence
  Description of Artificial Sequence: Synthetic oligonucleotide
  Target: LAMA2; (-) strand; PAM type: NRG; PAM sequence: CAG
gtctctagatttttcctcct

SEQ ID NO: 105066 - DNA, 20 bp, Artificial Sequence
  Description of Artificial Sequence: Synthetic oligonucleotide
  Target: LAMA2; (-) strand; PAM type: NRG; PAM sequence: TAG
gcaatttccttttgtgtctc

SEQ ID NO: 105067 - DNA, 20 bp, Artificial Sequence
  Description of Artificial Sequence: Synthetic oligonucleotide
  Target: LAMA2; (-) strand; PAM type: NRG; PAM sequence: CAG
tactcacaccaactcatctt

SEQ ID NO: 105068 - DNA, 20 bp, Artificial Sequence
  Description of Artificial Sequence: Synthetic oligonucleotide
  Target: LAMA2; (-) strand; PAM type: NRG; PAM sequence: AAG
tggaaatctcagtttgtcaa

SEQ ID NO: 105069 - DNA, 20 bp, Artificial Sequence
  Description of Artificial Sequence: Synthetic oligonucleotide
  Target: LAMA2; (-) strand; PAM type: NRG; PAM sequence: CAG
tgtaaattatctggaaatct

SEQ ID NO: 105070 - DNA, 20 bp, Artificial Sequence
  Description of Artificial Sequence: Synthetic oligonucleotide
  Target: LAMA2; (-) strand; PAM type: NRG; PAM sequence: TGG
ttagaaaactgtaaattatc

SEQ ID NO: 105071 - DNA, 20 bp, Artificial Sequence
  Description of Artificial Sequence: Synthetic oligonucleotide
  Target: LAMA2; (-) strand; PAM type: NRG; PAM sequence: TAG
ttatacgtgtgataaaaatt

SEQ ID NO: 105072 - DNA, 20 bp, Artificial Sequence
  Description of Artificial Sequence: Synthetic oligonucleotide
  Target: LAMA2; (-) strand; PAM type: NRG; PAM sequence: AAG
atctccaggttggaaaaaca

SEQ ID NO: 105073 - DNA, 20 bp, Artificial Sequence
  Description of Artificial Sequence: Synthetic oligonucleotide
  Target: LAMA2; (-) strand; PAM type: NRG; PAM sequence: TGG
catagcaaatatctccaggt

SEQ ID NO: 105074 - DNA, 20 bp, Artificial Sequence
  Description of Artificial Sequence: Synthetic oligonucleotide
  Target: LAMA2; (-) strand; PAM type: NRG; PAM sequence: AGG
ataacatagcaaatatctcc

SEQ ID NO: 105075 - DNA, 20 bp, Artificial Sequence
  Description of Artificial Sequence: Synthetic oligonucleotide
  Target: LAMA2; (-) strand; PAM type: NRG; PAM sequence: CAG
gataacatagcaaatatctc

SEQ ID NO: 105076 - DNA, 20 bp, Artificial Sequence
  Description of Artificial Sequence: Synthetic oligonucleotide
  Target: LAMA2; (-) strand; PAM type: NRG; PAM sequence: TAG
tagatagatgatagataaca

SEQ ID NO: 105077 - DNA, 20 bp, Artificial Sequence
  Description of Artificial Sequence: Synthetic oligonucleotide
  Target: LAMA2; (-) strand; PAM type: NRG; PAM sequence: TAG
atagatagatagatagatga

SEQ ID NO: 105078 - DNA, 20 bp, Artificial Sequence
  Description of Artificial Sequence: Synthetic oligonucleotide
  Target: LAMA2; (-) strand; PAM type: NRG; PAM sequence: TAG
tagatagatagatagataga

SEQ ID NO: 105079 - DNA, 20 bp, Artificial Sequence
  Description of Artificial Sequence: Synthetic oligonucleotide
  Target: LAMA2; (-) strand; PAM type: NRG; PAM sequence: TAG
taaatagatagatagataga

SEQ ID NO: 105080 - DNA, 20 bp, Artificial Sequence
  Description of Artificial Sequence: Synthetic oligonucleotide
  Target: LAMA2; (-) strand; PAM type: NRG; PAM sequence: TAG
tagataaatagatagataga

SEQ ID NO: 105081 - DNA, 20 bp, Artificial Sequence
  Description of Artificial Sequence: Synthetic oligonucleotide
  Target: LAMA2; (-) strand; PAM type: NRG; PAM sequence: TAG
tagatagataaatagataga

SEQ ID NO: 105082 - DNA, 20 bp, Artificial Sequence
  Description of Artificial Sequence: Synthetic oligonucleotide
  Target: LAMA2; (-) strand; PAM type: NRG; PAM sequence: TAG
atggtagatagataaataga

SEQ ID NO: 105083 - DNA, 20 bp, Artificial Sequence
  Description of Artificial Sequence: Synthetic oligonucleotide
  Target: LAMA2; (-) strand; PAM type: NRG; PAM sequence: TAG
atagatggtagatagataaa

SEQ ID NO: 105084 - DNA, 20 bp, Artificial Sequence
  Description of Artificial Sequence: Synthetic oligonucleotide
  Target: LAMA2; (-) strand; PAM type: NRG; PAM sequence: TAG
aataaataatagatggtaga

SEQ ID NO: 105085 - DNA, 20 bp, Artificial Sequence
  Description of Artificial Sequence: Synthetic oligonucleotide
  Target: LAMA2; (-) strand; PAM type: NRG; PAM sequence: TAG
aatgaataaataatagatgg

SEQ ID NO: 105086 - DNA, 20 bp, Artificial Sequence
  Description of Artificial Sequence: Synthetic oligonucleotide
  Target: LAMA2; (-) strand; PAM type: NRG; PAM sequence: TGG
gtaaatgaataaataataga

SEQ ID NO: 105087 - DNA, 20 bp, Artificial Sequence
  Description of Artificial Sequence: Synthetic oligonucleotide
  Target: LAMA2; (-) strand; PAM type: NRG; PAM sequence: TAG
ataagtaaatgaataaataa

SEQ ID NO: 105088 - DNA, 20 bp, Artificial Sequence
  Description of Artificial Sequence: Synthetic oligonucleotide
  Target: LAMA2; (-) strand; PAM type: NRG; PAM sequence: AAG
atggtaaagtacaattaaat

SEQ ID NO: 105089 - DNA, 20 bp, Artificial Sequence
  Description of Artificial Sequence: Synthetic oligonucleotide
  Target: LAMA2; (-) strand; PAM type: NRG; PAM sequence: AAG
ttcattttggaacaatggta

SEQ ID NO: 105090 - DNA, 20 bp, Artificial Sequence
  Description of Artificial Sequence: Synthetic oligonucleotide
  Target: LAMA2; (-) strand; PAM type: NRG; PAM sequence: TGG
tttgattcattttggaacaa

SEQ ID NO: 105091 - DNA, 20 bp, Artificial Sequence
  Description of Artificial Sequence: Synthetic oligonucleotide
  Target: LAMA2; (-) strand; PAM type: NRG; PAM sequence: TGG
aacatgcttttgattcattt

SEQ ID NO: 105092 - DNA, 20 bp, Artificial Sequence
  Description of Artificial Sequence: Synthetic oligonucleotide
  Target: LAMA2; (-) strand; PAM type: NRG; PAM sequence: AAG
ttacttgattatatgtaggc

SEQ ID NO: 105093 - DNA, 20 bp, Artificial Sequence
  Description of Artificial Sequence: Synthetic oligonucleotide
  Target: LAMA2; (-) strand; PAM type: NRG; PAM sequence: AGG
tcatttacttgattatatgt

SEQ ID NO: 105094 - DNA, 20 bp, Artificial Sequence
  Description of Artificial Sequence: Synthetic oligonucleotide
  Target: LAMA2; (-) strand; PAM type: NRG; PAM sequence: TAG
atcatttacttgattatatg

SEQ ID NO: 105095 - DNA, 20 bp, Artificial Sequence
  Description of Artificial Sequence: Synthetic oligonucleotide
  Target: LAMA2; (-) strand; PAM type: NRG; PAM sequence: AAG
cagaaggagcagcaccagaa

SEQ ID NO: 105096 - DNA, 20 bp, Artificial Sequence
  Description of Artificial Sequence: Synthetic oligonucleotide
  Target: LAMA2; (-) strand; PAM type: NRG; PAM sequence: CAG
aattacagaaggagcagcac

SEQ ID NO: 105097 - DNA, 20 bp, Artificial Sequence
  Description of Artificial Sequence: Synthetic oligonucleotide
  Target: LAMA2; (-) strand; PAM type: NRG; PAM sequence: CAG
tagcctaattacagaaggag

SEQ ID NO: 105098 - DNA, 20 bp, Artificial Sequence
  Description of Artificial Sequence: Synthetic oligonucleotide
  Target: LAMA2; (-) strand; PAM type: NRG; PAM sequence: GAG
cattagcctaattacagaag

SEQ ID NO: 105099 - DNA, 20 bp, Artificial Sequence
  Description of Artificial Sequence: Synthetic oligonucleotide
  Target: LAMA2; (-) strand; PAM type: NRG; PAM sequence: AGG
ctcattagcctaattacaga

SEQ ID NO: 105100 - DNA, 20 bp, Artificial Sequence
  Description of Artificial Sequence: Synthetic oligonucleotide
  Target: LAMA2; (-) strand; PAM type: NRG; PAM sequence: AAG
actcattagcctaattacag

SEQ ID NO: 105101 - DNA, 20 bp, Artificial Sequence
  Description of Artificial Sequence: Synthetic oligonucleotide
  Target: LAMA2; (-) strand; PAM type: NRG; PAM sequence: CAG
caaactcattagcctaatta

SEQ ID NO: 105102 - DNA, 20 bp, Artificial Sequence
  Description of Artificial Sequence: Synthetic oligonucleotide
  Target: LAMA2; (-) strand; PAM type: NRG; PAM sequence: TAG
gattaacaaaacaaactcat

SEQ ID NO: 105103 - DNA, 20 bp, Artificial Sequence
  Description of Artificial Sequence: Synthetic oligonucleotide
  Target: LAMA2; (-) strand; PAM type: NRG; PAM sequence: CAG
tagtccaaaagtccctaatg

SEQ ID NO: 105104 - DNA, 20 bp, Artificial Sequence
  Description of Artificial Sequence: Synthetic oligonucleotide
  Target: LAMA2; (-) strand; PAM type: NRG; PAM sequence: AAG
aaaatcaactgatagtccaa

SEQ ID NO: 105105 - DNA, 20 bp, Artificial Sequence
  Description of Artificial Sequence: Synthetic oligonucleotide
  Target: LAMA2; (-) strand; PAM type: NRG; PAM sequence: TAG
ttaaaacaaaaatcaactga

SEQ ID NO: 105106 - DNA, 20 bp, Artificial Sequence
  Description of Artificial Sequence: Synthetic oligonucleotide
  Target: LAMA2; (-) strand; PAM type: NRG; PAM sequence: AGG
tcataactttgtttatccaa

SEQ ID NO: 105107 - DNA, 20 bp, Artificial Sequence
  Description of Artificial Sequence: Synthetic oligonucleotide
  Target: LAMA2; (-) strand; PAM type: NRG; PAM sequence: AAG
gtcataactttgtttatcca

SEQ ID NO: 105108 - DNA, 20 bp, Artificial Sequence
  Description of Artificial Sequence: Synthetic oligonucleotide
  Target: LAMA2; (-) strand; PAM type: NRG; PAM sequence: AAG
tggccaatatatgaatggta

SEQ ID NO: 105109 - DNA, 20 bp, Artificial Sequence
  Description of Artificial Sequence: Synthetic oligonucleotide
  Target: LAMA2; (-) strand; PAM type: NRG; PAM sequence: TGG
taggttggccaatatatgaa

SEQ ID NO: 105110 - DNA, 20 bp, Artificial Sequence
  Description of Artificial Sequence: Synthetic oligonucleotide
  Target: LAMA2; (-) strand; PAM type: NRG; PAM sequence: TGG
agatgataaaatgtataggt

SEQ ID NO: 105111 - DNA, 20 bp, Artificial Sequence
  Description of Artificial Sequence: Synthetic oligonucleotide
  Target: LAMA2; (-) strand; PAM type: NRG; PAM sequence: AGG
cttaagatgataaaatgtat

SEQ ID NO: 105112 - DNA, 20 bp, Artificial Sequence
  Description of Artificial Sequence: Synthetic oligonucleotide
  Target: LAMA2; (-) strand; PAM type: NRG; PAM sequence: TAG
tcttaagatgataaaatgta

SEQ ID NO: 105113 - DNA, 20 bp, Artificial Sequence
  Description of Artificial Sequence: Synthetic oligonucleotide
  Target: LAMA2; (-) strand; PAM type: NRG; PAM sequence: AAG
ttttcttttcagcatttctt

SEQ ID NO: 105114 - DNA, 20 bp, Artificial Sequence
  Description of Artificial Sequence: Synthetic oligonucleotide
  Target: LAMA2; (-) strand; PAM type: NRG; PAM sequence: CAG
tatttgatgacttttctttt

SEQ ID NO: 105115 - DNA, 20 bp, Artificial Sequence
  Description of Artificial Sequence: Synthetic oligonucleotide
  Target: LAMA2; (-) strand; PAM type: NRG; PAM sequence: AGG
aactcttatttgaaagtatt

SEQ ID NO: 105116 - DNA, 20 bp, Artificial Sequence
  Description of Artificial Sequence: Synthetic oligonucleotide
  Target: LAMA2; (-) strand; PAM type: NRG; PAM sequence: TAG
caactcttatttgaaagtat

SEQ ID NO: 105117 - DNA, 20 bp, Artificial Sequence
  Description of Artificial Sequence: Synthetic oligonucleotide
  Target: LAMA2; (-) strand; PAM type: NRG; PAM sequence: AAG
tattcgcaactcttatttga

SEQ ID NO: 105118 - DNA, 20 bp, Artificial Sequence
  Description of Artificial Sequence: Synthetic oligonucleotide
  Target: LAMA2; (-) strand; PAM type: NRG; PAM sequence: GGG
tcataaaagttctttagcat

SEQ ID NO: 105119 - DNA, 20 bp, Artificial Sequence
  Description of Artificial Sequence: Synthetic oligonucleotide
  Target: LAMA2; (-) strand; PAM type: NRG; PAM sequence: TGG
atcataaaagttctttagca

SEQ ID NO: 105120 - DNA, 20 bp, Artificial Sequence
  Description of Artificial Sequence: Synthetic oligonucleotide
  Target: LAMA2; (-) strand; PAM type: NRG; PAM sequence: TAG
gcgttatcataaaagttctt

SEQ ID NO: 105121 - DNA, 20 bp, Artificial Sequence
  Description of Artificial Sequence: Synthetic oligonucleotide
  Target: LAMA2; (-) strand; PAM type: NRG; PAM sequence: AAG
tattgagtgcgttatcataa

SEQ ID NO: 105122 - DNA, 20 bp, Artificial Sequence
  Description of Artificial Sequence: Synthetic oligonucleotide
  Target: LAMA2; (-) strand; PAM type: NRG; PAM sequence: GAG
agagatgtatctattttatt

SEQ ID NO: 105123 - DNA, 20 bp, Artificial Sequence
  Description of Artificial Sequence: Synthetic oligonucleotide
  Target: LAMA2; (-) strand; PAM type: NRG; PAM sequence: GAG
gttagctgactatgaatgta

SEQ ID NO: 105124 - DNA, 20 bp, Artificial Sequence
  Description of Artificial Sequence: Synthetic oligonucleotide
  Target: LAMA2; (-) strand; PAM type: NRG; PAM sequence: TAG
aagttagctgactatgaatg

SEQ ID NO: 105125 - DNA, 20 bp, Artificial Sequence
  Description of Artificial Sequence: Synthetic oligonucleotide
  Target: LAMA2; (-) strand; PAM type: NRG; PAM sequence: TAG
taatactaccactttgaagt

SEQ ID NO: 105126 - DNA, 20 bp, Artificial Sequence
  Description of Artificial Sequence: Synthetic oligonucleotide
  Target: LAMA2; (-) strand; PAM type: NRG; PAM sequence: AAG
ttagtaatactaccactttg

SEQ ID NO: 105127 - DNA, 20 bp, Artificial Sequence
  Description of Artificial Sequence: Synthetic oligonucleotide
  Target: LAMA2; (-) strand; PAM type: NRG; PAM sequence: TAG
agtataaattatttaagtat

SEQ ID NO: 105128 - DNA, 20 bp, Artificial Sequence
  Description of Artificial Sequence: Synthetic oligonucleotide
  Target: LAMA2; (-) strand; PAM type: NRG; PAM sequence: AAG
tggtttagtataaattattt

SEQ ID NO: 105129 - DNA, 20 bp, Artificial Sequence
  Description of Artificial Sequence: Synthetic oligonucleotide
  Target: LAMA2; (-) strand; PAM type: NRG; PAM sequence: TAG
gtgtgctgatattgctggtt

SEQ ID NO: 105130 - DNA, 20 bp, Artificial Sequence
  Description of Artificial Sequence: Synthetic oligonucleotide
  Target: LAMA2; (-) strand; PAM type: NRG; PAM sequence: TGG
ctctggtgtgctgatattgc

SEQ ID NO: 105131 - DNA, 20 bp, Artificial Sequence
  Description of Artificial Sequence: Synthetic oligonucleotide
  Target: LAMA2; (-) strand; PAM type: NRG; PAM sequence: TGG
tgtatttttaacaagttctc

SEQ ID NO: 105132 - DNA, 20 bp, Artificial Sequence
  Description of Artificial Sequence: Synthetic oligonucleotide
  Target: LAMA2; (-) strand; PAM type: NRG; PAM sequence: AAG
tgacaatctgtatttttaac

SEQ ID NO: 105133 - DNA, 20 bp, Artificial Sequence
  Description of Artificial Sequence: Synthetic oligonucleotide
  Target: LAMA2; (-) strand; PAM type: NRG; PAM sequence: GGG
gattcaggaggtctgggagg

SEQ ID NO: 105134 - DNA, 20 bp, Artificial Sequence
  Description of Artificial Sequence: Synthetic oligonucleotide
  Target: LAMA2; (-) strand; PAM type: NRG; PAM sequence: GGG
tgattcaggaggtctgggag

SEQ ID NO: 105135 - DNA, 20 bp, Artificial Sequence
  Description of Artificial Sequence: Synthetic oligonucleotide
  Target: LAMA2; (-) strand; PAM type: NRG; PAM sequence: GGG
ctgattcaggaggtctggga

SEQ ID NO: 105136 - DNA, 20 bp, Artificial Sequence
  Description of Artificial Sequence: Synthetic oligonucleotide
  Target: LAMA2; (-) strand; PAM type: NRG; PAM sequence: AGG
tctgattcaggaggtctggg

SEQ ID NO: 105137 - DNA, 20 bp, Artificial Sequence
  Description of Artificial Sequence: Synthetic oligonucleotide
  Target: LAMA2; (-) strand; PAM type: NRG; PAM sequence: GAG
ttctgattcaggaggtctgg

SEQ ID NO: 105138 - DNA, 20 bp, Artificial Sequence
  Description of Artificial Sequence: Synthetic oligonucleotide
  Target: LAMA2; (-) strand; PAM type: NRG; PAM sequence: GGG
gtttctgattcaggaggtct

SEQ ID NO: 105139 - DNA, 20 bp, Artificial Sequence
  Description of Artificial Sequence: Synthetic oligonucleotide
  Target: LAMA2; (-) strand; PAM type: NRG; PAM sequence: TGG
agtttctgattcaggaggtc

SEQ ID NO: 105140 - DNA, 20 bp, Artificial Sequence
  Description of Artificial Sequence: Synthetic oligonucleotide
  Target: LAMA2; (-) strand; PAM type: NRG; PAM sequence: AGG
cccaaagtttctgattcagg

SEQ ID NO: 105141 - DNA, 20 bp, Artificial Sequence
  Description of Artificial Sequence: Synthetic oligonucleotide
  Target: LAMA2; (-) strand; PAM type: NRG; PAM sequence: GAG
ccccaaagtttctgattcag

SEQ ID NO: 105142 - DNA, 20 bp, Artificial Sequence
  Description of Artificial Sequence: Synthetic oligonucleotide
  Target: LAMA2; (-) strand; PAM type: NRG; PAM sequence: AGG
atccccaaagtttctgattc

SEQ ID NO: 105143 - DNA, 20 bp, Artificial Sequence
  Description of Artificial Sequence: Synthetic oligonucleotide
  Target: LAMA2; (-) strand; PAM type: NRG; PAM sequence: CAG
catccccaaagtttctgatt

SEQ ID NO: 105144 - DNA, 20 bp, Artificial Sequence
  Description of Artificial Sequence: Synthetic oligonucleotide
  Target: LAMA2; (-) strand; PAM type: NRG; PAM sequence: AAG
tttgctgggtcccatcccca

SEQ ID NO: 105145 - DNA, 20 bp, Artificial Sequence
  Description of Artificial Sequence: Synthetic oligonucleotide
  Target: LAMA2; (-) strand; PAM type: NRG; PAM sequence: GGG
ttgttaatacatggtttgct

SEQ ID NO: 105146 - DNA, 20 bp, Artificial Sequence
  Description of Artificial Sequence: Synthetic oligonucleotide
  Target: LAMA2; (-) strand; PAM type: NRG; PAM sequence: TGG
cttgttaatacatggtttgc

SEQ ID NO: 105147 - DNA, 20 bp, Artificial Sequence
  Description of Artificial Sequence: Synthetic oligonucleotide
  Target: LAMA2; (-) strand; PAM type: NRG; PAM sequence: TGG
ctgaagggcttgttaataca

SEQ ID NO: 105148 - DNA, 20 bp, Artificial Sequence
  Description of Artificial Sequence: Synthetic oligonucleotide
  Target: LAMA2; (-) strand; PAM type: NRG; PAM sequence: GGG
atgcctcataatcccctgaa

SEQ ID NO: 105149 - DNA, 20 bp, Artificial Sequence
  Description of Artificial Sequence: Synthetic oligonucleotide
  Target: LAMA2; (-) strand; PAM type: NRG; PAM sequence: AGG
catgcctcataatcccctga

SEQ ID NO: 105150 - DNA, 20 bp, Artificial Sequence
  Description of Artificial Sequence: Synthetic oligonucleotide
  Target: LAMA2; (-) strand; PAM type: NRG; PAM sequence: AAG
acatgcctcataatcccctg

SEQ ID NO: 105151 - DNA, 20 bp, Artificial Sequence
  Description of Artificial Sequence: Synthetic oligonucleotide
  Target: LAMA2; (-) strand; PAM type: NRG; PAM sequence: CAG
aactctaaatacttgaaaga

SEQ ID NO: 105152 - DNA, 20 bp, Artificial Sequence
  Description of Artificial Sequence: Synthetic oligonucleotide
  Target: LAMA2; (-) strand; PAM type: NRG; PAM sequence: AAG
aagaaactctaaatacttga

SEQ ID NO: 105153 - DNA, 20 bp, Artificial Sequence
  Description of Artificial Sequence: Synthetic oligonucleotide
  Target: LAMA2; (-) strand; PAM type: NRG; PAM sequence: AAG
gtgataattttcgagtcatt

SEQ ID NO: 105154 - DNA, 20 bp, Artificial Sequence
  Description of Artificial Sequence: Synthetic oligonucleotide
  Target: LAMA2; (-) strand; PAM type: NRG; PAM sequence: GAG
tttctaaagtgataattttc

SEQ ID NO: 105155 - DNA, 20 bp, Artificial Sequence
  Description of Artificial Sequence: Synthetic oligonucleotide
  Target: LAMA2; (-) strand; PAM type: NRG; PAM sequence: AAG
taacttacctagtttttcta

SEQ ID NO: 105156 - DNA, 20 bp, Artificial Sequence
  Description of Artificial Sequence: Synthetic oligonucleotide
  Target: LAMA2; (-) strand; PAM type: NRG; PAM sequence: TAG
gtttttggatttaacttacc

SEQ ID NO: 105157 - DNA, 20 bp, Artificial Sequence
  Description of Artificial Sequence: Synthetic oligonucleotide
  Target: LAMA2; (-) strand; PAM type: NRG; PAM sequence: TGG
ctgattgatctggaagtttt

SEQ ID NO: 105158 - DNA, 20 bp, Artificial Sequence
  Description of Artificial Sequence: Synthetic oligonucleotide
  Target: LAMA2; (-) strand; PAM type: NRG; PAM sequence: AAG
cttccaactgattgatctgg

SEQ ID NO: 105159 - DNA, 20 bp, Artificial Sequence
  Description of Artificial Sequence: Synthetic oligonucleotide
  Target: LAMA2; (-) strand; PAM type: NRG; PAM sequence: TGG
tttcttccaactgattgatc

SEQ ID NO: 105160 - DNA, 20 bp, Artificial Sequence
  Description of Artificial Sequence: Synthetic oligonucleotide
  Target: LAMA2; (-) strand; PAM type: NRG; PAM sequence: TAG
tcattgtcatgctagtagac

SEQ ID NO: 105161 - DNA, 20 bp, Artificial Sequence
  Description of Artificial Sequence: Synthetic oligonucleotide
  Target: LAMA2; (-) strand; PAM type: NRG; PAM sequence: TAG
ctaggtcattgtcatgctag

SEQ ID NO: 105162 - DNA, 20 bp, Artificial Sequence
  Description of Artificial Sequence: Synthetic oligonucleotide
  Target: LAMA2; (-) strand; PAM type: NRG; PAM sequence: TAG
attctaggtcattgtcatgc

SEQ ID NO: 105163 - DNA, 20 bp, Artificial Sequence
  Description of Artificial Sequence: Synthetic oligonucleotide
  Target: LAMA2; (-) strand; PAM type: NRG; PAM sequence: AGG
gaaactgtgaacagaattct

SEQ ID NO: 105164 - DNA, 20 bp, Artificial Sequence
  Description of Artificial Sequence: Synthetic oligonucleotide
  Target: LAMA2; (-) strand; PAM type: NRG; PAM sequence: TAG
agaaactgtgaacagaattc

SEQ ID NO: 105165 - DNA, 20 bp, Artificial Sequence
  Description of Artificial Sequence: Synthetic oligonucleotide
  Target: LAMA2; (-) strand; PAM type: NRG; PAM sequence: CAG
gtttgctcagaaactgtgaa

SEQ ID NO: 105166 - DNA, 20 bp, Artificial Sequence
  Description of Artificial Sequence: Synthetic oligonucleotide
  Target: LAMA2; (-) strand; PAM type: NRG; PAM sequence: CAG
tgaatattgttatgtttgct

SEQ ID NO: 105167 - DNA, 20 bp, Artificial Sequence
  Description of Artificial Sequence: Synthetic oligonucleotide
  Target: LAMA2; (-) strand; PAM type: NRG; PAM sequence: GAG
tccacttgtttcattgtact

SEQ ID NO: 105168 - DNA, 20 bp, Artificial Sequence
  Description of Artificial Sequence: Synthetic oligonucleotide
  Target: LAMA2; (-) strand; PAM type: NRG; PAM sequence: AAG
tgattgatgaaatgagtttt

SEQ ID NO: 105169 - DNA, 20 bp, Artificial Sequence
  Description of Artificial Sequence: Synthetic oligonucleotide
  Target: LAMA2; (-) strand; PAM type: NRG; PAM sequence: GAG
aggaatctgattgatgaaat

SEQ ID NO: 105170 - DNA, 20 bp, Artificial Sequence
  Description of Artificial Sequence: Synthetic oligonucleotide
  Target: LAMA2; (-) strand; PAM type: NRG; PAM sequence: AGG
attttgaatcatgtcattct

SEQ ID NO: 105171 - DNA, 20 bp, Artificial Sequence
  Description of Artificial Sequence: Synthetic oligonucleotide
  Target: LAMA2; (-) strand; PAM type: NRG; PAM sequence: TAG
cattttgaatcatgtcattc

SEQ ID NO: 105172 - DNA, 20 bp, Artificial Sequence
  Description of Artificial Sequence: Synthetic oligonucleotide
  Target: LAMA2; (-) strand; PAM type: NRG; PAM sequence: AAG
aagaaaccttttaaatttgt

SEQ ID NO: 105173 - DNA, 20 bp, Artificial Sequence
  Description of Artificial Sequence: Synthetic oligonucleotide
  Target: LAMA2; (-) strand; PAM type: NRG; PAM sequence: AAG
taaaagcgaaacagattttt

SEQ ID NO: 105174 - DNA, 20 bp, Artificial Sequence
  Description of Artificial Sequence: Synthetic oligonucleotide
  Target: LAMA2; (-) strand; PAM type: NRG; PAM sequence: CAG
taattaaaataaaagcgaaa

SEQ ID NO: 105175 - DNA, 20 bp, Artificial Sequence
  Description of Artificial Sequence: Synthetic oligonucleotide
  Target: LAMA2; (-) strand; PAM type: NRG; PAM sequence: AAG
tttataattaattaaaataa

SEQ ID NO: 105176 - DNA, 20 bp, Artificial Sequence
  Description of Artificial Sequence: Synthetic oligonucleotide
  Target: LAMA2; (-) strand; PAM type: NRG; PAM sequence: GAG
caagttgaaaactggtacct

SEQ ID NO: 105177 - DNA, 20 bp, Artificial Sequence
  Description of Artificial Sequence: Synthetic oligonucleotide
  Target: LAMA2; (-) strand; PAM type: NRG; PAM sequence: TGG
tgctaaatcaagttgaaaac

SEQ ID NO: 105178 - DNA, 20 bp, Artificial Sequence
  Description of Artificial Sequence: Synthetic oligonucleotide
  Target: LAMA2; (-) strand; PAM type: NRG; PAM sequence: AAG
gattcactgtgtgctaaatc

SEQ ID NO: 105179 - DNA, 20 bp, Artificial Sequence
  Description of Artificial Sequence: Synthetic oligonucleotide
  Target: LAMA2; (-) strand; PAM type: NRG; PAM sequence: TAG
aaataagaaaacatgtaaaa

SEQ ID NO: 105180 - DNA, 20 bp, Artificial Sequence
  Description of Artificial Sequence: Synthetic oligonucleotide
  Target: LAMA2; (-) strand; PAM type: NRG; PAM sequence: AAG
catgaaaagaatgagaaaat

SEQ ID NO: 105181 - DNA, 20 bp, Artificial Sequence
  Description of Artificial Sequence: Synthetic oligonucleotide
  Target: LAMA2; (-) strand; PAM type: NRG; PAM sequence: GAG
gatgctaacatgaaaagaat

SEQ ID NO: 105182 - DNA, 20 bp, Artificial Sequence
  Description of Artificial Sequence: Synthetic oligonucleotide
  Target: LAMA2; (-) strand; PAM type: NRG; PAM sequence: AAG
caaagagatgctaacatgaa

SEQ ID NO: 105183 - DNA, 20 bp, Artificial Sequence
  Description of Artificial Sequence: Synthetic oligonucleotide
  Target: LAMA2; (-) strand; PAM type: NRG; PAM sequence: GAG
gtattaaaccatgttacaaa

SEQ ID NO: 105184 - DNA, 20 bp, Artificial Sequence
  Description of Artificial Sequence: Synthetic oligonucleotide
  Target: LAMA2; (-) strand; PAM type: NRG; PAM sequence: AAG
tggtattaaaccatgttaca

SEQ ID NO: 105185 - DNA, 20 bp, Artificial Sequence
  Description of Artificial Sequence: Synthetic oligonucleotide
  Target: LAMA2; (-) strand; PAM type: NRG; PAM sequence: TGG
gtcactgccttagggtttat

SEQ ID NO: 105186 - DNA, 20 bp, Artificial Sequence
  Description of Artificial Sequence: Synthetic oligonucleotide
  Target: LAMA2; (-) strand; PAM type: NRG; PAM sequence: GGG
gagctcatgtcactgcctta

SEQ ID NO: 105187 - DNA, 20 bp, Artificial Sequence
  Description of Artificial Sequence: Synthetic oligonucleotide
  Target: LAMA2; (-) strand; PAM type: NRG; PAM sequence: AGG
tgagctcatgtcactgcctt

SEQ ID NO: 105188 - DNA, 20 bp, Artificial Sequence
  Description of Artificial Sequence: Synthetic oligonucleotide
  Target: LAMA2; (-) strand; PAM type: NRG; PAM sequence: TAG
atgagctcatgtcactgcct

SEQ ID NO: 105189 - DNA, 20 bp, Artificial Sequence
  Description of Artificial Sequence: Synthetic oligonucleotide
  Target: LAMA2; (-) strand; PAM type: NRG; PAM sequence: GAG
ccagcccaataatagacaat

SEQ ID NO: 105190 - DNA, 20 bp, Artificial Sequence
  Description of Artificial Sequence: Synthetic oligonucleotide
  Target: LAMA2; (-) strand; PAM type: NRG; PAM sequence: TAG
aaccacccccagcccaataa

SEQ ID NO: 105191 - DNA, 20 bp, Artificial Sequence
  Description of Artificial Sequence: Synthetic oligonucleotide
  Target: LAMA2; (-) strand; PAM type: NRG; PAM sequence: CAG
tgcagctctgtaaccacccc

SEQ ID NO: 105192 - DNA, 20 bp, Artificial Sequence
  Description of Artificial Sequence: Synthetic oligonucleotide
  Target: LAMA2; (-) strand; PAM type: NRG; PAM sequence: CAG
ttttttcagaagggcttctg

SEQ ID NO: 105193 - DNA, 20 bp, Artificial Sequence
  Description of Artificial Sequence: Synthetic oligonucleotide
  Target: LAMA2; (-) strand; PAM type: NRG; PAM sequence: GGG
cttcttcacttttttcagaa

SEQ ID NO: 105194 - DNA, 20 bp, Artificial Sequence
  Description of Artificial Sequence: Synthetic oligonucleotide
  Target: LAMA2; (-) strand; PAM type: NRG; PAM sequence: AGG
gcttcttcacttttttcaga

SEQ ID NO: 105195 - DNA, 20 bp, Artificial Sequence
  Description of Artificial Sequence: Synthetic oligonucleotide
  Target: LAMA2; (-) strand; PAM type: NRG; PAM sequence: AAG
agcttcttcacttttttcag

SEQ ID NO: 105196 - DNA, 20 bp, Artificial Sequence
  Description of Artificial Sequence: Synthetic oligonucleotide
  Target: LAMA2; (-) strand; PAM type: NRG; PAM sequence: CAG
aacagcttcttcactttttt

SEQ ID NO: 105197 - DNA, 20 bp, Artificial Sequence
  Description of Artificial Sequence: Synthetic oligonucleotide
  Target: LAMA2; (-) strand; PAM type: NRG; PAM sequence: CAG
tccccccgggactctccaaa

SEQ ID NO: 105198 - DNA, 20 bp, Artificial Sequence
  Description of Artificial Sequence: Synthetic oligonucleotide
  Target: LAMA2; (-) strand; PAM type: NRG; PAM sequence: GGG
catttcttcattttcccccc

SEQ ID NO: 105199 - DNA, 20 bp, Artificial Sequence
  Description of Artificial Sequence: Synthetic oligonucleotide
  Target: LAMA2; (-) strand; PAM type: NRG; PAM sequence: CGG
ccatttcttcattttccccc

SEQ ID NO: 105200 - DNA, 20 bp, Artificial Sequence
  Description of Artificial Sequence: Synthetic oligonucleotide
  Target: LAMA2; (-) strand; PAM type: NRG; PAM sequence: GAG
tagtcagccagtttttcccg

SEQ ID NO: 105201 - DNA, 20 bp, Artificial Sequence
  Description of Artificial Sequence: Synthetic oligonucleotide
  Target: LAMA2; (-) strand; PAM type: NRG; PAM sequence: CGG
tgtagtcagccagtttttcc

SEQ ID NO: 105202 - DNA, 20 bp, Artificial Sequence
  Description of Artificial Sequence: Synthetic oligonucleotide
  Target: LAMA2; (-) strand; PAM type: NRG; PAM sequence: CAG
actttgtttttgtagtcagc

SEQ ID NO: 105203 - DNA, 20 bp, Artificial Sequence
  Description of Artificial Sequence: Synthetic oligonucleotide
  Target: LAMA2; (-) strand; PAM type: NRG; PAM sequence: CAG
atcaactttgtttttgtagt

SEQ ID NO: 105204 - DNA, 20 bp, Artificial Sequence
  Description of Artificial Sequence: Synthetic oligonucleotide
  Target: LAMA2; (-) strand; PAM type: NRG; PAM sequence: TAG
catcatcaactttgtttttg

SEQ ID NO: 105205 - DNA, 20 bp, Artificial Sequence
  Description of Artificial Sequence: Synthetic oligonucleotide
  Target: LAMA2; (-) strand; PAM type: NRG; PAM sequence: AAG
ggcttctctcaaaaggtccc

SEQ ID NO: 105206 - DNA, 20 bp, Artificial Sequence
  Description of Artificial Sequence: Synthetic oligonucleotide
  Target: LAMA2; (-) strand; PAM type: NRG; PAM sequence: AGG
tatctgtggcttctctcaaa

SEQ ID NO: 105207 - DNA, 20 bp, Artificial Sequence
  Description of Artificial Sequence: Synthetic oligonucleotide
  Target: LAMA2; (-) strand; PAM type: NRG; PAM sequence: AAG
ttatctgtggcttctctcaa

SEQ ID NO: 105208 - DNA, 20 bp, Artificial Sequence
  Description of Artificial Sequence: Synthetic oligonucleotide
  Target: LAMA2; (-) strand; PAM type: NRG; PAM sequence: TGG
agcttctctgattttatctg

SEQ ID NO: 105209 - DNA, 20 bp, Artificial Sequence
  Description of Artificial Sequence: Synthetic oligonucleotide
  Target: LAMA2; (-) strand; PAM type: NRG; PAM sequence: TAG
atttactgcaaataggcgat

SEQ ID NO: 105210 - DNA, 20 bp, Artificial Sequence
  Description of Artificial Sequence: Synthetic oligonucleotide
  Target: LAMA2; (-) strand; PAM type: NRG; PAM sequence: AGG
ttttctgatttactgcaaat

SEQ ID NO: 105211 - DNA, 20 bp, Artificial Sequence
  Description of Artificial Sequence: Synthetic oligonucleotide
  Target: LAMA2; (-) strand; PAM type: NRG; PAM sequence: TAG
tttttctgatttactgcaaa

SEQ ID NO: 105212 - DNA, 20 bp, Artificial Sequence
  Description of Artificial Sequence: Synthetic oligonucleotide
  Target: LAMA2; (-) strand; PAM type: NRG; PAM sequence: CAG
cctaagactcacctccaatg

SEQ ID NO: 105213 - DNA, 20 bp, Artificial Sequence
  Description of Artificial Sequence: Synthetic oligonucleotide
  Target: LAMA2; (-) strand; PAM type: NRG; PAM sequence: AAG
attaagataaaagtgcccct

SEQ ID NO: 105214 - DNA, 20 bp, Artificial Sequence
  Description of Artificial Sequence: Synthetic oligonucleotide
  Target: LAMA2; (-) strand; PAM type: NRG; PAM sequence: AAG
accttctgagattaagataa

SEQ ID NO: 105215 - DNA, 20 bp, Artificial Sequence
  Description of Artificial Sequence: Synthetic oligonucleotide
  Target: LAMA2; (-) strand; PAM type: NRG; PAM sequence: AAG
gtccccaaccttctgagatt

SEQ ID NO: 105216 - DNA, 20 bp, Artificial Sequence
  Description of Artificial Sequence: Synthetic oligonucleotide
  Target: LAMA2; (-) strand; PAM type: NRG; PAM sequence: GAG
cccgcagtccccaaccttct

SEQ ID NO: 105217 - DNA, 20 bp, Artificial Sequence
  Description of Artificial Sequence: Synthetic oligonucleotide
  Target: LAMA2; (-) strand; PAM type: NRG; PAM sequence: CAG
catgttcaacactgcccccg

SEQ ID NO: 105218 - DNA, 20 bp, Artificial Sequence
  Description of Artificial Sequence: Synthetic oligonucleotide
  Target: LAMA2; (-) strand; PAM type: NRG; PAM sequence: CAG
gtgcatcaacttgaatagtc

SEQ ID NO: 105219 - DNA, 20 bp, Artificial Sequence
  Description of Artificial Sequence: Synthetic oligonucleotide
  Target: LAMA2; (-) strand; PAM type: NRG; PAM sequence: TAG
taaatgtgcatcaacttgaa

SEQ ID NO: 105220 - DNA, 20 bp, Artificial Sequence
  Description of Artificial Sequence: Synthetic oligonucleotide
  Target: LAMA2; (-) strand; PAM type: NRG; PAM sequence: GAG
ttcttagaagccccctttca

SEQ ID NO: 105221 - DNA, 20 bp, Artificial Sequence
  Description of Artificial Sequence: Synthetic oligonucleotide
  Target: LAMA2; (-) strand; PAM type: NRG; PAM sequence: CAG
gtttcttagaagcccccttt

SEQ ID NO: 105222 - DNA, 20 bp, Artificial Sequence
  Description of Artificial Sequence: Synthetic oligonucleotide
  Target: LAMA2; (-) strand; PAM type: NRG; PAM sequence: AAG
tttcttgttctgtttcttag

SEQ ID NO: 105223 - DNA, 20 bp, Artificial Sequence
  Description of Artificial Sequence: Synthetic oligonucleotide
  Target: LAMA2; (-) strand; PAM type: NRG; PAM sequence: TAG
tcatttcttgttctgtttct

SEQ ID NO: 105224 - DNA, 20 bp, Artificial Sequence
  Description of Artificial Sequence: Synthetic oligonucleotide
  Target: LAMA2; (-) strand; PAM type: NRG; PAM sequence: AAG
aacaaaacaaaaacaaaaaa

SEQ ID NO: 105225 - DNA, 20 bp, Artificial Sequence
  Description of Artificial Sequence: Synthetic oligonucleotide
  Target: LAMA2; (-) strand; PAM type: NRG; PAM sequence: TGG
attctttgggcgatggtaac

SEQ ID NO: 105226 - DNA, 20 bp, Artificial Sequence
  Description of Artificial Sequence: Synthetic oligonucleotide
  Target: LAMA2; (-) strand; PAM type: NRG; PAM sequence: TGG
ttatttgattctttgggcga

SEQ ID NO: 105227 - DNA, 20 bp, Artificial Sequence
  Description of Artificial Sequence: Synthetic oligonucleotide
  Target: LAMA2; (-) strand; PAM type: NRG; PAM sequence: GGG
aaaattttatttgattcttt

SEQ ID NO: 105228 - DNA, 20 bp, Artificial Sequence
  Description of Artificial Sequence: Synthetic oligonucleotide
  Target: LAMA2; (-) strand; PAM type: NRG; PAM sequence: TGG
caaaattttatttgattctt

SEQ ID NO: 105229 - DNA, 20 bp, Artificial Sequence
  Description of Artificial Sequence: Synthetic oligonucleotide
  Target: LAMA2; (-) strand; PAM type: NRG; PAM sequence: CAG
gtgttcttaaatatcttcaa

SEQ ID NO: 105230 - DNA, 20 bp, Artificial Sequence
  Description of Artificial Sequence: Synthetic oligonucleotide
  Target: LAMA2; (-) strand; PAM type: NRG; PAM sequence: CAG
gaacttcttccactgtatca

SEQ ID NO: 105231 - DNA, 20 bp, Artificial Sequence
  Description of Artificial Sequence: Synthetic oligonucleotide
  Target: LAMA2; (-) strand; PAM type: NRG; PAM sequence: AAG
aggtcgcctgactccctgta

SEQ ID NO: 105232 - DNA, 20 bp, Artificial Sequence
  Description of Artificial Sequence: Synthetic oligonucleotide
  Target: LAMA2; (-) strand; PAM type: NRG; PAM sequence: AGG
cacagttgtcattgagacca

SEQ ID NO: 105233 - DNA, 20 bp, Artificial Sequence
  Description of Artificial Sequence: Synthetic oligonucleotide
  Target: LAMA2; (-) strand; PAM type: NRG; PAM sequence: AAG
gcacagttgtcattgagacc

SEQ ID NO: 105234 - DNA, 20 bp, Artificial Sequence
  Description of Artificial Sequence: Synthetic oligonucleotide
  Target: LAMA2; (-) strand; PAM type: NRG; PAM sequence: GAG
atagtggcacagttgtcatt

SEQ ID NO: 105235 - DNA, 20 bp, Artificial Sequence
  Description of Artificial Sequence: Synthetic oligonucleotide
  Target: LAMA2; (-) strand; PAM type: NRG; PAM sequence: CAG
tgtatgtctagatagtggca

SEQ ID NO: 105236 - DNA, 20 bp, Artificial Sequence
  Description of Artificial Sequence: Synthetic oligonucleotide
  Target: LAMA2; (-) strand; PAM type: NRG; PAM sequence: TGG
caatttgtatgtctagatag

SEQ ID NO: 105237 - DNA, 20 bp, Artificial Sequence
  Description of Artificial Sequence: Synthetic oligonucleotide
  Target: LAMA2; (-) strand; PAM type: NRG; PAM sequence: TAG
gcccaatttgtatgtctaga

SEQ ID NO: 105238 - DNA, 20 bp, Artificial Sequence
  Description of Artificial Sequence: Synthetic oligonucleotide
  Target: LAMA2; (-) strand; PAM type: NRG; PAM sequence: TAG
acttgcccaatttgtatgtc

SEQ ID NO: 105239 - DNA, 20 bp, Artificial Sequence
  Description of Artificial Sequence: Synthetic oligonucleotide
  Target: LAMA2; (-) strand; PAM type: NRG; PAM sequence: CAG
atttggggaactgatgctta

SEQ ID NO: 105240 - DNA, 20 bp, Artificial Sequence
  Description of Artificial Sequence: Synthetic oligonucleotide
  Target: LAMA2; (-) strand; PAM type: NRG; PAM sequence: GGG
atgcacttattgtagatttg

SEQ ID NO: 105241 - DNA, 20 bp, Artificial Sequence
  Description of Artificial Sequence: Synthetic oligonucleotide
  Target: LAMA2; (-) strand; PAM type: NRG; PAM sequence: GGG
aatgcacttattgtagattt

SEQ ID NO: 105242 - DNA, 20 bp, Artificial Sequence
  Description of Artificial Sequence: Synthetic oligonucleotide
  Target: LAMA2; (-) strand; PAM type: NRG; PAM sequence: TGG
taatgcacttattgtagatt

SEQ ID NO: 105243 - DNA, 20 bp, Artificial Sequence
  Description of Artificial Sequence: Synthetic oligonucleotide
  Target: LAMA2; (-) strand; PAM type: NRG; PAM sequence: TAG
atagtataatgcacttattg

SEQ ID NO: 105244 - DNA, 20 bp, Artificial Sequence
  Description of Artificial Sequence: Synthetic oligonucleotide
  Target: LAMA2; (-) strand; PAM type: NRG; PAM sequence: TAG
gataccctatatgtatgcta

SEQ ID NO: 105245 - DNA, 20 bp, Artificial Sequence
  Description of Artificial Sequence: Synthetic oligonucleotide
  Target: LAMA2; (-) strand; PAM type: NRG; PAM sequence: AAG
taatatgatatgaatatttg

SEQ ID NO: 105246 - DNA, 20 bp, Artificial Sequence
  Description of Artificial Sequence: Synthetic oligonucleotide
  Target: LAMA2; (-) strand; PAM type: NRG; PAM sequence: AAG
atttgtgaattagtttggga

SEQ ID NO: 105247 - DNA, 20 bp, Artificial Sequence
  Description of Artificial Sequence: Synthetic oligonucleotide
  Target: LAMA2; (-) strand; PAM type: NRG; PAM sequence: GGG
caagatttgtgaattagttt

SEQ ID NO: 105248 - DNA, 20 bp, Artificial Sequence
  Description of Artificial Sequence: Synthetic oligonucleotide
  Target: LAMA2; (-) strand; PAM type: NRG; PAM sequence: TGG
acaagatttgtgaattagtt

SEQ ID NO: 105249 - DNA, 20 bp, Artificial Sequence
  Description of Artificial Sequence: Synthetic oligonucleotide
  Target: LAMA2; (-) strand; PAM type: NRG; PAM sequence: TAG
tctgaacaagatttgtgaat

SEQ ID NO: 105250 - DNA, 20 bp, Artificial Sequence
  Description of Artificial Sequence: Synthetic oligonucleotide
  Target: LAMA2; (-) strand; PAM type: NRG; PAM sequence: AAG
tggcagcaagatctctgaac

SEQ ID NO: 105251 - DNA, 20 bp, Artificial Sequence
  Description of Artificial Sequence: Synthetic oligonucleotide
  Target: LAMA2; (-) strand; PAM type: NRG; PAM sequence: AAG
cttctatgatttttggcagc

SEQ ID NO: 105252 - DNA, 20 bp, Artificial Sequence
  Description of Artificial Sequence: Synthetic oligonucleotide
  Target: LAMA2; (-) strand; PAM type: NRG; PAM sequence: CAG
ggaacttctatgatttttgg

SEQ ID NO: 105253 - DNA, 20 bp, Artificial Sequence
  Description of Artificial Sequence: Synthetic oligonucleotide
  Target: LAMA2; (-) strand; PAM type: NRG; PAM sequence: TGG
tagggaacttctatgatttt

SEQ ID NO: 105254 - DNA, 20 bp, Artificial Sequence
  Description of Artificial Sequence: Synthetic oligonucleotide
  Target: LAMA2; (-) strand; PAM type: NRG; PAM sequence: GGG
agattgaatttgaaagtgta

SEQ ID NO: 105255 - DNA, 20 bp, Artificial Sequence
  Description of Artificial Sequence: Synthetic oligonucleotide
  Target: LAMA2; (-) strand; PAM type: NRG; PAM sequence: AGG
cagattgaatttgaaagtgt

SEQ ID NO: 105256 - DNA, 20 bp, Artificial Sequence
  Description of Artificial Sequence: Synthetic oligonucleotide
  Target: LAMA2; (-) strand; PAM type: NRG; PAM sequence: TAG
tcagattgaatttgaaagtg

SEQ ID NO: 105257 - DNA, 20 bp, Artificial Sequence
  Description of Artificial Sequence: Synthetic oligonucleotide
  Target: LAMA2; (-) strand; PAM type: NRG; PAM sequence: AAG
tgtgctcagattgaatttga

SEQ ID NO: 105258 - DNA, 20 bp, Artificial Sequence
  Description of Artificial Sequence: Synthetic oligonucleotide
  Target: LAMA2; (-) strand; PAM type: NRG; PAM sequence: CAG
tgagctatttgtcatgtgct

SEQ ID NO: 105259 - DNA, 20 bp, Artificial Sequence
  Description of Artificial Sequence: Synthetic oligonucleotide
  Target: LAMA2; (-) strand; PAM type: NRG; PAM sequence: GAG
agctctggtctcaattcatt

SEQ ID NO: 105260 - DNA, 20 bp, Artificial Sequence
  Description of Artificial Sequence: Synthetic oligonucleotide
  Target: LAMA2; (-) strand; PAM type: NRG; PAM sequence: TGG
accaaaatttttccaagctc

SEQ ID NO: 105261 - DNA, 20 bp, Artificial Sequence
  Description of Artificial Sequence: Synthetic oligonucleotide
  Target: LAMA2; (-) strand; PAM type: NRG; PAM sequence: AAG
agaggaaccaaaatttttcc

SEQ ID NO: 105262 - DNA, 20 bp, Artificial Sequence
  Description of Artificial Sequence: Synthetic oligonucleotide
  Target: LAMA2; (-) strand; PAM type: NRG; PAM sequence: AGG
aacacagcgcatagaaaaag

SEQ ID NO: 105263 - DNA, 20 bp, Artificial Sequence
  Description of Artificial Sequence: Synthetic oligonucleotide
  Target: LAMA2; (-) strand; PAM type: NRG; PAM sequence: GAG
gaacacagcgcatagaaaaa

SEQ ID NO: 105264 - DNA, 20 bp, Artificial Sequence
  Description of Artificial Sequence: Synthetic oligonucleotide
  Target: LAMA2; (-) strand; PAM type: NRG; PAM sequence: AAG
tagaacacagcgcatagaaa

SEQ ID NO: 105265 - DNA, 20 bp, Artificial Sequence
  Description of Artificial Sequence: Synthetic oligonucleotide
  Target: LAMA2; (-) strand; PAM type: NRG; PAM sequence: TAG
tttgcatagaacacagcgca

SEQ ID NO: 105266 - DNA, 20 bp, Artificial Sequence
  Description of Artificial Sequence: Synthetic oligonucleotide
  Target: LAMA2; (-) strand; PAM type: NRG; PAM sequence: CAG
aagatcatttgcatagaaca

SEQ ID NO: 105267 - DNA, 20 bp, Artificial Sequence
  Description of Artificial Sequence: Synthetic oligonucleotide
  Target: LAMA2; (-) strand; PAM type: NRG; PAM sequence: TAG
cttctaaaagatcatttgca

SEQ ID NO: 105268 - DNA, 20 bp, Artificial Sequence
  Description of Artificial Sequence: Synthetic oligonucleotide
  Target: LAMA2; (-) strand; PAM type: NRG; PAM sequence: AAG
ttcatgttagttccttctaa

SEQ ID NO: 105269 - DNA, 20 bp, Artificial Sequence
  Description of Artificial Sequence: Synthetic oligonucleotide
  Target: LAMA2; (-) strand; PAM type: NRG; PAM sequence: TAG
cagacctgatctattcatgt

SEQ ID NO: 105270 - DNA, 20 bp, Artificial Sequence
  Description of Artificial Sequence: Synthetic oligonucleotide
  Target: LAMA2; (-) strand; PAM type: NRG; PAM sequence: CAG
aaaaggaggagaaaataacg

SEQ ID NO: 105271 - DNA, 20 bp, Artificial Sequence
  Description of Artificial Sequence: Synthetic oligonucleotide
  Target: LAMA2; (-) strand; PAM type: NRG; PAM sequence: GAG
ttatctgtgtggaaaaggag

SEQ ID NO: 105272 - DNA, 20 bp, Artificial Sequence
  Description of Artificial Sequence: Synthetic oligonucleotide
  Target: LAMA2; (-) strand; PAM type: NRG; PAM sequence: AGG
tgttatctgtgtggaaaagg

SEQ ID NO: 105273 - DNA, 20 bp, Artificial Sequence
  Description of Artificial Sequence: Synthetic oligonucleotide
  Target: LAMA2; (-) strand; PAM type: NRG; PAM sequence: GAG
ctgttatctgtgtggaaaag

SEQ ID NO: 105274 - DNA, 20 bp, Artificial Sequence
  Description of Artificial Sequence: Synthetic oligonucleotide
  Target: LAMA2; (-) strand; PAM type: NRG; PAM sequence: AGG
aactgttatctgtgtggaaa

SEQ ID NO: 105275 - DNA, 20 bp, Artificial Sequence
  Description of Artificial Sequence: Synthetic oligonucleotide
  Target: LAMA2; (-) strand; PAM type: NRG; PAM sequence: AAG
taactgttatctgtgtggaa

SEQ ID NO: 105276 - DNA, 20 bp, Artificial Sequence
  Description of Artificial Sequence: Synthetic oligonucleotide
  Target: LAMA2; (-) strand; PAM type: NRG; PAM sequence: TGG
agaagtaactgttatctgtg

SEQ ID NO: 105277 - DNA, 20 bp, Artificial Sequence
  Description of Artificial Sequence: Synthetic oligonucleotide
  Target: LAMA2; (-) strand; PAM type: NRG; PAM sequence: AAG
ccataatttcttgagttgag

SEQ ID NO: 105278 - DNA, 20 bp, Artificial Sequence
  Description of Artificial Sequence: Synthetic oligonucleotide
  Target: LAMA2; (-) strand; PAM type: NRG; PAM sequence: GAG
tgcccataatttcttgagtt

SEQ ID NO: 105279 - DNA, 20 bp, Artificial Sequence
  Description of Artificial Sequence: Synthetic oligonucleotide
  Target: LAMA2; (-) strand; PAM type: NRG; PAM sequence: GAG
gaggctgcccataatttctt

SEQ ID NO: 105280 - DNA, 20 bp, Artificial Sequence
  Description of Artificial Sequence: Synthetic oligonucleotide
  Target: LAMA2; (-) strand; PAM type: NRG; PAM sequence: AGG
cagaactcttaaaaagatag

SEQ ID NO: 105281 - DNA, 20 bp, Artificial Sequence
  Description of Artificial Sequence: Synthetic oligonucleotide
  Target: LAMA2; (-) strand; PAM type: NRG; PAM sequence: GAG
tcagaactcttaaaaagata

SEQ ID NO: 105282 - DNA, 20 bp, Artificial Sequence
  Description of Artificial Sequence: Synthetic oligonucleotide
  Target: LAMA2; (-) strand; PAM type: NRG; PAM sequence: TAG
catcagaactcttaaaaaga

SEQ ID NO: 105283 - DNA, 20 bp, Artificial Sequence
  Description of Artificial Sequence: Synthetic oligonucleotide
  Target: LAMA2; (-) strand; PAM type: NRG; PAM sequence: AAG
gttccatcagaactcttaaa

SEQ ID NO: 105284 - DNA, 20 bp, Artificial Sequence
  Description of Artificial Sequence: Synthetic oligonucleotide
  Target: LAMA2; (-) strand; PAM type: NRG; PAM sequence: CAG
tgttttagttctagttccat

SEQ ID NO: 105285 - DNA, 20 bp, Artificial Sequence
  Description of Artificial Sequence: Synthetic oligonucleotide
  Target: LAMA2; (-) strand; PAM type: NRG; PAM sequence: TAG
ggaggaatctgttttagttc

SEQ ID NO: 105286 - DNA, 20 bp, Artificial Sequence
  Description of Artificial Sequence: Synthetic oligonucleotide
  Target: LAMA2; (-) strand; PAM type: NRG; PAM sequence: TAG
aataatggaggaatctgttt

SEQ ID NO: 105287 - DNA, 20 bp, Artificial Sequence
  Description of Artificial Sequence: Synthetic oligonucleotide
  Target: LAMA2; (-) strand; PAM type: NRG; PAM sequence: AGG
aaaagaagaaaaaataatgg

SEQ ID NO: 105288 - DNA, 20 bp, Artificial Sequence
  Description of Artificial Sequence: Synthetic oligonucleotide
  Target: LAMA2; (-) strand; PAM type: NRG; PAM sequence: GAG
aaaaagaagaaaaaataatg

SEQ ID NO: 105289 - DNA, 20 bp, Artificial Sequence
  Description of Artificial Sequence: Synthetic oligonucleotide
  Target: LAMA2; (-) strand; PAM type: NRG; PAM sequence: TGG
aaaaaaagaagaaaaaataa

SEQ ID NO: 105290 - DNA, 20 bp, Artificial Sequence
  Description of Artificial Sequence: Synthetic oligonucleotide
  Target: LAMA2; (-) strand; PAM type: NRG; PAM sequence: AAG
aaagaaattggaaaaaaaag

SEQ ID NO: 105291 - DNA, 20 bp, Artificial Sequence
  Description of Artificial Sequence: Synthetic oligonucleotide
  Target: LAMA2; (-) strand; PAM type: NRG; PAM sequence: AAG
aagaaagaaattggaaaaaa

SEQ ID NO: 105292 - DNA, 20 bp, Artificial Sequence
  Description of Artificial Sequence: Synthetic oligonucleotide
  Target: LAMA2; (-) strand; PAM type: NRG; PAM sequence: TGG
gttaagattaagaaagaaat

SEQ ID NO: 105293 - DNA, 20 bp, Artificial Sequence
  Description of Artificial Sequence: Synthetic oligonucleotide
  Target: LAMA2; (-) strand; PAM type: NRG; PAM sequence: AAG
ttactatgttaagattaaga

SEQ ID NO: 105294 - DNA, 20 bp, Artificial Sequence
  Description of Artificial Sequence: Synthetic oligonucleotide
  Target: LAMA2; (-) strand; PAM type: NRG; PAM sequence: AAG
taatttactatgttaagatt

SEQ ID NO: 105295 - DNA, 20 bp, Artificial Sequence
  Description of Artificial Sequence: Synthetic oligonucleotide
  Target: LAMA2; (-) strand; PAM type: NRG; PAM sequence: AAG
aagtgataatttactatgtt

SEQ ID NO: 105296 - DNA, 20 bp, Artificial Sequence
  Description of Artificial Sequence: Synthetic oligonucleotide
  Target: LAMA2; (-) strand; PAM type: NRG; PAM sequence: AAG
gctgagtttactcttaggaa

SEQ ID NO: 105297 - DNA, 20 bp, Artificial Sequence
  Description of Artificial Sequence: Synthetic oligonucleotide
  Target: LAMA2; (-) strand; PAM type: NRG; PAM sequence: AGG
tatgtgctgagtttactctt

SEQ ID NO: 105298 - DNA, 20 bp, Artificial Sequence
  Description of Artificial Sequence: Synthetic oligonucleotide
  Target: LAMA2; (-) strand; PAM type: NRG; PAM sequence: TAG
atatgtgctgagtttactct

SEQ ID NO: 105299 - DNA, 20 bp, Artificial Sequence
  Description of Artificial Sequence: Synthetic oligonucleotide
  Target: LAMA2; (-) strand; PAM type: NRG; PAM sequence: GAG
gtgctgctgttatatgtgct

SEQ ID NO: 105300 - DNA, 20 bp, Artificial Sequence
  Description of Artificial Sequence: Synthetic oligonucleotide
  Target: LAMA2; (-) strand; PAM type: NRG; PAM sequence: GGG
aaatattaatatcacataca

SEQ ID NO: 105301 - DNA, 20 bp, Artificial Sequence
  Description of Artificial Sequence: Synthetic oligonucleotide
  Target: LAMA2; (-) strand; PAM type: NRG; PAM sequence: AGG
taaatattaatatcacatac

SEQ ID NO: 105302 - DNA, 20 bp, Artificial Sequence
  Description of Artificial Sequence: Synthetic oligonucleotide
  Target: LAMA2; (-) strand; PAM type: NRG; PAM sequence: CAG
ttaaatattaatatcacata

SEQ ID NO: 105303 - DNA, 20 bp, Artificial Sequence
  Description of Artificial Sequence: Synthetic oligonucleotide
  Target: LAMA2; (-) strand; PAM type: NRG; PAM sequence: AAG
taaatttgtctctggggaga

SEQ ID NO: 105304 - DNA, 20 bp, Artificial Sequence
  Description of Artificial Sequence: Synthetic oligonucleotide
  Target: LAMA2; (-) strand; PAM type: NRG; PAM sequence: GAG
aaggtaaatttgtctctggg

SEQ ID NO: 105305 - DNA, 20 bp, Artificial Sequence
  Description of Artificial Sequence: Synthetic oligonucleotide
  Target: LAMA2; (-) strand; PAM type: NRG; PAM sequence: GGG
caaaggtaaatttgtctctg

SEQ ID NO: 105306 - DNA, 20 bp, Artificial Sequence
  Description of Artificial Sequence: Synthetic oligonucleotide
  Target: LAMA2; (-) strand; PAM type: NRG; PAM sequence: GGG
gcaaaggtaaatttgtctct

SEQ ID NO: 105307 - DNA, 20 bp, Artificial Sequence
  Description of Artificial Sequence: Synthetic oligonucleotide
  Target: LAMA2; (-) strand; PAM type: NRG; PAM sequence: TGG
agcaaaggtaaatttgtctc

SEQ ID NO: 105308 - DNA, 20 bp, Artificial Sequence
  Description of Artificial Sequence: Synthetic oligonucleotide
  Target: LAMA2; (-) strand; PAM type: NRG; PAM sequence: AGG
agatactttgaaaacagcaa

SEQ ID NO: 105309 - DNA, 20 bp, Artificial Sequence
  Description of Artificial Sequence: Synthetic oligonucleotide
  Target: LAMA2; (-) strand; PAM type: NRG; PAM sequence: AAG
cagatactttgaaaacagca

SEQ ID NO: 105310 - DNA, 20 bp, Artificial Sequence
  Description of Artificial Sequence: Synthetic oligonucleotide
  Target: LAMA2; (-) strand; PAM type: NRG; PAM sequence: CAG
ggagtcagatactttgaaaa

SEQ ID NO: 105311 - DNA, 20 bp, Artificial Sequence
  Description of Artificial Sequence: Synthetic oligonucleotide
  Target: LAMA2; (-) strand; PAM type: NRG; PAM sequence: CAG
gttttctgacctgttggagt

SEQ ID NO: 105312 - DNA, 20 bp, Artificial Sequence
  Description of Artificial Sequence: Synthetic oligonucleotide
  Target: LAMA2; (-) strand; PAM type: NRG; PAM sequence: GAG
tgctgttttctgacctgttg

SEQ ID NO: 105313 - DNA, 20 bp, Artificial Sequence
  Description of Artificial Sequence: Synthetic oligonucleotide
  Target: LAMA2; (-) strand; PAM type: NRG; PAM sequence: TGG
gctgctgttttctgacctgt

SEQ ID NO: 105314 - DNA, 20 bp, Artificial Sequence
  Description of Artificial Sequence: Synthetic oligonucleotide
  Target: LAMA2; (-) strand; PAM type: NRG; PAM sequence: AGG
ttatgtgttagaagatgtat

SEQ ID NO: 105315 - DNA, 20 bp, Artificial Sequence
  Description of Artificial Sequence: Synthetic oligonucleotide
  Target: LAMA2; (-) strand; PAM type: NRG; PAM sequence: TAG
attatgtgttagaagatgta

SEQ ID NO: 105316 - DNA, 20 bp, Artificial Sequence
  Description of Artificial Sequence: Synthetic oligonucleotide
  Target: LAMA2; (-) strand; PAM type: NRG; PAM sequence: AAG
acggtgaaattatgtgttag

SEQ ID NO: 105317 - DNA, 20 bp, Artificial Sequence
  Description of Artificial Sequence: Synthetic oligonucleotide
  Target: LAMA2; (-) strand; PAM type: NRG; PAM sequence: TAG
ttgacggtgaaattatgtgt

SEQ ID NO: 105318 - DNA, 20 bp, Artificial Sequence
  Description of Artificial Sequence: Synthetic oligonucleotide
  Target: LAMA2; (-) strand; PAM type: NRG; PAM sequence: CGG
gggtgctgagttactgttga

SEQ ID NO: 105319 - DNA, 20 bp, Artificial Sequence
  Description of Artificial Sequence: Synthetic oligonucleotide
  Target: LAMA2; (-) strand; PAM type: NRG; PAM sequence: GAG
actatatgccagagggtgct

SEQ ID NO: 105320 - DNA, 20 bp, Artificial Sequence
  Description of Artificial Sequence: Synthetic oligonucleotide
  Target: LAMA2; (-) strand; PAM type: NRG; PAM sequence: GGG
catacatactatatgccaga

SEQ ID NO: 105321 - DNA, 20 bp, Artificial Sequence
  Description of Artificial Sequence: Synthetic oligonucleotide
  Target: LAMA2; (-) strand; PAM type: NRG; PAM sequence: AGG
acatacatactatatgccag

SEQ ID NO: 105322 - DNA, 20 bp, Artificial Sequence
  Description of Artificial Sequence: Synthetic oligonucleotide
  Target: LAMA2; (-) strand; PAM type: NRG; PAM sequence: GAG
tacatacatactatatgcca

SEQ ID NO: 105323 - DNA, 20 bp, Artificial Sequence
  Description of Artificial Sequence: Synthetic oligonucleotide
  Target: LAMA2; (-) strand; PAM type: NRG; PAM sequence: CAG
tctacatacatactatatgc

SEQ ID NO: 105324 - DNA, 20 bp, Artificial Sequence
  Description of Artificial Sequence: Synthetic oligonucleotide
  Target: LAMA2; (-) strand; PAM type: NRG; PAM sequence: TGG
tgaatagatttaaaaaatcc

SEQ ID NO: 105325 - DNA, 20 bp, Artificial Sequence
  Description of Artificial Sequence: Synthetic oligonucleotide
  Target: LAMA2; (-) strand; PAM type: NRG; PAM sequence: TAG
taaaggaaaatagaaatgaa

SEQ ID NO: 105326 - DNA, 20 bp, Artificial Sequence
  Description of Artificial Sequence: Synthetic oligonucleotide
  Target: LAMA2; (-) strand; PAM type: NRG; PAM sequence: TAG
ctacttaatctaaaggaaaa

SEQ ID NO: 105327 - DNA, 20 bp, Artificial Sequence
  Description of Artificial Sequence: Synthetic oligonucleotide
  Target: LAMA2; (-) strand; PAM type: NRG; PAM sequence: AGG
cctcttactacttaatctaa

SEQ ID NO: 105328 - DNA, 20 bp, Artificial Sequence
  Description of Artificial Sequence: Synthetic oligonucleotide
  Target: LAMA2; (-) strand; PAM type: NRG; PAM sequence: AAG
tcctcttactacttaatcta

SEQ ID NO: 105329 - DNA, 20 bp, Artificial Sequence
  Description of Artificial Sequence: Synthetic oligonucleotide
  Target: LAMA2; (-) strand; PAM type: NRG; PAM sequence: CGG
taagtcccagaagagggaca

SEQ ID NO: 105330 - DNA, 20 bp, Artificial Sequence
  Description of Artificial Sequence: Synthetic oligonucleotide
  Target: LAMA2; (-) strand; PAM type: NRG; PAM sequence: GGG
caaggctaagtcccagaaga

SEQ ID NO: 105331 - DNA, 20 bp, Artificial Sequence
  Description of Artificial Sequence: Synthetic oligonucleotide
  Target: LAMA2; (-) strand; PAM type: NRG; PAM sequence: AGG
acaaggctaagtcccagaag

SEQ ID NO: 105332 - DNA, 20 bp, Artificial Sequence
  Description of Artificial Sequence: Synthetic oligonucleotide
  Target: LAMA2; (-) strand; PAM type: NRG; PAM sequence: GAG
gacaaggctaagtcccagaa

SEQ ID NO: 105333 - DNA, 20 bp, Artificial Sequence
  Description of Artificial Sequence: Synthetic oligonucleotide
  Target: LAMA2; (-) strand; PAM type: NRG; PAM sequence: AAG
atgacaaggctaagtcccag

SEQ ID NO: 105334 - DNA, 20 bp, Artificial Sequence
  Description of Artificial Sequence: Synthetic oligonucleotide
  Target: LAMA2; (-) strand; PAM type: NRG; PAM sequence: CAG
agaatgacaaggctaagtcc

SEQ ID NO: 105335 - DNA, 20 bp, Artificial Sequence
  Description of Artificial Sequence: Synthetic oligonucleotide
  Target: LAMA2; (-) strand; PAM type: NRG; PAM sequence: AAG
tctaccagaatgacaaggct

SEQ ID NO: 105336 - DNA, 20 bp, Artificial Sequence
  Description of Artificial Sequence: Synthetic oligonucleotide
  Target: LAMA2; (-) strand; PAM type: NRG; PAM sequence: AGG
aatattctaccagaatgaca

SEQ ID NO: 105337 - DNA, 20 bp, Artificial Sequence
  Description of Artificial Sequence: Synthetic oligonucleotide
  Target: LAMA2; (-) strand; PAM type: NRG; PAM sequence: AAG
caatattctaccagaatgac

SEQ ID NO: 105338 - DNA, 20 bp, Artificial Sequence
  Description of Artificial Sequence: Synthetic oligonucleotide
  Target: LAMA2; (-) strand; PAM type: NRG; PAM sequence: CAG
aagcctcttcaatattctac

SEQ ID NO: 105339 - DNA, 20 bp, Artificial Sequence
  Description of Artificial Sequence: Synthetic oligonucleotide
  Target: LAMA2; (-) strand; PAM type: NRG; PAM sequence: AAG
catcagtgaagaaaaaaagt

SEQ ID NO: 105340 - DNA, 20 bp, Artificial Sequence
  Description of Artificial Sequence: Synthetic oligonucleotide
  Target: LAMA2; (-) strand; PAM type: NRG; PAM sequence: AAG
ggtgcatcagtgaagaaaaa

SEQ ID NO: 105341 - DNA, 20 bp, Artificial Sequence
  Description of Artificial Sequence: Synthetic oligonucleotide
  Target: LAMA2; (-) strand; PAM type: NRG; PAM sequence: AAG
attggttaggtgcatcagtg

SEQ ID NO: 105342 - DNA, 20 bp, Artificial Sequence
  Description of Artificial Sequence: Synthetic oligonucleotide
  Target: LAMA2; (-) strand; PAM type: NRG; PAM sequence: CAG
tccaaattggttaggtgcat

SEQ ID NO: 105343 - DNA, 20 bp, Artificial Sequence
  Description of Artificial Sequence: Synthetic oligonucleotide
  Target: LAMA2; (-) strand; PAM type: NRG; PAM sequence: AGG
cagtagactccaaattggtt

SEQ ID NO: 105344 - DNA, 20 bp, Artificial Sequence
  Description of Artificial Sequence: Synthetic oligonucleotide
  Target: LAMA2; (-) strand; PAM type: NRG; PAM sequence: TAG
tcagtagactccaaattggt

SEQ ID NO: 105345 - DNA, 20 bp, Artificial Sequence
  Description of Artificial Sequence: Synthetic oligonucleotide
  Target: LAMA2; (-) strand; PAM type: NRG; PAM sequence: TGG
catgtcagtagactccaaat

SEQ ID NO: 105346 - DNA, 20 bp, Artificial Sequence
  Description of Artificial Sequence: Synthetic oligonucleotide
  Target: LAMA2; (-) strand; PAM type: NRG; PAM sequence: TAG
gaatactgctagcatgtcag

SEQ ID NO: 105347 - DNA, 20 bp, Artificial Sequence
  Description of Artificial Sequence: Synthetic oligonucleotide
  Target: LAMA2; (-) strand; PAM type: NRG; PAM sequence: CAG
ctggaatactgctagcatgt

SEQ ID NO: 105348 - DNA, 20 bp, Artificial Sequence
  Description of Artificial Sequence: Synthetic oligonucleotide
  Target: LAMA2; (-) strand; PAM type: NRG; PAM sequence: TAG
cagtatttctggaatactgc

SEQ ID NO: 105349 - DNA, 20 bp, Artificial Sequence
  Description of Artificial Sequence: Synthetic oligonucleotide
  Target: LAMA2; (-) strand; PAM type: NRG; PAM sequence: TGG
ctgcctcacagcagtatttc

SEQ ID NO: 105350 - DNA, 20 bp, Artificial Sequence
  Description of Artificial Sequence: Synthetic oligonucleotide
  Target: LAMA2; (-) strand; PAM type: NRG; PAM sequence: CAG
cccagcatcctgcctcacag

SEQ ID NO: 105351 - DNA, 20 bp, Artificial Sequence
  Description of Artificial Sequence: Synthetic oligonucleotide
  Target: LAMA2; (-) strand; PAM type: NRG; PAM sequence: CAG
tggcccagcatcctgcctca

SEQ ID NO: 105352 - DNA, 20 bp, Artificial Sequence
  Description of Artificial Sequence: Synthetic oligonucleotide
  Target: LAMA2; (-) strand; PAM type: NRG; PAM sequence: CAG
cctgtgacaggacagtggcc

SEQ ID NO: 105353 - DNA, 20 bp, Artificial Sequence
  Description of Artificial Sequence: Synthetic oligonucleotide
  Target: LAMA2; (-) strand; PAM type: NRG; PAM sequence: TGG
tggagcctgtgacaggacag

SEQ ID NO: 105354 - DNA, 20 bp, Artificial Sequence
  Description of Artificial Sequence: Synthetic oligonucleotide
  Target: LAMA2; (-) strand; PAM type: NRG; PAM sequence: CAG
tgctggagcctgtgacagga

SEQ ID NO: 105355 - DNA, 20 bp, Artificial Sequence
  Description of Artificial Sequence: Synthetic oligonucleotide
  Target: LAMA2; (-) strand; PAM type: NRG; PAM sequence: AGG
atcatgctggagcctgtgac

SEQ ID NO: 105356 - DNA, 20 bp, Artificial Sequence
  Description of Artificial Sequence: Synthetic oligonucleotide
  Target: LAMA2; (-) strand; PAM type: NRG; PAM sequence: CAG
aatcatgctggagcctgtga

SEQ ID NO: 105357 - DNA, 20 bp, Artificial Sequence
  Description of Artificial Sequence: Synthetic oligonucleotide
  Target: LAMA2; (-) strand; PAM type: NRG; PAM sequence: GAG
gagcagggtgaatcatgctg

SEQ ID NO: 105358 - DNA, 20 bp, Artificial Sequence
  Description of Artificial Sequence: Synthetic oligonucleotide
  Target: LAMA2; (-) strand; PAM type: NRG; PAM sequence: TGG
ccgagcagggtgaatcatgc

SEQ ID NO: 105359 - DNA, 20 bp, Artificial Sequence
  Description of Artificial Sequence: Synthetic oligonucleotide
  Target: LAMA2; (-) strand; PAM type: NRG; PAM sequence: GGG
ggctggtgtgtcaccgagca

SEQ ID NO: 105360 - DNA, 20 bp, Artificial Sequence
  Description of Artificial Sequence: Synthetic oligonucleotide
  Target: LAMA2; (-) strand; PAM type: NRG; PAM sequence: AGG
cggctggtgtgtcaccgagc

SEQ ID NO: 105361 - DNA, 20 bp, Artificial Sequence
  Description of Artificial Sequence: Synthetic oligonucleotide
  Target: LAMA2; (-) strand; PAM type: NRG; PAM sequence: CAG
acggctggtgtgtcaccgag

SEQ ID NO: 105362 - DNA, 20 bp, Artificial Sequence
  Description of Artificial Sequence: Synthetic oligonucleotide
  Target: LAMA2; (-) strand; PAM type: NRG; PAM sequence: GAG
cacacggctggtgtgtcacc

SEQ ID NO: 105363 - DNA, 20 bp, Artificial Sequence
  Description of Artificial Sequence: Synthetic oligonucleotide
  Target: LAMA2; (-) strand; PAM type: NRG; PAM sequence: TGG
cttcgggtaagtcacacggc

SEQ ID NO: 105364 - DNA, 20 bp, Artificial Sequence
  Description of Artificial Sequence: Synthetic oligonucleotide
  Target: LAMA2; (-) strand; PAM type: NRG; PAM sequence: CGG
gcaccttcgggtaagtcaca

SEQ ID NO: 105365 - DNA, 20 bp, Artificial Sequence
  Description of Artificial Sequence: Synthetic oligonucleotide
  Target: LAMA2; (-) strand; PAM type: NRG; PAM sequence: AAG
agacaggtgcaccttcgggt

SEQ ID NO: 105366 - DNA, 20 bp, Artificial Sequence
  Description of Artificial Sequence: Synthetic oligonucleotide
  Target: LAMA2; (-) strand; PAM type: NRG; PAM sequence: GGG
aaatagacaggtgcaccttc

SEQ ID NO: 105367 - DNA, 20 bp, Artificial Sequence
  Description of Artificial Sequence: Synthetic oligonucleotide
  Target: LAMA2; (-) strand; PAM type: NRG; PAM sequence: CGG
aaaatagacaggtgcacctt

SEQ ID NO: 105368 - DNA, 20 bp, Artificial Sequence
  Description of Artificial Sequence: Synthetic oligonucleotide
  Target: LAMA2; (-) strand; PAM type: NRG; PAM sequence: AGG
acggttgccataaaatagac

SEQ ID NO: 105369 - DNA, 20 bp, Artificial Sequence
  Description of Artificial Sequence: Synthetic oligonucleotide
  Target: LAMA2; (-) strand; PAM type: NRG; PAM sequence: CAG
aacggttgccataaaataga

SEQ ID NO: 105370 - DNA, 20 bp, Artificial Sequence
  Description of Artificial Sequence: Synthetic oligonucleotide
  Target: LAMA2; (-) strand; PAM type: NRG; PAM sequence: TAG
atcaaacggttgccataaaa

SEQ ID NO: 105371 - DNA, 20 bp, Artificial Sequence
  Description of Artificial Sequence: Synthetic oligonucleotide
  Target: LAMA2; (-) strand; PAM type: NRG; PAM sequence: CGG
ggtaattttcatttatcaaa

SEQ ID NO: 105372 - DNA, 20 bp, Artificial Sequence
  Description of Artificial Sequence: Synthetic oligonucleotide
  Target: LAMA2; (-) strand; PAM type: NRG; PAM sequence: AGG
acttactatgctttccacac

SEQ ID NO: 105373 - DNA, 20 bp, Artificial Sequence
  Description of Artificial Sequence: Synthetic oligonucleotide
  Target: LAMA2; (-) strand; PAM type: NRG; PAM sequence: CAG
tacttactatgctttccaca

SEQ ID NO: 105374 - DNA, 20 bp, Artificial Sequence
  Description of Artificial Sequence: Synthetic oligonucleotide
  Target: LAMA2; (-) strand; PAM type: NRG; PAM sequence: AGG
taaaagaaacgaatagctaa

SEQ ID NO: 105375 - DNA, 20 bp, Artificial Sequence
  Description of Artificial Sequence: Synthetic oligonucleotide
  Target: LAMA2; (-) strand; PAM type: NRG; PAM sequence: AAG
ctaaaagaaacgaatagcta

SEQ ID NO: 105376 - DNA, 20 bp, Artificial Sequence
  Description of Artificial Sequence: Synthetic oligonucleotide
  Target: LAMA2; (-) strand; PAM type: NRG; PAM sequence: TAG
acatcactaaaagaaacgaa

SEQ ID NO: 105377 - DNA, 20 bp, Artificial Sequence
  Description of Artificial Sequence: Synthetic oligonucleotide
  Target: LAMA2; (-) strand; PAM type: NRG; PAM sequence: AAG
ctggttttaaacatcactaa

SEQ ID NO: 105378 - DNA, 20 bp, Artificial Sequence
  Description of Artificial Sequence: Synthetic oligonucleotide
  Target: LAMA2; (-) strand; PAM type: NRG; PAM sequence: TGG
tgcccaagaatgatgacttc

SEQ ID NO: 105379 - DNA, 20 bp, Artificial Sequence
  Description of Artificial Sequence: Synthetic oligonucleotide
  Target: LAMA2; (-) strand; PAM type: NRG; PAM sequence: AAG
aggtatttgtaggggtgccc

SEQ ID NO: 105380 - DNA, 20 bp, Artificial Sequence
  Description of Artificial Sequence: Synthetic oligonucleotide
  Target: LAMA2; (-) strand; PAM type: NRG; PAM sequence: GGG
taagctccaggtatttgtag

SEQ ID NO: 105381 - DNA, 20 bp, Artificial Sequence
  Description of Artificial Sequence: Synthetic oligonucleotide
  Target: LAMA2; (-) strand; PAM type: NRG; PAM sequence: GGG
ataagctccaggtatttgta

SEQ ID NO: 105382 - DNA, 20 bp, Artificial Sequence
  Description of Artificial Sequence: Synthetic oligonucleotide
  Target: LAMA2; (-) strand; PAM type: NRG; PAM sequence: AGG
cataagctccaggtatttgt

SEQ ID NO: 105383 - DNA, 20 bp, Artificial Sequence
  Description of Artificial Sequence: Synthetic oligonucleotide
  Target: LAMA2; (-) strand; PAM type: NRG; PAM sequence: TAG
acataagctccaggtatttg

SEQ ID NO: 105384 - DNA, 20 bp, Artificial Sequence
  Description of Artificial Sequence: Synthetic oligonucleotide
  Target: LAMA2; (-) strand; PAM type: NRG; PAM sequence: AGG
accgactatacataagctcc

SEQ ID NO: 105385 - DNA, 20 bp, Artificial Sequence
  Description of Artificial Sequence: Synthetic oligonucleotide
  Target: LAMA2; (-) strand; PAM type: NRG; PAM sequence: CAG
taccgactatacataagctc

SEQ ID NO: 105386 - DNA, 20 bp, Artificial Sequence
  Description of Artificial Sequence: Synthetic oligonucleotide
  Target: LAMA2; (-) strand; PAM type: NRG; PAM sequence: AAG
tttcaataccgactatacat

SEQ ID NO: 105387 - DNA, 20 bp, Artificial Sequence
  Description of Artificial Sequence: Synthetic oligonucleotide
  Target: LAMA2; (-) strand; PAM type: NRG; PAM sequence: CAG
aaaatccaaacaggaccact

SEQ ID NO: 105388 - DNA, 20 bp, Artificial Sequence
  Description of Artificial Sequence: Synthetic oligonucleotide
  Target: LAMA2; (-) strand; PAM type: NRG; PAM sequence: AGG
catacaaggaaaatccaaac

SEQ ID NO: 105389 - DNA, 20 bp, Artificial Sequence
  Description of Artificial Sequence: Synthetic oligonucleotide
  Target: LAMA2; (-) strand; PAM type: NRG; PAM sequence: CAG
acatacaaggaaaatccaaa

SEQ ID NO: 105390 - DNA, 20 bp, Artificial Sequence
  Description of Artificial Sequence: Synthetic oligonucleotide
  Target: LAMA2; (-) strand; PAM type: NRG; PAM sequence: AGG
agttaaacgtggcacataca

SEQ ID NO: 105391 - DNA, 20 bp, Artificial Sequence
  Description of Artificial Sequence: Synthetic oligonucleotide
  Target: LAMA2; (-) strand; PAM type: NRG; PAM sequence: AAG
tagttaaacgtggcacatac

SEQ ID NO: 105392 - DNA, 20 bp, Artificial Sequence
  Description of Artificial Sequence: Synthetic oligonucleotide
  Target: LAMA2; (-) strand; PAM type: NRG; PAM sequence: TGG
aacaagtctttagttaaacg

SEQ ID NO: 105393 - DNA, 20 bp, Artificial Sequence
  Description of Artificial Sequence: Synthetic oligonucleotide
  Target: LAMA2; (-) strand; PAM type: NRG; PAM sequence: TAG
gtaacttttaaacaagtctt

SEQ ID NO: 105394 - DNA, 20 bp, Artificial Sequence
  Description of Artificial Sequence: Synthetic oligonucleotide
  Target: LAMA2; (-) strand; PAM type: NRG; PAM sequence: AAG
ttatccagtaacttttaaac

SEQ ID NO: 105395 - DNA, 20 bp, Artificial Sequence
  Description of Artificial Sequence: Synthetic oligonucleotide
  Target: LAMA2; (-) strand; PAM type: NRG; PAM sequence: CAG
gttagtttatctattttatc

SEQ ID NO: 105396 - DNA, 20 bp, Artificial Sequence
  Description of Artificial Sequence: Synthetic oligonucleotide
  Target: LAMA2; (-) strand; PAM type: NRG; PAM sequence: TAG
cttattcatattgattcagt

SEQ ID NO: 105397 - DNA, 20 bp, Artificial Sequence
  Description of Artificial Sequence: Synthetic oligonucleotide
  Target: LAMA2; (-) strand; PAM type: NRG; PAM sequence: CAG
atgccttattcatattgatt

SEQ ID NO: 105398 - DNA, 20 bp, Artificial Sequence
  Description of Artificial Sequence: Synthetic oligonucleotide
  Target: LAMA2; (-) strand; PAM type: NRG; PAM sequence: AAG
ccaaattatttatttggttt

SEQ ID NO: 105399 - DNA, 20 bp, Artificial Sequence
  Description of Artificial Sequence: Synthetic oligonucleotide
  Target: LAMA2; (-) strand; PAM type: NRG; PAM sequence: TGG
cagcaaccaaattatttatt

SEQ ID NO: 105400 - DNA, 20 bp, Artificial Sequence
  Description of Artificial Sequence: Synthetic oligonucleotide
  Target: LAMA2; (-) strand; PAM type: NRG; PAM sequence: CAG
gtgattttcagccattttgg

SEQ ID NO: 105401 - DNA, 20 bp, Artificial Sequence
  Description of Artificial Sequence: Synthetic oligonucleotide
  Target: LAMA2; (-) strand; PAM type: NRG; PAM sequence: TGG
catgtgattttcagccattt

SEQ ID NO: 105402 - DNA, 20 bp, Artificial Sequence
  Description of Artificial Sequence: Synthetic oligonucleotide
  Target: LAMA2; (-) strand; PAM type: NRG; PAM sequence: CAG
caaacaccccatgtgatttt

SEQ ID NO: 105403 - DNA, 20 bp, Artificial Sequence
  Description of Artificial Sequence: Synthetic oligonucleotide
  Target: LAMA2; (-) strand; PAM type: NRG; PAM sequence: TGG
tgggagcccatgaaacctgt

SEQ ID NO: 105404 - DNA, 20 bp, Artificial Sequence
  Description of Artificial Sequence: Synthetic oligonucleotide
  Target: LAMA2; (-) strand; PAM type: NRG; PAM sequence: GAG
tacacagactctctaggtgg

SEQ ID NO: 105405 - DNA, 20 bp, Artificial Sequence
  Description of Artificial Sequence: Synthetic oligonucleotide
  Target: LAMA2; (-) strand; PAM type: NRG; PAM sequence: GGG
cctacacagactctctaggt

SEQ ID NO: 105406 - DNA, 20 bp, Artificial Sequence
  Description of Artificial Sequence: Synthetic oligonucleotide
  Target: LAMA2; (-) strand; PAM type: NRG; PAM sequence: TGG
gcctacacagactctctagg

SEQ ID NO: 105407 - DNA, 20 bp, Artificial Sequence
  Description of Artificial Sequence: Synthetic oligonucleotide
  Target: LAMA2; (-) strand; PAM type: NRG; PAM sequence: AGG
gcagcctacacagactctct

SEQ ID NO: 105408 - DNA, 20 bp, Artificial Sequence
  Description of Artificial Sequence: Synthetic oligonucleotide
  Target: LAMA2; (-) strand; PAM type: NRG; PAM sequence: TAG
agcagcctacacagactctc

SEQ ID NO: 105409 - DNA, 20 bp, Artificial Sequence
  Description of Artificial Sequence: Synthetic oligonucleotide
  Target: LAMA2; (-) strand; PAM type: NRG; PAM sequence: CAG
aaaccccagagcagcctaca

SEQ ID NO: 105410 - DNA, 20 bp, Artificial Sequence
  Description of Artificial Sequence: Synthetic oligonucleotide
  Target: LAMA2; (-) strand; PAM type: NRG; PAM sequence: CAG
catggggccaaaccccagag

SEQ ID NO: 105411 - DNA, 20 bp, Artificial Sequence
  Description of Artificial Sequence: Synthetic oligonucleotide
  Target: LAMA2; (-) strand; PAM type: NRG; PAM sequence: GAG
acacatggggccaaacccca

SEQ ID NO: 105412 - DNA, 20 bp, Artificial Sequence
  Description of Artificial Sequence: Synthetic oligonucleotide
  Target: LAMA2; (-) strand; PAM type: NRG; PAM sequence: CAG
gtacacatggggccaaaccc

SEQ ID NO: 105413 - DNA, 20 bp, Artificial Sequence
  Description of Artificial Sequence: Synthetic oligonucleotide
  Target: LAMA2; (-) strand; PAM type: NRG; PAM sequence: GGG
agtgttagaatgtacacatg

SEQ ID NO: 105414 - DNA, 20 bp, Artificial Sequence
  Description of Artificial Sequence: Synthetic oligonucleotide
  Target: LAMA2; (-) strand; PAM type: NRG; PAM sequence: GGG
gagtgttagaatgtacacat

SEQ ID NO: 105415 - DNA, 20 bp, Artificial Sequence
  Description of Artificial Sequence: Synthetic oligonucleotide
  Target: LAMA2; (-) strand; PAM type: NRG; PAM sequence: TGG
agagtgttagaatgtacaca

SEQ ID NO: 105416 - DNA, 20 bp, Artificial Sequence
  Description of Artificial Sequence: Synthetic oligonucleotide
  Target: LAMA2; (-) strand; PAM type: NRG; PAM sequence: TAG
gattagcccagggagagtgt

SEQ ID NO: 105417 - DNA, 20 bp, Artificial Sequence
  Description of Artificial Sequence: Synthetic oligonucleotide
  Target: LAMA2; (-) strand; PAM type: NRG; PAM sequence: GAG
gcatcagattagcccaggga

SEQ ID NO: 105418 - DNA, 20 bp, Artificial Sequence
  Description of Artificial Sequence: Synthetic oligonucleotide
  Target: LAMA2; (-) strand; PAM type: NRG; PAM sequence: GAG
aggcatcagattagcccagg

SEQ ID NO: 105419 - DNA, 20 bp, Artificial Sequence
  Description of Artificial Sequence: Synthetic oligonucleotide
  Target: LAMA2; (-) strand; PAM type: NRG; PAM sequence: GGG
ataggcatcagattagccca

SEQ ID NO: 105420 - DNA, 20 bp, Artificial Sequence
  Description of Artificial Sequence: Synthetic oligonucleotide
  Target: LAMA2; (-) strand; PAM type: NRG; PAM sequence: AGG
tataggcatcagattagccc

SEQ ID NO: 105421 - DNA, 20 bp, Artificial Sequence
  Description of Artificial Sequence: Synthetic oligonucleotide
  Target: LAMA2; (-) strand; PAM type: NRG; PAM sequence: CAG
gtataggcatcagattagcc

SEQ ID NO: 105422 - DNA, 20 bp, Artificial Sequence
  Description of Artificial Sequence: Synthetic oligonucleotide
  Target: LAMA2; (-) strand; PAM type: NRG; PAM sequence: TAG
aacctgtataggcatcagat

SEQ ID NO: 105423 - DNA, 20 bp, Artificial Sequence
  Description of Artificial Sequence: Synthetic oligonucleotide
  Target: LAMA2; (-) strand; PAM type: NRG; PAM sequence: CAG
cctcgaacctgtataggcat

SEQ ID NO: 105424 - DNA, 20 bp, Artificial Sequence
  Description of Artificial Sequence: Synthetic oligonucleotide
  Target: LAMA2; (-) strand; PAM type: NRG; PAM sequence: AGG
agttttcctcgaacctgtat

SEQ ID NO: 105425 - DNA, 20 bp, Artificial Sequence
  Description of Artificial Sequence: Synthetic oligonucleotide
  Target: LAMA2; (-) strand; PAM type: NRG; PAM sequence: TAG
cagttttcctcgaacctgta

SEQ ID NO: 105426 - DNA, 20 bp, Artificial Sequence
  Description of Artificial Sequence: Synthetic oligonucleotide
  Target: LAMA2; (-) strand; PAM type: NRG; PAM sequence: CAG
atcaaatagatgcaatgtgt

SEQ ID NO: 105427 - DNA, 20 bp, Artificial Sequence
  Description of Artificial Sequence: Synthetic oligonucleotide
  Target: LAMA2; (-) strand; PAM type: NRG; PAM sequence: TAG
cagcttattattcaatcaaa

SEQ ID NO: 105428 - DNA, 20 bp, Artificial Sequence
  Description of Artificial Sequence: Synthetic oligonucleotide
  Target: LAMA2; (-) strand; PAM type: NRG; PAM sequence: CAG
ggagttatttatttaaaatg

SEQ ID NO: 105429 - DNA, 20 bp, Artificial Sequence
  Description of Artificial Sequence: Synthetic oligonucleotide
  Target: LAMA2; (-) strand; PAM type: NRG; PAM sequence: GAG
ttgtggacacagttataagg

SEQ ID NO: 105430 - DNA, 20 bp, Artificial Sequence
  Description of Artificial Sequence: Synthetic oligonucleotide
  Target: LAMA2; (-) strand; PAM type: NRG; PAM sequence: GGG
cattgtggacacagttataa

SEQ ID NO: 105431 - DNA, 20 bp, Artificial Sequence
  Description of Artificial Sequence: Synthetic oligonucleotide
  Target: LAMA2; (-) strand; PAM type: NRG; PAM sequence: AGG
tcattgtggacacagttata

SEQ ID NO: 105432 - DNA, 20 bp, Artificial Sequence
  Description of Artificial Sequence: Synthetic oligonucleotide
  Target: LAMA2; (-) strand; PAM type: NRG; PAM sequence: AAG
ttcattgtggacacagttat

SEQ ID NO: 105433 - DNA, 20 bp, Artificial Sequence
  Description of Artificial Sequence: Synthetic oligonucleotide
  Target: LAMA2; (-) strand; PAM type: NRG; PAM sequence: CAG
tgttaccttcattgtggaca

SEQ ID NO: 105434 - DNA, 20 bp, Artificial Sequence
  Description of Artificial Sequence: Synthetic oligonucleotide
  Target: LAMA2; (-) strand; PAM type: NRG; PAM sequence: TGG
taattgtgttaccttcattg

SEQ ID NO: 105435 - DNA, 20 bp, Artificial Sequence
  Description of Artificial Sequence: Synthetic oligonucleotide
  Target: LAMA2; (-) strand; PAM type: NRG; PAM sequence: GGG
aaataaaaagtttttgagtt

SEQ ID NO: 105436 - DNA, 20 bp, Artificial Sequence
  Description of Artificial Sequence: Synthetic oligonucleotide
  Target: LAMA2; (-) strand; PAM type: NRG; PAM sequence: TGG
taaataaaaagtttttgagt

SEQ ID NO: 105437 - DNA, 20 bp, Artificial Sequence
  Description of Artificial Sequence: Synthetic oligonucleotide
  Target: LAMA2; (-) strand; PAM type: NRG; PAM sequence: GAG
aaaataaataaaaagttttt

SEQ ID NO: 105438 - DNA, 20 bp, Artificial Sequence
  Description of Artificial Sequence: Synthetic oligonucleotide
  Target: LAMA2; (-) strand; PAM type: NRG; PAM sequence: AAG
gccaccttaaaataaataaa

SEQ ID NO: 105439 - DNA, 20 bp, Artificial Sequence
  Description of Artificial Sequence: Synthetic oligonucleotide
  Target: LAMA2; (-) strand; PAM type: NRG; PAM sequence: AAG
ggcttgataaaatttttaaa

SEQ ID NO: 105440 - DNA, 20 bp, Artificial Sequence
  Description of Artificial Sequence: Synthetic oligonucleotide
  Target: LAMA2; (-) strand; PAM type: NRG; PAM sequence: AGG
acgtttcctgaatgaattag

SEQ ID NO: 105441 - DNA, 20 bp, Artificial Sequence
  Description of Artificial Sequence: Synthetic oligonucleotide
  Target: LAMA2; (-) strand; PAM type: NRG; PAM sequence: GAG
cacgtttcctgaatgaatta

SEQ ID NO: 105442 - DNA, 20 bp, Artificial Sequence
  Description of Artificial Sequence: Synthetic oligonucleotide
  Target: LAMA2; (-) strand; PAM type: NRG; PAM sequence: TAG
agcacgtttcctgaatgaat

SEQ ID NO: 105443 - DNA, 20 bp, Artificial Sequence
  Description of Artificial Sequence: Synthetic oligonucleotide
  Target: LAMA2; (-) strand; PAM type: NRG; PAM sequence: TAG
acacaatcaattttggtgtc

SEQ ID NO: 105444 - DNA, 20 bp, Artificial Sequence
  Description of Artificial Sequence: Synthetic oligonucleotide
  Target: LAMA2; (-) strand; PAM type: NRG; PAM sequence: TGG
atcactgacacaatcaattt

SEQ ID NO: 105445 - DNA, 20 bp, Artificial Sequence
  Description of Artificial Sequence: Synthetic oligonucleotide
  Target: LAMA2; (-) strand; PAM type: NRG; PAM sequence: GGG
ctgaggctgctgctctaagg

SEQ ID NO: 105446 - DNA, 20 bp, Artificial Sequence
  Description of Artificial Sequence: Synthetic oligonucleotide
  Target: LAMA2; (-) strand; PAM type: NRG; PAM sequence: GGG
gctgaggctgctgctctaag

SEQ ID NO: 105447 - DNA, 20 bp, Artificial Sequence
  Description of Artificial Sequence: Synthetic oligonucleotide
  Target: LAMA2; (-) strand; PAM type: NRG; PAM sequence: GGG
cgctgaggctgctgctctaa

SEQ ID NO: 105448 - DNA, 20 bp, Artificial Sequence
  Description of Artificial Sequence: Synthetic oligonucleotide
  Target: LAMA2; (-) strand; PAM type: NRG; PAM sequence: AGG
acgctgaggctgctgctcta

SEQ ID NO: 105449 - DNA, 20 bp, Artificial Sequence
  Description of Artificial Sequence: Synthetic oligonucleotide
  Target: LAMA2; (-) strand; PAM type: NRG; PAM sequence: AAG
tacgctgaggctgctgctct

SEQ ID NO: 105450 - DNA, 20 bp, Artificial Sequence
  Description of Artificial Sequence: Synthetic oligonucleotide
  Target: LAMA2; (-) strand; PAM type: NRG; PAM sequence: AGG
caagttgctaggttacgctg

SEQ ID NO: 105451 - DNA, 20 bp, Artificial Sequence
  Description of Artificial Sequence: Synthetic oligonucleotide
  Target: LAMA2; (-) strand; PAM type: NRG; PAM sequence: GAG
acaagttgctaggttacgct

SEQ ID NO: 105452 - DNA, 20 bp, Artificial Sequence
  Description of Artificial Sequence: Synthetic oligonucleotide
  Target: LAMA2; (-) strand; PAM type: NRG; PAM sequence: AGG
tgtctttttgacaagttgct

SEQ ID NO: 105453 - DNA, 20 bp, Artificial Sequence
  Description of Artificial Sequence: Synthetic oligonucleotide
  Target: LAMA2; (-) strand; PAM type: NRG; PAM sequence: TAG
ttgtctttttgacaagttgc

SEQ ID NO: 105454 - DNA, 20 bp, Artificial Sequence
  Description of Artificial Sequence: Synthetic oligonucleotide
  Target: LAMA2; (-) strand; PAM type: NRG; PAM sequence: AAG
caagaatttgtctttttgac

SEQ ID NO: 105455 - DNA, 20 bp, Artificial Sequence
  Description of Artificial Sequence: Synthetic oligonucleotide
  Target: LAMA2; (-) strand; PAM type: NRG; PAM sequence: AAG
gtcatttagggatggggtcc

SEQ ID NO: 105456 - DNA, 20 bp, Artificial Sequence
  Description of Artificial Sequence: Synthetic oligonucleotide
  Target: LAMA2; (-) strand; PAM type: NRG; PAM sequence: GGG
gagttggtcatttagggatg

SEQ ID NO: 105457 - DNA, 20 bp, Artificial Sequence
  Description of Artificial Sequence: Synthetic oligonucleotide
  Target: LAMA2; (-) strand; PAM type: NRG; PAM sequence: GGG
tgagttggtcatttagggat

SEQ ID NO: 105458 - DNA, 20 bp, Artificial Sequence
  Description of Artificial Sequence: Synthetic oligonucleotide
  Target: LAMA2; (-) strand; PAM type: NRG; PAM sequence: TGG
ctgagttggtcatttaggga

SEQ ID NO: 105459 - DNA, 20 bp, Artificial Sequence
  Description of Artificial Sequence: Synthetic oligonucleotide
  Target: LAMA2; (-) strand; PAM type: NRG; PAM sequence: GGG
gtttctgagttggtcattta

SEQ ID NO: 105460 - DNA, 20 bp, Artificial Sequence
  Description of Artificial Sequence: Synthetic oligonucleotide
  Target: LAMA2; (-) strand; PAM type: NRG; PAM sequence: AGG
agtttctgagttggtcattt

SEQ ID NO: 105461 - DNA, 20 bp, Artificial Sequence
  Description of Artificial Sequence: Synthetic oligonucleotide
  Target: LAMA2; (-) strand; PAM type: NRG; PAM sequence: TAG
gagtttctgagttggtcatt

SEQ ID NO: 105462 - DNA, 20 bp, Artificial Sequence
  Description of Artificial Sequence: Synthetic oligonucleotide
  Target: LAMA2; (-) strand; PAM type: NRG; PAM sequence: TGG
cattctcagagtttctgagt

SEQ ID NO: 105463 - DNA, 20 bp, Artificial Sequence
  Description of Artificial Sequence: Synthetic oligonucleotide
  Target: LAMA2; (-) strand; PAM type: NRG; PAM sequence: GAG
gccccattctcagagtttct

SEQ ID NO: 105464 - DNA, 20 bp, Artificial Sequence
  Description of Artificial Sequence: Synthetic oligonucleotide
  Target: LAMA2; (-) strand; PAM type: NRG; PAM sequence: GAG
atttctgggccccattctca

SEQ ID NO: 105465 - DNA, 20 bp, Artificial Sequence
  Description of Artificial Sequence: Synthetic oligonucleotide
  Target: LAMA2; (-) strand; PAM type: NRG; PAM sequence: CAG
ggatttctgggccccattct

SEQ ID NO: 105466 - DNA, 20 bp, Artificial Sequence
  Description of Artificial Sequence: Synthetic oligonucleotide
  Target: LAMA2; (-) strand; PAM type: NRG; PAM sequence: GGG
tttttaaaacacggatttct

SEQ ID NO: 105467 - DNA, 20 bp, Artificial Sequence
  Description of Artificial Sequence: Synthetic oligonucleotide
  Target: LAMA2; (-) strand; PAM type: NRG; PAM sequence: TGG
atttttaaaacacggatttc

SEQ ID NO: 105468 - DNA, 20 bp, Artificial Sequence
  Description of Artificial Sequence: Synthetic oligonucleotide
  Target: LAMA2; (-) strand; PAM type: NRG; PAM sequence: CGG
ctggaggaatttttaaaaca

SEQ ID NO: 105469 - DNA, 20 bp, Artificial Sequence
  Description of Artificial Sequence: Synthetic oligonucleotide
  Target: LAMA2; (-) strand; PAM type: NRG; PAM sequence: AGG
agctgcatcttaatcactgg

SEQ ID NO: 105470 - DNA, 20 bp, Artificial Sequence
  Description of Artificial Sequence: Synthetic oligonucleotide
  Target: LAMA2; (-) strand; PAM type: NRG; PAM sequence: GAG
aagctgcatcttaatcactg

SEQ ID NO: 105471 - DNA, 20 bp, Artificial Sequence
  Description of Artificial Sequence: Synthetic oligonucleotide
  Target: LAMA2; (-) strand; PAM type: NRG; PAM sequence: TGG
tgaagctgcatcttaatcac

SEQ ID NO: 105472 - DNA, 20 bp, Artificial Sequence
  Description of Artificial Sequence: Synthetic oligonucleotide
  Target: LAMA2; (-) strand; PAM type: NRG; PAM sequence: AAG
acccgtggttctcaaccttg

SEQ ID NO: 105473 - DNA, 20 bp, Artificial Sequence
  Description of Artificial Sequence: Synthetic oligonucleotide
  Target: LAMA2; (-) strand; PAM type: NRG; PAM sequence: TGG
tgttttagtgtttatacccg

SEQ ID NO: 105474 - DNA, 20 bp, Artificial Sequence
  Description of Artificial Sequence: Synthetic oligonucleotide
  Target: LAMA2; (-) strand; PAM type: NRG; PAM sequence: TAG
agtaatcagagatggtgttt

SEQ ID NO: 105475 - DNA, 20 bp, Artificial Sequence
  Description of Artificial Sequence: Synthetic oligonucleotide
  Target: LAMA2; (-) strand; PAM type: NRG; PAM sequence: TGG
ttacttgaagtaatcagaga

SEQ ID NO: 105476 - DNA, 20 bp, Artificial Sequence
  Description of Artificial Sequence: Synthetic oligonucleotide
  Target: LAMA2; (-) strand; PAM type: NRG; PAM sequence: GAG
caagttacttgaagtaatca

SEQ ID NO: 105477 - DNA, 20 bp, Artificial Sequence
  Description of Artificial Sequence: Synthetic oligonucleotide
  Target: LAMA2; (-) strand; PAM type: NRG; PAM sequence: CAG
tacaagttacttgaagtaat

SEQ ID NO: 105478 - DNA, 20 bp, Artificial Sequence
  Description of Artificial Sequence: Synthetic oligonucleotide
  Target: LAMA2; (-) strand; PAM type: NRG; PAM sequence: AAG
cactaaatacaagttacttg

SEQ ID NO: 105479 - DNA, 20 bp, Artificial Sequence
  Description of Artificial Sequence: Synthetic oligonucleotide
  Target: LAMA2; (-) strand; PAM type: NRG; PAM sequence: AAG
gtgtacctcccactaaatac

SEQ ID NO: 105480 - DNA, 20 bp, Artificial Sequence
  Description of Artificial Sequence: Synthetic oligonucleotide
  Target: LAMA2; (-) strand; PAM type: NRG; PAM sequence: TGG
aattatggtagcgtatggag

SEQ ID NO: 105481 - DNA, 20 bp, Artificial Sequence
  Description of Artificial Sequence: Synthetic oligonucleotide
  Target: LAMA2; (-) strand; PAM type: NRG; PAM sequence: GAG
gataattatggtagcgtatg

SEQ ID NO: 105482 - DNA, 20 bp, Artificial Sequence
  Description of Artificial Sequence: Synthetic oligonucleotide
  Target: LAMA2; (-) strand; PAM type: NRG; PAM sequence: TGG
gtgataattatggtagcgta

SEQ ID NO: 105483 - DNA, 20 bp, Artificial Sequence
  Description of Artificial Sequence: Synthetic oligonucleotide
  Target: LAMA2; (-) strand; PAM type: NRG; PAM sequence: TAG
tacgcctgtgataattatgg

SEQ ID NO: 105484 - DNA, 20 bp, Artificial Sequence
  Description of Artificial Sequence: Synthetic oligonucleotide
  Target: LAMA2; (-) strand; PAM type: NRG; PAM sequence: TGG
gcttacgcctgtgataatta

SEQ ID NO: 105485 - DNA, 20 bp, Artificial Sequence
  Description of Artificial Sequence: Synthetic oligonucleotide
  Target: LAMA2; (-) strand; PAM type: NRG; PAM sequence: TAG
tcctaaactcaggggtgact

SEQ ID NO: 105486 - DNA, 20 bp, Artificial Sequence
  Description of Artificial Sequence: Synthetic oligonucleotide
  Target: LAMA2; (-) strand; PAM type: NRG; PAM sequence: GGG
aaagctcttcctaaactcag

SEQ ID NO: 105487 - DNA, 20 bp, Artificial Sequence
  Description of Artificial Sequence: Synthetic oligonucleotide
  Target: LAMA2; (-) strand; PAM type: NRG; PAM sequence: GGG
caaagctcttcctaaactca

SEQ ID NO: 105488 - DNA, 20 bp, Artificial Sequence
  Description of Artificial Sequence: Synthetic oligonucleotide
  Target: LAMA2; (-) strand; PAM type: NRG; PAM sequence: AGG
acaaagctcttcctaaactc

SEQ ID NO: 105489 - DNA, 20 bp, Artificial Sequence
  Description of Artificial Sequence: Synthetic oligonucleotide
  Target: LAMA2; (-) strand; PAM type: NRG; PAM sequence: CAG
tacaaagctcttcctaaact

SEQ ID NO: 105490 - DNA, 20 bp, Artificial Sequence
  Description of Artificial Sequence: Synthetic oligonucleotide
  Target: LAMA2; (-) strand; PAM type: NRG; PAM sequence: AAG
caagtgtcagggcctctaca

SEQ ID NO: 105491 - DNA, 20 bp, Artificial Sequence
  Description of Artificial Sequence: Synthetic oligonucleotide
  Target: LAMA2; (-) strand; PAM type: NRG; PAM sequence: GGG
aggatctagcacaagtgtca

SEQ ID NO: 105492 - DNA, 20 bp, Artificial Sequence
  Description of Artificial Sequence: Synthetic oligonucleotide
  Target: LAMA2; (-) strand; PAM type: NRG; PAM sequence: AGG
taggatctagcacaagtgtc

SEQ ID NO: 105493 - DNA, 20 bp, Artificial Sequence
  Description of Artificial Sequence: Synthetic oligonucleotide
  Target: LAMA2; (-) strand; PAM type: NRG; PAM sequence: CAG
ttaggatctagcacaagtgt

SEQ ID NO: 105494 - DNA, 20 bp, Artificial Sequence
  Description of Artificial Sequence: Synthetic oligonucleotide
  Target: LAMA2; (-) strand; PAM type: NRG; PAM sequence: AAG
tatcctttaggatctagcac

SEQ ID NO: 105495 - DNA, 20 bp, Artificial Sequence
  Description of Artificial Sequence: Synthetic oligonucleotide
  Target: LAMA2; (-) strand; PAM type: NRG; PAM sequence: TAG
agtgcttatcctttaggatc

SEQ ID NO: 105496 - DNA, 20 bp, Artificial Sequence
  Description of Artificial Sequence: Synthetic oligonucleotide
  Target: LAMA2; (-) strand; PAM type: NRG; PAM sequence: AGG
tgacccagtgcttatccttt

SEQ ID NO: 105497 - DNA, 20 bp, Artificial Sequence
  Description of Artificial Sequence: Synthetic oligonucleotide
  Target: LAMA2; (-) strand; PAM type: NRG; PAM sequence: TAG
gtgacccagtgcttatcctt

SEQ ID NO: 105498 - DNA, 20 bp, Artificial Sequence
  Description of Artificial Sequence: Synthetic oligonucleotide
  Target: LAMA2; (-) strand; PAM type: NRG; PAM sequence: CAG
ctctttattcttctgtgacc

SEQ ID NO: 105499 - DNA, 20 bp, Artificial Sequence
  Description of Artificial Sequence: Synthetic oligonucleotide
  Target: LAMA2; (-) strand; PAM type: NRG; PAM sequence: CAG
gcctttgtatatgtttttcc

SEQ ID NO: 105500 - DNA, 20 bp, Artificial Sequence
  Description of Artificial Sequence: Synthetic oligonucleotide
  Target: LAMA2; (-) strand; PAM type: NRG; PAM sequence: AAG
tcacatgcagtcttctttcc

SEQ ID NO: 105501 - DNA, 20 bp, Artificial Sequence
  Description of Artificial Sequence: Synthetic oligonucleotide
  Target: LAMA2; (-) strand; PAM type: NRG; PAM sequence: CAG
tcccttcagtcgttcacatg

SEQ ID NO: 105502 - DNA, 20 bp, Artificial Sequence
  Description of Artificial Sequence: Synthetic oligonucleotide
  Target: LAMA2; (-) strand; PAM type: NRG; PAM sequence: CAG
tctctttctttctatccctt

SEQ ID NO: 105503 - DNA, 20 bp, Artificial Sequence
  Description of Artificial Sequence: Synthetic oligonucleotide
  Target: LAMA2; (-) strand; PAM type: NRG; PAM sequence: AGG
tgcgattctcttataactga

SEQ ID NO: 105504 - DNA, 20 bp, Artificial Sequence
  Description of Artificial Sequence: Synthetic oligonucleotide
  Target: LAMA2; (-) strand; PAM type: NRG; PAM sequence: AAG
atgcgattctcttataactg

SEQ ID NO: 105505 - DNA, 20 bp, Artificial Sequence
  Description of Artificial Sequence: Synthetic oligonucleotide
  Target: LAMA2; (-) strand; PAM type: NRG; PAM sequence: TAG
taaaaaccaattccttagct

SEQ ID NO: 105506 - DNA, 20 bp, Artificial Sequence
  Description of Artificial Sequence: Synthetic oligonucleotide
  Target: LAMA2; (-) strand; PAM type: NRG; PAM sequence: TAG
caggataaaaaccaattcct

SEQ ID NO: 105507 - DNA, 20 bp, Artificial Sequence
  Description of Artificial Sequence: Synthetic oligonucleotide
  Target: LAMA2; (-) strand; PAM type: NRG; PAM sequence: AGG
aattgcttcctatggctctc

SEQ ID NO: 105508 - DNA, 20 bp, Artificial Sequence
  Description of Artificial Sequence: Synthetic oligonucleotide
  Target: LAMA2; (-) strand; PAM type: NRG; PAM sequence: CAG
caattgcttcctatggctct

SEQ ID NO: 105509 - DNA, 20 bp, Artificial Sequence
  Description of Artificial Sequence: Synthetic oligonucleotide
  Target: LAMA2; (-) strand; PAM type: NRG; PAM sequence: TGG
aatatttcaattgcttccta

SEQ ID NO: 105510 - DNA, 20 bp, Artificial Sequence
  Description of Artificial Sequence: Synthetic oligonucleotide
  Target: LAMA2; (-) strand; PAM type: NRG; PAM sequence: GAG
accatttattcagtttaagt

SEQ ID NO: 105511 - DNA, 20 bp, Artificial Sequence
  Description of Artificial Sequence: Synthetic oligonucleotide
  Target: LAMA2; (-) strand; PAM type: NRG; PAM sequence: AAG
aaaaaccatttattcagttt

SEQ ID NO: 105512 - DNA, 20 bp, Artificial Sequence
  Description of Artificial Sequence: Synthetic oligonucleotide
  Target: LAMA2; (-) strand; PAM type: NRG; PAM sequence: CAG
ccgataaaaaaccatttatt

SEQ ID NO: 105513 - DNA, 20 bp, Artificial Sequence
  Description of Artificial Sequence: Synthetic oligonucleotide
  Target: LAMA2; (-) strand; PAM type: NRG; PAM sequence: TAG
attatcccagcctacttttc

SEQ ID NO: 105514 - DNA, 20 bp, Artificial Sequence
  Description of Artificial Sequence: Synthetic oligonucleotide
  Target: LAMA2; (-) strand; PAM type: NRG; PAM sequence: CAG
tatgtagataaatattatcc

SEQ ID NO: 105515 - DNA, 20 bp, Artificial Sequence
  Description of Artificial Sequence: Synthetic oligonucleotide
  Target: LAMA2; (-) strand; PAM type: NRG; PAM sequence: TAG
gtaggtacctgacagatatg

SEQ ID NO: 105516 - DNA, 20 bp, Artificial Sequence
  Description of Artificial Sequence: Synthetic oligonucleotide
  Target: LAMA2; (-) strand; PAM type: NRG; PAM sequence: CAG
ttgatatggtaggtacctga

SEQ ID NO: 105517 - DNA, 20 bp, Artificial Sequence
  Description of Artificial Sequence: Synthetic oligonucleotide
  Target: LAMA2; (-) strand; PAM type: NRG; PAM sequence: AGG
caacagtaccttgatatggt

SEQ ID NO: 105518 - DNA, 20 bp, Artificial Sequence
  Description of Artificial Sequence: Synthetic oligonucleotide
  Target: LAMA2; (-) strand; PAM type: NRG; PAM sequence: TAG
ccaacagtaccttgatatgg

SEQ ID NO: 105519 - DNA, 20 bp, Artificial Sequence
  Description of Artificial Sequence: Synthetic oligonucleotide
  Target: LAMA2; (-) strand; PAM type: NRG; PAM sequence: TGG
ttaccaacagtaccttgata

SEQ ID NO: 105520 - DNA, 20 bp, Artificial Sequence
  Description of Artificial Sequence: Synthetic oligonucleotide
  Target: LAMA2; (-) strand; PAM type: NRG; PAM sequence: CAG
tcaaataccctggttaccaa

SEQ ID NO: 105521 - DNA, 20 bp, Artificial Sequence
  Description of Artificial Sequence: Synthetic oligonucleotide
  Target: LAMA2; (-) strand; PAM type: NRG; PAM sequence: TGG
ctattcaacctcaaataccc

SEQ ID NO: 105522 - DNA, 20 bp, Artificial Sequence
  Description of Artificial Sequence: Synthetic oligonucleotide
  Target: LAMA2; (-) strand; PAM type: NRG; PAM sequence: AGG
gttgtaaattctttgaggcc

SEQ ID NO: 105523 - DNA, 20 bp, Artificial Sequence
  Description of Artificial Sequence: Synthetic oligonucleotide
  Target: LAMA2; (-) strand; PAM type: NRG; PAM sequence: CAG
ggttgtaaattctttgaggc

SEQ ID NO: 105524 - DNA, 20 bp, Artificial Sequence
  Description of Artificial Sequence: Synthetic oligonucleotide
  Target: LAMA2; (-) strand; PAM type: NRG; PAM sequence: AGG
aggaggttgtaaattctttg

SEQ ID NO: 105525 - DNA, 20 bp, Artificial Sequence
  Description of Artificial Sequence: Synthetic oligonucleotide
  Target: LAMA2; (-) strand; PAM type: NRG; PAM sequence: GAG
caggaggttgtaaattcttt

SEQ ID NO: 105526 - DNA, 20 bp, Artificial Sequence
  Description of Artificial Sequence: Synthetic oligonucleotide
  Target: LAMA2; (-) strand; PAM type: NRG; PAM sequence: AGG
acatgtctgaatttttcagg

SEQ ID NO: 105527 - DNA, 20 bp, Artificial Sequence
  Description of Artificial Sequence: Synthetic oligonucleotide
  Target: LAMA2; (-) strand; PAM type: NRG; PAM sequence: GAG
gacatgtctgaatttttcag

SEQ ID NO: 105528 - DNA, 20 bp, Artificial Sequence
  Description of Artificial Sequence: Synthetic oligonucleotide
  Target: LAMA2; (-) strand; PAM type: NRG; PAM sequence: AGG
ttgacatgtctgaatttttc

SEQ ID NO: 105529 - DNA, 20 bp, Artificial Sequence
  Description of Artificial Sequence: Synthetic oligonucleotide
  Target: LAMA2; (-) strand; PAM type: NRG; PAM sequence: CAG
gttgacatgtctgaattttt

SEQ ID NO: 105530 - DNA, 20 bp, Artificial Sequence
  Description of Artificial Sequence: Synthetic oligonucleotide
  Target: LAMA2; (-) strand; PAM type: NRG; PAM sequence: AGG
atagtattatgtagagtgaa

SEQ ID NO: 105531 - DNA, 20 bp, Artificial Sequence
  Description of Artificial Sequence: Synthetic oligonucleotide
  Target: LAMA2; (-) strand; PAM type: NRG; PAM sequence: AAG
catagtattatgtagagtga

SEQ ID NO: 105532 - DNA, 20 bp, Artificial Sequence
  Description of Artificial Sequence: Synthetic oligonucleotide
  Target: LAMA2; (-) strand; PAM type: NRG; PAM sequence: GAG
tattatcatagtattatgta

SEQ ID NO: 105533 - DNA, 20 bp, Artificial Sequence
  Description of Artificial Sequence: Synthetic oligonucleotide
  Target: LAMA2; (-) strand; PAM type: NRG; PAM sequence: TAG
aatattatcatagtattatg

SEQ ID NO: 105534 - DNA, 20 bp, Artificial Sequence
  Description of Artificial Sequence: Synthetic oligonucleotide
  Target: LAMA2; (-) strand; PAM type: NRG; PAM sequence: TAG
tctcccagtcaatattatca

SEQ ID NO: 105535 - DNA, 20 bp, Artificial Sequence
  Description of Artificial Sequence: Synthetic oligonucleotide
  Target: LAMA2; (-) strand; PAM type: NRG; PAM sequence: CAG
gaaacttttgctgaatctcc

SEQ ID NO: 105536 - DNA, 20 bp, Artificial Sequence
  Description of Artificial Sequence: Synthetic oligonucleotide
  Target: LAMA2; (-) strand; PAM type: NRG; PAM sequence: GGG
cacttccaaagctctggctg

SEQ ID NO: 105537 - DNA, 20 bp, Artificial Sequence
  Description of Artificial Sequence: Synthetic oligonucleotide
  Target: LAMA2; (-) strand; PAM type: NRG; PAM sequence: GGG
acacttccaaagctctggct

SEQ ID NO: 105538 - DNA, 20 bp, Artificial Sequence
  Description of Artificial Sequence: Synthetic oligonucleotide
  Target: LAMA2; (-) strand; PAM type: NRG; PAM sequence: TGG
tacacttccaaagctctggc

SEQ ID NO: 105539 - DNA, 20 bp, Artificial Sequence
  Description of Artificial Sequence: Synthetic oligonucleotide
  Target: LAMA2; (-) strand; PAM type: NRG; PAM sequence: TGG
accttacacttccaaagctc

SEQ ID NO: 105540 - DNA, 20 bp, Artificial Sequence
  Description of Artificial Sequence: Synthetic oligonucleotide
  Target: LAMA2; (-) strand; PAM type: NRG; PAM sequence: AAG
aagatcaccttacacttcca

SEQ ID NO: 105541 - DNA, 20 bp, Artificial Sequence
  Description of Artificial Sequence: Synthetic oligonucleotide
  Target: LAMA2; (-) strand; PAM type: NRG; PAM sequence: AAG
tgctgtactggacacttcct

SEQ ID NO: 105542 - DNA, 20 bp, Artificial Sequence
  Description of Artificial Sequence: Synthetic oligonucleotide
  Target: LAMA2; (-) strand; PAM type: NRG; PAM sequence: TGG
tgaaagtttttctgctgtac

SEQ ID NO: 105543 - DNA, 20 bp, Artificial Sequence
  Description of Artificial Sequence: Synthetic oligonucleotide
  Target: LAMA2; (-) strand; PAM type: NRG; PAM sequence: AAG
gatttttacgtagcttttga

SEQ ID NO: 105544 - DNA, 20 bp, Artificial Sequence
  Description of Artificial Sequence: Synthetic oligonucleotide
  Target: LAMA2; (-) strand; PAM type: NRG; PAM sequence: TAG
ctctgctacagatttttacg

SEQ ID NO: 105545 - DNA, 20 bp, Artificial Sequence
  Description of Artificial Sequence: Synthetic oligonucleotide
  Target: LAMA2; (-) strand; PAM type: NRG; PAM sequence: CAG
ttccagagccttctctgcta

SEQ ID NO: 105546 - DNA, 20 bp, Artificial Sequence
  Description of Artificial Sequence: Synthetic oligonucleotide
  Target: LAMA2; (-) strand; PAM type: NRG; PAM sequence: GAG
tgatctggctccaaattcca

SEQ ID NO: 105547 - DNA, 20 bp, Artificial Sequence
  Description of Artificial Sequence: Synthetic oligonucleotide
  Target: LAMA2; (-) strand; PAM type: NRG; PAM sequence: CAG
tatgatctggctccaaattc

SEQ ID NO: 105548 - DNA, 20 bp, Artificial Sequence
  Description of Artificial Sequence: Synthetic oligonucleotide
  Target: LAMA2; (-) strand; PAM type: NRG; PAM sequence: TGG
atccaaagccttctatgatc

SEQ ID NO: 105549 - DNA, 20 bp, Artificial Sequence
  Description of Artificial Sequence: Synthetic oligonucleotide
  Target: LAMA2; (-) strand; PAM type: NRG; PAM sequence: AAG
catctagttggctgcatcca

SEQ ID NO: 105550 - DNA, 20 bp, Artificial Sequence
  Description of Artificial Sequence: Synthetic oligonucleotide
  Target: LAMA2; (-) strand; PAM type: NRG; PAM sequence: TGG
caactccatcaccatctagt

SEQ ID NO: 105551 - DNA, 20 bp, Artificial Sequence
  Description of Artificial Sequence: Synthetic oligonucleotide
  Target: LAMA2; (-) strand; PAM type: NRG; PAM sequence: TAG
tttccaactccatcaccatc

SEQ ID NO: 105552 - DNA, 20 bp, Artificial Sequence
  Description of Artificial Sequence: Synthetic oligonucleotide
  Target: LAMA2; (-) strand; PAM type: NRG; PAM sequence: TGG
cttagccctctctccactgc

SEQ ID NO: 105553 - DNA, 20 bp, Artificial Sequence
  Description of Artificial Sequence: Synthetic oligonucleotide
  Target: LAMA2; (-) strand; PAM type: NRG; PAM sequence: TAG
catgacgtccccagttccct

SEQ ID NO: 105554 - DNA, 20 bp, Artificial Sequence
  Description of Artificial Sequence: Synthetic oligonucleotide
  Target: LAMA2; (-) strand; PAM type: NRG; PAM sequence: CAG
ttttcttcccatgacgtccc

SEQ ID NO: 105555 - DNA, 20 bp, Artificial Sequence
  Description of Artificial Sequence: Synthetic oligonucleotide
  Target: LAMA2; (-) strand; PAM type: NRG; PAM sequence: TAG
tataatggtagatttgggga

SEQ ID NO: 105556 - DNA, 20 bp, Artificial Sequence
  Description of Artificial Sequence: Synthetic oligonucleotide
  Target: LAMA2; (-) strand; PAM type: NRG; PAM sequence: GGG
aggatataatggtagatttg

SEQ ID NO: 105557 - DNA, 20 bp, Artificial Sequence
  Description of Artificial Sequence: Synthetic oligonucleotide
  Target: LAMA2; (-) strand; PAM type: NRG; PAM sequence: GGG
aaggatataatggtagattt

SEQ ID NO: 105558 - DNA, 20 bp, Artificial Sequence
  Description of Artificial Sequence: Synthetic oligonucleotide
  Target: LAMA2; (-) strand; PAM type: NRG; PAM sequence: TGG
caaggatataatggtagatt

SEQ ID NO: 105559 - DNA, 20 bp, Artificial Sequence
  Description of Artificial Sequence: Synthetic oligonucleotide
  Target: LAMA2; (-) strand; PAM type: NRG; PAM sequence: TAG
ctttggcaaggatataatgg

SEQ ID NO: 105560 - DNA, 20 bp, Artificial Sequence
  Description of Artificial Sequence: Synthetic oligonucleotide
  Target: LAMA2; (-) strand; PAM type: NRG; PAM sequence: TGG
cttctttggcaaggatataa

SEQ ID NO: 105561 - DNA, 20 bp, Artificial Sequence
  Description of Artificial Sequence: Synthetic oligonucleotide
  Target: LAMA2; (-) strand; PAM type: NRG; PAM sequence: AGG
ccgcactgccttctttggca

SEQ ID NO: 105562 - DNA, 20 bp, Artificial Sequence
  Description of Artificial Sequence: Synthetic oligonucleotide
  Target: LAMA2; (-) strand; PAM type: NRG; PAM sequence: AAG
tccgcactgccttctttggc

SEQ ID NO: 105563 - DNA, 20 bp, Artificial Sequence
  Description of Artificial Sequence: Synthetic oligonucleotide
  Target: LAMA2; (-) strand; PAM type: NRG; PAM sequence: TGG
ttgatccgcactgccttctt

SEQ ID NO: 105564 - DNA, 20 bp, Artificial Sequence
  Description of Artificial Sequence: Synthetic oligonucleotide
  Target: LAMA2; (-) strand; PAM type: NRG; PAM sequence: TAG
tggcctgtgtattctttatg

SEQ ID NO: 105565 - DNA, 20 bp, Artificial Sequence
  Description of Artificial Sequence: Synthetic oligonucleotide
  Target: LAMA2; (-) strand; PAM type: NRG; PAM sequence: TGG
tgtcaccatgttgctcaggc

SEQ ID NO: 105566 - DNA, 20 bp, Artificial Sequence
  Description of Artificial Sequence: Synthetic oligonucleotide
  Target: LAMA2; (-) strand; PAM type: NRG; PAM sequence: AGG
agggtgtcaccatgttgctc

SEQ ID NO: 105567 - DNA, 20 bp, Artificial Sequence
  Description of Artificial Sequence: Synthetic oligonucleotide
  Target: LAMA2; (-) strand; PAM type: NRG; PAM sequence: CAG
tagggtgtcaccatgttgct

SEQ ID NO: 105568 - DNA, 20 bp, Artificial Sequence
  Description of Artificial Sequence: Synthetic oligonucleotide
  Target: LAMA2; (-) strand; PAM type: NRG; PAM sequence: GGG
tgtatttttctatagagata

SEQ ID NO: 105569 - DNA, 20 bp, Artificial Sequence
  Description of Artificial Sequence: Synthetic oligonucleotide
  Target: LAMA2; (-) strand; PAM type: NRG; PAM sequence: AGG
ttgtatttttctatagagat

SEQ ID NO: 105570 - DNA, 20 bp, Artificial Sequence
  Description of Artificial Sequence: Synthetic oligonucleotide
  Target: LAMA2; (-) strand; PAM type: NRG; PAM sequence: TAG
tttgtatttttctatagaga

SEQ ID NO: 105571 - DNA, 20 bp, Artificial Sequence
  Description of Artificial Sequence: Synthetic oligonucleotide
  Target: LAMA2; (-) strand; PAM type: NRG; PAM sequence: GAG
aatttttgtatttttctata

SEQ ID NO: 105572 - DNA, 20 bp, Artificial Sequence
  Description of Artificial Sequence: Synthetic oligonucleotide
  Target: LAMA2; (-) strand; PAM type: NRG; PAM sequence: TAG
ctaatttttgtatttttcta

SEQ ID NO: 105573 - DNA, 20 bp, Artificial Sequence
  Description of Artificial Sequence: Synthetic oligonucleotide
  Target: LAMA2; (-) strand; PAM type: NRG; PAM sequence: AGG
ctccaagtagctgggaccac

SEQ ID NO: 105574 - DNA, 20 bp, Artificial Sequence
  Description of Artificial Sequence: Synthetic oligonucleotide
  Target: LAMA2; (-) strand; PAM type: NRG; PAM sequence: CAG
cctccaagtagctgggacca

SEQ ID NO: 105575 - DNA, 20 bp, Artificial Sequence
  Description of Artificial Sequence: Synthetic oligonucleotide
  Target: LAMA2; (-) strand; PAM type: NRG; PAM sequence: GGG
acctcagcctccaagtagct

SEQ ID NO: 105576 - DNA, 20 bp, Artificial Sequence
  Description of Artificial Sequence: Synthetic oligonucleotide
  Target: LAMA2; (-) strand; PAM type: NRG; PAM sequence: TGG
cacctcagcctccaagtagc

SEQ ID NO: 105577 - DNA, 20 bp, Artificial Sequence
  Description of Artificial Sequence: Synthetic oligonucleotide
  Target: LAMA2; (-) strand; PAM type: NRG; PAM sequence: TAG
ctcccacctcagcctccaag

SEQ ID NO: 105578 - DNA, 20 bp, Artificial Sequence
  Description of Artificial Sequence: Synthetic oligonucleotide
  Target: LAMA2; (-) strand; PAM type: NRG; PAM sequence: AAG
atcctcccacctcagcctcc

SEQ ID NO: 105579 - DNA, 20 bp, Artificial Sequence
  Description of Artificial Sequence: Synthetic oligonucleotide
  Target: LAMA2; (-) strand; PAM type: NRG; PAM sequence: CAG
ctcaagcaatcctcccacct

SEQ ID NO: 105580 - DNA, 20 bp, Artificial Sequence
  Description of Artificial Sequence: Synthetic oligonucleotide
  Target: LAMA2; (-) strand; PAM type: NRG; PAM sequence: AAG
aggctcaaacttctgggctc

SEQ ID NO: 105581 - DNA, 20 bp, Artificial Sequence
  Description of Artificial Sequence: Synthetic oligonucleotide
  Target: LAMA2; (-) strand; PAM type: NRG; PAM sequence: GGG
cactgcaggctcaaacttct

SEQ ID NO: 105582 - DNA, 20 bp, Artificial Sequence
  Description of Artificial Sequence: Synthetic oligonucleotide
  Target: LAMA2; (-) strand; PAM type: NRG; PAM sequence: TGG
tcactgcaggctcaaacttc

SEQ ID NO: 105583 - DNA, 20 bp, Artificial Sequence
  Description of Artificial Sequence: Synthetic oligonucleotide
  Target: LAMA2; (-) strand; PAM type: NRG; PAM sequence: AGG
gcatgatcacagctcactgc

SEQ ID NO: 105584 - DNA, 20 bp, Artificial Sequence
  Description of Artificial Sequence: Synthetic oligonucleotide
  Target: LAMA2; (-) strand; PAM type: NRG; PAM sequence: CAG
ggcatgatcacagctcactg

SEQ ID NO: 105585 - DNA, 20 bp, Artificial Sequence
  Description of Artificial Sequence: Synthetic oligonucleotide
  Target: LAMA2; (-) strand; PAM type: NRG; PAM sequence: CAG
ggagtgctgtggcatgatca

SEQ ID NO: 105586 - DNA, 20 bp, Artificial Sequence
  Description of Artificial Sequence: Synthetic oligonucleotide
  Target: LAMA2; (-) strand; PAM type: NRG; PAM sequence: TGG
tcatccaggctggagtgctg

SEQ ID NO: 105587 - DNA, 20 bp, Artificial Sequence
  Description of Artificial Sequence: Synthetic oligonucleotide
  Target: LAMA2; (-) strand; PAM type: NRG; PAM sequence: GAG
tctcactgtcatccaggctg

SEQ ID NO: 105588 - DNA, 20 bp, Artificial Sequence
  Description of Artificial Sequence: Synthetic oligonucleotide
  Target: LAMA2; (-) strand; PAM type: NRG; PAM sequence: TGG
tgtctcactgtcatccaggc

SEQ ID NO: 105589 - DNA, 20 bp, Artificial Sequence
  Description of Artificial Sequence: Synthetic oligonucleotide
  Target: LAMA2; (-) strand; PAM type: NRG; PAM sequence: AGG
tcattgtctcactgtcatcc

SEQ ID NO: 105590 - DNA, 20 bp, Artificial Sequence
  Description of Artificial Sequence: Synthetic oligonucleotide
  Target: LAMA2; (-) strand; PAM type: NRG; PAM sequence: CAG
ctcattgtctcactgtcatc

SEQ ID NO: 105591 - DNA, 20 bp, Artificial Sequence
  Description of Artificial Sequence: Synthetic oligonucleotide
  Target: LAMA2; (-) strand; PAM type: NRG; PAM sequence: GAG
ttttcttttttttttttttt

SEQ ID NO: 105592 - DNA, 20 bp, Artificial Sequence
  Description of Artificial Sequence: Synthetic oligonucleotide
  Target: LAMA2; (-) strand; PAM type: NRG; PAM sequence: AAG
gattcttcaggaacctgcaa

SEQ ID NO: 105593 - DNA, 20 bp, Artificial Sequence
  Description of Artificial Sequence: Synthetic oligonucleotide
  Target: LAMA2; (-) strand; PAM type: NRG; PAM sequence: AGG
gttggtgtggtagattcttc

SEQ ID NO: 105594 - DNA, 20 bp, Artificial Sequence
  Description of Artificial Sequence: Synthetic oligonucleotide
  Target: LAMA2; (-) strand; PAM type: NRG; PAM sequence: CAG
tgttggtgtggtagattctt

SEQ ID NO: 105595 - DNA, 20 bp, Artificial Sequence
  Description of Artificial Sequence: Synthetic oligonucleotide
  Target: LAMA2; (-) strand; PAM type: NRG; PAM sequence: TAG
tttttggtgtgttggtgtgg

SEQ ID NO: 105596 - DNA, 20 bp, Artificial Sequence
  Description of Artificial Sequence: Synthetic oligonucleotide
  Target: LAMA2; (-) strand; PAM type: NRG; PAM sequence: TGG
ttttttttggtgtgttggtg

SEQ ID NO: 105597 - DNA, 20 bp, Artificial Sequence
  Description of Artificial Sequence: Synthetic oligonucleotide
  Target: LAMA2; (-) strand; PAM type: NRG; PAM sequence: TGG
tttctttttttttggtgtgt

SEQ ID NO: 105598 - DNA, 20 bp, Artificial Sequence
  Description of Artificial Sequence: Synthetic oligonucleotide
  Target: LAMA2; (-) strand; PAM type: NRG; PAM sequence: TGG
tttctttctttctttttttt

SEQ ID NO: 105599 - DNA, 20 bp, Artificial Sequence
  Description of Artificial Sequence: Synthetic oligonucleotide
  Target: LAMA2; (-) strand; PAM type: NRG; PAM sequence: TGG
tattccagagctttgcaaat

SEQ ID NO: 105600 - DNA, 20 bp, Artificial Sequence
  Description of Artificial Sequence: Synthetic oligonucleotide
  Target: LAMA2; (-) strand; PAM type: NRG; PAM sequence: GAG
ttagatctttatttattcca

SEQ ID NO: 105601 - DNA, 20 bp, Artificial Sequence
  Description of Artificial Sequence: Synthetic oligonucleotide
  Target: LAMA2; (-) strand; PAM type: NRG; PAM sequence: CAG
aattagatctttatttattc

SEQ ID NO: 105602 - DNA, 20 bp, Artificial Sequence
  Description of Artificial Sequence: Synthetic oligonucleotide
  Target: LAMA2; (-) strand; PAM type: NRG; PAM sequence: TAG
acttttaacttgtaattaat

SEQ ID NO: 105603 - DNA, 20 bp, Artificial Sequence
  Description of Artificial Sequence: Synthetic oligonucleotide
  Target: LAMA2; (-) strand; PAM type: NRG; PAM sequence: AGG
caattattgtttggatatga

SEQ ID NO: 105604 - DNA, 20 bp, Artificial Sequence
  Description of Artificial Sequence: Synthetic oligonucleotide
  Target: LAMA2; (-) strand; PAM type: NRG; PAM sequence: AAG
tcaattattgtttggatatg

SEQ ID NO: 105605 - DNA, 20 bp, Artificial Sequence
  Description of Artificial Sequence: Synthetic oligonucleotide
  Target: LAMA2; (-) strand; PAM type: NRG; PAM sequence: TGG
ataattgctcaattattgtt

SEQ ID NO: 105606 - DNA, 20 bp, Artificial Sequence
  Description of Artificial Sequence: Synthetic oligonucleotide
  Target: LAMA2; (-) strand; PAM type: NRG; PAM sequence: AAG
ttctacaaaaagtatggcat

SEQ ID NO: 105607 - DNA, 20 bp, Artificial Sequence
  Description of Artificial Sequence: Synthetic oligonucleotide
  Target: LAMA2; (-) strand; PAM type: NRG; PAM sequence: TGG
gaattattctacaaaaagta

SEQ ID NO: 105608 - DNA, 20 bp, Artificial Sequence
  Description of Artificial Sequence: Synthetic oligonucleotide
  Target: LAMA2; (-) strand; PAM type: NRG; PAM sequence: AAG
agggagaattattctacaaa

SEQ ID NO: 105609 - DNA, 20 bp, Artificial Sequence
  Description of Artificial Sequence: Synthetic oligonucleotide
  Target: LAMA2; (-) strand; PAM type: NRG; PAM sequence: GAG
aaagaaggcctatgtatagg

SEQ ID NO: 105610 - DNA, 20 bp, Artificial Sequence
  Description of Artificial Sequence: Synthetic oligonucleotide
  Target: LAMA2; (-) strand; PAM type: NRG; PAM sequence: GGG
agaaagaaggcctatgtata

SEQ ID NO: 105611 - DNA, 20 bp, Artificial Sequence
  Description of Artificial Sequence: Synthetic oligonucleotide
  Target: LAMA2; (-) strand; PAM type: NRG; PAM sequence: AGG
cagaaagaaggcctatgtat

SEQ ID NO: 105612 - DNA, 20 bp, Artificial Sequence
  Description of Artificial Sequence: Synthetic oligonucleotide
  Target: LAMA2; (-) strand; PAM type: NRG; PAM sequence: TAG
acagaaagaaggcctatgta

SEQ ID NO: 105613 - DNA, 20 bp, Artificial Sequence
  Description of Artificial Sequence: Synthetic oligonucleotide
  Target: LAMA2; (-) strand; PAM type: NRG; PAM sequence: AGG
gtatttaagaaacagaaaga

SEQ ID NO: 105614 - DNA, 20 bp, Artificial Sequence
  Description of Artificial Sequence: Synthetic oligonucleotide
  Target: LAMA2; (-) strand; PAM type: NRG; PAM sequence: AAG
agtatttaagaaacagaaag

SEQ ID NO: 105615 - DNA, 20 bp, Artificial Sequence
  Description of Artificial Sequence: Synthetic oligonucleotide
  Target: LAMA2; (-) strand; PAM type: NRG; PAM sequence: AAG
tagagtatttaagaaacaga

SEQ ID NO: 105616 - DNA, 20 bp, Artificial Sequence
  Description of Artificial Sequence: Synthetic oligonucleotide
  Target: LAMA2; (-) strand; PAM type: NRG; PAM sequence: CAG
aacttagagtatttaagaaa

SEQ ID NO: 105617 - DNA, 20 bp, Artificial Sequence
  Description of Artificial Sequence: Synthetic oligonucleotide
  Target: LAMA2; (-) strand; PAM type: NRG; PAM sequence: AAG
ataggaaacttagagtattt

SEQ ID NO: 105618 - DNA, 20 bp, Artificial Sequence
  Description of Artificial Sequence: Synthetic oligonucleotide
  Target: LAMA2; (-) strand; PAM type: NRG; PAM sequence: GAG
tacctaagataggaaactta

SEQ ID NO: 105619 - DNA, 20 bp, Artificial Sequence
  Description of Artificial Sequence: Synthetic oligonucleotide
  Target: LAMA2; (-) strand; PAM type: NRG; PAM sequence: TAG
aatacctaagataggaaact

SEQ ID NO: 105620 - DNA, 20 bp, Artificial Sequence
  Description of Artificial Sequence: Synthetic oligonucleotide
  Target: LAMA2; (-) strand; PAM type: NRG; PAM sequence: AGG
gcatataaaatacctaagat

SEQ ID NO: 105621 - DNA, 20 bp, Artificial Sequence
  Description of Artificial Sequence: Synthetic oligonucleotide
  Target: LAMA2; (-) strand; PAM type: NRG; PAM sequence: TAG
agcatataaaatacctaaga

SEQ ID NO: 105622 - DNA, 20 bp, Artificial Sequence
  Description of Artificial Sequence: Synthetic oligonucleotide
  Target: LAMA2; (-) strand; PAM type: NRG; PAM sequence: AAG
atgtagcatataaaatacct

SEQ ID NO: 105623 - DNA, 20 bp, Artificial Sequence
  Description of Artificial Sequence: Synthetic oligonucleotide
  Target: LAMA2; (-) strand; PAM type: NRG; PAM sequence: TAG
ggcacagatagaaaatgatg

SEQ ID NO: 105624 - DNA, 20 bp, Artificial Sequence
  Description of Artificial Sequence: Synthetic oligonucleotide
  Target: LAMA2; (-) strand; PAM type: NRG; PAM sequence: TAG
aaaacaaagagaggcacaga

SEQ ID NO: 105625 - DNA, 20 bp, Artificial Sequence
  Description of Artificial Sequence: Synthetic oligonucleotide
  Target: LAMA2; (-) strand; PAM type: NRG; PAM sequence: CAG
aataaaaacaaagagaggca

SEQ ID NO: 105626 - DNA, 20 bp, Artificial Sequence
  Description of Artificial Sequence: Synthetic oligonucleotide
  Target: LAMA2; (-) strand; PAM type: NRG; PAM sequence: AGG
agtacaataaaaacaaagag

SEQ ID NO: 105627 - DNA, 20 bp, Artificial Sequence
  Description of Artificial Sequence: Synthetic oligonucleotide
  Target: LAMA2; (-) strand; PAM type: NRG; PAM sequence: GAG
gagtacaataaaaacaaaga

SEQ ID NO: 105628 - DNA, 20 bp, Artificial Sequence
  Description of Artificial Sequence: Synthetic oligonucleotide
  Target: LAMA2; (-) strand; PAM type: NRG; PAM sequence: GAG
atgagtacaataaaaacaaa

SEQ ID NO: 105629 - DNA, 20 bp, Artificial Sequence
  Description of Artificial Sequence: Synthetic oligonucleotide
  Target: LAMA2; (-) strand; PAM type: NRG; PAM sequence: AAG
agatgagtacaataaaaaca

SEQ ID NO: 105630 - DNA, 20 bp, Artificial Sequence
  Description of Artificial Sequence: Synthetic oligonucleotide
  Target: LAMA2; (-) strand; PAM type: NRG; PAM sequence: GAG
ttcttaaagaaagattagat

SEQ ID NO: 105631 - DNA, 20 bp, Artificial Sequence
  Description of Artificial Sequence: Synthetic oligonucleotide
  Target: LAMA2; (-) strand; PAM type: NRG; PAM sequence: TAG
atatattcttaaagaaagat

SEQ ID NO: 105632 - DNA, 20 bp, Artificial Sequence
  Description of Artificial Sequence: Synthetic oligonucleotide
  Target: LAMA2; (-) strand; PAM type: NRG; PAM sequence: AAG
gtataatatattcttaaaga

SEQ ID NO: 105633 - DNA, 20 bp, Artificial Sequence
  Description of Artificial Sequence: Synthetic oligonucleotide
  Target: LAMA2; (-) strand; PAM type: NRG; PAM sequence: AAG
taatgtataatatattctta

SEQ ID NO: 105634 - DNA, 20 bp, Artificial Sequence
  Description of Artificial Sequence: Synthetic oligonucleotide
  Target: LAMA2; (-) strand; PAM type: NRG; PAM sequence: GAG
ggaggagagataaaatgaat

SEQ ID NO: 105635 - DNA, 20 bp, Artificial Sequence
  Description of Artificial Sequence: Synthetic oligonucleotide
  Target: LAMA2; (-) strand; PAM type: NRG; PAM sequence: GAG
ctcatggcttgtgtggagga

SEQ ID NO: 105636 - DNA, 20 bp, Artificial Sequence
  Description of Artificial Sequence: Synthetic oligonucleotide
  Target: LAMA2; (-) strand; PAM type: NRG; PAM sequence: GAG
tcctcatggcttgtgtggag

SEQ ID NO: 105637 - DNA, 20 bp, Artificial Sequence
  Description of Artificial Sequence: Synthetic oligonucleotide
  Target: LAMA2; (-) strand; PAM type: NRG; PAM sequence: AGG
gttcctcatggcttgtgtgg

SEQ ID NO: 105638 - DNA, 20 bp, Artificial Sequence
  Description of Artificial Sequence: Synthetic oligonucleotide
  Target: LAMA2; (-) strand; PAM type: NRG; PAM sequence: GAG
tgttcctcatggcttgtgtg

SEQ ID NO: 105639 - DNA, 20 bp, Artificial Sequence
  Description of Artificial Sequence: Synthetic oligonucleotide
  Target: LAMA2; (-) strand; PAM type: NRG; PAM sequence: TGG
catgttcctcatggcttgtg

SEQ ID NO: 105640 - DNA, 20 bp, Artificial Sequence
  Description of Artificial Sequence: Synthetic oligonucleotide
  Target: LAMA2; (-) strand; PAM type: NRG; PAM sequence: TGG
ggaagaacacatgttcctca

SEQ ID NO: 105641 - DNA, 20 bp, Artificial Sequence
  Description of Artificial Sequence: Synthetic oligonucleotide
  Target: LAMA2; (-) strand; PAM type: NRG; PAM sequence: AAG
taggattgggggatgtgagg

SEQ ID NO: 105642 - DNA, 20 bp, Artificial Sequence
  Description of Artificial Sequence: Synthetic oligonucleotide
  Target: LAMA2; (-) strand; PAM type: NRG; PAM sequence: AGG
ttctaggattgggggatgtg

SEQ ID NO: 105643 - DNA, 20 bp, Artificial Sequence
  Description of Artificial Sequence: Synthetic oligonucleotide
  Target: LAMA2; (-) strand; PAM type: NRG; PAM sequence: GAG
gttctaggattgggggatgt

SEQ ID NO: 105644 - DNA, 20 bp, Artificial Sequence
  Description of Artificial Sequence: Synthetic oligonucleotide
  Target: LAMA2; (-) strand; PAM type: NRG; PAM sequence: GGG
agatactgttctaggattgg

SEQ ID NO: 105645 - DNA, 20 bp, Artificial Sequence
  Description of Artificial Sequence: Synthetic oligonucleotide
  Target: LAMA2; (-) strand; PAM type: NRG; PAM sequence: GGG
tagatactgttctaggattg

SEQ ID NO: 105646 - DNA, 20 bp, Artificial Sequence
  Description of Artificial Sequence: Synthetic oligonucleotide
  Target: LAMA2; (-) strand; PAM type: NRG; PAM sequence: GGG
ctagatactgttctaggatt

SEQ ID NO: 105647 - DNA, 20 bp, Artificial Sequence
  Description of Artificial Sequence: Synthetic oligonucleotide
  Target: LAMA2; (-) strand; PAM type: NRG; PAM sequence: TGG
gctagatactgttctaggat

SEQ ID NO: 105648 - DNA, 20 bp, Artificial Sequence
  Description of Artificial Sequence: Synthetic oligonucleotide
  Target: LAMA2; (-) strand; PAM type: NRG; PAM sequence: AGG
cctttgctagatactgttct

SEQ ID NO: 105649 - DNA, 20 bp, Artificial Sequence
  Description of Artificial Sequence: Synthetic oligonucleotide
  Target: LAMA2; (-) strand; PAM type: NRG; PAM sequence: TAG
gcctttgctagatactgttc

SEQ ID NO: 105650 - DNA, 20 bp, Artificial Sequence
  Description of Artificial Sequence: Synthetic oligonucleotide
  Target: LAMA2; (-) strand; PAM type: NRG; PAM sequence: TAG
acaatctgttttgcctttgc

SEQ ID NO: 105651 - DNA, 20 bp, Artificial Sequence
  Description of Artificial Sequence: Synthetic oligonucleotide
  Target: LAMA2; (-) strand; PAM type: NRG; PAM sequence: CGG
tatggcactttatttattca

SEQ ID NO: 105652 - DNA, 20 bp, Artificial Sequence
  Description of Artificial Sequence: Synthetic oligonucleotide
  Target: LAMA2; (-) strand; PAM type: NRG; PAM sequence: TGG
gagtatctgggtttgttcta

SEQ ID NO: 105653 - DNA, 20 bp, Artificial Sequence
  Description of Artificial Sequence: Synthetic oligonucleotide
  Target: LAMA2; (-) strand; PAM type: NRG; PAM sequence: GGG
gacaaaagtatagagtatct

SEQ ID NO: 105654 - DNA, 20 bp, Artificial Sequence
  Description of Artificial Sequence: Synthetic oligonucleotide
  Target: LAMA2; (-) strand; PAM type: NRG; PAM sequence: TGG
tgacaaaagtatagagtatc

SEQ ID NO: 105655 - DNA, 20 bp, Artificial Sequence
  Description of Artificial Sequence: Synthetic oligonucleotide
  Target: LAMA2; (-) strand; PAM type: NRG; PAM sequence: GAG
caaatattgacaaaagtata

SEQ ID NO: 105656 - DNA, 20 bp, Artificial Sequence
  Description of Artificial Sequence: Synthetic oligonucleotide
  Target: LAMA2; (-) strand; PAM type: NRG; PAM sequence: TAG
cacaaatattgacaaaagta

SEQ ID NO: 105657 - DNA, 20 bp, Artificial Sequence
  Description of Artificial Sequence: Synthetic oligonucleotide
  Target: LAMA2; (-) strand; PAM type: NRG; PAM sequence: AAG
gagctcacaaatattgacaa

SEQ ID NO: 105658 - DNA, 20 bp, Artificial Sequence
  Description of Artificial Sequence: Synthetic oligonucleotide
  Target: LAMA2; (-) strand; PAM type: NRG; PAM sequence: GAG
cgagaaaagatggaaatttg

SEQ ID NO: 105659 - DNA, 20 bp, Artificial Sequence
  Description of Artificial Sequence: Synthetic oligonucleotide
  Target: LAMA2; (-) strand; PAM type: NRG; PAM sequence: TGG
accgagaaaagatggaaatt

SEQ ID NO: 105660 - DNA, 20 bp, Artificial Sequence
  Description of Artificial Sequence: Synthetic oligonucleotide
  Target: LAMA2; (-) strand; PAM type: NRG; PAM sequence: TGG
agctttgaaccgagaaaaga

SEQ ID NO: 105661 - DNA, 20 bp, Artificial Sequence
  Description of Artificial Sequence: Synthetic oligonucleotide
  Target: LAMA2; (-) strand; PAM type: NRG; PAM sequence: AAG
ttctagctttgaaccgagaa

SEQ ID NO: 105662 - DNA, 20 bp, Artificial Sequence
  Description of Artificial Sequence: Synthetic oligonucleotide
  Target: LAMA2; (-) strand; PAM type: NRG; PAM sequence: GAG
atgggttctagctttgaacc

SEQ ID NO: 105663 - DNA, 20 bp, Artificial Sequence
  Description of Artificial Sequence: Synthetic oligonucleotide
  Target: LAMA2; (-) strand; PAM type: NRG; PAM sequence: TAG
gattagatactgatgggttc

SEQ ID NO: 105664 - DNA, 20 bp, Artificial Sequence
  Description of Artificial Sequence: Synthetic oligonucleotide
  Target: LAMA2; (-) strand; PAM type: NRG; PAM sequence: GGG
ttttcagattagatactgat

SEQ ID NO: 105665 - DNA, 20 bp, Artificial Sequence
  Description of Artificial Sequence: Synthetic oligonucleotide
  Target: LAMA2; (-) strand; PAM type: NRG; PAM sequence: TGG
gttttcagattagatactga

SEQ ID NO: 105666 - DNA, 20 bp, Artificial Sequence
  Description of Artificial Sequence: Synthetic oligonucleotide
  Target: LAMA2; (-) strand; PAM type: NRG; PAM sequence: TAG
gaggtgtcttgttttcagat

SEQ ID NO: 105667 - DNA, 20 bp, Artificial Sequence
  Description of Artificial Sequence: Synthetic oligonucleotide
  Target: LAMA2; (-) strand; PAM type: NRG; PAM sequence: CAG
ttttagaggtgtcttgtttt

SEQ ID NO: 105668 - DNA, 20 bp, Artificial Sequence
  Description of Artificial Sequence: Synthetic oligonucleotide
  Target: LAMA2; (-) strand; PAM type: NRG; PAM sequence: AGG
tgaggttaaataaattttag

SEQ ID NO: 105669 - DNA, 20 bp, Artificial Sequence
  Description of Artificial Sequence: Synthetic oligonucleotide
  Target: LAMA2; (-) strand; PAM type: NRG; PAM sequence: GAG
atgaggttaaataaatttta

SEQ ID NO: 105670 - DNA, 20 bp, Artificial Sequence
  Description of Artificial Sequence: Synthetic oligonucleotide
  Target: LAMA2; (-) strand; PAM type: NRG; PAM sequence: TAG
ggatgaggttaaataaattt

SEQ ID NO: 105671 - DNA, 20 bp, Artificial Sequence
  Description of Artificial Sequence: Synthetic oligonucleotide
  Target: LAMA2; (-) strand; PAM type: NRG; PAM sequence: AGG
cctcccagagtgctgggatg

SEQ ID NO: 105672 - DNA, 20 bp, Artificial Sequence
  Description of Artificial Sequence: Synthetic oligonucleotide
  Target: LAMA2; (-) strand; PAM type: NRG; PAM sequence: GAG
gcctcccagagtgctgggat

SEQ ID NO: 105673 - DNA, 20 bp, Artificial Sequence
  Description of Artificial Sequence: Synthetic oligonucleotide
  Target: LAMA2; (-) strand; PAM type: NRG; PAM sequence: GGG
cctcagcctcccagagtgct

SEQ ID NO: 105674 - DNA, 20 bp, Artificial Sequence
  Description of Artificial Sequence: Synthetic oligonucleotide
  Target: LAMA2; (-) strand; PAM type: NRG; PAM sequence: TGG
gcctcagcctcccagagtgc

SEQ ID NO: 105675 - DNA, 20 bp, Artificial Sequence
  Description of Artificial Sequence: Synthetic oligonucleotide
  Target: LAMA2; (-) strand; PAM type: NRG; PAM sequence: GAG
cctcctgcctcagcctccca

SEQ ID NO: 105676 - DNA, 20 bp, Artificial Sequence
  Description of Artificial Sequence: Synthetic oligonucleotide
  Target: LAMA2; (-) strand; PAM type: NRG; PAM sequence: CAG
atcctcctgcctcagcctcc

SEQ ID NO: 105677 - DNA, 20 bp, Artificial Sequence
  Description of Artificial Sequence: Synthetic oligonucleotide
  Target: LAMA2; (-) strand; PAM type: NRG; PAM sequence: CAG
acctcatgatcctcctgcct

SEQ ID NO: 105678 - DNA, 20 bp, Artificial Sequence
  Description of Artificial Sequence: Synthetic oligonucleotide
  Target: LAMA2; (-) strand; PAM type: NRG; PAM sequence: TGG
tttcaccatgttagccagga

SEQ ID NO: 105679 - DNA, 20 bp, Artificial Sequence
  Description of Artificial Sequence: Synthetic oligonucleotide
  Target: LAMA2; (-) strand; PAM type: NRG; PAM sequence: AGG
ggggtttcaccatgttagcc

SEQ ID NO: 105680 - DNA, 20 bp, Artificial Sequence
  Description of Artificial Sequence: Synthetic oligonucleotide
  Target: LAMA2; (-) strand; PAM type: NRG; PAM sequence: CAG
tggggtttcaccatgttagc

SEQ ID NO: 105681 - DNA, 20 bp, Artificial Sequence
  Description of Artificial Sequence: Synthetic oligonucleotide
  Target: LAMA2; (-) strand; PAM type: NRG; PAM sequence: TAG
gagatggggtttcaccatgt

SEQ ID NO: 105682 - DNA, 20 bp, Artificial Sequence
  Description of Artificial Sequence: Synthetic oligonucleotide
  Target: LAMA2; (-) strand; PAM type: NRG; PAM sequence: GGG
tttcattttcagtagagatg

SEQ ID NO: 105683 - DNA, 20 bp, Artificial Sequence
  Description of Artificial Sequence: Synthetic oligonucleotide
  Target: LAMA2; (-) strand; PAM type: NRG; PAM sequence: GGG
ttttcattttcagtagagat

SEQ ID NO: 105684 - DNA, 20 bp, Artificial Sequence
  Description of Artificial Sequence: Synthetic oligonucleotide
  Target: LAMA2; (-) strand; PAM type: NRG; PAM sequence: TGG
attttcattttcagtagaga

SEQ ID NO: 105685 - DNA, 20 bp, Artificial Sequence
  Description of Artificial Sequence: Synthetic oligonucleotide
  Target: LAMA2; (-) strand; PAM type: NRG; PAM sequence: GAG
tttaattttcattttcagta

SEQ ID NO: 105686 - DNA, 20 bp, Artificial Sequence
  Description of Artificial Sequence: Synthetic oligonucleotide
  Target: LAMA2; (-) strand; PAM type: NRG; PAM sequence: TAG
tttttaattttcattttcag

SEQ ID NO: 105687 - DNA, 20 bp, Artificial Sequence
  Description of Artificial Sequence: Synthetic oligonucleotide
  Target: LAMA2; (-) strand; PAM type: NRG; PAM sequence: CAG
ttttttttaattttcatttt

SEQ ID NO: 105688 - DNA, 20 bp, Artificial Sequence
  Description of Artificial Sequence: Synthetic oligonucleotide
  Target: LAMA2; (-) strand; PAM type: NRG; PAM sequence: TGG
caggtgcctgccaccacgcc

SEQ ID NO: 105689 - DNA, 20 bp, Artificial Sequence
  Description of Artificial Sequence: Synthetic oligonucleotide
  Target: LAMA2; (-) strand; PAM type: NRG; PAM sequence: AGG
gcctcccgagtagggactgc

SEQ ID NO: 105690 - DNA, 20 bp, Artificial Sequence
  Description of Artificial Sequence: Synthetic oligonucleotide
  Target: LAMA2; (-) strand; PAM type: NRG; PAM sequence: CAG
agcctcccgagtagggactg

SEQ ID NO: 105691 - DNA, 20 bp, Artificial Sequence
  Description of Artificial Sequence: Synthetic oligonucleotide
  Target: LAMA2; (-) strand; PAM type: NRG; PAM sequence: GGG
ctgcctcagcctcccgagta

SEQ ID NO: 105692 - DNA, 20 bp, Artificial Sequence
  Description of Artificial Sequence: Synthetic oligonucleotide
  Target: LAMA2; (-) strand; PAM type: NRG; PAM sequence: AGG
cctgcctcagcctcccgagt

SEQ ID NO: 105693 - DNA, 20 bp, Artificial Sequence
  Description of Artificial Sequence: Synthetic oligonucleotide
  Target: LAMA2; (-) strand; PAM type: NRG; PAM sequence: TAG
tcctgcctcagcctcccgag

SEQ ID NO: 105694 - DNA, 20 bp, Artificial Sequence
  Description of Artificial Sequence: Synthetic oligonucleotide
  Target: LAMA2; (-) strand; PAM type: NRG; PAM sequence: GAG
ttctcctgcctcagcctccc

SEQ ID NO: 105695 - DNA, 20 bp, Artificial Sequence
  Description of Artificial Sequence: Synthetic oligonucleotide
  Target: LAMA2; (-) strand; PAM type: NRG; PAM sequence: CAG
ttcacaccattctcctgcct

SEQ ID NO: 105696 - DNA, 20 bp, Artificial Sequence
  Description of Artificial Sequence: Synthetic oligonucleotide
  Target: LAMA2; (-) strand; PAM type: NRG; PAM sequence: AGG
cactgcaagctctgcctccc

SEQ ID NO: 105697 - DNA, 20 bp, Artificial Sequence
  Description of Artificial Sequence: Synthetic oligonucleotide
  Target: LAMA2; (-) strand; PAM type: NRG; PAM sequence: CAG
tcactgcaagctctgcctcc

SEQ ID NO: 105698 - DNA, 20 bp, Artificial Sequence
  Description of Artificial Sequence: Synthetic oligonucleotide
  Target: LAMA2; (-) strand; PAM type: NRG; PAM sequence: AAG
gagcaatcttggctcactgc

SEQ ID NO: 105699 - DNA, 20 bp, Artificial Sequence
  Description of Artificial Sequence: Synthetic oligonucleotide
  Target: LAMA2; (-) strand; PAM type: NRG; PAM sequence: TGG
ggagtgcagtggagcaatct

SEQ ID NO: 105700 - DNA, 20 bp, Artificial Sequence
  Description of Artificial Sequence: Synthetic oligonucleotide
  Target: LAMA2; (-) strand; PAM type: NRG; PAM sequence: GAG
gcccaggctggagtgcagtg

SEQ ID NO: 105701 - DNA, 20 bp, Artificial Sequence
  Description of Artificial Sequence: Synthetic oligonucleotide
  Target: LAMA2; (-) strand; PAM type: NRG; PAM sequence: TGG
tcgcccaggctggagtgcag

SEQ ID NO: 105702 - DNA, 20 bp, Artificial Sequence
  Description of Artificial Sequence: Synthetic oligonucleotide
  Target: LAMA2; (-) strand; PAM type: NRG; PAM sequence: CAG
ctgtcgcccaggctggagtg

SEQ ID NO: 105703 - DNA, 20 bp, Artificial Sequence
  Description of Artificial Sequence: Synthetic oligonucleotide
  Target: LAMA2; (-) strand; PAM type: NRG; PAM sequence: GAG
tcactctgtcgcccaggctg

SEQ ID NO: 105704 - DNA, 20 bp, Artificial Sequence
  Description of Artificial Sequence: Synthetic oligonucleotide
  Target: LAMA2; (-) strand; PAM type: NRG; PAM sequence: TGG
tctcactctgtcgcccaggc

SEQ ID NO: 105705 - DNA, 20 bp, Artificial Sequence
  Description of Artificial Sequence: Synthetic oligonucleotide
  Target: LAMA2; (-) strand; PAM type: NRG; PAM sequence: AGG
ggagtctcactctgtcgccc

SEQ ID NO: 105706 - DNA, 20 bp, Artificial Sequence
  Description of Artificial Sequence: Synthetic oligonucleotide
  Target: LAMA2; (-) strand; PAM type: NRG; PAM sequence: CAG
cggagtctcactctgtcgcc

SEQ ID NO: 105707 - DNA, 20 bp, Artificial Sequence
  Description of Artificial Sequence: Synthetic oligonucleotide
  Target: LAMA2; (-) strand; PAM type: NRG; PAM sequence: GAG
ttttttttttttctgagacg

SEQ ID NO: 105708 - DNA, 20 bp, Artificial Sequence
  Description of Artificial Sequence: Synthetic oligonucleotide
  Target: LAMA2; (-) strand; PAM type: NRG; PAM sequence: CGG
ttttttttttttttctgaga

SEQ ID NO: 105709 - DNA, 20 bp, Artificial Sequence
  Description of Artificial Sequence: Synthetic oligonucleotide
  Target: LAMA2; (-) strand; PAM type: NRG; PAM sequence: GAG
ttttttttttttttttttct

SEQ ID NO: 105710 - DNA, 20 bp, Artificial Sequence
  Description of Artificial Sequence: Synthetic oligonucleotide
  Target: LAMA2; (-) strand; PAM type: NRG; PAM sequence: AGG
aatcagaaatgatgatcaag

SEQ ID NO: 105711 - DNA, 20 bp, Artificial Sequence
  Description of Artificial Sequence: Synthetic oligonucleotide
  Target: LAMA2; (-) strand; PAM type: NRG; PAM sequence: GAG
caatcagaaatgatgatcaa

SEQ ID NO: 105712 - DNA, 20 bp, Artificial Sequence
  Description of Artificial Sequence: Synthetic oligonucleotide
  Target: LAMA2; (-) strand; PAM type: NRG; PAM sequence: AAG
ctcaatcagaaatgatgatc

SEQ ID NO: 105713 - DNA, 20 bp, Artificial Sequence
  Description of Artificial Sequence: Synthetic oligonucleotide
  Target: LAMA2; (-) strand; PAM type: NRG; PAM sequence: CAG
tgcttcttagcatactcaat

SEQ ID NO: 105714 - DNA, 20 bp, Artificial Sequence
  Description of Artificial Sequence: Synthetic oligonucleotide
  Target: LAMA2; (-) strand; PAM type: NRG; PAM sequence: TAG
aaagatcaaaatgtgcttct

SEQ ID NO: 105715 - DNA, 20 bp, Artificial Sequence
  Description of Artificial Sequence: Synthetic oligonucleotide
  Target: LAMA2; (-) strand; PAM type: NRG; PAM sequence: AAG
tagaatcttttgtaaaagca

SEQ ID NO: 105716 - DNA, 20 bp, Artificial Sequence
  Description of Artificial Sequence: Synthetic oligonucleotide
  Target: LAMA2; (-) strand; PAM type: NRG; PAM sequence: AAG
tgagttagaatcttttgtaa

SEQ ID NO: 105717 - DNA, 20 bp, Artificial Sequence
  Description of Artificial Sequence: Synthetic oligonucleotide
  Target: LAMA2; (-) strand; PAM type: NRG; PAM sequence: TAG
atttcaataaagtagtgagt

SEQ ID NO: 105718 - DNA, 20 bp, Artificial Sequence
  Description of Artificial Sequence: Synthetic oligonucleotide
  Target: LAMA2; (-) strand; PAM type: NRG; PAM sequence: GAG
tttgatttcaataaagtagt

SEQ ID NO: 105719 - DNA, 20 bp, Artificial Sequence
  Description of Artificial Sequence: Synthetic oligonucleotide
  Target: LAMA2; (-) strand; PAM type: NRG; PAM sequence: TAG
atattttgatttcaataaag

SEQ ID NO: 105720 - DNA, 20 bp, Artificial Sequence
  Description of Artificial Sequence: Synthetic oligonucleotide
  Target: LAMA2; (-) strand; PAM type: NRG; PAM sequence: AAG
tatatattttgatttcaata

SEQ ID NO: 105721 - DNA, 20 bp, Artificial Sequence
  Description of Artificial Sequence: Synthetic oligonucleotide
  Target: LAMA2; (-) strand; PAM type: NRG; PAM sequence: GAG
ccacacgtgtgttaattgaa

SEQ ID NO: 105722 - DNA, 20 bp, Artificial Sequence
  Description of Artificial Sequence: Synthetic oligonucleotide
  Target: LAMA2; (-) strand; PAM type: NRG; PAM sequence: AAG
ttccacacgtgtgttaattg

SEQ ID NO: 105723 - DNA, 20 bp, Artificial Sequence
  Description of Artificial Sequence: Synthetic oligonucleotide
  Target: LAMA2; (-) strand; PAM type: NRG; PAM sequence: AAG
ctgtgccactggaaacaggg

SEQ ID NO: 105724 - DNA, 20 bp, Artificial Sequence
  Description of Artificial Sequence: Synthetic oligonucleotide
  Target: LAMA2; (-) strand; PAM type: NRG; PAM sequence: GGG
atgctgtgccactggaaaca

SEQ ID NO: 105725 - DNA, 20 bp, Artificial Sequence
  Description of Artificial Sequence: Synthetic oligonucleotide
  Target: LAMA2; (-) strand; PAM type: NRG; PAM sequence: AGG
aatgctgtgccactggaaac

SEQ ID NO: 105726 - DNA, 20 bp, Artificial Sequence
  Description of Artificial Sequence: Synthetic oligonucleotide
  Target: LAMA2; (-) strand; PAM type: NRG; PAM sequence: CAG
aaatgctgtgccactggaaa

SEQ ID NO: 105727 - DNA, 20 bp, Artificial Sequence
  Description of Artificial Sequence: Synthetic oligonucleotide
  Target: LAMA2; (-) strand; PAM type: NRG; PAM sequence: TGG
aatttaaaatgctgtgccac

SEQ ID NO: 105728 - DNA, 20 bp, Artificial Sequence
  Description of Artificial Sequence: Synthetic oligonucleotide
  Target: LAMA2; (-) strand; PAM type: NRG; PAM sequence: AGG
ttgtttgaattaatggatca

SEQ ID NO: 105729 - DNA, 20 bp, Artificial Sequence
  Description of Artificial Sequence: Synthetic oligonucleotide
  Target: LAMA2; (-) strand; PAM type: NRG; PAM sequence: AAG
cttgtttgaattaatggatc

SEQ ID NO: 105730 - DNA, 20 bp, Artificial Sequence
  Description of Artificial Sequence: Synthetic oligonucleotide
  Target: LAMA2; (-) strand; PAM type: NRG; PAM sequence: TGG
acatggcttgtttgaattaa

SEQ ID NO: 105731 - DNA, 20 bp, Artificial Sequence
  Description of Artificial Sequence: Synthetic oligonucleotide
  Target: LAMA2; (-) strand; PAM type: NRG; PAM sequence: TGG
cacaagaatcttttacaaca

SEQ ID NO: 105732 - DNA, 20 bp, Artificial Sequence
  Description of Artificial Sequence: Synthetic oligonucleotide
  Target: LAMA2; (-) strand; PAM type: NRG; PAM sequence: AAG
tatagcatgtacagaaacac

SEQ ID NO: 105733 - DNA, 20 bp, Artificial Sequence
  Description of Artificial Sequence: Synthetic oligonucleotide
  Target: LAMA2; (-) strand; PAM type: NRG; PAM sequence: CAG
gacttaaagtatagcatgta

SEQ ID NO: 105734 - DNA, 20 bp, Artificial Sequence
  Description of Artificial Sequence: Synthetic oligonucleotide
  Target: LAMA2; (-) strand; PAM type: NRG; PAM sequence: TAG
gtatgagctgacttaaagta

SEQ ID NO: 105735 - DNA, 20 bp, Artificial Sequence
  Description of Artificial Sequence: Synthetic oligonucleotide
  Target: LAMA2; (-) strand; PAM type: NRG; PAM sequence: AAG
cttttgtatgagctgactta

SEQ ID NO: 105736 - DNA, 20 bp, Artificial Sequence
  Description of Artificial Sequence: Synthetic oligonucleotide
  Target: LAMA2; (-) strand; PAM type: NRG; PAM sequence: GAG
ttagcccttagcttttgtat

SEQ ID NO: 105737 - DNA, 20 bp, Artificial Sequence
  Description of Artificial Sequence: Synthetic oligonucleotide
  Target: LAMA2; (-) strand; PAM type: NRG; PAM sequence: TAG
caactgccaattttagccct

SEQ ID NO: 105738 - DNA, 20 bp, Artificial Sequence
  Description of Artificial Sequence: Synthetic oligonucleotide
  Target: LAMA2; (-) strand; PAM type: NRG; PAM sequence: TAG
ttttacacaactgccaattt

SEQ ID NO: 105739 - DNA, 20 bp, Artificial Sequence
  Description of Artificial Sequence: Synthetic oligonucleotide
  Target: LAMA2; (-) strand; PAM type: NRG; PAM sequence: GGG
agtcatatcttatcttccaa

SEQ ID NO: 105740 - DNA, 20 bp, Artificial Sequence
  Description of Artificial Sequence: Synthetic oligonucleotide
  Target: LAMA2; (-) strand; PAM type: NRG; PAM sequence: AGG
aagtcatatcttatcttcca

SEQ ID NO: 105741 - DNA, 20 bp, Artificial Sequence
  Description of Artificial Sequence: Synthetic oligonucleotide
  Target: LAMA2; (-) strand; PAM type: NRG; PAM sequence: AAG
caagtcatatcttatcttcc

SEQ ID NO: 105742 - DNA, 20 bp, Artificial Sequence
  Description of Artificial Sequence: Synthetic oligonucleotide
  Target: LAMA2; (-) strand; PAM type: NRG; PAM sequence: AAG
attacaatctccctgattac

SEQ ID NO: 105743 - DNA, 20 bp, Artificial Sequence
  Description of Artificial Sequence: Synthetic oligonucleotide
  Target: LAMA2; (-) strand; PAM type: NRG; PAM sequence: GAG
acagacaacaaatgtgggaa

SEQ ID NO: 105744 - DNA, 20 bp, Artificial Sequence
  Description of Artificial Sequence: Synthetic oligonucleotide
  Target: LAMA2; (-) strand; PAM type: NRG; PAM sequence: AAG
tcacagacaacaaatgtggg

SEQ ID NO: 105745 - DNA, 20 bp, Artificial Sequence
  Description of Artificial Sequence: Synthetic oligonucleotide
  Target: LAMA2; (-) strand; PAM type: NRG; PAM sequence: GGG
tcttcacagacaacaaatgt

SEQ ID NO: 105746 - DNA, 20 bp, Artificial Sequence
  Description of Artificial Sequence: Synthetic oligonucleotide
  Target: LAMA2; (-) strand; PAM type: NRG; PAM sequence: TGG
ctcttcacagacaacaaatg

SEQ ID NO: 105747 - DNA, 20 bp, Artificial Sequence
  Description of Artificial Sequence: Synthetic oligonucleotide
  Target: LAMA2; (-) strand; PAM type: NRG; PAM sequence: CAG
gatatgtcattcactcttca

SEQ ID NO: 105748 - DNA, 20 bp, Artificial Sequence
  Description of Artificial Sequence: Synthetic oligonucleotide
  Target: LAMA2; (-) strand; PAM type: NRG; PAM sequence: AAG
tcccatcactaattcagggg

SEQ ID NO: 105749 - DNA, 20 bp, Artificial Sequence
  Description of Artificial Sequence: Synthetic oligonucleotide
  Target: LAMA2; (-) strand; PAM type: NRG; PAM sequence: GGG
tactcccatcactaattcag

SEQ ID NO: 105750 - DNA, 20 bp, Artificial Sequence
  Description of Artificial Sequence: Synthetic oligonucleotide
  Target: LAMA2; (-) strand; PAM type: NRG; PAM sequence: GGG
ctactcccatcactaattca

SEQ ID NO: 105751 - DNA, 20 bp, Artificial Sequence
  Description of Artificial Sequence: Synthetic oligonucleotide
  Target: LAMA2; (-) strand; PAM type: NRG; PAM sequence: AGG
gctactcccatcactaattc

SEQ ID NO: 105752 - DNA, 20 bp, Artificial Sequence
  Description of Artificial Sequence: Synthetic oligonucleotide
  Target: LAMA2; (-) strand; PAM type: NRG; PAM sequence: CAG
agctactcccatcactaatt

SEQ ID NO: 105753 - DNA, 20 bp, Artificial Sequence
  Description of Artificial Sequence: Synthetic oligonucleotide
  Target: LAMA2; (-) strand; PAM type: NRG; PAM sequence: CAG
ctgctgacacttggctcatt

SEQ ID NO: 105754 - DNA, 20 bp, Artificial Sequence
  Description of Artificial Sequence: Synthetic oligonucleotide
  Target: LAMA2; (-) strand; PAM type: NRG; PAM sequence: TGG
ggacttgtgctgctgacact

SEQ ID NO: 105755 - DNA, 20 bp, Artificial Sequence
  Description of Artificial Sequence: Synthetic oligonucleotide
  Target: LAMA2; (-) strand; PAM type: NRG; PAM sequence: GGG
agaaaatgaagtccattcct

SEQ ID NO: 105756 - DNA, 20 bp, Artificial Sequence
  Description of Artificial Sequence: Synthetic oligonucleotide
  Target: LAMA2; (-) strand; PAM type: NRG; PAM sequence: TGG
aagaaaatgaagtccattcc

SEQ ID NO: 105757 - DNA, 20 bp, Artificial Sequence
  Description of Artificial Sequence: Synthetic oligonucleotide
  Target: LAMA2; (-) strand; PAM type: NRG; PAM sequence: AAG
aagaaagaaaaaagaaaatg

SEQ ID NO: 105758 - DNA, 20 bp, Artificial Sequence
  Description of Artificial Sequence: Synthetic oligonucleotide
  Target: LAMA2; (-) strand; PAM type: NRG; PAM sequence: AAG
agaaaagaaaagaaagaaaa

SEQ ID NO: 105759 - DNA, 20 bp, Artificial Sequence
  Description of Artificial Sequence: Synthetic oligonucleotide
  Target: LAMA2; (-) strand; PAM type: NRG; PAM sequence: AAG
aaaaaaaagaaaagaaaaga

SEQ ID NO: 105760 - DNA, 20 bp, Artificial Sequence
  Description of Artificial Sequence: Synthetic oligonucleotide
  Target: LAMA2; (-) strand; PAM type: NRG; PAM sequence: AAG
aaaaaaaaaaaagaaaagaa

SEQ ID NO: 105761 - DNA, 20 bp, Artificial Sequence
  Description of Artificial Sequence: Synthetic oligonucleotide
  Target: LAMA2; (-) strand; PAM type: NRG; PAM sequence: AAG
aaaaaaaaaaaaaaaaagaa

SEQ ID NO: 105762 - DNA, 20 bp, Artificial Sequence
  Description of Artificial Sequence: Synthetic oligonucleotide
  Target: LAMA2; (-) strand; PAM type: NRG; PAM sequence: AAG
tcaaaaaaaaaaaaaaaaaa

SEQ ID NO: 105763 - DNA, 20 bp, Artificial Sequence
  Description of Artificial Sequence: Synthetic oligonucleotide
  Target: LAMA2; (-) strand; PAM type: NRG; PAM sequence: GAG
caatccagcctgggtgacaa

SEQ ID NO: 105764 - DNA, 20 bp, Artificial Sequence
  Description of Artificial Sequence: Synthetic oligonucleotide
  Target: LAMA2; (-) strand; PAM type: NRG; PAM sequence: AAG
tgcaatccagcctgggtgac

SEQ ID NO: 105765 - DNA, 20 bp, Artificial Sequence
  Description of Artificial Sequence: Synthetic oligonucleotide
  Target: LAMA2; (-) strand; PAM type: NRG; PAM sequence: GGG
gcaccattgcaatccagcct

SEQ ID NO: 105766 - DNA, 20 bp, Artificial Sequence
  Description of Artificial Sequence: Synthetic oligonucleotide
  Target: LAMA2; (-) strand; PAM type: NRG; PAM sequence: TGG
tgcaccattgcaatccagcc

SEQ ID NO: 105767 - DNA, 20 bp, Artificial Sequence
  Description of Artificial Sequence: Synthetic oligonucleotide
  Target: LAMA2; (-) strand; PAM type: NRG; PAM sequence: CAG
aagattgcaccattgcaatc

SEQ ID NO: 105768 - DNA, 20 bp, Artificial Sequence
  Description of Artificial Sequence: Synthetic oligonucleotide
  Target: LAMA2; (-) strand; PAM type: NRG; PAM sequence: AAG
ggtggaggttaaagtgagcc

SEQ ID NO: 105769 - DNA, 20 bp, Artificial Sequence
  Description of Artificial Sequence: Synthetic oligonucleotide
  Target: LAMA2; (-) strand; PAM type: NRG; PAM sequence: GAG
tgagaggtggaggttaaagt

SEQ ID NO: 105770 - DNA, 20 bp, Artificial Sequence
  Description of Artificial Sequence: Synthetic oligonucleotide
  Target: LAMA2; (-) strand; PAM type: NRG; PAM sequence: AAG
gacctgagaggtggaggtta

SEQ ID NO: 105771 - DNA, 20 bp, Artificial Sequence
  Description of Artificial Sequence: Synthetic oligonucleotide
  Target: LAMA2; (-) strand; PAM type: NRG; PAM sequence: AGG
tcacttgacctgagaggtgg

SEQ ID NO: 105772 - DNA, 20 bp, Artificial Sequence
  Description of Artificial Sequence: Synthetic oligonucleotide
  Target: LAMA2; (-) strand; PAM type: NRG; PAM sequence: GAG
atcacttgacctgagaggtg

SEQ ID NO: 105773 - DNA, 20 bp, Artificial Sequence
  Description of Artificial Sequence: Synthetic oligonucleotide
  Target: LAMA2; (-) strand; PAM type: NRG; PAM sequence: TGG
gaatcacttgacctgagagg

SEQ ID NO: 105774 - DNA, 20 bp, Artificial Sequence
  Description of Artificial Sequence: Synthetic oligonucleotide
  Target: LAMA2; (-) strand; PAM type: NRG; PAM sequence: AGG
ggagaatcacttgacctgag

SEQ ID NO: 105775 - DNA, 20 bp, Artificial Sequence
  Description of Artificial Sequence: Synthetic oligonucleotide
  Target: LAMA2; (-) strand; PAM type: NRG; PAM sequence: GAG
aggagaatcacttgacctga

SEQ ID NO: 105776 - DNA, 20 bp, Artificial Sequence
  Description of Artificial Sequence: Synthetic oligonucleotide
  Target: LAMA2; (-) strand; PAM type: NRG; PAM sequence: GAG
gcaggagaatcacttgacct

SEQ ID NO: 105777 - DNA, 20 bp, Artificial Sequence
  Description of Artificial Sequence: Synthetic oligonucleotide
  Target: LAMA2; (-) strand; PAM type: NRG; PAM sequence: GAG
tacttgggaggctgaggcag

SEQ ID NO: 105778 - DNA, 20 bp, Artificial Sequence
  Description of Artificial Sequence: Synthetic oligonucleotide
  Target: LAMA2; (-) strand; PAM type: NRG; PAM sequence: AGG
gctacttgggaggctgaggc

SEQ ID NO: 105779 - DNA, 20 bp, Artificial Sequence
  Description of Artificial Sequence: Synthetic oligonucleotide
  Target: LAMA2; (-) strand; PAM type: NRG; PAM sequence: CAG
agctacttgggaggctgagg

SEQ ID NO: 105780 - DNA, 20 bp, Artificial Sequence
  Description of Artificial Sequence: Synthetic oligonucleotide
  Target: LAMA2; (-) strand; PAM type: NRG; PAM sequence: AGG
ctcagctacttgggaggctg

SEQ ID NO: 105781 - DNA, 20 bp, Artificial Sequence
  Description of Artificial Sequence: Synthetic oligonucleotide
  Target: LAMA2; (-) strand; PAM type: NRG; PAM sequence: GAG
tctcagctacttgggaggct

SEQ ID NO: 105782 - DNA, 20 bp, Artificial Sequence
  Description of Artificial Sequence: Synthetic oligonucleotide
  Target: LAMA2; (-) strand; PAM type: NRG; PAM sequence: AGG
tgtaatctcagctacttggg

SEQ ID NO: 105783 - DNA, 20 bp, Artificial Sequence
  Description of Artificial Sequence: Synthetic oligonucleotide
  Target: LAMA2; (-) strand; PAM type: NRG; PAM sequence: GAG
ctgtaatctcagctacttgg

SEQ ID NO: 105784 - DNA, 20 bp, Artificial Sequence
  Description of Artificial Sequence: Synthetic oligonucleotide
  Target: LAMA2; (-) strand; PAM type: NRG; PAM sequence: GGG
gcctgtaatctcagctactt

SEQ ID NO: 105785 - DNA, 20 bp, Artificial Sequence
  Description of Artificial Sequence: Synthetic oligonucleotide
  Target: LAMA2; (-) strand; PAM type: NRG; PAM sequence: TGG
tgcctgtaatctcagctact

SEQ ID NO: 105786 - DNA, 20 bp, Artificial Sequence
  Description of Artificial Sequence: Synthetic oligonucleotide
  Target: LAMA2; (-) strand; PAM type: NRG; PAM sequence: CAG
gtggtgcatgcctgtaatct

SEQ ID NO: 105787 - DNA, 20 bp, Artificial Sequence
  Description of Artificial Sequence: Synthetic oligonucleotide
  Target: LAMA2; (-) strand; PAM type: NRG; PAM sequence: TGG
acaaaattagctgggtgtgg

SEQ ID NO: 105788 - DNA, 20 bp, Artificial Sequence
  Description of Artificial Sequence: Synthetic oligonucleotide
  Target: LAMA2; (-) strand; PAM type: NRG; PAM sequence: TGG
aatacaaaattagctgggtg

SEQ ID NO: 105789 - DNA, 20 bp, Artificial Sequence
  Description of Artificial Sequence: Synthetic oligonucleotide
  Target: LAMA2; (-) strand; PAM type: NRG; PAM sequence: GGG
ctaaaaatacaaaattagct

SEQ ID NO: 105790 - DNA, 20 bp, Artificial Sequence
  Description of Artificial Sequence: Synthetic oligonucleotide
  Target: LAMA2; (-) strand; PAM type: NRG; PAM sequence: TGG
actaaaaatacaaaattagc

SEQ ID NO: 105791 - DNA, 20 bp, Artificial Sequence
  Description of Artificial Sequence: Synthetic oligonucleotide
  Target: LAMA2; (-) strand; PAM type: NRG; PAM sequence: TAG
ctctactaaaaatacaaaat

SEQ ID NO: 105792 - DNA, 20 bp, Artificial Sequence
  Description of Artificial Sequence: Synthetic oligonucleotide
  Target: LAMA2; (-) strand; PAM type: NRG; PAM sequence: TGG
cgagaccagcctggccaaca

SEQ ID NO: 105793 - DNA, 20 bp, Artificial Sequence
  Description of Artificial Sequence: Synthetic oligonucleotide
  Target: LAMA2; (-) strand; PAM type: NRG; PAM sequence: TGG
tcaggagtccgagaccagcc

SEQ ID NO: 105794 - DNA, 20 bp, Artificial Sequence
  Description of Artificial Sequence: Synthetic oligonucleotide
  Target: LAMA2; (-) strand; PAM type: NRG; PAM sequence: CAG
tgaggtcaggagtccgagac

SEQ ID NO: 105795 - DNA, 20 bp, Artificial Sequence
  Description of Artificial Sequence: Synthetic oligonucleotide
  Target: LAMA2; (-) strand; PAM type: NRG; PAM sequence: GAG
tcacctgaggtcaggagtcc

SEQ ID NO: 105796 - DNA, 20 bp, Artificial Sequence
  Description of Artificial Sequence: Synthetic oligonucleotide
  Target: LAMA2; (-) strand; PAM type: NRG; PAM sequence: GAG
ggtggatcacctgaggtcag

SEQ ID NO: 105797 - DNA, 20 bp, Artificial Sequence
  Description of Artificial Sequence: Synthetic oligonucleotide
  Target: LAMA2; (-) strand; PAM type: NRG; PAM sequence: AGG
caggtggatcacctgaggtc

SEQ ID NO: 105798 - DNA, 20 bp, Artificial Sequence
  Description of Artificial Sequence: Synthetic oligonucleotide
  Target: LAMA2; (-) strand; PAM type: NRG; PAM sequence: CAG
gcaggtggatcacctgaggt

SEQ ID NO: 105799 - DNA, 20 bp, Artificial Sequence
  Description of Artificial Sequence: Synthetic oligonucleotide
  Target: LAMA2; (-) strand; PAM type: NRG; PAM sequence: AGG
caaggcaggtggatcacctg

SEQ ID NO: 105800 - DNA, 20 bp, Artificial Sequence
  Description of Artificial Sequence: Synthetic oligonucleotide
  Target: LAMA2; (-) strand; PAM type: NRG; PAM sequence: GAG
ccaaggcaggtggatcacct

SEQ ID NO: 105801 - DNA, 20 bp, Artificial Sequence
  Description of Artificial Sequence: Synthetic oligonucleotide
  Target: LAMA2; (-) strand; PAM type: NRG; PAM sequence: TGG
ctttgggaggccaaggcagg

SEQ ID NO: 105802 - DNA, 20 bp, Artificial Sequence
  Description of Artificial Sequence: Synthetic oligonucleotide
  Target: LAMA2; (-) strand; PAM type: NRG; PAM sequence: AGG
gcactttgggaggccaaggc

SEQ ID NO: 105803 - DNA, 20 bp, Artificial Sequence
  Description of Artificial Sequence: Synthetic oligonucleotide
  Target: LAMA2; (-) strand; PAM type: NRG; PAM sequence: CAG
agcactttgggaggccaagg

SEQ ID NO: 105804 - DNA, 20 bp, Artificial Sequence
  Description of Artificial Sequence: Synthetic oligonucleotide
  Target: LAMA2; (-) strand; PAM type: NRG; PAM sequence: AGG
cccagcactttgggaggcca

SEQ ID NO: 105805 - DNA, 20 bp, Artificial Sequence
  Description of Artificial Sequence: Synthetic oligonucleotide
  Target: LAMA2; (-) strand; PAM type: NRG; PAM sequence: AAG
tcccagcactttgggaggcc

SEQ ID NO: 105806 - DNA, 20 bp, Artificial Sequence
  Description of Artificial Sequence: Synthetic oligonucleotide
  Target: LAMA2; (-) strand; PAM type: NRG; PAM sequence: AGG
tgttatcccagcactttggg

SEQ ID NO: 105807 - DNA, 20 bp, Artificial Sequence
  Description of Artificial Sequence: Synthetic oligonucleotide
  Target: LAMA2; (-) strand; PAM type: NRG; PAM sequence: GAG
ctgttatcccagcactttgg

SEQ ID NO: 105808 - DNA, 20 bp, Artificial Sequence
  Description of Artificial Sequence: Synthetic oligonucleotide
  Target: LAMA2; (-) strand; PAM type: NRG; PAM sequence: GGG
gcctgttatcccagcacttt

SEQ ID NO: 105809 - DNA, 20 bp, Artificial Sequence
  Description of Artificial Sequence: Synthetic oligonucleotide
  Target: LAMA2; (-) strand; PAM type: NRG; PAM sequence: TGG
tgcctgttatcccagcactt

SEQ ID NO: 105810 - DNA, 20 bp, Artificial Sequence
  Description of Artificial Sequence: Synthetic oligonucleotide
  Target: LAMA2; (-) strand; PAM type: NRG; PAM sequence: CAG
gtggctcatgcctgttatcc

SEQ ID NO: 105811 - DNA, 20 bp, Artificial Sequence
  Description of Artificial Sequence: Synthetic oligonucleotide
  Target: LAMA2; (-) strand; PAM type: NRG; PAM sequence: TGG
taaaaatgggtcaggcacgg

SEQ ID NO: 105812 - DNA, 20 bp, Artificial Sequence
  Description of Artificial Sequence: Synthetic oligonucleotide
  Target: LAMA2; (-) strand; PAM type: NRG; PAM sequence: CGG
aaataaaaatgggtcaggca

SEQ ID NO: 105813 - DNA, 20 bp, Artificial Sequence
  Description of Artificial Sequence: Synthetic oligonucleotide
  Target: LAMA2; (-) strand; PAM type: NRG; PAM sequence: AGG
taaataaataaaaatgggtc

SEQ ID NO: 105814 - DNA, 20 bp, Artificial Sequence
  Description of Artificial Sequence: Synthetic oligonucleotide
  Target: LAMA2; (-) strand; PAM type: NRG; PAM sequence: CAG
ataaataaataaaaatgggt

SEQ ID NO: 105815 - DNA, 20 bp, Artificial Sequence
  Description of Artificial Sequence: Synthetic oligonucleotide
  Target: LAMA2; (-) strand; PAM type: NRG; PAM sequence: GGG
tttaataaataaataaaaat

SEQ ID NO: 105816 - DNA, 20 bp, Artificial Sequence
  Description of Artificial Sequence: Synthetic oligonucleotide
  Target: LAMA2; (-) strand; PAM type: NRG; PAM sequence: TGG
ttttaataaataaataaaaa

SEQ ID NO: 105817 - DNA, 20 bp, Artificial Sequence
  Description of Artificial Sequence: Synthetic oligonucleotide
  Target: LAMA2; (-) strand; PAM type: NRG; PAM sequence: GAG
actatctctagtatgtagat

SEQ ID NO: 105818 - DNA, 20 bp, Artificial Sequence
  Description of Artificial Sequence: Synthetic oligonucleotide
  Target: LAMA2; (-) strand; PAM type: NRG; PAM sequence: TAG
atatcactatctctagtatg

SEQ ID NO: 105819 - DNA, 20 bp, Artificial Sequence
  Description of Artificial Sequence: Synthetic oligonucleotide
  Target: LAMA2; (-) strand; PAM type: NRG; PAM sequence: TAG
gttttatatatcactatctc

SEQ ID NO: 105820 - DNA, 20 bp, Artificial Sequence
  Description of Artificial Sequence: Synthetic oligonucleotide
  Target: LAMA2; (-) strand; PAM type: NRG; PAM sequence: CAG
taacacaaattccataaaga

SEQ ID NO: 105821 - DNA, 20 bp, Artificial Sequence
  Description of Artificial Sequence: Synthetic oligonucleotide
  Target: LAMA2; (-) strand; PAM type: NRG; PAM sequence: AAG
actgtaacacaaattccata

SEQ ID NO: 105822 - DNA, 20 bp, Artificial Sequence
  Description of Artificial Sequence: Synthetic oligonucleotide
  Target: LAMA2; (-) strand; PAM type: NRG; PAM sequence: TAG
cttatgcttatttattgact

SEQ ID NO: 105823 - DNA, 20 bp, Artificial Sequence
  Description of Artificial Sequence: Synthetic oligonucleotide
  Target: LAMA2; (-) strand; PAM type: NRG; PAM sequence: TAG
gcatccagactttatggtcg

SEQ ID NO: 105824 - DNA, 20 bp, Artificial Sequence
  Description of Artificial Sequence: Synthetic oligonucleotide
  Target: LAMA2; (-) strand; PAM type: NRG; PAM sequence: TGG
gcccgtgcatccagacttta

SEQ ID NO: 105825 - DNA, 20 bp, Artificial Sequence
  Description of Artificial Sequence: Synthetic oligonucleotide
  Target: LAMA2; (-) strand; PAM type: NRG; PAM sequence: CAG
tgtttatcagcccgtgcatc

SEQ ID NO: 105826 - DNA, 20 bp, Artificial Sequence
  Description of Artificial Sequence: Synthetic oligonucleotide
  Target: LAMA2; (-) strand; PAM type: NRG; PAM sequence: CAG
agtaaacaacttatgtttat

SEQ ID NO: 105827 - DNA, 20 bp, Artificial Sequence
  Description of Artificial Sequence: Synthetic oligonucleotide
  Target: LAMA2; (-) strand; PAM type: NRG; PAM sequence: CAG
acataccatttattacatat

SEQ ID NO: 105828 - DNA, 20 bp, Artificial Sequence
  Description of Artificial Sequence: Synthetic oligonucleotide
  Target: LAMA2; (-) strand; PAM type: NRG; PAM sequence: AGG
gaactacacattgttaatga

SEQ ID NO: 105829 - DNA, 20 bp, Artificial Sequence
  Description of Artificial Sequence: Synthetic oligonucleotide
  Target: LAMA2; (-) strand; PAM type: NRG; PAM sequence: AAG
tgaactacacattgttaatg

SEQ ID NO: 105830 - DNA, 20 bp, Artificial Sequence
  Description of Artificial Sequence: Synthetic oligonucleotide
  Target: LAMA2; (-) strand; PAM type: NRG; PAM sequence: CAG
cagggactagcagaaaggca

SEQ ID NO: 105831 - DNA, 20 bp, Artificial Sequence
  Description of Artificial Sequence: Synthetic oligonucleotide
  Target: LAMA2; (-) strand; PAM type: NRG; PAM sequence: AGG
atgtacagggactagcagaa

SEQ ID NO: 105832 - DNA, 20 bp, Artificial Sequence
  Description of Artificial Sequence: Synthetic oligonucleotide
  Target: LAMA2; (-) strand; PAM type: NRG; PAM sequence: AAG
catgtacagggactagcaga

SEQ ID NO: 105833 - DNA, 20 bp, Artificial Sequence
  Description of Artificial Sequence: Synthetic oligonucleotide
  Target: LAMA2; (-) strand; PAM type: NRG; PAM sequence: CAG
gatacatgtacagggactag

SEQ ID NO: 105834 - DNA, 20 bp, Artificial Sequence
  Description of Artificial Sequence: Synthetic oligonucleotide
  Target: LAMA2; (-) strand; PAM type: NRG; PAM sequence: TAG
acagatacatgtacagggac

SEQ ID NO: 105835 - DNA, 20 bp, Artificial Sequence
  Description of Artificial Sequence: Synthetic oligonucleotide
  Target: LAMA2; (-) strand; PAM type: NRG; PAM sequence: GGG
gcatcacagatacatgtaca

SEQ ID NO: 105836 - DNA, 20 bp, Artificial Sequence
  Description of Artificial Sequence: Synthetic oligonucleotide
  Target: LAMA2; (-) strand; PAM type: NRG; PAM sequence: AGG
tgcatcacagatacatgtac

SEQ ID NO: 105837 - DNA, 20 bp, Artificial Sequence
  Description of Artificial Sequence: Synthetic oligonucleotide
  Target: LAMA2; (-) strand; PAM type: NRG; PAM sequence: CAG
atgcatcacagatacatgta

SEQ ID NO: 105838 - DNA, 20 bp, Artificial Sequence
  Description of Artificial Sequence: Synthetic oligonucleotide
  Target: LAMA2; (-) strand; PAM type: NRG; PAM sequence: CAG
tcagaaataccaatgcatca

SEQ ID NO: 105839 - DNA, 20 bp, Artificial Sequence
  Description of Artificial Sequence: Synthetic oligonucleotide
  Target: LAMA2; (-) strand; PAM type: NRG; PAM sequence: CAG
aaagattaggtaataaaaat

SEQ ID NO: 105840 - DNA, 20 bp, Artificial Sequence
  Description of Artificial Sequence: Synthetic oligonucleotide
  Target: LAMA2; (-) strand; PAM type: NRG; PAM sequence: AGG
agttgctaaaaacaaagatt

SEQ ID NO: 105841 - DNA, 20 bp, Artificial Sequence
  Description of Artificial Sequence: Synthetic oligonucleotide
  Target: LAMA2; (-) strand; PAM type: NRG; PAM sequence: TAG
gagttgctaaaaacaaagat

SEQ ID NO: 105842 - DNA, 20 bp, Artificial Sequence
  Description of Artificial Sequence: Synthetic oligonucleotide
  Target: LAMA2; (-) strand; PAM type: NRG; PAM sequence: AAG
gccgggagttgctaaaaaca

SEQ ID NO: 105843 - DNA, 20 bp, Artificial Sequence
  Description of Artificial Sequence: Synthetic oligonucleotide
  Target: LAMA2; (-) strand; PAM type: NRG; PAM sequence: GAG
gtcttgattacttttgccgg

SEQ ID NO: 105844 - DNA, 20 bp, Artificial Sequence
  Description of Artificial Sequence: Synthetic oligonucleotide
  Target: LAMA2; (-) strand; PAM type: NRG; PAM sequence: GGG
tcgtcttgattacttttgcc

SEQ ID NO: 105845 - DNA, 20 bp, Artificial Sequence
  Description of Artificial Sequence: Synthetic oligonucleotide
  Target: LAMA2; (-) strand; PAM type: NRG; PAM sequence: CGG
ttcgtcttgattacttttgc

SEQ ID NO: 105846 - DNA, 20 bp, Artificial Sequence
  Description of Artificial Sequence: Synthetic oligonucleotide
  Target: LAMA2; (-) strand; PAM type: NRG; PAM sequence: TAG
atattattttcttttttata

SEQ ID NO: 105847 - DNA, 20 bp, Artificial Sequence
  Description of Artificial Sequence: Synthetic oligonucleotide
  Target: LAMA2; (-) strand; PAM type: NRG; PAM sequence: TAG
tctacagagtggtagaaaca

SEQ ID NO: 105848 - DNA, 20 bp, Artificial Sequence
  Description of Artificial Sequence: Synthetic oligonucleotide
  Target: LAMA2; (-) strand; PAM type: NRG; PAM sequence: TAG
aattatattctacagagtgg

SEQ ID NO: 105849 - DNA, 20 bp, Artificial Sequence
  Description of Artificial Sequence: Synthetic oligonucleotide
  Target: LAMA2; (-) strand; PAM type: NRG; PAM sequence: TGG
ctgaattatattctacagag

SEQ ID NO: 105850 - DNA, 20 bp, Artificial Sequence
  Description of Artificial Sequence: Synthetic oligonucleotide
  Target: LAMA2; (-) strand; PAM type: NRG; PAM sequence: GAG
tatctgaattatattctaca

SEQ ID NO: 105851 - DNA, 20 bp, Artificial Sequence
  Description of Artificial Sequence: Synthetic oligonucleotide
  Target: LAMA2; (-) strand; PAM type: NRG; PAM sequence: CAG
tttatctgaattatattcta

SEQ ID NO: 105852 - DNA, 20 bp, Artificial Sequence
  Description of Artificial Sequence: Synthetic oligonucleotide
  Target: LAMA2; (-) strand; PAM type: NRG; PAM sequence: TAG
ttaccttattttgttcttct

SEQ ID NO: 105853 - DNA, 20 bp, Artificial Sequence
  Description of Artificial Sequence: Synthetic oligonucleotide
  Target: LAMA2; (-) strand; PAM type: NRG; PAM sequence: CAG
ttagaacactgcctggcacc

SEQ ID NO: 105854 - DNA, 20 bp, Artificial Sequence
  Description of Artificial Sequence: Synthetic oligonucleotide
  Target: LAMA2; (-) strand; PAM type: NRG; PAM sequence: TGG
aattagcttagaacactgcc

SEQ ID NO: 105855 - DNA, 20 bp, Artificial Sequence
  Description of Artificial Sequence: Synthetic oligonucleotide
  Target: LAMA2; (-) strand; PAM type: NRG; PAM sequence: TAG
aaattggagaagaattagct

SEQ ID NO: 105856 - DNA, 20 bp, Artificial Sequence
  Description of Artificial Sequence: Synthetic oligonucleotide
  Target: LAMA2; (-) strand; PAM type: NRG; PAM sequence: TAG
ttgtaaaattggagaagaat

SEQ ID NO: 105857 - DNA, 20 bp, Artificial Sequence
  Description of Artificial Sequence: Synthetic oligonucleotide
  Target: LAMA2; (-) strand; PAM type: NRG; PAM sequence: AAG
tagacattgtaaaattggag

SEQ ID NO: 105858 - DNA, 20 bp, Artificial Sequence
  Description of Artificial Sequence: Synthetic oligonucleotide
  Target: LAMA2; (-) strand; PAM type: NRG; PAM sequence: GAG
tgatagacattgtaaaattg

SEQ ID NO: 105859 - DNA, 20 bp, Artificial Sequence
  Description of Artificial Sequence: Synthetic oligonucleotide
  Target: LAMA2; (-) strand; PAM type: NRG; PAM sequence: TGG
attgatagacattgtaaaat

SEQ ID NO: 105860 - DNA, 20 bp, Artificial Sequence
  Description of Artificial Sequence: Synthetic oligonucleotide
  Target: LAMA2; (-) strand; PAM type: NRG; PAM sequence: TAG
caagaaccccacatgattga

SEQ ID NO: 105861 - DNA, 20 bp, Artificial Sequence
  Description of Artificial Sequence: Synthetic oligonucleotide
  Target: LAMA2; (-) strand; PAM type: NRG; PAM sequence: AAG
ctcagaatctgcactttaac

SEQ ID NO: 105862 - DNA, 20 bp, Artificial Sequence
  Description of Artificial Sequence: Synthetic oligonucleotide
  Target: LAMA2; (-) strand; PAM type: NRG; PAM sequence: CAG
attcctgggaactactgact

SEQ ID NO: 105863 - DNA, 20 bp, Artificial Sequence
  Description of Artificial Sequence: Synthetic oligonucleotide
  Target: LAMA2; (-) strand; PAM type: NRG; PAM sequence: GGG
cataatctcaatccattcct

SEQ ID NO: 105864 - DNA, 20 bp, Artificial Sequence
  Description of Artificial Sequence: Synthetic oligonucleotide
  Target: LAMA2; (-) strand; PAM type: NRG; PAM sequence: TGG
gcataatctcaatccattcc

SEQ ID NO: 105865 - DNA, 20 bp, Artificial Sequence
  Description of Artificial Sequence: Synthetic oligonucleotide
  Target: LAMA2; (-) strand; PAM type: NRG; PAM sequence: TAG
agcgtcacctggaagctcat

SEQ ID NO: 105866 - DNA, 20 bp, Artificial Sequence
  Description of Artificial Sequence: Synthetic oligonucleotide
  Target: LAMA2; (-) strand; PAM type: NRG; PAM sequence: AAG
gcagcatcagcgtcacctgg

SEQ ID NO: 105867 - DNA, 20 bp, Artificial Sequence
  Description of Artificial Sequence: Synthetic oligonucleotide
  Target: LAMA2; (-) strand; PAM type: NRG; PAM sequence: TGG
ccagcagcatcagcgtcacc

SEQ ID NO: 105868 - DNA, 20 bp, Artificial Sequence
  Description of Artificial Sequence: Synthetic oligonucleotide
  Target: LAMA2; (-) strand; PAM type: NRG; PAM sequence: CAG
agcccattcaccagcagcat

SEQ ID NO: 105869 - DNA, 20 bp, Artificial Sequence
  Description of Artificial Sequence: Synthetic oligonucleotide
  Target: LAMA2; (-) strand; PAM type: NRG; PAM sequence: CAG
atgtgcagcccattcaccag

SEQ ID NO: 105870 - DNA, 20 bp, Artificial Sequence
  Description of Artificial Sequence: Synthetic oligonucleotide
  Target: LAMA2; (-) strand; PAM type: NRG; PAM sequence: CAG
tcaatgtgcagcccattcac

SEQ ID NO: 105871 - DNA, 20 bp, Artificial Sequence
  Description of Artificial Sequence: Synthetic oligonucleotide
  Target: LAMA2; (-) strand; PAM type: NRG; PAM sequence: CAG
gtccctccctactcaatgtg

SEQ ID NO: 105872 - DNA, 20 bp, Artificial Sequence
  Description of Artificial Sequence: Synthetic oligonucleotide
  Target: LAMA2; (-) strand; PAM type: NRG; PAM sequence: TAG
ttaccttcatacaaaatgtt

SEQ ID NO: 105873 - DNA, 20 bp, Artificial Sequence
  Description of Artificial Sequence: Synthetic oligonucleotide
  Target: LAMA2; (-) strand; PAM type: NRG; PAM sequence: AAG
caagctatgaaaccttaagg

SEQ ID NO: 105874 - DNA, 20 bp, Artificial Sequence
  Description of Artificial Sequence: Synthetic oligonucleotide
  Target: LAMA2; (-) strand; PAM type: NRG; PAM sequence: AGG
tcccaagctatgaaacctta

SEQ ID NO: 105875 - DNA, 20 bp, Artificial Sequence
  Description of Artificial Sequence: Synthetic oligonucleotide
  Target: LAMA2; (-) strand; PAM type: NRG; PAM sequence: AAG
ctcccaagctatgaaacctt

SEQ ID NO: 105876 - DNA, 20 bp, Artificial Sequence
  Description of Artificial Sequence: Synthetic oligonucleotide
  Target: LAMA2; (-) strand; PAM type: NRG; PAM sequence: AAG
tcacagctctgctcactccc

SEQ ID NO: 105877 - DNA, 20 bp, Artificial Sequence
  Description of Artificial Sequence: Synthetic oligonucleotide
  Target: LAMA2; (-) strand; PAM type: NRG; PAM sequence: CAG
gcccttctggtttgggatca

SEQ ID NO: 105878 - DNA, 20 bp, Artificial Sequence
  Description of Artificial Sequence: Synthetic oligonucleotide
  Target: LAMA2; (-) strand; PAM type: NRG; PAM sequence: GGG
agtgacagcccttctggttt

SEQ ID NO: 105879 - DNA, 20 bp, Artificial Sequence
  Description of Artificial Sequence: Synthetic oligonucleotide
  Target: LAMA2; (-) strand; PAM type: NRG; PAM sequence: TGG
aagtgacagcccttctggtt

SEQ ID NO: 105880 - DNA, 20 bp, Artificial Sequence
  Description of Artificial Sequence: Synthetic oligonucleotide
  Target: LAMA2; (-) strand; PAM type: NRG; PAM sequence: TGG
catccaagtgacagcccttc

SEQ ID NO: 105881 - DNA, 20 bp, Artificial Sequence
  Description of Artificial Sequence: Synthetic oligonucleotide
  Target: LAMA2; (-) strand; PAM type: NRG; PAM sequence: CAG
taaaagctacatccaagtga

SEQ ID NO: 105882 - DNA, 20 bp, Artificial Sequence
  Description of Artificial Sequence: Synthetic oligonucleotide
  Target: LAMA2; (-) strand; PAM type: NRG; PAM sequence: AAG
agtgattaaaagctacatcc

SEQ ID NO: 105883 - DNA, 20 bp, Artificial Sequence
  Description of Artificial Sequence: Synthetic oligonucleotide
  Target: LAMA2; (-) strand; PAM type: NRG; PAM sequence: AAG
tactagggcacagtgattaa

SEQ ID NO: 105884 - DNA, 20 bp, Artificial Sequence
  Description of Artificial Sequence: Synthetic oligonucleotide
  Target: LAMA2; (-) strand; PAM type: NRG; PAM sequence: CAG
attctctatgtactagggca

SEQ ID NO: 105885 - DNA, 20 bp, Artificial Sequence
  Description of Artificial Sequence: Synthetic oligonucleotide
  Target: LAMA2; (-) strand; PAM type: NRG; PAM sequence: GGG
caatcattctctatgtacta

SEQ ID NO: 105886 - DNA, 20 bp, Artificial Sequence
  Description of Artificial Sequence: Synthetic oligonucleotide
  Target: LAMA2; (-) strand; PAM type: NRG; PAM sequence: AGG
tcaatcattctctatgtact

SEQ ID NO: 105887 - DNA, 20 bp, Artificial Sequence
  Description of Artificial Sequence: Synthetic oligonucleotide
  Target: LAMA2; (-) strand; PAM type: NRG; PAM sequence: TAG
ctcaatcattctctatgtac

SEQ ID NO: 105888 - DNA, 20 bp, Artificial Sequence
  Description of Artificial Sequence: Synthetic oligonucleotide
  Target: LAMA2; (-) strand; PAM type: NRG; PAM sequence: TAG
ctctgattacctatctaaaa

SEQ ID NO: 105889 - DNA, 20 bp, Artificial Sequence
  Description of Artificial Sequence: Synthetic oligonucleotide
  Target: LAMA2; (-) strand; PAM type: NRG; PAM sequence: TAG
tcctccctccattctggtaa

SEQ ID NO: 105890 - DNA, 20 bp, Artificial Sequence
  Description of Artificial Sequence: Synthetic oligonucleotide
  Target: LAMA2; (-) strand; PAM type: NRG; PAM sequence: TGG
cttgtgtcctccctccattc

SEQ ID NO: 105891 - DNA, 20 bp, Artificial Sequence
  Description of Artificial Sequence: Synthetic oligonucleotide
  Target: LAMA2; (-) strand; PAM type: NRG; PAM sequence: TGG
tatgtgctcttcctactctt

SEQ ID NO: 105892 - DNA, 20 bp, Artificial Sequence
  Description of Artificial Sequence: Synthetic oligonucleotide
  Target: LAMA2; (-) strand; PAM type: NRG; PAM sequence: CAG
cctctaagcctttgcacttg

SEQ ID NO: 105893 - DNA, 20 bp, Artificial Sequence
  Description of Artificial Sequence: Synthetic oligonucleotide
  Target: LAMA2; (-) strand; PAM type: NRG; PAM sequence: AAG
tacaactagttcctgcctct

SEQ ID NO: 105894 - DNA, 20 bp, Artificial Sequence
  Description of Artificial Sequence: Synthetic oligonucleotide
  Target: LAMA2; (-) strand; PAM type: NRG; PAM sequence: TAG
tgttgccaggtacatacaac

SEQ ID NO: 105895 - DNA, 20 bp, Artificial Sequence
  Description of Artificial Sequence: Synthetic oligonucleotide
  Target: LAMA2; (-) strand; PAM type: NRG; PAM sequence: AGG
gaccaattcagtatgttgcc

SEQ ID NO: 105896 - DNA, 20 bp, Artificial Sequence
  Description of Artificial Sequence: Synthetic oligonucleotide
  Target: LAMA2; (-) strand; PAM type: NRG; PAM sequence: CAG
cgaccaattcagtatgttgc

SEQ ID NO: 105897 - DNA, 20 bp, Artificial Sequence
  Description of Artificial Sequence: Synthetic oligonucleotide
  Target: LAMA2; (-) strand; PAM type: NRG; PAM sequence: CAG
cttcccttcaccgaccaatt

SEQ ID NO: 105898 - DNA, 20 bp, Artificial Sequence
  Description of Artificial Sequence: Synthetic oligonucleotide
  Target: LAMA2; (-) strand; PAM type: NRG; PAM sequence: TAG
ttttaaaatttgcactgagc

SEQ ID NO: 105899 - DNA, 20 bp, Artificial Sequence
  Description of Artificial Sequence: Synthetic oligonucleotide
  Target: LAMA2; (-) strand; PAM type: NRG; PAM sequence: GAG
acagttttaaaatttgcact

SEQ ID NO: 105900 - DNA, 20 bp, Artificial Sequence
  Description of Artificial Sequence: Synthetic oligonucleotide
  Target: LAMA2; (-) strand; PAM type: NRG; PAM sequence: CAG
ctcttctattatagaaatca

SEQ ID NO: 105901 - DNA, 20 bp, Artificial Sequence
  Description of Artificial Sequence: Synthetic oligonucleotide
  Target: LAMA2; (-) strand; PAM type: NRG; PAM sequence: TAG
aaatactatctcttctatta

SEQ ID NO: 105902 - DNA, 20 bp, Artificial Sequence
  Description of Artificial Sequence: Synthetic oligonucleotide
  Target: LAMA2; (-) strand; PAM type: NRG; PAM sequence: GGG
tctacttaatgatagatcct

SEQ ID NO: 105903 - DNA, 20 bp, Artificial Sequence
  Description of Artificial Sequence: Synthetic oligonucleotide
  Target: LAMA2; (-) strand; PAM type: NRG; PAM sequence: TGG
gtctacttaatgatagatcc

SEQ ID NO: 105904 - DNA, 20 bp, Artificial Sequence
  Description of Artificial Sequence: Synthetic oligonucleotide
  Target: LAMA2; (-) strand; PAM type: NRG; PAM sequence: TAG
aacccctgtctacttaatga

SEQ ID NO: 105905 - DNA, 20 bp, Artificial Sequence
  Description of Artificial Sequence: Synthetic oligonucleotide
  Target: LAMA2; (-) strand; PAM type: NRG; PAM sequence: AAG
tcacatagtacagtgtgatt

SEQ ID NO: 105906 - DNA, 20 bp, Artificial Sequence
  Description of Artificial Sequence: Synthetic oligonucleotide
  Target: LAMA2; (-) strand; PAM type: NRG; PAM sequence: CAG
tcctttaaggtcacatagta

SEQ ID NO: 105907 - DNA, 20 bp, Artificial Sequence
  Description of Artificial Sequence: Synthetic oligonucleotide
  Target: LAMA2; (-) strand; PAM type: NRG; PAM sequence: TAG
atgattcctttaaggtcaca

SEQ ID NO: 105908 - DNA, 20 bp, Artificial Sequence
  Description of Artificial Sequence: Synthetic oligonucleotide
  Target: LAMA2; (-) strand; PAM type: NRG; PAM sequence: AGG
gatattaaatgattccttta

SEQ ID NO: 105909 - DNA, 20 bp, Artificial Sequence
  Description of Artificial Sequence: Synthetic oligonucleotide
  Target: LAMA2; (-) strand; PAM type: NRG; PAM sequence: AAG
agatattaaatgattccttt

SEQ ID NO: 105910 - DNA, 20 bp, Artificial Sequence
  Description of Artificial Sequence: Synthetic oligonucleotide
  Target: LAMA2; (-) strand; PAM type: NRG; PAM sequence: AAG
tatagcagctcagatgaact

SEQ ID NO: 105911 - DNA, 20 bp, Artificial Sequence
  Description of Artificial Sequence: Synthetic oligonucleotide
  Target: LAMA2; (-) strand; PAM type: NRG; PAM sequence: CAG
ggtctcttgctatagcagct

SEQ ID NO: 105912 - DNA, 20 bp, Artificial Sequence
  Description of Artificial Sequence: Synthetic oligonucleotide
  Target: LAMA2; (-) strand; PAM type: NRG; PAM sequence: CAG
tttttggtctcttgctatag

SEQ ID NO: 105913 - DNA, 20 bp, Artificial Sequence
  Description of Artificial Sequence: Synthetic oligonucleotide
  Target: LAMA2; (-) strand; PAM type: NRG; PAM sequence: TAG
cagtttttggtctcttgcta

SEQ ID NO: 105914 - DNA, 20 bp, Artificial Sequence
  Description of Artificial Sequence: Synthetic oligonucleotide
  Target: LAMA2; (-) strand; PAM type: NRG; PAM sequence: TGG
catataagccactcagtttt

SEQ ID NO: 105915 - DNA, 20 bp, Artificial Sequence
  Description of Artificial Sequence: Synthetic oligonucleotide
  Target: LAMA2; (-) strand; PAM type: NRG; PAM sequence: CAG
ttgattgcatataagccact

SEQ ID NO: 105916 - DNA, 20 bp, Artificial Sequence
  Description of Artificial Sequence: Synthetic oligonucleotide
  Target: LAMA2; (-) strand; PAM type: NRG; PAM sequence: AAG
aataagttttgattgcatat

SEQ ID NO: 105917 - DNA, 20 bp, Artificial Sequence
  Description of Artificial Sequence: Synthetic oligonucleotide
  Target: LAMA2; (-) strand; PAM type: NRG; PAM sequence: AAG
cctccagaaccataagaaat

SEQ ID NO: 105918 - DNA, 20 bp, Artificial Sequence
  Description of Artificial Sequence: Synthetic oligonucleotide
  Target: LAMA2; (-) strand; PAM type: NRG; PAM sequence: AAG
ttcccagcctccagaaccat

SEQ ID NO: 105919 - DNA, 20 bp, Artificial Sequence
  Description of Artificial Sequence: Synthetic oligonucleotide
  Target: LAMA2; (-) strand; PAM type: NRG; PAM sequence: CAG
atcatggatttcccagcctc

SEQ ID NO: 105920 - DNA, 20 bp, Artificial Sequence
  Description of Artificial Sequence: Synthetic oligonucleotide
  Target: LAMA2; (-) strand; PAM type: NRG; PAM sequence: CAG
tactttgatcatggatttcc

SEQ ID NO: 105921 - DNA, 20 bp, Artificial Sequence
  Description of Artificial Sequence: Synthetic oligonucleotide
  Target: LAMA2; (-) strand; PAM type: NRG; PAM sequence: TGG
atctgccaatactttgatca

SEQ ID NO: 105922 - DNA, 20 bp, Artificial Sequence
  Description of Artificial Sequence: Synthetic oligonucleotide
  Target: LAMA2; (-) strand; PAM type: NRG; PAM sequence: CAG
accagaaagtggtccctcat

SEQ ID NO: 105923 - DNA, 20 bp, Artificial Sequence
  Description of Artificial Sequence: Synthetic oligonucleotide
  Target: LAMA2; (-) strand; PAM type: NRG; PAM sequence: TGG
ggtgtctatgaaccagaaag

SEQ ID NO: 105924 - DNA, 20 bp, Artificial Sequence
  Description of Artificial Sequence: Synthetic oligonucleotide
  Target: LAMA2; (-) strand; PAM type: NRG; PAM sequence: AAG
aacggtgtctatgaaccaga

SEQ ID NO: 105925 - DNA, 20 bp, Artificial Sequence
  Description of Artificial Sequence: Synthetic oligonucleotide
  Target: LAMA2; (-) strand; PAM type: NRG; PAM sequence: CAG
tgaaaacggtgtctatgaac

SEQ ID NO: 105926 - DNA, 20 bp, Artificial Sequence
  Description of Artificial Sequence: Synthetic oligonucleotide
  Target: LAMA2; (-) strand; PAM type: NRG; PAM sequence: CGG
atgtgaggacacagtgaaaa

SEQ ID NO: 105927 - DNA, 20 bp, Artificial Sequence
  Description of Artificial Sequence: Synthetic oligonucleotide
  Target: LAMA2; (-) strand; PAM type: NRG; PAM sequence: CAG
ccttttaccatgtgaggaca

SEQ ID NO: 105928 - DNA, 20 bp, Artificial Sequence
  Description of Artificial Sequence: Synthetic oligonucleotide
  Target: LAMA2; (-) strand; PAM type: NRG; PAM sequence: AGG
gttcatccttttaccatgtg

SEQ ID NO: 105929 - DNA, 20 bp, Artificial Sequence
  Description of Artificial Sequence: Synthetic oligonucleotide
  Target: LAMA2; (-) strand; PAM type: NRG; PAM sequence: GAG
tgttcatccttttaccatgt

SEQ ID NO: 105930 - DNA, 20 bp, Artificial Sequence
  Description of Artificial Sequence: Synthetic oligonucleotide
  Target: LAMA2; (-) strand; PAM type: NRG; PAM sequence: GAG
cttataaaaaagacctgaag

SEQ ID NO: 105931 - DNA, 20 bp, Artificial Sequence
  Description of Artificial Sequence: Synthetic oligonucleotide
  Target: LAMA2; (-) strand; PAM type: NRG; PAM sequence: AGG
cccttataaaaaagacctga

SEQ ID NO: 105932 - DNA, 20 bp, Artificial Sequence
  Description of Artificial Sequence: Synthetic oligonucleotide
  Target: LAMA2; (-) strand; PAM type: NRG; PAM sequence: AAG
gcccttataaaaaagacctg

SEQ ID NO: 105933 - DNA, 20 bp, Artificial Sequence
  Description of Artificial Sequence: Synthetic oligonucleotide
  Target: LAMA2; (-) strand; PAM type: NRG; PAM sequence: AAG
ggattactgcccttataaaa

SEQ ID NO: 105934 - DNA, 20 bp, Artificial Sequence
  Description of Artificial Sequence: Synthetic oligonucleotide
  Target: LAMA2; (-) strand; PAM type: NRG; PAM sequence: GGG
gaagcagagacttcataaac

SEQ ID NO: 105935 - DNA, 20 bp, Artificial Sequence
  Description of Artificial Sequence: Synthetic oligonucleotide
  Target: LAMA2; (-) strand; PAM type: NRG; PAM sequence: CGG
tgaagcagagacttcataaa

SEQ ID NO: 105936 - DNA, 20 bp, Artificial Sequence
  Description of Artificial Sequence: Synthetic oligonucleotide
  Target: LAMA2; (-) strand; PAM type: NRG; PAM sequence: GAG
ggtgaccaggtcatgaagca

SEQ ID NO: 105937 - DNA, 20 bp, Artificial Sequence
  Description of Artificial Sequence: Synthetic oligonucleotide
  Target: LAMA2; (-) strand; PAM type: NRG; PAM sequence: CAG
gaggtgaccaggtcatgaag

SEQ ID NO: 105938 - DNA, 20 bp, Artificial Sequence
  Description of Artificial Sequence: Synthetic oligonucleotide
  Target: LAMA2; (-) strand; PAM type: NRG; PAM sequence: AAG
ttggaggtgaccaggtcatg

SEQ ID NO: 105939 - DNA, 20 bp, Artificial Sequence
  Description of Artificial Sequence: Synthetic oligonucleotide
  Target: LAMA2; (-) strand; PAM type: NRG; PAM sequence: AGG
tggggcctttggaggtgacc

SEQ ID NO: 105940 - DNA, 20 bp, Artificial Sequence
  Description of Artificial Sequence: Synthetic oligonucleotide
  Target: LAMA2; (-) strand; PAM type: NRG; PAM sequence: CAG
gtggggcctttggaggtgac

SEQ ID NO: 105941 - DNA, 20 bp, Artificial Sequence
  Description of Artificial Sequence: Synthetic oligonucleotide
  Target: LAMA2; (-) strand; PAM type: NRG; PAM sequence: AGG
ttaggaagtggggcctttgg

SEQ ID NO: 105942 - DNA, 20 bp, Artificial Sequence
  Description of Artificial Sequence: Synthetic oligonucleotide
  Target: LAMA2; (-) strand; PAM type: NRG; PAM sequence: GAG
attaggaagtggggcctttg

SEQ ID NO: 105943 - DNA, 20 bp, Artificial Sequence
  Description of Artificial Sequence: Synthetic oligonucleotide
  Target: LAMA2; (-) strand; PAM type: NRG; PAM sequence: TGG
ggattaggaagtggggcctt

SEQ ID NO: 105944 - DNA, 20 bp, Artificial Sequence
  Description of Artificial Sequence: Synthetic oligonucleotide
  Target: LAMA2; (-) strand; PAM type: NRG; PAM sequence: GGG
ggtgataggattaggaagtg

SEQ ID NO: 105945 - DNA, 20 bp, Artificial Sequence
  Description of Artificial Sequence: Synthetic oligonucleotide
  Target: LAMA2; (-) strand; PAM type: NRG; PAM sequence: GGG
aggtgataggattaggaagt

SEQ ID NO: 105946 - DNA, 20 bp, Artificial Sequence
  Description of Artificial Sequence: Synthetic oligonucleotide
  Target: LAMA2; (-) strand; PAM type: NRG; PAM sequence: TGG
aaggtgataggattaggaag

SEQ ID NO: 105947 - DNA, 20 bp, Artificial Sequence
  Description of Artificial Sequence: Synthetic oligonucleotide
  Target: LAMA2; (-) strand; PAM type: NRG; PAM sequence: AAG
ctcaaggtgataggattagg

SEQ ID NO: 105948 - DNA, 20 bp, Artificial Sequence
  Description of Artificial Sequence: Synthetic oligonucleotide
  Target: LAMA2; (-) strand; PAM type: NRG; PAM sequence: AGG
atcctcaaggtgataggatt

SEQ ID NO: 105949 - DNA, 20 bp, Artificial Sequence
  Description of Artificial Sequence: Synthetic oligonucleotide
  Target: LAMA2; (-) strand; PAM type: NRG; PAM sequence: TAG
aatcctcaaggtgataggat

SEQ ID NO: 105950 - DNA, 20 bp, Artificial Sequence
  Description of Artificial Sequence: Synthetic oligonucleotide
  Target: LAMA2; (-) strand; PAM type: NRG; PAM sequence: AGG
atcctaatcctcaaggtgat

SEQ ID NO: 105951 - DNA, 20 bp, Artificial Sequence
  Description of Artificial Sequence: Synthetic oligonucleotide
  Target: LAMA2; (-) strand; PAM type: NRG; PAM sequence: TAG
aatcctaatcctcaaggtga

SEQ ID NO: 105952 - DNA, 20 bp, Artificial Sequence
  Description of Artificial Sequence: Synthetic oligonucleotide
  Target: LAMA2; (-) strand; PAM type: NRG; PAM sequence: AGG
tgttgaaatcctaatcctca

SEQ ID NO: 105953 - DNA, 20 bp, Artificial Sequence
  Description of Artificial Sequence: Synthetic oligonucleotide
  Target: LAMA2; (-) strand; PAM type: NRG; PAM sequence: AAG
atgttgaaatcctaatcctc

SEQ ID NO: 105954 - DNA, 20 bp, Artificial Sequence
  Description of Artificial Sequence: Synthetic oligonucleotide
  Target: LAMA2; (-) strand; PAM type: NRG; PAM sequence: TGG
attgaataagtaaagggcag

SEQ ID NO: 105955 - DNA, 20 bp, Artificial Sequence
  Description of Artificial Sequence: Synthetic oligonucleotide
  Target: LAMA2; (-) strand; PAM type: NRG; PAM sequence: CAG
gaaattgaataagtaaaggg

SEQ ID NO: 105956 - DNA, 20 bp, Artificial Sequence
  Description of Artificial Sequence: Synthetic oligonucleotide
  Target: LAMA2; (-) strand; PAM type: NRG; PAM sequence: GGG
tgggaaattgaataagtaaa

SEQ ID NO: 105957 - DNA, 20 bp, Artificial Sequence
  Description of Artificial Sequence: Synthetic oligonucleotide
  Target: LAMA2; (-) strand; PAM type: NRG; PAM sequence: AGG
gtgggaaattgaataagtaa

SEQ ID NO: 105958 - DNA, 20 bp, Artificial Sequence
  Description of Artificial Sequence: Synthetic oligonucleotide
  Target: LAMA2; (-) strand; PAM type: NRG; PAM sequence: AAG
agtgggaaattgaataagta

SEQ ID NO: 105959 - DNA, 20 bp, Artificial Sequence
  Description of Artificial Sequence: Synthetic oligonucleotide
  Target: LAMA2; (-) strand; PAM type: NRG; PAM sequence: AAG
acataagtgggaaattgaat

SEQ ID NO: 105960 - DNA, 20 bp, Artificial Sequence
  Description of Artificial Sequence: Synthetic oligonucleotide
  Target: LAMA2; (-) strand; PAM type: NRG; PAM sequence: GGG
tgatcactttttacataagt

SEQ ID NO: 105961 - DNA, 20 bp, Artificial Sequence
  Description of Artificial Sequence: Synthetic oligonucleotide
  Target: LAMA2; (-) strand; PAM type: NRG; PAM sequence: TGG
ttgatcactttttacataag

SEQ ID NO: 105962 - DNA, 20 bp, Artificial Sequence
  Description of Artificial Sequence: Synthetic oligonucleotide
  Target: LAMA2; (-) strand; PAM type: NRG; PAM sequence: AAG
atgttgatcactttttacat

SEQ ID NO: 105963 - DNA, 20 bp, Artificial Sequence
  Description of Artificial Sequence: Synthetic oligonucleotide
  Target: LAMA2; (-) strand; PAM type: NRG; PAM sequence: TGG
cattttgttattccaatctt

SEQ ID NO: 105964 - DNA, 20 bp, Artificial Sequence
  Description of Artificial Sequence: Synthetic oligonucleotide
  Target: LAMA2; (-) strand; PAM type: NRG; PAM sequence: AAG
atatgtgccagacagtttgt

SEQ ID NO: 105965 - DNA, 20 bp, Artificial Sequence
  Description of Artificial Sequence: Synthetic oligonucleotide
  Target: LAMA2; (-) strand; PAM type: NRG; PAM sequence: CAG
agatctcaatatgtgccaga

SEQ ID NO: 105966 - DNA, 20 bp, Artificial Sequence
  Description of Artificial Sequence: Synthetic oligonucleotide
  Target: LAMA2; (-) strand; PAM type: NRG; PAM sequence: CAG
atttagatctcaatatgtgc

SEQ ID NO: 105967 - DNA, 20 bp, Artificial Sequence
  Description of Artificial Sequence: Synthetic oligonucleotide
  Target: LAMA2; (-) strand; PAM type: NRG; PAM sequence: TAG
gacaataatgctaattcatt

SEQ ID NO: 105968 - DNA, 20 bp, Artificial Sequence
  Description of Artificial Sequence: Synthetic oligonucleotide
  Target: LAMA2; (-) strand; PAM type: NRG; PAM sequence: TAG
ccacttatagtttttttcta

SEQ ID NO: 105969 - DNA, 20 bp, Artificial Sequence
  Description of Artificial Sequence: Synthetic oligonucleotide
  Target: LAMA2; (-) strand; PAM type: NRG; PAM sequence: TAG
ttttaagctttgaccactta

SEQ ID NO: 105970 - DNA, 20 bp, Artificial Sequence
  Description of Artificial Sequence: Synthetic oligonucleotide
  Target: LAMA2; (-) strand; PAM type: NRG; PAM sequence: AAG
actgcatcaattataatttt

SEQ ID NO: 105971 - DNA, 20 bp, Artificial Sequence
  Description of Artificial Sequence: Synthetic oligonucleotide
  Target: LAMA2; (-) strand; PAM type: NRG; PAM sequence: CAG
tgaaatcaccattctaccta

SEQ ID NO: 105972 - DNA, 20 bp, Artificial Sequence
  Description of Artificial Sequence: Synthetic oligonucleotide
  Target: LAMA2; (-) strand; PAM type: NRG; PAM sequence: GGG
tattgctatttctccatttg

SEQ ID NO: 105973 - DNA, 20 bp, Artificial Sequence
  Description of Artificial Sequence: Synthetic oligonucleotide
  Target: LAMA2; (-) strand; PAM type: NRG; PAM sequence: GGG
atattgctatttctccattt

SEQ ID NO: 105974 - DNA, 20 bp, Artificial Sequence
  Description of Artificial Sequence: Synthetic oligonucleotide
  Target: LAMA2; (-) strand; PAM type: NRG; PAM sequence: TGG
aatattgctatttctccatt

SEQ ID NO: 105975 - DNA, 20 bp, Artificial Sequence
  Description of Artificial Sequence: Synthetic oligonucleotide
  Target: LAMA2; (-) strand; PAM type: NRG; PAM sequence: GAG
tagaagagtaaaatcagtga

SEQ ID NO: 105976 - DNA, 20 bp, Artificial Sequence
  Description of Artificial Sequence: Synthetic oligonucleotide
  Target: LAMA2; (-) strand; PAM type: NRG; PAM sequence: GAG
cctagaagagtaaaatcagt

SEQ ID NO: 105977 - DNA, 20 bp, Artificial Sequence
  Description of Artificial Sequence: Synthetic oligonucleotide
  Target: LAMA2; (-) strand; PAM type: NRG; PAM sequence: CAG
ctggcctagaagagtaaaat

SEQ ID NO: 105978 - DNA, 20 bp, Artificial Sequence
  Description of Artificial Sequence: Synthetic oligonucleotide
  Target: LAMA2; (-) strand; PAM type: NRG; PAM sequence: GAG
aactcaatcctggcctagaa

SEQ ID NO: 105979 - DNA, 20 bp, Artificial Sequence
  Description of Artificial Sequence: Synthetic oligonucleotide
  Target: LAMA2; (-) strand; PAM type: NRG; PAM sequence: AAG
gaaactcaatcctggcctag

SEQ ID NO: 105980 - DNA, 20 bp, Artificial Sequence
  Description of Artificial Sequence: Synthetic oligonucleotide
  Target: LAMA2; (-) strand; PAM type: NRG; PAM sequence: TAG
catgaaactcaatcctggcc

SEQ ID NO: 105981 - DNA, 20 bp, Artificial Sequence
  Description of Artificial Sequence: Synthetic oligonucleotide
  Target: LAMA2; (-) strand; PAM type: NRG; PAM sequence: TGG
aagtacatgaaactcaatcc

SEQ ID NO: 105982 - DNA, 20 bp, Artificial Sequence
  Description of Artificial Sequence: Synthetic oligonucleotide
  Target: LAMA2; (-) strand; PAM type: NRG; PAM sequence: AAG
gaacatatagcttgtctcaa

SEQ ID NO: 105983 - DNA, 20 bp, Artificial Sequence
  Description of Artificial Sequence: Synthetic oligonucleotide
  Target: LAMA2; (-) strand; PAM type: NRG; PAM sequence: TAG
taatttttctttggaacata

SEQ ID NO: 105984 - DNA, 20 bp, Artificial Sequence
  Description of Artificial Sequence: Synthetic oligonucleotide
  Target: LAMA2; (-) strand; PAM type: NRG; PAM sequence: TGG
aatagattataatttttctt

SEQ ID NO: 105985 - DNA, 20 bp, Artificial Sequence
  Description of Artificial Sequence: Synthetic oligonucleotide
  Target: LAMA2; (-) strand; PAM type: NRG; PAM sequence: TAG
tggactgtttcatgagagaa

SEQ ID NO: 105986 - DNA, 20 bp, Artificial Sequence
  Description of Artificial Sequence: Synthetic oligonucleotide
  Target: LAMA2; (-) strand; PAM type: NRG; PAM sequence: GAG
cctaatggactgtttcatga

SEQ ID NO: 105987 - DNA, 20 bp, Artificial Sequence
  Description of Artificial Sequence: Synthetic oligonucleotide
  Target: LAMA2; (-) strand; PAM type: NRG; PAM sequence: GAG
aacctaatggactgtttcat

SEQ ID NO: 105988 - DNA, 20 bp, Artificial Sequence
  Description of Artificial Sequence: Synthetic oligonucleotide
  Target: LAMA2; (-) strand; PAM type: NRG; PAM sequence: TGG
acatggaagaatcaacctaa

SEQ ID NO: 105989 - DNA, 20 bp, Artificial Sequence
  Description of Artificial Sequence: Synthetic oligonucleotide
  Target: LAMA2; (-) strand; PAM type: NRG; PAM sequence: AAG
atagagaaaccatcacatgg

SEQ ID NO: 105990 - DNA, 20 bp, Artificial Sequence
  Description of Artificial Sequence: Synthetic oligonucleotide
  Target: LAMA2; (-) strand; PAM type: NRG; PAM sequence: TGG
gaaatagagaaaccatcaca

SEQ ID NO: 105991 - DNA, 20 bp, Artificial Sequence
  Description of Artificial Sequence: Synthetic oligonucleotide
  Target: LAMA2; (-) strand; PAM type: NRG; PAM sequence: GAG
aaaatactttttaagaaata

SEQ ID NO: 105992 - DNA, 20 bp, Artificial Sequence
  Description of Artificial Sequence: Synthetic oligonucleotide
  Target: LAMA2; (-) strand; PAM type: NRG; PAM sequence: TAG
ggaaaatactttttaagaaa

SEQ ID NO: 105993 - DNA, 20 bp, Artificial Sequence
  Description of Artificial Sequence: Synthetic oligonucleotide
  Target: LAMA2; (-) strand; PAM type: NRG; PAM sequence: AAG
acttagggaaaatacttttt

SEQ ID NO: 105994 - DNA, 20 bp, Artificial Sequence
  Description of Artificial Sequence: Synthetic oligonucleotide
  Target: LAMA2; (-) strand; PAM type: NRG; PAM sequence: GGG
gagatttttaaggaaactta

SEQ ID NO: 105995 - DNA, 20 bp, Artificial Sequence
  Description of Artificial Sequence: Synthetic oligonucleotide
  Target: LAMA2; (-) strand; PAM type: NRG; PAM sequence: AGG
tgagatttttaaggaaactt

SEQ ID NO: 105996 - DNA, 20 bp, Artificial Sequence
  Description of Artificial Sequence: Synthetic oligonucleotide
  Target: LAMA2; (-) strand; PAM type: NRG; PAM sequence: TAG
gtgagatttttaaggaaact

SEQ ID NO: 105997 - DNA, 20 bp, Artificial Sequence
  Description of Artificial Sequence: Synthetic oligonucleotide
  Target: LAMA2; (-) strand; PAM type: NRG; PAM sequence: AGG
aatttgaagtgagattttta

SEQ ID NO: 105998 - DNA, 20 bp, Artificial Sequence
  Description of Artificial Sequence: Synthetic oligonucleotide
  Target: LAMA2; (-) strand; PAM type: NRG; PAM sequence: AAG
aaatttgaagtgagattttt

SEQ ID NO: 105999 - DNA, 20 bp, Artificial Sequence
  Description of Artificial Sequence: Synthetic oligonucleotide
  Target: LAMA2; (-) strand; PAM type: NRG; PAM sequence: GAG
agttctgtgaaatttgaagt

SEQ ID NO: 106000 - DNA, 20 bp, Artificial Sequence
  Description of Artificial Sequence: Synthetic oligonucleotide
  Target: LAMA2; (-) strand; PAM type: NRG; PAM sequence: AAG
tgggagttctgtgaaatttg

SEQ ID NO: 106001 - DNA, 20 bp, Artificial Sequence
  Description of Artificial Sequence: Synthetic oligonucleotide
  Target: LAMA2; (-) strand; PAM type: NRG; PAM sequence: GAG
taagcagatgtattcaatgg

SEQ ID NO: 106002 - DNA, 20 bp, Artificial Sequence
  Description of Artificial Sequence: Synthetic oligonucleotide
  Target: LAMA2; (-) strand; PAM type: NRG; PAM sequence: GGG
cataagcagatgtattcaat

SEQ ID NO: 106003 - DNA, 20 bp, Artificial Sequence
  Description of Artificial Sequence: Synthetic oligonucleotide
  Target: LAMA2; (-) strand; PAM type: NRG; PAM sequence: TGG
acataagcagatgtattcaa

SEQ ID NO: 106004 - DNA, 20 bp, Artificial Sequence
  Description of Artificial Sequence: Synthetic oligonucleotide
  Target: LAMA2; (-) strand; PAM type: NRG; PAM sequence: CAG
tttgtgagcataaacataag

SEQ ID NO: 106005 - DNA, 20 bp, Artificial Sequence
  Description of Artificial Sequence: Synthetic oligonucleotide
  Target: LAMA2; (-) strand; PAM type: NRG; PAM sequence: AAG
tactttgtgagcataaacat

SEQ ID NO: 106006 - DNA, 20 bp, Artificial Sequence
  Description of Artificial Sequence: Synthetic oligonucleotide
  Target: LAMA2; (-) strand; PAM type: NRG; PAM sequence: GAG
tatacaaatgagtactttgt

SEQ ID NO: 106007 - DNA, 20 bp, Artificial Sequence
  Description of Artificial Sequence: Synthetic oligonucleotide
  Target: LAMA2; (-) strand; PAM type: NRG; PAM sequence: GAG
tctagaatctatatacaaat

SEQ ID NO: 106008 - DNA, 20 bp, Artificial Sequence
  Description of Artificial Sequence: Synthetic oligonucleotide
  Target: LAMA2; (-) strand; PAM type: NRG; PAM sequence: TAG
tggtactacatattgaattc

SEQ ID NO: 106009 - DNA, 20 bp, Artificial Sequence
  Description of Artificial Sequence: Synthetic oligonucleotide
  Target: LAMA2; (-) strand; PAM type: NRG; PAM sequence: TGG
taagtgctgaatagttatat

SEQ ID NO: 106010 - DNA, 20 bp, Artificial Sequence
  Description of Artificial Sequence: Synthetic oligonucleotide
  Target: LAMA2; (-) strand; PAM type: NRG; PAM sequence: TAG
actaaaatataagtgctgaa

SEQ ID NO: 106011 - DNA, 20 bp, Artificial Sequence
  Description of Artificial Sequence: Synthetic oligonucleotide
  Target: LAMA2; (-) strand; PAM type: NRG; PAM sequence: AAG
tccatttctaactaaaatat

SEQ ID NO: 106012 - DNA, 20 bp, Artificial Sequence
  Description of Artificial Sequence: Synthetic oligonucleotide
  Target: LAMA2; (-) strand; PAM type: NRG; PAM sequence: GAG
actacttttaaagaaagatg

SEQ ID NO: 106013 - DNA, 20 bp, Artificial Sequence
  Description of Artificial Sequence: Synthetic oligonucleotide
  Target: LAMA2; (-) strand; PAM type: NRG; PAM sequence: TGG
aaactacttttaaagaaaga

SEQ ID NO: 106014 - DNA, 20 bp, Artificial Sequence
  Description of Artificial Sequence: Synthetic oligonucleotide
  Target: LAMA2; (-) strand; PAM type: NRG; PAM sequence: AAG
attaaaactacttttaaaga

SEQ ID NO: 106015 - DNA, 20 bp, Artificial Sequence
  Description of Artificial Sequence: Synthetic oligonucleotide
  Target: LAMA2; (-) strand; PAM type: NRG; PAM sequence: AAG
aggaattaaaactactttta

SEQ ID NO: 106016 - DNA, 20 bp, Artificial Sequence
  Description of Artificial Sequence: Synthetic oligonucleotide
  Target: LAMA2; (-) strand; PAM type: NRG; PAM sequence: AGG
aagttatgcgatactagtta

SEQ ID NO: 106017 - DNA, 20 bp, Artificial Sequence
  Description of Artificial Sequence: Synthetic oligonucleotide
  Target: LAMA2; (-) strand; PAM type: NRG; PAM sequence: AAG
aaagttatgcgatactagtt

SEQ ID NO: 106018 - DNA, 20 bp, Artificial Sequence
  Description of Artificial Sequence: Synthetic oligonucleotide
  Target: LAMA2; (-) strand; PAM type: NRG; PAM sequence: TAG
gaagaaaagttatgcgatac

SEQ ID NO: 106019 - DNA, 20 bp, Artificial Sequence
  Description of Artificial Sequence: Synthetic oligonucleotide
  Target: LAMA2; (-) strand; PAM type: NRG; PAM sequence: AAG
aaagtcatccaagcgaagaa

SEQ ID NO: 106020 - DNA, 20 bp, Artificial Sequence
  Description of Artificial Sequence: Synthetic oligonucleotide
  Target: LAMA2; (-) strand; PAM type: NRG; PAM sequence: AAG
gtgagaaagtcatccaagcg

SEQ ID NO: 106021 - DNA, 20 bp, Artificial Sequence
  Description of Artificial Sequence: Synthetic oligonucleotide
  Target: LAMA2; (-) strand; PAM type: NRG; PAM sequence: AAG
tcattgtgagaaagtcatcc

SEQ ID NO: 106022 - DNA, 20 bp, Artificial Sequence
  Description of Artificial Sequence: Synthetic oligonucleotide
  Target: LAMA2; (-) strand; PAM type: NRG; PAM sequence: AAG
ttcttcttctcattgtgaga

SEQ ID NO: 106023 - DNA, 20 bp, Artificial Sequence
  Description of Artificial Sequence: Synthetic oligonucleotide
  Target: LAMA2; (-) strand; PAM type: NRG; PAM sequence: GAG
ttatttcttcttctcattgt

SEQ ID NO: 106024 - DNA, 20 bp, Artificial Sequence
  Description of Artificial Sequence: Synthetic oligonucleotide
  Target: LAMA2; (-) strand; PAM type: NRG; PAM sequence: AGG
ttctatgtagaggcttgtac

SEQ ID NO: 106025 - DNA, 20 bp, Artificial Sequence
  Description of Artificial Sequence: Synthetic oligonucleotide
  Target: LAMA2; (-) strand; PAM type: NRG; PAM sequence: CAG
cttctatgtagaggcttgta

SEQ ID NO: 106026 - DNA, 20 bp, Artificial Sequence
  Description of Artificial Sequence: Synthetic oligonucleotide
  Target: LAMA2; (-) strand; PAM type: NRG; PAM sequence: AGG
tgaagagttcttctatgtag

SEQ ID NO: 106027 - DNA, 20 bp, Artificial Sequence
  Description of Artificial Sequence: Synthetic oligonucleotide
  Target: LAMA2; (-) strand; PAM type: NRG; PAM sequence: GAG
ttgaagagttcttctatgta

SEQ ID NO: 106028 - DNA, 20 bp, Artificial Sequence
  Description of Artificial Sequence: Synthetic oligonucleotide
  Target: LAMA2; (-) strand; PAM type: NRG; PAM sequence: TAG
ccttgaagagttcttctatg

SEQ ID NO: 106029 - DNA, 20 bp, Artificial Sequence
  Description of Artificial Sequence: Synthetic oligonucleotide
  Target: LAMA2; (-) strand; PAM type: NRG; PAM sequence: GAG
ctacttagccagtccttgaa

SEQ ID NO: 106030 - DNA, 20 bp, Artificial Sequence
  Description of Artificial Sequence: Synthetic oligonucleotide
  Target: LAMA2; (-) strand; PAM type: NRG; PAM sequence: AAG
aactacttagccagtccttg

SEQ ID NO: 106031 - DNA, 20 bp, Artificial Sequence
  Description of Artificial Sequence: Synthetic oligonucleotide
  Target: LAMA2; (-) strand; PAM type: NRG; PAM sequence: CAG
aaaaatataaactacttagc

SEQ ID NO: 106032 - DNA, 20 bp, Artificial Sequence
  Description of Artificial Sequence: Synthetic oligonucleotide
  Target: LAMA2; (-) strand; PAM type: NRG; PAM sequence: TAG
tgagaaaaatataaactact

SEQ ID NO: 106033 - DNA, 20 bp, Artificial Sequence
  Description of Artificial Sequence: Synthetic oligonucleotide
  Target: LAMA2; (-) strand; PAM type: NRG; PAM sequence: GAG
atgttgaaatgtggctagat

SEQ ID NO: 106034 - DNA, 20 bp, Artificial Sequence
  Description of Artificial Sequence: Synthetic oligonucleotide
  Target: LAMA2; (-) strand; PAM type: NRG; PAM sequence: TAG
acatcatgttgaaatgtggc

SEQ ID NO: 106035 - DNA, 20 bp, Artificial Sequence
  Description of Artificial Sequence: Synthetic oligonucleotide
  Target: LAMA2; (-) strand; PAM type: NRG; PAM sequence: TGG
aggtacatcatgttgaaatg

SEQ ID NO: 106036 - DNA, 20 bp, Artificial Sequence
  Description of Artificial Sequence: Synthetic oligonucleotide
  Target: LAMA2; (-) strand; PAM type: NRG; PAM sequence: AGG
gaataaaagcttagcaaaaa

SEQ ID NO: 106037 - DNA, 20 bp, Artificial Sequence
  Description of Artificial Sequence: Synthetic oligonucleotide
  Target: LAMA2; (-) strand; PAM type: NRG; PAM sequence: AAG
tgaataaaagcttagcaaaa

SEQ ID NO: 106038 - DNA, 20 bp, Artificial Sequence
  Description of Artificial Sequence: Synthetic oligonucleotide
  Target: LAMA2; (-) strand; PAM type: NRG; PAM sequence: TAG
gagctgtttgaataaaagct

SEQ ID NO: 106039 - DNA, 20 bp, Artificial Sequence
  Description of Artificial Sequence: Synthetic oligonucleotide
  Target: LAMA2; (-) strand; PAM type: NRG; PAM sequence: AAG
ttcctgagctgtttgaataa

SEQ ID NO: 106040 - DNA, 20 bp, Artificial Sequence
  Description of Artificial Sequence: Synthetic oligonucleotide
  Target: LAMA2; (-) strand; PAM type: NRG; PAM sequence: GAG
cttgtattcctgactttcct

SEQ ID NO: 106041 - DNA, 20 bp, Artificial Sequence
  Description of Artificial Sequence: Synthetic oligonucleotide
  Target: LAMA2; (-) strand; PAM type: NRG; PAM sequence: AAG
ttctgtagaccattatgaac

SEQ ID NO: 106042 - DNA, 20 bp, Artificial Sequence
  Description of Artificial Sequence: Synthetic oligonucleotide
  Target: LAMA2; (-) strand; PAM type: NRG; PAM sequence: TAG
acagcctccttctttttctg

SEQ ID NO: 106043 - DNA, 20 bp, Artificial Sequence
  Description of Artificial Sequence: Synthetic oligonucleotide
  Target: LAMA2; (-) strand; PAM type: NRG; PAM sequence: CAG
ttgtcgtttgccgctttcaa

SEQ ID NO: 106044 - DNA, 20 bp, Artificial Sequence
  Description of Artificial Sequence: Synthetic oligonucleotide
  Target: LAMA2; (-) strand; PAM type: NRG; PAM sequence: AAG
tatgtcattgccctctttta

SEQ ID NO: 106045 - DNA, 20 bp, Artificial Sequence
  Description of Artificial Sequence: Synthetic oligonucleotide
  Target: LAMA2; (-) strand; PAM type: NRG; PAM sequence: GAG
gcaagacggttggcttcatc

SEQ ID NO: 106046 - DNA, 20 bp, Artificial Sequence
  Description of Artificial Sequence: Synthetic oligonucleotide
  Target: LAMA2; (-) strand; PAM type: NRG; PAM sequence: TGG
gatttcatctgcaagacggt

SEQ ID NO: 106047 - DNA, 20 bp, Artificial Sequence
  Description of Artificial Sequence: Synthetic oligonucleotide
  Target: LAMA2; (-) strand; PAM type: NRG; PAM sequence: CGG
agttgatttcatctgcaaga

SEQ ID NO: 106048 - DNA, 20 bp, Artificial Sequence
  Description of Artificial Sequence: Synthetic oligonucleotide
  Target: LAMA2; (-) strand; PAM type: NRG; PAM sequence: AAG
atggagttgatttcatctgc

SEQ ID NO: 106049 - DNA, 20 bp, Artificial Sequence
  Description of Artificial Sequence: Synthetic oligonucleotide
  Target: LAMA2; (-) strand; PAM type: NRG; PAM sequence: GAG
caatactcacgtctatgatg

SEQ ID NO: 106050 - DNA, 20 bp, Artificial Sequence
  Description of Artificial Sequence: Synthetic oligonucleotide
  Target: LAMA2; (-) strand; PAM type: NRG; PAM sequence: TGG
cccaatactcacgtctatga

SEQ ID NO: 106051 - DNA, 20 bp, Artificial Sequence
  Description of Artificial Sequence: Synthetic oligonucleotide
  Target: LAMA2; (-) strand; PAM type: NRG; PAM sequence: GAG
ttcattatcatctctctttt

SEQ ID NO: 106052 - DNA, 20 bp, Artificial Sequence
  Description of Artificial Sequence: Synthetic oligonucleotide
  Target: LAMA2; (-) strand; PAM type: NRG; PAM sequence: CGG
ctattactgagctttctcat

SEQ ID NO: 106053 - DNA, 20 bp, Artificial Sequence
  Description of Artificial Sequence: Synthetic oligonucleotide
  Target: LAMA2; (-) strand; PAM type: NRG; PAM sequence: GAG
tagtatttgcttctattact

SEQ ID NO: 106054 - DNA, 20 bp, Artificial Sequence
  Description of Artificial Sequence: Synthetic oligonucleotide
  Target: LAMA2; (-) strand; PAM type: NRG; PAM sequence: TAG
ctccacaagaaaacaagtac

SEQ ID NO: 106055 - DNA, 20 bp, Artificial Sequence
  Description of Artificial Sequence: Synthetic oligonucleotide
  Target: LAMA2; (-) strand; PAM type: NRG; PAM sequence: AAG
ttttatctccacaagaaaac

SEQ ID NO: 106056 - DNA, 20 bp, Artificial Sequence
  Description of Artificial Sequence: Synthetic oligonucleotide
  Target: LAMA2; (-) strand; PAM type: NRG; PAM sequence: AAG
aaaaataattttatctccac

SEQ ID NO: 106057 - DNA, 20 bp, Artificial Sequence
  Description of Artificial Sequence: Synthetic oligonucleotide
  Target: LAMA2; (-) strand; PAM type: NRG; PAM sequence: TAG
atagataggcatggtcacag

SEQ ID NO: 106058 - DNA, 20 bp, Artificial Sequence
  Description of Artificial Sequence: Synthetic oligonucleotide
  Target: LAMA2; (-) strand; PAM type: NRG; PAM sequence: CAG
ccaatagataggcatggtca

SEQ ID NO: 106059 - DNA, 20 bp, Artificial Sequence
  Description of Artificial Sequence: Synthetic oligonucleotide
  Target: LAMA2; (-) strand; PAM type: NRG; PAM sequence: TGG
ttgtcaccaatagataggca

SEQ ID NO: 106060 - DNA, 20 bp, Artificial Sequence
  Description of Artificial Sequence: Synthetic oligonucleotide
  Target: LAMA2; (-) strand; PAM type: NRG; PAM sequence: AGG
tccagttgtcaccaatagat

SEQ ID NO: 106061 - DNA, 20 bp, Artificial Sequence
  Description of Artificial Sequence: Synthetic oligonucleotide
  Target: LAMA2; (-) strand; PAM type: NRG; PAM sequence: TAG
ttccagttgtcaccaataga

SEQ ID NO: 106062 - DNA, 20 bp, Artificial Sequence
  Description of Artificial Sequence: Synthetic oligonucleotide
  Target: LAMA2; (-) strand; PAM type: NRG; PAM sequence: TAG
gatattccagttgtcaccaa

SEQ ID NO: 106063 - DNA, 20 bp, Artificial Sequence
  Description of Artificial Sequence: Synthetic oligonucleotide
  Target: LAMA2; (-) strand; PAM type: NRG; PAM sequence: CAG
gggagaacaaagtgatattc

SEQ ID NO: 106064 - DNA, 20 bp, Artificial Sequence
  Description of Artificial Sequence: Synthetic oligonucleotide
  Target: LAMA2; (-) strand; PAM type: NRG; PAM sequence: AAG
tcatgtccattgggagaaca

SEQ ID NO: 106065 - DNA, 20 bp, Artificial Sequence
  Description of Artificial Sequence: Synthetic oligonucleotide
  Target: LAMA2; (-) strand; PAM type: NRG; PAM sequence: GAG
caaacactcatgtccattgg

SEQ ID NO: 106066 - DNA, 20 bp, Artificial Sequence
  Description of Artificial Sequence: Synthetic oligonucleotide
  Target: LAMA2; (-) strand; PAM type: NRG; PAM sequence: GGG
cacaaacactcatgtccatt

SEQ ID NO: 106067 - DNA, 20 bp, Artificial Sequence
  Description of Artificial Sequence: Synthetic oligonucleotide
  Target: LAMA2; (-) strand; PAM type: NRG; PAM sequence: TGG
acacaaacactcatgtccat

SEQ ID NO: 106068 - DNA, 20 bp, Artificial Sequence
  Description of Artificial Sequence: Synthetic oligonucleotide
  Target: LAMA2; (-) strand; PAM type: NRG; PAM sequence: GAG
acagatatgtgtgaatgtgt

SEQ ID NO: 106069 - DNA, 20 bp, Artificial Sequence
  Description of Artificial Sequence: Synthetic oligonucleotide
  Target: LAMA2; (-) strand; PAM type: NRG; PAM sequence: CAG
ttcatcgctgtggacaaaaa

SEQ ID NO: 106070 - DNA, 20 bp, Artificial Sequence
  Description of Artificial Sequence: Synthetic oligonucleotide
  Target: LAMA2; (-) strand; PAM type: NRG; PAM sequence: TGG
agaaatgtccttcatcgctg

SEQ ID NO: 106071 - DNA, 20 bp, Artificial Sequence
  Description of Artificial Sequence: Synthetic oligonucleotide
  Target: LAMA2; (-) strand; PAM type: NRG; PAM sequence: AAG
gtaagtgctgctctaggaac

SEQ ID NO: 106072 - DNA, 20 bp, Artificial Sequence
  Description of Artificial Sequence: Synthetic oligonucleotide
  Target: LAMA2; (-) strand; PAM type: NRG; PAM sequence: AGG
cagattgtaagtgctgctct

SEQ ID NO: 106073 - DNA, 20 bp, Artificial Sequence
  Description of Artificial Sequence: Synthetic oligonucleotide
  Target: LAMA2; (-) strand; PAM type: NRG; PAM sequence: TAG
gcagattgtaagtgctgctc

SEQ ID NO: 106074 - DNA, 20 bp, Artificial Sequence
  Description of Artificial Sequence: Synthetic oligonucleotide
  Target: LAMA2; (-) strand; PAM type: NRG; PAM sequence: AAG
taaatattgaagcagattgt

SEQ ID NO: 106075 - DNA, 20 bp, Artificial Sequence
  Description of Artificial Sequence: Synthetic oligonucleotide
  Target: LAMA2; (-) strand; PAM type: NRG; PAM sequence: CAG
atgttatataaatattgaag

SEQ ID NO: 106076 - DNA, 20 bp, Artificial Sequence
  Description of Artificial Sequence: Synthetic oligonucleotide
  Target: LAMA2; (-) strand; PAM type: NRG; PAM sequence: AAG
ctaatgttatataaatattg

SEQ ID NO: 106077 - DNA, 20 bp, Artificial Sequence
  Description of Artificial Sequence: Synthetic oligonucleotide
  Target: LAMA2; (-) strand; PAM type: NRG; PAM sequence: AAG
cattagacattacatgttaa

SEQ ID NO: 106078 - DNA, 20 bp, Artificial Sequence
  Description of Artificial Sequence: Synthetic oligonucleotide
  Target: LAMA2; (-) strand; PAM type: NRG; PAM sequence: TAG
tatcactctatgtaatgcat

SEQ ID NO: 106079 - DNA, 20 bp, Artificial Sequence
  Description of Artificial Sequence: Synthetic oligonucleotide
  Target: LAMA2; (-) strand; PAM type: NRG; PAM sequence: AGG
acatgtcattaggatctctt

SEQ ID NO: 106080 - DNA, 20 bp, Artificial Sequence
  Description of Artificial Sequence: Synthetic oligonucleotide
  Target: LAMA2; (-) strand; PAM type: NRG; PAM sequence: TAG
tacatgtcattaggatctct

SEQ ID NO: 106081 - DNA, 20 bp, Artificial Sequence
  Description of Artificial Sequence: Synthetic oligonucleotide
  Target: LAMA2; (-) strand; PAM type: NRG; PAM sequence: AGG
tcataggtatacatgtcatt

SEQ ID NO: 106082 - DNA, 20 bp, Artificial Sequence
  Description of Artificial Sequence: Synthetic oligonucleotide
  Target: LAMA2; (-) strand; PAM type: NRG; PAM sequence: TAG
ttcataggtatacatgtcat

SEQ ID NO: 106083 - DNA, 20 bp, Artificial Sequence
  Description of Artificial Sequence: Synthetic oligonucleotide
  Target: LAMA2; (-) strand; PAM type: NRG; PAM sequence: AGG
tttaaacaatgccacttcat

SEQ ID NO: 106084 - DNA, 20 bp, Artificial Sequence
  Description of Artificial Sequence: Synthetic oligonucleotide
  Target: LAMA2; (-) strand; PAM type: NRG; PAM sequence: TAG
atttaaacaatgccacttca

SEQ ID NO: 106085 - DNA, 20 bp, Artificial Sequence
  Description of Artificial Sequence: Synthetic oligonucleotide
  Target: LAMA2; (-) strand; PAM type: NRG; PAM sequence: AAG
aaaccaacttagaccaagaa

SEQ ID NO: 106086 - DNA, 20 bp, Artificial Sequence
  Description of Artificial Sequence: Synthetic oligonucleotide
  Target: LAMA2; (-) strand; PAM type: NRG; PAM sequence: AAG
ttaagaaaccaacttagacc

SEQ ID NO: 106087 - DNA, 20 bp, Artificial Sequence
  Description of Artificial Sequence: Synthetic oligonucleotide
  Target: LAMA2; (-) strand; PAM type: NRG; PAM sequence: TAG
ggaaatttaagaaaccaact

SEQ ID NO: 106088 - DNA, 20 bp, Artificial Sequence
  Description of Artificial Sequence: Synthetic oligonucleotide
  Target: LAMA2; (-) strand; PAM type: NRG; PAM sequence: AAG
tggaatagactaggaaattt

SEQ ID NO: 106089 - DNA, 20 bp, Artificial Sequence
  Description of Artificial Sequence: Synthetic oligonucleotide
  Target: LAMA2; (-) strand; PAM type: NRG; PAM sequence: AGG
attatttaatggaatagact

SEQ ID NO: 106090 - DNA, 20 bp, Artificial Sequence
  Description of Artificial Sequence: Synthetic oligonucleotide
  Target: LAMA2; (-) strand; PAM type: NRG; PAM sequence: TAG
cattatttaatggaatagac

SEQ ID NO: 106091 - DNA, 20 bp, Artificial Sequence
  Description of Artificial Sequence: Synthetic oligonucleotide
  Target: LAMA2; (-) strand; PAM type: NRG; PAM sequence: TAG
aaagtcattatttaatggaa

SEQ ID NO: 106092 - DNA, 20 bp, Artificial Sequence
  Description of Artificial Sequence: Synthetic oligonucleotide
  Target: LAMA2; (-) strand; PAM type: NRG; PAM sequence: TGG
gaattaaagtcattatttaa

SEQ ID NO: 106093 - DNA, 20 bp, Artificial Sequence
  Description of Artificial Sequence: Synthetic oligonucleotide
  Target: LAMA2; (-) strand; PAM type: NRG; PAM sequence: AAG
gcaaaaagaatagagaatta

SEQ ID NO: 106094 - DNA, 20 bp, Artificial Sequence
  Description of Artificial Sequence: Synthetic oligonucleotide
  Target: LAMA2; (-) strand; PAM type: NRG; PAM sequence: GAG
ctaacatagcaaaaagaata

SEQ ID NO: 106095 - DNA, 20 bp, Artificial Sequence
  Description of Artificial Sequence: Synthetic oligonucleotide
  Target: LAMA2; (-) strand; PAM type: NRG; PAM sequence: TAG
tactaacatagcaaaaagaa

SEQ ID NO: 106096 - DNA, 20 bp, Artificial Sequence
  Description of Artificial Sequence: Synthetic oligonucleotide
  Target: LAMA2; (-) strand; PAM type: NRG; PAM sequence: AAG
aaacttactaacatagcaaa

SEQ ID NO: 106097 - DNA, 20 bp, Artificial Sequence
  Description of Artificial Sequence: Synthetic oligonucleotide
  Target: LAMA2; (-) strand; PAM type: NRG; PAM sequence: TAG
aaacttcaaacttactaaca

SEQ ID NO: 106098 - DNA, 20 bp, Artificial Sequence
  Description of Artificial Sequence: Synthetic oligonucleotide
  Target: LAMA2; (-) strand; PAM type: NRG; PAM sequence: TAG
ccgtgcctggcccacatgtt

SEQ ID NO: 106099 - DNA, 20 bp, Artificial Sequence
  Description of Artificial Sequence: Synthetic oligonucleotide
  Target: LAMA2; (-) strand; PAM type: NRG; PAM sequence: TGG
caggcatgagccaccgtgcc

SEQ ID NO: 106100 - DNA, 20 bp, Artificial Sequence
  Description of Artificial Sequence: Synthetic oligonucleotide
  Target: LAMA2; (-) strand; PAM type: NRG; PAM sequence: GAG
agtgctgggattacaggcat

SEQ ID NO: 106101 - DNA, 20 bp, Artificial Sequence
  Description of Artificial Sequence: Synthetic oligonucleotide
  Target: LAMA2; (-) strand; PAM type: NRG; PAM sequence: AGG
tcccaaagtgctgggattac

SEQ ID NO: 106102 - DNA, 20 bp, Artificial Sequence
  Description of Artificial Sequence: Synthetic oligonucleotide
  Target: LAMA2; (-) strand; PAM type: NRG; PAM sequence: CAG
ctcccaaagtgctgggatta

SEQ ID NO: 106103 - DNA, 20 bp, Artificial Sequence
  Description of Artificial Sequence: Synthetic oligonucleotide
  Target: LAMA2; (-) strand; PAM type: NRG; PAM sequence: GGG
cctcggcctcccaaagtgct

SEQ ID NO: 106104 - DNA, 20 bp, Artificial Sequence
  Description of Artificial Sequence: Synthetic oligonucleotide
  Target: LAMA2; (-) strand; PAM type: NRG; PAM sequence: TGG
acctcggcctcccaaagtgc

SEQ ID NO: 106105 - DNA, 20 bp, Artificial Sequence
  Description of Artificial Sequence: Synthetic oligonucleotide
  Target: LAMA2; (-) strand; PAM type: NRG; PAM sequence: AAG
ctgcccacctcggcctccca

SEQ ID NO: 106106 - DNA, 20 bp, Artificial Sequence
  Description of Artificial Sequence: Synthetic oligonucleotide
  Target: LAMA2; (-) strand; PAM type: NRG; PAM sequence: CGG
ctcaggcagtctgcccacct

SEQ ID NO: 106107 - DNA, 20 bp, Artificial Sequence
  Description of Artificial Sequence: Synthetic oligonucleotide
  Target: LAMA2; (-) strand; PAM type: NRG; PAM sequence: CAG
tttgaactcccgagctcagg

SEQ ID NO: 106108 - DNA, 20 bp, Artificial Sequence
  Description of Artificial Sequence: Synthetic oligonucleotide
  Target: LAMA2; (-) strand; PAM type: NRG; PAM sequence: AGG
ggttttgaactcccgagctc

SEQ ID NO: 106109 - DNA, 20 bp, Artificial Sequence
  Description of Artificial Sequence: Synthetic oligonucleotide
  Target: LAMA2; (-) strand; PAM type: NRG; PAM sequence: CAG
tggttttgaactcccgagct

SEQ ID NO: 106110 - DNA, 20 bp, Artificial Sequence
  Description of Artificial Sequence: Synthetic oligonucleotide
  Target: LAMA2; (-) strand; PAM type: NRG; PAM sequence: GAG
caggctggttttgaactccc

SEQ ID NO: 106111 - DNA, 20 bp, Artificial Sequence
  Description of Artificial Sequence: Synthetic oligonucleotide
  Target: LAMA2; (-) strand; PAM type: NRG; PAM sequence: TGG
tttcgccatgttgcccaggc

SEQ ID NO: 106112 - DNA, 20 bp, Artificial Sequence
  Description of Artificial Sequence: Synthetic oligonucleotide
  Target: LAMA2; (-) strand; PAM type: NRG; PAM sequence: AGG
ggggtttcgccatgttgccc

SEQ ID NO: 106113 - DNA, 20 bp, Artificial Sequence
  Description of Artificial Sequence: Synthetic oligonucleotide
  Target: LAMA2; (-) strand; PAM type: NRG; PAM sequence: CAG
cggggtttcgccatgttgcc

SEQ ID NO: 106114 - DNA, 20 bp, Artificial Sequence
  Description of Artificial Sequence: Synthetic oligonucleotide
  Target: LAMA2; (-) strand; PAM type: NRG; PAM sequence: GGG
ttgaatatttaatagagacg

SEQ ID NO: 106115 - DNA, 20 bp, Artificial Sequence
  Description of Artificial Sequence: Synthetic oligonucleotide
  Target: LAMA2; (-) strand; PAM type: NRG; PAM sequence: GGG
tttgaatatttaatagagac

SEQ ID NO: 106116 - DNA, 20 bp, Artificial Sequence
  Description of Artificial Sequence: Synthetic oligonucleotide
  Target: LAMA2; (-) strand; PAM type: NRG; PAM sequence: CGG
ttttgaatatttaatagaga

SEQ ID NO: 106117 - DNA, 20 bp, Artificial Sequence
  Description of Artificial Sequence: Synthetic oligonucleotide
  Target: LAMA2; (-) strand; PAM type: NRG; PAM sequence: GAG
aattttttgaatatttaata

SEQ ID NO: 106118 - DNA, 20 bp, Artificial Sequence
  Description of Artificial Sequence: Synthetic oligonucleotide
  Target: LAMA2; (-) strand; PAM type: NRG; PAM sequence: TAG
ctaattttttgaatatttaa

SEQ ID NO: 106119 - DNA, 20 bp, Artificial Sequence
  Description of Artificial Sequence: Synthetic oligonucleotide
  Target: LAMA2; (-) strand; PAM type: NRG; PAM sequence: CAG
caggtgcccaccaccacacc

SEQ ID NO: 106120 - DNA, 20 bp, Artificial Sequence
  Description of Artificial Sequence: Synthetic oligonucleotide
  Target: LAMA2; (-) strand; PAM type: NRG; PAM sequence: AGG
tcctgagtagctgggattac

SEQ ID NO: 106121 - DNA, 20 bp, Artificial Sequence
  Description of Artificial Sequence: Synthetic oligonucleotide
  Target: LAMA2; (-) strand; PAM type: NRG; PAM sequence: CAG
ctcctgagtagctgggatta

SEQ ID NO: 106122 - DNA, 20 bp, Artificial Sequence
  Description of Artificial Sequence: Synthetic oligonucleotide
  Target: LAMA2; (-) strand; PAM type: NRG; PAM sequence: GGG
cctcagcctcctgagtagct

SEQ ID NO: 106123 - DNA, 20 bp, Artificial Sequence
  Description of Artificial Sequence: Synthetic oligonucleotide
  Target: LAMA2; (-) strand; PAM type: NRG; PAM sequence: TGG
gcctcagcctcctgagtagc

SEQ ID NO: 106124 - DNA, 20 bp, Artificial Sequence
  Description of Artificial Sequence: Synthetic oligonucleotide
  Target: LAMA2; (-) strand; PAM type: NRG; PAM sequence: TAG
tcctgcctcagcctcctgag

SEQ ID NO: 106125 - DNA, 20 bp, Artificial Sequence
  Description of Artificial Sequence: Synthetic oligonucleotide
  Target: LAMA2; (-) strand; PAM type: NRG; PAM sequence: GAG
ttctcctgcctcagcctcct

SEQ ID NO: 106126 - DNA, 20 bp, Artificial Sequence
  Description of Artificial Sequence: Synthetic oligonucleotide
  Target: LAMA2; (-) strand; PAM type: NRG; PAM sequence: CAG
ttcaagcaattctcctgcct

SEQ ID NO: 106127 - DNA, 20 bp, Artificial Sequence
  Description of Artificial Sequence: Synthetic oligonucleotide
  Target: LAMA2; (-) strand; PAM type: NRG; PAM sequence: AAG
aacctctgcctccctggttc

SEQ ID NO: 106128 - DNA, 20 bp, Artificial Sequence
  Description of Artificial Sequence: Synthetic oligonucleotide
  Target: LAMA2; (-) strand; PAM type: NRG; PAM sequence: TGG
cactgcaacctctgcctccc

SEQ ID NO: 106129 - DNA, 20 bp, Artificial Sequence
  Description of Artificial Sequence: Synthetic oligonucleotide
  Target: LAMA2; (-) strand; PAM type: NRG; PAM sequence: CAG
ggaatgcagtggtgcgatct

SEQ ID NO: 106130 - DNA, 20 bp, Artificial Sequence
  Description of Artificial Sequence: Synthetic oligonucleotide
  Target: LAMA2; (-) strand; PAM type: NRG; PAM sequence: TGG
tcacccaggctggaatgcag

SEQ ID NO: 106131 - DNA, 20 bp, Artificial Sequence
  Description of Artificial Sequence: Synthetic oligonucleotide
  Target: LAMA2; (-) strand; PAM type: NRG; PAM sequence: CAG
ctgtcacccaggctggaatg

SEQ ID NO: 106132 - DNA, 20 bp, Artificial Sequence
  Description of Artificial Sequence: Synthetic oligonucleotide
  Target: LAMA2; (-) strand; PAM type: NRG; PAM sequence: TGG
tcttgctctgtcacccaggc

SEQ ID NO: 106133 - DNA, 20 bp, Artificial Sequence
  Description of Artificial Sequence: Synthetic oligonucleotide
  Target: LAMA2; (-) strand; PAM type: NRG; PAM sequence: AGG
agagtcttgctctgtcaccc

SEQ ID NO: 106134 - DNA, 20 bp, Artificial Sequence
  Description of Artificial Sequence: Synthetic oligonucleotide
  Target: LAMA2; (-) strand; PAM type: NRG; PAM sequence: CAG
cagagtcttgctctgtcacc

SEQ ID NO: 106135 - DNA, 20 bp, Artificial Sequence
  Description of Artificial Sequence: Synthetic oligonucleotide
  Target: LAMA2; (-) strand; PAM type: NRG; PAM sequence: GAG
ttttttttttttttgagaca

SEQ ID NO: 106136 - DNA, 20 bp, Artificial Sequence
  Description of Artificial Sequence: Synthetic oligonucleotide
  Target: LAMA2; (-) strand; PAM type: NRG; PAM sequence: CAG
ttttttttttttttttgaga

SEQ ID NO: 106137 - DNA, 20 bp, Artificial Sequence
  Description of Artificial Sequence: Synthetic oligonucleotide
  Target: LAMA2; (-) strand; PAM type: NRG; PAM sequence: GAG
gttttttttttttttttttt

SEQ ID NO: 106138 - DNA, 20 bp, Artificial Sequence
  Description of Artificial Sequence: Synthetic oligonucleotide
  Target: LAMA2; (-) strand; PAM type: NRG; PAM sequence: TAG
acataactacacgtttagtt

SEQ ID NO: 106139 - DNA, 20 bp, Artificial Sequence
  Description of Artificial Sequence: Synthetic oligonucleotide
  Target: LAMA2; (-) strand; PAM type: NRG; PAM sequence: TAG
atgagacataactacacgtt

SEQ ID NO: 106140 - DNA, 20 bp, Artificial Sequence
  Description of Artificial Sequence: Synthetic oligonucleotide
  Target: LAMA2; (-) strand; PAM type: NRG; PAM sequence: GAG
tcttttactaatttctctat

SEQ ID NO: 106141 - DNA, 20 bp, Artificial Sequence
  Description of Artificial Sequence: Synthetic oligonucleotide
  Target: LAMA2; (-) strand; PAM type: NRG; PAM sequence: AAG
cattttaagcaagtgaattc

SEQ ID NO: 106142 - DNA, 20 bp, Artificial Sequence
  Description of Artificial Sequence: Synthetic oligonucleotide
  Target: LAMA2; (-) strand; PAM type: NRG; PAM sequence: AAG
gagaagagggcattttaagc

SEQ ID NO: 106143 - DNA, 20 bp, Artificial Sequence
  Description of Artificial Sequence: Synthetic oligonucleotide
  Target: LAMA2; (-) strand; PAM type: NRG; PAM sequence: AAG
tgtagagaagagggcatttt

SEQ ID NO: 106144 - DNA, 20 bp, Artificial Sequence
  Description of Artificial Sequence: Synthetic oligonucleotide
  Target: LAMA2; (-) strand; PAM type: NRG; PAM sequence: GGG
atactgatatgtagagaaga

SEQ ID NO: 106145 - DNA, 20 bp, Artificial Sequence
  Description of Artificial Sequence: Synthetic oligonucleotide
  Target: LAMA2; (-) strand; PAM type: NRG; PAM sequence: AGG
catactgatatgtagagaag

SEQ ID NO: 106146 - DNA, 20 bp, Artificial Sequence
  Description of Artificial Sequence: Synthetic oligonucleotide
  Target: LAMA2; (-) strand; PAM type: NRG; PAM sequence: GAG
acatactgatatgtagagaa

SEQ ID NO: 106147 - DNA, 20 bp, Artificial Sequence
  Description of Artificial Sequence: Synthetic oligonucleotide
  Target: LAMA2; (-) strand; PAM type: NRG; PAM sequence: AAG
caacatactgatatgtagag

SEQ ID NO: 106148 - DNA, 20 bp, Artificial Sequence
  Description of Artificial Sequence: Synthetic oligonucleotide
  Target: LAMA2; (-) strand; PAM type: NRG; PAM sequence: GAG
cttcaacatactgatatgta

SEQ ID NO: 106149 - DNA, 20 bp, Artificial Sequence
  Description of Artificial Sequence: Synthetic oligonucleotide
  Target: LAMA2; (-) strand; PAM type: NRG; PAM sequence: TAG
gtcttcaacatactgatatg

SEQ ID NO: 106150 - DNA, 20 bp, Artificial Sequence
  Description of Artificial Sequence: Synthetic oligonucleotide
  Target: LAMA2; (-) strand; PAM type: NRG; PAM sequence: TGG
acataggtggcaatttagtt

SEQ ID NO: 106151 - DNA, 20 bp, Artificial Sequence
  Description of Artificial Sequence: Synthetic oligonucleotide
  Target: LAMA2; (-) strand; PAM type: NRG; PAM sequence: TAG
ctcagacataggtggcaatt

SEQ ID NO: 106152 - DNA, 20 bp, Artificial Sequence
  Description of Artificial Sequence: Synthetic oligonucleotide
  Target: LAMA2; (-) strand; PAM type: NRG; PAM sequence: TGG
ttaagctcctcagacatagg

SEQ ID NO: 106153 - DNA, 20 bp, Artificial Sequence
  Description of Artificial Sequence: Synthetic oligonucleotide
  Target: LAMA2; (-) strand; PAM type: NRG; PAM sequence: AGG
tcattaagctcctcagacat

SEQ ID NO: 106154 - DNA, 20 bp, Artificial Sequence
  Description of Artificial Sequence: Synthetic oligonucleotide
  Target: LAMA2; (-) strand; PAM type: NRG; PAM sequence: TAG
atcattaagctcctcagaca

SEQ ID NO: 106155 - DNA, 20 bp, Artificial Sequence
  Description of Artificial Sequence: Synthetic oligonucleotide
  Target: LAMA2; (-) strand; PAM type: NRG; PAM sequence: CAG
tattttatcattaagctcct

SEQ ID NO: 106156 - DNA, 20 bp, Artificial Sequence
  Description of Artificial Sequence: Synthetic oligonucleotide
  Target: LAMA2; (-) strand; PAM type: NRG; PAM sequence: AAG
aggtcatctattttatcatt

SEQ ID NO: 106157 - DNA, 20 bp, Artificial Sequence
  Description of Artificial Sequence: Synthetic oligonucleotide
  Target: LAMA2; (-) strand; PAM type: NRG; PAM sequence: AGG
tgtcctttatttcttgggag

SEQ ID NO: 106158 - DNA, 20 bp, Artificial Sequence
  Description of Artificial Sequence: Synthetic oligonucleotide
  Target: LAMA2; (-) strand; PAM type: NRG; PAM sequence: GAG
ctgtcctttatttcttggga

SEQ ID NO: 106159 - DNA, 20 bp, Artificial Sequence
  Description of Artificial Sequence: Synthetic oligonucleotide
  Target: LAMA2; (-) strand; PAM type: NRG; PAM sequence: GAG
tcctgtcctttatttcttgg

SEQ ID NO: 106160 - DNA, 20 bp, Artificial Sequence
  Description of Artificial Sequence: Synthetic oligonucleotide
  Target: LAMA2; (-) strand; PAM type: NRG; PAM sequence: GGG
cttcctgtcctttatttctt

SEQ ID NO: 106161 - DNA, 20 bp, Artificial Sequence
  Description of Artificial Sequence: Synthetic oligonucleotide
  Target: LAMA2; (-) strand; PAM type: NRG; PAM sequence: TGG
gcttcctgtcctttatttct

SEQ ID NO: 106162 - DNA, 20 bp, Artificial Sequence
  Description of Artificial Sequence: Synthetic oligonucleotide
  Target: LAMA2; (-) strand; PAM type: NRG; PAM sequence: AAG
gcctgggacaccttctcagc

SEQ ID NO: 106163 - DNA, 20 bp, Artificial Sequence
  Description of Artificial Sequence: Synthetic oligonucleotide
  Target: LAMA2; (-) strand; PAM type: NRG; PAM sequence: CAG
ctcagcctgggacaccttct

SEQ ID NO: 106164 - DNA, 20 bp, Artificial Sequence
  Description of Artificial Sequence: Synthetic oligonucleotide
  Target: LAMA2; (-) strand; PAM type: NRG; PAM sequence: GGG
agctgcgtggctctcagcct

SEQ ID NO: 106165 - DNA, 20 bp, Artificial Sequence
  Description of Artificial Sequence: Synthetic oligonucleotide
  Target: LAMA2; (-) strand; PAM type: NRG; PAM sequence: TGG
gagctgcgtggctctcagcc

SEQ ID NO: 106166 - DNA, 20 bp, Artificial Sequence
  Description of Artificial Sequence: Synthetic oligonucleotide
  Target: LAMA2; (-) strand; PAM type: NRG; PAM sequence: CAG
caactgagctgcgtggctct

SEQ ID NO: 106167 - DNA, 20 bp, Artificial Sequence
  Description of Artificial Sequence: Synthetic oligonucleotide
  Target: LAMA2; (-) strand; PAM type: NRG; PAM sequence: TGG
agtcattcaactgagctgcg

SEQ ID NO: 106168 - DNA, 20 bp, Artificial Sequence
  Description of Artificial Sequence: Synthetic oligonucleotide
  Target: LAMA2; (-) strand; PAM type: NRG; PAM sequence: GAG
agcagatgagtcattcaact

SEQ ID NO: 106169 - DNA, 20 bp, Artificial Sequence
  Description of Artificial Sequence: Synthetic oligonucleotide
  Target: LAMA2; (-) strand; PAM type: NRG; PAM sequence: GAG
acccatcaaggacagcagat

SEQ ID NO: 106170 - DNA, 20 bp, Artificial Sequence
  Description of Artificial Sequence: Synthetic oligonucleotide
  Target: LAMA2; (-) strand; PAM type: NRG; PAM sequence: CAG
gacatacccatcaaggacag

SEQ ID NO: 106171 - DNA, 20 bp, Artificial Sequence
  Description of Artificial Sequence: Synthetic oligonucleotide
  Target: LAMA2; (-) strand; PAM type: NRG; PAM sequence: CAG
aatgacatacccatcaagga

SEQ ID NO: 106172 - DNA, 20 bp, Artificial Sequence
  Description of Artificial Sequence: Synthetic oligonucleotide
  Target: LAMA2; (-) strand; PAM type: NRG; PAM sequence: AGG
aacaaatgacatacccatca

SEQ ID NO: 106173 - DNA, 20 bp, Artificial Sequence
  Description of Artificial Sequence: Synthetic oligonucleotide
  Target: LAMA2; (-) strand; PAM type: NRG; PAM sequence: AAG
aaacaaatgacatacccatc

SEQ ID NO: 106174 - DNA, 20 bp, Artificial Sequence
  Description of Artificial Sequence: Synthetic oligonucleotide
  Target: LAMA2; (-) strand; PAM type: NRG; PAM sequence: AAG
gctagtcaaaacctttggac

SEQ ID NO: 106175 - DNA, 20 bp, Artificial Sequence
  Description of Artificial Sequence: Synthetic oligonucleotide
  Target: LAMA2; (-) strand; PAM type: NRG; PAM sequence: TGG
tttatgctagtcaaaacctt

SEQ ID NO: 106176 - DNA, 20 bp, Artificial Sequence
  Description of Artificial Sequence: Synthetic oligonucleotide
  Target: LAMA2; (-) strand; PAM type: NRG; PAM sequence: TAG
tgattctctactatttatgc

SEQ ID NO: 106177 - DNA, 20 bp, Artificial Sequence
  Description of Artificial Sequence: Synthetic oligonucleotide
  Target: LAMA2; (-) strand; PAM type: NRG; PAM sequence: AGG
gttcataattaacagaaatc

SEQ ID NO: 106178 - DNA, 20 bp, Artificial Sequence
  Description of Artificial Sequence: Synthetic oligonucleotide
  Target: LAMA2; (-) strand; PAM type: NRG; PAM sequence: CAG
tgttcataattaacagaaat

SEQ ID NO: 106179 - DNA, 20 bp, Artificial Sequence
  Description of Artificial Sequence: Synthetic oligonucleotide
  Target: LAMA2; (-) strand; PAM type: NRG; PAM sequence: CAG
gctagtgtgttcataattaa

SEQ ID NO: 106180 - DNA, 20 bp, Artificial Sequence
  Description of Artificial Sequence: Synthetic oligonucleotide
  Target: LAMA2; (-) strand; PAM type: NRG; PAM sequence: TAG
ccacagaaaggccatatagc

SEQ ID NO: 106181 - DNA, 20 bp, Artificial Sequence
  Description of Artificial Sequence: Synthetic oligonucleotide
  Target: LAMA2; (-) strand; PAM type: NRG; PAM sequence: TAG
ctatccacagaaaggccata

SEQ ID NO: 106182 - DNA, 20 bp, Artificial Sequence
  Description of Artificial Sequence: Synthetic oligonucleotide
  Target: LAMA2; (-) strand; PAM type: NRG; PAM sequence: AGG
aattaagcctatccacagaa

SEQ ID NO: 106183 - DNA, 20 bp, Artificial Sequence
  Description of Artificial Sequence: Synthetic oligonucleotide
  Target: LAMA2; (-) strand; PAM type: NRG; PAM sequence: AAG
taattaagcctatccacaga

SEQ ID NO: 106184 - DNA, 20 bp, Artificial Sequence
  Description of Artificial Sequence: Synthetic oligonucleotide
  Target: LAMA2; (-) strand; PAM type: NRG; PAM sequence: CAG
ctcctaattaagcctatcca

SEQ ID NO: 106185 - DNA, 20 bp, Artificial Sequence
  Description of Artificial Sequence: Synthetic oligonucleotide
  Target: LAMA2; (-) strand; PAM type: NRG; PAM sequence: AAG
ttgcccagaccctcctaatt

SEQ ID NO: 106186 - DNA, 20 bp, Artificial Sequence
  Description of Artificial Sequence: Synthetic oligonucleotide
  Target: LAMA2; (-) strand; PAM type: NRG; PAM sequence: CAG
tgctgtagcaaagctttgcc

SEQ ID NO: 106187 - DNA, 20 bp, Artificial Sequence
  Description of Artificial Sequence: Synthetic oligonucleotide
  Target: LAMA2; (-) strand; PAM type: NRG; PAM sequence: AAG
cttttgatgctgctgtagca

SEQ ID NO: 106188 - DNA, 20 bp, Artificial Sequence
  Description of Artificial Sequence: Synthetic oligonucleotide
  Target: LAMA2; (-) strand; PAM type: NRG; PAM sequence: TAG
tcagacttttgatgctgctg

SEQ ID NO: 106189 - DNA, 20 bp, Artificial Sequence
  Description of Artificial Sequence: Synthetic oligonucleotide
  Target: LAMA2; (-) strand; PAM type: NRG; PAM sequence: CAG
atttgagtctacttgtaaat

SEQ ID NO: 106190 - DNA, 20 bp, Artificial Sequence
  Description of Artificial Sequence: Synthetic oligonucleotide
  Target: LAMA2; (-) strand; PAM type: NRG; PAM sequence: GAG
cttcctactaagccatattt

SEQ ID NO: 106191 - DNA, 20 bp, Artificial Sequence
  Description of Artificial Sequence: Synthetic oligonucleotide
  Target: LAMA2; (-) strand; PAM type: NRG; PAM sequence: AAG
ggctatgttcacttcctact

SEQ ID NO: 106192 - DNA, 20 bp, Artificial Sequence
  Description of Artificial Sequence: Synthetic oligonucleotide
  Target: LAMA2; (-) strand; PAM type: NRG; PAM sequence: GGG
ttttttctaagtgtagccta

SEQ ID NO: 106193 - DNA, 20 bp, Artificial Sequence
  Description of Artificial Sequence: Synthetic oligonucleotide
  Target: LAMA2; (-) strand; PAM type: NRG; PAM sequence: AGG
attttttctaagtgtagcct

SEQ ID NO: 106194 - DNA, 20 bp, Artificial Sequence
  Description of Artificial Sequence: Synthetic oligonucleotide
  Target: LAMA2; (-) strand; PAM type: NRG; PAM sequence: TAG
aattttttctaagtgtagcc

SEQ ID NO: 106195 - DNA, 20 bp, Artificial Sequence
  Description of Artificial Sequence: Synthetic oligonucleotide
  Target: LAMA2; (-) strand; PAM type: NRG; PAM sequence: TAG
aaaataattttttctaagtg

SEQ ID NO: 106196 - DNA, 20 bp, Artificial Sequence
  Description of Artificial Sequence: Synthetic oligonucleotide
  Target: LAMA2; (-) strand; PAM type: NRG; PAM sequence: AAG
aacagaaaataattttttct

SEQ ID NO: 106197 - DNA, 20 bp, Artificial Sequence
  Description of Artificial Sequence: Synthetic oligonucleotide
  Target: LAMA2; (-) strand; PAM type: NRG; PAM sequence: CAG
ctgtgctttttaataaagaa

SEQ ID NO: 106198 - DNA, 20 bp, Artificial Sequence
  Description of Artificial Sequence: Synthetic oligonucleotide
  Target: LAMA2; (-) strand; PAM type: NRG; PAM sequence: AAG
aaccactgtgctttttaata

SEQ ID NO: 106199 - DNA, 20 bp, Artificial Sequence
  Description of Artificial Sequence: Synthetic oligonucleotide
  Target: LAMA2; (-) strand; PAM type: NRG; PAM sequence: AGG
tgttatttaaaatgctaata

SEQ ID NO: 106200 - DNA, 20 bp, Artificial Sequence
  Description of Artificial Sequence: Synthetic oligonucleotide
  Target: LAMA2; (-) strand; PAM type: NRG; PAM sequence: AAG
atgttatttaaaatgctaat

SEQ ID NO: 106201 - DNA, 20 bp, Artificial Sequence
  Description of Artificial Sequence: Synthetic oligonucleotide
  Target: LAMA2; (-) strand; PAM type: NRG; PAM sequence: CAG
catgaaactgaaatttgaaa

SEQ ID NO: 106202 - DNA, 20 bp, Artificial Sequence
  Description of Artificial Sequence: Synthetic oligonucleotide
  Target: LAMA2; (-) strand; PAM type: NRG; PAM sequence: TAG
ataaattgttttgattccat

SEQ ID NO: 106203 - DNA, 20 bp, Artificial Sequence
  Description of Artificial Sequence: Synthetic oligonucleotide
  Target: LAMA2; (-) strand; PAM type: NRG; PAM sequence: AAG
gtatggggccaaattttcaa

SEQ ID NO: 106204 - DNA, 20 bp, Artificial Sequence
  Description of Artificial Sequence: Synthetic oligonucleotide
  Target: LAMA2; (-) strand; PAM type: NRG; PAM sequence: GGG
agacttaaagactacgtatg

SEQ ID NO: 106205 - DNA, 20 bp, Artificial Sequence
  Description of Artificial Sequence: Synthetic oligonucleotide
  Target: LAMA2; (-) strand; PAM type: NRG; PAM sequence: GGG
aagacttaaagactacgtat

SEQ ID NO: 106206 - DNA, 20 bp, Artificial Sequence
  Description of Artificial Sequence: Synthetic oligonucleotide
  Target: LAMA2; (-) strand; PAM type: NRG; PAM sequence: TGG
aaagacttaaagactacgta

SEQ ID NO: 106207 - DNA, 20 bp, Artificial Sequence
  Description of Artificial Sequence: Synthetic oligonucleotide
  Target: LAMA2; (-) strand; PAM type: NRG; PAM sequence: AAG
ggaaaaataaaaaagactta

SEQ ID NO: 106208 - DNA, 20 bp, Artificial Sequence
  Description of Artificial Sequence: Synthetic oligonucleotide
  Target: LAMA2; (-) strand; PAM type: NRG; PAM sequence: AAG
ttaaaagaggaaaaataaaa

SEQ ID NO: 106209 - DNA, 20 bp, Artificial Sequence
  Description of Artificial Sequence: Synthetic oligonucleotide
  Target: LAMA2; (-) strand; PAM type: NRG; PAM sequence: AGG
gtctccctggagcttaaaag

SEQ ID NO: 106210 - DNA, 20 bp, Artificial Sequence
  Description of Artificial Sequence: Synthetic oligonucleotide
  Target: LAMA2; (-) strand; PAM type: NRG; PAM sequence: GAG
tgtctccctggagcttaaaa

SEQ ID NO: 106211 - DNA, 20 bp, Artificial Sequence
  Description of Artificial Sequence: Synthetic oligonucleotide
  Target: LAMA2; (-) strand; PAM type: NRG; PAM sequence: AAG
aatgtctccctggagcttaa

SEQ ID NO: 106212 - DNA, 20 bp, Artificial Sequence
  Description of Artificial Sequence: Synthetic oligonucleotide
  Target: LAMA2; (-) strand; PAM type: NRG; PAM sequence: GAG
gaaaatgtaatgtctccctg

SEQ ID NO: 106213 - DNA, 20 bp, Artificial Sequence
  Description of Artificial Sequence: Synthetic oligonucleotide
  Target: LAMA2; (-) strand; PAM type: NRG; PAM sequence: TGG
gagaaaatgtaatgtctccc

SEQ ID NO: 106214 - DNA, 20 bp, Artificial Sequence
  Description of Artificial Sequence: Synthetic oligonucleotide
  Target: LAMA2; (-) strand; PAM type: NRG; PAM sequence: GAG
aataagctgctattttacag

SEQ ID NO: 106215 - DNA, 20 bp, Artificial Sequence
  Description of Artificial Sequence: Synthetic oligonucleotide
  Target: LAMA2; (-) strand; PAM type: NRG; PAM sequence: AGG
agaataagctgctattttac

SEQ ID NO: 106216 - DNA, 20 bp, Artificial Sequence
  Description of Artificial Sequence: Synthetic oligonucleotide
  Target: LAMA2; (-) strand; PAM type: NRG; PAM sequence: CAG
tagaataagctgctatttta

SEQ ID NO: 106217 - DNA, 20 bp, Artificial Sequence
  Description of Artificial Sequence: Synthetic oligonucleotide
  Target: LAMA2; (-) strand; PAM type: NRG; PAM sequence: AAG
gtaataatcccagctagaat

SEQ ID NO: 106218 - DNA, 20 bp, Artificial Sequence
  Description of Artificial Sequence: Synthetic oligonucleotide
  Target: LAMA2; (-) strand; PAM type: NRG; PAM sequence: TAG
acctttgtaataatcccagc

SEQ ID NO: 106219 - DNA, 20 bp, Artificial Sequence
  Description of Artificial Sequence: Synthetic oligonucleotide
  Target: LAMA2; (-) strand; PAM type: NRG; PAM sequence: CAG
tatgacctttgtaataatcc

SEQ ID NO: 106220 - DNA, 20 bp, Artificial Sequence
  Description of Artificial Sequence: Synthetic oligonucleotide
  Target: LAMA2; (-) strand; PAM type: NRG; PAM sequence: AAG
atacacagaaggctgtttgt

SEQ ID NO: 106221 - DNA, 20 bp, Artificial Sequence
  Description of Artificial Sequence: Synthetic oligonucleotide
  Target: LAMA2; (-) strand; PAM type: NRG; PAM sequence: AGG
gcatatcagttatacacaga

SEQ ID NO: 106222 - DNA, 20 bp, Artificial Sequence
  Description of Artificial Sequence: Synthetic oligonucleotide
  Target: LAMA2; (-) strand; PAM type: NRG; PAM sequence: AAG
agcatatcagttatacacag

SEQ ID NO: 106223 - DNA, 20 bp, Artificial Sequence
  Description of Artificial Sequence: Synthetic oligonucleotide
  Target: LAMA2; (-) strand; PAM type: NRG; PAM sequence: CAG
aaaagcatatcagttataca

SEQ ID NO: 106224 - DNA, 20 bp, Artificial Sequence
  Description of Artificial Sequence: Synthetic oligonucleotide
  Target: LAMA2; (-) strand; PAM type: NRG; PAM sequence: CAG
aaattgtaggaaaagcatat

SEQ ID NO: 106225 - DNA, 20 bp, Artificial Sequence
  Description of Artificial Sequence: Synthetic oligonucleotide
  Target: LAMA2; (-) strand; PAM type: NRG; PAM sequence: AAG
caatcccaaaattgtaggaa

SEQ ID NO: 106226 - DNA, 20 bp, Artificial Sequence
  Description of Artificial Sequence: Synthetic oligonucleotide
  Target: LAMA2; (-) strand; PAM type: NRG; PAM sequence: AGG
tacgacaatcccaaaattgt

SEQ ID NO: 106227 - DNA, 20 bp, Artificial Sequence
  Description of Artificial Sequence: Synthetic oligonucleotide
  Target: LAMA2; (-) strand; PAM type: NRG; PAM sequence: TAG
ttacgacaatcccaaaattg

SEQ ID NO: 106228 - DNA, 20 bp, Artificial Sequence
  Description of Artificial Sequence: Synthetic oligonucleotide
  Target: LAMA2; (-) strand; PAM type: NRG; PAM sequence: TAG
caaattattcttggggctaa

SEQ ID NO: 106229 - DNA, 20 bp, Artificial Sequence
  Description of Artificial Sequence: Synthetic oligonucleotide
  Target: LAMA2; (-) strand; PAM type: NRG; PAM sequence: GGG
atctgggcaaattattcttg

SEQ ID NO: 106230 - DNA, 20 bp, Artificial Sequence
  Description of Artificial Sequence: Synthetic oligonucleotide
  Target: LAMA2; (-) strand; PAM type: NRG; PAM sequence: GGG
tatctgggcaaattattctt

SEQ ID NO: 106231 - DNA, 20 bp, Artificial Sequence
  Description of Artificial Sequence: Synthetic oligonucleotide
  Target: LAMA2; (-) strand; PAM type: NRG; PAM sequence: TGG
ttatctgggcaaattattct

SEQ ID NO: 106232 - DNA, 20 bp, Artificial Sequence
  Description of Artificial Sequence: Synthetic oligonucleotide
  Target: LAMA2; (-) strand; PAM type: NRG; PAM sequence: GGG
catgtgatgtagatttatct

SEQ ID NO: 106233 - DNA, 20 bp, Artificial Sequence
  Description of Artificial Sequence: Synthetic oligonucleotide
  Target: LAMA2; (-) strand; PAM type: NRG; PAM sequence: TGG
gcatgtgatgtagatttatc

SEQ ID NO: 106234 - DNA, 20 bp, Artificial Sequence
  Description of Artificial Sequence: Synthetic oligonucleotide
  Target: LAMA2; (-) strand; PAM type: NRG; PAM sequence: TAG
acaaagctttgcatgtgatg

SEQ ID NO: 106235 - DNA, 20 bp, Artificial Sequence
  Description of Artificial Sequence: Synthetic oligonucleotide
  Target: LAMA2; (-) strand; PAM type: NRG; PAM sequence: AAG
aagtattaagtatgagaaca

SEQ ID NO: 106236 - DNA, 20 bp, Artificial Sequence
  Description of Artificial Sequence: Synthetic oligonucleotide
  Target: LAMA2; (-) strand; PAM type: NRG; PAM sequence: GAG
taacagtaagtattaagtat

SEQ ID NO: 106237 - DNA, 20 bp, Artificial Sequence
  Description of Artificial Sequence: Synthetic oligonucleotide
  Target: LAMA2; (-) strand; PAM type: NRG; PAM sequence: AAG
tctttataacagtaagtatt

SEQ ID NO: 106238 - DNA, 20 bp, Artificial Sequence
  Description of Artificial Sequence: Synthetic oligonucleotide
  Target: LAMA2; (-) strand; PAM type: NRG; PAM sequence: AAG
cattttttctttataacagt

SEQ ID NO: 106239 - DNA, 20 bp, Artificial Sequence
  Description of Artificial Sequence: Synthetic oligonucleotide
  Target: LAMA2; (-) strand; PAM type: NRG; PAM sequence: CAG
ttagcattttttctttataa

SEQ ID NO: 106240 - DNA, 20 bp, Artificial Sequence
  Description of Artificial Sequence: Synthetic oligonucleotide
  Target: LAMA2; (-) strand; PAM type: NRG; PAM sequence: TAG
tgtccaaggtcttcaaacat

SEQ ID NO: 106241 - DNA, 20 bp, Artificial Sequence
  Description of Artificial Sequence: Synthetic oligonucleotide
  Target: LAMA2; (-) strand; PAM type: NRG; PAM sequence: AGG
gatagttcatatattgtcca

SEQ ID NO: 106242 - DNA, 20 bp, Artificial Sequence
  Description of Artificial Sequence: Synthetic oligonucleotide
  Target: LAMA2; (-) strand; PAM type: NRG; PAM sequence: AAG
tgatagttcatatattgtcc

SEQ ID NO: 106243 - DNA, 20 bp, Artificial Sequence
  Description of Artificial Sequence: Synthetic oligonucleotide
  Target: LAMA2; (-) strand; PAM type: NRG; PAM sequence: TAG
tttgacataaaataaaatga

SEQ ID NO: 106244 - DNA, 20 bp, Artificial Sequence
  Description of Artificial Sequence: Synthetic oligonucleotide
  Target: LAMA2; (-) strand; PAM type: NRG; PAM sequence: AAG
ccttcattataaagtggcaa

SEQ ID NO: 106245 - DNA, 20 bp, Artificial Sequence
  Description of Artificial Sequence: Synthetic oligonucleotide
  Target: LAMA2; (-) strand; PAM type: NRG; PAM sequence: TGG
acccacccttcattataaag

SEQ ID NO: 106246 - DNA, 20 bp, Artificial Sequence
  Description of Artificial Sequence: Synthetic oligonucleotide
  Target: LAMA2; (-) strand; PAM type: NRG; PAM sequence: AAG
gccacccacccttcattata

SEQ ID NO: 106247 - DNA, 20 bp, Artificial Sequence
  Description of Artificial Sequence: Synthetic oligonucleotide
  Target: LAMA2; (-) strand; PAM type: NRG; PAM sequence: TAG
agcctggatctgatgatacc

SEQ ID NO: 106248 - DNA, 20 bp, Artificial Sequence
  Description of Artificial Sequence: Synthetic oligonucleotide
  Target: LAMA2; (-) strand; PAM type: NRG; PAM sequence: TGG
ccaagtaaggacttagagcc

SEQ ID NO: 106249 - DNA, 20 bp, Artificial Sequence
  Description of Artificial Sequence: Synthetic oligonucleotide
  Target: LAMA2; (-) strand; PAM type: NRG; PAM sequence: GAG
tgtccccaagtaaggactta

SEQ ID NO: 106250 - DNA, 20 bp, Artificial Sequence
  Description of Artificial Sequence: Synthetic oligonucleotide
  Target: LAMA2; (-) strand; PAM type: NRG; PAM sequence: TAG
tatgtccccaagtaaggact

SEQ ID NO: 106251 - DNA, 20 bp, Artificial Sequence
  Description of Artificial Sequence: Synthetic oligonucleotide
  Target: LAMA2; (-) strand; PAM type: NRG; PAM sequence: AGG
gaccaatatgtccccaagta

SEQ ID NO: 106252 - DNA, 20 bp, Artificial Sequence
  Description of Artificial Sequence: Synthetic oligonucleotide
  Target: LAMA2; (-) strand; PAM type: NRG; PAM sequence: AAG
tgaccaatatgtccccaagt

SEQ ID NO: 106253 - DNA, 20 bp, Artificial Sequence
  Description of Artificial Sequence: Synthetic oligonucleotide
  Target: LAMA2; (-) strand; PAM type: NRG; PAM sequence: AAG
caaatgaccaatatgtcccc

SEQ ID NO: 106254 - DNA, 20 bp, Artificial Sequence
  Description of Artificial Sequence: Synthetic oligonucleotide
  Target: LAMA2; (-) strand; PAM type: NRG; PAM sequence: AGG
aaggttaaatggcctgtttc

SEQ ID NO: 106255 - DNA, 20 bp, Artificial Sequence
  Description of Artificial Sequence: Synthetic oligonucleotide
  Target: LAMA2; (-) strand; PAM type: NRG; PAM sequence: CAG
gaaggttaaatggcctgttt

SEQ ID NO: 106256 - DNA, 20 bp, Artificial Sequence
  Description of Artificial Sequence: Synthetic oligonucleotide
  Target: LAMA2; (-) strand; PAM type: NRG; PAM sequence: TGG
gtgaatttcagaaggttaaa

SEQ ID NO: 106257 - DNA, 20 bp, Artificial Sequence
  Description of Artificial Sequence: Synthetic oligonucleotide
  Target: LAMA2; (-) strand; PAM type: NRG; PAM sequence: AGG
gagaccaagtgaatttcaga

SEQ ID NO: 106258 - DNA, 20 bp, Artificial Sequence
  Description of Artificial Sequence: Synthetic oligonucleotide
  Target: LAMA2; (-) strand; PAM type: NRG; PAM sequence: AAG
agagaccaagtgaatttcag

SEQ ID NO: 106259 - DNA, 20 bp, Artificial Sequence
  Description of Artificial Sequence: Synthetic oligonucleotide
  Target: LAMA2; (-) strand; PAM type: NRG; PAM sequence: CAG
agaagagaccaagtgaattt

SEQ ID NO: 106260 - DNA, 20 bp, Artificial Sequence
  Description of Artificial Sequence: Synthetic oligonucleotide
  Target: LAMA2; (-) strand; PAM type: NRG; PAM sequence: AAG
tgcacttcccagaagagacc

SEQ ID NO: 106261 - DNA, 20 bp, Artificial Sequence
  Description of Artificial Sequence: Synthetic oligonucleotide
  Target: LAMA2; (-) strand; PAM type: NRG; PAM sequence: GAG
ggtaggtgcacttcccagaa

SEQ ID NO: 106262 - DNA, 20 bp, Artificial Sequence
  Description of Artificial Sequence: Synthetic oligonucleotide
  Target: LAMA2; (-) strand; PAM type: NRG; PAM sequence: AAG
ggggtaggtgcacttcccag

SEQ ID NO: 106263 - DNA, 20 bp, Artificial Sequence
  Description of Artificial Sequence: Synthetic oligonucleotide
  Target: LAMA2; (-) strand; PAM type: NRG; PAM sequence: CAG
tctggggtaggtgcacttcc

SEQ ID NO: 106264 - DNA, 20 bp, Artificial Sequence
  Description of Artificial Sequence: Synthetic oligonucleotide
  Target: LAMA2; (-) strand; PAM type: NRG; PAM sequence: AGG
tcacaaaatctttctggggt

SEQ ID NO: 106265 - DNA, 20 bp, Artificial Sequence
  Description of Artificial Sequence: Synthetic oligonucleotide
  Target: LAMA2; (-) strand; PAM type: NRG; PAM sequence: TAG
ttcacaaaatctttctgggg

SEQ ID NO: 106266 - DNA, 20 bp, Artificial Sequence
  Description of Artificial Sequence: Synthetic oligonucleotide
  Target: LAMA2; (-) strand; PAM type: NRG; PAM sequence: GGG
aatttcacaaaatctttctg

SEQ ID NO: 106267 - DNA, 20 bp, Artificial Sequence
  Description of Artificial Sequence: Synthetic oligonucleotide
  Target: LAMA2; (-) strand; PAM type: NRG; PAM sequence: GGG
taatttcacaaaatctttct

SEQ ID NO: 106268 - DNA, 20 bp, Artificial Sequence
  Description of Artificial Sequence: Synthetic oligonucleotide
  Target: LAMA2; (-) strand; PAM type: NRG; PAM sequence: TGG
ttaatttcacaaaatctttc

SEQ ID NO: 106269 - DNA, 20 bp, Artificial Sequence
  Description of Artificial Sequence: Synthetic oligonucleotide
  Target: LAMA2; (-) strand; PAM type: NRG; PAM sequence: TGG
gagcacttgtactacattac

SEQ ID NO: 106270 - DNA, 20 bp, Artificial Sequence
  Description of Artificial Sequence: Synthetic oligonucleotide
  Target: LAMA2; (-) strand; PAM type: NRG; PAM sequence: GAG
gaagcatgctgtgagattca

SEQ ID NO: 106271 - DNA, 20 bp, Artificial Sequence
  Description of Artificial Sequence: Synthetic oligonucleotide
  Target: LAMA2; (-) strand; PAM type: NRG; PAM sequence: CAG
gtgaagcatgctgtgagatt

SEQ ID NO: 106272 - DNA, 20 bp, Artificial Sequence
  Description of Artificial Sequence: Synthetic oligonucleotide
  Target: LAMA2; (-) strand; PAM type: NRG; PAM sequence: GAG
ttatttgtgaagcatgctgt

SEQ ID NO: 106273 - DNA, 20 bp, Artificial Sequence
  Description of Artificial Sequence: Synthetic oligonucleotide
  Target: LAMA2; (-) strand; PAM type: NRG; PAM sequence: AAG
aattcttcaccttatttgtg

SEQ ID NO: 106274 - DNA, 20 bp, Artificial Sequence
  Description of Artificial Sequence: Synthetic oligonucleotide
  Target: LAMA2; (-) strand; PAM type: NRG; PAM sequence: GAG
ctctagcaggtgtgtgatat

SEQ ID NO: 106275 - DNA, 20 bp, Artificial Sequence
  Description of Artificial Sequence: Synthetic oligonucleotide
  Target: LAMA2; (-) strand; PAM type: NRG; PAM sequence: AGG
ctgcaaccaggtgctctagc

SEQ ID NO: 106276 - DNA, 20 bp, Artificial Sequence
  Description of Artificial Sequence: Synthetic oligonucleotide
  Target: LAMA2; (-) strand; PAM type: NRG; PAM sequence: CAG
tctgcaaccaggtgctctag

SEQ ID NO: 106277 - DNA, 20 bp, Artificial Sequence
  Description of Artificial Sequence: Synthetic oligonucleotide
  Target: LAMA2; (-) strand; PAM type: NRG; PAM sequence: TAG
gtctctgcaaccaggtgctc

SEQ ID NO: 106278 - DNA, 20 bp, Artificial Sequence
  Description of Artificial Sequence: Synthetic oligonucleotide
  Target: LAMA2; (-) strand; PAM type: NRG; PAM sequence: AGG
ctccaaaagtctctgcaacc

SEQ ID NO: 106279 - DNA, 20 bp, Artificial Sequence
  Description of Artificial Sequence: Synthetic oligonucleotide
  Target: LAMA2; (-) strand; PAM type: NRG; PAM sequence: CAG
cctccaaaagtctctgcaac

SEQ ID NO: 106280 - DNA, 20 bp, Artificial Sequence
  Description of Artificial Sequence: Synthetic oligonucleotide
  Target: LAMA2; (-) strand; PAM type: NRG; PAM sequence: AAG
atacccatagcatcctccaa

SEQ ID NO: 106281 - DNA, 20 bp, Artificial Sequence
  Description of Artificial Sequence: Synthetic oligonucleotide
  Target: LAMA2; (-) strand; PAM type: NRG; PAM sequence: TAG
caacatatcttaaataccca

SEQ ID NO: 106282 - DNA, 20 bp, Artificial Sequence
  Description of Artificial Sequence: Synthetic oligonucleotide
  Target: LAMA2; (-) strand; PAM type: NRG; PAM sequence: CAG
aacttatatttctaataatt

SEQ ID NO: 106283 - DNA, 20 bp, Artificial Sequence
  Description of Artificial Sequence: Synthetic oligonucleotide
  Target: LAMA2; (-) strand; PAM type: NRG; PAM sequence: TAG
ctacttattatattgtccta

SEQ ID NO: 106284 - DNA, 20 bp, Artificial Sequence
  Description of Artificial Sequence: Synthetic oligonucleotide
  Target: LAMA2; (-) strand; PAM type: NRG; PAM sequence: AAG
gacaattccaaataatagtg

SEQ ID NO: 106285 - DNA, 20 bp, Artificial Sequence
  Description of Artificial Sequence: Synthetic oligonucleotide
  Target: LAMA2; (-) strand; PAM type: NRG; PAM sequence: TAG
tctatgacaattccaaataa

SEQ ID NO: 106286 - DNA, 20 bp, Artificial Sequence
  Description of Artificial Sequence: Synthetic oligonucleotide
  Target: LAMA2; (-) strand; PAM type: NRG; PAM sequence: TGG
atctggcttccaaatgatca

SEQ ID NO: 106287 - DNA, 20 bp, Artificial Sequence
  Description of Artificial Sequence: Synthetic oligonucleotide
  Target: LAMA2; (-) strand; PAM type: NRG; PAM sequence: TGG
cgtcctaattatatgaaatc

SEQ ID NO: 106288 - DNA, 20 bp, Artificial Sequence
  Description of Artificial Sequence: Synthetic oligonucleotide
  Target: LAMA2; (-) strand; PAM type: NRG; PAM sequence: AAG
cactcaatggtactcaaatg

SEQ ID NO: 106289 - DNA, 20 bp, Artificial Sequence
  Description of Artificial Sequence: Synthetic oligonucleotide
  Target: LAMA2; (-) strand; PAM type: NRG; PAM sequence: TGG
aggaatgtcagggcactcaa

SEQ ID NO: 106290 - DNA, 20 bp, Artificial Sequence
  Description of Artificial Sequence: Synthetic oligonucleotide
  Target: LAMA2; (-) strand; PAM type: NRG; PAM sequence: GGG
gattcaaaaaaggaatgtca

SEQ ID NO: 106291 - DNA, 20 bp, Artificial Sequence
  Description of Artificial Sequence: Synthetic oligonucleotide
  Target: LAMA2; (-) strand; PAM type: NRG; PAM sequence: AGG
tgattcaaaaaaggaatgtc

SEQ ID NO: 106292 - DNA, 20 bp, Artificial Sequence
  Description of Artificial Sequence: Synthetic oligonucleotide
  Target: LAMA2; (-) strand; PAM type: NRG; PAM sequence: CAG
atgattcaaaaaaggaatgt

SEQ ID NO: 106293 - DNA, 20 bp, Artificial Sequence
  Description of Artificial Sequence: Synthetic oligonucleotide
  Target: LAMA2; (-) strand; PAM type: NRG; PAM sequence: AGG
ctggtgggatgattcaaaaa

SEQ ID NO: 106294 - DNA, 20 bp, Artificial Sequence
  Description of Artificial Sequence: Synthetic oligonucleotide
  Target: LAMA2; (-) strand; PAM type: NRG; PAM sequence: AAG
tctggtgggatgattcaaaa

SEQ ID NO: 106295 - DNA, 20 bp, Artificial Sequence
  Description of Artificial Sequence: Synthetic oligonucleotide
  Target: LAMA2; (-) strand; PAM type: NRG; PAM sequence: GGG
gcctcatcaaggattctggt

SEQ ID NO: 106296 - DNA, 20 bp, Artificial Sequence
  Description of Artificial Sequence: Synthetic oligonucleotide
  Target: LAMA2; (-) strand; PAM type: NRG; PAM sequence: TGG
agcctcatcaaggattctgg

SEQ ID NO: 106297 - DNA, 20 bp, Artificial Sequence
  Description of Artificial Sequence: Synthetic oligonucleotide
  Target: LAMA2; (-) strand; PAM type: NRG; PAM sequence: TGG
tttagcctcatcaaggattc

SEQ ID NO: 106298 - DNA, 20 bp, Artificial Sequence
  Description of Artificial Sequence: Synthetic oligonucleotide
  Target: LAMA2; (-) strand; PAM type: NRG; PAM sequence: AGG
agatgtttttagcctcatca

SEQ ID NO: 106299 - DNA, 20 bp, Artificial Sequence
  Description of Artificial Sequence: Synthetic oligonucleotide
  Target: LAMA2; (-) strand; PAM type: NRG; PAM sequence: AAG
gagatgtttttagcctcatc

SEQ ID NO: 106300 - DNA, 20 bp, Artificial Sequence
  Description of Artificial Sequence: Synthetic oligonucleotide
  Target: LAMA2; (-) strand; PAM type: NRG; PAM sequence: TAG
ggcattgaaggagatgtttt

SEQ ID NO: 106301 - DNA, 20 bp, Artificial Sequence
  Description of Artificial Sequence: Synthetic oligonucleotide
  Target: LAMA2; (-) strand; PAM type: NRG; PAM sequence: GAG
aggctgcagtggcattgaag

SEQ ID NO: 106302 - DNA, 20 bp, Artificial Sequence
  Description of Artificial Sequence: Synthetic oligonucleotide
  Target: LAMA2; (-) strand; PAM type: NRG; PAM sequence: AGG
gaaggctgcagtggcattga

SEQ ID NO: 106303 - DNA, 20 bp, Artificial Sequence
  Description of Artificial Sequence: Synthetic oligonucleotide
  Target: LAMA2; (-) strand; PAM type: NRG; PAM sequence: AAG
tgaaggctgcagtggcattg

SEQ ID NO: 106304 - DNA, 20 bp, Artificial Sequence
  Description of Artificial Sequence: Synthetic oligonucleotide
  Target: LAMA2; (-) strand; PAM type: NRG; PAM sequence: TGG
gtaagctttgaaggctgcag

SEQ ID NO: 106305 - DNA, 20 bp, Artificial Sequence
  Description of Artificial Sequence: Synthetic oligonucleotide
  Target: LAMA2; (-) strand; PAM type: NRG; PAM sequence: CAG
gctgtaagctttgaaggctg

SEQ ID NO: 106306 - DNA, 20 bp, Artificial Sequence
  Description of Artificial Sequence: Synthetic oligonucleotide
  Target: LAMA2; (-) strand; PAM type: NRG; PAM sequence: AGG
aatattgctgtaagctttga

SEQ ID NO: 106307 - DNA, 20 bp, Artificial Sequence
  Description of Artificial Sequence: Synthetic oligonucleotide
  Target: LAMA2; (-) strand; PAM type: NRG; PAM sequence: AAG
taatattgctgtaagctttg

SEQ ID NO: 106308 - DNA, 20 bp, Artificial Sequence
  Description of Artificial Sequence: Synthetic oligonucleotide
  Target: LAMA2; (-) strand; PAM type: NRG; PAM sequence: AAG
atagtccttaatattgctgt

SEQ ID NO: 106309 - DNA, 20 bp, Artificial Sequence
  Description of Artificial Sequence: Synthetic oligonucleotide
  Target: LAMA2; (-) strand; PAM type: NRG; PAM sequence: TAG
ctttctcagcttcatcaata

SEQ ID NO: 106310 - DNA, 20 bp, Artificial Sequence
  Description of Artificial Sequence: Synthetic oligonucleotide
  Target: LAMA2; (-) strand; PAM type: NRG; PAM sequence: CAG
ggcttctttggcaactttct

SEQ ID NO: 106311 - DNA, 20 bp, Artificial Sequence
  Description of Artificial Sequence: Synthetic oligonucleotide
  Target: LAMA2; (-) strand; PAM type: NRG; PAM sequence: TGG
tgcaagatctttggcttctt

SEQ ID NO: 106312 - DNA, 20 bp, Artificial Sequence
  Description of Artificial Sequence: Synthetic oligonucleotide
  Target: LAMA2; (-) strand; PAM type: NRG; PAM sequence: TGG
agcttcatgtgcaagatctt

SEQ ID NO: 106313 - DNA, 20 bp, Artificial Sequence
  Description of Artificial Sequence: Synthetic oligonucleotide
  Target: LAMA2; (-) strand; PAM type: NRG; PAM sequence: AAG
agttttgtagcttcatgtgc

SEQ ID NO: 106314 - DNA, 20 bp, Artificial Sequence
  Description of Artificial Sequence: Synthetic oligonucleotide
  Target: LAMA2; (-) strand; PAM type: NRG; PAM sequence: TAG
tttgtttcttaccagttttg

SEQ ID NO: 106315 - DNA, 20 bp, Artificial Sequence
  Description of Artificial Sequence: Synthetic oligonucleotide
  Target: LAMA2; (-) strand; PAM type: NRG; PAM sequence: CAG
atgtgccatttgtttcttac

SEQ ID NO: 106316 - DNA, 20 bp, Artificial Sequence
  Description of Artificial Sequence: Synthetic oligonucleotide
  Target: LAMA2; (-) strand; PAM type: NRG; PAM sequence: CAG
aaaaggttgacttccattcc

SEQ ID NO: 106317 - DNA, 20 bp, Artificial Sequence
  Description of Artificial Sequence: Synthetic oligonucleotide
  Target: LAMA2; (-) strand; PAM type: NRG; PAM sequence: AGG
tacatttgaaaaattcaaaa

SEQ ID NO: 106318 - DNA, 20 bp, Artificial Sequence
  Description of Artificial Sequence: Synthetic oligonucleotide
  Target: LAMA2; (-) strand; PAM type: NRG; PAM sequence: AAG
ttacatttgaaaaattcaaa

SEQ ID NO: 106319 - DNA, 20 bp, Artificial Sequence
  Description of Artificial Sequence: Synthetic oligonucleotide
  Target: LAMA2; (-) strand; PAM type: NRG; PAM sequence: CAG
accaatttactgggattttc

SEQ ID NO: 106320 - DNA, 20 bp, Artificial Sequence
  Description of Artificial Sequence: Synthetic oligonucleotide
  Target: LAMA2; (-) strand; PAM type: NRG; PAM sequence: GGG
aacaaatataccaatttact

SEQ ID NO: 106321 - DNA, 20 bp, Artificial Sequence
  Description of Artificial Sequence: Synthetic oligonucleotide
  Target: LAMA2; (-) strand; PAM type: NRG; PAM sequence: TGG
aaacaaatataccaatttac

SEQ ID NO: 106322 - DNA, 20 bp, Artificial Sequence
  Description of Artificial Sequence: Synthetic oligonucleotide
  Target: LAMA2; (-) strand; PAM type: NRG; PAM sequence: AGG
ttttaggcaaattttaaaag

SEQ ID NO: 106323 - DNA, 20 bp, Artificial Sequence
  Description of Artificial Sequence: Synthetic oligonucleotide
  Target: LAMA2; (-) strand; PAM type: NRG; PAM sequence: GAG
attttaggcaaattttaaaa

SEQ ID NO: 106324 - DNA, 20 bp, Artificial Sequence
  Description of Artificial Sequence: Synthetic oligonucleotide
  Target: LAMA2; (-) strand; PAM type: NRG; PAM sequence: AAG
ttattttaggcaaattttaa

SEQ ID NO: 106325 - DNA, 20 bp, Artificial Sequence
  Description of Artificial Sequence: Synthetic oligonucleotide
  Target: LAMA2; (-) strand; PAM type: NRG; PAM sequence: AGG
gcataccgagaatttatttt

SEQ ID NO: 106326 - DNA, 20 bp, Artificial Sequence
  Description of Artificial Sequence: Synthetic oligonucleotide
  Target: LAMA2; (-) strand; PAM type: NRG; PAM sequence: TAG
agcataccgagaatttattt

SEQ ID NO: 106327 - DNA, 20 bp, Artificial Sequence
  Description of Artificial Sequence: Synthetic oligonucleotide
  Target: LAMA2; (-) strand; PAM type: NRG; PAM sequence: GAG
tgctataattatagcatacc

SEQ ID NO: 106328 - DNA, 20 bp, Artificial Sequence
  Description of Artificial Sequence: Synthetic oligonucleotide
  Target: LAMA2; (-) strand; PAM type: NRG; PAM sequence: TAG
aaagagttctgctataatta

SEQ ID NO: 106329 - DNA, 20 bp, Artificial Sequence
  Description of Artificial Sequence: Synthetic oligonucleotide
  Target: LAMA2; (-) strand; PAM type: NRG; PAM sequence: GAG
gtagtgggtgactgagaaaa

SEQ ID NO: 106330 - DNA, 20 bp, Artificial Sequence
  Description of Artificial Sequence: Synthetic oligonucleotide
  Target: LAMA2; (-) strand; PAM type: NRG; PAM sequence: AAG
tggtagtgggtgactgagaa

SEQ ID NO: 106331 - DNA, 20 bp, Artificial Sequence
  Description of Artificial Sequence: Synthetic oligonucleotide
  Target: LAMA2; (-) strand; PAM type: NRG; PAM sequence: GAG
aacagtggtagtgggtgact

SEQ ID NO: 106332 - DNA, 20 bp, Artificial Sequence
  Description of Artificial Sequence: Synthetic oligonucleotide
  Target: LAMA2; (-) strand; PAM type: NRG; PAM sequence: GGG
aagaccctaacagtggtagt

SEQ ID NO: 106333 - DNA, 20 bp, Artificial Sequence
  Description of Artificial Sequence: Synthetic oligonucleotide
  Target: LAMA2; (-) strand; PAM type: NRG; PAM sequence: TGG
taagaccctaacagtggtag

SEQ ID NO: 106334 - DNA, 20 bp, Artificial Sequence
  Description of Artificial Sequence: Synthetic oligonucleotide
  Target: LAMA2; (-) strand; PAM type: NRG; PAM sequence: TAG
ttttaagaccctaacagtgg

SEQ ID NO: 106335 - DNA, 20 bp, Artificial Sequence
  Description of Artificial Sequence: Synthetic oligonucleotide
  Target: LAMA2; (-) strand; PAM type: NRG; PAM sequence: TGG
taattttaagaccctaacag

SEQ ID NO: 106336 - DNA, 20 bp, Artificial Sequence
  Description of Artificial Sequence: Synthetic oligonucleotide
  Target: LAMA2; (-) strand; PAM type: NRG; PAM sequence: CAG
agataattttaagaccctaa

SEQ ID NO: 106337 - DNA, 20 bp, Artificial Sequence
  Description of Artificial Sequence: Synthetic oligonucleotide
  Target: LAMA2; (-) strand; PAM type: NRG; PAM sequence: AAG
ttggtttctgagataatttt

SEQ ID NO: 106338 - DNA, 20 bp, Artificial Sequence
  Description of Artificial Sequence: Synthetic oligonucleotide
  Target: LAMA2; (-) strand; PAM type: NRG; PAM sequence: GAG
cacaaacttgcttggtttct

SEQ ID NO: 106339 - DNA, 20 bp, Artificial Sequence
  Description of Artificial Sequence: Synthetic oligonucleotide
  Target: LAMA2; (-) strand; PAM type: NRG; PAM sequence: TGG
gttggtagcacaaacttgct

SEQ ID NO: 106340 - DNA, 20 bp, Artificial Sequence
  Description of Artificial Sequence: Synthetic oligonucleotide
  Target: LAMA2; (-) strand; PAM type: NRG; PAM sequence: TAG
tgttttattttgtgagttgg

SEQ ID NO: 106341 - DNA, 20 bp, Artificial Sequence
  Description of Artificial Sequence: Synthetic oligonucleotide
  Target: LAMA2; (-) strand; PAM type: NRG; PAM sequence: TGG
gcctgttttattttgtgagt

SEQ ID NO: 106342 - DNA, 20 bp, Artificial Sequence
  Description of Artificial Sequence: Synthetic oligonucleotide
  Target: LAMA2; (-) strand; PAM type: NRG; PAM sequence: GAG
ctttgcctgttttattttgt

SEQ ID NO: 106343 - DNA, 20 bp, Artificial Sequence
  Description of Artificial Sequence: Synthetic oligonucleotide
  Target: LAMA2; (-) strand; PAM type: NRG; PAM sequence: GAG
gtgataaaattccctatcca

SEQ ID NO: 106344 - DNA, 20 bp, Artificial Sequence
  Description of Artificial Sequence: Synthetic oligonucleotide
  Target: LAMA2; (-) strand; PAM type: NRG; PAM sequence: CAG
tggtgataaaattccctatc

SEQ ID NO: 106345 - DNA, 20 bp, Artificial Sequence
  Description of Artificial Sequence: Synthetic oligonucleotide
  Target: LAMA2; (-) strand; PAM type: NRG; PAM sequence: TGG
actaatgccatttgagataa

SEQ ID NO: 106346 - DNA, 20 bp, Artificial Sequence
  Description of Artificial Sequence: Synthetic oligonucleotide
  Target: LAMA2; (-) strand; PAM type: NRG; PAM sequence: GAG
cttttttactaatgccattt

SEQ ID NO: 106347 - DNA, 20 bp, Artificial Sequence
  Description of Artificial Sequence: Synthetic oligonucleotide
  Target: LAMA2; (-) strand; PAM type: NRG; PAM sequence: TGG
ttgtgtgtgattatatacaa

SEQ ID NO: 106348 - DNA, 20 bp, Artificial Sequence
  Description of Artificial Sequence: Synthetic oligonucleotide
  Target: LAMA2; (-) strand; PAM type: NRG; PAM sequence: TAG
ttattaaaaagtgaatttta

SEQ ID NO: 106349 - DNA, 20 bp, Artificial Sequence
  Description of Artificial Sequence: Synthetic oligonucleotide
  Target: LAMA2; (-) strand; PAM type: NRG; PAM sequence: AAG
tccagtatgtttttattaaa

SEQ ID NO: 106350 - DNA, 20 bp, Artificial Sequence
  Description of Artificial Sequence: Synthetic oligonucleotide
  Target: LAMA2; (-) strand; PAM type: NRG; PAM sequence: CAG
ttgtttagaagcatatgatc

SEQ ID NO: 106351 - DNA, 20 bp, Artificial Sequence
  Description of Artificial Sequence: Synthetic oligonucleotide
  Target: LAMA2; (-) strand; PAM type: NRG; PAM sequence: AAG
acatggtataaattgtttag

SEQ ID NO: 106352 - DNA, 20 bp, Artificial Sequence
  Description of Artificial Sequence: Synthetic oligonucleotide
  Target: LAMA2; (-) strand; PAM type: NRG; PAM sequence: TAG
taaacatggtataaattgtt

SEQ ID NO: 106353 - DNA, 20 bp, Artificial Sequence
  Description of Artificial Sequence: Synthetic oligonucleotide
  Target: LAMA2; (-) strand; PAM type: NRG; PAM sequence: TGG
aattcattaattcataaaca

SEQ ID NO: 106354 - DNA, 20 bp, Artificial Sequence
  Description of Artificial Sequence: Synthetic oligonucleotide
  Target: LAMA2; (-) strand; PAM type: NRG; PAM sequence: GAG
tgattgtagccaaaggttaa

SEQ ID NO: 106355 - DNA, 20 bp, Artificial Sequence
  Description of Artificial Sequence: Synthetic oligonucleotide
  Target: LAMA2; (-) strand; PAM type: NRG; PAM sequence: AAG
aatgattgtagccaaaggtt

SEQ ID NO: 106356 - DNA, 20 bp, Artificial Sequence
  Description of Artificial Sequence: Synthetic oligonucleotide
  Target: LAMA2; (-) strand; PAM type: NRG; PAM sequence: AGG
cgaacaatgattgtagccaa

SEQ ID NO: 106357 - DNA, 20 bp, Artificial Sequence
  Description of Artificial Sequence: Synthetic oligonucleotide
  Target: LAMA2; (-) strand; PAM type: NRG; PAM sequence: AAG
acgaacaatgattgtagcca

SEQ ID NO: 106358 - DNA, 20 bp, Artificial Sequence
  Description of Artificial Sequence: Synthetic oligonucleotide
  Target: LAMA2; (-) strand; PAM type: NRG; PAM sequence: TAG
tgtattacgaacaatgattg

SEQ ID NO: 106359 - DNA, 20 bp, Artificial Sequence
  Description of Artificial Sequence: Synthetic oligonucleotide
  Target: LAMA2; (-) strand; PAM type: NRG; PAM sequence: TGG
tcaaataatgtgatagaact

SEQ ID NO: 106360 - DNA, 20 bp, Artificial Sequence
  Description of Artificial Sequence: Synthetic oligonucleotide
  Target: LAMA2; (-) strand; PAM type: NRG; PAM sequence: TAG
aaggcattcaaataatgtga

SEQ ID NO: 106361 - DNA, 20 bp, Artificial Sequence
  Description of Artificial Sequence: Synthetic oligonucleotide
  Target: LAMA2; (-) strand; PAM type: NRG; PAM sequence: AGG
taaagatttgtcaccattga

SEQ ID NO: 106362 - DNA, 20 bp, Artificial Sequence
  Description of Artificial Sequence: Synthetic oligonucleotide
  Target: LAMA2; (-) strand; PAM type: NRG; PAM sequence: AAG
ataaagatttgtcaccattg

SEQ ID NO: 106363 - DNA, 20 bp, Artificial Sequence
  Description of Artificial Sequence: Synthetic oligonucleotide
  Target: LAMA2; (-) strand; PAM type: NRG; PAM sequence: AAG
tgctttacatctaaagcata

SEQ ID NO: 106364 - DNA, 20 bp, Artificial Sequence
  Description of Artificial Sequence: Synthetic oligonucleotide
  Target: LAMA2; (-) strand; PAM type: NRG; PAM sequence: AAG
aaaatgttgctttacatcta

SEQ ID NO: 106365 - DNA, 20 bp, Artificial Sequence
  Description of Artificial Sequence: Synthetic oligonucleotide
  Target: LAMA2; (-) strand; PAM type: NRG; PAM sequence: TAG
gagatttttttaacctgaaa

SEQ ID NO: 106366 - DNA, 20 bp, Artificial Sequence
  Description of Artificial Sequence: Synthetic oligonucleotide
  Target: LAMA2; (-) strand; PAM type: NRG; PAM sequence: GAG
ttattcaggatgattcctat

SEQ ID NO: 106367 - DNA, 20 bp, Artificial Sequence
  Description of Artificial Sequence: Synthetic oligonucleotide
  Target: LAMA2; (-) strand; PAM type: NRG; PAM sequence: AGG
tggttctgaacattttattc

SEQ ID NO: 106368 - DNA, 20 bp, Artificial Sequence
  Description of Artificial Sequence: Synthetic oligonucleotide
  Target: LAMA2; (-) strand; PAM type: NRG; PAM sequence: CAG
atggttctgaacattttatt

SEQ ID NO: 106369 - DNA, 20 bp, Artificial Sequence
  Description of Artificial Sequence: Synthetic oligonucleotide
  Target: LAMA2; (-) strand; PAM type: NRG; PAM sequence: TGG
gaaacaaaataaataaatga

SEQ ID NO: 106370 - DNA, 20 bp, Artificial Sequence
  Description of Artificial Sequence: Synthetic oligonucleotide
  Target: LAMA2; (-) strand; PAM type: NRG; PAM sequence: AGG
aaaattctcatgtgtttggt

SEQ ID NO: 106371 - DNA, 20 bp, Artificial Sequence
  Description of Artificial Sequence: Synthetic oligonucleotide
  Target: LAMA2; (-) strand; PAM type: NRG; PAM sequence: TAG
aaaaattctcatgtgtttgg

SEQ ID NO: 106372 - DNA, 20 bp, Artificial Sequence
  Description of Artificial Sequence: Synthetic oligonucleotide
  Target: LAMA2; (-) strand; PAM type: NRG; PAM sequence: TGG
ccaaaaaattctcatgtgtt

SEQ ID NO: 106373 - DNA, 20 bp, Artificial Sequence
  Description of Artificial Sequence: Synthetic oligonucleotide
  Target: LAMA2; (-) strand; PAM type: NRG; PAM sequence: CAG
ctcacagtcaaatgtccaat

SEQ ID NO: 106374 - DNA, 20 bp, Artificial Sequence
  Description of Artificial Sequence: Synthetic oligonucleotide
  Target: LAMA2; (-) strand; PAM type: NRG; PAM sequence: CAG
gcttatgtgtatttcactca

SEQ ID NO: 106375 - DNA, 20 bp, Artificial Sequence
  Description of Artificial Sequence: Synthetic oligonucleotide
  Target: LAMA2; (-) strand; PAM type: NRG; PAM sequence: CAG
gaagcaaagaaaatattgat

SEQ ID NO: 106376 - DNA, 20 bp, Artificial Sequence
  Description of Artificial Sequence: Synthetic oligonucleotide
  Target: LAMA2; (-) strand; PAM type: NRG; PAM sequence: AAG
ttttgcccaacactgaagca

SEQ ID NO: 106377 - DNA, 20 bp, Artificial Sequence
  Description of Artificial Sequence: Synthetic oligonucleotide
  Target: LAMA2; (-) strand; PAM type: NRG; PAM sequence: AAG
agtatttttgcccaacactg

SEQ ID NO: 106378 - DNA, 20 bp, Artificial Sequence
  Description of Artificial Sequence: Synthetic oligonucleotide
  Target: LAMA2; (-) strand; PAM type: NRG; PAM sequence: AAG
aatatcccctaaatcctaga

SEQ ID NO: 106379 - DNA, 20 bp, Artificial Sequence
  Description of Artificial Sequence: Synthetic oligonucleotide
  Target: LAMA2; (-) strand; PAM type: NRG; PAM sequence: TAG
ctctaatatcccctaaatcc

SEQ ID NO: 106380 - DNA, 20 bp, Artificial Sequence
  Description of Artificial Sequence: Synthetic oligonucleotide
  Target: LAMA2; (-) strand; PAM type: NRG; PAM sequence: GGG
gctaagactggttcatttag

SEQ ID NO: 106381 - DNA, 20 bp, Artificial Sequence
  Description of Artificial Sequence: Synthetic oligonucleotide
  Target: LAMA2; (-) strand; PAM type: NRG; PAM sequence: GGG
tgctaagactggttcattta

SEQ ID NO: 106382 - DNA, 20 bp, Artificial Sequence
  Description of Artificial Sequence: Synthetic oligonucleotide
  Target: LAMA2; (-) strand; PAM type: NRG; PAM sequence: AGG
ctgctaagactggttcattt

SEQ ID NO: 106383 - DNA, 20 bp, Artificial Sequence
  Description of Artificial Sequence: Synthetic oligonucleotide
  Target: LAMA2; (-) strand; PAM type: NRG; PAM sequence: TAG
cctgctaagactggttcatt

SEQ ID NO: 106384 - DNA, 20 bp, Artificial Sequence
  Description of Artificial Sequence: Synthetic oligonucleotide
  Target: LAMA2; (-) strand; PAM type: NRG; PAM sequence: TGG
caaaatgaacctgctaagac

SEQ ID NO: 106385 - DNA, 20 bp, Artificial Sequence
  Description of Artificial Sequence: Synthetic oligonucleotide
  Target: LAMA2; (-) strand; PAM type: NRG; PAM sequence: AAG
gatcacaaaatgaacctgct

SEQ ID NO: 106386 - DNA, 20 bp, Artificial Sequence
  Description of Artificial Sequence: Synthetic oligonucleotide
  Target: LAMA2; (-) strand; PAM type: NRG; PAM sequence: TAG
aaaacagtacaaattgctca

SEQ ID NO: 106387 - DNA, 20 bp, Artificial Sequence
  Description of Artificial Sequence: Synthetic oligonucleotide
  Target: LAMA2; (-) strand; PAM type: NRG; PAM sequence: CAG
cactcaagagaaaccaaaaa

SEQ ID NO: 106388 - DNA, 20 bp, Artificial Sequence
  Description of Artificial Sequence: Synthetic oligonucleotide
  Target: LAMA2; (-) strand; PAM type: NRG; PAM sequence: GAG
cattagtagggctcactcaa

SEQ ID NO: 106389 - DNA, 20 bp, Artificial Sequence
  Description of Artificial Sequence: Synthetic oligonucleotide
  Target: LAMA2; (-) strand; PAM type: NRG; PAM sequence: AAG
ggcattagtagggctcactc

SEQ ID NO: 106390 - DNA, 20 bp, Artificial Sequence
  Description of Artificial Sequence: Synthetic oligonucleotide
  Target: LAMA2; (-) strand; PAM type: NRG; PAM sequence: GGG
cagaacatatggcattagta

SEQ ID NO: 106391 - DNA, 20 bp, Artificial Sequence
  Description of Artificial Sequence: Synthetic oligonucleotide
  Target: LAMA2; (-) strand; PAM type: NRG; PAM sequence: AGG
acagaacatatggcattagt

SEQ ID NO: 106392 - DNA, 20 bp, Artificial Sequence
  Description of Artificial Sequence: Synthetic oligonucleotide
  Target: LAMA2; (-) strand; PAM type: NRG; PAM sequence: TAG
aacagaacatatggcattag

SEQ ID NO: 106393 - DNA, 20 bp, Artificial Sequence
  Description of Artificial Sequence: Synthetic oligonucleotide
  Target: LAMA2; (-) strand; PAM type: NRG; PAM sequence: TAG
gtcaacagaacatatggcat

SEQ ID NO: 106394 - DNA, 20 bp, Artificial Sequence
  Description of Artificial Sequence: Synthetic oligonucleotide
  Target: LAMA2; (-) strand; PAM type: NRG; PAM sequence: TGG
taagaagtcaacagaacata

SEQ ID NO: 106395 - DNA, 20 bp, Artificial Sequence
  Description of Artificial Sequence: Synthetic oligonucleotide
  Target: LAMA2; (-) strand; PAM type: NRG; PAM sequence: CAG
tattttgaataagaagtcaa

SEQ ID NO: 106396 - DNA, 20 bp, Artificial Sequence
  Description of Artificial Sequence: Synthetic oligonucleotide
  Target: LAMA2; (-) strand; PAM type: NRG; PAM sequence: AAG
atgccactattttgaataag

SEQ ID NO: 106397 - DNA, 20 bp, Artificial Sequence
  Description of Artificial Sequence: Synthetic oligonucleotide
  Target: LAMA2; (-) strand; PAM type: NRG; PAM sequence: AAG
atcatgccactattttgaat

SEQ ID NO: 106398 - DNA, 20 bp, Artificial Sequence
  Description of Artificial Sequence: Synthetic oligonucleotide
  Target: LAMA2; (-) strand; PAM type: NRG; PAM sequence: TAG
tctgaaaggataactgaaca

SEQ ID NO: 106399 - DNA, 20 bp, Artificial Sequence
  Description of Artificial Sequence: Synthetic oligonucleotide
  Target: LAMA2; (-) strand; PAM type: NRG; PAM sequence: AGG
aaaagtagattcattctgaa

SEQ ID NO: 106400 - DNA, 20 bp, Artificial Sequence
  Description of Artificial Sequence: Synthetic oligonucleotide
  Target: LAMA2; (-) strand; PAM type: NRG; PAM sequence: AAG
gaaaagtagattcattctga

SEQ ID NO: 106401 - DNA, 20 bp, Artificial Sequence
  Description of Artificial Sequence: Synthetic oligonucleotide
  Target: LAMA2; (-) strand; PAM type: NRG; PAM sequence: TAG
tttagtttagatttgaaaag

SEQ ID NO: 106402 - DNA, 20 bp, Artificial Sequence
  Description of Artificial Sequence: Synthetic oligonucleotide
  Target: LAMA2; (-) strand; PAM type: NRG; PAM sequence: AAG
aaatttagtttagatttgaa

SEQ ID NO: 106403 - DNA, 20 bp, Artificial Sequence
  Description of Artificial Sequence: Synthetic oligonucleotide
  Target: LAMA2; (-) strand; PAM type: NRG; PAM sequence: TAG
agatggattaaaatttagtt

SEQ ID NO: 106404 - DNA, 20 bp, Artificial Sequence
  Description of Artificial Sequence: Synthetic oligonucleotide
  Target: LAMA2; (-) strand; PAM type: NRG; PAM sequence: TAG
acagaagatggattaaaatt

SEQ ID NO: 106405 - DNA, 20 bp, Artificial Sequence
  Description of Artificial Sequence: Synthetic oligonucleotide
  Target: LAMA2; (-) strand; PAM type: NRG; PAM sequence: TGG
gaaaattatctaacagaaga

SEQ ID NO: 106406 - DNA, 20 bp, Artificial Sequence
  Description of Artificial Sequence: Synthetic oligonucleotide
  Target: LAMA2; (-) strand; PAM type: NRG; PAM sequence: AAG
aatagaaaattatctaacag

SEQ ID NO: 106407 - DNA, 20 bp, Artificial Sequence
  Description of Artificial Sequence: Synthetic oligonucleotide
  Target: LAMA2; (-) strand; PAM type: NRG; PAM sequence: CAG
taaaatagaaaattatctaa

SEQ ID NO: 106408 - DNA, 20 bp, Artificial Sequence
  Description of Artificial Sequence: Synthetic oligonucleotide
  Target: LAMA2; (-) strand; PAM type: NRG; PAM sequence: TAG
tgaaattagggtctttaaaa

SEQ ID NO: 106409 - DNA, 20 bp, Artificial Sequence
  Description of Artificial Sequence: Synthetic oligonucleotide
  Target: LAMA2; (-) strand; PAM type: NRG; PAM sequence: GGG
aaatggtgaacttgaaatta

SEQ ID NO: 106410 - DNA, 20 bp, Artificial Sequence
  Description of Artificial Sequence: Synthetic oligonucleotide
  Target: LAMA2; (-) strand; PAM type: NRG; PAM sequence: AGG
aaaatggtgaacttgaaatt

SEQ ID NO: 106411 - DNA, 20 bp, Artificial Sequence
  Description of Artificial Sequence: Synthetic oligonucleotide
  Target: LAMA2; (-) strand; PAM type: NRG; PAM sequence: TAG
gaaaatggtgaacttgaaat

SEQ ID NO: 106412 - DNA, 20 bp, Artificial Sequence
  Description of Artificial Sequence: Synthetic oligonucleotide
  Target: LAMA2; (-) strand; PAM type: NRG; PAM sequence: TGG
taaaacaggtgaaatgaaaa

SEQ ID NO: 106413 - DNA, 20 bp, Artificial Sequence
  Description of Artificial Sequence: Synthetic oligonucleotide
  Target: LAMA2; (-) strand; PAM type: NRG; PAM sequence: AGG
aaataatcatacaataaaac

SEQ ID NO: 106414 - DNA, 20 bp, Artificial Sequence
  Description of Artificial Sequence: Synthetic oligonucleotide
  Target: LAMA2; (-) strand; PAM type: NRG; PAM sequence: CAG
aaaataatcatacaataaaa

SEQ ID NO: 106415 - DNA, 20 bp, Artificial Sequence
  Description of Artificial Sequence: Synthetic oligonucleotide
  Target: LAMA2; (-) strand; PAM type: NRG; PAM sequence: AGG
tatttgccaggcaccatttt

SEQ ID NO: 106416 - DNA, 20 bp, Artificial Sequence
  Description of Artificial Sequence: Synthetic oligonucleotide
  Target: LAMA2; (-) strand; PAM type: NRG; PAM sequence: TAG
ctatttgccaggcaccattt

SEQ ID NO: 106417 - DNA, 20 bp, Artificial Sequence
  Description of Artificial Sequence: Synthetic oligonucleotide
  Target: LAMA2; (-) strand; PAM type: NRG; PAM sequence: AGG
ataagtgcctactatttgcc

SEQ ID NO: 106418 - DNA, 20 bp, Artificial Sequence
  Description of Artificial Sequence: Synthetic oligonucleotide
  Target: LAMA2; (-) strand; PAM type: NRG; PAM sequence: CAG
tataagtgcctactatttgc

SEQ ID NO: 106419 - DNA, 20 bp, Artificial Sequence
  Description of Artificial Sequence: Synthetic oligonucleotide
  Target: LAMA2; (-) strand; PAM type: NRG; PAM sequence: AAG
aaatacactcattcatttat

SEQ ID NO: 106420 - DNA, 20 bp, Artificial Sequence
  Description of Artificial Sequence: Synthetic oligonucleotide
  Target: LAMA2; (-) strand; PAM type: NRG; PAM sequence: AGG
agattatgaacaggcataaa

SEQ ID NO: 106421 - DNA, 20 bp, Artificial Sequence
  Description of Artificial Sequence: Synthetic oligonucleotide
  Target: LAMA2; (-) strand; PAM type: NRG; PAM sequence: AAG
aagattatgaacaggcataa

SEQ ID NO: 106422 - DNA, 20 bp, Artificial Sequence
  Description of Artificial Sequence: Synthetic oligonucleotide
  Target: LAMA2; (-) strand; PAM type: NRG; PAM sequence: AGG
tggtataaaagattatgaac

SEQ ID NO: 106423 - DNA, 20 bp, Artificial Sequence
  Description of Artificial Sequence: Synthetic oligonucleotide
  Target: LAMA2; (-) strand; PAM type: NRG; PAM sequence: CAG
ttggtataaaagattatgaa

SEQ ID NO: 106424 - DNA, 20 bp, Artificial Sequence
  Description of Artificial Sequence: Synthetic oligonucleotide
  Target: LAMA2; (-) strand; PAM type: NRG; PAM sequence: AAG
gcaaatttttattggtataa

SEQ ID NO: 106425 - DNA, 20 bp, Artificial Sequence
  Description of Artificial Sequence: Synthetic oligonucleotide
  Target: LAMA2; (-) strand; PAM type: NRG; PAM sequence: TGG
ttactacagcaaatttttat

SEQ ID NO: 106426 - DNA, 20 bp, Artificial Sequence
  Description of Artificial Sequence: Synthetic oligonucleotide
  Target: LAMA2; (-) strand; PAM type: NRG; PAM sequence: CAG
taaggatgaagcaattacta

SEQ ID NO: 106427 - DNA, 20 bp, Artificial Sequence
  Description of Artificial Sequence: Synthetic oligonucleotide
  Target: LAMA2; (-) strand; PAM type: NRG; PAM sequence: AAG
acaagaaatttataaggatg

SEQ ID NO: 106428 - DNA, 20 bp, Artificial Sequence
  Description of Artificial Sequence: Synthetic oligonucleotide
  Target: LAMA2; (-) strand; PAM type: NRG; PAM sequence: AGG
aatgttacaagaaatttata

SEQ ID NO: 106429 - DNA, 20 bp, Artificial Sequence
  Description of Artificial Sequence: Synthetic oligonucleotide
  Target: LAMA2; (-) strand; PAM type: NRG; PAM sequence: AAG
aaatgttacaagaaatttat

SEQ ID NO: 106430 - DNA, 20 bp, Artificial Sequence
  Description of Artificial Sequence: Synthetic oligonucleotide
  Target: LAMA2; (-) strand; PAM type: NRG; PAM sequence: AAG
tccttatcataaaatgttac

SEQ ID NO: 106431 - DNA, 20 bp, Artificial Sequence
  Description of Artificial Sequence: Synthetic oligonucleotide
  Target: LAMA2; (-) strand; PAM type: NRG; PAM sequence: GGG
ttcctaaaggtattaaatta

SEQ ID NO: 106432 - DNA, 20 bp, Artificial Sequence
  Description of Artificial Sequence: Synthetic oligonucleotide
  Target: LAMA2; (-) strand; PAM type: NRG; PAM sequence: AGG
tttcctaaaggtattaaatt

SEQ ID NO: 106433 - DNA, 20 bp, Artificial Sequence
  Description of Artificial Sequence: Synthetic oligonucleotide
  Target: LAMA2; (-) strand; PAM type: NRG; PAM sequence: TAG
ttttcctaaaggtattaaat

SEQ ID NO: 106434 - DNA, 20 bp, Artificial Sequence
  Description of Artificial Sequence: Synthetic oligonucleotide
  Target: LAMA2; (-) strand; PAM type: NRG; PAM sequence: AGG
caaaaaatgatttttcctaa

SEQ ID NO: 106435 - DNA, 20 bp, Artificial Sequence
  Description of Artificial Sequence: Synthetic oligonucleotide
  Target: LAMA2; (-) strand; PAM type: NRG; PAM sequence: AAG
gcaaaaaatgatttttccta

SEQ ID NO: 106436 - DNA, 20 bp, Artificial Sequence
  Description of Artificial Sequence: Synthetic oligonucleotide
  Target: LAMA2; (-) strand; PAM type: NRG; PAM sequence: TGG
agtaagtgcacacttcatgt

SEQ ID NO: 106437 - DNA, 20 bp, Artificial Sequence
  Description of Artificial Sequence: Synthetic oligonucleotide
  Target: LAMA2; (-) strand; PAM type: NRG; PAM sequence: AAG
aagcatgggtggtaagaagt

SEQ ID NO: 106438 - DNA, 20 bp, Artificial Sequence
  Description of Artificial Sequence: Synthetic oligonucleotide
  Target: LAMA2; (-) strand; PAM type: NRG; PAM sequence: AAG
gtataagcatgggtggtaag

SEQ ID NO: 106439 - DNA, 20 bp, Artificial Sequence
  Description of Artificial Sequence: Synthetic oligonucleotide
  Target: LAMA2; (-) strand; PAM type: NRG; PAM sequence: AAG
catgtataagcatgggtggt

SEQ ID NO: 106440 - DNA, 20 bp, Artificial Sequence
  Description of Artificial Sequence: Synthetic oligonucleotide
  Target: LAMA2; (-) strand; PAM type: NRG; PAM sequence: TGG
ctaccatgtataagcatggg

SEQ ID NO: 106441 - DNA, 20 bp, Artificial Sequence
  Description of Artificial Sequence: Synthetic oligonucleotide
  Target: LAMA2; (-) strand; PAM type: NRG; PAM sequence: GGG
agcctaccatgtataagcat

SEQ ID NO: 106442 - DNA, 20 bp, Artificial Sequence
  Description of Artificial Sequence: Synthetic oligonucleotide
  Target: LAMA2; (-) strand; PAM type: NRG; PAM sequence: TGG
tagcctaccatgtataagca

SEQ ID NO: 106443 - DNA, 20 bp, Artificial Sequence
  Description of Artificial Sequence: Synthetic oligonucleotide
  Target: LAMA2; (-) strand; PAM type: NRG; PAM sequence: AAG
ttggttagcctaccatgtat

SEQ ID NO: 106444 - DNA, 20 bp, Artificial Sequence
  Description of Artificial Sequence: Synthetic oligonucleotide
  Target: LAMA2; (-) strand; PAM type: NRG; PAM sequence: TAG
actctctgtttgaggttggt

SEQ ID NO: 106445 - DNA, 20 bp, Artificial Sequence
  Description of Artificial Sequence: Synthetic oligonucleotide
  Target: LAMA2; (-) strand; PAM type: NRG; PAM sequence: TGG
catcactctctgtttgaggt

SEQ ID NO: 106446 - DNA, 20 bp, Artificial Sequence
  Description of Artificial Sequence: Synthetic oligonucleotide
  Target: LAMA2; (-) strand; PAM type: NRG; PAM sequence: AGG
tcaccatcactctctgtttg

SEQ ID NO: 106447 - DNA, 20 bp, Artificial Sequence
  Description of Artificial Sequence: Synthetic oligonucleotide
  Target: LAMA2; (-) strand; PAM type: NRG; PAM sequence: GAG
ctcaccatcactctctgttt

SEQ ID NO: 106448 - DNA, 20 bp, Artificial Sequence
  Description of Artificial Sequence: Synthetic oligonucleotide
  Target: LAMA2; (-) strand; PAM type: NRG; PAM sequence: TGG
aataatgataacagcagaca

SEQ ID NO: 106449 - DNA, 20 bp, Artificial Sequence
  Description of Artificial Sequence: Synthetic oligonucleotide
  Target: LAMA2; (-) strand; PAM type: NRG; PAM sequence: CAG
agaaggaataatgataacag

SEQ ID NO: 106450 - DNA, 20 bp, Artificial Sequence
  Description of Artificial Sequence: Synthetic oligonucleotide
  Target: LAMA2; (-) strand; PAM type: NRG; PAM sequence: CAG
gagagaaggaataatgataa

SEQ ID NO: 106451 - DNA, 20 bp, Artificial Sequence
  Description of Artificial Sequence: Synthetic oligonucleotide
  Target: LAMA2; (-) strand; PAM type: NRG; PAM sequence: AGG
aatgattgtggaaagagaga

SEQ ID NO: 106452 - DNA, 20 bp, Artificial Sequence
  Description of Artificial Sequence: Synthetic oligonucleotide
  Target: LAMA2; (-) strand; PAM type: NRG; PAM sequence: AAG
aaatgattgtggaaagagag

SEQ ID NO: 106453 - DNA, 20 bp, Artificial Sequence
  Description of Artificial Sequence: Synthetic oligonucleotide
  Target: LAMA2; (-) strand; PAM type: NRG; PAM sequence: GAG
tttaaatgattgtggaaaga

SEQ ID NO: 106454 - DNA, 20 bp, Artificial Sequence
  Description of Artificial Sequence: Synthetic oligonucleotide
  Target: LAMA2; (-) strand; PAM type: NRG; PAM sequence: GAG
tttttaaatgattgtggaaa

SEQ ID NO: 106455 - DNA, 20 bp, Artificial Sequence
  Description of Artificial Sequence: Synthetic oligonucleotide
  Target: LAMA2; (-) strand; PAM type: NRG; PAM sequence: AAG
tatttttaaatgattgtgga

SEQ ID NO: 106456 - DNA, 20 bp, Artificial Sequence
  Description of Artificial Sequence: Synthetic oligonucleotide
  Target: LAMA2; (-) strand; PAM type: NRG; PAM sequence: TGG
taattatttttaaatgattg

SEQ ID NO: 106457 - DNA, 20 bp, Artificial Sequence
  Description of Artificial Sequence: Synthetic oligonucleotide
  Target: LAMA2; (-) strand; PAM type: NRG; PAM sequence: CAG
gcacttattttgtaattttt

SEQ ID NO: 106458 - DNA, 20 bp, Artificial Sequence
  Description of Artificial Sequence: Synthetic oligonucleotide
  Target: LAMA2; (-) strand; PAM type: NRG; PAM sequence: TAG
aataaatcactgattctcta

SEQ ID NO: 106459 - DNA, 20 bp, Artificial Sequence
  Description of Artificial Sequence: Synthetic oligonucleotide
  Target: LAMA2; (-) strand; PAM type: NRG; PAM sequence: TAG
gtcttctttttcttatccaa

SEQ ID NO: 106460 - DNA, 20 bp, Artificial Sequence
  Description of Artificial Sequence: Synthetic oligonucleotide
  Target: LAMA2; (-) strand; PAM type: NRG; PAM sequence: CAG
ttccaacaaaatttctggga

SEQ ID NO: 106461 - DNA, 20 bp, Artificial Sequence
  Description of Artificial Sequence: Synthetic oligonucleotide
  Target: LAMA2; (-) strand; PAM type: NRG; PAM sequence: GGG
aacattccaacaaaatttct

SEQ ID NO: 106462 - DNA, 20 bp, Artificial Sequence
  Description of Artificial Sequence: Synthetic oligonucleotide
  Target: LAMA2; (-) strand; PAM type: NRG; PAM sequence: TGG
aaacattccaacaaaatttc

SEQ ID NO: 106463 - DNA, 20 bp, Artificial Sequence
  Description of Artificial Sequence: Synthetic oligonucleotide
  Target: LAMA2; (-) strand; PAM type: NRG; PAM sequence: TAG
atatttcttttccagcaaag

SEQ ID NO: 106464 - DNA, 20 bp, Artificial Sequence
  Description of Artificial Sequence: Synthetic oligonucleotide
  Target: LAMA2; (-) strand; PAM type: NRG; PAM sequence: AAG
aatatatttcttttccagca

SEQ ID NO: 106465 - DNA, 20 bp, Artificial Sequence
  Description of Artificial Sequence: Synthetic oligonucleotide
  Target: LAMA2; (-) strand; PAM type: NRG; PAM sequence: CAG
tttcaaatatatttcttttc

SEQ ID NO: 106466 - DNA, 20 bp, Artificial Sequence
  Description of Artificial Sequence: Synthetic oligonucleotide
  Target: LAMA2; (-) strand; PAM type: NRG; PAM sequence: TAG
tatgggatgttagtcctatc

SEQ ID NO: 106467 - DNA, 20 bp, Artificial Sequence
  Description of Artificial Sequence: Synthetic oligonucleotide
  Target: LAMA2; (-) strand; PAM type: NRG; PAM sequence: TAG
atcttatatttatgggatgt

SEQ ID NO: 106468 - DNA, 20 bp, Artificial Sequence
  Description of Artificial Sequence: Synthetic oligonucleotide
  Target: LAMA2; (-) strand; PAM type: NRG; PAM sequence: GGG
atatcagatcttatatttat

SEQ ID NO: 106469 - DNA, 20 bp, Artificial Sequence
  Description of Artificial Sequence: Synthetic oligonucleotide
  Target: LAMA2; (-) strand; PAM type: NRG; PAM sequence: TGG
tatatcagatcttatattta

SEQ ID NO: 106470 - DNA, 20 bp, Artificial Sequence
  Description of Artificial Sequence: Synthetic oligonucleotide
  Target: LAMA2; (-) strand; PAM type: NRG; PAM sequence: CAG
ttgagctatagcttttatat

SEQ ID NO: 106471 - DNA, 20 bp, Artificial Sequence
  Description of Artificial Sequence: Synthetic oligonucleotide
  Target: LAMA2; (-) strand; PAM type: NRG; PAM sequence: TAG
cattcttctctgttgagcta

SEQ ID NO: 106472 - DNA, 20 bp, Artificial Sequence
  Description of Artificial Sequence: Synthetic oligonucleotide
  Target: LAMA2; (-) strand; PAM type: NRG; PAM sequence: GAG
taatctcattcttctctgtt

SEQ ID NO: 106473 - DNA, 20 bp, Artificial Sequence
  Description of Artificial Sequence: Synthetic oligonucleotide
  Target: LAMA2; (-) strand; PAM type: NRG; PAM sequence: AAG
gaggactcttctgtattgtt

SEQ ID NO: 106474 - DNA, 20 bp, Artificial Sequence
  Description of Artificial Sequence: Synthetic oligonucleotide
  Target: LAMA2; (-) strand; PAM type: NRG; PAM sequence: AGG
ggctagactcaaaggagtag

SEQ ID NO: 106475 - DNA, 20 bp, Artificial Sequence
  Description of Artificial Sequence: Synthetic oligonucleotide
  Target: LAMA2; (-) strand; PAM type: NRG; PAM sequence: GAG
gggctagactcaaaggagta

SEQ ID NO: 106476 - DNA, 20 bp, Artificial Sequence
  Description of Artificial Sequence: Synthetic oligonucleotide
  Target: LAMA2; (-) strand; PAM type: NRG; PAM sequence: TAG
tagggctagactcaaaggag

SEQ ID NO: 106477 - DNA, 20 bp, Artificial Sequence
  Description of Artificial Sequence: Synthetic oligonucleotide
  Target: LAMA2; (-) strand; PAM type: NRG; PAM sequence: GAG
ttatagggctagactcaaag

SEQ ID NO: 106478 - DNA, 20 bp, Artificial Sequence
  Description of Artificial Sequence: Synthetic oligonucleotide
  Target: LAMA2; (-) strand; PAM type: NRG; PAM sequence: AGG
ctttatagggctagactcaa

SEQ ID NO: 106479 - DNA, 20 bp, Artificial Sequence
  Description of Artificial Sequence: Synthetic oligonucleotide
  Target: LAMA2; (-) strand; PAM type: NRG; PAM sequence: AAG
tctttatagggctagactca

SEQ ID NO: 106480 - DNA, 20 bp, Artificial Sequence
  Description of Artificial Sequence: Synthetic oligonucleotide
  Target: LAMA2; (-) strand; PAM type: NRG; PAM sequence: TAG
ttcttccttctttatagggc

SEQ ID NO: 106481 - DNA, 20 bp, Artificial Sequence
  Description of Artificial Sequence: Synthetic oligonucleotide
  Target: LAMA2; (-) strand; PAM type: NRG; PAM sequence: GGG
aacattcttccttctttata

SEQ ID NO: 106482 - DNA, 20 bp, Artificial Sequence
  Description of Artificial Sequence: Synthetic oligonucleotide
  Target: LAMA2; (-) strand; PAM type: NRG; PAM sequence: AGG
aaacattcttccttctttat

SEQ ID NO: 106483 - DNA, 20 bp, Artificial Sequence
  Description of Artificial Sequence: Synthetic oligonucleotide
  Target: LAMA2; (-) strand; PAM type: NRG; PAM sequence: TAG
aaaacattcttccttcttta

SEQ ID NO: 106484 - DNA, 20 bp, Artificial Sequence
  Description of Artificial Sequence: Synthetic oligonucleotide
  Target: LAMA2; (-) strand; PAM type: NRG; PAM sequence: AAG
gtttctttgtttttcctttt

SEQ ID NO: 106485 - DNA, 20 bp, Artificial Sequence
  Description of Artificial Sequence: Synthetic oligonucleotide
  Target: LAMA2; (-) strand; PAM type: NRG; PAM sequence: TGG
actttcttcatagtggtcgt

SEQ ID NO: 106486 - DNA, 20 bp, Artificial Sequence
  Description of Artificial Sequence: Synthetic oligonucleotide
  Target: LAMA2; (-) strand; PAM type: NRG; PAM sequence: TGG
gacctccactttcttcatag

SEQ ID NO: 106487 - DNA, 20 bp, Artificial Sequence
  Description of Artificial Sequence: Synthetic oligonucleotide
  Target: LAMA2; (-) strand; PAM type: NRG; PAM sequence: TAG
tctgacctccactttcttca

SEQ ID NO: 106488 - DNA, 20 bp, Artificial Sequence
  Description of Artificial Sequence: Synthetic oligonucleotide
  Target: LAMA2; (-) strand; PAM type: NRG; PAM sequence: TGG
tttctttgtttcttttctta

SEQ ID NO: 106489 - DNA, 20 bp, Artificial Sequence
  Description of Artificial Sequence: Synthetic oligonucleotide
  Target: LAMA2; (-) strand; PAM type: NRG; PAM sequence: AGG
attgtcttaattatgcttgg

SEQ ID NO: 106490 - DNA, 20 bp, Artificial Sequence
  Description of Artificial Sequence: Synthetic oligonucleotide
  Target: LAMA2; (-) strand; PAM type: NRG; PAM sequence: GAG
cattgtcttaattatgcttg

SEQ ID NO: 106491 - DNA, 20 bp, Artificial Sequence
  Description of Artificial Sequence: Synthetic oligonucleotide
  Target: LAMA2; (-) strand; PAM type: NRG; PAM sequence: TGG
aacattgtcttaattatgct

SEQ ID NO: 106492 - DNA, 20 bp, Artificial Sequence
  Description of Artificial Sequence: Synthetic oligonucleotide
  Target: LAMA2; (-) strand; PAM type: NRG; PAM sequence: AAG
agtaaatttttaaaaaatca

SEQ ID NO: 106493 - DNA, 20 bp, Artificial Sequence
  Description of Artificial Sequence: Synthetic oligonucleotide
  Target: LAMA2; (-) strand; PAM type: NRG; PAM sequence: AAG
gtgtttatatataggaagac

SEQ ID NO: 106494 - DNA, 20 bp, Artificial Sequence
  Description of Artificial Sequence: Synthetic oligonucleotide
  Target: LAMA2; (-) strand; PAM type: NRG; PAM sequence: AAG
tatgtgtgtttatatatagg

SEQ ID NO: 106495 - DNA, 20 bp, Artificial Sequence
  Description of Artificial Sequence: Synthetic oligonucleotide
  Target: LAMA2; (-) strand; PAM type: NRG; PAM sequence: AGG
gtctatgtgtgtttatatat

SEQ ID NO: 106496 - DNA, 20 bp, Artificial Sequence
  Description of Artificial Sequence: Synthetic oligonucleotide
  Target: LAMA2; (-) strand; PAM type: NRG; PAM sequence: TAG
tgtctatgtgtgtttatata

SEQ ID NO: 106497 - DNA, 20 bp, Artificial Sequence
  Description of Artificial Sequence: Synthetic oligonucleotide
  Target: LAMA2; (-) strand; PAM type: NRG; PAM sequence: CAG
tctcactcatattttccttt

SEQ ID NO: 106498 - DNA, 20 bp, Artificial Sequence
  Description of Artificial Sequence: Synthetic oligonucleotide
  Target: LAMA2; (-) strand; PAM type: NRG; PAM sequence: AGG
tagctttctcctgcttataa

SEQ ID NO: 106499 - DNA, 20 bp, Artificial Sequence
  Description of Artificial Sequence: Synthetic oligonucleotide
  Target: LAMA2; (-) strand; PAM type: NRG; PAM sequence: AAG
ttagctttctcctgcttata

SEQ ID NO: 106500 - DNA, 20 bp, Artificial Sequence
  Description of Artificial Sequence: Synthetic oligonucleotide
  Target: LAMA2; (-) strand; PAM type: NRG; PAM sequence: TAG
gcagtacaaacaaatcgtat

SEQ ID NO: 106501 - DNA, 20 bp, Artificial Sequence
  Description of Artificial Sequence: Synthetic oligonucleotide
  Target: LAMA2; (-) strand; PAM type: NRG; PAM sequence: CAG
ctctttacaaaataatactg

SEQ ID NO: 106502 - DNA, 20 bp, Artificial Sequence
  Description of Artificial Sequence: Synthetic oligonucleotide
  Target: LAMA2; (-) strand; PAM type: NRG; PAM sequence: TAG
aattagttatgcaagacaag

SEQ ID NO: 106503 - DNA, 20 bp, Artificial Sequence
  Description of Artificial Sequence: Synthetic oligonucleotide
  Target: LAMA2; (-) strand; PAM type: NRG; PAM sequence: AAG
agaaattagttatgcaagac

SEQ ID NO: 106504 - DNA, 20 bp, Artificial Sequence
  Description of Artificial Sequence: Synthetic oligonucleotide
  Target: LAMA2; (-) strand; PAM type: NRG; PAM sequence: AAG
tttaaagaaattagttatgc

SEQ ID NO: 106505 - DNA, 20 bp, Artificial Sequence
  Description of Artificial Sequence: Synthetic oligonucleotide
  Target: LAMA2; (-) strand; PAM type: NRG; PAM sequence: TAG
attctgatatttaaagaaat

SEQ ID NO: 106506 - DNA, 20 bp, Artificial Sequence
  Description of Artificial Sequence: Synthetic oligonucleotide
  Target: LAMA2; (-) strand; PAM type: NRG; PAM sequence: AAG
acatttcattctgatattta

SEQ ID NO: 106507 - DNA, 20 bp, Artificial Sequence
  Description of Artificial Sequence: Synthetic oligonucleotide
  Target: LAMA2; (-) strand; PAM type: NRG; PAM sequence: TAG
acccgacaccaatagaaaaa

SEQ ID NO: 106508 - DNA, 20 bp, Artificial Sequence
  Description of Artificial Sequence: Synthetic oligonucleotide
  Target: LAMA2; (-) strand; PAM type: NRG; PAM sequence: TAG
ctttcctcacccgacaccaa

SEQ ID NO: 106509 - DNA, 20 bp, Artificial Sequence
  Description of Artificial Sequence: Synthetic oligonucleotide
  Target: LAMA2; (-) strand; PAM type: NRG; PAM sequence: TAG
gtaggaaaacaaatgcttta

SEQ ID NO: 106510 - DNA, 20 bp, Artificial Sequence
  Description of Artificial Sequence: Synthetic oligonucleotide
  Target: LAMA2; (-) strand; PAM type: NRG; PAM sequence: AGG
ttttcttggtgattatatgt

SEQ ID NO: 106511 - DNA, 20 bp, Artificial Sequence
  Description of Artificial Sequence: Synthetic oligonucleotide
  Target: LAMA2; (-) strand; PAM type: NRG; PAM sequence: TAG
attttcttggtgattatatg

SEQ ID NO: 106512 - DNA, 20 bp, Artificial Sequence
  Description of Artificial Sequence: Synthetic oligonucleotide
  Target: LAMA2; (-) strand; PAM type: NRG; PAM sequence: TGG
tactaaatgagatattttct

SEQ ID NO: 106513 - DNA, 20 bp, Artificial Sequence
  Description of Artificial Sequence: Synthetic oligonucleotide
  Target: LAMA2; (-) strand; PAM type: NRG; PAM sequence: GAG
cctctagagaagtactaaat

SEQ ID NO: 106514 - DNA, 20 bp, Artificial Sequence
  Description of Artificial Sequence: Synthetic oligonucleotide
  Target: LAMA2; (-) strand; PAM type: NRG; PAM sequence: AAG
tttccttgcaccctctagag

SEQ ID NO: 106515 - DNA, 20 bp, Artificial Sequence
  Description of Artificial Sequence: Synthetic oligonucleotide
  Target: LAMA2; (-) strand; PAM type: NRG; PAM sequence: GAG
tgttttccttgcaccctcta

SEQ ID NO: 106516 - DNA, 20 bp, Artificial Sequence
  Description of Artificial Sequence: Synthetic oligonucleotide
  Target: LAMA2; (-) strand; PAM type: NRG; PAM sequence: TAG
tctgttttccttgcaccctc

SEQ ID NO: 106517 - DNA, 20 bp, Artificial Sequence
  Description of Artificial Sequence: Synthetic oligonucleotide
  Target: LAMA2; (-) strand; PAM type: NRG; PAM sequence: GAG
ccatttttattccattttat

SEQ ID NO: 106518 - DNA, 20 bp, Artificial Sequence
  Description of Artificial Sequence: Synthetic oligonucleotide
  Target: LAMA2; (-) strand; PAM type: NRG; PAM sequence: GAG
aggatcaaagcaactaagat

SEQ ID NO: 106519 - DNA, 20 bp, Artificial Sequence
  Description of Artificial Sequence: Synthetic oligonucleotide
  Target: LAMA2; (-) strand; PAM type: NRG; PAM sequence: AAG
cttataggatcaaagcaact

SEQ ID NO: 106520 - DNA, 20 bp, Artificial Sequence
  Description of Artificial Sequence: Synthetic oligonucleotide
  Target: LAMA2; (-) strand; PAM type: NRG; PAM sequence: AAG
tagagtctcttataggatca

SEQ ID NO: 106521 - DNA, 20 bp, Artificial Sequence
  Description of Artificial Sequence: Synthetic oligonucleotide
  Target: LAMA2; (-) strand; PAM type: NRG; PAM sequence: AGG
gttattttagagtctcttat

SEQ ID NO: 106522 - DNA, 20 bp, Artificial Sequence
  Description of Artificial Sequence: Synthetic oligonucleotide
  Target: LAMA2; (-) strand; PAM type: NRG; PAM sequence: TAG
tgttattttagagtctctta

SEQ ID NO: 106523 - DNA, 20 bp, Artificial Sequence
  Description of Artificial Sequence: Synthetic oligonucleotide
  Target: LAMA2; (-) strand; PAM type: NRG; PAM sequence: GAG
tctaattctctgttatttta

SEQ ID NO: 106524 - DNA, 20 bp, Artificial Sequence
  Description of Artificial Sequence: Synthetic oligonucleotide
  Target: LAMA2; (-) strand; PAM type: NRG; PAM sequence: TAG
catctaattctctgttattt

SEQ ID NO: 106525 - DNA, 20 bp, Artificial Sequence
  Description of Artificial Sequence: Synthetic oligonucleotide
  Target: LAMA2; (-) strand; PAM type: NRG; PAM sequence: TGG
gctttgagtttactatgacc

SEQ ID NO: 106526 - DNA, 20 bp, Artificial Sequence
  Description of Artificial Sequence: Synthetic oligonucleotide
  Target: LAMA2; (-) strand; PAM type: NRG; PAM sequence: GAG
tgatagataatgtaggcttt

SEQ ID NO: 106527 - DNA, 20 bp, Artificial Sequence
  Description of Artificial Sequence: Synthetic oligonucleotide
  Target: LAMA2; (-) strand; PAM type: NRG; PAM sequence: AGG
tctgatctgatagataatgt

SEQ ID NO: 106528 - DNA, 20 bp, Artificial Sequence
  Description of Artificial Sequence: Synthetic oligonucleotide
  Target: LAMA2; (-) strand; PAM type: NRG; PAM sequence: TAG
atctgatctgatagataatg

SEQ ID NO: 106529 - DNA, 20 bp, Artificial Sequence
  Description of Artificial Sequence: Synthetic oligonucleotide
  Target: LAMA2; (-) strand; PAM type: NRG; PAM sequence: TAG
attttaaaaatctgatctga

SEQ ID NO: 106530 - DNA, 20 bp, Artificial Sequence
  Description of Artificial Sequence: Synthetic oligonucleotide
  Target: LAMA2; (-) strand; PAM type: NRG; PAM sequence: GAG
ctattagttctgtccttcta

SEQ ID NO: 106531 - DNA, 20 bp, Artificial Sequence
  Description of Artificial Sequence: Synthetic oligonucleotide
  Target: LAMA2; (-) strand; PAM type: NRG; PAM sequence: TAG
tcctattagttctgtccttc

SEQ ID NO: 106532 - DNA, 20 bp, Artificial Sequence
  Description of Artificial Sequence: Synthetic oligonucleotide
  Target: LAMA2; (-) strand; PAM type: NRG; PAM sequence: TAG
cttgtatacatctatcctat

SEQ ID NO: 106533 - DNA, 20 bp, Artificial Sequence
  Description of Artificial Sequence: Synthetic oligonucleotide
  Target: LAMA2; (-) strand; PAM type: NRG; PAM sequence: TAG
tggcgtgggtcaatattcct

SEQ ID NO: 106534 - DNA, 20 bp, Artificial Sequence
  Description of Artificial Sequence: Synthetic oligonucleotide
  Target: LAMA2; (-) strand; PAM type: NRG; PAM sequence: GGG
acttcatcttgtgatggcgt

SEQ ID NO: 106535 - DNA, 20 bp, Artificial Sequence
  Description of Artificial Sequence: Synthetic oligonucleotide
  Target: LAMA2; (-) strand; PAM type: NRG; PAM sequence: TGG
gacttcatcttgtgatggcg

SEQ ID NO: 106536 - DNA, 20 bp, Artificial Sequence
  Description of Artificial Sequence: Synthetic oligonucleotide
  Target: LAMA2; (-) strand; PAM type: NRG; PAM sequence: TGG
tgtgggacttcatcttgtga

SEQ ID NO: 106537 - DNA, 20 bp, Artificial Sequence
  Description of Artificial Sequence: Synthetic oligonucleotide
  Target: LAMA2; (-) strand; PAM type: NRG; PAM sequence: GGG
gcttgcagatggcctattgt

SEQ ID NO: 106538 - DNA, 20 bp, Artificial Sequence
  Description of Artificial Sequence: Synthetic oligonucleotide
  Target: LAMA2; (-) strand; PAM type: NRG; PAM sequence: TGG
agcttgcagatggcctattg

SEQ ID NO: 106539 - DNA, 20 bp, Artificial Sequence
  Description of Artificial Sequence: Synthetic oligonucleotide
  Target: LAMA2; (-) strand; PAM type: NRG; PAM sequence: TGG
cctgctcctcagcttgcaga

SEQ ID NO: 106540 - DNA, 20 bp, Artificial Sequence
  Description of Artificial Sequence: Synthetic oligonucleotide
  Target: LAMA2; (-) strand; PAM type: NRG; PAM sequence: CAG
cttccctgctcctcagcttg

SEQ ID NO: 106541 - DNA, 20 bp, Artificial Sequence
  Description of Artificial Sequence: Synthetic oligonucleotide
  Target: LAMA2; (-) strand; PAM type: NRG; PAM sequence: CAG
gggctggcttccctgctcct

SEQ ID NO: 106542 - DNA, 20 bp, Artificial Sequence
  Description of Artificial Sequence: Synthetic oligonucleotide
  Target: LAMA2; (-) strand; PAM type: NRG; PAM sequence: TGG
tgaggttttgggactcgggc

SEQ ID NO: 106543 - DNA, 20 bp, Artificial Sequence
  Description of Artificial Sequence: Synthetic oligonucleotide
  Target: LAMA2; (-) strand; PAM type: NRG; PAM sequence: GGG
cttttgaggttttgggactc

SEQ ID NO: 106544 - DNA, 20 bp, Artificial Sequence
  Description of Artificial Sequence: Synthetic oligonucleotide
  Target: LAMA2; (-) strand; PAM type: NRG; PAM sequence: CGG
acttttgaggttttgggact

SEQ ID NO: 106545 - DNA, 20 bp, Artificial Sequence
  Description of Artificial Sequence: Synthetic oligonucleotide
  Target: LAMA2; (-) strand; PAM type: NRG; PAM sequence: GGG
ttccctacttttgaggtttt

SEQ ID NO: 106546 - DNA, 20 bp, Artificial Sequence
  Description of Artificial Sequence: Synthetic oligonucleotide
  Target: LAMA2; (-) strand; PAM type: NRG; PAM sequence: TGG
cttccctacttttgaggttt

SEQ ID NO: 106547 - DNA, 20 bp, Artificial Sequence
  Description of Artificial Sequence: Synthetic oligonucleotide
  Target: LAMA2; (-) strand; PAM type: NRG; PAM sequence: AGG
tgtcagcttccctacttttg

SEQ ID NO: 106548 - DNA, 20 bp, Artificial Sequence
  Description of Artificial Sequence: Synthetic oligonucleotide
  Target: LAMA2; (-) strand; PAM type: NRG; PAM sequence: GAG
ctgtcagcttccctactttt

SEQ ID NO: 106549 - DNA, 20 bp, Artificial Sequence
  Description of Artificial Sequence: Synthetic oligonucleotide
  Target: LAMA2; (-) strand; PAM type: NRG; PAM sequence: CAG
cagactgaaggctgcactgt

SEQ ID NO: 106550 - DNA, 20 bp, Artificial Sequence
  Description of Artificial Sequence: Synthetic oligonucleotide
  Target: LAMA2; (-) strand; PAM type: NRG; PAM sequence: AGG
ggcctttaaccacagactga

SEQ ID NO: 106551 - DNA, 20 bp, Artificial Sequence
  Description of Artificial Sequence: Synthetic oligonucleotide
  Target: LAMA2; (-) strand; PAM type: NRG; PAM sequence: AAG
aggcctttaaccacagactg

SEQ ID NO: 106552 - DNA, 20 bp, Artificial Sequence
  Description of Artificial Sequence: Synthetic oligonucleotide
  Target: LAMA2; (-) strand; PAM type: NRG; PAM sequence: CAG
ggctgtcaggcctttaacca

SEQ ID NO: 106553 - DNA, 20 bp, Artificial Sequence
  Description of Artificial Sequence: Synthetic oligonucleotide
  Target: LAMA2; (-) strand; PAM type: NRG; PAM sequence: AGG
ggggtttgccaggggctgtc

SEQ ID NO: 106554 - DNA, 20 bp, Artificial Sequence
  Description of Artificial Sequence: Synthetic oligonucleotide
  Target: LAMA2; (-) strand; PAM type: NRG; PAM sequence: CAG
aggggtttgccaggggctgt

SEQ ID NO: 106555 - DNA, 20 bp, Artificial Sequence
  Description of Artificial Sequence: Synthetic oligonucleotide
  Target: LAMA2; (-) strand; PAM type: NRG; PAM sequence: GGG
ttacaccaggggtttgccag

SEQ ID NO: 106556 - DNA, 20 bp, Artificial Sequence
  Description of Artificial Sequence: Synthetic oligonucleotide
  Target: LAMA2; (-) strand; PAM type: NRG; PAM sequence: GGG
cttacaccaggggtttgcca

SEQ ID NO: 106557 - DNA, 20 bp, Artificial Sequence
  Description of Artificial Sequence: Synthetic oligonucleotide
  Target: LAMA2; (-) strand; PAM type: NRG; PAM sequence: AGG
acttacaccaggggtttgcc

SEQ ID NO: 106558 - DNA, 20 bp, Artificial Sequence
  Description of Artificial Sequence: Synthetic oligonucleotide
  Target: LAMA2; (-) strand; PAM type: NRG; PAM sequence: CAG
gacttacaccaggggtttgc

SEQ ID NO: 106559 - DNA, 20 bp, Artificial Sequence
  Description of Artificial Sequence: Synthetic oligonucleotide
  Target: LAMA2; (-) strand; PAM type: NRG; PAM sequence: GGG
gattcctggacttacaccag

SEQ ID NO: 106560 - DNA, 20 bp, Artificial Sequence
  Description of Artificial Sequence: Synthetic oligonucleotide
  Target: LAMA2; (-) strand; PAM type: NRG; PAM sequence: GGG
ggattcctggacttacacca

SEQ ID NO: 106561 - DNA, 20 bp, Artificial Sequence
  Description of Artificial Sequence: Synthetic oligonucleotide
  Target: LAMA2; (-) strand; PAM type: NRG; PAM sequence: AGG
tggattcctggacttacacc

SEQ ID NO: 106562 - DNA, 20 bp, Artificial Sequence
  Description of Artificial Sequence: Synthetic oligonucleotide
  Target: LAMA2; (-) strand; PAM type: NRG; PAM sequence: CAG
ttggattcctggacttacac

SEQ ID NO: 106563 - DNA, 20 bp, Artificial Sequence
  Description of Artificial Sequence: Synthetic oligonucleotide
  Target: LAMA2; (-) strand; PAM type: NRG; PAM sequence: TGG
ttcttcagcttttggattcc

SEQ ID NO: 106564 - DNA, 20 bp, Artificial Sequence
  Description of Artificial Sequence: Synthetic oligonucleotide
  Target: LAMA2; (-) strand; PAM type: NRG; PAM sequence: TGG
actccaagttcttcagcttt

SEQ ID NO: 106565 - DNA, 20 bp, Artificial Sequence
  Description of Artificial Sequence: Synthetic oligonucleotide
  Target: LAMA2; (-) strand; PAM type: NRG; PAM sequence: CAG
acatcacactccaagttctt

SEQ ID NO: 106566 - DNA, 20 bp, Artificial Sequence
  Description of Artificial Sequence: Synthetic oligonucleotide
  Target: LAMA2; (-) strand; PAM type: NRG; PAM sequence: AAG
gcccttgaacatcacactcc

SEQ ID NO: 106567 - DNA, 20 bp, Artificial Sequence
  Description of Artificial Sequence: Synthetic oligonucleotide
  Target: LAMA2; (-) strand; PAM type: NRG; PAM sequence: TGG
ccttcatctttcacccatgc

SEQ ID NO: 106568 - DNA, 20 bp, Artificial Sequence
  Description of Artificial Sequence: Synthetic oligonucleotide
  Target: LAMA2; (-) strand; PAM type: NRG; PAM sequence: CAG
agtagatcttctgactcttc

SEQ ID NO: 106569 - DNA, 20 bp, Artificial Sequence
  Description of Artificial Sequence: Synthetic oligonucleotide
  Target: LAMA2; (-) strand; PAM type: NRG; PAM sequence: TAG
gcagaagaaagtggaaagag

SEQ ID NO: 106570 - DNA, 20 bp, Artificial Sequence
  Description of Artificial Sequence: Synthetic oligonucleotide
  Target: LAMA2; (-) strand; PAM type: NRG; PAM sequence: GAG
caggcagaagaaagtggaaa

SEQ ID NO: 106571 - DNA, 20 bp, Artificial Sequence
  Description of Artificial Sequence: Synthetic oligonucleotide
  Target: LAMA2; (-) strand; PAM type: NRG; PAM sequence: AAG
agcaggcagaagaaagtgga

SEQ ID NO: 106572 - DNA, 20 bp, Artificial Sequence
  Description of Artificial Sequence: Synthetic oligonucleotide
  Target: LAMA2; (-) strand; PAM type: NRG; PAM sequence: TGG
taaaagcaggcagaagaaag

SEQ ID NO: 106573 - DNA, 20 bp, Artificial Sequence
  Description of Artificial Sequence: Synthetic oligonucleotide
  Target: LAMA2; (-) strand; PAM type: NRG; PAM sequence: AAG
gaataaaagcaggcagaaga

SEQ ID NO: 106574 - DNA, 20 bp, Artificial Sequence
  Description of Artificial Sequence: Synthetic oligonucleotide
  Target: LAMA2; (-) strand; PAM type: NRG; PAM sequence: AAG
gctagaataaaagcaggcag

SEQ ID NO: 106575 - DNA, 20 bp, Artificial Sequence
  Description of Artificial Sequence: Synthetic oligonucleotide
  Target: LAMA2; (-) strand; PAM type: NRG; PAM sequence: CAG
gtggctagaataaaagcagg

SEQ ID NO: 106576 - DNA, 20 bp, Artificial Sequence
  Description of Artificial Sequence: Synthetic oligonucleotide
  Target: LAMA2; (-) strand; PAM type: NRG; PAM sequence: AGG
agtgtggctagaataaaagc

SEQ ID NO: 106577 - DNA, 20 bp, Artificial Sequence
  Description of Artificial Sequence: Synthetic oligonucleotide
  Target: LAMA2; (-) strand; PAM type: NRG; PAM sequence: CAG
cagtgtggctagaataaaag

SEQ ID NO: 106578 - DNA, 20 bp, Artificial Sequence
  Description of Artificial Sequence: Synthetic oligonucleotide
  Target: LAMA2; (-) strand; PAM type: NRG; PAM sequence: AAG
tgccagtgtggctagaataa

SEQ ID NO: 106579 - DNA, 20 bp, Artificial Sequence
  Description of Artificial Sequence: Synthetic oligonucleotide
  Target: LAMA2; (-) strand; PAM type: NRG; PAM sequence: TAG
taataagctgccagtgtggc

SEQ ID NO: 106580 - DNA, 20 bp, Artificial Sequence
  Description of Artificial Sequence: Synthetic oligonucleotide
  Target: LAMA2; (-) strand; PAM type: NRG; PAM sequence: TGG
catctaataagctgccagtg

SEQ ID NO: 106581 - DNA, 20 bp, Artificial Sequence
  Description of Artificial Sequence: Synthetic oligonucleotide
  Target: LAMA2; (-) strand; PAM type: NRG; PAM sequence: CAG
ggcaccatctaataagctgc

SEQ ID NO: 106582 - DNA, 20 bp, Artificial Sequence
  Description of Artificial Sequence: Synthetic oligonucleotide
  Target: LAMA2; (-) strand; PAM type: NRG; PAM sequence: AAG
gtgggtgggcaccatctaat

SEQ ID NO: 106583 - DNA, 20 bp, Artificial Sequence
  Description of Artificial Sequence: Synthetic oligonucleotide
  Target: LAMA2; (-) strand; PAM type: NRG; PAM sequence: GGG
gacccaccctcaatgtgggt

SEQ ID NO: 106584 - DNA, 20 bp, Artificial Sequence
  Description of Artificial Sequence: Synthetic oligonucleotide
  Target: LAMA2; (-) strand; PAM type: NRG; PAM sequence: TGG
agacccaccctcaatgtggg

SEQ ID NO: 106585 - DNA, 20 bp, Artificial Sequence
  Description of Artificial Sequence: Synthetic oligonucleotide
  Target: LAMA2; (-) strand; PAM type: NRG; PAM sequence: GGG
ggcagacccaccctcaatgt

SEQ ID NO: 106586 - DNA, 20 bp, Artificial Sequence
  Description of Artificial Sequence: Synthetic oligonucleotide
  Target: LAMA2; (-) strand; PAM type: NRG; PAM sequence: TGG
aggcagacccaccctcaatg

SEQ ID NO: 106587 - DNA, 20 bp, Artificial Sequence
  Description of Artificial Sequence: Synthetic oligonucleotide
  Target: LAMA2; (-) strand; PAM type: NRG; PAM sequence: CAG
agtcactggactggaagagg

SEQ ID NO: 106588 - DNA, 20 bp, Artificial Sequence
  Description of Artificial Sequence: Synthetic oligonucleotide
  Target: LAMA2; (-) strand; PAM type: NRG; PAM sequence: AGG
ttgagtcactggactggaag

SEQ ID NO: 106589 - DNA, 20 bp, Artificial Sequence
  Description of Artificial Sequence: Synthetic oligonucleotide
  Target: LAMA2; (-) strand; PAM type: NRG; PAM sequence: GAG
tttgagtcactggactggaa

SEQ ID NO: 106590 - DNA, 20 bp, Artificial Sequence
  Description of Artificial Sequence: Synthetic oligonucleotide
  Target: LAMA2; (-) strand; PAM type: NRG; PAM sequence: AAG
aatttgagtcactggactgg

SEQ ID NO: 106591 - DNA, 20 bp, Artificial Sequence
  Description of Artificial Sequence: Synthetic oligonucleotide
  Target: LAMA2; (-) strand; PAM type: NRG; PAM sequence: TGG
taaaatttgagtcactggac

SEQ ID NO: 106592 - DNA, 20 bp, Artificial Sequence
  Description of Artificial Sequence: Synthetic oligonucleotide
  Target: LAMA2; (-) strand; PAM type: NRG; PAM sequence: TGG
gagattaaaatttgagtcac

SEQ ID NO: 106593 - DNA, 20 bp, Artificial Sequence
  Description of Artificial Sequence: Synthetic oligonucleotide
  Target: LAMA2; (-) strand; PAM type: NRG; PAM sequence: GAG
gccaaaggagattaaaattt

SEQ ID NO: 106594 - DNA, 20 bp, Artificial Sequence
  Description of Artificial Sequence: Synthetic oligonucleotide
  Target: LAMA2; (-) strand; PAM type: NRG; PAM sequence: GAG
ctgtgagggtgttgccaaag

SEQ ID NO: 106595 - DNA, 20 bp, Artificial Sequence
  Description of Artificial Sequence: Synthetic oligonucleotide
  Target: LAMA2; (-) strand; PAM type: NRG; PAM sequence: AGG
ctctgtgagggtgttgccaa

SEQ ID NO: 106596 - DNA, 20 bp, Artificial Sequence
  Description of Artificial Sequence: Synthetic oligonucleotide
  Target: LAMA2; (-) strand; PAM type: NRG; PAM sequence: AAG
tctctgtgagggtgttgcca

SEQ ID NO: 106597 - DNA, 20 bp, Artificial Sequence
  Description of Artificial Sequence: Synthetic oligonucleotide
  Target: LAMA2; (-) strand; PAM type: NRG; PAM sequence: GGG
gttcctgggtgtctctgtga

SEQ ID NO: 106598 - DNA, 20 bp, Artificial Sequence
  Description of Artificial Sequence: Synthetic oligonucleotide
  Target: LAMA2; (-) strand; PAM type: NRG; PAM sequence: AGG
tgttcctgggtgtctctgtg

SEQ ID NO: 106599 - DNA, 20 bp, Artificial Sequence
  Description of Artificial Sequence: Synthetic oligonucleotide
  Target: LAMA2; (-) strand; PAM type: NRG; PAM sequence: GAG
ttgttcctgggtgtctctgt

SEQ ID NO: 106600 - DNA, 20 bp, Artificial Sequence
  Description of Artificial Sequence: Synthetic oligonucleotide
  Target: LAMA2; (-) strand; PAM type: NRG; PAM sequence: GGG
cgatgcaaagtattgttcct

SEQ ID NO: 106601 - DNA, 20 bp, Artificial Sequence
  Description of Artificial Sequence: Synthetic oligonucleotide
  Target: LAMA2; (-) strand; PAM type: NRG; PAM sequence: TGG
acgatgcaaagtattgttcc

SEQ ID NO: 106602 - DNA, 20 bp, Artificial Sequence
  Description of Artificial Sequence: Synthetic oligonucleotide
  Target: LAMA2; (-) strand; PAM type: NRG; PAM sequence: AAG
tgattggattgaacgatgca

SEQ ID NO: 106603 - DNA, 20 bp, Artificial Sequence
  Description of Artificial Sequence: Synthetic oligonucleotide
  Target: LAMA2; (-) strand; PAM type: NRG; PAM sequence: TGG
atattgagtatcagcttgat

SEQ ID NO: 106604 - DNA, 20 bp, Artificial Sequence
  Description of Artificial Sequence: Synthetic oligonucleotide
  Target: LAMA2; (-) strand; PAM type: NRG; PAM sequence: CAG
tgatgactaatattgagtat

SEQ ID NO: 106605 - DNA, 20 bp, Artificial Sequence
  Description of Artificial Sequence: Synthetic oligonucleotide
  Target: LAMA2; (-) strand; PAM type: NRG; PAM sequence: GAG
gacttgtgatgactaatatt

SEQ ID NO: 106606 - DNA, 20 bp, Artificial Sequence
  Description of Artificial Sequence: Synthetic oligonucleotide
  Target: LAMA2; (-) strand; PAM type: NRG; PAM sequence: TGG
gggttcaagttgacaagggg

SEQ ID NO: 106607 - DNA, 20 bp, Artificial Sequence
  Description of Artificial Sequence: Synthetic oligonucleotide
  Target: LAMA2; (-) strand; PAM type: NRG; PAM sequence: GGG
tatgggttcaagttgacaag

SEQ ID NO: 106608 - DNA, 20 bp, Artificial Sequence
  Description of Artificial Sequence: Synthetic oligonucleotide
  Target: LAMA2; (-) strand; PAM type: NRG; PAM sequence: GGG
gtatgggttcaagttgacaa

SEQ ID NO: 106609 - DNA, 20 bp, Artificial Sequence
  Description of Artificial Sequence: Synthetic oligonucleotide
  Target: LAMA2; (-) strand; PAM type: NRG; PAM sequence: AGG
tgtatgggttcaagttgaca

SEQ ID NO: 106610 - DNA, 20 bp, Artificial Sequence
  Description of Artificial Sequence: Synthetic oligonucleotide
  Target: LAMA2; (-) strand; PAM type: NRG; PAM sequence: AAG
gtgtatgggttcaagttgac

SEQ ID NO: 106611 - DNA, 20 bp, Artificial Sequence
  Description of Artificial Sequence: Synthetic oligonucleotide
  Target: LAMA2; (-) strand; PAM type: NRG; PAM sequence: AAG
caggagatgtgtatgggttc

SEQ ID NO: 106612 - DNA, 20 bp, Artificial Sequence
  Description of Artificial Sequence: Synthetic oligonucleotide
  Target: LAMA2; (-) strand; PAM type: NRG; PAM sequence: GGG
tgatttcaggagatgtgtat

SEQ ID NO: 106613 - DNA, 20 bp, Artificial Sequence
  Description of Artificial Sequence: Synthetic oligonucleotide
  Target: LAMA2; (-) strand; PAM type: NRG; PAM sequence: TGG
atgatttcaggagatgtgta

SEQ ID NO: 106614 - DNA, 20 bp, Artificial Sequence
  Description of Artificial Sequence: Synthetic oligonucleotide
  Target: LAMA2; (-) strand; PAM type: NRG; PAM sequence: GAG
gagattatgtatgatttcag

SEQ ID NO: 106615 - DNA, 20 bp, Artificial Sequence
  Description of Artificial Sequence: Synthetic oligonucleotide
  Target: LAMA2; (-) strand; PAM type: NRG; PAM sequence: AGG
tggagattatgtatgatttc

SEQ ID NO: 106616 - DNA, 20 bp, Artificial Sequence
  Description of Artificial Sequence: Synthetic oligonucleotide
  Target: LAMA2; (-) strand; PAM type: NRG; PAM sequence: CAG
ttggagattatgtatgattt

SEQ ID NO: 106617 - DNA, 20 bp, Artificial Sequence
  Description of Artificial Sequence: Synthetic oligonucleotide
  Target: LAMA2; (-) strand; PAM type: NRG; PAM sequence: GAG
gttattattgtctttatttg

SEQ ID NO: 106618 - DNA, 20 bp, Artificial Sequence
  Description of Artificial Sequence: Synthetic oligonucleotide
  Target: LAMA2; (-) strand; PAM type: NRG; PAM sequence: TGG
atgttattattgtctttatt

SEQ ID NO: 106619 - DNA, 20 bp, Artificial Sequence
  Description of Artificial Sequence: Synthetic oligonucleotide
  Target: LAMA2; (-) strand; PAM type: NRG; PAM sequence: AGG
agggatagctgtattatgtt

SEQ ID NO: 106620 - DNA, 20 bp, Artificial Sequence
  Description of Artificial Sequence: Synthetic oligonucleotide
  Target: LAMA2; (-) strand; PAM type: NRG; PAM sequence: TAG
aagggatagctgtattatgt

SEQ ID NO: 106621 - DNA, 20 bp, Artificial Sequence
  Description of Artificial Sequence: Synthetic oligonucleotide
  Target: LAMA2; (-) strand; PAM type: NRG; PAM sequence: TAG
gcttctgattgtacaaggga

SEQ ID NO: 106622 - DNA, 20 bp, Artificial Sequence
  Description of Artificial Sequence: Synthetic oligonucleotide
  Target: LAMA2; (-) strand; PAM type: NRG; PAM sequence: GGG
gtgtgcttctgattgtacaa

SEQ ID NO: 106623 - DNA, 20 bp, Artificial Sequence
  Description of Artificial Sequence: Synthetic oligonucleotide
  Target: LAMA2; (-) strand; PAM type: NRG; PAM sequence: AGG
agtgtgcttctgattgtaca

SEQ ID NO: 106624 - DNA, 20 bp, Artificial Sequence
  Description of Artificial Sequence: Synthetic oligonucleotide
  Target: LAMA2; (-) strand; PAM type: NRG; PAM sequence: AAG
tagtgtgcttctgattgtac

SEQ ID NO: 106625 - DNA, 20 bp, Artificial Sequence
  Description of Artificial Sequence: Synthetic oligonucleotide
  Target: LAMA2; (-) strand; PAM type: NRG; PAM sequence: TAG
atagcatttaggttaaggat

SEQ ID NO: 106626 - DNA, 20 bp, Artificial Sequence
  Description of Artificial Sequence: Synthetic oligonucleotide
  Target: LAMA2; (-) strand; PAM type: NRG; PAM sequence: AGG
atgtaatagcatttaggtta

SEQ ID NO: 106627 - DNA, 20 bp, Artificial Sequence
  Description of Artificial Sequence: Synthetic oligonucleotide
  Target: LAMA2; (-) strand; PAM type: NRG; PAM sequence: AAG
tatgtaatagcatttaggtt

SEQ ID NO: 106628 - DNA, 20 bp, Artificial Sequence
  Description of Artificial Sequence: Synthetic oligonucleotide
  Target: LAMA2; (-) strand; PAM type: NRG; PAM sequence: AGG
aactttatgtaatagcattt

SEQ ID NO: 106629 - DNA, 20 bp, Artificial Sequence
  Description of Artificial Sequence: Synthetic oligonucleotide
  Target: LAMA2; (-) strand; PAM type: NRG; PAM sequence: TAG
taactttatgtaatagcatt

SEQ ID NO: 106630 - DNA, 20 bp, Artificial Sequence
  Description of Artificial Sequence: Synthetic oligonucleotide
  Target: LAMA2; (-) strand; PAM type: NRG; PAM sequence: TAG
gtgttgttaactttatgtaa

SEQ ID NO: 106631 - DNA, 20 bp, Artificial Sequence
  Description of Artificial Sequence: Synthetic oligonucleotide
  Target: LAMA2; (-) strand; PAM type: NRG; PAM sequence: AAG
ttgacttcatatcagcattt

SEQ ID NO: 106632 - DNA, 20 bp, Artificial Sequence
  Description of Artificial Sequence: Synthetic oligonucleotide
  Target: LAMA2; (-) strand; PAM type: NRG; PAM sequence: CAG
aaaatttattgacttcatat

SEQ ID NO: 106633 - DNA, 20 bp, Artificial Sequence
  Description of Artificial Sequence: Synthetic oligonucleotide
  Target: LAMA2; (-) strand; PAM type: NRG; PAM sequence: AGG
tgcatgtatacacttgtact

SEQ ID NO: 106634 - DNA, 20 bp, Artificial Sequence
  Description of Artificial Sequence: Synthetic oligonucleotide
  Target: LAMA2; (-) strand; PAM type: NRG; PAM sequence: TAG
gtgcatgtatacacttgtac

SEQ ID NO: 106635 - DNA, 20 bp, Artificial Sequence
  Description of Artificial Sequence: Synthetic oligonucleotide
  Target: LAMA2; (-) strand; PAM type: NRG; PAM sequence: AAG
tatttcctccttattctgtt

SEQ ID NO: 106636 - DNA, 20 bp, Artificial Sequence
  Description of Artificial Sequence: Synthetic oligonucleotide
  Target: LAMA2; (-) strand; PAM type: NRG; PAM sequence: AAG
cgtggccagttgcagaaatg

SEQ ID NO: 106637 - DNA, 20 bp, Artificial Sequence
  Description of Artificial Sequence: Synthetic oligonucleotide
  Target: LAMA2; (-) strand; PAM type: NRG; PAM sequence: CAG
tacaaccacgtggccagttg

SEQ ID NO: 106638 - DNA, 20 bp, Artificial Sequence
  Description of Artificial Sequence: Synthetic oligonucleotide
  Target: LAMA2; (-) strand; PAM type: NRG; PAM sequence: CAG
accagctacaaccacgtggc

SEQ ID NO: 106639 - DNA, 20 bp, Artificial Sequence
  Description of Artificial Sequence: Synthetic oligonucleotide
  Target: LAMA2; (-) strand; PAM type: NRG; PAM sequence: TGG
caataccagctacaaccacg

SEQ ID NO: 106640 - DNA, 20 bp, Artificial Sequence
  Description of Artificial Sequence: Synthetic oligonucleotide
  Target: LAMA2; (-) strand; PAM type: NRG; PAM sequence: CAG
aagaaggtagtcatcaatac

SEQ ID NO: 106641 - DNA, 20 bp, Artificial Sequence
  Description of Artificial Sequence: Synthetic oligonucleotide
  Target: LAMA2; (-) strand; PAM type: NRG; PAM sequence: TAG
taatggttagtagaagaagg

SEQ ID NO: 106642 - DNA, 20 bp, Artificial Sequence
  Description of Artificial Sequence: Synthetic oligonucleotide
  Target: LAMA2; (-) strand; PAM type: NRG; PAM sequence: AGG
acataatggttagtagaaga

SEQ ID NO: 106643 - DNA, 20 bp, Artificial Sequence
  Description of Artificial Sequence: Synthetic oligonucleotide
  Target: LAMA2; (-) strand; PAM type: NRG; PAM sequence: AAG
tacataatggttagtagaag

SEQ ID NO: 106644 - DNA, 20 bp, Artificial Sequence
  Description of Artificial Sequence: Synthetic oligonucleotide
  Target: LAMA2; (-) strand; PAM type: NRG; PAM sequence: AAG
gaatacataatggttagtag

SEQ ID NO: 106645 - DNA, 20 bp, Artificial Sequence
  Description of Artificial Sequence: Synthetic oligonucleotide
  Target: LAMA2; (-) strand; PAM type: NRG; PAM sequence: TAG
agggaatacataatggttag

SEQ ID NO: 106646 - DNA, 20 bp, Artificial Sequence
  Description of Artificial Sequence: Synthetic oligonucleotide
  Target: LAMA2; (-) strand; PAM type: NRG; PAM sequence: TAG
caaagggaatacataatggt

SEQ ID NO: 106647 - DNA, 20 bp, Artificial Sequence
  Description of Artificial Sequence: Synthetic oligonucleotide
  Target: LAMA2; (-) strand; PAM type: NRG; PAM sequence: TGG
aaggcaaagggaatacataa

SEQ ID NO: 106648 - DNA, 20 bp, Artificial Sequence
  Description of Artificial Sequence: Synthetic oligonucleotide
  Target: LAMA2; (-) strand; PAM type: NRG; PAM sequence: GGG
aggtgcttgcagaaggcaaa

SEQ ID NO: 106649 - DNA, 20 bp, Artificial Sequence
  Description of Artificial Sequence: Synthetic oligonucleotide
  Target: LAMA2; (-) strand; PAM type: NRG; PAM sequence: AGG
gaggtgcttgcagaaggcaa

SEQ ID NO: 106650 - DNA, 20 bp, Artificial Sequence
  Description of Artificial Sequence: Synthetic oligonucleotide
  Target: LAMA2; (-) strand; PAM type: NRG; PAM sequence: AAG
tgaggtgcttgcagaaggca

SEQ ID NO: 106651 - DNA, 20 bp, Artificial Sequence
  Description of Artificial Sequence: Synthetic oligonucleotide
  Target: LAMA2; (-) strand; PAM type: NRG; PAM sequence: AGG
cccgctgaggtgcttgcaga

SEQ ID NO: 106652 - DNA, 20 bp, Artificial Sequence
  Description of Artificial Sequence: Synthetic oligonucleotide
  Target: LAMA2; (-) strand; PAM type: NRG; PAM sequence: AAG
acccgctgaggtgcttgcag

SEQ ID NO: 106653 - DNA, 20 bp, Artificial Sequence
  Description of Artificial Sequence: Synthetic oligonucleotide
  Target: LAMA2; (-) strand; PAM type: NRG; PAM sequence: CAG
atgacccgctgaggtgcttg

SEQ ID NO: 106654 - DNA, 20 bp, Artificial Sequence
  Description of Artificial Sequence: Synthetic oligonucleotide
  Target: LAMA2; (-) strand; PAM type: NRG; PAM sequence: AGG
taaaaagccatgacccgctg

SEQ ID NO: 106655 - DNA, 20 bp, Artificial Sequence
  Description of Artificial Sequence: Synthetic oligonucleotide
  Target: LAMA2; (-) strand; PAM type: NRG; PAM sequence: GAG
gtaaaaagccatgacccgct

SEQ ID NO: 106656 - DNA, 20 bp, Artificial Sequence
  Description of Artificial Sequence: Synthetic oligonucleotide
  Target: LAMA2; (-) strand; PAM type: NRG; PAM sequence: AAG
gggtcaccccaccaggtaaa

SEQ ID NO: 106657 - DNA, 20 bp, Artificial Sequence
  Description of Artificial Sequence: Synthetic oligonucleotide
  Target: LAMA2; (-) strand; PAM type: NRG; PAM sequence: AGG
aaggtttgggtcaccccacc

SEQ ID NO: 106658 - DNA, 20 bp, Artificial Sequence
  Description of Artificial Sequence: Synthetic oligonucleotide
  Target: LAMA2; (-) strand; PAM type: NRG; PAM sequence: CAG
aaaggtttgggtcaccccac

SEQ ID NO: 106659 - DNA, 20 bp, Artificial Sequence
  Description of Artificial Sequence: Synthetic oligonucleotide
  Target: LAMA2; (-) strand; PAM type: NRG; PAM sequence: GGG
tccttccagaataaaggttt

SEQ ID NO: 106660 - DNA, 20 bp, Artificial Sequence
  Description of Artificial Sequence: Synthetic oligonucleotide
  Target: LAMA2; (-) strand; PAM type: NRG; PAM sequence: TGG
gtccttccagaataaaggtt

SEQ ID NO: 106661 - DNA, 20 bp, Artificial Sequence
  Description of Artificial Sequence: Synthetic oligonucleotide
  Target: LAMA2; (-) strand; PAM type: NRG; PAM sequence: AGG
cacaggtccttccagaataa

SEQ ID NO: 106662 - DNA, 20 bp, Artificial Sequence
  Description of Artificial Sequence: Synthetic oligonucleotide
  Target: LAMA2; (-) strand; PAM type: NRG; PAM sequence: AAG
gcacaggtccttccagaata

SEQ ID NO: 106663 - DNA, 20 bp, Artificial Sequence
  Description of Artificial Sequence: Synthetic oligonucleotide
  Target: LAMA2; (-) strand; PAM type: NRG; PAM sequence: CAG
acaaatggcacaggtccttc

SEQ ID NO: 106664 - DNA, 20 bp, Artificial Sequence
  Description of Artificial Sequence: Synthetic oligonucleotide
  Target: LAMA2; (-) strand; PAM type: NRG; PAM sequence: AGG
gacaggactacaaatggcac

SEQ ID NO: 106665 - DNA, 20 bp, Artificial Sequence
  Description of Artificial Sequence: Synthetic oligonucleotide
  Target: LAMA2; (-) strand; PAM type: NRG; PAM sequence: CAG
agacaggactacaaatggca

SEQ ID NO: 106666 - DNA, 20 bp, Artificial Sequence
  Description of Artificial Sequence: Synthetic oligonucleotide
  Target: LAMA2; (-) strand; PAM type: NRG; PAM sequence: TGG
aatccagacaggactacaaa

SEQ ID NO: 106667 - DNA, 20 bp, Artificial Sequence
  Description of Artificial Sequence: Synthetic oligonucleotide
  Target: LAMA2; (-) strand; PAM type: NRG; PAM sequence: AGG
caatccaacccaatccagac

SEQ ID NO: 106668 - DNA, 20 bp, Artificial Sequence
  Description of Artificial Sequence: Synthetic oligonucleotide
  Target: LAMA2; (-) strand; PAM type: NRG; PAM sequence: CAG
ccaatccaacccaatccaga

SEQ ID NO: 106669 - DNA, 20 bp, Artificial Sequence
  Description of Artificial Sequence: Synthetic oligonucleotide
  Target: LAMA2; (-) strand; PAM type: NRG; PAM sequence: CAG
caacccaatccaacccaatc

SEQ ID NO: 106670 - DNA, 20 bp, Artificial Sequence
  Description of Artificial Sequence: Synthetic oligonucleotide
  Target: LAMA2; (-) strand; PAM type: NRG; PAM sequence: GGG
cctctgtgtttaaggtcaat

SEQ ID NO: 106671 - DNA, 20 bp, Artificial Sequence
  Description of Artificial Sequence: Synthetic oligonucleotide
  Target: LAMA2; (-) strand; PAM type: NRG; PAM sequence: TGG
tcctctgtgtttaaggtcaa

SEQ ID NO: 106672 - DNA, 20 bp, Artificial Sequence
  Description of Artificial Sequence: Synthetic oligonucleotide
  Target: LAMA2; (-) strand; PAM type: NRG; PAM sequence: AGG
attaccatcctctgtgttta

SEQ ID NO: 106673 - DNA, 20 bp, Artificial Sequence
  Description of Artificial Sequence: Synthetic oligonucleotide
  Target: LAMA2; (-) strand; PAM type: NRG; PAM sequence: AAG
tattaccatcctctgtgttt

SEQ ID NO: 106674 - DNA, 20 bp, Artificial Sequence
  Description of Artificial Sequence: Synthetic oligonucleotide
  Target: LAMA2; (-) strand; PAM type: NRG; PAM sequence: GGG
ggaatacaggagatcccata

SEQ ID NO: 106675 - DNA, 20 bp, Artificial Sequence
  Description of Artificial Sequence: Synthetic oligonucleotide
  Target: LAMA2; (-) strand; PAM type: NRG; PAM sequence: AGG
tggaatacaggagatcccat

SEQ ID NO: 106676 - DNA, 20 bp, Artificial Sequence
  Description of Artificial Sequence: Synthetic oligonucleotide
  Target: LAMA2; (-) strand; PAM type: NRG; PAM sequence: TAG
atggaatacaggagatccca

SEQ ID NO: 106677 - DNA, 20 bp, Artificial Sequence
  Description of Artificial Sequence: Synthetic oligonucleotide
  Target: LAMA2; (-) strand; PAM type: NRG; PAM sequence: GAG
agagcatgcatggaatacag

SEQ ID NO: 106678 - DNA, 20 bp, Artificial Sequence
  Description of Artificial Sequence: Synthetic oligonucleotide
  Target: LAMA2; (-) strand; PAM type: NRG; PAM sequence: AGG
gaagagcatgcatggaatac

SEQ ID NO: 106679 - DNA, 20 bp, Artificial Sequence
  Description of Artificial Sequence: Synthetic oligonucleotide
  Target: LAMA2; (-) strand; PAM type: NRG; PAM sequence: CAG
ggaagagcatgcatggaata

SEQ ID NO: 106680 - DNA, 20 bp, Artificial Sequence
  Description of Artificial Sequence: Synthetic oligonucleotide
  Target: LAMA2; (-) strand; PAM type: NRG; PAM sequence: TGG
aaggcaaggaagagcatgca

SEQ ID NO: 106681 - DNA, 20 bp, Artificial Sequence
  Description of Artificial Sequence: Synthetic oligonucleotide
  Target: LAMA2; (-) strand; PAM type: NRG; PAM sequence: GAG
tccacaatgaaggcaaggaa

SEQ ID NO: 106682 - DNA, 20 bp, Artificial Sequence
  Description of Artificial Sequence: Synthetic oligonucleotide
  Target: LAMA2; (-) strand; PAM type: NRG; PAM sequence: AAG
attccacaatgaaggcaagg

SEQ ID NO: 106683 - DNA, 20 bp, Artificial Sequence
  Description of Artificial Sequence: Synthetic oligonucleotide
  Target: LAMA2; (-) strand; PAM type: NRG; PAM sequence: AGG
actattccacaatgaaggca

SEQ ID NO: 106684 - DNA, 20 bp, Artificial Sequence
  Description of Artificial Sequence: Synthetic oligonucleotide
  Target: LAMA2; (-) strand; PAM type: NRG; PAM sequence: AAG
tactattccacaatgaaggc

SEQ ID NO: 106685 - DNA, 20 bp, Artificial Sequence
  Description of Artificial Sequence: Synthetic oligonucleotide
  Target: LAMA2; (-) strand; PAM type: NRG; PAM sequence: AGG
agtctactattccacaatga

SEQ ID NO: 106686 - DNA, 20 bp, Artificial Sequence
  Description of Artificial Sequence: Synthetic oligonucleotide
  Target: LAMA2; (-) strand; PAM type: NRG; PAM sequence: AAG
cagtctactattccacaatg

SEQ ID NO: 106687 - DNA, 20 bp, Artificial Sequence
  Description of Artificial Sequence: Synthetic oligonucleotide
  Target: LAMA2; (-) strand; PAM type: NRG; PAM sequence: CAG
ccagaatatcaaggtgaaat

SEQ ID NO: 106688 - DNA, 20 bp, Artificial Sequence
  Description of Artificial Sequence: Synthetic oligonucleotide
  Target: LAMA2; (-) strand; PAM type: NRG; PAM sequence: AGG
gtaattgacccagaatatca

SEQ ID NO: 106689 - DNA, 20 bp, Artificial Sequence
  Description of Artificial Sequence: Synthetic oligonucleotide
  Target: LAMA2; (-) strand; PAM type: NRG; PAM sequence: AAG
ggtaattgacccagaatatc

SEQ ID NO: 106690 - DNA, 20 bp, Artificial Sequence
  Description of Artificial Sequence: Synthetic oligonucleotide
  Target: LAMA2; (-) strand; PAM type: NRG; PAM sequence: CAG
tgttggctgggtaattgacc

SEQ ID NO: 106691 - DNA, 20 bp, Artificial Sequence
  Description of Artificial Sequence: Synthetic oligonucleotide
  Target: LAMA2; (-) strand; PAM type: NRG; PAM sequence: GGG
agggggtttcagtgttggct

SEQ ID NO: 106692 - DNA, 20 bp, Artificial Sequence
  Description of Artificial Sequence: Synthetic oligonucleotide
  Target: LAMA2; (-) strand; PAM type: NRG; PAM sequence: TGG
aagggggtttcagtgttggc

SEQ ID NO: 106693 - DNA, 20 bp, Artificial Sequence
  Description of Artificial Sequence: Synthetic oligonucleotide
  Target: LAMA2; (-) strand; PAM type: NRG; PAM sequence: TGG
taagaagggggtttcagtgt

SEQ ID NO: 106694 - DNA, 20 bp, Artificial Sequence
  Description of Artificial Sequence: Synthetic oligonucleotide
  Target: LAMA2; (-) strand; PAM type: NRG; PAM sequence: CAG
acaggctaagaagggggttt

SEQ ID NO: 106695 - DNA, 20 bp, Artificial Sequence
  Description of Artificial Sequence: Synthetic oligonucleotide
  Target: LAMA2; (-) strand; PAM type: NRG; PAM sequence: GGG
aagtcaacaggctaagaagg

SEQ ID NO: 106696 - DNA, 20 bp, Artificial Sequence
  Description of Artificial Sequence: Synthetic oligonucleotide
  Target: LAMA2; (-) strand; PAM type: NRG; PAM sequence: GGG
caagtcaacaggctaagaag

SEQ ID NO: 106697 - DNA, 20 bp, Artificial Sequence
  Description of Artificial Sequence: Synthetic oligonucleotide
  Target: LAMA2; (-) strand; PAM type: NRG; PAM sequence: GGG
ccaagtcaacaggctaagaa

SEQ ID NO: 106698 - DNA, 20 bp, Artificial Sequence
  Description of Artificial Sequence: Synthetic oligonucleotide
  Target: LAMA2; (-) strand; PAM type: NRG; PAM sequence: AGG
tccaagtcaacaggctaaga

SEQ ID NO: 106699 - DNA, 20 bp, Artificial Sequence
  Description of Artificial Sequence: Synthetic oligonucleotide
  Target: LAMA2; (-) strand; PAM type: NRG; PAM sequence: AAG
ctccaagtcaacaggctaag

SEQ ID NO: 106700 - DNA, 20 bp, Artificial Sequence
  Description of Artificial Sequence: Synthetic oligonucleotide
  Target: LAMA2; (-) strand; PAM type: NRG; PAM sequence: AAG
tacctccaagtcaacaggct

SEQ ID NO: 106701 - DNA, 20 bp, Artificial Sequence
  Description of Artificial Sequence: Synthetic oligonucleotide
  Target: LAMA2; (-) strand; PAM type: NRG; PAM sequence: AGG
cctcctacctccaagtcaac

SEQ ID NO: 106702 - DNA, 20 bp, Artificial Sequence
  Description of Artificial Sequence: Synthetic oligonucleotide
  Target: LAMA2; (-) strand; PAM type: NRG; PAM sequence: CAG
ccctcctacctccaagtcaa

SEQ ID NO: 106703 - DNA, 20 bp, Artificial Sequence
  Description of Artificial Sequence: Synthetic oligonucleotide
  Target: LAMA2; (-) strand; PAM type: NRG; PAM sequence: AAG
attggggccctcctacctcc

SEQ ID NO: 106704 - DNA, 20 bp, Artificial Sequence
  Description of Artificial Sequence: Synthetic oligonucleotide
  Target: LAMA2; (-) strand; PAM type: NRG; PAM sequence: GGG
gattaccacctggccaattg

SEQ ID NO: 106705 - DNA, 20 bp, Artificial Sequence
  Description of Artificial Sequence: Synthetic oligonucleotide
  Target: LAMA2; (-) strand; PAM type: NRG; PAM sequence: GGG
agattaccacctggccaatt

SEQ ID NO: 106706 - DNA, 20 bp, Artificial Sequence
  Description of Artificial Sequence: Synthetic oligonucleotide
  Target: LAMA2; (-) strand; PAM type: NRG; PAM sequence: TGG
aagattaccacctggccaat

SEQ ID NO: 106707 - DNA, 20 bp, Artificial Sequence
  Description of Artificial Sequence: Synthetic oligonucleotide
  Target: LAMA2; (-) strand; PAM type: NRG; PAM sequence: TGG
tggaagttaagattaccacc

SEQ ID NO: 106708 - DNA, 20 bp, Artificial Sequence
  Description of Artificial Sequence: Synthetic oligonucleotide
  Target: LAMA2; (-) strand; PAM type: NRG; PAM sequence: AAG
attccattaaactggaagtt

SEQ ID NO: 106709 - DNA, 20 bp, Artificial Sequence
  Description of Artificial Sequence: Synthetic oligonucleotide
  Target: LAMA2; (-) strand; PAM type: NRG; PAM sequence: AAG
caatgattccattaaactgg

SEQ ID NO: 106710 - DNA, 20 bp, Artificial Sequence
  Description of Artificial Sequence: Synthetic oligonucleotide
  Target: LAMA2; (-) strand; PAM type: NRG; PAM sequence: TGG
caacaatgattccattaaac

SEQ ID NO: 106711 - DNA, 20 bp, Artificial Sequence
  Description of Artificial Sequence: Synthetic oligonucleotide
  Target: LAMA2; (-) strand; PAM type: NRG; PAM sequence: GGG
gggaagaatgctgtcaccaa

SEQ ID NO: 106712 - DNA, 20 bp, Artificial Sequence
  Description of Artificial Sequence: Synthetic oligonucleotide
  Target: LAMA2; (-) strand; PAM type: NRG; PAM sequence: AGG
agggaagaatgctgtcacca

SEQ ID NO: 106713 - DNA, 20 bp, Artificial Sequence
  Description of Artificial Sequence: Synthetic oligonucleotide
  Target: LAMA2; (-) strand; PAM type: NRG; PAM sequence: AAG
gagggaagaatgctgtcacc

SEQ ID NO: 106714 - DNA, 20 bp, Artificial Sequence
  Description of Artificial Sequence: Synthetic oligonucleotide
  Target: LAMA2; (-) strand; PAM type: NRG; PAM sequence: AAG
gacatcttagttccagaggg

SEQ ID NO: 106715 - DNA, 20 bp, Artificial Sequence
  Description of Artificial Sequence: Synthetic oligonucleotide
  Target: LAMA2; (-) strand; PAM type: NRG; PAM sequence: GGG
ctagacatcttagttccaga

SEQ ID NO: 106716 - DNA, 20 bp, Artificial Sequence
  Description of Artificial Sequence: Synthetic oligonucleotide
  Target: LAMA2; (-) strand; PAM type: NRG; PAM sequence: AGG
cctagacatcttagttccag

SEQ ID NO: 106717 - DNA, 20 bp, Artificial Sequence
  Description of Artificial Sequence: Synthetic oligonucleotide
  Target: LAMA2; (-) strand; PAM type: NRG; PAM sequence: GAG
gcctagacatcttagttcca

SEQ ID NO: 106718 - DNA, 20 bp, Artificial Sequence
  Description of Artificial Sequence: Synthetic oligonucleotide
  Target: LAMA2; (-) strand; PAM type: NRG; PAM sequence: CAG
tggcctagacatcttagttc

SEQ ID NO: 106719 - DNA, 20 bp, Artificial Sequence
  Description of Artificial Sequence: Synthetic oligonucleotide
  Target: LAMA2; (-) strand; PAM type: NRG; PAM sequence: TAG
ttctgctggcctagacatct

SEQ ID NO: 106720 - DNA, 20 bp, Artificial Sequence
  Description of Artificial Sequence: Synthetic oligonucleotide
  Target: LAMA2; (-) strand; PAM type: NRG; PAM sequence: TAG
aacattatgttctgctggcc

SEQ ID NO: 106721 - DNA, 20 bp, Artificial Sequence
  Description of Artificial Sequence: Synthetic oligonucleotide
  Target: LAMA2; (-) strand; PAM type: NRG; PAM sequence: TGG
cccacaacattatgttctgc

SEQ ID NO: 106722 - DNA, 20 bp, Artificial Sequence
  Description of Artificial Sequence: Synthetic oligonucleotide
  Target: LAMA2; (-) strand; PAM type: NRG; PAM sequence: TAG
catcaccactagtgacccac

SEQ ID NO: 106723 - DNA, 20 bp, Artificial Sequence
  Description of Artificial Sequence: Synthetic oligonucleotide
  Target: LAMA2; (-) strand; PAM type: NRG; PAM sequence: TAG
gcaccactcaccatcaccac

SEQ ID NO: 106724 - DNA, 20 bp, Artificial Sequence
  Description of Artificial Sequence: Synthetic oligonucleotide
  Target: LAMA2; (-) strand; PAM type: NRG; PAM sequence: TGG
tcaaggggtggaagcggaag

SEQ ID NO: 106725 - DNA, 20 bp, Artificial Sequence
  Description of Artificial Sequence: Synthetic oligonucleotide
  Target: LAMA2; (-) strand; PAM type: NRG; PAM sequence: AAG
gaatcaaggggtggaagcgg

SEQ ID NO: 106726 - DNA, 20 bp, Artificial Sequence
  Description of Artificial Sequence: Synthetic oligonucleotide
  Target: LAMA2; (-) strand; PAM type: NRG; PAM sequence: CGG
ccagaatcaaggggtggaag

SEQ ID NO: 106727 - DNA, 20 bp, Artificial Sequence
  Description of Artificial Sequence: Synthetic oligonucleotide
  Target: LAMA2; (-) strand; PAM type: NRG; PAM sequence: AAG
gtcccagaatcaaggggtgg

SEQ ID NO: 106728 - DNA, 20 bp, Artificial Sequence
  Description of Artificial Sequence: Synthetic oligonucleotide
  Target: LAMA2; (-) strand; PAM type: NRG; PAM sequence: TGG
cgtgtcccagaatcaagggg

SEQ ID NO: 106729 - DNA, 20 bp, Artificial Sequence
  Description of Artificial Sequence: Synthetic oligonucleotide
  Target: LAMA2; (-) strand; PAM type: NRG; PAM sequence: GGG
tcacgtgtcccagaatcaag

SEQ ID NO: 106730 - DNA, 20 bp, Artificial Sequence
  Description of Artificial Sequence: Synthetic oligonucleotide
  Target: LAMA2; (-) strand; PAM type: NRG; PAM sequence: GGG
ttcacgtgtcccagaatcaa

SEQ ID NO: 106731 - DNA, 20 bp, Artificial Sequence
  Description of Artificial Sequence: Synthetic oligonucleotide
  Target: LAMA2; (-) strand; PAM type: NRG; PAM sequence: AGG
gttcacgtgtcccagaatca

SEQ ID NO: 106732 - DNA, 20 bp, Artificial Sequence
  Description of Artificial Sequence: Synthetic oligonucleotide
  Target: LAMA2; (-) strand; PAM type: NRG; PAM sequence: AAG
tgttcacgtgtcccagaatc

SEQ ID NO: 106733 - DNA, 20 bp, Artificial Sequence
  Description of Artificial Sequence: Synthetic oligonucleotide
  Target: LAMA2; (-) strand; PAM type: NRG; PAM sequence: CAG
tagccagtgttcacgtgtcc

SEQ ID NO: 106734 - DNA, 20 bp, Artificial Sequence
  Description of Artificial Sequence: Synthetic oligonucleotide
  Target: LAMA2; (-) strand; PAM type: NRG; PAM sequence: CAG
ggtactgtttctcccatagc

SEQ ID NO: 106735 - DNA, 20 bp, Artificial Sequence
  Description of Artificial Sequence: Synthetic oligonucleotide
  Target: LAMA2; (-) strand; PAM type: NRG; PAM sequence: TAG
atatggtactgtttctccca

SEQ ID NO: 106736 - DNA, 20 bp, Artificial Sequence
  Description of Artificial Sequence: Synthetic oligonucleotide
  Target: LAMA2; (-) strand; PAM type: NRG; PAM sequence: TGG
ttgaatcagtgtccaaaata

SEQ ID NO: 106737 - DNA, 20 bp, Artificial Sequence
  Description of Artificial Sequence: Synthetic oligonucleotide
  Target: LAMA2; (-) strand; PAM type: NRG; PAM sequence: CAG
aggctgtgtatgccttgaat

SEQ ID NO: 106738 - DNA, 20 bp, Artificial Sequence
  Description of Artificial Sequence: Synthetic oligonucleotide
  Target: LAMA2; (-) strand; PAM type: NRG; PAM sequence: AGG
ctggggcaaagttctccaga

SEQ ID NO: 106739 - DNA, 20 bp, Artificial Sequence
  Description of Artificial Sequence: Synthetic oligonucleotide
  Target: LAMA2; (-) strand; PAM type: NRG; PAM sequence: AAG
actggggcaaagttctccag

SEQ ID NO: 106740 - DNA, 20 bp, Artificial Sequence
  Description of Artificial Sequence: Synthetic oligonucleotide
  Target: LAMA2; (-) strand; PAM type: NRG; PAM sequence: CAG
cggactggggcaaagttctc

SEQ ID NO: 106741 - DNA, 20 bp, Artificial Sequence
  Description of Artificial Sequence: Synthetic oligonucleotide
  Target: LAMA2; (-) strand; PAM type: NRG; PAM sequence: AAG
tactttgccggactggggca

SEQ ID NO: 106742 - DNA, 20 bp, Artificial Sequence
  Description of Artificial Sequence: Synthetic oligonucleotide
  Target: LAMA2; (-) strand; PAM type: NRG; PAM sequence: GGG
gacaatactttgccggactg

SEQ ID NO: 106743 - DNA, 20 bp, Artificial Sequence
  Description of Artificial Sequence: Synthetic oligonucleotide
  Target: LAMA2; (-) strand; PAM type: NRG; PAM sequence: GGG
tgacaatactttgccggact

SEQ ID NO: 106744 - DNA, 20 bp, Artificial Sequence
  Description of Artificial Sequence: Synthetic oligonucleotide
  Target: LAMA2; (-) strand; PAM type: NRG; PAM sequence: TGG
gtgacaatactttgccggac

SEQ ID NO: 106745 - DNA, 20 bp, Artificial Sequence
  Description of Artificial Sequence: Synthetic oligonucleotide
  Target: LAMA2; (-) strand; PAM type: NRG; PAM sequence: CGG
actaggtgacaatactttgc

SEQ ID NO: 106746 - DNA, 20 bp, Artificial Sequence
  Description of Artificial Sequence: Synthetic oligonucleotide
  Target: LAMA2; (-) strand; PAM type: NRG; PAM sequence: AGG
tcataattacaatgccaact

SEQ ID NO: 106747 - DNA, 20 bp, Artificial Sequence
  Description of Artificial Sequence: Synthetic oligonucleotide
  Target: LAMA2; (-) strand; PAM type: NRG; PAM sequence: TAG
gtcataattacaatgccaac

SEQ ID NO: 106748 - DNA, 20 bp, Artificial Sequence
  Description of Artificial Sequence: Synthetic oligonucleotide
  Target: LAMA2; (-) strand; PAM type: NRG; PAM sequence: AAG
aattgtggaatgcccttttg

SEQ ID NO: 106749 - DNA, 20 bp, Artificial Sequence
  Description of Artificial Sequence: Synthetic oligonucleotide
  Target: LAMA2; (-) strand; PAM type: NRG; PAM sequence: TGG
caggtggattgatagaattg

SEQ ID NO: 106750 - DNA, 20 bp, Artificial Sequence
  Description of Artificial Sequence: Synthetic oligonucleotide
  Target: LAMA2; (-) strand; PAM type: NRG; PAM sequence: TAG
tcctgaagcaggtggattga

SEQ ID NO: 106751 - DNA, 20 bp, Artificial Sequence
  Description of Artificial Sequence: Synthetic oligonucleotide
  Target: LAMA2; (-) strand; PAM type: NRG; PAM sequence: TGG
tcccatcatcctgaagcagg

SEQ ID NO: 106752 - DNA, 20 bp, Artificial Sequence
  Description of Artificial Sequence: Synthetic oligonucleotide
  Target: LAMA2; (-) strand; PAM type: NRG; PAM sequence: AGG
gtttcccatcatcctgaagc

SEQ ID NO: 106753 - DNA, 20 bp, Artificial Sequence
  Description of Artificial Sequence: Synthetic oligonucleotide
  Target: LAMA2; (-) strand; PAM type: NRG; PAM sequence: CAG
tgtttcccatcatcctgaag

SEQ ID NO: 106754 - DNA, 20 bp, Artificial Sequence
  Description of Artificial Sequence: Synthetic oligonucleotide
  Target: LAMA2; (-) strand; PAM type: NRG; PAM sequence: AAG
tcatgtttcccatcatcctg

SEQ ID NO: 106755 - DNA, 20 bp, Artificial Sequence
  Description of Artificial Sequence: Synthetic oligonucleotide
  Target: LAMA2; (-) strand; PAM type: NRG; PAM sequence: TGG
ctcatgctcatggaattcac

SEQ ID NO: 106756 - DNA, 20 bp, Artificial Sequence
  Description of Artificial Sequence: Synthetic oligonucleotide
  Target: LAMA2; (-) strand; PAM type: NRG; PAM sequence: TGG
cagcactgggctcatgctca

SEQ ID NO: 106757 - DNA, 20 bp, Artificial Sequence
  Description of Artificial Sequence: Synthetic oligonucleotide
  Target: LAMA2; (-) strand; PAM type: NRG; PAM sequence: GGG
agctaaagaagtgcagcact

SEQ ID NO: 106758 - DNA, 20 bp, Artificial Sequence
  Description of Artificial Sequence: Synthetic oligonucleotide
  Target: LAMA2; (-) strand; PAM type: NRG; PAM sequence: TGG
cagctaaagaagtgcagcac

SEQ ID NO: 106759 - DNA, 20 bp, Artificial Sequence
  Description of Artificial Sequence: Synthetic oligonucleotide
  Target: LAMA2; (-) strand; PAM type: NRG; PAM sequence: CAG
actttacagctaaagaagtg

SEQ ID NO: 106760 - DNA, 20 bp, Artificial Sequence
  Description of Artificial Sequence: Synthetic oligonucleotide
  Target: LAMA2; (-) strand; PAM type: NRG; PAM sequence: AAG
cactcactttacagctaaag

SEQ ID NO: 106761 - DNA, 20 bp, Artificial Sequence
  Description of Artificial Sequence: Synthetic oligonucleotide
  Target: LAMA2; (-) strand; PAM type: NRG; PAM sequence: AAG
aggcactcactttacagcta

SEQ ID NO: 106762 - DNA, 20 bp, Artificial Sequence
  Description of Artificial Sequence: Synthetic oligonucleotide
  Target: LAMA2; (-) strand; PAM type: NRG; PAM sequence: CAG
tgaacaaggcactcacttta

SEQ ID NO: 106763 - DNA, 20 bp, Artificial Sequence
  Description of Artificial Sequence: Synthetic oligonucleotide
  Target: LAMA2; (-) strand; PAM type: NRG; PAM sequence: AGG
cacagcattgcctctgaaca

SEQ ID NO: 106764 - DNA, 20 bp, Artificial Sequence
  Description of Artificial Sequence: Synthetic oligonucleotide
  Target: LAMA2; (-) strand; PAM type: NRG; PAM sequence: AAG
acacagcattgcctctgaac

SEQ ID NO: 106765 - DNA, 20 bp, Artificial Sequence
  Description of Artificial Sequence: Synthetic oligonucleotide
  Target: LAMA2; (-) strand; PAM type: NRG; PAM sequence: CAG
cgctgtcatggtattccaca

SEQ ID NO: 106766 - DNA, 20 bp, Artificial Sequence
  Description of Artificial Sequence: Synthetic oligonucleotide
  Target: LAMA2; (-) strand; PAM type: NRG; PAM sequence: TGG
gaatgccttattcgctgtca

SEQ ID NO: 106767 - DNA, 20 bp, Artificial Sequence
  Description of Artificial Sequence: Synthetic oligonucleotide
  Target: LAMA2; (-) strand; PAM type: NRG; PAM sequence: CAG
gagtaccatccgtgaactcc

SEQ ID NO: 106768 - DNA, 20 bp, Artificial Sequence
  Description of Artificial Sequence: Synthetic oligonucleotide
  Target: LAMA2; (-) strand; PAM type: NRG; PAM sequence: GAG
acgcccaatgtttctgccaa

SEQ ID NO: 106769 - DNA, 20 bp, Artificial Sequence
  Description of Artificial Sequence: Synthetic oligonucleotide
  Target: LAMA2; (-) strand; PAM type: NRG; PAM sequence: AAG
ctacgcccaatgtttctgcc

SEQ ID NO: 106770 - DNA, 20 bp, Artificial Sequence
  Description of Artificial Sequence: Synthetic oligonucleotide
  Target: LAMA2; (-) strand; PAM type: NRG; PAM sequence: TGG
ataggcacttattctggata

SEQ ID NO: 106771 - DNA, 20 bp, Artificial Sequence
  Description of Artificial Sequence: Synthetic oligonucleotide
  Target: LAMA2; (-) strand; PAM type: NRG; PAM sequence: TGG
aatggaataggcacttattc

SEQ ID NO: 106772 - DNA, 20 bp, Artificial Sequence
  Description of Artificial Sequence: Synthetic oligonucleotide
  Target: LAMA2; (-) strand; PAM type: NRG; PAM sequence: AGG
aggtttgtcctcaatggaat

SEQ ID NO: 106773 - DNA, 20 bp, Artificial Sequence
  Description of Artificial Sequence: Synthetic oligonucleotide
  Target: LAMA2; (-) strand; PAM type: NRG; PAM sequence: TAG
gaggtttgtcctcaatggaa

SEQ ID NO: 106774 - DNA, 20 bp, Artificial Sequence
  Description of Artificial Sequence: Synthetic oligonucleotide
  Target: LAMA2; (-) strand; PAM type: NRG; PAM sequence: TGG
aggcagaggtttgtcctcaa

SEQ ID NO: 106775 - DNA, 20 bp, Artificial Sequence
  Description of Artificial Sequence: Synthetic oligonucleotide
  Target: LAMA2; (-) strand; PAM type: NRG; PAM sequence: AGG
cttccatcatgcaaaggcag

SEQ ID NO: 106776 - DNA, 20 bp, Artificial Sequence
  Description of Artificial Sequence: Synthetic oligonucleotide
  Target: LAMA2; (-) strand; PAM type: NRG; PAM sequence: GAG
tcttccatcatgcaaaggca

SEQ ID NO: 106777 - DNA, 20 bp, Artificial Sequence
  Description of Artificial Sequence: Synthetic oligonucleotide
  Target: LAMA2; (-) strand; PAM type: NRG; PAM sequence: CAG
cctcttccatcatgcaaagg

SEQ ID NO: 106778 - DNA, 20 bp, Artificial Sequence
  Description of Artificial Sequence: Synthetic oligonucleotide
  Target: LAMA2; (-) strand; PAM type: NRG; PAM sequence: AGG
agacctcttccatcatgcaa

SEQ ID NO: 106779 - DNA, 20 bp, Artificial Sequence
  Description of Artificial Sequence: Synthetic oligonucleotide
  Target: LAMA2; (-) strand; PAM type: NRG; PAM sequence: AAG
cagacctcttccatcatgca

SEQ ID NO: 106780 - DNA, 20 bp, Artificial Sequence
  Description of Artificial Sequence: Synthetic oligonucleotide
  Target: LAMA2; (-) strand; PAM type: NRG; PAM sequence: CAG
tggtggcaggttgattatat

SEQ ID NO: 106781 - DNA, 20 bp, Artificial Sequence
  Description of Artificial Sequence: Synthetic oligonucleotide
  Target: LAMA2; (-) strand; PAM type: NRG; PAM sequence: AGG
tcagccagcttcttggtggc

SEQ ID NO: 106782 - DNA, 20 bp, Artificial Sequence
  Description of Artificial Sequence: Synthetic oligonucleotide
  Target: LAMA2; (-) strand; PAM type: NRG; PAM sequence: CAG
atcagccagcttcttggtgg

SEQ ID NO: 106783 - DNA, 20 bp, Artificial Sequence
  Description of Artificial Sequence: Synthetic oligonucleotide
  Target: LAMA2; (-) strand; PAM type: NRG; PAM sequence: TGG
gtgatcagccagcttcttgg

SEQ ID NO: 106784 - DNA, 20 bp, Artificial Sequence
  Description of Artificial Sequence: Synthetic oligonucleotide
  Target: LAMA2; (-) strand; PAM type: NRG; PAM sequence: TGG
agggtgatcagccagcttct

SEQ ID NO: 106785 - DNA, 20 bp, Artificial Sequence
  Description of Artificial Sequence: Synthetic oligonucleotide
  Target: LAMA2; (-) strand; PAM type: NRG; PAM sequence: CAG
ccttcctcagggtgatcagc

SEQ ID NO: 106786 - DNA, 20 bp, Artificial Sequence
  Description of Artificial Sequence: Synthetic oligonucleotide
  Target: LAMA2; (-) strand; PAM type: NRG; PAM sequence: CAG
gcatccttcctcagggtgat

SEQ ID NO: 106787 - DNA, 20 bp, Artificial Sequence
  Description of Artificial Sequence: Synthetic oligonucleotide
  Target: LAMA2; (-) strand; PAM type: NRG; PAM sequence: GGG
ccgtctggcatccttcctca

SEQ ID NO: 106788 - DNA, 20 bp, Artificial Sequence
  Description of Artificial Sequence: Synthetic oligonucleotide
  Target: LAMA2; (-) strand; PAM type: NRG; PAM sequence: AGG
tccgtctggcatccttcctc

SEQ ID NO: 106789 - DNA, 20 bp, Artificial Sequence
  Description of Artificial Sequence: Synthetic oligonucleotide
  Target: LAMA2; (-) strand; PAM type: NRG; PAM sequence: CAG
ctccgtctggcatccttcct

SEQ ID NO: 106790 - DNA, 20 bp, Artificial Sequence
  Description of Artificial Sequence: Synthetic oligonucleotide
  Target: LAMA2; (-) strand; PAM type: NRG; PAM sequence: TGG
ccaacactgagccctccgtc

SEQ ID NO: 106791 - DNA, 20 bp, Artificial Sequence
  Description of Artificial Sequence: Synthetic oligonucleotide
  Target: LAMA2; (-) strand; PAM type: NRG; PAM sequence: GAG
cagcagcagaaaccaacact

SEQ ID NO: 106792 - DNA, 20 bp, Artificial Sequence
  Description of Artificial Sequence: Synthetic oligonucleotide
  Target: LAMA2; (-) strand; PAM type: NRG; PAM sequence: CAG
agtgcccaatttgccagcag

SEQ ID NO: 106793 - DNA, 20 bp, Artificial Sequence
  Description of Artificial Sequence: Synthetic oligonucleotide
  Target: LAMA2; (-) strand; PAM type: NRG; PAM sequence: CAG
ctgagtgcccaatttgccag

SEQ ID NO: 106794 - DNA, 20 bp, Artificial Sequence
  Description of Artificial Sequence: Synthetic oligonucleotide
  Target: LAMA2; (-) strand; PAM type: NRG; PAM sequence: CAG
ccgctgagtgcccaatttgc

SEQ ID NO: 106795 - DNA, 20 bp, Artificial Sequence
  Description of Artificial Sequence: Synthetic oligonucleotide
  Target: LAMA2; (-) strand; PAM type: NRG; PAM sequence: GAG
acctgactatagccaccgct

SEQ ID NO: 106796 - DNA, 20 bp, Artificial Sequence
  Description of Artificial Sequence: Synthetic oligonucleotide
  Target: LAMA2; (-) strand; PAM type: NRG; PAM sequence: TAG
aacatggactgacctgacta

SEQ ID NO: 106797 - DNA, 20 bp, Artificial Sequence
  Description of Artificial Sequence: Synthetic oligonucleotide
  Target: LAMA2; (-) strand; PAM type: NRG; PAM sequence: TGG
tatgcataggctcagcaaca

SEQ ID NO: 106798 - DNA, 20 bp, Artificial Sequence
  Description of Artificial Sequence: Synthetic oligonucleotide
  Target: LAMA2; (-) strand; PAM type: NRG; PAM sequence: CAG
atggaggttatgcataggct

SEQ ID NO: 106799 - DNA, 20 bp, Artificial Sequence
  Description of Artificial Sequence: Synthetic oligonucleotide
  Target: LAMA2; (-) strand; PAM type: NRG; PAM sequence: AGG
caggaatggaggttatgcat

SEQ ID NO: 106800 - DNA, 20 bp, Artificial Sequence
  Description of Artificial Sequence: Synthetic oligonucleotide
  Target: LAMA2; (-) strand; PAM type: NRG; PAM sequence: TAG
gcaggaatggaggttatgca

SEQ ID NO: 106801 - DNA, 20 bp, Artificial Sequence
  Description of Artificial Sequence: Synthetic oligonucleotide
  Target: LAMA2; (-) strand; PAM type: NRG; PAM sequence: AGG
ggccatggtggcaggaatgg

SEQ ID NO: 106802 - DNA, 20 bp, Artificial Sequence
  Description of Artificial Sequence: Synthetic oligonucleotide
  Target: LAMA2; (-) strand; PAM type: NRG; PAM sequence: GAG
tggccatggtggcaggaatg

SEQ ID NO: 106803 - DNA, 20 bp, Artificial Sequence
  Description of Artificial Sequence: Synthetic oligonucleotide
  Target: LAMA2; (-) strand; PAM type: NRG; PAM sequence: TGG
agtggccatggtggcaggaa

SEQ ID NO: 106804 - DNA, 20 bp, Artificial Sequence
  Description of Artificial Sequence: Synthetic oligonucleotide
  Target: LAMA2; (-) strand; PAM type: NRG; PAM sequence: AGG
aacaaagtggccatggtggc

SEQ ID NO: 106805 - DNA, 20 bp, Artificial Sequence
  Description of Artificial Sequence: Synthetic oligonucleotide
  Target: LAMA2; (-) strand; PAM type: NRG; PAM sequence: CAG
gaacaaagtggccatggtgg

SEQ ID NO: 106806 - DNA, 20 bp, Artificial Sequence
  Description of Artificial Sequence: Synthetic oligonucleotide
  Target: LAMA2; (-) strand; PAM type: NRG; PAM sequence: TGG
catgaacaaagtggccatgg

SEQ ID NO: 106807 - DNA, 20 bp, Artificial Sequence
  Description of Artificial Sequence: Synthetic oligonucleotide
  Target: LAMA2; (-) strand; PAM type: NRG; PAM sequence: TGG
gctcatgaacaaagtggcca

SEQ ID NO: 106808 - DNA, 20 bp, Artificial Sequence
  Description of Artificial Sequence: Synthetic oligonucleotide
  Target: LAMA2; (-) strand; PAM type: NRG; PAM sequence: TGG
caatgggctcatgaacaaag

SEQ ID NO: 106809 - DNA, 20 bp, Artificial Sequence
  Description of Artificial Sequence: Synthetic oligonucleotide
  Target: LAMA2; (-) strand; PAM type: NRG; PAM sequence: AAG
gctcaatgggctcatgaaca

SEQ ID NO: 106810 - DNA, 20 bp, Artificial Sequence
  Description of Artificial Sequence: Synthetic oligonucleotide
  Target: LAMA2; (-) strand; PAM type: NRG; PAM sequence: GGG
ccaccctgtcatcgctcaat

SEQ ID NO: 106811 - DNA, 20 bp, Artificial Sequence
  Description of Artificial Sequence: Synthetic oligonucleotide
  Target: LAMA2; (-) strand; PAM type: NRG; PAM sequence: TGG
gccaccctgtcatcgctcaa

SEQ ID NO: 106812 - DNA, 20 bp, Artificial Sequence
  Description of Artificial Sequence: Synthetic oligonucleotide
  Target: LAMA2; (-) strand; PAM type: NRG; PAM sequence: CAG
caccactcagcctctttccc

SEQ ID NO: 106813 - DNA, 20 bp, Artificial Sequence
  Description of Artificial Sequence: Synthetic oligonucleotide
  Target: LAMA2; (-) strand; PAM type: NRG; PAM sequence: CAG
ctcattctgtgtacaccact

SEQ ID NO: 106814 - DNA, 20 bp, Artificial Sequence
  Description of Artificial Sequence: Synthetic oligonucleotide
  Target: LAMA2; (-) strand; PAM type: NRG; PAM sequence: AGG
attttaataatcaagtggat

SEQ ID NO: 106815 - DNA, 20 bp, Artificial Sequence
  Description of Artificial Sequence: Synthetic oligonucleotide
  Target: LAMA2; (-) strand; PAM type: NRG; PAM sequence: TAG
gattttaataatcaagtgga

SEQ ID NO: 106816 - DNA, 20 bp, Artificial Sequence
  Description of Artificial Sequence: Synthetic oligonucleotide
  Target: LAMA2; (-) strand; PAM type: NRG; PAM sequence: TGG
ggaggattttaataatcaag

SEQ ID NO: 106817 - DNA, 20 bp, Artificial Sequence
  Description of Artificial Sequence: Synthetic oligonucleotide
  Target: LAMA2; (-) strand; PAM type: NRG; PAM sequence: AAG
tgaggaggattttaataatc

SEQ ID NO: 106818 - DNA, 20 bp, Artificial Sequence
  Description of Artificial Sequence: Synthetic oligonucleotide
  Target: LAMA2; (-) strand; PAM type: NRG; PAM sequence: AGG
acgggtgacctcagctgagg

SEQ ID NO: 106819 - DNA, 20 bp, Artificial Sequence
  Description of Artificial Sequence: Synthetic oligonucleotide
  Target: LAMA2; (-) strand; PAM type: NRG; PAM sequence: GAG
aacgggtgacctcagctgag

SEQ ID NO: 106820 - DNA, 20 bp, Artificial Sequence
  Description of Artificial Sequence: Synthetic oligonucleotide
  Target: LAMA2; (-) strand; PAM type: NRG; PAM sequence: AGG
ccaacgggtgacctcagctg

SEQ ID NO: 106821 - DNA, 20 bp, Artificial Sequence
  Description of Artificial Sequence: Synthetic oligonucleotide
  Target: LAMA2; (-) strand; PAM type: NRG; PAM sequence: GAG
accaacgggtgacctcagct

SEQ ID NO: 106822 - DNA, 20 bp, Artificial Sequence
  Description of Artificial Sequence: Synthetic oligonucleotide
  Target: LAMA2; (-) strand; PAM type: NRG; PAM sequence: CAG
tgctcaccaacgggtgacct

SEQ ID NO: 106823 - DNA, 20 bp, Artificial Sequence
  Description of Artificial Sequence: Synthetic oligonucleotide
  Target: LAMA2; (-) strand; PAM type: NRG; PAM sequence: GGG
ctatgtgagtgctcaccaac

SEQ ID NO: 106824 - DNA, 20 bp, Artificial Sequence
  Description of Artificial Sequence: Synthetic oligonucleotide
  Target: LAMA2; (-) strand; PAM type: NRG; PAM sequence: CGG
cctatgtgagtgctcaccaa

SEQ ID NO: 106825 - DNA, 20 bp, Artificial Sequence
  Description of Artificial Sequence: Synthetic oligonucleotide
  Target: LAMA2; (-) strand; PAM type: NRG; PAM sequence: GAG
aagatatttgtatcctatgt

SEQ ID NO: 106826 - DNA, 20 bp, Artificial Sequence
  Description of Artificial Sequence: Synthetic oligonucleotide
  Target: LAMA2; (-) strand; PAM type: NRG; PAM sequence: AAG
ctgagtggtcaaaaactgtg

SEQ ID NO: 106827 - DNA, 20 bp, Artificial Sequence
  Description of Artificial Sequence: Synthetic oligonucleotide
  Target: LAMA2; (-) strand; PAM type: NRG; PAM sequence: TGG
tgtggatggacctctctgag

SEQ ID NO: 106828 - DNA, 20 bp, Artificial Sequence
  Description of Artificial Sequence: Synthetic oligonucleotide
  Target: LAMA2; (-) strand; PAM type: NRG; PAM sequence: GAG
gtatgtggatggacctctct

SEQ ID NO: 106829 - DNA, 20 bp, Artificial Sequence
  Description of Artificial Sequence: Synthetic oligonucleotide
  Target: LAMA2; (-) strand; PAM type: NRG; PAM sequence: TGG
ctggggaagaggtatgtgga

SEQ ID NO: 106830 - DNA, 20 bp, Artificial Sequence
  Description of Artificial Sequence: Synthetic oligonucleotide
  Target: LAMA2; (-) strand; PAM type: NRG; PAM sequence: TGG
taatctggggaagaggtatg

SEQ ID NO: 106831 - DNA, 20 bp, Artificial Sequence
  Description of Artificial Sequence: Synthetic oligonucleotide
  Target: LAMA2; (-) strand; PAM type: NRG; PAM sequence: AGG
ggcaaagtaatctggggaag

SEQ ID NO: 106832 - DNA, 20 bp, Artificial Sequence
  Description of Artificial Sequence: Synthetic oligonucleotide
  Target: LAMA2; (-) strand; PAM type: NRG; PAM sequence: GAG
tggcaaagtaatctggggaa

SEQ ID NO: 106833 - DNA, 20 bp, Artificial Sequence
  Description of Artificial Sequence: Synthetic oligonucleotide
  Target: LAMA2; (-) strand; PAM type: NRG; PAM sequence: AAG
ggtggcaaagtaatctgggg

SEQ ID NO: 106834 - DNA, 20 bp, Artificial Sequence
  Description of Artificial Sequence: Synthetic oligonucleotide
  Target: LAMA2; (-) strand; PAM type: NRG; PAM sequence: GGG
attggtggcaaagtaatctg

SEQ ID NO: 106835 - DNA, 20 bp, Artificial Sequence
  Description of Artificial Sequence: Synthetic oligonucleotide
  Target: LAMA2; (-) strand; PAM type: NRG; PAM sequence: GGG
aattggtggcaaagtaatct

SEQ ID NO: 106836 - DNA, 20 bp, Artificial Sequence
  Description of Artificial Sequence: Synthetic oligonucleotide
  Target: LAMA2; (-) strand; PAM type: NRG; PAM sequence: TGG
aaattggtggcaaagtaatc

SEQ ID NO: 106837 - DNA, 20 bp, Artificial Sequence
  Description of Artificial Sequence: Synthetic oligonucleotide
  Target: LAMA2; (-) strand; PAM type: NRG; PAM sequence: AAG
tgattaaaaaattggtggca

SEQ ID NO: 106838 - DNA, 20 bp, Artificial Sequence
  Description of Artificial Sequence: Synthetic oligonucleotide
  Target: LAMA2; (-) strand; PAM type: NRG; PAM sequence: TGG
aagcatgattaaaaaattgg

SEQ ID NO: 106839 - DNA, 20 bp, Artificial Sequence
  Description of Artificial Sequence: Synthetic oligonucleotide
  Target: LAMA2; (-) strand; PAM type: NRG; PAM sequence: TGG
aagaagcatgattaaaaaat

SEQ ID NO: 106840 - DNA, 20 bp, Artificial Sequence
  Description of Artificial Sequence: Synthetic oligonucleotide
  Target: LAMA2; (-) strand; PAM type: NRG; PAM sequence: AAG
gatggtcagggacttggaag

SEQ ID NO: 106841 - DNA, 20 bp, Artificial Sequence
  Description of Artificial Sequence: Synthetic oligonucleotide
  Target: LAMA2; (-) strand; PAM type: NRG; PAM sequence: AAG
ctggatggtcagggacttgg

SEQ ID NO: 106842 - DNA, 20 bp, Artificial Sequence
  Description of Artificial Sequence: Synthetic oligonucleotide
  Target: LAMA2; (-) strand; PAM type: NRG; PAM sequence: TGG
tggctggatggtcagggact

SEQ ID NO: 106843 - DNA, 20 bp, Artificial Sequence
  Description of Artificial Sequence: Synthetic oligonucleotide
  Target: LAMA2; (-) strand; PAM type: NRG; PAM sequence: GGG
atggtttggctggatggtca

SEQ ID NO: 106844 - DNA, 20 bp, Artificial Sequence
  Description of Artificial Sequence: Synthetic oligonucleotide
  Target: LAMA2; (-) strand; PAM type: NRG; PAM sequence: AGG
aatggtttggctggatggtc

SEQ ID NO: 106845 - DNA, 20 bp, Artificial Sequence
  Description of Artificial Sequence: Synthetic oligonucleotide
  Target: LAMA2; (-) strand; PAM type: NRG; PAM sequence: CAG
caatggtttggctggatggt

SEQ ID NO: 106846 - DNA, 20 bp, Artificial Sequence
  Description of Artificial Sequence: Synthetic oligonucleotide
  Target: LAMA2; (-) strand; PAM type: NRG; PAM sequence: TGG
tagccaatggtttggctgga

SEQ ID NO: 106847 - DNA, 20 bp, Artificial Sequence
  Description of Artificial Sequence: Synthetic oligonucleotide
  Target: LAMA2; (-) strand; PAM type: NRG; PAM sequence: TGG
gctgtagccaatggtttggc

SEQ ID NO: 106848 - DNA, 20 bp, Artificial Sequence
  Description of Artificial Sequence: Synthetic oligonucleotide
  Target: LAMA2; (-) strand; PAM type: NRG; PAM sequence: TGG
atgtgctgtagccaatggtt

SEQ ID NO: 106849 - DNA, 20 bp, Artificial Sequence
  Description of Artificial Sequence: Synthetic oligonucleotide
  Target: LAMA2; (-) strand; PAM type: NRG; PAM sequence: TGG
aattaatgtgctgtagccaa

SEQ ID NO: 106850 - DNA, 20 bp, Artificial Sequence
  Description of Artificial Sequence: Synthetic oligonucleotide
  Target: LAMA2; (-) strand; PAM type: NRG; PAM sequence: TAG
atatactaattaatgtgctg

SEQ ID NO: 106851 - DNA, 20 bp, Artificial Sequence
  Description of Artificial Sequence: Synthetic oligonucleotide
  Target: LAMA2; (-) strand; PAM type: NRG; PAM sequence: CAG
tgcttggaagaagaaatggc

SEQ ID NO: 106852 - DNA, 20 bp, Artificial Sequence
  Description of Artificial Sequence: Synthetic oligonucleotide
  Target: LAMA2; (-) strand; PAM type: NRG; PAM sequence: TGG
cacttgcttggaagaagaaa

SEQ ID NO: 106853 - DNA, 20 bp, Artificial Sequence
  Description of Artificial Sequence: Synthetic oligonucleotide
  Target: LAMA2; (-) strand; PAM type: NRG; PAM sequence: AAG
gttgtgcacttgcttggaag

SEQ ID NO: 106854 - DNA, 20 bp, Artificial Sequence
  Description of Artificial Sequence: Synthetic oligonucleotide
  Target: LAMA2; (-) strand; PAM type: NRG; PAM sequence: AAG
ctggttgtgcacttgcttgg

SEQ ID NO: 106855 - DNA, 20 bp, Artificial Sequence
  Description of Artificial Sequence: Synthetic oligonucleotide
  Target: LAMA2; (-) strand; PAM type: NRG; PAM sequence: TGG
cacctggttgtgcacttgct

SEQ ID NO: 106856 - DNA, 20 bp, Artificial Sequence
  Description of Artificial Sequence: Synthetic oligonucleotide
  Target: LAMA2; (-) strand; PAM type: NRG; PAM sequence: TGG
agaattttgagcagggcacc

SEQ ID NO: 106857 - DNA, 20 bp, Artificial Sequence
  Description of Artificial Sequence: Synthetic oligonucleotide
  Target: LAMA2; (-) strand; PAM type: NRG; PAM sequence: GGG
agggggcagaattttgagca

SEQ ID NO: 106858 - DNA, 20 bp, Artificial Sequence
  Description of Artificial Sequence: Synthetic oligonucleotide
  Target: LAMA2; (-) strand; PAM type: NRG; PAM sequence: AGG
cagggggcagaattttgagc

SEQ ID NO: 106859 - DNA, 20 bp, Artificial Sequence
  Description of Artificial Sequence: Synthetic oligonucleotide
  Target: LAMA2; (-) strand; PAM type: NRG; PAM sequence: CAG
ccagggggcagaattttgag

SEQ ID NO: 106860 - DNA, 20 bp, Artificial Sequence
  Description of Artificial Sequence: Synthetic oligonucleotide
  Target: LAMA2; (-) strand; PAM type: NRG; PAM sequence: GAG
ttcccagggggcagaatttt

SEQ ID NO: 106861 - DNA, 20 bp, Artificial Sequence
  Description of Artificial Sequence: Synthetic oligonucleotide
  Target: LAMA2; (-) strand; PAM type: NRG; PAM sequence: CAG
agggaagtcttcccaggggg

SEQ ID NO: 106862 - DNA, 20 bp, Artificial Sequence
  Description of Artificial Sequence: Synthetic oligonucleotide
  Target: LAMA2; (-) strand; PAM type: NRG; PAM sequence: GGG
caaagggaagtcttcccagg

SEQ ID NO: 106863 - DNA, 20 bp, Artificial Sequence
  Description of Artificial Sequence: Synthetic oligonucleotide
  Target: LAMA2; (-) strand; PAM type: NRG; PAM sequence: GGG
gcaaagggaagtcttcccag

SEQ ID NO: 106864 - DNA, 20 bp, Artificial Sequence
  Description of Artificial Sequence: Synthetic oligonucleotide
  Target: LAMA2; (-) strand; PAM type: NRG; PAM sequence: GGG
agcaaagggaagtcttccca

SEQ ID NO: 106865 - DNA, 20 bp, Artificial Sequence
  Description of Artificial Sequence: Synthetic oligonucleotide
  Target: LAMA2; (-) strand; PAM type: NRG; PAM sequence: AGG
tagcaaagggaagtcttccc

SEQ ID NO: 106866 - DNA, 20 bp, Artificial Sequence
  Description of Artificial Sequence: Synthetic oligonucleotide
  Target: LAMA2; (-) strand; PAM type: NRG; PAM sequence: CAG
gtagcaaagggaagtcttcc

SEQ ID NO: 106867 - DNA, 20 bp, Artificial Sequence
  Description of Artificial Sequence: Synthetic oligonucleotide
  Target: LAMA2; (-) strand; PAM type: NRG; PAM sequence: AAG
tgaaggacagtagcaaaggg

SEQ ID NO: 106868 - DNA, 20 bp, Artificial Sequence
  Description of Artificial Sequence: Synthetic oligonucleotide
  Target: LAMA2; (-) strand; PAM type: NRG; PAM sequence: GGG
ccctgaaggacagtagcaaa

SEQ ID NO: 106869 - DNA, 20 bp, Artificial Sequence
  Description of Artificial Sequence: Synthetic oligonucleotide
  Target: LAMA2; (-) strand; PAM type: NRG; PAM sequence: AGG
tccctgaaggacagtagcaa

SEQ ID NO: 106870 - DNA, 20 bp, Artificial Sequence
  Description of Artificial Sequence: Synthetic oligonucleotide
  Target: LAMA2; (-) strand; PAM type: NRG; PAM sequence: AAG
atccctgaaggacagtagca

SEQ ID NO: 106871 - DNA, 20 bp, Artificial Sequence
  Description of Artificial Sequence: Synthetic oligonucleotide
  Target: LAMA2; (-) strand; PAM type: NRG; PAM sequence: TAG
aggacatccctgaaggacag

SEQ ID NO: 106872 - DNA, 20 bp, Artificial Sequence
  Description of Artificial Sequence: Synthetic oligonucleotide
  Target: LAMA2; (-) strand; PAM type: NRG; PAM sequence: CAG
tctaggacatccctgaagga

SEQ ID NO: 106873 - DNA, 20 bp, Artificial Sequence
  Description of Artificial Sequence: Synthetic oligonucleotide
  Target: LAMA2; (-) strand; PAM type: NRG; PAM sequence: AGG
cctttctaggacatccctga

SEQ ID NO: 106874 - DNA, 20 bp, Artificial Sequence
  Description of Artificial Sequence: Synthetic oligonucleotide
  Target: LAMA2; (-) strand; PAM type: NRG; PAM sequence: AAG
ccctttctaggacatccctg

SEQ ID NO: 106875 - DNA, 20 bp, Artificial Sequence
  Description of Artificial Sequence: Synthetic oligonucleotide
  Target: LAMA2; (-) strand; PAM type: NRG; PAM sequence: AGG
cagcactacagcccctttct

SEQ ID NO: 106876 - DNA, 20 bp, Artificial Sequence
  Description of Artificial Sequence: Synthetic oligonucleotide
  Target: LAMA2; (-) strand; PAM type: NRG; PAM sequence: TAG
gcagcactacagcccctttc

SEQ ID NO: 106877 - DNA, 20 bp, Artificial Sequence
  Description of Artificial Sequence: Synthetic oligonucleotide
  Target: LAMA2; (-) strand; PAM type: NRG; PAM sequence: CAG
agtggacagctgcagcacta

SEQ ID NO: 106878 - DNA, 20 bp, Artificial Sequence
  Description of Artificial Sequence: Synthetic oligonucleotide
  Target: LAMA2; (-) strand; PAM type: NRG; PAM sequence: CAG
cacccaaaagtggacagctg

SEQ ID NO: 106879 - DNA, 20 bp, Artificial Sequence
  Description of Artificial Sequence: Synthetic oligonucleotide
  Target: LAMA2; (-) strand; PAM type: NRG; PAM sequence: CAG
aggtagcacccaaaagtgga

SEQ ID NO: 106880 - DNA, 20 bp, Artificial Sequence
  Description of Artificial Sequence: Synthetic oligonucleotide
  Target: LAMA2; (-) strand; PAM type: NRG; PAM sequence: TGG
atgcaggtagcacccaaaag

SEQ ID NO: 106881 - DNA, 20 bp, Artificial Sequence
  Description of Artificial Sequence: Synthetic oligonucleotide
  Target: LAMA2; (-) strand; PAM type: NRG; PAM sequence: AAG
gatatgcaggtagcacccaa

SEQ ID NO: 106882 - DNA, 20 bp, Artificial Sequence
  Description of Artificial Sequence: Synthetic oligonucleotide
  Target: LAMA2; (-) strand; PAM type: NRG; PAM sequence: TAG
gattctgcaagatatgcagg

SEQ ID NO: 106883 - DNA, 20 bp, Artificial Sequence
  Description of Artificial Sequence: Synthetic oligonucleotide
  Target: LAMA2; (-) strand; PAM type: NRG; PAM sequence: AGG
gatgattctgcaagatatgc

SEQ ID NO: 106884 - DNA, 20 bp, Artificial Sequence
  Description of Artificial Sequence: Synthetic oligonucleotide
  Target: LAMA2; (-) strand; PAM type: NRG; PAM sequence: CAG
agatgattctgcaagatatg

SEQ ID NO: 106885 - DNA, 20 bp, Artificial Sequence
  Description of Artificial Sequence: Synthetic oligonucleotide
  Target: LAMA2; (-) strand; PAM type: NRG; PAM sequence: AAG
tggttcacagatgattctgc

SEQ ID NO: 106886 - DNA, 20 bp, Artificial Sequence
  Description of Artificial Sequence: Synthetic oligonucleotide
  Target: LAMA2; (-) strand; PAM type: NRG; PAM sequence: CAG
gaagactagggcctggttca

SEQ ID NO: 106887 - DNA, 20 bp, Artificial Sequence
  Description of Artificial Sequence: Synthetic oligonucleotide
  Target: LAMA2; (-) strand; PAM type: NRG; PAM sequence: TGG
aggcagagaagactagggcc

SEQ ID NO: 106888 - DNA, 20 bp, Artificial Sequence
  Description of Artificial Sequence: Synthetic oligonucleotide
  Target: LAMA2; (-) strand; PAM type: NRG; PAM sequence: GGG
gacagaggcagagaagacta

SEQ ID NO: 106889 - DNA, 20 bp, Artificial Sequence
  Description of Artificial Sequence: Synthetic oligonucleotide
  Target: LAMA2; (-) strand; PAM type: NRG; PAM sequence: AGG
tgacagaggcagagaagact

SEQ ID NO: 106890 - DNA, 20 bp, Artificial Sequence
  Description of Artificial Sequence: Synthetic oligonucleotide
  Target: LAMA2; (-) strand; PAM type: NRG; PAM sequence: TAG
ttgacagaggcagagaagac

SEQ ID NO: 106891 - DNA, 20 bp, Artificial Sequence
  Description of Artificial Sequence: Synthetic oligonucleotide
  Target: LAMA2; (-) strand; PAM type: NRG; PAM sequence: AAG
atcagttgacagaggcagag

SEQ ID NO: 106892 - DNA, 20 bp, Artificial Sequence
  Description of Artificial Sequence: Synthetic oligonucleotide
  Target: LAMA2; (-) strand; PAM type: NRG; PAM sequence: GAG
atgatcagttgacagaggca

SEQ ID NO: 106893 - DNA, 20 bp, Artificial Sequence
  Description of Artificial Sequence: Synthetic oligonucleotide
  Target: LAMA2; (-) strand; PAM type: NRG; PAM sequence: CAG
ccatgatcagttgacagagg

SEQ ID NO: 106894 - DNA, 20 bp, Artificial Sequence
  Description of Artificial Sequence: Synthetic oligonucleotide
  Target: LAMA2; (-) strand; PAM type: NRG; PAM sequence: AGG
tccccatgatcagttgacag

SEQ ID NO: 106895 - DNA, 20 bp, Artificial Sequence
  Description of Artificial Sequence: Synthetic oligonucleotide
  Target: LAMA2; (-) strand; PAM type: NRG; PAM sequence: GAG
ttccccatgatcagttgaca

SEQ ID NO: 106896 - DNA, 20 bp, Artificial Sequence
  Description of Artificial Sequence: Synthetic oligonucleotide
  Target: LAMA2; (-) strand; PAM type: NRG; PAM sequence: CAG
agttccccatgatcagttga

SEQ ID NO: 106897 - DNA, 20 bp, Artificial Sequence
  Description of Artificial Sequence: Synthetic oligonucleotide
  Target: LAMA2; (-) strand; PAM type: NRG; PAM sequence: CAG
cacagggagttccccatgat

SEQ ID NO: 106898 - DNA, 20 bp, Artificial Sequence
  Description of Artificial Sequence: Synthetic oligonucleotide
  Target: LAMA2; (-) strand; PAM type: NRG; PAM sequence: GAG
tgcactgatggcctcacagg

SEQ ID NO: 106899 - DNA, 20 bp, Artificial Sequence
  Description of Artificial Sequence: Synthetic oligonucleotide
  Target: LAMA2; (-) strand; PAM type: NRG; PAM sequence: GGG
cctgcactgatggcctcaca

SEQ ID NO: 106900 - DNA, 20 bp, Artificial Sequence
  Description of Artificial Sequence: Synthetic oligonucleotide
  Target: LAMA2; (-) strand; PAM type: NRG; PAM sequence: AGG
gcctgcactgatggcctcac

SEQ ID NO: 106901 - DNA, 20 bp, Artificial Sequence
  Description of Artificial Sequence: Synthetic oligonucleotide
  Target: LAMA2; (-) strand; PAM type: NRG; PAM sequence: CAG
agcctgcactgatggcctca

SEQ ID NO: 106902 - DNA, 20 bp, Artificial Sequence
  Description of Artificial Sequence: Synthetic oligonucleotide
  Target: LAMA2; (-) strand; PAM type: NRG; PAM sequence: TGG
tctccccaagcctgcactga

SEQ ID NO: 106903 - DNA, 20 bp, Artificial Sequence
  Description of Artificial Sequence: Synthetic oligonucleotide
  Target: LAMA2; (-) strand; PAM type: NRG; PAM sequence: AAG
ccaccctgccttctctcccc

SEQ ID NO: 106904 - DNA, 20 bp, Artificial Sequence
  Description of Artificial Sequence: Synthetic oligonucleotide
  Target: LAMA2; (-) strand; PAM type: NRG; PAM sequence: TGG
ggaagtggctcaaacgccca

SEQ ID NO: 106905 - DNA, 20 bp, Artificial Sequence
  Description of Artificial Sequence: Synthetic oligonucleotide
  Target: LAMA2; (-) strand; PAM type: NRG; PAM sequence: TGG
aagtcagttgcatgaggaag

SEQ ID NO: 106906 - DNA, 20 bp, Artificial Sequence
  Description of Artificial Sequence: Synthetic oligonucleotide
  Target: LAMA2; (-) strand; PAM type: NRG; PAM sequence: AAG
cacaagtcagttgcatgagg

SEQ ID NO: 106907 - DNA, 20 bp, Artificial Sequence
  Description of Artificial Sequence: Synthetic oligonucleotide
  Target: LAMA2; (-) strand; PAM type: NRG; PAM sequence: AGG
aggcacaagtcagttgcatg

SEQ ID NO: 106908 - DNA, 20 bp, Artificial Sequence
  Description of Artificial Sequence: Synthetic oligonucleotide
  Target: LAMA2; (-) strand; PAM type: NRG; PAM sequence: GAG
aaggcacaagtcagttgcat

SEQ ID NO: 106909 - DNA, 20 bp, Artificial Sequence
  Description of Artificial Sequence: Synthetic oligonucleotide
  Target: LAMA2; (-) strand; PAM type: NRG; PAM sequence: CAG
ccagtcctaaaggcacaagt

SEQ ID NO: 106910 - DNA, 20 bp, Artificial Sequence
  Description of Artificial Sequence: Synthetic oligonucleotide
  Target: LAMA2; (-) strand; PAM type: NRG; PAM sequence: AAG
cgagccagtcctaaaggcac

SEQ ID NO: 106911 - DNA, 20 bp, Artificial Sequence
  Description of Artificial Sequence: Synthetic oligonucleotide
  Target: LAMA2; (-) strand; PAM type: NRG; PAM sequence: AGG
caggctcgagccagtcctaa

SEQ ID NO: 106912 - DNA, 20 bp, Artificial Sequence
  Description of Artificial Sequence: Synthetic oligonucleotide
  Target: LAMA2; (-) strand; PAM type: NRG; PAM sequence: AAG
tcaggctcgagccagtccta

SEQ ID NO: 106913 - DNA, 20 bp, Artificial Sequence
  Description of Artificial Sequence: Synthetic oligonucleotide
  Target: LAMA2; (-) strand; PAM type: NRG; PAM sequence: CAG
atacatgatcaggctcgagc

SEQ ID NO: 106914 - DNA, 20 bp, Artificial Sequence
  Description of Artificial Sequence: Synthetic oligonucleotide
  Target: LAMA2; (-) strand; PAM type: NRG; PAM sequence: GAG
gtatatacatgatcaggctc

SEQ ID NO: 106915 - DNA, 20 bp, Artificial Sequence
  Description of Artificial Sequence: Synthetic oligonucleotide
  Target: LAMA2; (-) strand; PAM type: NRG; PAM sequence: AGG
taagtggtatatacatgatc

SEQ ID NO: 106916 - DNA, 20 bp, Artificial Sequence
  Description of Artificial Sequence: Synthetic oligonucleotide
  Target: LAMA2; (-) strand; PAM type: NRG; PAM sequence: CAG
gtaagtggtatatacatgat

SEQ ID NO: 106917 - DNA, 20 bp, Artificial Sequence
  Description of Artificial Sequence: Synthetic oligonucleotide
  Target: LAMA2; (-) strand; PAM type: NRG; PAM sequence: TGG
cttccatcatcaactgtaag

SEQ ID NO: 106918 - DNA, 20 bp, Artificial Sequence
  Description of Artificial Sequence: Synthetic oligonucleotide
  Target: LAMA2; (-) strand; PAM type: NRG; PAM sequence: AAG
agccttccatcatcaactgt

SEQ ID NO: 106919 - DNA, 20 bp, Artificial Sequence
  Description of Artificial Sequence: Synthetic oligonucleotide
  Target: LAMA2; (-) strand; PAM type: NRG; PAM sequence: CAG
ataaagttgggcatacacag

SEQ ID NO: 106920 - DNA, 20 bp, Artificial Sequence
  Description of Artificial Sequence: Synthetic oligonucleotide
  Target: LAMA2; (-) strand; PAM type: NRG; PAM sequence: CAG
gccataaagttgggcataca

SEQ ID NO: 106921 - DNA, 20 bp, Artificial Sequence
  Description of Artificial Sequence: Synthetic oligonucleotide
  Target: LAMA2; (-) strand; PAM type: NRG; PAM sequence: GGG
acccatctagccataaagtt

SEQ ID NO: 106922 - DNA, 20 bp, Artificial Sequence
  Description of Artificial Sequence: Synthetic oligonucleotide
  Target: LAMA2; (-) strand; PAM type: NRG; PAM sequence: TGG
gacccatctagccataaagt

SEQ ID NO: 106923 - DNA, 20 bp, Artificial Sequence
  Description of Artificial Sequence: Synthetic oligonucleotide
  Target: LAMA2; (-) strand; PAM type: NRG; PAM sequence: AAG
ttctgacccatctagccata

SEQ ID NO: 106924 - DNA, 20 bp, Artificial Sequence
  Description of Artificial Sequence: Synthetic oligonucleotide
  Target: LAMA2; (-) strand; PAM type: NRG; PAM sequence: TAG
tggatgctttctgacccatc

SEQ ID NO: 106925 - DNA, 20 bp, Artificial Sequence
  Description of Artificial Sequence: Synthetic oligonucleotide
  Target: LAMA2; (-) strand; PAM type: NRG; PAM sequence: TGG
ctaaactgcctttcatgaac

SEQ ID NO: 106926 - DNA, 20 bp, Artificial Sequence
  Description of Artificial Sequence: Synthetic oligonucleotide
  Target: LAMA2; (-) strand; PAM type: NRG; PAM sequence: AAG
atgtttgactgtaggtcatc

SEQ ID NO: 106927 - DNA, 20 bp, Artificial Sequence
  Description of Artificial Sequence: Synthetic oligonucleotide
  Target: LAMA2; (-) strand; PAM type: NRG; PAM sequence: AGG
gaaactgaatgtttgactgt

SEQ ID NO: 106928 - DNA, 20 bp, Artificial Sequence
  Description of Artificial Sequence: Synthetic oligonucleotide
  Target: LAMA2; (-) strand; PAM type: NRG; PAM sequence: TAG
agaaactgaatgtttgactg

SEQ ID NO: 106929 - DNA, 20 bp, Artificial Sequence
  Description of Artificial Sequence: Synthetic oligonucleotide
  Target: LAMA2; (-) strand; PAM type: NRG; PAM sequence: TAG
ggcctgttactgggctttgg

SEQ ID NO: 106930 - DNA, 20 bp, Artificial Sequence
  Description of Artificial Sequence: Synthetic oligonucleotide
  Target: LAMA2; (-) strand; PAM type: NRG; PAM sequence: TGG
cttggcctgttactgggctt

SEQ ID NO: 106931 - DNA, 20 bp, Artificial Sequence
  Description of Artificial Sequence: Synthetic oligonucleotide
  Target: LAMA2; (-) strand; PAM type: NRG; PAM sequence: GGG
acaactcttggcctgttact

SEQ ID NO: 106932 - DNA, 20 bp, Artificial Sequence
  Description of Artificial Sequence: Synthetic oligonucleotide
  Target: LAMA2; (-) strand; PAM type: NRG; PAM sequence: TGG
gacaactcttggcctgttac

SEQ ID NO: 106933 - DNA, 20 bp, Artificial Sequence
  Description of Artificial Sequence: Synthetic oligonucleotide
  Target: LAMA2; (-) strand; PAM type: NRG; PAM sequence: TGG
tccatttgagagacaactct

SEQ ID NO: 106934 - DNA, 20 bp, Artificial Sequence
  Description of Artificial Sequence: Synthetic oligonucleotide
  Target: LAMA2; (-) strand; PAM type: NRG; PAM sequence: GAG
gatcactactctccatttga

SEQ ID NO: 106935 - DNA, 20 bp, Artificial Sequence
  Description of Artificial Sequence: Synthetic oligonucleotide
  Target: LAMA2; (-) strand; PAM type: NRG; PAM sequence: GAG
cagatcactactctccattt

SEQ ID NO: 106936 - DNA, 20 bp, Artificial Sequence
  Description of Artificial Sequence: Synthetic oligonucleotide
  Target: LAMA2; (-) strand; PAM type: NRG; PAM sequence: CAG
caaggccctgccatcttctg

SEQ ID NO: 106937 - DNA, 20 bp, Artificial Sequence
  Description of Artificial Sequence: Synthetic oligonucleotide
  Target: LAMA2; (-) strand; PAM type: NRG; PAM sequence: AGG
gcctctaggattttggagca

SEQ ID NO: 106938 - DNA, 20 bp, Artificial Sequence
  Description of Artificial Sequence: Synthetic oligonucleotide
  Target: LAMA2; (-) strand; PAM type: NRG; PAM sequence: AAG
agcctctaggattttggagc

SEQ ID NO: 106939 - DNA, 20 bp, Artificial Sequence
  Description of Artificial Sequence: Synthetic oligonucleotide
  Target: LAMA2; (-) strand; PAM type: NRG; PAM sequence: GAG
tggaagcctctaggattttg

SEQ ID NO: 106940 - DNA, 20 bp, Artificial Sequence
  Description of Artificial Sequence: Synthetic oligonucleotide
  Target: LAMA2; (-) strand; PAM type: NRG; PAM sequence: TGG
ggtggaagcctctaggattt

SEQ ID NO: 106941 - DNA, 20 bp, Artificial Sequence
  Description of Artificial Sequence: Synthetic oligonucleotide
  Target: LAMA2; (-) strand; PAM type: NRG; PAM sequence: AGG
tcctagaggtggaagcctct

SEQ ID NO: 106942 - DNA, 20 bp, Artificial Sequence
  Description of Artificial Sequence: Synthetic oligonucleotide
  Target: LAMA2; (-) strand; PAM type: NRG; PAM sequence: TAG
ctcctagaggtggaagcctc

SEQ ID NO: 106943 - DNA, 20 bp, Artificial Sequence
  Description of Artificial Sequence: Synthetic oligonucleotide
  Target: LAMA2; (-) strand; PAM type: NRG; PAM sequence: AAG
taggtgactcctagaggtgg

SEQ ID NO: 106944 - DNA, 20 bp, Artificial Sequence
  Description of Artificial Sequence: Synthetic oligonucleotide
  Target: LAMA2; (-) strand; PAM type: NRG; PAM sequence: TGG
ccataggtgactcctagagg

SEQ ID NO: 106945 - DNA, 20 bp, Artificial Sequence
  Description of Artificial Sequence: Synthetic oligonucleotide
  Target: LAMA2; (-) strand; PAM type: NRG; PAM sequence: AGG
ctcccataggtgactcctag

SEQ ID NO: 106946 - DNA, 20 bp, Artificial Sequence
  Description of Artificial Sequence: Synthetic oligonucleotide
  Target: LAMA2; (-) strand; PAM type: NRG; PAM sequence: GAG
gctcccataggtgactccta

SEQ ID NO: 106947 - DNA, 20 bp, Artificial Sequence
  Description of Artificial Sequence: Synthetic oligonucleotide
  Target: LAMA2; (-) strand; PAM type: NRG; PAM sequence: TAG
aggctcccataggtgactcc

SEQ ID NO: 106948 - DNA, 20 bp, Artificial Sequence
  Description of Artificial Sequence: Synthetic oligonucleotide
  Target: LAMA2; (-) strand; PAM type: NRG; PAM sequence: AGG
agcctttggcaggctcccat

SEQ ID NO: 106949 - DNA, 20 bp, Artificial Sequence
  Description of Artificial Sequence: Synthetic oligonucleotide
  Target: LAMA2; (-) strand; PAM type: NRG; PAM sequence: TAG
aagcctttggcaggctccca

SEQ ID NO: 106950 - DNA, 20 bp, Artificial Sequence
  Description of Artificial Sequence: Synthetic oligonucleotide
  Target: LAMA2; (-) strand; PAM type: NRG; PAM sequence: AGG
tcctgtttgaagcctttggc

SEQ ID NO: 106951 - DNA, 20 bp, Artificial Sequence
  Description of Artificial Sequence: Synthetic oligonucleotide
  Target: LAMA2; (-) strand; PAM type: NRG; PAM sequence: CAG
atcctgtttgaagcctttgg

SEQ ID NO: 106952 - DNA, 20 bp, Artificial Sequence
  Description of Artificial Sequence: Synthetic oligonucleotide
  Target: LAMA2; (-) strand; PAM type: NRG; PAM sequence: TGG
gggatcctgtttgaagcctt

SEQ ID NO: 106953 - DNA, 20 bp, Artificial Sequence
  Description of Artificial Sequence: Synthetic oligonucleotide
  Target: LAMA2; (-) strand; PAM type: NRG; PAM sequence: AAG
gcagacagggatcctgtttg

SEQ ID NO: 106954 - DNA, 20 bp, Artificial Sequence
  Description of Artificial Sequence: Synthetic oligonucleotide
  Target: LAMA2; (-) strand; PAM type: NRG; PAM sequence: GGG
tgaggtgtcaatggcagaca

SEQ ID NO: 106955 - DNA, 20 bp, Artificial Sequence
  Description of Artificial Sequence: Synthetic oligonucleotide
  Target: LAMA2; (-) strand; PAM type: NRG; PAM sequence: AGG
ttgaggtgtcaatggcagac

SEQ ID NO: 106956 - DNA, 20 bp, Artificial Sequence
  Description of Artificial Sequence: Synthetic oligonucleotide
  Target: LAMA2; (-) strand; PAM type: NRG; PAM sequence: CAG
cttgaggtgtcaatggcaga

SEQ ID NO: 106957 - DNA, 20 bp, Artificial Sequence
  Description of Artificial Sequence: Synthetic oligonucleotide
  Target: LAMA2; (-) strand; PAM type: NRG; PAM sequence: CAG
agtccttgaggtgtcaatgg

SEQ ID NO: 106958 - DNA, 20 bp, Artificial Sequence
  Description of Artificial Sequence: Synthetic oligonucleotide
  Target: LAMA2; (-) strand; PAM type: NRG; PAM sequence: TGG
aatagtccttgaggtgtcaa

SEQ ID NO: 106959 - DNA, 20 bp, Artificial Sequence
  Description of Artificial Sequence: Synthetic oligonucleotide
  Target: LAMA2; (-) strand; PAM type: NRG; PAM sequence: AGG
agcagatccaatagtccttg

SEQ ID NO: 106960 - DNA, 20 bp, Artificial Sequence
  Description of Artificial Sequence: Synthetic oligonucleotide
  Target: LAMA2; (-) strand; PAM type: NRG; PAM sequence: GAG
tagcagatccaatagtcctt

SEQ ID NO: 106961 - DNA, 20 bp, Artificial Sequence
  Description of Artificial Sequence: Synthetic oligonucleotide
  Target: LAMA2; (-) strand; PAM type: NRG; PAM sequence: TAG
gtatgacctagcagatccaa

SEQ ID NO: 106962 - DNA, 20 bp, Artificial Sequence
  Description of Artificial Sequence: Synthetic oligonucleotide
  Target: LAMA2; (-) strand; PAM type: NRG; PAM sequence: CAG
gattgggccgtatgacctag

SEQ ID NO: 106963 - DNA, 20 bp, Artificial Sequence
  Description of Artificial Sequence: Synthetic oligonucleotide
  Target: LAMA2; (-) strand; PAM type: NRG; PAM sequence: TAG
gccgattgggccgtatgacc

SEQ ID NO: 106964 - DNA, 20 bp, Artificial Sequence
  Description of Artificial Sequence: Synthetic oligonucleotide
  Target: LAMA2; (-) strand; PAM type: NRG; PAM sequence: GGG
tgcaaactgctctgccgatt

SEQ ID NO: 106965 - DNA, 20 bp, Artificial Sequence
  Description of Artificial Sequence: Synthetic oligonucleotide
  Target: LAMA2; (-) strand; PAM type: NRG; PAM sequence: TGG
gtgcaaactgctctgccgat

SEQ ID NO: 106966 - DNA, 20 bp, Artificial Sequence
  Description of Artificial Sequence: Synthetic oligonucleotide
  Target: LAMA2; (-) strand; PAM type: NRG; PAM sequence: CAG
agtgggctctgcaacaagtc

SEQ ID NO: 106967 - DNA, 20 bp, Artificial Sequence
  Description of Artificial Sequence: Synthetic oligonucleotide
  Target: LAMA2; (-) strand; PAM type: NRG; PAM sequence: AAG
ttttaagtgggctctgcaac

SEQ ID NO: 106968 - DNA, 20 bp, Artificial Sequence
  Description of Artificial Sequence: Synthetic oligonucleotide
  Target: LAMA2; (-) strand; PAM type: NRG; PAM sequence: GGG
aaaggctgccaattttaagt

SEQ ID NO: 106969 - DNA, 20 bp, Artificial Sequence
  Description of Artificial Sequence: Synthetic oligonucleotide
  Target: LAMA2; (-) strand; PAM type: NRG; PAM sequence: TGG
gaaaggctgccaattttaag

SEQ ID NO: 106970 - DNA, 20 bp, Artificial Sequence
  Description of Artificial Sequence: Synthetic oligonucleotide
  Target: LAMA2; (-) strand; PAM type: NRG; PAM sequence: AAG
cctgaaaggctgccaatttt

SEQ ID NO: 106971 - DNA, 20 bp, Artificial Sequence
  Description of Artificial Sequence: Synthetic oligonucleotide
  Target: LAMA2; (-) strand; PAM type: NRG; PAM sequence: AGG
catttattgagtgacctgaa

SEQ ID NO: 106972 - DNA, 20 bp, Artificial Sequence
  Description of Artificial Sequence: Synthetic oligonucleotide
  Target: LAMA2; (-) strand; PAM type: NRG; PAM sequence: AAG
ccatttattgagtgacctga

SEQ ID NO: 106973 - DNA, 20 bp, Artificial Sequence
  Description of Artificial Sequence: Synthetic oligonucleotide
  Target: LAMA2; (-) strand; PAM type: NRG; PAM sequence: GAG
ttaaaatgggcccatttatt

SEQ ID NO: 106974 - DNA, 20 bp, Artificial Sequence
  Description of Artificial Sequence: Synthetic oligonucleotide
  Target: LAMA2; (-) strand; PAM type: NRG; PAM sequence: GGG
gttcctgggtgtgttaaaat

SEQ ID NO: 106975 - DNA, 20 bp, Artificial Sequence
  Description of Artificial Sequence: Synthetic oligonucleotide
  Target: LAMA2; (-) strand; PAM type: NRG; PAM sequence: TGG
tgttcctgggtgtgttaaaa

SEQ ID NO: 106976 - DNA, 20 bp, Artificial Sequence
  Description of Artificial Sequence: Synthetic oligonucleotide
  Target: LAMA2; (-) strand; PAM type: NRG; PAM sequence: GGG
ggatgcaaagcattgttcct

SEQ ID NO: 106977 - DNA, 20 bp, Artificial Sequence
  Description of Artificial Sequence: Synthetic oligonucleotide
  Target: LAMA2; (-) strand; PAM type: NRG; PAM sequence: TGG
aggatgcaaagcattgttcc

SEQ ID NO: 106978 - DNA, 20 bp, Artificial Sequence
  Description of Artificial Sequence: Synthetic oligonucleotide
  Target: LAMA2; (-) strand; PAM type: NRG; PAM sequence: AAG
tgattgtattgaaggatgca

SEQ ID NO: 106979 - DNA, 20 bp, Artificial Sequence
  Description of Artificial Sequence: Synthetic oligonucleotide
  Target: LAMA2; (-) strand; PAM type: NRG; PAM sequence: AGG
tgccaacttgattgtattga

SEQ ID NO: 106980 - DNA, 20 bp, Artificial Sequence
  Description of Artificial Sequence: Synthetic oligonucleotide
  Target: LAMA2; (-) strand; PAM type: NRG; PAM sequence: AAG
gtgccaacttgattgtattg

SEQ ID NO: 106981 - DNA, 20 bp, Artificial Sequence
  Description of Artificial Sequence: Synthetic oligonucleotide
  Target: LAMA2; (-) strand; PAM type: NRG; PAM sequence: GAG
tcactgtgatggttaatact

SEQ ID NO: 106982 - DNA, 20 bp, Artificial Sequence
  Description of Artificial Sequence: Synthetic oligonucleotide
  Target: LAMA2; (-) strand; PAM type: NRG; PAM sequence: TGG
aatctattcattcactgtga

SEQ ID NO: 106983 - DNA, 20 bp, Artificial Sequence
  Description of Artificial Sequence: Synthetic oligonucleotide
  Target: LAMA2; (-) strand; PAM type: NRG; PAM sequence: TAG
attccaaggagtcaacgtca

SEQ ID NO: 106984 - DNA, 20 bp, Artificial Sequence
  Description of Artificial Sequence: Synthetic oligonucleotide
  Target: LAMA2; (-) strand; PAM type: NRG; PAM sequence: GAG
cctctggtggtcattccaag

SEQ ID NO: 106985 - DNA, 20 bp, Artificial Sequence
  Description of Artificial Sequence: Synthetic oligonucleotide
  Target: LAMA2; (-) strand; PAM type: NRG; PAM sequence: AGG
tgcctctggtggtcattcca

SEQ ID NO: 106986 - DNA, 20 bp, Artificial Sequence
  Description of Artificial Sequence: Synthetic oligonucleotide
  Target: LAMA2; (-) strand; PAM type: NRG; PAM sequence: AAG
ttgcctctggtggtcattcc

SEQ ID NO: 106987 - DNA, 20 bp, Artificial Sequence
  Description of Artificial Sequence: Synthetic oligonucleotide
  Target: LAMA2; (-) strand; PAM type: NRG; PAM sequence: TGG
agtgtgcttattgcctctgg

SEQ ID NO: 106988 - DNA, 20 bp, Artificial Sequence
  Description of Artificial Sequence: Synthetic oligonucleotide
  Target: LAMA2; (-) strand; PAM type: NRG; PAM sequence: TGG
gagagtgtgcttattgcctc

SEQ ID NO: 106989 - DNA, 20 bp, Artificial Sequence
  Description of Artificial Sequence: Synthetic oligonucleotide
  Target: LAMA2; (-) strand; PAM type: NRG; PAM sequence: GAG
tcatatcctcgtgtcactga

SEQ ID NO: 106990 - DNA, 20 bp, Artificial Sequence
  Description of Artificial Sequence: Synthetic oligonucleotide
  Target: LAMA2; (-) strand; PAM type: NRG; PAM sequence: GAG
cctcatatcctcgtgtcact

SEQ ID NO: 106991 - DNA, 20 bp, Artificial Sequence
  Description of Artificial Sequence: Synthetic oligonucleotide
  Target: LAMA2; (-) strand; PAM type: NRG; PAM sequence: GGG
cagtgtaaatgggcagagga

SEQ ID NO: 106992 - DNA, 20 bp, Artificial Sequence
  Description of Artificial Sequence: Synthetic oligonucleotide
  Target: LAMA2; (-) strand; PAM type: NRG; PAM sequence: AGG
ccagtgtaaatgggcagagg

SEQ ID NO: 106993 - DNA, 20 bp, Artificial Sequence
  Description of Artificial Sequence: Synthetic oligonucleotide
  Target: LAMA2; (-) strand; PAM type: NRG; PAM sequence: GAG
tccagtgtaaatgggcagag

SEQ ID NO: 106994 - DNA, 20 bp, Artificial Sequence
  Description of Artificial Sequence: Synthetic oligonucleotide
  Target: LAMA2; (-) strand; PAM type: NRG; PAM sequence: AGG
tttccagtgtaaatgggcag

SEQ ID NO: 106995 - DNA, 20 bp, Artificial Sequence
  Description of Artificial Sequence: Synthetic oligonucleotide
  Target: LAMA2; (-) strand; PAM type: NRG; PAM sequence: GAG
atttccagtgtaaatgggca

SEQ ID NO: 106996 - DNA, 20 bp, Artificial Sequence
  Description of Artificial Sequence: Synthetic oligonucleotide
  Target: LAMA2; (-) strand; PAM type: NRG; PAM sequence: CAG
acatttccagtgtaaatggg

SEQ ID NO: 106997 - DNA, 20 bp, Artificial Sequence
  Description of Artificial Sequence: Synthetic oligonucleotide
  Target: LAMA2; (-) strand; PAM type: NRG; PAM sequence: GGG
aagacatttccagtgtaaat

SEQ ID NO: 106998 - DNA, 20 bp, Artificial Sequence
  Description of Artificial Sequence: Synthetic oligonucleotide
  Target: LAMA2; (-) strand; PAM type: NRG; PAM sequence: TGG
taagacatttccagtgtaaa

SEQ ID NO: 106999 - DNA, 20 bp, Artificial Sequence
  Description of Artificial Sequence: Synthetic oligonucleotide
  Target: LAMA2; (-) strand; PAM type: NRG; PAM sequence: CAG
taagacatctaagacatttc

SEQ ID NO: 107000 - DNA, 20 bp, Artificial Sequence
  Description of Artificial Sequence: Synthetic oligonucleotide
  Target: LAMA2; (-) strand; PAM type: NRG; PAM sequence: AAG
tgaaaagcactaagacatct

SEQ ID NO: 107001 - DNA, 20 bp, Artificial Sequence
  Description of Artificial Sequence: Synthetic oligonucleotide
  Target: LAMA2; (-) strand; PAM type: NRG; PAM sequence: AAG
atacctgattgaaaagcact

SEQ ID NO: 107002 - DNA, 20 bp, Artificial Sequence
  Description of Artificial Sequence: Synthetic oligonucleotide
  Target: LAMA2; (-) strand; PAM type: NRG; PAM sequence: AAG
tttggatatacctgattgaa

SEQ ID NO: 107003 - DNA, 20 bp, Artificial Sequence
  Description of Artificial Sequence: Synthetic oligonucleotide
  Target: LAMA2; (-) strand; PAM type: NRG; PAM sequence: TGG
ttatttgtttgtttgttgtt

SEQ ID NO: 107004 - DNA, 20 bp, Artificial Sequence
  Description of Artificial Sequence: Synthetic oligonucleotide
  Target: LAMA2; (-) strand; PAM type: NRG; PAM sequence: TAG
ctatggaattcattctgcat

SEQ ID NO: 107005 - DNA, 20 bp, Artificial Sequence
  Description of Artificial Sequence: Synthetic oligonucleotide
  Target: LAMA2; (-) strand; PAM type: NRG; PAM sequence: TGG
atcttgaagaatctgaacta

SEQ ID NO: 107006 - DNA, 20 bp, Artificial Sequence
  Description of Artificial Sequence: Synthetic oligonucleotide
  Target: LAMA2; (-) strand; PAM type: NRG; PAM sequence: AAG
gataattttccattatcttg

SEQ ID NO: 107007 - DNA, 20 bp, Artificial Sequence
  Description of Artificial Sequence: Synthetic oligonucleotide
  Target: LAMA2; (-) strand; PAM type: NRG; PAM sequence: GAG
ataatgtttcaaaacaggtg

SEQ ID NO: 107008 - DNA, 20 bp, Artificial Sequence
  Description of Artificial Sequence: Synthetic oligonucleotide
  Target: LAMA2; (-) strand; PAM type: NRG; PAM sequence: TGG
agataatgtttcaaaacagg

SEQ ID NO: 107009 - DNA, 20 bp, Artificial Sequence
  Description of Artificial Sequence: Synthetic oligonucleotide
  Target: LAMA2; (-) strand; PAM type: NRG; PAM sequence: AGG
agaagataatgtttcaaaac

SEQ ID NO: 107010 - DNA, 20 bp, Artificial Sequence
  Description of Artificial Sequence: Synthetic oligonucleotide
  Target: LAMA2; (-) strand; PAM type: NRG; PAM sequence: CAG
aagaagataatgtttcaaaa

SEQ ID NO: 107011 - DNA, 20 bp, Artificial Sequence
  Description of Artificial Sequence: Synthetic oligonucleotide
  Target: LAMA2; (-) strand; PAM type: NRG; PAM sequence: AAG
agggaggaaaggaaggaaag

SEQ ID NO: 107012 - DNA, 20 bp, Artificial Sequence
  Description of Artificial Sequence: Synthetic oligonucleotide
  Target: LAMA2; (-) strand; PAM type: NRG; PAM sequence: AAG
gaaagggaggaaaggaagga

SEQ ID NO: 107013 - DNA, 20 bp, Artificial Sequence
  Description of Artificial Sequence: Synthetic oligonucleotide
  Target: LAMA2; (-) strand; PAM type: NRG; PAM sequence: AGG
gggagaaagggaggaaagga

SEQ ID NO: 107014 - DNA, 20 bp, Artificial Sequence
  Description of Artificial Sequence: Synthetic oligonucleotide
  Target: LAMA2; (-) strand; PAM type: NRG; PAM sequence: AAG
agggagaaagggaggaaagg

SEQ ID NO: 107015 - DNA, 20 bp, Artificial Sequence
  Description of Artificial Sequence: Synthetic oligonucleotide
  Target: LAMA2; (-) strand; PAM type: NRG; PAM sequence: AGG
gaaagggagaaagggaggaa

SEQ ID NO: 107016 - DNA, 20 bp, Artificial Sequence
  Description of Artificial Sequence: Synthetic oligonucleotide
  Target: LAMA2; (-) strand; PAM type: NRG; PAM sequence: AAG
agaaagggagaaagggagga

SEQ ID NO: 107017 - DNA, 20 bp, Artificial Sequence
  Description of Artificial Sequence: Synthetic oligonucleotide
  Target: LAMA2; (-) strand; PAM type: NRG; PAM sequence: AGG
ttagagaaagggagaaaggg

SEQ ID NO: 107018 - DNA, 20 bp, Artificial Sequence
  Description of Artificial Sequence: Synthetic oligonucleotide
  Target: LAMA2; (-) strand; PAM type: NRG; PAM sequence: GAG
cttagagaaagggagaaagg

SEQ ID NO: 107019 - DNA, 20 bp, Artificial Sequence
  Description of Artificial Sequence: Synthetic oligonucleotide
  Target: LAMA2; (-) strand; PAM type: NRG; PAM sequence: GGG
gacttagagaaagggagaaa

SEQ ID NO: 107020 - DNA, 20 bp, Artificial Sequence
  Description of Artificial Sequence: Synthetic oligonucleotide
  Target: LAMA2; (-) strand; PAM type: NRG; PAM sequence: AGG
tgacttagagaaagggagaa

SEQ ID NO: 107021 - DNA, 20 bp, Artificial Sequence
  Description of Artificial Sequence: Synthetic oligonucleotide
  Target: LAMA2; (-) strand; PAM type: NRG; PAM sequence: AAG
ctgacttagagaaagggaga

SEQ ID NO: 107022 - DNA, 20 bp, Artificial Sequence
  Description of Artificial Sequence: Synthetic oligonucleotide
  Target: LAMA2; (-) strand; PAM type: NRG; PAM sequence: GAG
tccactgacttagagaaagg

SEQ ID NO: 107023 - DNA, 20 bp, Artificial Sequence
  Description of Artificial Sequence: Synthetic oligonucleotide
  Target: LAMA2; (-) strand; PAM type: NRG; PAM sequence: GGG
attccactgacttagagaaa

SEQ ID NO: 107024 - DNA, 20 bp, Artificial Sequence
  Description of Artificial Sequence: Synthetic oligonucleotide
  Target: LAMA2; (-) strand; PAM type: NRG; PAM sequence: AGG
tattccactgacttagagaa

SEQ ID NO: 107025 - DNA, 20 bp, Artificial Sequence
  Description of Artificial Sequence: Synthetic oligonucleotide
  Target: LAMA2; (-) strand; PAM type: NRG; PAM sequence: AAG
ctattccactgacttagaga

SEQ ID NO: 107026 - DNA, 20 bp, Artificial Sequence
  Description of Artificial Sequence: Synthetic oligonucleotide
  Target: LAMA2; (-) strand; PAM type: NRG; PAM sequence: GAG
tagactattccactgactta

SEQ ID NO: 107027 - DNA, 20 bp, Artificial Sequence
  Description of Artificial Sequence: Synthetic oligonucleotide
  Target: LAMA2; (-) strand; PAM type: NRG; PAM sequence: TAG
actagactattccactgact

SEQ ID NO: 107028 - DNA, 20 bp, Artificial Sequence
  Description of Artificial Sequence: Synthetic oligonucleotide
  Target: LAMA2; (-) strand; PAM type: NRG; PAM sequence: TAG
tttctacatcaaagttaaac

SEQ ID NO: 107029 - DNA, 20 bp, Artificial Sequence
  Description of Artificial Sequence: Synthetic oligonucleotide
  Target: LAMA2; (-) strand; PAM type: NRG; PAM sequence: AAG
tgcctaaattttctacatca

SEQ ID NO: 107030 - DNA, 20 bp, Artificial Sequence
  Description of Artificial Sequence: Synthetic oligonucleotide
  Target: LAMA2; (-) strand; PAM type: NRG; PAM sequence: AGG
cagcatacctagagaggttg

SEQ ID NO: 107031 - DNA, 20 bp, Artificial Sequence
  Description of Artificial Sequence: Synthetic oligonucleotide
  Target: LAMA2; (-) strand; PAM type: NRG; PAM sequence: GAG
tcagcatacctagagaggtt

SEQ ID NO: 107032 - DNA, 20 bp, Artificial Sequence
  Description of Artificial Sequence: Synthetic oligonucleotide
  Target: LAMA2; (-) strand; PAM type: NRG; PAM sequence: AGG
ttaattcagcatacctagag

SEQ ID NO: 107033 - DNA, 20 bp, Artificial Sequence
  Description of Artificial Sequence: Synthetic oligonucleotide
  Target: LAMA2; (-) strand; PAM type: NRG; PAM sequence: GAG
tttaattcagcatacctaga

SEQ ID NO: 107034 - DNA, 20 bp, Artificial Sequence
  Description of Artificial Sequence: Synthetic oligonucleotide
  Target: LAMA2; (-) strand; PAM type: NRG; PAM sequence: GAG
tttttaattcagcataccta

SEQ ID NO: 107035 - DNA, 20 bp, Artificial Sequence
  Description of Artificial Sequence: Synthetic oligonucleotide
  Target: LAMA2; (-) strand; PAM type: NRG; PAM sequence: TAG
tttttttaattcagcatacc

SEQ ID NO: 107036 - DNA, 20 bp, Artificial Sequence
  Description of Artificial Sequence: Synthetic oligonucleotide
  Target: LAMA2; (-) strand; PAM type: NRG; PAM sequence: CAG
attcttttttttttttaatt

SEQ ID NO: 107037 - DNA, 20 bp, Artificial Sequence
  Description of Artificial Sequence: Synthetic oligonucleotide
  Target: LAMA2; (-) strand; PAM type: NRG; PAM sequence: GGG
aggagaactccatttgccat

SEQ ID NO: 107038 - DNA, 20 bp, Artificial Sequence
  Description of Artificial Sequence: Synthetic oligonucleotide
  Target: LAMA2; (-) strand; PAM type: NRG; PAM sequence: TGG
gaggagaactccatttgcca

SEQ ID NO: 107039 - DNA, 20 bp, Artificial Sequence
  Description of Artificial Sequence: Synthetic oligonucleotide
  Target: LAMA2; (-) strand; PAM type: NRG; PAM sequence: GAG
aagaggaacagaagaaagag

SEQ ID NO: 107040 - DNA, 20 bp, Artificial Sequence
  Description of Artificial Sequence: Synthetic oligonucleotide
  Target: LAMA2; (-) strand; PAM type: NRG; PAM sequence: AGG
agaagaggaacagaagaaag

SEQ ID NO: 107041 - DNA, 20 bp, Artificial Sequence
  Description of Artificial Sequence: Synthetic oligonucleotide
  Target: LAMA2; (-) strand; PAM type: NRG; PAM sequence: GAG
aagaagaggaacagaagaaa

SEQ ID NO: 107042 - DNA, 20 bp, Artificial Sequence
  Description of Artificial Sequence: Synthetic oligonucleotide
  Target: LAMA2; (-) strand; PAM type: NRG; PAM sequence: AAG
tgaagaagaggaacagaaga

SEQ ID NO: 107043 - DNA, 20 bp, Artificial Sequence
  Description of Artificial Sequence: Synthetic oligonucleotide
  Target: LAMA2; (-) strand; PAM type: NRG; PAM sequence: AAG
aaggtgaagaagaggaacag

SEQ ID NO: 107044 - DNA, 20 bp, Artificial Sequence
  Description of Artificial Sequence: Synthetic oligonucleotide
  Target: LAMA2; (-) strand; PAM type: NRG; PAM sequence: CAG
tgcaaggtgaagaagaggaa

SEQ ID NO: 107045 - DNA, 20 bp, Artificial Sequence
  Description of Artificial Sequence: Synthetic oligonucleotide
  Target: LAMA2; (-) strand; PAM type: NRG; PAM sequence: AGG
gtcattgcaaggtgaagaag

SEQ ID NO: 107046 - DNA, 20 bp, Artificial Sequence
  Description of Artificial Sequence: Synthetic oligonucleotide
  Target: LAMA2; (-) strand; PAM type: NRG; PAM sequence: GAG
agtcattgcaaggtgaagaa

SEQ ID NO: 107047 - DNA, 20 bp, Artificial Sequence
  Description of Artificial Sequence: Synthetic oligonucleotide
  Target: LAMA2; (-) strand; PAM type: NRG; PAM sequence: AAG
acagtcattgcaaggtgaag

SEQ ID NO: 107048 - DNA, 20 bp, Artificial Sequence
  Description of Artificial Sequence: Synthetic oligonucleotide
  Target: LAMA2; (-) strand; PAM type: NRG; PAM sequence: AAG
atgacagtcattgcaaggtg

SEQ ID NO: 107049 - DNA, 20 bp, Artificial Sequence
  Description of Artificial Sequence: Synthetic oligonucleotide
  Target: LAMA2; (-) strand; PAM type: NRG; PAM sequence: AGG
acaaaatgacagtcattgca

SEQ ID NO: 107050 - DNA, 20 bp, Artificial Sequence
  Description of Artificial Sequence: Synthetic oligonucleotide
  Target: LAMA2; (-) strand; PAM type: NRG; PAM sequence: AAG
tacaaaatgacagtcattgc

SEQ ID NO: 107051 - DNA, 20 bp, Artificial Sequence
  Description of Artificial Sequence: Synthetic oligonucleotide
  Target: LAMA2; (-) strand; PAM type: NRG; PAM sequence: CAG
gagaaagttttacaaaatga

SEQ ID NO: 107052 - DNA, 20 bp, Artificial Sequence
  Description of Artificial Sequence: Synthetic oligonucleotide
  Target: LAMA2; (-) strand; PAM type: NRG; PAM sequence: AAG
gagagacagagacagagaga

SEQ ID NO: 107053 - DNA, 20 bp, Artificial Sequence
  Description of Artificial Sequence: Synthetic oligonucleotide
  Target: LAMA2; (-) strand; PAM type: NRG; PAM sequence: GAG
gtaagagagacagagacaga

SEQ ID NO: 107054 - DNA, 20 bp, Artificial Sequence
  Description of Artificial Sequence: Synthetic oligonucleotide
  Target: LAMA2; (-) strand; PAM type: NRG; PAM sequence: GAG
gagtaagagagacagagaca

SEQ ID NO: 107055 - DNA, 20 bp, Artificial Sequence
  Description of Artificial Sequence: Synthetic oligonucleotide
  Target: LAMA2; (-) strand; PAM type: NRG; PAM sequence: CAG
gtgagtaagagagacagaga

SEQ ID NO: 107056 - DNA, 20 bp, Artificial Sequence
  Description of Artificial Sequence: Synthetic oligonucleotide
  Target: LAMA2; (-) strand; PAM type: NRG; PAM sequence: GAG
atgtgtgagtaagagagaca

SEQ ID NO: 107057 - DNA, 20 bp, Artificial Sequence
  Description of Artificial Sequence: Synthetic oligonucleotide
  Target: LAMA2; (-) strand; PAM type: NRG; PAM sequence: CAG
gtatgtgtgagtaagagaga

SEQ ID NO: 107058 - DNA, 20 bp, Artificial Sequence
  Description of Artificial Sequence: Synthetic oligonucleotide
  Target: LAMA2; (-) strand; PAM type: NRG; PAM sequence: GAG
gagtgtatgtgtgagtaaga

SEQ ID NO: 107059 - DNA, 20 bp, Artificial Sequence
  Description of Artificial Sequence: Synthetic oligonucleotide
  Target: LAMA2; (-) strand; PAM type: NRG; PAM sequence: GAG
gtgagtgtatgtgtgagtaa

SEQ ID NO: 107060 - DNA, 20 bp, Artificial Sequence
  Description of Artificial Sequence: Synthetic oligonucleotide
  Target: LAMA2; (-) strand; PAM type: NRG; PAM sequence: AAG
ttgtgagtgtatgtgtgagt

SEQ ID NO: 107061 - DNA, 20 bp, Artificial Sequence
  Description of Artificial Sequence: Synthetic oligonucleotide
  Target: LAMA2; (-) strand; PAM type: NRG; PAM sequence: GAG
aacattgtgagtgtatgtgt

SEQ ID NO: 107062 - DNA, 20 bp, Artificial Sequence
  Description of Artificial Sequence: Synthetic oligonucleotide
  Target: LAMA2; (-) strand; PAM type: NRG; PAM sequence: GAG
aagatattaaggaacattgt

SEQ ID NO: 107063 - DNA, 20 bp, Artificial Sequence
  Description of Artificial Sequence: Synthetic oligonucleotide
  Target: LAMA2; (-) strand; PAM type: NRG; PAM sequence: AGG
ttcaggattagaagatatta

SEQ ID NO: 107064 - DNA, 20 bp, Artificial Sequence
  Description of Artificial Sequence: Synthetic oligonucleotide
  Target: LAMA2; (-) strand; PAM type: NRG; PAM sequence: AAG
attcaggattagaagatatt

SEQ ID NO: 107065 - DNA, 20 bp, Artificial Sequence
  Description of Artificial Sequence: Synthetic oligonucleotide
  Target: LAMA2; (-) strand; PAM type: NRG; PAM sequence: AAG
gaaaggaaattcaggattag

SEQ ID NO: 107066 - DNA, 20 bp, Artificial Sequence
  Description of Artificial Sequence: Synthetic oligonucleotide
  Target: LAMA2; (-) strand; PAM type: NRG; PAM sequence: TAG
tgagaaaggaaattcaggat

SEQ ID NO: 107067 - DNA, 20 bp, Artificial Sequence
  Description of Artificial Sequence: Synthetic oligonucleotide
  Target: LAMA2; (-) strand; PAM type: NRG; PAM sequence: AGG
caaattgagaaaggaaattc

SEQ ID NO: 107068 - DNA, 20 bp, Artificial Sequence
  Description of Artificial Sequence: Synthetic oligonucleotide
  Target: LAMA2; (-) strand; PAM type: NRG; PAM sequence: CAG
acaaattgagaaaggaaatt

SEQ ID NO: 107069 - DNA, 20 bp, Artificial Sequence
  Description of Artificial Sequence: Synthetic oligonucleotide
  Target: LAMA2; (-) strand; PAM type: NRG; PAM sequence: AGG
ctaactaaacaaattgagaa

SEQ ID NO: 107070 - DNA, 20 bp, Artificial Sequence
  Description of Artificial Sequence: Synthetic oligonucleotide
  Target: LAMA2; (-) strand; PAM type: NRG; PAM sequence: AAG
tctaactaaacaaattgaga

SEQ ID NO: 107071 - DNA, 20 bp, Artificial Sequence
  Description of Artificial Sequence: Synthetic oligonucleotide
  Target: LAMA2; (-) strand; PAM type: NRG; PAM sequence: GAG
aagatctaactaaacaaatt

SEQ ID NO: 107072 - DNA, 20 bp, Artificial Sequence
  Description of Artificial Sequence: Synthetic oligonucleotide
  Target: LAMA2; (-) strand; PAM type: NRG; PAM sequence: AAG
tctaatacttatttctagtg

SEQ ID NO: 107073 - DNA, 20 bp, Artificial Sequence
  Description of Artificial Sequence: Synthetic oligonucleotide
  Target: LAMA2; (-) strand; PAM type: NRG; PAM sequence: TAG
caatttctaatacttatttc

SEQ ID NO: 107074 - DNA, 20 bp, Artificial Sequence
  Description of Artificial Sequence: Synthetic oligonucleotide
  Target: LAMA2; (-) strand; PAM type: NRG; PAM sequence: CAG
ttggagaaccctaatacaac

SEQ ID NO: 107075 - DNA, 20 bp, Artificial Sequence
  Description of Artificial Sequence: Synthetic oligonucleotide
  Target: LAMA2; (-) strand; PAM type: NRG; PAM sequence: GAG
ctaatagttctgtttatttg

SEQ ID NO: 107076 - DNA, 20 bp, Artificial Sequence
  Description of Artificial Sequence: Synthetic oligonucleotide
  Target: LAMA2; (-) strand; PAM type: NRG; PAM sequence: TGG
tcctaatagttctgtttatt

SEQ ID NO: 107077 - DNA, 20 bp, Artificial Sequence
  Description of Artificial Sequence: Synthetic oligonucleotide
  Target: LAMA2; (-) strand; PAM type: NRG; PAM sequence: TAG
tctatctatccatctcctaa

SEQ ID NO: 107078 - DNA, 20 bp, Artificial Sequence
  Description of Artificial Sequence: Synthetic oligonucleotide
  Target: LAMA2; (-) strand; PAM type: NRG; PAM sequence: CAG
atcatccatctatcatctac

SEQ ID NO: 107079 - DNA, 20 bp, Artificial Sequence
  Description of Artificial Sequence: Synthetic oligonucleotide
  Target: LAMA2; (-) strand; PAM type: NRG; PAM sequence: AAG
tgcagcctccataatcacgt

SEQ ID NO: 107080 - DNA, 20 bp, Artificial Sequence
  Description of Artificial Sequence: Synthetic oligonucleotide
  Target: LAMA2; (-) strand; PAM type: NRG; PAM sequence: CAG
tcacagatactgggactttg

SEQ ID NO: 107081 - DNA, 20 bp, Artificial Sequence
  Description of Artificial Sequence: Synthetic oligonucleotide
  Target: LAMA2; (-) strand; PAM type: NRG; PAM sequence: GGG
atctgcagctcacagatact

SEQ ID NO: 107082 - DNA, 20 bp, Artificial Sequence
  Description of Artificial Sequence: Synthetic oligonucleotide
  Target: LAMA2; (-) strand; PAM type: NRG; PAM sequence: TGG
gatctgcagctcacagatac

SEQ ID NO: 107083 - DNA, 20 bp, Artificial Sequence
  Description of Artificial Sequence: Synthetic oligonucleotide
  Target: LAMA2; (-) strand; PAM type: NRG; PAM sequence: CAG
tatcatggatctgcagctca

SEQ ID NO: 107084 - DNA, 20 bp, Artificial Sequence
  Description of Artificial Sequence: Synthetic oligonucleotide
  Target: LAMA2; (-) strand; PAM type: NRG; PAM sequence: CAG
tgaactatatcatggatctg

SEQ ID NO: 107085 - DNA, 20 bp, Artificial Sequence
  Description of Artificial Sequence: Synthetic oligonucleotide
  Target: LAMA2; (-) strand; PAM type: NRG; PAM sequence: TGG
actcaaagtgaactatatca

SEQ ID NO: 107086 - DNA, 20 bp, Artificial Sequence
  Description of Artificial Sequence: Synthetic oligonucleotide
  Target: LAMA2; (-) strand; PAM type: NRG; PAM sequence: AAG
ttctctggcctttggactca

SEQ ID NO: 107087 - DNA, 20 bp, Artificial Sequence
  Description of Artificial Sequence: Synthetic oligonucleotide
  Target: LAMA2; (-) strand; PAM type: NRG; PAM sequence: TGG
tcccgtgattctctggcctt

SEQ ID NO: 107088 - DNA, 20 bp, Artificial Sequence
  Description of Artificial Sequence: Synthetic oligonucleotide
  Target: LAMA2; (-) strand; PAM type: NRG; PAM sequence: TGG
catcagctcccgtgattctc

SEQ ID NO: 107089 - DNA, 20 bp, Artificial Sequence
  Description of Artificial Sequence: Synthetic oligonucleotide
  Target: LAMA2; (-) strand; PAM type: NRG; PAM sequence: CAG
tgaactgtggtttgtaccat

SEQ ID NO: 107090 - DNA, 20 bp, Artificial Sequence
  Description of Artificial Sequence: Synthetic oligonucleotide
  Target: LAMA2; (-) strand; PAM type: NRG; PAM sequence: TGG
tctctctagttcttgaactg

SEQ ID NO: 107091 - DNA, 20 bp, Artificial Sequence
  Description of Artificial Sequence: Synthetic oligonucleotide
  Target: LAMA2; (-) strand; PAM type: NRG; PAM sequence: TAG
atctcatctcattttctctc

SEQ ID NO: 107092 - DNA, 20 bp, Artificial Sequence
  Description of Artificial Sequence: Synthetic oligonucleotide
  Target: LAMA2; (-) strand; PAM type: NRG; PAM sequence: GGG
tctgccttacagattgagct

SEQ ID NO: 107093 - DNA, 20 bp, Artificial Sequence
  Description of Artificial Sequence: Synthetic oligonucleotide
  Target: LAMA2; (-) strand; PAM type: NRG; PAM sequence: TGG
ttctgccttacagattgagc

SEQ ID NO: 107094 - DNA, 20 bp, Artificial Sequence
  Description of Artificial Sequence: Synthetic oligonucleotide
  Target: LAMA2; (-) strand; PAM type: NRG; PAM sequence: GAG
tcttttctgccttacagatt

SEQ ID NO: 107095 - DNA, 20 bp, Artificial Sequence
  Description of Artificial Sequence: Synthetic oligonucleotide
  Target: LAMA2; (-) strand; PAM type: NRG; PAM sequence: CAG
ttcccttcttttctgcctta

SEQ ID NO: 107096 - DNA, 20 bp, Artificial Sequence
  Description of Artificial Sequence: Synthetic oligonucleotide
  Target: LAMA2; (-) strand; PAM type: NRG; PAM sequence: AGG
gaacaaaaagcaaagaaagg

SEQ ID NO: 107097 - DNA, 20 bp, Artificial Sequence
  Description of Artificial Sequence: Synthetic oligonucleotide
  Target: LAMA2; (-) strand; PAM type: NRG; PAM sequence: GAG
agaacaaaaagcaaagaaag

SEQ ID NO: 107098 - DNA, 20 bp, Artificial Sequence
  Description of Artificial Sequence: Synthetic oligonucleotide
  Target: LAMA2; (-) strand; PAM type: NRG; PAM sequence: AGG
atagaacaaaaagcaaagaa

SEQ ID NO: 107099 - DNA, 20 bp, Artificial Sequence
  Description of Artificial Sequence: Synthetic oligonucleotide
  Target: LAMA2; (-) strand; PAM type: NRG; PAM sequence: AAG
aatagaacaaaaagcaaaga

SEQ ID NO: 107100 - DNA, 20 bp, Artificial Sequence
  Description of Artificial Sequence: Synthetic oligonucleotide
  Target: LAMA2; (-) strand; PAM type: NRG; PAM sequence: AAG
gctgaatagaacaaaaagca

SEQ ID NO: 107101 - DNA, 20 bp, Artificial Sequence
  Description of Artificial Sequence: Synthetic oligonucleotide
  Target: LAMA2; (-) strand; PAM type: NRG; PAM sequence: AAG
tgagggctgaatagaacaaa

SEQ ID NO: 107102 - DNA, 20 bp, Artificial Sequence
  Description of Artificial Sequence: Synthetic oligonucleotide
  Target: LAMA2; (-) strand; PAM type: NRG; PAM sequence: TAG
ccaatctcttgagggctgaa

SEQ ID NO: 107103 - DNA, 20 bp, Artificial Sequence
  Description of Artificial Sequence: Synthetic oligonucleotide
  Target: LAMA2; (-) strand; PAM type: NRG; PAM sequence: GGG
tgcatcacccaatctcttga

SEQ ID NO: 107104 - DNA, 20 bp, Artificial Sequence
  Description of Artificial Sequence: Synthetic oligonucleotide
  Target: LAMA2; (-) strand; PAM type: NRG; PAM sequence: AGG
gtgcatcacccaatctcttg

SEQ ID NO: 107105 - DNA, 20 bp, Artificial Sequence
  Description of Artificial Sequence: Synthetic oligonucleotide
  Target: LAMA2; (-) strand; PAM type: NRG; PAM sequence: GAG
tgtgcatcacccaatctctt

SEQ ID NO: 107106 - DNA, 20 bp, Artificial Sequence
  Description of Artificial Sequence: Synthetic oligonucleotide
  Target: LAMA2; (-) strand; PAM type: NRG; PAM sequence: GAG
gtttctggatgacagtaaaa

SEQ ID NO: 107107 - DNA, 20 bp, Artificial Sequence
  Description of Artificial Sequence: Synthetic oligonucleotide
  Target: LAMA2; (-) strand; PAM type: NRG; PAM sequence: AAG
gtgtttctggatgacagtaa

SEQ ID NO: 107108 - DNA, 20 bp, Artificial Sequence
  Description of Artificial Sequence: Synthetic oligonucleotide
  Target: LAMA2; (-) strand; PAM type: NRG; PAM sequence: CAG
gtgagggtgtttctggatga

SEQ ID NO: 107109 - DNA, 20 bp, Artificial Sequence
  Description of Artificial Sequence: Synthetic oligonucleotide
  Target: LAMA2; (-) strand; PAM type: NRG; PAM sequence: TGG
tgtgtctgtgagggtgtttc

SEQ ID NO: 107110 - DNA, 20 bp, Artificial Sequence
  Description of Artificial Sequence: Synthetic oligonucleotide
  Target: LAMA2; (-) strand; PAM type: NRG; PAM sequence: GGG
atttccgggtgtgtctgtga

SEQ ID NO: 107111 - DNA, 20 bp, Artificial Sequence
  Description of Artificial Sequence: Synthetic oligonucleotide
  Target: LAMA2; (-) strand; PAM type: NRG; PAM sequence: AGG
tatttccgggtgtgtctgtg

SEQ ID NO: 107112 - DNA, 20 bp, Artificial Sequence
  Description of Artificial Sequence: Synthetic oligonucleotide
  Target: LAMA2; (-) strand; PAM type: NRG; PAM sequence: GAG
ttatttccgggtgtgtctgt

SEQ ID NO: 107113 - DNA, 20 bp, Artificial Sequence
  Description of Artificial Sequence: Synthetic oligonucleotide
  Target: LAMA2; (-) strand; PAM type: NRG; PAM sequence: GGG
ctaaattaaacattatttcc

SEQ ID NO: 107114 - DNA, 20 bp, Artificial Sequence
  Description of Artificial Sequence: Synthetic oligonucleotide
  Target: LAMA2; (-) strand; PAM type: NRG; PAM sequence: CGG
cctaaattaaacattatttc

SEQ ID NO: 107115 - DNA, 20 bp, Artificial Sequence
  Description of Artificial Sequence: Synthetic oligonucleotide
  Target: LAMA2; (-) strand; PAM type: NRG; PAM sequence: GGG
gtgtcaacttgactggccat

SEQ ID NO: 107116 - DNA, 20 bp, Artificial Sequence
  Description of Artificial Sequence: Synthetic oligonucleotide
  Target: LAMA2; (-) strand; PAM type: NRG; PAM sequence: TGG
tgtgtcaacttgactggcca

SEQ ID NO: 107117 - DNA, 20 bp, Artificial Sequence
  Description of Artificial Sequence: Synthetic oligonucleotide
  Target: LAMA2; (-) strand; PAM type: NRG; PAM sequence: TGG
attgtatgtgtcaacttgac

SEQ ID NO: 107118 - DNA, 20 bp, Artificial Sequence
  Description of Artificial Sequence: Synthetic oligonucleotide
  Target: LAMA2; (-) strand; PAM type: NRG; PAM sequence: CAG
tgtgcactggagttgaaggc

SEQ ID NO: 107119 - DNA, 20 bp, Artificial Sequence
  Description of Artificial Sequence: Synthetic oligonucleotide
  Target: LAMA2; (-) strand; PAM type: NRG; PAM sequence: AGG
acattgtgcactggagttga

SEQ ID NO: 107120 - DNA, 20 bp, Artificial Sequence
  Description of Artificial Sequence: Synthetic oligonucleotide
  Target: LAMA2; (-) strand; PAM type: NRG; PAM sequence: AAG
cacattgtgcactggagttg

SEQ ID NO: 107121 - DNA, 20 bp, Artificial Sequence
  Description of Artificial Sequence: Synthetic oligonucleotide
  Target: LAMA2; (-) strand; PAM type: NRG; PAM sequence: GAG
gaagaccacattgtgcactg

SEQ ID NO: 107122 - DNA, 20 bp, Artificial Sequence
  Description of Artificial Sequence: Synthetic oligonucleotide
  Target: LAMA2; (-) strand; PAM type: NRG; PAM sequence: TGG
aggaagaccacattgtgcac

SEQ ID NO: 107123 - DNA, 20 bp, Artificial Sequence
  Description of Artificial Sequence: Synthetic oligonucleotide
  Target: LAMA2; (-) strand; PAM type: NRG; PAM sequence: AAG
gaatttggagaataaagagg

SEQ ID NO: 107124 - DNA, 20 bp, Artificial Sequence
  Description of Artificial Sequence: Synthetic oligonucleotide
  Target: LAMA2; (-) strand; PAM type: NRG; PAM sequence: AGG
cttgaatttggagaataaag

SEQ ID NO: 107125 - DNA, 20 bp, Artificial Sequence
  Description of Artificial Sequence: Synthetic oligonucleotide
  Target: LAMA2; (-) strand; PAM type: NRG; PAM sequence: GAG
acttgaatttggagaataaa

SEQ ID NO: 107126 - DNA, 20 bp, Artificial Sequence
  Description of Artificial Sequence: Synthetic oligonucleotide
  Target: LAMA2; (-) strand; PAM type: NRG; PAM sequence: AAG
gaacttgaatttggagaata

SEQ ID NO: 107127 - DNA, 20 bp, Artificial Sequence
  Description of Artificial Sequence: Synthetic oligonucleotide
  Target: LAMA2; (-) strand; PAM type: NRG; PAM sequence: GAG
agtaagagaacttgaatttg

SEQ ID NO: 107128 - DNA, 20 bp, Artificial Sequence
  Description of Artificial Sequence: Synthetic oligonucleotide
  Target: LAMA2; (-) strand; PAM type: NRG; PAM sequence: TGG
caagtaagagaacttgaatt

SEQ ID NO: 107129 - DNA, 20 bp, Artificial Sequence
  Description of Artificial Sequence: Synthetic oligonucleotide
  Target: LAMA2; (-) strand; PAM type: NRG; PAM sequence: GAG
tggacaactgtagcaagtaa

SEQ ID NO: 107130 - DNA, 20 bp, Artificial Sequence
  Description of Artificial Sequence: Synthetic oligonucleotide
  Target: LAMA2; (-) strand; PAM type: NRG; PAM sequence: AAG
tatggacaactgtagcaagt

SEQ ID NO: 107131 - DNA, 20 bp, Artificial Sequence
  Description of Artificial Sequence: Synthetic oligonucleotide
  Target: LAMA2; (-) strand; PAM type: NRG; PAM sequence: AAG
gaaatatggacaactgtagc

SEQ ID NO: 107132 - DNA, 20 bp, Artificial Sequence
  Description of Artificial Sequence: Synthetic oligonucleotide
  Target: LAMA2; (-) strand; PAM type: NRG; PAM sequence: TAG
ccaagaaatatggacaactg

SEQ ID NO: 107133 - DNA, 20 bp, Artificial Sequence
  Description of Artificial Sequence: Synthetic oligonucleotide
  Target: LAMA2; (-) strand; PAM type: NRG; PAM sequence: TGG
atgatggttcccaagaaata

SEQ ID NO: 107134 - DNA, 20 bp, Artificial Sequence
  Description of Artificial Sequence: Synthetic oligonucleotide
  Target: LAMA2; (-) strand; PAM type: NRG; PAM sequence: AAG
tttttagaatgatggttccc

SEQ ID NO: 107135 - DNA, 20 bp, Artificial Sequence
  Description of Artificial Sequence: Synthetic oligonucleotide
  Target: LAMA2; (-) strand; PAM type: NRG; PAM sequence: TGG
gtcaacattttttagaatga

SEQ ID NO: 107136 - DNA, 20 bp, Artificial Sequence
  Description of Artificial Sequence: Synthetic oligonucleotide
  Target: LAMA2; (-) strand; PAM type: NRG; PAM sequence: TAG
aaggcctggtcaacattttt

SEQ ID NO: 107137 - DNA, 20 bp, Artificial Sequence
  Description of Artificial Sequence: Synthetic oligonucleotide
  Target: LAMA2; (-) strand; PAM type: NRG; PAM sequence: TGG
agaaatgcctaagaaaggcc

SEQ ID NO: 107138 - DNA, 20 bp, Artificial Sequence
  Description of Artificial Sequence: Synthetic oligonucleotide
  Target: LAMA2; (-) strand; PAM type: NRG; PAM sequence: AGG
ttcctagaaatgcctaagaa

SEQ ID NO: 107139 - DNA, 20 bp, Artificial Sequence
  Description of Artificial Sequence: Synthetic oligonucleotide
  Target: LAMA2; (-) strand; PAM type: NRG; PAM sequence: AAG
tttcctagaaatgcctaaga

SEQ ID NO: 107140 - DNA, 20 bp, Artificial Sequence
  Description of Artificial Sequence: Synthetic oligonucleotide
  Target: LAMA2; (-) strand; PAM type: NRG; PAM sequence: AAG
tatttttcctagaaatgcct

SEQ ID NO: 107141 - DNA, 20 bp, Artificial Sequence
  Description of Artificial Sequence: Synthetic oligonucleotide
  Target: LAMA2; (-) strand; PAM type: NRG; PAM sequence: TAG
gtattttatattatttttcc

SEQ ID NO: 107142 - DNA, 20 bp, Artificial Sequence
  Description of Artificial Sequence: Synthetic oligonucleotide
  Target: LAMA2; (-) strand; PAM type: NRG; PAM sequence: GAG
cccactatcattttttctat

SEQ ID NO: 107143 - DNA, 20 bp, Artificial Sequence
  Description of Artificial Sequence: Synthetic oligonucleotide
  Target: LAMA2; (-) strand; PAM type: NRG; PAM sequence: CAG
tacatcttgcttacacagca

SEQ ID NO: 107144 - DNA, 20 bp, Artificial Sequence
  Description of Artificial Sequence: Synthetic oligonucleotide
  Target: LAMA2; (-) strand; PAM type: NRG; PAM sequence: CAG
aagcttacatcttgcttaca

SEQ ID NO: 107145 - DNA, 20 bp, Artificial Sequence
  Description of Artificial Sequence: Synthetic oligonucleotide
  Target: LAMA2; (-) strand; PAM type: NRG; PAM sequence: AAG
ccttttcttcactttgttta

SEQ ID NO: 107146 - DNA, 20 bp, Artificial Sequence
  Description of Artificial Sequence: Synthetic oligonucleotide
  Target: LAMA2; (-) strand; PAM type: NRG; PAM sequence: AGG
tgtataatgttattttttct

SEQ ID NO: 107147 - DNA, 20 bp, Artificial Sequence
  Description of Artificial Sequence: Synthetic oligonucleotide
  Target: LAMA2; (-) strand; PAM type: NRG; PAM sequence: TAG
ctgtataatgttattttttc

SEQ ID NO: 107148 - DNA, 20 bp, Artificial Sequence
  Description of Artificial Sequence: Synthetic oligonucleotide
  Target: LAMA2; (-) strand; PAM type: NRG; PAM sequence: AAG
taagagaagttgacatattt

SEQ ID NO: 107149 - DNA, 20 bp, Artificial Sequence
  Description of Artificial Sequence: Synthetic oligonucleotide
  Target: LAMA2; (-) strand; PAM type: NRG; PAM sequence: AAG
tgggaaatttgctataagag

SEQ ID NO: 107150 - DNA, 20 bp, Artificial Sequence
  Description of Artificial Sequence: Synthetic oligonucleotide
  Target: LAMA2; (-) strand; PAM type: NRG; PAM sequence: GAG
cactgggaaatttgctataa

SEQ ID NO: 107151 - DNA, 20 bp, Artificial Sequence
  Description of Artificial Sequence: Synthetic oligonucleotide
  Target: LAMA2; (-) strand; PAM type: NRG; PAM sequence: AAG
aacactgggaaatttgctat

SEQ ID NO: 107152 - DNA, 20 bp, Artificial Sequence
  Description of Artificial Sequence: Synthetic oligonucleotide
  Target: LAMA2; (-) strand; PAM type: NRG; PAM sequence: GGG
ttgtattaggaatgaacact

SEQ ID NO: 107153 - DNA, 20 bp, Artificial Sequence
  Description of Artificial Sequence: Synthetic oligonucleotide
  Target: LAMA2; (-) strand; PAM type: NRG; PAM sequence: TGG
cttgtattaggaatgaacac

SEQ ID NO: 107154 - DNA, 20 bp, Artificial Sequence
  Description of Artificial Sequence: Synthetic oligonucleotide
  Target: LAMA2; (-) strand; PAM type: NRG; PAM sequence: AGG
gtttttactctccttgtatt

SEQ ID NO: 107155 - DNA, 20 bp, Artificial Sequence
  Description of Artificial Sequence: Synthetic oligonucleotide
  Target: LAMA2; (-) strand; PAM type: NRG; PAM sequence: TAG
agtttttactctccttgtat

SEQ ID NO: 107156 - DNA, 20 bp, Artificial Sequence
  Description of Artificial Sequence: Synthetic oligonucleotide
  Target: LAMA2; (-) strand; PAM type: NRG; PAM sequence: GAG
ctctttttgaggtttctatg

SEQ ID NO: 107157 - DNA, 20 bp, Artificial Sequence
  Description of Artificial Sequence: Synthetic oligonucleotide
  Target: LAMA2; (-) strand; PAM type: NRG; PAM sequence: TGG
agctctttttgaggtttcta

SEQ ID NO: 107158 - DNA, 20 bp, Artificial Sequence
  Description of Artificial Sequence: Synthetic oligonucleotide
  Target: LAMA2; (-) strand; PAM type: NRG; PAM sequence: AGG
gcaagaaaaagctctttttg

SEQ ID NO: 107159 - DNA, 20 bp, Artificial Sequence
  Description of Artificial Sequence: Synthetic oligonucleotide
  Target: LAMA2; (-) strand; PAM type: NRG; PAM sequence: GAG
tgcaagaaaaagctcttttt

SEQ ID NO: 107160 - DNA, 20 bp, Artificial Sequence
  Description of Artificial Sequence: Synthetic oligonucleotide
  Target: LAMA2; (-) strand; PAM type: NRG; PAM sequence: AAG
cctaaccccattgcaagaaa

SEQ ID NO: 107161 - DNA, 20 bp, Artificial Sequence
  Description of Artificial Sequence: Synthetic oligonucleotide
  Target: LAMA2; (-) strand; PAM type: NRG; PAM sequence: AAG
tagacacctaaccccattgc

SEQ ID NO: 107162 - DNA, 20 bp, Artificial Sequence
  Description of Artificial Sequence: Synthetic oligonucleotide
  Target: LAMA2; (-) strand; PAM type: NRG; PAM sequence: TAG
caaaagtcctgtttattcct

SEQ ID NO: 107163 - DNA, 20 bp, Artificial Sequence
  Description of Artificial Sequence: Synthetic oligonucleotide
  Target: LAMA2; (-) strand; PAM type: NRG; PAM sequence: AAG
acataagagtaaagtttcaa

SEQ ID NO: 107164 - DNA, 20 bp, Artificial Sequence
  Description of Artificial Sequence: Synthetic oligonucleotide
  Target: LAMA2; (-) strand; PAM type: NRG; PAM sequence: AAG
tgatctgtcacataagagta

SEQ ID NO: 107165 - DNA, 20 bp, Artificial Sequence
  Description of Artificial Sequence: Synthetic oligonucleotide
  Target: LAMA2; (-) strand; PAM type: NRG; PAM sequence: GAG
ctcactgatctgtcacataa

SEQ ID NO: 107166 - DNA, 20 bp, Artificial Sequence
  Description of Artificial Sequence: Synthetic oligonucleotide
  Target: LAMA2; (-) strand; PAM type: NRG; PAM sequence: AAG
tcctcactgatctgtcacat

SEQ ID NO: 107167 - DNA, 20 bp, Artificial Sequence
  Description of Artificial Sequence: Synthetic oligonucleotide
  Target: LAMA2; (-) strand; PAM type: NRG; PAM sequence: CAG
agtagttcagtgcttcttat

SEQ ID NO: 107168 - DNA, 20 bp, Artificial Sequence
  Description of Artificial Sequence: Synthetic oligonucleotide
  Target: LAMA2; (-) strand; PAM type: NRG; PAM sequence: CAG
gaagcgtatttgtagtagtt

SEQ ID NO: 107169 - DNA, 20 bp, Artificial Sequence
  Description of Artificial Sequence: Synthetic oligonucleotide
  Target: LAMA2; (-) strand; PAM type: NRG; PAM sequence: TAG
caaatgaagcgtatttgtag

SEQ ID NO: 107170 - DNA, 20 bp, Artificial Sequence
  Description of Artificial Sequence: Synthetic oligonucleotide
  Target: LAMA2; (-) strand; PAM type: NRG; PAM sequence: TAG
tagcaaatgaagcgtatttg

SEQ ID NO: 107171 - DNA, 20 bp, Artificial Sequence
  Description of Artificial Sequence: Synthetic oligonucleotide
  Target: LAMA2; (-) strand; PAM type: NRG; PAM sequence: AAG
aagtgtatttatagcaaatg

SEQ ID NO: 107172 - DNA, 20 bp, Artificial Sequence
  Description of Artificial Sequence: Synthetic oligonucleotide
  Target: LAMA2; (-) strand; PAM type: NRG; PAM sequence: TAG
cagtgaatgaagtgtattta

SEQ ID NO: 107173 - DNA, 20 bp, Artificial Sequence
  Description of Artificial Sequence: Synthetic oligonucleotide
  Target: LAMA2; (-) strand; PAM type: NRG; PAM sequence: AAG
ttattatagttcagtgaatg

SEQ ID NO: 107174 - DNA, 20 bp, Artificial Sequence
  Description of Artificial Sequence: Synthetic oligonucleotide
  Target: LAMA2; (-) strand; PAM type: NRG; PAM sequence: CAG
aagtgaattttattatagtt

SEQ ID NO: 107175 - DNA, 20 bp, Artificial Sequence
  Description of Artificial Sequence: Synthetic oligonucleotide
  Target: LAMA2; (-) strand; PAM type: NRG; PAM sequence: TAG
ttttgaagtgaattttatta

SEQ ID NO: 107176 - DNA, 20 bp, Artificial Sequence
  Description of Artificial Sequence: Synthetic oligonucleotide
  Target: LAMA2; (-) strand; PAM type: NRG; PAM sequence: AAG
ttttgttcacattccttttg

SEQ ID NO: 107177 - DNA, 20 bp, Artificial Sequence
  Description of Artificial Sequence: Synthetic oligonucleotide
  Target: LAMA2; (-) strand; PAM type: NRG; PAM sequence: AAG
acttttgcccctttatatcc

SEQ ID NO: 107178 - DNA, 20 bp, Artificial Sequence
  Description of Artificial Sequence: Synthetic oligonucleotide
  Target: LAMA2; (-) strand; PAM type: NRG; PAM sequence: TAG
tgctttccataatgcttact

SEQ ID NO: 107179 - DNA, 20 bp, Artificial Sequence
  Description of Artificial Sequence: Synthetic oligonucleotide
  Target: LAMA2; (-) strand; PAM type: NRG; PAM sequence: TAG
tttattagtctcttgtgttt

SEQ ID NO: 107180 - DNA, 20 bp, Artificial Sequence
  Description of Artificial Sequence: Synthetic oligonucleotide
  Target: LAMA2; (-) strand; PAM type: NRG; PAM sequence: TAG
tgccccattttccattttat

SEQ ID NO: 107181 - DNA, 20 bp, Artificial Sequence
  Description of Artificial Sequence: Synthetic oligonucleotide
  Target: LAMA2; (-) strand; PAM type: NRG; PAM sequence: AAG
tgctttcctccccagaattc

SEQ ID NO: 107182 - DNA, 20 bp, Artificial Sequence
  Description of Artificial Sequence: Synthetic oligonucleotide
  Target: LAMA2; (-) strand; PAM type: NRG; PAM sequence: CAG
tagctttttgctttcctccc

SEQ ID NO: 107183 - DNA, 20 bp, Artificial Sequence
  Description of Artificial Sequence: Synthetic oligonucleotide
  Target: LAMA2; (-) strand; PAM type: NRG; PAM sequence: TAG
tagtgaaaactaaagttaat

SEQ ID NO: 107184 - DNA, 20 bp, Artificial Sequence
  Description of Artificial Sequence: Synthetic oligonucleotide
  Target: LAMA2; (-) strand; PAM type: NRG; PAM sequence: AAG
catattcttagtgaaaacta

SEQ ID NO: 107185 - DNA, 20 bp, Artificial Sequence
  Description of Artificial Sequence: Synthetic oligonucleotide
  Target: LAMA2; (-) strand; PAM type: NRG; PAM sequence: TAG
caatgtttaatacatattct

SEQ ID NO: 107186 - DNA, 20 bp, Artificial Sequence
  Description of Artificial Sequence: Synthetic oligonucleotide
  Target: LAMA2; (-) strand; PAM type: NRG; PAM sequence: CAG
tattgtcaattttatttttc

SEQ ID NO: 107187 - DNA, 20 bp, Artificial Sequence
  Description of Artificial Sequence: Synthetic oligonucleotide
  Target: LAMA2; (-) strand; PAM type: NRG; PAM sequence: GAG
caatttgttctgtttctctg

SEQ ID NO: 107188 - DNA, 20 bp, Artificial Sequence
  Description of Artificial Sequence: Synthetic oligonucleotide
  Target: LAMA2; (-) strand; PAM type: NRG; PAM sequence: TGG
tccaatttgttctgtttctc

SEQ ID NO: 107189 - DNA, 20 bp, Artificial Sequence
  Description of Artificial Sequence: Synthetic oligonucleotide
  Target: LAMA2; (-) strand; PAM type: NRG; PAM sequence: GAG
gccagaccccacaatctcat

SEQ ID NO: 107190 - DNA, 20 bp, Artificial Sequence
  Description of Artificial Sequence: Synthetic oligonucleotide
  Target: LAMA2; (-) strand; PAM type: NRG; PAM sequence: CAG
attcacctattccctgcagc

SEQ ID NO: 107191 - DNA, 20 bp, Artificial Sequence
  Description of Artificial Sequence: Synthetic oligonucleotide
  Target: LAMA2; (-) strand; PAM type: NRG; PAM sequence: CAG
caatattcacctattccctg

SEQ ID NO: 107192 - DNA, 20 bp, Artificial Sequence
  Description of Artificial Sequence: Synthetic oligonucleotide
  Target: LAMA2; (-) strand; PAM type: NRG; PAM sequence: CGG
aactgcctttggattcaaga

SEQ ID NO: 107193 - DNA, 20 bp, Artificial Sequence
  Description of Artificial Sequence: Synthetic oligonucleotide
  Target: LAMA2; (-) strand; PAM type: NRG; PAM sequence: AAG
tccaaactgcctttggattc

SEQ ID NO: 107194 - DNA, 20 bp, Artificial Sequence
  Description of Artificial Sequence: Synthetic oligonucleotide
  Target: LAMA2; (-) strand; PAM type: NRG; PAM sequence: TGG
ttctgcctccaaactgcctt

SEQ ID NO: 107195 - DNA, 20 bp, Artificial Sequence
  Description of Artificial Sequence: Synthetic oligonucleotide
  Target: LAMA2; (-) strand; PAM type: NRG; PAM sequence: AAG
actgaggtcccctgaagaag

SEQ ID NO: 107196 - DNA, 20 bp, Artificial Sequence
  Description of Artificial Sequence: Synthetic oligonucleotide
  Target: LAMA2; (-) strand; PAM type: NRG; PAM sequence: AAG
attactgaggtcccctgaag

SEQ ID NO: 107197 - DNA, 20 bp, Artificial Sequence
  Description of Artificial Sequence: Synthetic oligonucleotide
  Target: LAMA2; (-) strand; PAM type: NRG; PAM sequence: AAG
agaattactgaggtcccctg

SEQ ID NO: 107198 - DNA, 20 bp, Artificial Sequence
  Description of Artificial Sequence: Synthetic oligonucleotide
  Target: LAMA2; (-) strand; PAM type: NRG; PAM sequence: AGG
ggccttaagaagaattactg

SEQ ID NO: 107199 - DNA, 20 bp, Artificial Sequence
  Description of Artificial Sequence: Synthetic oligonucleotide
  Target: LAMA2; (-) strand; PAM type: NRG; PAM sequence: GAG
aggccttaagaagaattact

SEQ ID NO: 107200 - DNA, 20 bp, Artificial Sequence
  Description of Artificial Sequence: Synthetic oligonucleotide
  Target: LAMA2; (-) strand; PAM type: NRG; PAM sequence: AAG
caacagtcagaggccttaag

SEQ ID NO: 107201 - DNA, 20 bp, Artificial Sequence
  Description of Artificial Sequence: Synthetic oligonucleotide
  Target: LAMA2; (-) strand; PAM type: NRG; PAM sequence: AAG
atccaacagtcagaggcctt

SEQ ID NO: 107202 - DNA, 20 bp, Artificial Sequence
  Description of Artificial Sequence: Synthetic oligonucleotide
  Target: LAMA2; (-) strand; PAM type: NRG; PAM sequence: AGG
gaacctcatccaacagtcag

SEQ ID NO: 107203 - DNA, 20 bp, Artificial Sequence
  Description of Artificial Sequence: Synthetic oligonucleotide
  Target: LAMA2; (-) strand; PAM type: NRG; PAM sequence: GAG
ggaacctcatccaacagtca

SEQ ID NO: 107204 - DNA, 20 bp, Artificial Sequence
  Description of Artificial Sequence: Synthetic oligonucleotide
  Target: LAMA2; (-) strand; PAM type: NRG; PAM sequence: CAG
ggggaacctcatccaacagt

SEQ ID NO: 107205 - DNA, 20 bp, Artificial Sequence
  Description of Artificial Sequence: Synthetic oligonucleotide
  Target: LAMA2; (-) strand; PAM type: NRG; PAM sequence: CAG
tgttggggaacctcatccaa

SEQ ID NO: 107206 - DNA, 20 bp, Artificial Sequence
  Description of Artificial Sequence: Synthetic oligonucleotide
  Target: LAMA2; (-) strand; PAM type: NRG; PAM sequence: GGG
ggtcaccctccatgatgttg

SEQ ID NO: 107207 - DNA, 20 bp, Artificial Sequence
  Description of Artificial Sequence: Synthetic oligonucleotide
  Target: LAMA2; (-) strand; PAM type: NRG; PAM sequence: GGG
aggtcaccctccatgatgtt

SEQ ID NO: 107208 - DNA, 20 bp, Artificial Sequence
  Description of Artificial Sequence: Synthetic oligonucleotide
  Target: LAMA2; (-) strand; PAM type: NRG; PAM sequence: TGG
caggtcaccctccatgatgt

SEQ ID NO: 107209 - DNA, 20 bp, Artificial Sequence
  Description of Artificial Sequence: Synthetic oligonucleotide
  Target: LAMA2; (-) strand; PAM type: NRG; PAM sequence: AGG
cagtagactttgagtaaagc

SEQ ID NO: 107210 - DNA, 20 bp, Artificial Sequence
  Description of Artificial Sequence: Synthetic oligonucleotide
  Target: LAMA2; (-) strand; PAM type: NRG; PAM sequence: CAG
tcagtagactttgagtaaag

SEQ ID NO: 107211 - DNA, 20 bp, Artificial Sequence
  Description of Artificial Sequence: Synthetic oligonucleotide
  Target: LAMA2; (-) strand; PAM type: NRG; PAM sequence: AAG
cagtcagtagactttgagta

SEQ ID NO: 107212 - DNA, 20 bp, Artificial Sequence
  Description of Artificial Sequence: Synthetic oligonucleotide
  Target: LAMA2; (-) strand; PAM type: NRG; PAM sequence: GAG
cgtttcagtcagtagacttt

SEQ ID NO: 107213 - DNA, 20 bp, Artificial Sequence
  Description of Artificial Sequence: Synthetic oligonucleotide
  Target: LAMA2; (-) strand; PAM type: NRG; PAM sequence: TAG
gtgattaacgtttcagtcag

SEQ ID NO: 107214 - DNA, 20 bp, Artificial Sequence
  Description of Artificial Sequence: Synthetic oligonucleotide
  Target: LAMA2; (-) strand; PAM type: NRG; PAM sequence: CAG
gatgtgattaacgtttcagt

SEQ ID NO: 107215 - DNA, 20 bp, Artificial Sequence
  Description of Artificial Sequence: Synthetic oligonucleotide
  Target: LAMA2; (-) strand; PAM type: NRG; PAM sequence: CAG
tttagatgtgattaacgttt

SEQ ID NO: 107216 - DNA, 20 bp, Artificial Sequence
  Description of Artificial Sequence: Synthetic oligonucleotide
  Target: LAMA2; (-) strand; PAM type: NRG; PAM sequence: TAG
gttgctgtgaatgtattttt

SEQ ID NO: 107217 - DNA, 20 bp, Artificial Sequence
  Description of Artificial Sequence: Synthetic oligonucleotide
  Target: LAMA2; (-) strand; PAM type: NRG; PAM sequence: TAG
tttttggtaaaacagcagtc

SEQ ID NO: 107218 - DNA, 20 bp, Artificial Sequence
  Description of Artificial Sequence: Synthetic oligonucleotide
  Target: LAMA2; (-) strand; PAM type: NRG; PAM sequence: CAG
cttggtttttggtaaaacag

SEQ ID NO: 107219 - DNA, 20 bp, Artificial Sequence
  Description of Artificial Sequence: Synthetic oligonucleotide
  Target: LAMA2; (-) strand; PAM type: NRG; PAM sequence: CAG
gtacttggtttttggtaaaa

SEQ ID NO: 107220 - DNA, 20 bp, Artificial Sequence
  Description of Artificial Sequence: Synthetic oligonucleotide
  Target: LAMA2; (-) strand; PAM type: NRG; PAM sequence: TGG
aggctatggtacttggtttt

SEQ ID NO: 107221 - DNA, 20 bp, Artificial Sequence
  Description of Artificial Sequence: Synthetic oligonucleotide
  Target: LAMA2; (-) strand; PAM type: NRG; PAM sequence: TGG
cttggctaggctatggtact

SEQ ID NO: 107222 - DNA, 20 bp, Artificial Sequence
  Description of Artificial Sequence: Synthetic oligonucleotide
  Target: LAMA2; (-) strand; PAM type: NRG; PAM sequence: TGG
atatccacttggctaggcta

SEQ ID NO: 107223 - DNA, 20 bp, Artificial Sequence
  Description of Artificial Sequence: Synthetic oligonucleotide
  Target: LAMA2; (-) strand; PAM type: NRG; PAM sequence: AGG
taatttatatccacttggct

SEQ ID NO: 107224 - DNA, 20 bp, Artificial Sequence
  Description of Artificial Sequence: Synthetic oligonucleotide
  Target: LAMA2; (-) strand; PAM type: NRG; PAM sequence: TAG
ttaatttatatccacttggc

SEQ ID NO: 107225 - DNA, 20 bp, Artificial Sequence
  Description of Artificial Sequence: Synthetic oligonucleotide
  Target: LAMA2; (-) strand; PAM type: NRG; PAM sequence: TGG
atcgttaatttatatccact

SEQ ID NO: 107226 - DNA, 20 bp, Artificial Sequence
  Description of Artificial Sequence: Synthetic oligonucleotide
  Target: LAMA2; (-) strand; PAM type: NRG; PAM sequence: TAG
gtctgcttgtttggaatgtt

SEQ ID NO: 107227 - DNA, 20 bp, Artificial Sequence
  Description of Artificial Sequence: Synthetic oligonucleotide
  Target: LAMA2; (-) strand; PAM type: NRG; PAM sequence: TGG
tctctctctgtctgcttgtt

SEQ ID NO: 107228 - DNA, 20 bp, Artificial Sequence
  Description of Artificial Sequence: Synthetic oligonucleotide
  Target: LAMA2; (-) strand; PAM type: NRG; PAM sequence: CAG
ttctctttttttgtcttttc

SEQ ID NO: 107229 - DNA, 20 bp, Artificial Sequence
  Description of Artificial Sequence: Synthetic oligonucleotide
  Target: LAMA2; (-) strand; PAM type: NRG; PAM sequence: TGG
attaccctgattgttgtata

SEQ ID NO: 107230 - DNA, 20 bp, Artificial Sequence
  Description of Artificial Sequence: Synthetic oligonucleotide
  Target: LAMA2; (-) strand; PAM type: NRG; PAM sequence: TGG
gggttatttcttgaggcagc

SEQ ID NO: 107231 - DNA, 20 bp, Artificial Sequence
  Description of Artificial Sequence: Synthetic oligonucleotide
  Target: LAMA2; (-) strand; PAM type: NRG; PAM sequence: CAG
tcaggggttatttcttgagg

SEQ ID NO: 107232 - DNA, 20 bp, Artificial Sequence
  Description of Artificial Sequence: Synthetic oligonucleotide
  Target: LAMA2; (-) strand; PAM type: NRG; PAM sequence: AGG
atttcaggggttatttcttg

SEQ ID NO: 107233 - DNA, 20 bp, Artificial Sequence
  Description of Artificial Sequence: Synthetic oligonucleotide
  Target: LAMA2; (-) strand; PAM type: NRG; PAM sequence: GAG
gatttcaggggttatttctt

SEQ ID NO: 107234 - DNA, 20 bp, Artificial Sequence
  Description of Artificial Sequence: Synthetic oligonucleotide
  Target: LAMA2; (-) strand; PAM type: NRG; PAM sequence: GGG
tccatcatgtgagatttcag

SEQ ID NO: 107235 - DNA, 20 bp, Artificial Sequence
  Description of Artificial Sequence: Synthetic oligonucleotide
  Target: LAMA2; (-) strand; PAM type: NRG; PAM sequence: GGG
gtccatcatgtgagatttca

SEQ ID NO: 107236 - DNA, 20 bp, Artificial Sequence
  Description of Artificial Sequence: Synthetic oligonucleotide
  Target: LAMA2; (-) strand; PAM type: NRG; PAM sequence: AGG
tgtccatcatgtgagatttc

SEQ ID NO: 107237 - DNA, 20 bp, Artificial Sequence
  Description of Artificial Sequence: Synthetic oligonucleotide
  Target: LAMA2; (-) strand; PAM type: NRG; PAM sequence: CAG
atgtccatcatgtgagattt

SEQ ID NO: 107238 - DNA, 20 bp, Artificial Sequence
  Description of Artificial Sequence: Synthetic oligonucleotide
  Target: LAMA2; (-) strand; PAM type: NRG; PAM sequence: GAG
ttgaattatgtccatcatgt

SEQ ID NO: 107239 - DNA, 20 bp, Artificial Sequence
  Description of Artificial Sequence: Synthetic oligonucleotide
  Target: LAMA2; (-) strand; PAM type: NRG; PAM sequence: GAG
ctcacattgtgttgtgatgt

SEQ ID NO: 107240 - DNA, 20 bp, Artificial Sequence
  Description of Artificial Sequence: Synthetic oligonucleotide
  Target: LAMA2; (-) strand; PAM type: NRG; PAM sequence: TGG
tcactacaagatgcaaaagg

SEQ ID NO: 107241 - DNA, 20 bp, Artificial Sequence
  Description of Artificial Sequence: Synthetic oligonucleotide
  Target: LAMA2; (-) strand; PAM type: NRG; PAM sequence: AGG
gtgtcactacaagatgcaaa

SEQ ID NO: 107242 - DNA, 20 bp, Artificial Sequence
  Description of Artificial Sequence: Synthetic oligonucleotide
  Target: LAMA2; (-) strand; PAM type: NRG; PAM sequence: AAG
ggtgtcactacaagatgcaa

SEQ ID NO: 107243 - DNA, 20 bp, Artificial Sequence
  Description of Artificial Sequence: Synthetic oligonucleotide
  Target: LAMA2; (-) strand; PAM type: NRG; PAM sequence: AAG
acactgtatggtgtcactac

SEQ ID NO: 107244 - DNA, 20 bp, Artificial Sequence
  Description of Artificial Sequence: Synthetic oligonucleotide
  Target: LAMA2; (-) strand; PAM type: NRG; PAM sequence: TGG
gccttggaggctacactgta

SEQ ID NO: 107245 - DNA, 20 bp, Artificial Sequence
  Description of Artificial Sequence: Synthetic oligonucleotide
  Target: LAMA2; (-) strand; PAM type: NRG; PAM sequence: AGG
ttttctcttccctgccttgg

SEQ ID NO: 107246 - DNA, 20 bp, Artificial Sequence
  Description of Artificial Sequence: Synthetic oligonucleotide
  Target: LAMA2; (-) strand; PAM type: NRG; PAM sequence: GAG
tttttctcttccctgccttg

SEQ ID NO: 107247 - DNA, 20 bp, Artificial Sequence
  Description of Artificial Sequence: Synthetic oligonucleotide
  Target: LAMA2; (-) strand; PAM type: NRG; PAM sequence: TGG
attttttctcttccctgcct

SEQ ID NO: 107248 - DNA, 20 bp, Artificial Sequence
  Description of Artificial Sequence: Synthetic oligonucleotide
  Target: LAMA2; (-) strand; PAM type: NRG; PAM sequence: GGG
ttcatgagccagtatggtag

SEQ ID NO: 107249 - DNA, 20 bp, Artificial Sequence
  Description of Artificial Sequence: Synthetic oligonucleotide
  Target: LAMA2; (-) strand; PAM type: NRG; PAM sequence: GGG
cttcatgagccagtatggta

SEQ ID NO: 107250 - DNA, 20 bp, Artificial Sequence
  Description of Artificial Sequence: Synthetic oligonucleotide
  Target: LAMA2; (-) strand; PAM type: NRG; PAM sequence: AGG
gcttcatgagccagtatggt

SEQ ID NO: 107251 - DNA, 20 bp, Artificial Sequence
  Description of Artificial Sequence: Synthetic oligonucleotide
  Target: LAMA2; (-) strand; PAM type: NRG; PAM sequence: TAG
ggcttcatgagccagtatgg

SEQ ID NO: 107252 - DNA, 20 bp, Artificial Sequence
  Description of Artificial Sequence: Synthetic oligonucleotide
  Target: LAMA2; (-) strand; PAM type: NRG; PAM sequence: TGG
ccaggcttcatgagccagta

SEQ ID NO: 107253 - DNA, 20 bp, Artificial Sequence
  Description of Artificial Sequence: Synthetic oligonucleotide
  Target: LAMA2; (-) strand; PAM type: NRG; PAM sequence: CAG
gtggtccaggcttcatgagc

SEQ ID NO: 107254 - DNA, 20 bp, Artificial Sequence
  Description of Artificial Sequence: Synthetic oligonucleotide
  Target: LAMA2; (-) strand; PAM type: NRG; PAM sequence: GAG
agacgtggtccaggcttcat

SEQ ID NO: 107255 - DNA, 20 bp, Artificial Sequence
  Description of Artificial Sequence: Synthetic oligonucleotide
  Target: LAMA2; (-) strand; PAM type: NRG; PAM sequence: AGG
actcagaccagacgtggtcc

SEQ ID NO: 107256 - DNA, 20 bp, Artificial Sequence
  Description of Artificial Sequence: Synthetic oligonucleotide
  Target: LAMA2; (-) strand; PAM type: NRG; PAM sequence: CAG
gactcagaccagacgtggtc

SEQ ID NO: 107257 - DNA, 20 bp, Artificial Sequence
  Description of Artificial Sequence: Synthetic oligonucleotide
  Target: LAMA2; (-) strand; PAM type: NRG; PAM sequence: TGG
tcaatgactcagaccagacg

SEQ ID NO: 107258 - DNA, 20 bp, Artificial Sequence
  Description of Artificial Sequence: Synthetic oligonucleotide
  Target: LAMA2; (-) strand; PAM type: NRG; PAM sequence: CAG
ttctggtcaatgactcagac

SEQ ID NO: 107259 - DNA, 20 bp, Artificial Sequence
  Description of Artificial Sequence: Synthetic oligonucleotide
  Target: LAMA2; (-) strand; PAM type: NRG; PAM sequence: CAG
gctacttctggtcaatgact

SEQ ID NO: 107260 - DNA, 20 bp, Artificial Sequence
  Description of Artificial Sequence: Synthetic oligonucleotide
  Target: LAMA2; (-) strand; PAM type: NRG; PAM sequence: TGG
ttggggcacacggctacttc

SEQ ID NO: 107261 - DNA, 20 bp, Artificial Sequence
  Description of Artificial Sequence: Synthetic oligonucleotide
  Target: LAMA2; (-) strand; PAM type: NRG; PAM sequence: CGG
tacagttagcttggggcaca

SEQ ID NO: 107262 - DNA, 20 bp, Artificial Sequence
  Description of Artificial Sequence: Synthetic oligonucleotide
  Target: LAMA2; (-) strand; PAM type: NRG; PAM sequence: GGG
cctcccttacagttagcttg

SEQ ID NO: 107263 - DNA, 20 bp, Artificial Sequence
  Description of Artificial Sequence: Synthetic oligonucleotide
  Target: LAMA2; (-) strand; PAM type: NRG; PAM sequence: GGG
acctcccttacagttagctt

SEQ ID NO: 107264 - DNA, 20 bp, Artificial Sequence
  Description of Artificial Sequence: Synthetic oligonucleotide
  Target: LAMA2; (-) strand; PAM type: NRG; PAM sequence: TGG
gacctcccttacagttagct

SEQ ID NO: 107265 - DNA, 20 bp, Artificial Sequence
  Description of Artificial Sequence: Synthetic oligonucleotide
  Target: LAMA2; (-) strand; PAM type: NRG; PAM sequence: TAG
ttccagacctcccttacagt

SEQ ID NO: 107266 - DNA, 20 bp, Artificial Sequence
  Description of Artificial Sequence: Synthetic oligonucleotide
  Target: LAMA2; (-) strand; PAM type: NRG; PAM sequence: CAG
acttttccagacctccctta

SEQ ID NO: 107267 - DNA, 20 bp, Artificial Sequence
  Description of Artificial Sequence: Synthetic oligonucleotide
  Target: LAMA2; (-) strand; PAM type: NRG; PAM sequence: CAG
ctatgtgcctcctacttttc

SEQ ID NO: 107268 - DNA, 20 bp, Artificial Sequence
  Description of Artificial Sequence: Synthetic oligonucleotide
  Target: LAMA2; (-) strand; PAM type: NRG; PAM sequence: TAG
caacctgaagcagagatagt

SEQ ID NO: 107269 - DNA, 20 bp, Artificial Sequence
  Description of Artificial Sequence: Synthetic oligonucleotide
  Target: LAMA2; (-) strand; PAM type: NRG; PAM sequence: TAG
aagacaacctgaagcagaga

SEQ ID NO: 107270 - DNA, 20 bp, Artificial Sequence
  Description of Artificial Sequence: Synthetic oligonucleotide
  Target: LAMA2; (-) strand; PAM type: NRG; PAM sequence: GAG
tatgaagacaacctgaagca

SEQ ID NO: 107271 - DNA, 20 bp, Artificial Sequence
  Description of Artificial Sequence: Synthetic oligonucleotide
  Target: LAMA2; (-) strand; PAM type: NRG; PAM sequence: CAG
attatgaagacaacctgaag

SEQ ID NO: 107272 - DNA, 20 bp, Artificial Sequence
  Description of Artificial Sequence: Synthetic oligonucleotide
  Target: LAMA2; (-) strand; PAM type: NRG; PAM sequence: AAG
tttattatgaagacaacctg

SEQ ID NO: 107273 - DNA, 20 bp, Artificial Sequence
  Description of Artificial Sequence: Synthetic oligonucleotide
  Target: LAMA2; (-) strand; PAM type: NRG; PAM sequence: AAG
taatgtttgcatttattatg

SEQ ID NO: 107274 - DNA, 20 bp, Artificial Sequence
  Description of Artificial Sequence: Synthetic oligonucleotide
  Target: LAMA2; (-) strand; PAM type: NRG; PAM sequence: TAG
ttaatccaatatgaaaatca

SEQ ID NO: 107275 - DNA, 20 bp, Artificial Sequence
  Description of Artificial Sequence: Synthetic oligonucleotide
  Target: LAMA2; (-) strand; PAM type: NRG; PAM sequence: TAG
atagacgaatccctttgttt

SEQ ID NO: 107276 - DNA, 20 bp, Artificial Sequence
  Description of Artificial Sequence: Synthetic oligonucleotide
  Target: LAMA2; (-) strand; PAM type: NRG; PAM sequence: TAG
gtatttgtgtaagtcataca

SEQ ID NO: 107277 - DNA, 20 bp, Artificial Sequence
  Description of Artificial Sequence: Synthetic oligonucleotide
  Target: LAMA2; (-) strand; PAM type: NRG; PAM sequence: AAG
aagatttgcagtatttgtgt

SEQ ID NO: 107278 - DNA, 20 bp, Artificial Sequence
  Description of Artificial Sequence: Synthetic oligonucleotide
  Target: LAMA2; (-) strand; PAM type: NRG; PAM sequence: CAG
ttctgttcccctaagatttg

SEQ ID NO: 107279 - DNA, 20 bp, Artificial Sequence
  Description of Artificial Sequence: Synthetic oligonucleotide
  Target: LAMA2; (-) strand; PAM type: NRG; PAM sequence: AAG
ttcagtctttctgttcccct

SEQ ID NO: 107280 - DNA, 20 bp, Artificial Sequence
  Description of Artificial Sequence: Synthetic oligonucleotide
  Target: LAMA2; (-) strand; PAM type: NRG; PAM sequence: CAG
tgtatcttatctctcatttt

SEQ ID NO: 107281 - DNA, 20 bp, Artificial Sequence
  Description of Artificial Sequence: Synthetic oligonucleotide
  Target: LAMA2; (-) strand; PAM type: NRG; PAM sequence: TAG
tcttctggttagagtttgca

SEQ ID NO: 107282 - DNA, 20 bp, Artificial Sequence
  Description of Artificial Sequence: Synthetic oligonucleotide
  Target: LAMA2; (-) strand; PAM type: NRG; PAM sequence: GAG
taccagctttcttctggtta

SEQ ID NO: 107283 - DNA, 20 bp, Artificial Sequence
  Description of Artificial Sequence: Synthetic oligonucleotide
  Target: LAMA2; (-) strand; PAM type: NRG; PAM sequence: TAG
cataccagctttcttctggt

SEQ ID NO: 107284 - DNA, 20 bp, Artificial Sequence
  Description of Artificial Sequence: Synthetic oligonucleotide
  Target: LAMA2; (-) strand; PAM type: NRG; PAM sequence: TGG
gtagcataccagctttcttc

SEQ ID NO: 107285 - DNA, 20 bp, Artificial Sequence
  Description of Artificial Sequence: Synthetic oligonucleotide
  Target: LAMA2; (-) strand; PAM type: NRG; PAM sequence: CAG
tgctattaatggtagcatac

SEQ ID NO: 107286 - DNA, 20 bp, Artificial Sequence
  Description of Artificial Sequence: Synthetic oligonucleotide
  Target: LAMA2; (-) strand; PAM type: NRG; PAM sequence: TAG
tttttgattgctattaatgg

SEQ ID NO: 107287 - DNA, 20 bp, Artificial Sequence
  Description of Artificial Sequence: Synthetic oligonucleotide
  Target: LAMA2; (-) strand; PAM type: NRG; PAM sequence: TGG
gtctttttgattgctattaa

SEQ ID NO: 107288 - DNA, 20 bp, Artificial Sequence
  Description of Artificial Sequence: Synthetic oligonucleotide
  Target: LAMA2; (-) strand; PAM type: NRG; PAM sequence: AAG
taattcttttaaaaaaatta

SEQ ID NO: 107289 - DNA, 20 bp, Artificial Sequence
  Description of Artificial Sequence: Synthetic oligonucleotide
  Target: LAMA2; (-) strand; PAM type: NRG; PAM sequence: TAG
cttgcaggctcataattttt

SEQ ID NO: 107290 - DNA, 20 bp, Artificial Sequence
  Description of Artificial Sequence: Synthetic oligonucleotide
  Target: LAMA2; (-) strand; PAM type: NRG; PAM sequence: AGG
ctttgttattatgaccttgc

SEQ ID NO: 107291 - DNA, 20 bp, Artificial Sequence
  Description of Artificial Sequence: Synthetic oligonucleotide
  Target: LAMA2; (-) strand; PAM type: NRG; PAM sequence: CAG
gctttgttattatgaccttg

SEQ ID NO: 107292 - DNA, 20 bp, Artificial Sequence
  Description of Artificial Sequence: Synthetic oligonucleotide
  Target: LAMA2; (-) strand; PAM type: NRG; PAM sequence: AGG
atttatctttatttatccat

SEQ ID NO: 107293 - DNA, 20 bp, Artificial Sequence
  Description of Artificial Sequence: Synthetic oligonucleotide
  Target: LAMA2; (-) strand; PAM type: NRG; PAM sequence: TAG
tatttatctttatttatcca

SEQ ID NO: 107294 - DNA, 20 bp, Artificial Sequence
  Description of Artificial Sequence: Synthetic oligonucleotide
  Target: LAMA2; (-) strand; PAM type: NRG; PAM sequence: TGG
atcactttttaagagagata

SEQ ID NO: 107295 - DNA, 20 bp, Artificial Sequence
  Description of Artificial Sequence: Synthetic oligonucleotide
  Target: LAMA2; (-) strand; PAM type: NRG; PAM sequence: GAG
tgatctatcactttttaaga

SEQ ID NO: 107296 - DNA, 20 bp, Artificial Sequence
  Description of Artificial Sequence: Synthetic oligonucleotide
  Target: LAMA2; (-) strand; PAM type: NRG; PAM sequence: GAG
cttgatctatcactttttaa

SEQ ID NO: 107297 - DNA, 20 bp, Artificial Sequence
  Description of Artificial Sequence: Synthetic oligonucleotide
  Target: LAMA2; (-) strand; PAM type: NRG; PAM sequence: AAG
tgcttgatctatcacttttt

SEQ ID NO: 107298 - DNA, 20 bp, Artificial Sequence
  Description of Artificial Sequence: Synthetic oligonucleotide
  Target: LAMA2; (-) strand; PAM type: NRG; PAM sequence: AGG
ccattaagttatcttgtgta

SEQ ID NO: 107299 - DNA, 20 bp, Artificial Sequence
  Description of Artificial Sequence: Synthetic oligonucleotide
  Target: LAMA2; (-) strand; PAM type: NRG; PAM sequence: AAG
gccattaagttatcttgtgt

SEQ ID NO: 107300 - DNA, 20 bp, Artificial Sequence
  Description of Artificial Sequence: Synthetic oligonucleotide
  Target: LAMA2; (-) strand; PAM type: NRG; PAM sequence: AAG
tagagttctataaggccatt

SEQ ID NO: 107301 - DNA, 20 bp, Artificial Sequence
  Description of Artificial Sequence: Synthetic oligonucleotide
  Target: LAMA2; (-) strand; PAM type: NRG; PAM sequence: AGG
agttgacatagagttctata

SEQ ID NO: 107302 - DNA, 20 bp, Artificial Sequence
  Description of Artificial Sequence: Synthetic oligonucleotide
  Target: LAMA2; (-) strand; PAM type: NRG; PAM sequence: AAG
tagttgacatagagttctat

SEQ ID NO: 107303 - DNA, 20 bp, Artificial Sequence
  Description of Artificial Sequence: Synthetic oligonucleotide
  Target: LAMA2; (-) strand; PAM type: NRG; PAM sequence: GAG
ttaattatctagttgacata

SEQ ID NO: 107304 - DNA, 20 bp, Artificial Sequence
  Description of Artificial Sequence: Synthetic oligonucleotide
  Target: LAMA2; (-) strand; PAM type: NRG; PAM sequence: TAG
aattaattatctagttgaca

SEQ ID NO: 107305 - DNA, 20 bp, Artificial Sequence
  Description of Artificial Sequence: Synthetic oligonucleotide
  Target: LAMA2; (-) strand; PAM type: NRG; PAM sequence: TAG
ggcatgtagaattaattatc

SEQ ID NO: 107306 - DNA, 20 bp, Artificial Sequence
  Description of Artificial Sequence: Synthetic oligonucleotide
  Target: LAMA2; (-) strand; PAM type: NRG; PAM sequence: TAG
acttcatcgaatggggcatg

SEQ ID NO: 107307 - DNA, 20 bp, Artificial Sequence
  Description of Artificial Sequence: Synthetic oligonucleotide
  Target: LAMA2; (-) strand; PAM type: NRG; PAM sequence: GGG
atgagttacttcatcgaatg

SEQ ID NO: 107308 - DNA, 20 bp, Artificial Sequence
  Description of Artificial Sequence: Synthetic oligonucleotide
  Target: LAMA2; (-) strand; PAM type: NRG; PAM sequence: GGG
catgagttacttcatcgaat

SEQ ID NO: 107309 - DNA, 20 bp, Artificial Sequence
  Description of Artificial Sequence: Synthetic oligonucleotide
  Target: LAMA2; (-) strand; PAM type: NRG; PAM sequence: TGG
tcatgagttacttcatcgaa

SEQ ID NO: 107310 - DNA, 20 bp, Artificial Sequence
  Description of Artificial Sequence: Synthetic oligonucleotide
  Target: LAMA2; (-) strand; PAM type: NRG; PAM sequence: GAG
tggtcctttgtttgtttcat

SEQ ID NO: 107311 - DNA, 20 bp, Artificial Sequence
  Description of Artificial Sequence: Synthetic oligonucleotide
  Target: LAMA2; (-) strand; PAM type: NRG; PAM sequence: TGG
ttgctttatgatctaggttg

SEQ ID NO: 107312 - DNA, 20 bp, Artificial Sequence
  Description of Artificial Sequence: Synthetic oligonucleotide
  Target: LAMA2; (-) strand; PAM type: NRG; PAM sequence: AGG
tgatacttgctttatgatct

SEQ ID NO: 107313 - DNA, 20 bp, Artificial Sequence
  Description of Artificial Sequence: Synthetic oligonucleotide
  Target: LAMA2; (-) strand; PAM type: NRG; PAM sequence: TAG
ctgatacttgctttatgatc

SEQ ID NO: 107314 - DNA, 20 bp, Artificial Sequence
  Description of Artificial Sequence: Synthetic oligonucleotide
  Target: LAMA2; (-) strand; PAM type: NRG; PAM sequence: AGG
ctagatgctattggatcatt

SEQ ID NO: 107315 - DNA, 20 bp, Artificial Sequence
  Description of Artificial Sequence: Synthetic oligonucleotide
  Target: LAMA2; (-) strand; PAM type: NRG; PAM sequence: TAG
tctagatgctattggatcat

SEQ ID NO: 107316 - DNA, 20 bp, Artificial Sequence
  Description of Artificial Sequence: Synthetic oligonucleotide
  Target: LAMA2; (-) strand; PAM type: NRG; PAM sequence: TGG
ggatgtagtctagatgctat

SEQ ID NO: 107317 - DNA, 20 bp, Artificial Sequence
  Description of Artificial Sequence: Synthetic oligonucleotide
  Target: LAMA2; (-) strand; PAM type: NRG; PAM sequence: TAG
tatgataagaggatgtagtc

SEQ ID NO: 107318 - DNA, 20 bp, Artificial Sequence
  Description of Artificial Sequence: Synthetic oligonucleotide
  Target: LAMA2; (-) strand; PAM type: NRG; PAM sequence: TAG
tgcattatgataagaggatg

SEQ ID NO: 107319 - DNA, 20 bp, Artificial Sequence
  Description of Artificial Sequence: Synthetic oligonucleotide
  Target: LAMA2; (-) strand; PAM type: NRG; PAM sequence: AGG
ttgtattgcattatgataag

SEQ ID NO: 107320 - DNA, 20 bp, Artificial Sequence
  Description of Artificial Sequence: Synthetic oligonucleotide
  Target: LAMA2; (-) strand; PAM type: NRG; PAM sequence: GAG
attgtattgcattatgataa

SEQ ID NO: 107321 - DNA, 20 bp, Artificial Sequence
  Description of Artificial Sequence: Synthetic oligonucleotide
  Target: LAMA2; (-) strand; PAM type: NRG; PAM sequence: AAG
taattgtattgcattatgat

SEQ ID NO: 107322 - DNA, 20 bp, Artificial Sequence
  Description of Artificial Sequence: Synthetic oligonucleotide
  Target: LAMA2; (-) strand; PAM type: NRG; PAM sequence: AAG
tcaagccatggattactttg

SEQ ID NO: 107323 - DNA, 20 bp, Artificial Sequence
  Description of Artificial Sequence: Synthetic oligonucleotide
  Target: LAMA2; (-) strand; PAM type: NRG; PAM sequence: TGG
tgtgtttttttctcaagcca

SEQ ID NO: 107324 - DNA, 20 bp, Artificial Sequence
  Description of Artificial Sequence: Synthetic oligonucleotide
  Target: LAMA2; (-) strand; PAM type: NRG; PAM sequence: AAG
ttaaactgtgtttttttctc

SEQ ID NO: 107325 - DNA, 20 bp, Artificial Sequence
  Description of Artificial Sequence: Synthetic oligonucleotide
  Target: LAMA2; (-) strand; PAM type: NRG; PAM sequence: AGG
atttgcacacacaaattttg

SEQ ID NO: 107326 - DNA, 20 bp, Artificial Sequence
  Description of Artificial Sequence: Synthetic oligonucleotide
  Target: LAMA2; (-) strand; PAM type: NRG; PAM sequence: GAG
tatttgcacacacaaatttt

SEQ ID NO: 107327 - DNA, 20 bp, Artificial Sequence
  Description of Artificial Sequence: Synthetic oligonucleotide
  Target: LAMA2; (-) strand; PAM type: NRG; PAM sequence: TGG
caaactgtacattttcctgt

SEQ ID NO: 107328 - DNA, 20 bp, Artificial Sequence
  Description of Artificial Sequence: Synthetic oligonucleotide
  Target: LAMA2; (-) strand; PAM type: NRG; PAM sequence: CAG
aaaccttagataattagtat

SEQ ID NO: 107329 - DNA, 20 bp, Artificial Sequence
  Description of Artificial Sequence: Synthetic oligonucleotide
  Target: LAMA2; (-) strand; PAM type: NRG; PAM sequence: TAG
gagcagaaaccttagataat

SEQ ID NO: 107330 - DNA, 20 bp, Artificial Sequence
  Description of Artificial Sequence: Synthetic oligonucleotide
  Target: LAMA2; (-) strand; PAM type: NRG; PAM sequence: TAG
aacatcttgagcagaaacct

SEQ ID NO: 107331 - DNA, 20 bp, Artificial Sequence
  Description of Artificial Sequence: Synthetic oligonucleotide
  Target: LAMA2; (-) strand; PAM type: NRG; PAM sequence: CAG
acttttttaaacatcttgag

SEQ ID NO: 107332 - DNA, 20 bp, Artificial Sequence
  Description of Artificial Sequence: Synthetic oligonucleotide
  Target: LAMA2; (-) strand; PAM type: NRG; PAM sequence: GAG
tgtacttttttaaacatctt

SEQ ID NO: 107333 - DNA, 20 bp, Artificial Sequence
  Description of Artificial Sequence: Synthetic oligonucleotide
  Target: LAMA2; (-) strand; PAM type: NRG; PAM sequence: AGG
cctgtctaatgcctttcctt

SEQ ID NO: 107334 - DNA, 20 bp, Artificial Sequence
  Description of Artificial Sequence: Synthetic oligonucleotide
  Target: LAMA2; (-) strand; PAM type: NRG; PAM sequence: TAG
ccctgtctaatgcctttcct

SEQ ID NO: 107335 - DNA, 20 bp, Artificial Sequence
  Description of Artificial Sequence: Synthetic oligonucleotide
  Target: LAMA2; (-) strand; PAM type: NRG; PAM sequence: AAG
tttatttgctagtttattct

SEQ ID NO: 107336 - DNA, 20 bp, Artificial Sequence
  Description of Artificial Sequence: Synthetic oligonucleotide
  Target: LAMA2; (-) strand; PAM type: NRG; PAM sequence: TAG
cttgtcttctgtttatttgc

SEQ ID NO: 107337 - DNA, 20 bp, Artificial Sequence
  Description of Artificial Sequence: Synthetic oligonucleotide
  Target: LAMA2; (-) strand; PAM type: NRG; PAM sequence: CAG
ttcaatctataatgtatcta

SEQ ID NO: 107338 - DNA, 20 bp, Artificial Sequence
  Description of Artificial Sequence: Synthetic oligonucleotide
  Target: LAMA2; (-) strand; PAM type: NRG; PAM sequence: AAG
acttactgtttacttcacct

SEQ ID NO: 107339 - DNA, 20 bp, Artificial Sequence
  Description of Artificial Sequence: Synthetic oligonucleotide
  Target: LAMA2; (-) strand; PAM type: NRG; PAM sequence: GAG
caggtgtactatttcttttt

SEQ ID NO: 107340 - DNA, 20 bp, Artificial Sequence
  Description of Artificial Sequence: Synthetic oligonucleotide
  Target: LAMA2; (-) strand; PAM type: NRG; PAM sequence: AGG
atttaacggttatagttctc

SEQ ID NO: 107341 - DNA, 20 bp, Artificial Sequence
  Description of Artificial Sequence: Synthetic oligonucleotide
  Target: LAMA2; (-) strand; PAM type: NRG; PAM sequence: CAG
tatttaacggttatagttct

SEQ ID NO: 107342 - DNA, 20 bp, Artificial Sequence
  Description of Artificial Sequence: Synthetic oligonucleotide
  Target: LAMA2; (-) strand; PAM type: NRG; PAM sequence: TAG
tgcaatttatttaacggtta

SEQ ID NO: 107343 - DNA, 20 bp, Artificial Sequence
  Description of Artificial Sequence: Synthetic oligonucleotide
  Target: LAMA2; (-) strand; PAM type: NRG; PAM sequence: CGG
tactgatgcaatttatttaa

SEQ ID NO: 107344 - DNA, 20 bp, Artificial Sequence
  Description of Artificial Sequence: Synthetic oligonucleotide
  Target: LAMA2; (-) strand; PAM type: NRG; PAM sequence: GGG
ttgggaacaaattgcataat

SEQ ID NO: 107345 - DNA, 20 bp, Artificial Sequence
  Description of Artificial Sequence: Synthetic oligonucleotide
  Target: LAMA2; (-) strand; PAM type: NRG; PAM sequence: TGG
cttgggaacaaattgcataa

SEQ ID NO: 107346 - DNA, 20 bp, Artificial Sequence
  Description of Artificial Sequence: Synthetic oligonucleotide
  Target: LAMA2; (-) strand; PAM type: NRG; PAM sequence: GGG
tttcttctttttccattctt

SEQ ID NO: 107347 - DNA, 20 bp, Artificial Sequence
  Description of Artificial Sequence: Synthetic oligonucleotide
  Target: LAMA2; (-) strand; PAM type: NRG; PAM sequence: TGG
ttttcttctttttccattct

SEQ ID NO: 107348 - DNA, 20 bp, Artificial Sequence
  Description of Artificial Sequence: Synthetic oligonucleotide
  Target: LAMA2; (-) strand; PAM type: NRG; PAM sequence: AGG
cagcctcataaaataagctg

SEQ ID NO: 107349 - DNA, 20 bp, Artificial Sequence
  Description of Artificial Sequence: Synthetic oligonucleotide
  Target: LAMA2; (-) strand; PAM type: NRG; PAM sequence: GAG
tcagcctcataaaataagct

SEQ ID NO: 107350 - DNA, 20 bp, Artificial Sequence
  Description of Artificial Sequence: Synthetic oligonucleotide
  Target: LAMA2; (-) strand; PAM type: NRG; PAM sequence: AAG
ttgtatcagcctcataaaat

SEQ ID NO: 107351 - DNA, 20 bp, Artificial Sequence
  Description of Artificial Sequence: Synthetic oligonucleotide
  Target: LAMA2; (-) strand; PAM type: NRG; PAM sequence: CAG
gcttgccatcaagattgtat

SEQ ID NO: 107352 - DNA, 20 bp, Artificial Sequence
  Description of Artificial Sequence: Synthetic oligonucleotide
  Target: LAMA2; (-) strand; PAM type: NRG; PAM sequence: AAG
cctctgtagggcttgccatc

SEQ ID NO: 107353 - DNA, 20 bp, Artificial Sequence
  Description of Artificial Sequence: Synthetic oligonucleotide
  Target: LAMA2; (-) strand; PAM type: NRG; PAM sequence: GGG
ttgtagtactgtcctctgta

SEQ ID NO: 107354 - DNA, 20 bp, Artificial Sequence
  Description of Artificial Sequence: Synthetic oligonucleotide
  Target: LAMA2; (-) strand; PAM type: NRG; PAM sequence: AGG
tttgtagtactgtcctctgt

SEQ ID NO: 107355 - DNA, 20 bp, Artificial Sequence
  Description of Artificial Sequence: Synthetic oligonucleotide
  Target: LAMA2; (-) strand; PAM type: NRG; PAM sequence: TAG
ctttgtagtactgtcctctg

SEQ ID NO: 107356 - DNA, 20 bp, Artificial Sequence
  Description of Artificial Sequence: Synthetic oligonucleotide
  Target: LAMA2; (-) strand; PAM type: NRG; PAM sequence: TAG
tggcctatagtttttctttg

SEQ ID NO: 107357 - DNA, 20 bp, Artificial Sequence
  Description of Artificial Sequence: Synthetic oligonucleotide
  Target: LAMA2; (-) strand; PAM type: NRG; PAM sequence: TAG
ctatttaaataactggccta

SEQ ID NO: 107358 - DNA, 20 bp, Artificial Sequence
  Description of Artificial Sequence: Synthetic oligonucleotide
  Target: LAMA2; (-) strand; PAM type: NRG; PAM sequence: TGG
agcttctctatttaaataac

SEQ ID NO: 107359 - DNA, 20 bp, Artificial Sequence
  Description of Artificial Sequence: Synthetic oligonucleotide
  Target: LAMA2; (-) strand; PAM type: NRG; PAM sequence: TAG
gttttataatatttcatttg

SEQ ID NO: 107360 - DNA, 20 bp, Artificial Sequence
  Description of Artificial Sequence: Synthetic oligonucleotide
  Target: LAMA2; (-) strand; PAM type: NRG; PAM sequence: GGG
aaaatatgtacatttgaact

SEQ ID NO: 107361 - DNA, 20 bp, Artificial Sequence
  Description of Artificial Sequence: Synthetic oligonucleotide
  Target: LAMA2; (-) strand; PAM type: NRG; PAM sequence: TGG
taaaatatgtacatttgaac

SEQ ID NO: 107362 - DNA, 20 bp, Artificial Sequence
  Description of Artificial Sequence: Synthetic oligonucleotide
  Target: LAMA2; (-) strand; PAM type: NRG; PAM sequence: CAG
aatgttttactgtatattta

SEQ ID NO: 107363 - DNA, 20 bp, Artificial Sequence
  Description of Artificial Sequence: Synthetic oligonucleotide
  Target: LAMA2; (-) strand; PAM type: NRG; PAM sequence: TGG
ctattcccatcatctgtatc

SEQ ID NO: 107364 - DNA, 20 bp, Artificial Sequence
  Description of Artificial Sequence: Synthetic oligonucleotide
  Target: LAMA2; (-) strand; PAM type: NRG; PAM sequence: CAG
gatacgattagaaattaata

SEQ ID NO: 107365 - DNA, 20 bp, Artificial Sequence
  Description of Artificial Sequence: Synthetic oligonucleotide
  Target: LAMA2; (-) strand; PAM type: NRG; PAM sequence: TAG
ggaaataagatagatacgat

SEQ ID NO: 107366 - DNA, 20 bp, Artificial Sequence
  Description of Artificial Sequence: Synthetic oligonucleotide
  Target: LAMA2; (-) strand; PAM type: NRG; PAM sequence: TAG
tatttaagtaggaaataaga

SEQ ID NO: 107367 - DNA, 20 bp, Artificial Sequence
  Description of Artificial Sequence: Synthetic oligonucleotide
  Target: LAMA2; (-) strand; PAM type: NRG; PAM sequence: AAG
aaactatttaagtaggaaat

SEQ ID NO: 107368 - DNA, 20 bp, Artificial Sequence
  Description of Artificial Sequence: Synthetic oligonucleotide
  Target: LAMA2; (-) strand; PAM type: NRG; PAM sequence: AGG
tttaattaaactatttaagt

SEQ ID NO: 107369 - DNA, 20 bp, Artificial Sequence
  Description of Artificial Sequence: Synthetic oligonucleotide
  Target: LAMA2; (-) strand; PAM type: NRG; PAM sequence: TAG
ttttaattaaactatttaag

SEQ ID NO: 107370 - DNA, 20 bp, Artificial Sequence
  Description of Artificial Sequence: Synthetic oligonucleotide
  Target: LAMA2; (-) strand; PAM type: NRG; PAM sequence: AAG
tcattttaattaaactattt

SEQ ID NO: 107371 - DNA, 20 bp, Artificial Sequence
  Description of Artificial Sequence: Synthetic oligonucleotide
  Target: LAMA2; (-) strand; PAM type: NRG; PAM sequence: AGG
cagattttctatctcctctg

SEQ ID NO: 107372 - DNA, 20 bp, Artificial Sequence
  Description of Artificial Sequence: Synthetic oligonucleotide
  Target: LAMA2; (-) strand; PAM type: NRG; PAM sequence: GAG
acagattttctatctcctct

SEQ ID NO: 107373 - DNA, 20 bp, Artificial Sequence
  Description of Artificial Sequence: Synthetic oligonucleotide
  Target: LAMA2; (-) strand; PAM type: NRG; PAM sequence: CAG
gaacagattttattgcagga

SEQ ID NO: 107374 - DNA, 20 bp, Artificial Sequence
  Description of Artificial Sequence: Synthetic oligonucleotide
  Target: LAMA2; (-) strand; PAM type: NRG; PAM sequence: AGG
tttagaacagattttattgc

SEQ ID NO: 107375 - DNA, 20 bp, Artificial Sequence
  Description of Artificial Sequence: Synthetic oligonucleotide
  Target: LAMA2; (-) strand; PAM type: NRG; PAM sequence: CAG
ttttagaacagattttattg

SEQ ID NO: 107376 - DNA, 20 bp, Artificial Sequence
  Description of Artificial Sequence: Synthetic oligonucleotide
  Target: LAMA2; (-) strand; PAM type: NRG; PAM sequence: CAG
ttttctttattattttagaa

SEQ ID NO: 107377 - DNA, 20 bp, Artificial Sequence
  Description of Artificial Sequence: Synthetic oligonucleotide
  Target: LAMA2; (-) strand; PAM type: NRG; PAM sequence: TAG
acctattttctttattattt

SEQ ID NO: 107378 - DNA, 20 bp, Artificial Sequence
  Description of Artificial Sequence: Synthetic oligonucleotide
  Target: LAMA2; (-) strand; PAM type: NRG; PAM sequence: TAG
tttcatttccagacccattt

SEQ ID NO: 107379 - DNA, 20 bp, Artificial Sequence
  Description of Artificial Sequence: Synthetic oligonucleotide
  Target: LAMA2; (-) strand; PAM type: NRG; PAM sequence: CAG
gagggttgttgtttcatttc

SEQ ID NO: 107380 - DNA, 20 bp, Artificial Sequence
  Description of Artificial Sequence: Synthetic oligonucleotide
  Target: LAMA2; (-) strand; PAM type: NRG; PAM sequence: GGG
cttgctggtgtaaaggatga

SEQ ID NO: 107381 - DNA, 20 bp, Artificial Sequence
  Description of Artificial Sequence: Synthetic oligonucleotide
  Target: LAMA2; (-) strand; PAM type: NRG; PAM sequence: AGG
tcttgctggtgtaaaggatg

SEQ ID NO: 107382 - DNA, 20 bp, Artificial Sequence
  Description of Artificial Sequence: Synthetic oligonucleotide
  Target: LAMA2; (-) strand; PAM type: NRG; PAM sequence: GAG
ttcttgctggtgtaaaggat

SEQ ID NO: 107383 - DNA, 20 bp, Artificial Sequence
  Description of Artificial Sequence: Synthetic oligonucleotide
  Target: LAMA2; (-) strand; PAM type: NRG; PAM sequence: AGG
agaacttcttgctggtgtaa

SEQ ID NO: 107384 - DNA, 20 bp, Artificial Sequence
  Description of Artificial Sequence: Synthetic oligonucleotide
  Target: LAMA2; (-) strand; PAM type: NRG; PAM sequence: AAG
tagaacttcttgctggtgta

SEQ ID NO: 107385 - DNA, 20 bp, Artificial Sequence
  Description of Artificial Sequence: Synthetic oligonucleotide
  Target: LAMA2; (-) strand; PAM type: NRG; PAM sequence: TGG
agaaatttagaacttcttgc

SEQ ID NO: 107386 - DNA, 20 bp, Artificial Sequence
  Description of Artificial Sequence: Synthetic oligonucleotide
  Target: LAMA2; (-) strand; PAM type: NRG; PAM sequence: TAG
tttagaaaaagaaagaaatt

SEQ ID NO: 107387 - DNA, 20 bp, Artificial Sequence
  Description of Artificial Sequence: Synthetic oligonucleotide
  Target: LAMA2; (-) strand; PAM type: NRG; PAM sequence: AAG
atcatgaatttagaaaaaga

SEQ ID NO: 107388 - DNA, 20 bp, Artificial Sequence
  Description of Artificial Sequence: Synthetic oligonucleotide
  Target: LAMA2; (-) strand; PAM type: NRG; PAM sequence: AAG
atgcatcatgaatttagaaa

SEQ ID NO: 107389 - DNA, 20 bp, Artificial Sequence
  Description of Artificial Sequence: Synthetic oligonucleotide
  Target: LAMA2; (-) strand; PAM type: NRG; PAM sequence: TAG
acatgtatgcatcatgaatt

SEQ ID NO: 107390 - DNA, 20 bp, Artificial Sequence
  Description of Artificial Sequence: Synthetic oligonucleotide
  Target: LAMA2; (-) strand; PAM type: NRG; PAM sequence: AAG
atcagcctctgatcatttaa

SEQ ID NO: 107391 - DNA, 20 bp, Artificial Sequence
  Description of Artificial Sequence: Synthetic oligonucleotide
  Target: LAMA2; (-) strand; PAM type: NRG; PAM sequence: CAG
ggattgttgcttgcaattat

SEQ ID NO: 107392 - DNA, 20 bp, Artificial Sequence
  Description of Artificial Sequence: Synthetic oligonucleotide
  Target: LAMA2; (-) strand; PAM type: NRG; PAM sequence: GGG
tgagagaaaagttaggttag

SEQ ID NO: 107393 - DNA, 20 bp, Artificial Sequence
  Description of Artificial Sequence: Synthetic oligonucleotide
  Target: LAMA2; (-) strand; PAM type: NRG; PAM sequence: GGG
ttgagagaaaagttaggtta

SEQ ID NO: 107394 - DNA, 20 bp, Artificial Sequence
  Description of Artificial Sequence: Synthetic oligonucleotide
  Target: LAMA2; (-) strand; PAM type: NRG; PAM sequence: AGG
gttgagagaaaagttaggtt

SEQ ID NO: 107395 - DNA, 20 bp, Artificial Sequence
  Description of Artificial Sequence: Synthetic oligonucleotide
  Target: LAMA2; (-) strand; PAM type: NRG; PAM sequence: TAG
agttgagagaaaagttaggt

SEQ ID NO: 107396 - DNA, 20 bp, Artificial Sequence
  Description of Artificial Sequence: Synthetic oligonucleotide
  Target: LAMA2; (-) strand; PAM type: NRG; PAM sequence: AGG
gcttagttgagagaaaagtt

SEQ ID NO: 107397 - DNA, 20 bp, Artificial Sequence
  Description of Artificial Sequence: Synthetic oligonucleotide
  Target: LAMA2; (-) strand; PAM type: NRG; PAM sequence: TAG
agcttagttgagagaaaagt

SEQ ID NO: 107398 - DNA, 20 bp, Artificial Sequence
  Description of Artificial Sequence: Synthetic oligonucleotide
  Target: LAMA2; (-) strand; PAM type: NRG; PAM sequence: AAG
tgtgagcttagttgagagaa

SEQ ID NO: 107399 - DNA, 20 bp, Artificial Sequence
  Description of Artificial Sequence: Synthetic oligonucleotide
  Target: LAMA2; (-) strand; PAM type: NRG; PAM sequence: GAG
ggagctgtgagcttagttga

SEQ ID NO: 107400 - DNA, 20 bp, Artificial Sequence
  Description of Artificial Sequence: Synthetic oligonucleotide
  Target: LAMA2; (-) strand; PAM type: NRG; PAM sequence: GAG
ctggagctgtgagcttagtt

SEQ ID NO: 107401 - DNA, 20 bp, Artificial Sequence
  Description of Artificial Sequence: Synthetic oligonucleotide
  Target: LAMA2; (-) strand; PAM type: NRG; PAM sequence: TAG
tgatcctggagctgtgagct

SEQ ID NO: 107402 - DNA, 20 bp, Artificial Sequence
  Description of Artificial Sequence: Synthetic oligonucleotide
  Target: LAMA2; (-) strand; PAM type: NRG; PAM sequence: GAG
attgttgatcctggagctgt

SEQ ID NO: 107403 - DNA, 20 bp, Artificial Sequence
  Description of Artificial Sequence: Synthetic oligonucleotide
  Target: LAMA2; (-) strand; PAM type: NRG; PAM sequence: GAG
atttggaattgttgatcctg

SEQ ID NO: 107404 - DNA, 20 bp, Artificial Sequence
  Description of Artificial Sequence: Synthetic oligonucleotide
  Target: LAMA2; (-) strand; PAM type: NRG; PAM sequence: TGG
agatttggaattgttgatcc

SEQ ID NO: 107405 - DNA, 20 bp, Artificial Sequence
  Description of Artificial Sequence: Synthetic oligonucleotide
  Target: LAMA2; (-) strand; PAM type: NRG; PAM sequence: TGG
agaagaatatttgaaagatt

SEQ ID NO: 107406 - DNA, 20 bp, Artificial Sequence
  Description of Artificial Sequence: Synthetic oligonucleotide
  Target: LAMA2; (-) strand; PAM type: NRG; PAM sequence: AAG
agtaaaagaagaatatttga

SEQ ID NO: 107407 - DNA, 20 bp, Artificial Sequence
  Description of Artificial Sequence: Synthetic oligonucleotide
  Target: LAMA2; (-) strand; PAM type: NRG; PAM sequence: AAG
actaagagatgtagtaaaag

SEQ ID NO: 107408 - DNA, 20 bp, Artificial Sequence
  Description of Artificial Sequence: Synthetic oligonucleotide
  Target: LAMA2; (-) strand; PAM type: NRG; PAM sequence: AAG
attactaagagatgtagtaa

SEQ ID NO: 107409 - DNA, 20 bp, Artificial Sequence
  Description of Artificial Sequence: Synthetic oligonucleotide
  Target: LAMA2; (-) strand; PAM type: NRG; PAM sequence: TAG
aataatattactaagagatg

SEQ ID NO: 107410 - DNA, 20 bp, Artificial Sequence
  Description of Artificial Sequence: Synthetic oligonucleotide
  Target: LAMA2; (-) strand; PAM type: NRG; PAM sequence: GAG
tggcacaataatattactaa

SEQ ID NO: 107411 - DNA, 20 bp, Artificial Sequence
  Description of Artificial Sequence: Synthetic oligonucleotide
  Target: LAMA2; (-) strand; PAM type: NRG; PAM sequence: AAG
gatggcacaataatattact

SEQ ID NO: 107412 - DNA, 20 bp, Artificial Sequence
  Description of Artificial Sequence: Synthetic oligonucleotide
  Target: LAMA2; (-) strand; PAM type: NRG; PAM sequence: TGG
ccacttaatgaaatacgtga

SEQ ID NO: 107413 - DNA, 20 bp, Artificial Sequence
  Description of Artificial Sequence: Synthetic oligonucleotide
  Target: LAMA2; (-) strand; PAM type: NRG; PAM sequence: TAG
tcatcatagcagtaattaaa

SEQ ID NO: 107414 - DNA, 20 bp, Artificial Sequence
  Description of Artificial Sequence: Synthetic oligonucleotide
  Target: LAMA2; (-) strand; PAM type: NRG; PAM sequence: CAG
ctacatctccttcatcatag

SEQ ID NO: 107415 - DNA, 20 bp, Artificial Sequence
  Description of Artificial Sequence: Synthetic oligonucleotide
  Target: LAMA2; (-) strand; PAM type: NRG; PAM sequence: TAG
gaactacatctccttcatca

SEQ ID NO: 107416 - DNA, 20 bp, Artificial Sequence
  Description of Artificial Sequence: Synthetic oligonucleotide
  Target: LAMA2; (-) strand; PAM type: NRG; PAM sequence: AAG
aatgtgatgtgatattctgt

SEQ ID NO: 107417 - DNA, 20 bp, Artificial Sequence
  Description of Artificial Sequence: Synthetic oligonucleotide
  Target: LAMA2; (-) strand; PAM type: NRG; PAM sequence: GGG
atattgggaaactgaagggt

SEQ ID NO: 107418 - DNA, 20 bp, Artificial Sequence
  Description of Artificial Sequence: Synthetic oligonucleotide
  Target: LAMA2; (-) strand; PAM type: NRG; PAM sequence: TGG
tatattgggaaactgaaggg

SEQ ID NO: 107419 - DNA, 20 bp, Artificial Sequence
  Description of Artificial Sequence: Synthetic oligonucleotide
  Target: LAMA2; (-) strand; PAM type: NRG; PAM sequence: GGG
acctatattgggaaactgaa

SEQ ID NO: 107420 - DNA, 20 bp, Artificial Sequence
  Description of Artificial Sequence: Synthetic oligonucleotide
  Target: LAMA2; (-) strand; PAM type: NRG; PAM sequence: AGG
tacctatattgggaaactga

SEQ ID NO: 107421 - DNA, 20 bp, Artificial Sequence
  Description of Artificial Sequence: Synthetic oligonucleotide
  Target: LAMA2; (-) strand; PAM type: NRG; PAM sequence: AAG
gtacctatattgggaaactg

SEQ ID NO: 107422 - DNA, 20 bp, Artificial Sequence
  Description of Artificial Sequence: Synthetic oligonucleotide
  Target: LAMA2; (-) strand; PAM type: NRG; PAM sequence: GGG
cacagtaatgtacctatatt

SEQ ID NO: 107423 - DNA, 20 bp, Artificial Sequence
  Description of Artificial Sequence: Synthetic oligonucleotide
  Target: LAMA2; (-) strand; PAM type: NRG; PAM sequence: TGG
gcacagtaatgtacctatat

SEQ ID NO: 107424 - DNA, 20 bp, Artificial Sequence
  Description of Artificial Sequence: Synthetic oligonucleotide
  Target: LAMA2; (-) strand; PAM type: NRG; PAM sequence: CAG
aaaaatgaagaatctaagca

SEQ ID NO: 107425 - DNA, 20 bp, Artificial Sequence
  Description of Artificial Sequence: Synthetic oligonucleotide
  Target: LAMA2; (-) strand; PAM type: NRG; PAM sequence: AAG
aggttaaaaatgaagaatct

SEQ ID NO: 107426 - DNA, 20 bp, Artificial Sequence
  Description of Artificial Sequence: Synthetic oligonucleotide
  Target: LAMA2; (-) strand; PAM type: NRG; PAM sequence: AAG
agtatattaggttaaaaatg

SEQ ID NO: 107427 - DNA, 20 bp, Artificial Sequence
  Description of Artificial Sequence: Synthetic oligonucleotide
  Target: LAMA2; (-) strand; PAM type: NRG; PAM sequence: AGG
aataatgctctcagtatatt

SEQ ID NO: 107428 - DNA, 20 bp, Artificial Sequence
  Description of Artificial Sequence: Synthetic oligonucleotide
  Target: LAMA2; (-) strand; PAM type: NRG; PAM sequence: TAG
aaataatgctctcagtatat

SEQ ID NO: 107429 - DNA, 20 bp, Artificial Sequence
  Description of Artificial Sequence: Synthetic oligonucleotide
  Target: LAMA2; (-) strand; PAM type: NRG; PAM sequence: CAG
tatacaggaaataatgctct

SEQ ID NO: 107430 - DNA, 20 bp, Artificial Sequence
  Description of Artificial Sequence: Synthetic oligonucleotide
  Target: LAMA2; (-) strand; PAM type: NRG; PAM sequence: AGG
gcagagtctatcatttatac

SEQ ID NO: 107431 - DNA, 20 bp, Artificial Sequence
  Description of Artificial Sequence: Synthetic oligonucleotide
  Target: LAMA2; (-) strand; PAM type: NRG; PAM sequence: CAG
tgcagagtctatcatttata

SEQ ID NO: 107432 - DNA, 20 bp, Artificial Sequence
  Description of Artificial Sequence: Synthetic oligonucleotide
  Target: LAMA2; (-) strand; PAM type: NRG; PAM sequence: GAG
gcttcatcttaaagagtgca

SEQ ID NO: 107433 - DNA, 20 bp, Artificial Sequence
  Description of Artificial Sequence: Synthetic oligonucleotide
  Target: LAMA2; (-) strand; PAM type: NRG; PAM sequence: CAG
tagcttcatcttaaagagtg

SEQ ID NO: 107434 - DNA, 20 bp, Artificial Sequence
  Description of Artificial Sequence: Synthetic oligonucleotide
  Target: LAMA2; (-) strand; PAM type: NRG; PAM sequence: GAG
ataaatagcttcatcttaaa

SEQ ID NO: 107435 - DNA, 20 bp, Artificial Sequence
  Description of Artificial Sequence: Synthetic oligonucleotide
  Target: LAMA2; (-) strand; PAM type: NRG; PAM sequence: AAG
acataaatagcttcatctta

SEQ ID NO: 107436 - DNA, 20 bp, Artificial Sequence
  Description of Artificial Sequence: Synthetic oligonucleotide
  Target: LAMA2; (-) strand; PAM type: NRG; PAM sequence: TAG
gggaagaatgaggacataaa

SEQ ID NO: 107437 - DNA, 20 bp, Artificial Sequence
  Description of Artificial Sequence: Synthetic oligonucleotide
  Target: LAMA2; (-) strand; PAM type: NRG; PAM sequence: AGG
ggaagctaaagggaagaatg

SEQ ID NO: 107438 - DNA, 20 bp, Artificial Sequence
  Description of Artificial Sequence: Synthetic oligonucleotide
  Target: LAMA2; (-) strand; PAM type: NRG; PAM sequence: GAG
aggaagctaaagggaagaat

SEQ ID NO: 107439 - DNA, 20 bp, Artificial Sequence
  Description of Artificial Sequence: Synthetic oligonucleotide
  Target: LAMA2; (-) strand; PAM type: NRG; PAM sequence: AAG
gaaaaaaggaagctaaaggg

SEQ ID NO: 107440 - DNA, 20 bp, Artificial Sequence
  Description of Artificial Sequence: Synthetic oligonucleotide
  Target: LAMA2; (-) strand; PAM type: NRG; PAM sequence: GGG
gaggaaaaaaggaagctaaa

SEQ ID NO: 107441 - DNA, 20 bp, Artificial Sequence
  Description of Artificial Sequence: Synthetic oligonucleotide
  Target: LAMA2; (-) strand; PAM type: NRG; PAM sequence: AGG
cgaggaaaaaaggaagctaa

SEQ ID NO: 107442 - DNA, 20 bp, Artificial Sequence
  Description of Artificial Sequence: Synthetic oligonucleotide
  Target: LAMA2; (-) strand; PAM type: NRG; PAM sequence: AAG
acgaggaaaaaaggaagcta

SEQ ID NO: 107443 - DNA, 20 bp, Artificial Sequence
  Description of Artificial Sequence: Synthetic oligonucleotide
  Target: LAMA2; (-) strand; PAM type: NRG; PAM sequence: AAG
gagaggacgaggaaaaaagg

SEQ ID NO: 107444 - DNA, 20 bp, Artificial Sequence
  Description of Artificial Sequence: Synthetic oligonucleotide
  Target: LAMA2; (-) strand; PAM type: NRG; PAM sequence: AGG
gctgagaggacgaggaaaaa

SEQ ID NO: 107445 - DNA, 20 bp, Artificial Sequence
  Description of Artificial Sequence: Synthetic oligonucleotide
  Target: LAMA2; (-) strand; PAM type: NRG; PAM sequence: AAG
agctgagaggacgaggaaaa

SEQ ID NO: 107446 - DNA, 20 bp, Artificial Sequence
  Description of Artificial Sequence: Synthetic oligonucleotide
  Target: LAMA2; (-) strand; PAM type: NRG; PAM sequence: AGG
aggtagaagctgagaggacg

SEQ ID NO: 107447 - DNA, 20 bp, Artificial Sequence
  Description of Artificial Sequence: Synthetic oligonucleotide
  Target: LAMA2; (-) strand; PAM type: NRG; PAM sequence: GAG
gaggtagaagctgagaggac

SEQ ID NO: 107448 - DNA, 20 bp, Artificial Sequence
  Description of Artificial Sequence: Synthetic oligonucleotide
  Target: LAMA2; (-) strand; PAM type: NRG; PAM sequence: AGG
ttaaagaggtagaagctgag

SEQ ID NO: 107449 - DNA, 20 bp, Artificial Sequence
  Description of Artificial Sequence: Synthetic oligonucleotide
  Target: LAMA2; (-) strand; PAM type: NRG; PAM sequence: GAG
gttaaagaggtagaagctga

SEQ ID NO: 107450 - DNA, 20 bp, Artificial Sequence
  Description of Artificial Sequence: Synthetic oligonucleotide
  Target: LAMA2; (-) strand; PAM type: NRG; PAM sequence: GAG
aagttaaagaggtagaagct

SEQ ID NO: 107451 - DNA, 20 bp, Artificial Sequence
  Description of Artificial Sequence: Synthetic oligonucleotide
  Target: LAMA2; (-) strand; PAM type: NRG; PAM sequence: AAG
tatcaaagttaaagaggtag

SEQ ID NO: 107452 - DNA, 20 bp, Artificial Sequence
  Description of Artificial Sequence: Synthetic oligonucleotide
  Target: LAMA2; (-) strand; PAM type: NRG; PAM sequence: TAG
caatatcaaagttaaagagg

SEQ ID NO: 107453 - DNA, 20 bp, Artificial Sequence
  Description of Artificial Sequence: Synthetic oligonucleotide
  Target: LAMA2; (-) strand; PAM type: NRG; PAM sequence: AGG
tcacaatatcaaagttaaag

SEQ ID NO: 107454 - DNA, 20 bp, Artificial Sequence
  Description of Artificial Sequence: Synthetic oligonucleotide
  Target: LAMA2; (-) strand; PAM type: NRG; PAM sequence: GAG
atcacaatatcaaagttaaa

SEQ ID NO: 107455 - DNA, 20 bp, Artificial Sequence
  Description of Artificial Sequence: Synthetic oligonucleotide
  Target: LAMA2; (-) strand; PAM type: NRG; PAM sequence: AAG
ccatcacaatatcaaagtta

SEQ ID NO: 107456 - DNA, 20 bp, Artificial Sequence
  Description of Artificial Sequence: Synthetic oligonucleotide
  Target: LAMA2; (-) strand; PAM type: NRG; PAM sequence: AAG
tattgaccatcacaatatca

SEQ ID NO: 107457 - DNA, 20 bp, Artificial Sequence
  Description of Artificial Sequence: Synthetic oligonucleotide
  Target: LAMA2; (-) strand; PAM type: NRG; PAM sequence: TAG
ccatggcacaattatggtta

SEQ ID NO: 107458 - DNA, 20 bp, Artificial Sequence
  Description of Artificial Sequence: Synthetic oligonucleotide
  Target: LAMA2; (-) strand; PAM type: NRG; PAM sequence: TGG
attctgccatggcacaatta

SEQ ID NO: 107459 - DNA, 20 bp, Artificial Sequence
  Description of Artificial Sequence: Synthetic oligonucleotide
  Target: LAMA2; (-) strand; PAM type: NRG; PAM sequence: TGG
gggacttctgtattctgcca

SEQ ID NO: 107460 - DNA, 20 bp, Artificial Sequence
  Description of Artificial Sequence: Synthetic oligonucleotide
  Target: LAMA2; (-) strand; PAM type: NRG; PAM sequence: GGG
aataaaatgtcttcagagaa

SEQ ID NO: 107461 - DNA, 20 bp, Artificial Sequence
  Description of Artificial Sequence: Synthetic oligonucleotide
  Target: LAMA2; (-) strand; PAM type: NRG; PAM sequence: AGG
gaataaaatgtcttcagaga

SEQ ID NO: 107462 - DNA, 20 bp, Artificial Sequence
  Description of Artificial Sequence: Synthetic oligonucleotide
  Target: LAMA2; (-) strand; PAM type: NRG; PAM sequence: AAG
ggaataaaatgtcttcagag

SEQ ID NO: 107463 - DNA, 20 bp, Artificial Sequence
  Description of Artificial Sequence: Synthetic oligonucleotide
  Target: LAMA2; (-) strand; PAM type: NRG; PAM sequence: GAG
taaggaataaaatgtcttca

SEQ ID NO: 107464 - DNA, 20 bp, Artificial Sequence
  Description of Artificial Sequence: Synthetic oligonucleotide
  Target: LAMA2; (-) strand; PAM type: NRG; PAM sequence: CAG
tttaaggaataaaatgtctt

SEQ ID NO: 107465 - DNA, 20 bp, Artificial Sequence
  Description of Artificial Sequence: Synthetic oligonucleotide
  Target: LAMA2; (-) strand; PAM type: NRG; PAM sequence: AGG
aaatcaaagggagtccttta

SEQ ID NO: 107466 - DNA, 20 bp, Artificial Sequence
  Description of Artificial Sequence: Synthetic oligonucleotide
  Target: LAMA2; (-) strand; PAM type: NRG; PAM sequence: AAG
aaaatcaaagggagtccttt

SEQ ID NO: 107467 - DNA, 20 bp, Artificial Sequence
  Description of Artificial Sequence: Synthetic oligonucleotide
  Target: LAMA2; (-) strand; PAM type: NRG; PAM sequence: GAG
cactgaaaaaaaatcaaagg

SEQ ID NO: 107468 - DNA, 20 bp, Artificial Sequence
  Description of Artificial Sequence: Synthetic oligonucleotide
  Target: LAMA2; (-) strand; PAM type: NRG; PAM sequence: GGG
cccactgaaaaaaaatcaaa

SEQ ID NO: 107469 - DNA, 20 bp, Artificial Sequence
  Description of Artificial Sequence: Synthetic oligonucleotide
  Target: LAMA2; (-) strand; PAM type: NRG; PAM sequence: AGG
gcccactgaaaaaaaatcaa

SEQ ID NO: 107470 - DNA, 20 bp, Artificial Sequence
  Description of Artificial Sequence: Synthetic oligonucleotide
  Target: LAMA2; (-) strand; PAM type: NRG; PAM sequence: AAG
ggcccactgaaaaaaaatca

SEQ ID NO: 107471 - DNA, 20 bp, Artificial Sequence
  Description of Artificial Sequence: Synthetic oligonucleotide
  Target: LAMA2; (-) strand; PAM type: NRG; PAM sequence: TGG
actggcaatcaagcatcaaa

SEQ ID NO: 107472 - DNA, 20 bp, Artificial Sequence
  Description of Artificial Sequence: Synthetic oligonucleotide
  Target: LAMA2; (-) strand; PAM type: NRG; PAM sequence: AAG
gcacagagcaactggcaatc

SEQ ID NO: 107473 - DNA, 20 bp, Artificial Sequence
  Description of Artificial Sequence: Synthetic oligonucleotide
  Target: LAMA2; (-) strand; PAM type: NRG; PAM sequence: TGG
tctcttctgcacagagcaac

SEQ ID NO: 107474 - DNA, 20 bp, Artificial Sequence
  Description of Artificial Sequence: Synthetic oligonucleotide
  Target: LAMA2; (-) strand; PAM type: NRG; PAM sequence: GAG
taccccttctcttctgcaca

SEQ ID NO: 107475 - DNA, 20 bp, Artificial Sequence
  Description of Artificial Sequence: Synthetic oligonucleotide
  Target: LAMA2; (-) strand; PAM type: NRG; PAM sequence: CAG
aataccccttctcttctgca

SEQ ID NO: 107476 - DNA, 20 bp, Artificial Sequence
  Description of Artificial Sequence: Synthetic oligonucleotide
  Target: LAMA2; (-) strand; PAM type: NRG; PAM sequence: TGG
attcactgcaagttatttta

SEQ ID NO: 107477 - DNA, 20 bp, Artificial Sequence
  Description of Artificial Sequence: Synthetic oligonucleotide
  Target: LAMA2; (-) strand; PAM type: NRG; PAM sequence: AAG
aaaaaggaataattcactgc

SEQ ID NO: 107478 - DNA, 20 bp, Artificial Sequence
  Description of Artificial Sequence: Synthetic oligonucleotide
  Target: LAMA2; (-) strand; PAM type: NRG; PAM sequence: AGG
agtcagttgtgaaaataaaa

SEQ ID NO: 107479 - DNA, 20 bp, Artificial Sequence
  Description of Artificial Sequence: Synthetic oligonucleotide
  Target: LAMA2; (-) strand; PAM type: NRG; PAM sequence: AAG
gagtcagttgtgaaaataaa

SEQ ID NO: 107480 - DNA, 20 bp, Artificial Sequence
  Description of Artificial Sequence: Synthetic oligonucleotide
  Target: LAMA2; (-) strand; PAM type: NRG; PAM sequence: CAG
gtaaggtagagaatgagagt

SEQ ID NO: 107481 - DNA, 20 bp, Artificial Sequence
  Description of Artificial Sequence: Synthetic oligonucleotide
  Target: LAMA2; (-) strand; PAM type: NRG; PAM sequence: GAG
acaggtaaggtagagaatga

SEQ ID NO: 107482 - DNA, 20 bp, Artificial Sequence
  Description of Artificial Sequence: Synthetic oligonucleotide
  Target: LAMA2; (-) strand; PAM type: NRG; PAM sequence: GAG
gaacaggtaaggtagagaat

SEQ ID NO: 107483 - DNA, 20 bp, Artificial Sequence
  Description of Artificial Sequence: Synthetic oligonucleotide
  Target: LAMA2; (-) strand; PAM type: NRG; PAM sequence: GAG
cagaaagaacaggtaaggta

SEQ ID NO: 107484 - DNA, 20 bp, Artificial Sequence
  Description of Artificial Sequence: Synthetic oligonucleotide
  Target: LAMA2; (-) strand; PAM type: NRG; PAM sequence: TAG
ctcagaaagaacaggtaagg

SEQ ID NO: 107485 - DNA, 20 bp, Artificial Sequence
  Description of Artificial Sequence: Synthetic oligonucleotide
  Target: LAMA2; (-) strand; PAM type: NRG; PAM sequence: AGG
ggcctcagaaagaacaggta

SEQ ID NO: 107486 - DNA, 20 bp, Artificial Sequence
  Description of Artificial Sequence: Synthetic oligonucleotide
  Target: LAMA2; (-) strand; PAM type: NRG; PAM sequence: AAG
aggcctcagaaagaacaggt

SEQ ID NO: 107487 - DNA, 20 bp, Artificial Sequence
  Description of Artificial Sequence: Synthetic oligonucleotide
  Target: LAMA2; (-) strand; PAM type: NRG; PAM sequence: AGG
ggccaggcctcagaaagaac

SEQ ID NO: 107488 - DNA, 20 bp, Artificial Sequence
  Description of Artificial Sequence: Synthetic oligonucleotide
  Target: LAMA2; (-) strand; PAM type: NRG; PAM sequence: CAG
aggccaggcctcagaaagaa

SEQ ID NO: 107489 - DNA, 20 bp, Artificial Sequence
  Description of Artificial Sequence: Synthetic oligonucleotide
  Target: LAMA2; (-) strand; PAM type: NRG; PAM sequence: AAG
ggagaaggccaggcctcaga

SEQ ID NO: 107490 - DNA, 20 bp, Artificial Sequence
  Description of Artificial Sequence: Synthetic oligonucleotide
  Target: LAMA2; (-) strand; PAM type: NRG; PAM sequence: CAG
atttggagaaggccaggcct

SEQ ID NO: 107491 - DNA, 20 bp, Artificial Sequence
  Description of Artificial Sequence: Synthetic oligonucleotide
  Target: LAMA2; (-) strand; PAM type: NRG; PAM sequence: AGG
gaaaaaatttggagaaggcc

SEQ ID NO: 107492 - DNA, 20 bp, Artificial Sequence
  Description of Artificial Sequence: Synthetic oligonucleotide
  Target: LAMA2; (-) strand; PAM type: NRG; PAM sequence: CAG
agaaaaaatttggagaaggc

SEQ ID NO: 107493 - DNA, 20 bp, Artificial Sequence
  Description of Artificial Sequence: Synthetic oligonucleotide
  Target: LAMA2; (-) strand; PAM type: NRG; PAM sequence: AGG
agatagaaaaaatttggaga

SEQ ID NO: 107494 - DNA, 20 bp, Artificial Sequence
  Description of Artificial Sequence: Synthetic oligonucleotide
  Target: LAMA2; (-) strand; PAM type: NRG; PAM sequence: AAG
gagatagaaaaaatttggag

SEQ ID NO: 107495 - DNA, 20 bp, Artificial Sequence
  Description of Artificial Sequence: Synthetic oligonucleotide
  Target: LAMA2; (-) strand; PAM type: NRG; PAM sequence: GAG
aaggagatagaaaaaatttg

SEQ ID NO: 107496 - DNA, 20 bp, Artificial Sequence
  Description of Artificial Sequence: Synthetic oligonucleotide
  Target: LAMA2; (-) strand; PAM type: NRG; PAM sequence: TGG
gcaaggagatagaaaaaatt

SEQ ID NO: 107497 - DNA, 20 bp, Artificial Sequence
  Description of Artificial Sequence: Synthetic oligonucleotide
  Target: LAMA2; (-) strand; PAM type: NRG; PAM sequence: TAG
ggtatatgccagcaaggaga

SEQ ID NO: 107498 - DNA, 20 bp, Artificial Sequence
  Description of Artificial Sequence: Synthetic oligonucleotide
  Target: LAMA2; (-) strand; PAM type: NRG; PAM sequence: GAG
atagggtatatgccagcaag

SEQ ID NO: 107499 - DNA, 20 bp, Artificial Sequence
  Description of Artificial Sequence: Synthetic oligonucleotide
  Target: LAMA2; (-) strand; PAM type: NRG; PAM sequence: AGG
ctatagggtatatgccagca

SEQ ID NO: 107500 - DNA, 20 bp, Artificial Sequence
  Description of Artificial Sequence: Synthetic oligonucleotide
  Target: LAMA2; (-) strand; PAM type: NRG; PAM sequence: AAG
actatagggtatatgccagc

SEQ ID NO: 107501 - DNA, 20 bp, Artificial Sequence
  Description of Artificial Sequence: Synthetic oligonucleotide
  Target: LAMA2; (-) strand; PAM type: NRG; PAM sequence: CAG
ttgcactatagggtatatgc

SEQ ID NO: 107502 - DNA, 20 bp, Artificial Sequence
  Description of Artificial Sequence: Synthetic oligonucleotide
  Target: LAMA2; (-) strand; PAM type: NRG; PAM sequence: GGG
tacccacaacttgcactata

SEQ ID NO: 107503 - DNA, 20 bp, Artificial Sequence
  Description of Artificial Sequence: Synthetic oligonucleotide
  Target: LAMA2; (-) strand; PAM type: NRG; PAM sequence: AGG
gtacccacaacttgcactat

SEQ ID NO: 107504 - DNA, 20 bp, Artificial Sequence
  Description of Artificial Sequence: Synthetic oligonucleotide
  Target: LAMA2; (-) strand; PAM type: NRG; PAM sequence: TAG
tgtacccacaacttgcacta

SEQ ID NO: 107505 - DNA, 20 bp, Artificial Sequence
  Description of Artificial Sequence: Synthetic oligonucleotide
  Target: LAMA2; (-) strand; PAM type: NRG; PAM sequence: CAG
tcctgctcctcaatcttttg

SEQ ID NO: 107506 - DNA, 20 bp, Artificial Sequence
  Description of Artificial Sequence: Synthetic oligonucleotide
  Target: LAMA2; (-) strand; PAM type: NRG; PAM sequence: TAG
agccaccatggttatttaga

SEQ ID NO: 107507 - DNA, 20 bp, Artificial Sequence
  Description of Artificial Sequence: Synthetic oligonucleotide
  Target: LAMA2; (-) strand; PAM type: NRG; PAM sequence: TAG
acccagccaccatggttatt

SEQ ID NO: 107508 - DNA, 20 bp, Artificial Sequence
  Description of Artificial Sequence: Synthetic oligonucleotide
  Target: LAMA2; (-) strand; PAM type: NRG; PAM sequence: TGG
gtcactgcacccagccacca

SEQ ID NO: 107509 - DNA, 20 bp, Artificial Sequence
  Description of Artificial Sequence: Synthetic oligonucleotide
  Target: LAMA2; (-) strand; PAM type: NRG; PAM sequence: CAG
ccggcatgagtcactgcacc

SEQ ID NO: 107510 - DNA, 20 bp, Artificial Sequence
  Description of Artificial Sequence: Synthetic oligonucleotide
  Target: LAMA2; (-) strand; PAM type: NRG; PAM sequence: GAG
agtgctgggattaccggcat

SEQ ID NO: 107511 - DNA, 20 bp, Artificial Sequence
  Description of Artificial Sequence: Synthetic oligonucleotide
  Target: LAMA2; (-) strand; PAM type: NRG; PAM sequence: CGG
tcccaaagtgctgggattac

SEQ ID NO: 107512 - DNA, 20 bp, Artificial Sequence
  Description of Artificial Sequence: Synthetic oligonucleotide
  Target: LAMA2; (-) strand; PAM type: NRG; PAM sequence: GGG
cctcagcctcccaaagtgct

SEQ ID NO: 107513 - DNA, 20 bp, Artificial Sequence
  Description of Artificial Sequence: Synthetic oligonucleotide
  Target: LAMA2; (-) strand; PAM type: NRG; PAM sequence: TGG
acctcagcctcccaaagtgc

SEQ ID NO: 107514 - DNA, 20 bp, Artificial Sequence
  Description of Artificial Sequence: Synthetic oligonucleotide
  Target: LAMA2; (-) strand; PAM type: NRG; PAM sequence: AAG
cttcccacctcagcctccca

SEQ ID NO: 107515 - DNA, 20 bp, Artificial Sequence
  Description of Artificial Sequence: Synthetic oligonucleotide
  Target: LAMA2; (-) strand; PAM type: NRG; PAM sequence: CAG
ctcaagcaatcttcccacct

SEQ ID NO: 107516 - DNA, 20 bp, Artificial Sequence
  Description of Artificial Sequence: Synthetic oligonucleotide
  Target: LAMA2; (-) strand; PAM type: NRG; PAM sequence: AAG
ggtctcaaactcctgggctc

SEQ ID NO: 107517 - DNA, 20 bp, Artificial Sequence
  Description of Artificial Sequence: Synthetic oligonucleotide
  Target: LAMA2; (-) strand; PAM type: NRG; PAM sequence: GGG
caggctggtctcaaactcct

SEQ ID NO: 107518 - DNA, 20 bp, Artificial Sequence
  Description of Artificial Sequence: Synthetic oligonucleotide
  Target: LAMA2; (-) strand; PAM type: NRG; PAM sequence: TGG
ccaggctggtctcaaactcc

SEQ ID NO: 107519 - DNA, 20 bp, Artificial Sequence
  Description of Artificial Sequence: Synthetic oligonucleotide
  Target: LAMA2; (-) strand; PAM type: NRG; PAM sequence: TGG
tttcgccatgttgtccaggc

SEQ ID NO: 107520 - DNA, 20 bp, Artificial Sequence
  Description of Artificial Sequence: Synthetic oligonucleotide
  Target: LAMA2; (-) strand; PAM type: NRG; PAM sequence: AGG
ggggtttcgccatgttgtcc

SEQ ID NO: 107521 - DNA, 20 bp, Artificial Sequence
  Description of Artificial Sequence: Synthetic oligonucleotide
  Target: LAMA2; (-) strand; PAM type: NRG; PAM sequence: CAG
tggggtttcgccatgttgtc

SEQ ID NO: 107522 - DNA, 20 bp, Artificial Sequence
  Description of Artificial Sequence: Synthetic oligonucleotide
  Target: LAMA2; (-) strand; PAM type: NRG; PAM sequence: GGG
ttgtatttttagtagagatg

SEQ ID NO: 107523 - DNA, 20 bp, Artificial Sequence
  Description of Artificial Sequence: Synthetic oligonucleotide
  Target: LAMA2; (-) strand; PAM type: NRG; PAM sequence: GGG
tttgtatttttagtagagat

SEQ ID NO: 107524 - DNA, 20 bp, Artificial Sequence
  Description of Artificial Sequence: Synthetic oligonucleotide
  Target: LAMA2; (-) strand; PAM type: NRG; PAM sequence: TGG
ttttgtatttttagtagaga

SEQ ID NO: 107525 - DNA, 20 bp, Artificial Sequence
  Description of Artificial Sequence: Synthetic oligonucleotide
  Target: LAMA2; (-) strand; PAM type: NRG; PAM sequence: GAG
taatttttgtatttttagta

SEQ ID NO: 107526 - DNA, 20 bp, Artificial Sequence
  Description of Artificial Sequence: Synthetic oligonucleotide
  Target: LAMA2; (-) strand; PAM type: NRG; PAM sequence: TAG
gctaatttttgtatttttag

SEQ ID NO: 107527 - DNA, 20 bp, Artificial Sequence
  Description of Artificial Sequence: Synthetic oligonucleotide
  Target: LAMA2; (-) strand; PAM type: NRG; PAM sequence: TAG
ctggctaatttttgtatttt

SEQ ID NO: 107528 - DNA, 20 bp, Artificial Sequence
  Description of Artificial Sequence: Synthetic oligonucleotide
  Target: LAMA2; (-) strand; PAM type: NRG; PAM sequence: TGG
caggcatgtgtcaccatgcc

SEQ ID NO: 107529 - DNA, 20 bp, Artificial Sequence
  Description of Artificial Sequence: Synthetic oligonucleotide
  Target: LAMA2; (-) strand; PAM type: NRG; PAM sequence: AGG
tcctgagtagcctggattac

SEQ ID NO: 107530 - DNA, 20 bp, Artificial Sequence
  Description of Artificial Sequence: Synthetic oligonucleotide
  Target: LAMA2; (-) strand; PAM type: NRG; PAM sequence: CAG
ctcctgagtagcctggatta

SEQ ID NO: 107531 - DNA, 20 bp, Artificial Sequence
  Description of Artificial Sequence: Synthetic oligonucleotide
  Target: LAMA2; (-) strand; PAM type: NRG; PAM sequence: TGG
cctcagcctcctgagtagcc

SEQ ID NO: 107532 - DNA, 20 bp, Artificial Sequence
  Description of Artificial Sequence: Synthetic oligonucleotide
  Target: LAMA2; (-) strand; PAM type: NRG; PAM sequence: TAG
tcccacctcagcctcctgag

SEQ ID NO: 107533 - DNA, 20 bp, Artificial Sequence
  Description of Artificial Sequence: Synthetic oligonucleotide
  Target: LAMA2; (-) strand; PAM type: NRG; PAM sequence: GAG
tcctcccacctcagcctcct

SEQ ID NO: 107534 - DNA, 20 bp, Artificial Sequence
  Description of Artificial Sequence: Synthetic oligonucleotide
  Target: LAMA2; (-) strand; PAM type: NRG; PAM sequence: CAG
ctcaggggatcctcccacct

SEQ ID NO: 107535 - DNA, 20 bp, Artificial Sequence
  Description of Artificial Sequence: Synthetic oligonucleotide
  Target: LAMA2; (-) strand; PAM type: NRG; PAM sequence: GGG
ccttgacttcccaggctcag

SEQ ID NO: 107536 - DNA, 20 bp, Artificial Sequence
  Description of Artificial Sequence: Synthetic oligonucleotide
  Target: LAMA2; (-) strand; PAM type: NRG; PAM sequence: GGG
gccttgacttcccaggctca

SEQ ID NO: 107537 - DNA, 20 bp, Artificial Sequence
  Description of Artificial Sequence: Synthetic oligonucleotide
  Target: LAMA2; (-) strand; PAM type: NRG; PAM sequence: AGG
agccttgacttcccaggctc

SEQ ID NO: 107538 - DNA, 20 bp, Artificial Sequence
  Description of Artificial Sequence: Synthetic oligonucleotide
  Target: LAMA2; (-) strand; PAM type: NRG; PAM sequence: CAG
cagccttgacttcccaggct

SEQ ID NO: 107539 - DNA, 20 bp, Artificial Sequence
  Description of Artificial Sequence: Synthetic oligonucleotide
  Target: LAMA2; (-) strand; PAM type: NRG; PAM sequence: AGG
cactgcagccttgacttccc

SEQ ID NO: 107540 - DNA, 20 bp, Artificial Sequence
  Description of Artificial Sequence: Synthetic oligonucleotide
  Target: LAMA2; (-) strand; PAM type: NRG; PAM sequence: CAG
tcactgcagccttgacttcc

SEQ ID NO: 107541 - DNA, 20 bp, Artificial Sequence
  Description of Artificial Sequence: Synthetic oligonucleotide
  Target: LAMA2; (-) strand; PAM type: NRG; PAM sequence: CAG
ggcatgatcttggctcactg

SEQ ID NO: 107542 - DNA, 20 bp, Artificial Sequence
  Description of Artificial Sequence: Synthetic oligonucleotide
  Target: LAMA2; (-) strand; PAM type: NRG; PAM sequence: TGG
ggagtgcagtggcatgatct

SEQ ID NO: 107543 - DNA, 20 bp, Artificial Sequence
  Description of Artificial Sequence: Synthetic oligonucleotide
  Target: LAMA2; (-) strand; PAM type: NRG; PAM sequence: TGG
tcacgcaggctggagtgcag

SEQ ID NO: 107544 - DNA, 20 bp, Artificial Sequence
  Description of Artificial Sequence: Synthetic oligonucleotide
  Target: LAMA2; (-) strand; PAM type: NRG; PAM sequence: CAG
ctgtcacgcaggctggagtg

SEQ ID NO: 107545 - DNA, 20 bp, Artificial Sequence
  Description of Artificial Sequence: Synthetic oligonucleotide
  Target: LAMA2; (-) strand; PAM type: NRG; PAM sequence: GAG
ttgctctgtcacgcaggctg

SEQ ID NO: 107546 - DNA, 20 bp, Artificial Sequence
  Description of Artificial Sequence: Synthetic oligonucleotide
  Target: LAMA2; (-) strand; PAM type: NRG; PAM sequence: TGG
tcttgctctgtcacgcaggc

SEQ ID NO: 107547 - DNA, 20 bp, Artificial Sequence
  Description of Artificial Sequence: Synthetic oligonucleotide
  Target: LAMA2; (-) strand; PAM type: NRG; PAM sequence: AGG
aaggtcttgctctgtcacgc

SEQ ID NO: 107548 - DNA, 20 bp, Artificial Sequence
  Description of Artificial Sequence: Synthetic oligonucleotide
  Target: LAMA2; (-) strand; PAM type: NRG; PAM sequence: CAG
taaggtcttgctctgtcacg

SEQ ID NO: 107549 - DNA, 20 bp, Artificial Sequence
  Description of Artificial Sequence: Synthetic oligonucleotide
  Target: LAMA2; (-) strand; PAM type: NRG; PAM sequence: AGG
attttcttttttgtgagata

SEQ ID NO: 107550 - DNA, 20 bp, Artificial Sequence
  Description of Artificial Sequence: Synthetic oligonucleotide
  Target: LAMA2; (-) strand; PAM type: NRG; PAM sequence: AAG
tattttcttttttgtgagat

SEQ ID NO: 107551 - DNA, 20 bp, Artificial Sequence
  Description of Artificial Sequence: Synthetic oligonucleotide
  Target: LAMA2; (-) strand; PAM type: NRG; PAM sequence: GAG
ccttttattttcttttttgt

SEQ ID NO: 107552 - DNA, 20 bp, Artificial Sequence
  Description of Artificial Sequence: Synthetic oligonucleotide
  Target: LAMA2; (-) strand; PAM type: NRG; PAM sequence: GGG
tttcctagccacaccaccat

SEQ ID NO: 107553 - DNA, 20 bp, Artificial Sequence
  Description of Artificial Sequence: Synthetic oligonucleotide
  Target: LAMA2; (-) strand; PAM type: NRG; PAM sequence: TGG
ctttcctagccacaccacca

SEQ ID NO: 107554 - DNA, 20 bp, Artificial Sequence
  Description of Artificial Sequence: Synthetic oligonucleotide
  Target: LAMA2; (-) strand; PAM type: NRG; PAM sequence: TAG
acagggttggcactctttcc

SEQ ID NO: 107555 - DNA, 20 bp, Artificial Sequence
  Description of Artificial Sequence: Synthetic oligonucleotide
  Target: LAMA2; (-) strand; PAM type: NRG; PAM sequence: TGG
agcttccctttggacagggt

SEQ ID NO: 107556 - DNA, 20 bp, Artificial Sequence
  Description of Artificial Sequence: Synthetic oligonucleotide
  Target: LAMA2; (-) strand; PAM type: NRG; PAM sequence: GGG
agaaagcttccctttggaca

SEQ ID NO: 107557 - DNA, 20 bp, Artificial Sequence
  Description of Artificial Sequence: Synthetic oligonucleotide
  Target: LAMA2; (-) strand; PAM type: NRG; PAM sequence: AGG
aagaaagcttccctttggac

SEQ ID NO: 107558 - DNA, 20 bp, Artificial Sequence
  Description of Artificial Sequence: Synthetic oligonucleotide
  Target: LAMA2; (-) strand; PAM type: NRG; PAM sequence: CAG
aaagaaagcttccctttgga

SEQ ID NO: 107559 - DNA, 20 bp, Artificial Sequence
  Description of Artificial Sequence: Synthetic oligonucleotide
  Target: LAMA2; (-) strand; PAM type: NRG; PAM sequence: TGG
cagcaaagaaagcttccctt

SEQ ID NO: 107560 - DNA, 20 bp, Artificial Sequence
  Description of Artificial Sequence: Synthetic oligonucleotide
  Target: LAMA2; (-) strand; PAM type: NRG; PAM sequence: AAG
gtgtataatttcagcaaaga

SEQ ID NO: 107561 - DNA, 20 bp, Artificial Sequence
  Description of Artificial Sequence: Synthetic oligonucleotide
  Target: LAMA2; (-) strand; PAM type: NRG; PAM sequence: AAG
gaaagtgtataatttcagca

SEQ ID NO: 107562 - DNA, 20 bp, Artificial Sequence
  Description of Artificial Sequence: Synthetic oligonucleotide
  Target: LAMA2; (-) strand; PAM type: NRG; PAM sequence: CAG
agaaagaaagtgtataattt

SEQ ID NO: 107563 - DNA, 20 bp, Artificial Sequence
  Description of Artificial Sequence: Synthetic oligonucleotide
  Target: LAMA2; (-) strand; PAM type: NRG; PAM sequence: AAG
aaaaaaaaaaaaaagaaaga

SEQ ID NO: 107564 - DNA, 20 bp, Artificial Sequence
  Description of Artificial Sequence: Synthetic oligonucleotide
  Target: LAMA2; (-) strand; PAM type: NRG; PAM sequence: AAG
aaaaaaaaaaaaaaaaaaga

SEQ ID NO: 107565 - DNA, 20 bp, Artificial Sequence
  Description of Artificial Sequence: Synthetic oligonucleotide
  Target: LAMA2; (-) strand; PAM type: NRG; PAM sequence: AAG
caaaaaaaaaaaaaaaaaaa

SEQ ID NO: 107566 - DNA, 20 bp, Artificial Sequence
  Description of Artificial Sequence: Synthetic oligonucleotide
  Target: LAMA2; (-) strand; PAM type: NRG; PAM sequence: GAG
tccagcctgggcgacagagc

SEQ ID NO: 107567 - DNA, 20 bp, Artificial Sequence
  Description of Artificial Sequence: Synthetic oligonucleotide
  Target: LAMA2; (-) strand; PAM type: NRG; PAM sequence: GAG
gcactccagcctgggcgaca

SEQ ID NO: 107568 - DNA, 20 bp, Artificial Sequence
  Description of Artificial Sequence: Synthetic oligonucleotide
  Target: LAMA2; (-) strand; PAM type: NRG; PAM sequence: CAG
ctgcactccagcctgggcga

SEQ ID NO: 107569 - DNA, 20 bp, Artificial Sequence
  Description of Artificial Sequence: Synthetic oligonucleotide
  Target: LAMA2; (-) strand; PAM type: NRG; PAM sequence: GGG
ccgccactgcactccagcct

SEQ ID NO: 107570 - DNA, 20 bp, Artificial Sequence
  Description of Artificial Sequence: Synthetic oligonucleotide
  Target: LAMA2; (-) strand; PAM type: NRG; PAM sequence: TGG
cccgccactgcactccagcc

SEQ ID NO: 107571 - DNA, 20 bp, Artificial Sequence
  Description of Artificial Sequence: Synthetic oligonucleotide
  Target: LAMA2; (-) strand; PAM type: NRG; PAM sequence: CAG
gagatcccgccactgcactc

SEQ ID NO: 107572 - DNA, 20 bp, Artificial Sequence
  Description of Artificial Sequence: Synthetic oligonucleotide
  Target: LAMA2; (-) strand; PAM type: NRG; PAM sequence: GAG
ggcggagcttgcagtgagcc

SEQ ID NO: 107573 - DNA, 20 bp, Artificial Sequence
  Description of Artificial Sequence: Synthetic oligonucleotide
  Target: LAMA2; (-) strand; PAM type: NRG; PAM sequence: GAG
cgggaggcggagcttgcagt

SEQ ID NO: 107574 - DNA, 20 bp, Artificial Sequence
  Description of Artificial Sequence: Synthetic oligonucleotide
  Target: LAMA2; (-) strand; PAM type: NRG; PAM sequence: CAG
aacccgggaggcggagcttg

SEQ ID NO: 107575 - DNA, 20 bp, Artificial Sequence
  Description of Artificial Sequence: Synthetic oligonucleotide
  Target: LAMA2; (-) strand; PAM type: NRG; PAM sequence: GAG
tggcgtgaacccgggaggcg

SEQ ID NO: 107576 - DNA, 20 bp, Artificial Sequence
  Description of Artificial Sequence: Synthetic oligonucleotide
  Target: LAMA2; (-) strand; PAM type: NRG; PAM sequence: CGG
aatggcgtgaacccgggagg

SEQ ID NO: 107577 - DNA, 20 bp, Artificial Sequence
  Description of Artificial Sequence: Synthetic oligonucleotide
  Target: LAMA2; (-) strand; PAM type: NRG; PAM sequence: AGG
gagaatggcgtgaacccggg

SEQ ID NO: 107578 - DNA, 20 bp, Artificial Sequence
  Description of Artificial Sequence: Synthetic oligonucleotide
  Target: LAMA2; (-) strand; PAM type: NRG; PAM sequence: GAG
ggagaatggcgtgaacccgg

SEQ ID NO: 107579 - DNA, 20 bp, Artificial Sequence
  Description of Artificial Sequence: Synthetic oligonucleotide
  Target: LAMA2; (-) strand; PAM type: NRG; PAM sequence: GGG
caggagaatggcgtgaaccc

SEQ ID NO: 107580 - DNA, 20 bp, Artificial Sequence
  Description of Artificial Sequence: Synthetic oligonucleotide
  Target: LAMA2; (-) strand; PAM type: NRG; PAM sequence: CGG
gcaggagaatggcgtgaacc

SEQ ID NO: 107581 - DNA, 20 bp, Artificial Sequence
  Description of Artificial Sequence: Synthetic oligonucleotide
  Target: LAMA2; (-) strand; PAM type: NRG; PAM sequence: TGG
gggaggctgaggcaggagaa

SEQ ID NO: 107582 - DNA, 20 bp, Artificial Sequence
  Description of Artificial Sequence: Synthetic oligonucleotide
  Target: LAMA2; (-) strand; PAM type: NRG; PAM sequence: GAG
tacttgggaggctgaggcag

SEQ ID NO: 107583 - DNA, 20 bp, Artificial Sequence
  Description of Artificial Sequence: Synthetic oligonucleotide
  Target: LAMA2; (-) strand; PAM type: NRG; PAM sequence: AGG
gctacttgggaggctgaggc

SEQ ID NO: 107584 - DNA, 20 bp, Artificial Sequence
  Description of Artificial Sequence: Synthetic oligonucleotide
  Target: LAMA2; (-) strand; PAM type: NRG; PAM sequence: CAG
agctacttgggaggctgagg

SEQ ID NO: 107585 - DNA, 20 bp, Artificial Sequence
  Description of Artificial Sequence: Synthetic oligonucleotide
  Target: LAMA2; (-) strand; PAM type: NRG; PAM sequence: AGG
cccagctacttgggaggctg

SEQ ID NO: 107586 - DNA, 20 bp, Artificial Sequence
  Description of Artificial Sequence: Synthetic oligonucleotide
  Target: LAMA2; (-) strand; PAM type: NRG; PAM sequence: GAG
tcccagctacttgggaggct

SEQ ID NO: 107587 - DNA, 20 bp, Artificial Sequence
  Description of Artificial Sequence: Synthetic oligonucleotide
  Target: LAMA2; (-) strand; PAM type: NRG; PAM sequence: AGG
tgtagtcccagctacttggg

SEQ ID NO: 107588 - DNA, 20 bp, Artificial Sequence
  Description of Artificial Sequence: Synthetic oligonucleotide
  Target: LAMA2; (-) strand; PAM type: NRG; PAM sequence: GAG
ctgtagtcccagctacttgg

SEQ ID NO: 107589 - DNA, 20 bp, Artificial Sequence
  Description of Artificial Sequence: Synthetic oligonucleotide
  Target: LAMA2; (-) strand; PAM type: NRG; PAM sequence: GGG
gcctgtagtcccagctactt

SEQ ID NO: 107590 - DNA, 20 bp, Artificial Sequence
  Description of Artificial Sequence: Synthetic oligonucleotide
  Target: LAMA2; (-) strand; PAM type: NRG; PAM sequence: TGG
cgcctgtagtcccagctact

SEQ ID NO: 107591 - DNA, 20 bp, Artificial Sequence
  Description of Artificial Sequence: Synthetic oligonucleotide
  Target: LAMA2; (-) strand; PAM type: NRG; PAM sequence: CAG
gtggcgggcgcctgtagtcc

SEQ ID NO: 107592 - DNA, 20 bp, Artificial Sequence
  Description of Artificial Sequence: Synthetic oligonucleotide
  Target: LAMA2; (-) strand; PAM type: NRG; PAM sequence: TAG
ggcgtagtggcgggcgcctg

SEQ ID NO: 107593 - DNA, 20 bp, Artificial Sequence
  Description of Artificial Sequence: Synthetic oligonucleotide
  Target: LAMA2; (-) strand; PAM type: NRG; PAM sequence: GGG
aattagccgggcgtagtggc

SEQ ID NO: 107594 - DNA, 20 bp, Artificial Sequence
  Description of Artificial Sequence: Synthetic oligonucleotide
  Target: LAMA2; (-) strand; PAM type: NRG; PAM sequence: CGG
aaattagccgggcgtagtgg

SEQ ID NO: 107595 - DNA, 20 bp, Artificial Sequence
  Description of Artificial Sequence: Synthetic oligonucleotide
  Target: LAMA2; (-) strand; PAM type: NRG; PAM sequence: TGG
aaaaaattagccgggcgtag

SEQ ID NO: 107596 - DNA, 20 bp, Artificial Sequence
  Description of Artificial Sequence: Synthetic oligonucleotide
  Target: LAMA2; (-) strand; PAM type: NRG; PAM sequence: TAG
acaaaaaaattagccgggcg

SEQ ID NO: 107597 - DNA, 20 bp, Artificial Sequence
  Description of Artificial Sequence: Synthetic oligonucleotide
  Target: LAMA2; (-) strand; PAM type: NRG; PAM sequence: GGG
aaaatacaaaaaaattagcc

SEQ ID NO: 107598 - DNA, 20 bp, Artificial Sequence
  Description of Artificial Sequence: Synthetic oligonucleotide
  Target: LAMA2; (-) strand; PAM type: NRG; PAM sequence: CGG
aaaaatacaaaaaaattagc

SEQ ID NO: 107599 - DNA, 20 bp, Artificial Sequence
  Description of Artificial Sequence: Synthetic oligonucleotide
  Target: LAMA2; (-) strand; PAM type: NRG; PAM sequence: TAG
tactaaaaatacaaaaaaat

SEQ ID NO: 107600 - DNA, 20 bp, Artificial Sequence
  Description of Artificial Sequence: Synthetic oligonucleotide
  Target: LAMA2; (-) strand; PAM type: NRG; PAM sequence: CGG
cgagaccatcccggctaaaa

SEQ ID NO: 107601 - DNA, 20 bp, Artificial Sequence
  Description of Artificial Sequence: Synthetic oligonucleotide
  Target: LAMA2; (-) strand; PAM type: NRG; PAM sequence: CGG
tcaggagatcgagaccatcc

SEQ ID NO: 107602 - DNA, 20 bp, Artificial Sequence
  Description of Artificial Sequence: Synthetic oligonucleotide
  Target: LAMA2; (-) strand; PAM type: NRG; PAM sequence: GAG
gatcacgaggtcaggagatc

SEQ ID NO: 107603 - DNA, 20 bp, Artificial Sequence
  Description of Artificial Sequence: Synthetic oligonucleotide
  Target: LAMA2; (-) strand; PAM type: NRG; PAM sequence: GAG
cgggcggatcacgaggtcag

SEQ ID NO: 107604 - DNA, 20 bp, Artificial Sequence
  Description of Artificial Sequence: Synthetic oligonucleotide
  Target: LAMA2; (-) strand; PAM type: NRG; PAM sequence: AGG
ggcgggcggatcacgaggtc

SEQ ID NO: 107605 - DNA, 20 bp, Artificial Sequence
  Description of Artificial Sequence: Synthetic oligonucleotide
  Target: LAMA2; (-) strand; PAM type: NRG; PAM sequence: CAG
gggcgggcggatcacgaggt

SEQ ID NO: 107606 - DNA, 20 bp, Artificial Sequence
  Description of Artificial Sequence: Synthetic oligonucleotide
  Target: LAMA2; (-) strand; PAM type: NRG; PAM sequence: AGG
ctttgggcgggcggatcacg

SEQ ID NO: 107607 - DNA, 20 bp, Artificial Sequence
  Description of Artificial Sequence: Synthetic oligonucleotide
  Target: LAMA2; (-) strand; PAM type: NRG; PAM sequence: GAG
actttgggcgggcggatcac

SEQ ID NO: 107608 - DNA, 20 bp, Artificial Sequence
  Description of Artificial Sequence: Synthetic oligonucleotide
  Target: LAMA2; (-) strand; PAM type: NRG; PAM sequence: CGG
atcccagcactttgggcggg

SEQ ID NO: 107609 - DNA, 20 bp, Artificial Sequence
  Description of Artificial Sequence: Synthetic oligonucleotide
  Target: LAMA2; (-) strand; PAM type: NRG; PAM sequence: GGG
gtaatcccagcactttgggc

SEQ ID NO: 107610 - DNA, 20 bp, Artificial Sequence
  Description of Artificial Sequence: Synthetic oligonucleotide
  Target: LAMA2; (-) strand; PAM type: NRG; PAM sequence: CGG
tgtaatcccagcactttggg

SEQ ID NO: 107611 - DNA, 20 bp, Artificial Sequence
  Description of Artificial Sequence: Synthetic oligonucleotide
  Target: LAMA2; (-) strand; PAM type: NRG; PAM sequence: GGG
gcctgtaatcccagcacttt

SEQ ID NO: 107612 - DNA, 20 bp, Artificial Sequence
  Description of Artificial Sequence: Synthetic oligonucleotide
  Target: LAMA2; (-) strand; PAM type: NRG; PAM sequence: TGG
cgcctgtaatcccagcactt

SEQ ID NO: 107613 - DNA, 20 bp, Artificial Sequence
  Description of Artificial Sequence: Synthetic oligonucleotide
  Target: LAMA2; (-) strand; PAM type: NRG; PAM sequence: CAG
gtggctcacgcctgtaatcc

SEQ ID NO: 107614 - DNA, 20 bp, Artificial Sequence
  Description of Artificial Sequence: Synthetic oligonucleotide
  Target: LAMA2; (-) strand; PAM type: NRG; PAM sequence: TGG
ataatttcggccgggcgcgg

SEQ ID NO: 107615 - DNA, 20 bp, Artificial Sequence
  Description of Artificial Sequence: Synthetic oligonucleotide
  Target: LAMA2; (-) strand; PAM type: NRG; PAM sequence: CGG
tgtataatttcggccgggcg

SEQ ID NO: 107616 - DNA, 20 bp, Artificial Sequence
  Description of Artificial Sequence: Synthetic oligonucleotide
  Target: LAMA2; (-) strand; PAM type: NRG; PAM sequence: GGG
gaaagtgtataatttcggcc

SEQ ID NO: 107617 - DNA, 20 bp, Artificial Sequence
  Description of Artificial Sequence: Synthetic oligonucleotide
  Target: LAMA2; (-) strand; PAM type: NRG; PAM sequence: CGG
agaaagtgtataatttcggc

SEQ ID NO: 107618 - DNA, 20 bp, Artificial Sequence
  Description of Artificial Sequence: Synthetic oligonucleotide
  Target: LAMA2; (-) strand; PAM type: NRG; PAM sequence: CGG
tcaaagaaagtgtataattt

SEQ ID NO: 107619 - DNA, 20 bp, Artificial Sequence
  Description of Artificial Sequence: Synthetic oligonucleotide
  Target: LAMA2; (-) strand; PAM type: NRG; PAM sequence: AAG
aaaaagaagttgatcaaaga

SEQ ID NO: 107620 - DNA, 20 bp, Artificial Sequence
  Description of Artificial Sequence: Synthetic oligonucleotide
  Target: LAMA2; (-) strand; PAM type: NRG; PAM sequence: AAG
gagtaaaaagaagttgatca

SEQ ID NO: 107621 - DNA, 20 bp, Artificial Sequence
  Description of Artificial Sequence: Synthetic oligonucleotide
  Target: LAMA2; (-) strand; PAM type: NRG; PAM sequence: AAG
aactatgacggagtaaaaag

SEQ ID NO: 107622 - DNA, 20 bp, Artificial Sequence
  Description of Artificial Sequence: Synthetic oligonucleotide
  Target: LAMA2; (-) strand; PAM type: NRG; PAM sequence: AAG
taaaactatgacggagtaaa

SEQ ID NO: 107623 - DNA, 20 bp, Artificial Sequence
  Description of Artificial Sequence: Synthetic oligonucleotide
  Target: LAMA2; (-) strand; PAM type: NRG; PAM sequence: GAG
tggggaataaaactatgacg

SEQ ID NO: 107624 - DNA, 20 bp, Artificial Sequence
  Description of Artificial Sequence: Synthetic oligonucleotide
  Target: LAMA2; (-) strand; PAM type: NRG; PAM sequence: CGG
ggtggggaataaaactatga

SEQ ID NO: 107625 - DNA, 20 bp, Artificial Sequence
  Description of Artificial Sequence: Synthetic oligonucleotide
  Target: LAMA2; (-) strand; PAM type: NRG; PAM sequence: GGG
ctgtccgggggagattggtg

SEQ ID NO: 107626 - DNA, 20 bp, Artificial Sequence
  Description of Artificial Sequence: Synthetic oligonucleotide
  Target: LAMA2; (-) strand; PAM type: NRG; PAM sequence: GGG
actgtccgggggagattggt

SEQ ID NO: 107627 - DNA, 20 bp, Artificial Sequence
  Description of Artificial Sequence: Synthetic oligonucleotide
  Target: LAMA2; (-) strand; PAM type: NRG; PAM sequence: TGG
gactgtccgggggagattgg

SEQ ID NO: 107628 - DNA, 20 bp, Artificial Sequence
  Description of Artificial Sequence: Synthetic oligonucleotide
  Target: LAMA2; (-) strand; PAM type: NRG; PAM sequence: TGG
agtgactgtccgggggagat

SEQ ID NO: 107629 - DNA, 20 bp, Artificial Sequence
  Description of Artificial Sequence: Synthetic oligonucleotide
  Target: LAMA2; (-) strand; PAM type: NRG; PAM sequence: GAG
aatggagtgactgtccgggg

SEQ ID NO: 107630 - DNA, 20 bp, Artificial Sequence
  Description of Artificial Sequence: Synthetic oligonucleotide
  Target: LAMA2; (-) strand; PAM type: NRG; PAM sequence: GGG
aaaatggagtgactgtccgg

SEQ ID NO: 107631 - DNA, 20 bp, Artificial Sequence
  Description of Artificial Sequence: Synthetic oligonucleotide
  Target: LAMA2; (-) strand; PAM type: NRG; PAM sequence: GGG
taaaatggagtgactgtccg

SEQ ID NO: 107632 - DNA, 20 bp, Artificial Sequence
  Description of Artificial Sequence: Synthetic oligonucleotide
  Target: LAMA2; (-) strand; PAM type: NRG; PAM sequence: GGG
gtaaaatggagtgactgtcc

SEQ ID NO: 107633 - DNA, 20 bp, Artificial Sequence
  Description of Artificial Sequence: Synthetic oligonucleotide
  Target: LAMA2; (-) strand; PAM type: NRG; PAM sequence: CGG
agtaaaatggagtgactgtc

SEQ ID NO: 107634 - DNA, 20 bp, Artificial Sequence
  Description of Artificial Sequence: Synthetic oligonucleotide
  Target: LAMA2; (-) strand; PAM type: NRG; PAM sequence: GAG
ccaagagactaagtaaaatg

SEQ ID NO: 107635 - DNA, 20 bp, Artificial Sequence
  Description of Artificial Sequence: Synthetic oligonucleotide
  Target: LAMA2; (-) strand; PAM type: NRG; PAM sequence: TGG
taccaagagactaagtaaaa

SEQ ID NO: 107636 - DNA, 20 bp, Artificial Sequence
  Description of Artificial Sequence: Synthetic oligonucleotide
  Target: LAMA2; (-) strand; PAM type: NRG; PAM sequence: AAG
gagaatagtaccaagagact

SEQ ID NO: 107637 - DNA, 20 bp, Artificial Sequence
  Description of Artificial Sequence: Synthetic oligonucleotide
  Target: LAMA2; (-) strand; PAM type: NRG; PAM sequence: GAG
aattctgagaatagtaccaa

SEQ ID NO: 107638 - DNA, 20 bp, Artificial Sequence
  Description of Artificial Sequence: Synthetic oligonucleotide
  Target: LAMA2; (-) strand; PAM type: NRG; PAM sequence: AAG
tgaattctgagaatagtacc

SEQ ID NO: 107639 - DNA, 20 bp, Artificial Sequence
  Description of Artificial Sequence: Synthetic oligonucleotide
  Target: LAMA2; (-) strand; PAM type: NRG; PAM sequence: TAG
taaaatttgaattctgagaa

SEQ ID NO: 107640 - DNA, 20 bp, Artificial Sequence
  Description of Artificial Sequence: Synthetic oligonucleotide
  Target: LAMA2; (-) strand; PAM type: NRG; PAM sequence: GAG
taatttaaaatttgaattct

SEQ ID NO: 107641 - DNA, 20 bp, Artificial Sequence
  Description of Artificial Sequence: Synthetic oligonucleotide
  Target: LAMA2; (-) strand; PAM type: NRG; PAM sequence: CAG
caaacagctcttcagaaata

SEQ ID NO: 107642 - DNA, 20 bp, Artificial Sequence
  Description of Artificial Sequence: Synthetic oligonucleotide
  Target: LAMA2; (-) strand; PAM type: NRG; PAM sequence: CAG
taagaaaacaaacagctctt

SEQ ID NO: 107643 - DNA, 20 bp, Artificial Sequence
  Description of Artificial Sequence: Synthetic oligonucleotide
  Target: LAMA2; (-) strand; PAM type: NRG; PAM sequence: CAG
atatacagtaagaaaacaaa

SEQ ID NO: 107644 - DNA, 20 bp, Artificial Sequence
  Description of Artificial Sequence: Synthetic oligonucleotide
  Target: LAMA2; (-) strand; PAM type: NRG; PAM sequence: AAG
gagaaagcaaaatatacagt

SEQ ID NO: 107645 - DNA, 20 bp, Artificial Sequence
  Description of Artificial Sequence: Synthetic oligonucleotide
  Target: LAMA2; (-) strand; PAM type: NRG; PAM sequence: CAG
catggagaaagcaaaatata

SEQ ID NO: 107646 - DNA, 20 bp, Artificial Sequence
  Description of Artificial Sequence: Synthetic oligonucleotide
  Target: LAMA2; (-) strand; PAM type: NRG; PAM sequence: AAG
gcatatctttcccatggaga

SEQ ID NO: 107647 - DNA, 20 bp, Artificial Sequence
  Description of Artificial Sequence: Synthetic oligonucleotide
  Target: LAMA2; (-) strand; PAM type: NRG; PAM sequence: GAG
ccaagcatatctttcccatg

SEQ ID NO: 107648 - DNA, 20 bp, Artificial Sequence
  Description of Artificial Sequence: Synthetic oligonucleotide
  Target: LAMA2; (-) strand; PAM type: NRG; PAM sequence: TGG
tcccaagcatatctttccca

SEQ ID NO: 107649 - DNA, 20 bp, Artificial Sequence
  Description of Artificial Sequence: Synthetic oligonucleotide
  Target: LAMA2; (-) strand; PAM type: NRG; PAM sequence: AAG
caagactgcatgaggctccc

SEQ ID NO: 107650 - DNA, 20 bp, Artificial Sequence
  Description of Artificial Sequence: Synthetic oligonucleotide
  Target: LAMA2; (-) strand; PAM type: NRG; PAM sequence: AGG
actcccaccaagactgcatg

SEQ ID NO: 107651 - DNA, 20 bp, Artificial Sequence
  Description of Artificial Sequence: Synthetic oligonucleotide
  Target: LAMA2; (-) strand; PAM type: NRG; PAM sequence: GAG
aactcccaccaagactgcat

SEQ ID NO: 107652 - DNA, 20 bp, Artificial Sequence
  Description of Artificial Sequence: Synthetic oligonucleotide
  Target: LAMA2; (-) strand; PAM type: NRG; PAM sequence: AAG
gtggttacataactcccacc

SEQ ID NO: 107653 - DNA, 20 bp, Artificial Sequence
  Description of Artificial Sequence: Synthetic oligonucleotide
  Target: LAMA2; (-) strand; PAM type: NRG; PAM sequence: TGG
ccctgacatatctggcccag

SEQ ID NO: 107654 - DNA, 20 bp, Artificial Sequence
  Description of Artificial Sequence: Synthetic oligonucleotide
  Target: LAMA2; (-) strand; PAM type: NRG; PAM sequence: CAG
gtgccctgacatatctggcc

SEQ ID NO: 107655 - DNA, 20 bp, Artificial Sequence
  Description of Artificial Sequence: Synthetic oligonucleotide
  Target: LAMA2; (-) strand; PAM type: NRG; PAM sequence: TGG
gctgtgtgccctgacatatc

SEQ ID NO: 107656 - DNA, 20 bp, Artificial Sequence
  Description of Artificial Sequence: Synthetic oligonucleotide
  Target: LAMA2; (-) strand; PAM type: NRG; PAM sequence: TGG
cgatggaactggccagggaa

SEQ ID NO: 107657 - DNA, 20 bp, Artificial Sequence
  Description of Artificial Sequence: Synthetic oligonucleotide
  Target: LAMA2; (-) strand; PAM type: NRG; PAM sequence: GGG
ctgggcgatggaactggcca

SEQ ID NO: 107658 - DNA, 20 bp, Artificial Sequence
  Description of Artificial Sequence: Synthetic oligonucleotide
  Target: LAMA2; (-) strand; PAM type: NRG; PAM sequence: AGG
tctgggcgatggaactggcc

SEQ ID NO: 107659 - DNA, 20 bp, Artificial Sequence
  Description of Artificial Sequence: Synthetic oligonucleotide
  Target: LAMA2; (-) strand; PAM type: NRG; PAM sequence: CAG
ctctgggcgatggaactggc

SEQ ID NO: 107660 - DNA, 20 bp, Artificial Sequence
  Description of Artificial Sequence: Synthetic oligonucleotide
  Target: LAMA2; (-) strand; PAM type: NRG; PAM sequence: TGG
ctggctctgggcgatggaac

SEQ ID NO: 107661 - DNA, 20 bp, Artificial Sequence
  Description of Artificial Sequence: Synthetic oligonucleotide
  Target: LAMA2; (-) strand; PAM type: NRG; PAM sequence: TGG
aagggtctggctctgggcga

SEQ ID NO: 107662 - DNA, 20 bp, Artificial Sequence
  Description of Artificial Sequence: Synthetic oligonucleotide
  Target: LAMA2; (-) strand; PAM type: NRG; PAM sequence: GGG
ggcccaaagggtctggctct

SEQ ID NO: 107663 - DNA, 20 bp, Artificial Sequence
  Description of Artificial Sequence: Synthetic oligonucleotide
  Target: LAMA2; (-) strand; PAM type: NRG; PAM sequence: TGG
gggcccaaagggtctggctc

SEQ ID NO: 107664 - DNA, 20 bp, Artificial Sequence
  Description of Artificial Sequence: Synthetic oligonucleotide
  Target: LAMA2; (-) strand; PAM type: NRG; PAM sequence: TGG
tgtgtagggcccaaagggtc

SEQ ID NO: 107665 - DNA, 20 bp, Artificial Sequence
  Description of Artificial Sequence: Synthetic oligonucleotide
  Target: LAMA2; (-) strand; PAM type: NRG; PAM sequence: GGG
cagtctgtgtagggcccaaa

SEQ ID NO: 107666 - DNA, 20 bp, Artificial Sequence
  Description of Artificial Sequence: Synthetic oligonucleotide
  Target: LAMA2; (-) strand; PAM type: NRG; PAM sequence: AGG
gcagtctgtgtagggcccaa

SEQ ID NO: 107667 - DNA, 20 bp, Artificial Sequence
  Description of Artificial Sequence: Synthetic oligonucleotide
  Target: LAMA2; (-) strand; PAM type: NRG; PAM sequence: AAG
tgcagtctgtgtagggccca

SEQ ID NO: 107668 - DNA, 20 bp, Artificial Sequence
  Description of Artificial Sequence: Synthetic oligonucleotide
  Target: LAMA2; (-) strand; PAM type: NRG; PAM sequence: GGG
ggggctgtgcagtctgtgta

SEQ ID NO: 107669 - DNA, 20 bp, Artificial Sequence
  Description of Artificial Sequence: Synthetic oligonucleotide
  Target: LAMA2; (-) strand; PAM type: NRG; PAM sequence: AGG
tggggctgtgcagtctgtgt

SEQ ID NO: 107670 - DNA, 20 bp, Artificial Sequence
  Description of Artificial Sequence: Synthetic oligonucleotide
  Target: LAMA2; (-) strand; PAM type: NRG; PAM sequence: TAG
ctggggctgtgcagtctgtg

SEQ ID NO: 107671 - DNA, 20 bp, Artificial Sequence
  Description of Artificial Sequence: Synthetic oligonucleotide
  Target: LAMA2; (-) strand; PAM type: NRG; PAM sequence: CAG
ccccacatgctggggctgtg

SEQ ID NO: 107672 - DNA, 20 bp, Artificial Sequence
  Description of Artificial Sequence: Synthetic oligonucleotide
  Target: LAMA2; (-) strand; PAM type: NRG; PAM sequence: GGG
atacaagcccccacatgctg

SEQ ID NO: 107673 - DNA, 20 bp, Artificial Sequence
  Description of Artificial Sequence: Synthetic oligonucleotide
  Target: LAMA2; (-) strand; PAM type: NRG; PAM sequence: GGG
tatacaagcccccacatgct

SEQ ID NO: 107674 - DNA, 20 bp, Artificial Sequence
  Description of Artificial Sequence: Synthetic oligonucleotide
  Target: LAMA2; (-) strand; PAM type: NRG; PAM sequence: TGG
ttatacaagcccccacatgc

SEQ ID NO: 107675 - DNA, 20 bp, Artificial Sequence
  Description of Artificial Sequence: Synthetic oligonucleotide
  Target: LAMA2; (-) strand; PAM type: NRG; PAM sequence: AAG
catcagaacttcccttatac

SEQ ID NO: 107676 - DNA, 20 bp, Artificial Sequence
  Description of Artificial Sequence: Synthetic oligonucleotide
  Target: LAMA2; (-) strand; PAM type: NRG; PAM sequence: CAG
ccccaaggatcctgtgacat

SEQ ID NO: 107677 - DNA, 20 bp, Artificial Sequence
  Description of Artificial Sequence: Synthetic oligonucleotide
  Target: LAMA2; (-) strand; PAM type: NRG; PAM sequence: AGG
gctggtgaagaaacacccca

SEQ ID NO: 107678 - DNA, 20 bp, Artificial Sequence
  Description of Artificial Sequence: Synthetic oligonucleotide
  Target: LAMA2; (-) strand; PAM type: NRG; PAM sequence: AAG
agctggtgaagaaacacccc

SEQ ID NO: 107679 - DNA, 20 bp, Artificial Sequence
  Description of Artificial Sequence: Synthetic oligonucleotide
  Target: LAMA2; (-) strand; PAM type: NRG; PAM sequence: AAG
acagaggtttccagctggtg

SEQ ID NO: 107680 - DNA, 20 bp, Artificial Sequence
  Description of Artificial Sequence: Synthetic oligonucleotide
  Target: LAMA2; (-) strand; PAM type: NRG; PAM sequence: TGG
tggccacagaggtttccagc

SEQ ID NO: 107681 - DNA, 20 bp, Artificial Sequence
  Description of Artificial Sequence: Synthetic oligonucleotide
  Target: LAMA2; (-) strand; PAM type: NRG; PAM sequence: CAG
ccactggccacagaggtttc

SEQ ID NO: 107682 - DNA, 20 bp, Artificial Sequence
  Description of Artificial Sequence: Synthetic oligonucleotide
  Target: LAMA2; (-) strand; PAM type: NRG; PAM sequence: AGG
aaaggtgccactggccacag

SEQ ID NO: 107683 - DNA, 20 bp, Artificial Sequence
  Description of Artificial Sequence: Synthetic oligonucleotide
  Target: LAMA2; (-) strand; PAM type: NRG; PAM sequence: GAG
caaaggtgccactggccaca

SEQ ID NO: 107684 - DNA, 20 bp, Artificial Sequence
  Description of Artificial Sequence: Synthetic oligonucleotide
  Target: LAMA2; (-) strand; PAM type: NRG; PAM sequence: CAG
ggcaaaggtgccactggcca

SEQ ID NO: 107685 - DNA, 20 bp, Artificial Sequence
  Description of Artificial Sequence: Synthetic oligonucleotide
  Target: LAMA2; (-) strand; PAM type: NRG; PAM sequence: TGG
aactcaggcaaaggtgccac

SEQ ID NO: 107686 - DNA, 20 bp, Artificial Sequence
  Description of Artificial Sequence: Synthetic oligonucleotide
  Target: LAMA2; (-) strand; PAM type: NRG; PAM sequence: AGG
cctcagcaaaactcaggcaa

SEQ ID NO: 107687 - DNA, 20 bp, Artificial Sequence
  Description of Artificial Sequence: Synthetic oligonucleotide
  Target: LAMA2; (-) strand; PAM type: NRG; PAM sequence: AAG
acctcagcaaaactcaggca

SEQ ID NO: 107688 - DNA, 20 bp, Artificial Sequence
  Description of Artificial Sequence: Synthetic oligonucleotide
  Target: LAMA2; (-) strand; PAM type: NRG; PAM sequence: AGG
agtggacctcagcaaaactc

SEQ ID NO: 107689 - DNA, 20 bp, Artificial Sequence
  Description of Artificial Sequence: Synthetic oligonucleotide
  Target: LAMA2; (-) strand; PAM type: NRG; PAM sequence: CAG
cagtggacctcagcaaaact

SEQ ID NO: 107690 - DNA, 20 bp, Artificial Sequence
  Description of Artificial Sequence: Synthetic oligonucleotide
  Target: LAMA2; (-) strand; PAM type: NRG; PAM sequence: CAG
ggaatgtgcccagtggacct

SEQ ID NO: 107691 - DNA, 20 bp, Artificial Sequence
  Description of Artificial Sequence: Synthetic oligonucleotide
  Target: LAMA2; (-) strand; PAM type: NRG; PAM sequence: TGG
agtgggcggaatgtgcccag

SEQ ID NO: 107692 - DNA, 20 bp, Artificial Sequence
  Description of Artificial Sequence: Synthetic oligonucleotide
  Target: LAMA2; (-) strand; PAM type: NRG; PAM sequence: CAG
ctgagtgggcggaatgtgcc

SEQ ID NO: 107693 - DNA, 20 bp, Artificial Sequence
  Description of Artificial Sequence: Synthetic oligonucleotide
  Target: LAMA2; (-) strand; PAM type: NRG; PAM sequence: CGG
agcctgccaggctgagtggg

SEQ ID NO: 107694 - DNA, 20 bp, Artificial Sequence
  Description of Artificial Sequence: Synthetic oligonucleotide
  Target: LAMA2; (-) strand; PAM type: NRG; PAM sequence: GGG
tgtagcctgccaggctgagt

SEQ ID NO: 107695 - DNA, 20 bp, Artificial Sequence
  Description of Artificial Sequence: Synthetic oligonucleotide
  Target: LAMA2; (-) strand; PAM type: NRG; PAM sequence: TGG
gtgtagcctgccaggctgag

SEQ ID NO: 107696 - DNA, 20 bp, Artificial Sequence
  Description of Artificial Sequence: Synthetic oligonucleotide
  Target: LAMA2; (-) strand; PAM type: NRG; PAM sequence: GAG
caagtgtagcctgccaggct

SEQ ID NO: 107697 - DNA, 20 bp, Artificial Sequence
  Description of Artificial Sequence: Synthetic oligonucleotide
  Target: LAMA2; (-) strand; PAM type: NRG; PAM sequence: AGG
tgagccaagtgtagcctgcc

SEQ ID NO: 107698 - DNA, 20 bp, Artificial Sequence
  Description of Artificial Sequence: Synthetic oligonucleotide
  Target: LAMA2; (-) strand; PAM type: NRG; PAM sequence: CAG
gtgagccaagtgtagcctgc

SEQ ID NO: 107699 - DNA, 20 bp, Artificial Sequence
  Description of Artificial Sequence: Synthetic oligonucleotide
  Target: LAMA2; (-) strand; PAM type: NRG; PAM sequence: TAG
gtggtagtgtgagccaagtg

SEQ ID NO: 107700 - DNA, 20 bp, Artificial Sequence
  Description of Artificial Sequence: Synthetic oligonucleotide
  Target: LAMA2; (-) strand; PAM type: NRG; PAM sequence: AAG
cagtagtggtagtgtgagcc

SEQ ID NO: 107701 - DNA, 20 bp, Artificial Sequence
  Description of Artificial Sequence: Synthetic oligonucleotide
  Target: LAMA2; (-) strand; PAM type: NRG; PAM sequence: GAG
cagcccagtagtggtagtgt

SEQ ID NO: 107702 - DNA, 20 bp, Artificial Sequence
  Description of Artificial Sequence: Synthetic oligonucleotide
  Target: LAMA2; (-) strand; PAM type: NRG; PAM sequence: TAG
gggatccagcccagtagtgg

SEQ ID NO: 107703 - DNA, 20 bp, Artificial Sequence
  Description of Artificial Sequence: Synthetic oligonucleotide
  Target: LAMA2; (-) strand; PAM type: NRG; PAM sequence: TGG
tgtgggatccagcccagtag

SEQ ID NO: 107704 - DNA, 20 bp, Artificial Sequence
  Description of Artificial Sequence: Synthetic oligonucleotide
  Target: LAMA2; (-) strand; PAM type: NRG; PAM sequence: TAG
aggtgtgggatccagcccag

SEQ ID NO: 107705 - DNA, 20 bp, Artificial Sequence
  Description of Artificial Sequence: Synthetic oligonucleotide
  Target: LAMA2; (-) strand; PAM type: NRG; PAM sequence: CAG
ggcaggtgtgggatccagcc

SEQ ID NO: 107706 - DNA, 20 bp, Artificial Sequence
  Description of Artificial Sequence: Synthetic oligonucleotide
  Target: LAMA2; (-) strand; PAM type: NRG; PAM sequence: CAG
cccttggcaggtgtgggatc

SEQ ID NO: 107707 - DNA, 20 bp, Artificial Sequence
  Description of Artificial Sequence: Synthetic oligonucleotide
  Target: LAMA2; (-) strand; PAM type: NRG; PAM sequence: GGG
gaatcacccttggcaggtgt

SEQ ID NO: 107708 - DNA, 20 bp, Artificial Sequence
  Description of Artificial Sequence: Synthetic oligonucleotide
  Target: LAMA2; (-) strand; PAM type: NRG; PAM sequence: TGG
tgaatcacccttggcaggtg

SEQ ID NO: 107709 - DNA, 20 bp, Artificial Sequence
  Description of Artificial Sequence: Synthetic oligonucleotide
  Target: LAMA2; (-) strand; PAM type: NRG; PAM sequence: AGG
tgccctgaatcacccttggc

SEQ ID NO: 107710 - DNA, 20 bp, Artificial Sequence
  Description of Artificial Sequence: Synthetic oligonucleotide
  Target: LAMA2; (-) strand; PAM type: NRG; PAM sequence: CAG
ctgccctgaatcacccttgg

SEQ ID NO: 107711 - DNA, 20 bp, Artificial Sequence
  Description of Artificial Sequence: Synthetic oligonucleotide
  Target: LAMA2; (-) strand; PAM type: NRG; PAM sequence: TGG
actctgccctgaatcaccct

SEQ ID NO: 107712 - DNA, 20 bp, Artificial Sequence
  Description of Artificial Sequence: Synthetic oligonucleotide
  Target: LAMA2; (-) strand; PAM type: NRG; PAM sequence: GAG
ttagctgtgcacagtggctg

SEQ ID NO: 107713 - DNA, 20 bp, Artificial Sequence
  Description of Artificial Sequence: Synthetic oligonucleotide
  Target: LAMA2; (-) strand; PAM type: NRG; PAM sequence: TGG
gcttagctgtgcacagtggc

SEQ ID NO: 107714 - DNA, 20 bp, Artificial Sequence
  Description of Artificial Sequence: Synthetic oligonucleotide
  Target: LAMA2; (-) strand; PAM type: NRG; PAM sequence: TGG
gcacgcttagctgtgcacag

SEQ ID NO: 107715 - DNA, 20 bp, Artificial Sequence
  Description of Artificial Sequence: Synthetic oligonucleotide
  Target: LAMA2; (-) strand; PAM type: NRG; PAM sequence: CAG
ctggcacgcttagctgtgca

SEQ ID NO: 107716 - DNA, 20 bp, Artificial Sequence
  Description of Artificial Sequence: Synthetic oligonucleotide
  Target: LAMA2; (-) strand; PAM type: NRG; PAM sequence: TAG
cccactgcagctggcacgct

SEQ ID NO: 107717 - DNA, 20 bp, Artificial Sequence
  Description of Artificial Sequence: Synthetic oligonucleotide
  Target: LAMA2; (-) strand; PAM type: NRG; PAM sequence: TGG
gctgcccagcccactgcagc

SEQ ID NO: 107718 - DNA, 20 bp, Artificial Sequence
  Description of Artificial Sequence: Synthetic oligonucleotide
  Target: LAMA2; (-) strand; PAM type: NRG; PAM sequence: CAG
tggagctgcccagcccactg

SEQ ID NO: 107719 - DNA, 20 bp, Artificial Sequence
  Description of Artificial Sequence: Synthetic oligonucleotide
  Target: LAMA2; (-) strand; PAM type: NRG; PAM sequence: CAG
agccaggacctggagctgcc

SEQ ID NO: 107720 - DNA, 20 bp, Artificial Sequence
  Description of Artificial Sequence: Synthetic oligonucleotide
  Target: LAMA2; (-) strand; PAM type: NRG; PAM sequence: GAG
tcacatagagccaggacctg

SEQ ID NO: 107721 - DNA, 20 bp, Artificial Sequence
  Description of Artificial Sequence: Synthetic oligonucleotide
  Target: LAMA2; (-) strand; PAM type: NRG; PAM sequence: TGG
cctcacatagagccaggacc

SEQ ID NO: 107722 - DNA, 20 bp, Artificial Sequence
  Description of Artificial Sequence: Synthetic oligonucleotide
  Target: LAMA2; (-) strand; PAM type: NRG; PAM sequence: AGG
ccacagcctcacatagagcc

SEQ ID NO: 107723 - DNA, 20 bp, Artificial Sequence
  Description of Artificial Sequence: Synthetic oligonucleotide
  Target: LAMA2; (-) strand; PAM type: NRG; PAM sequence: CAG
gccacagcctcacatagagc

SEQ ID NO: 107724 - DNA, 20 bp, Artificial Sequence
  Description of Artificial Sequence: Synthetic oligonucleotide
  Target: LAMA2; (-) strand; PAM type: NRG; PAM sequence: GAG
ttcagccacagcctcacata

SEQ ID NO: 107725 - DNA, 20 bp, Artificial Sequence
  Description of Artificial Sequence: Synthetic oligonucleotide
  Target: LAMA2; (-) strand; PAM type: NRG; PAM sequence: TAG
ggttcagccacagcctcaca

SEQ ID NO: 107726 - DNA, 20 bp, Artificial Sequence
  Description of Artificial Sequence: Synthetic oligonucleotide
  Target: LAMA2; (-) strand; PAM type: NRG; PAM sequence: CAG
tagtatgtctggttcagcca

SEQ ID NO: 107727 - DNA, 20 bp, Artificial Sequence
  Description of Artificial Sequence: Synthetic oligonucleotide
  Target: LAMA2; (-) strand; PAM type: NRG; PAM sequence: CAG
caattgtagtatgtctggtt

SEQ ID NO: 107728 - DNA, 20 bp, Artificial Sequence
  Description of Artificial Sequence: Synthetic oligonucleotide
  Target: LAMA2; (-) strand; PAM type: NRG; PAM sequence: TGG
gaagccaattgtagtatgtc

SEQ ID NO: 107729 - DNA, 20 bp, Artificial Sequence
  Description of Artificial Sequence: Synthetic oligonucleotide
  Target: LAMA2; (-) strand; PAM type: NRG; PAM sequence: TAG
ccagtggtggaagccaattg

SEQ ID NO: 107730 - DNA, 20 bp, Artificial Sequence
  Description of Artificial Sequence: Synthetic oligonucleotide
  Target: LAMA2; (-) strand; PAM type: NRG; PAM sequence: AAG
ttccctggtaccagtggtgg

SEQ ID NO: 107731 - DNA, 20 bp, Artificial Sequence
  Description of Artificial Sequence: Synthetic oligonucleotide
  Target: LAMA2; (-) strand; PAM type: NRG; PAM sequence: TGG
gcattccctggtaccagtgg

SEQ ID NO: 107732 - DNA, 20 bp, Artificial Sequence
  Description of Artificial Sequence: Synthetic oligonucleotide
  Target: LAMA2; (-) strand; PAM type: NRG; PAM sequence: TGG
accgcattccctggtaccag

SEQ ID NO: 107733 - DNA, 20 bp, Artificial Sequence
  Description of Artificial Sequence: Synthetic oligonucleotide
  Target: LAMA2; (-) strand; PAM type: NRG; PAM sequence: CAG
gccaccgcattccctggtac

SEQ ID NO: 107734 - DNA, 20 bp, Artificial Sequence
  Description of Artificial Sequence: Synthetic oligonucleotide
  Target: LAMA2; (-) strand; PAM type: NRG; PAM sequence: TGG
ctgggtgccaccgcattccc

SEQ ID NO: 107735 - DNA, 20 bp, Artificial Sequence
  Description of Artificial Sequence: Synthetic oligonucleotide
  Target: LAMA2; (-) strand; PAM type: NRG; PAM sequence: GGG
cctggcatctccaagctcct

SEQ ID NO: 107736 - DNA, 20 bp, Artificial Sequence
  Description of Artificial Sequence: Synthetic oligonucleotide
  Target: LAMA2; (-) strand; PAM type: NRG; PAM sequence: TGG
tcctggcatctccaagctcc

SEQ ID NO: 107737 - DNA, 20 bp, Artificial Sequence
  Description of Artificial Sequence: Synthetic oligonucleotide
  Target: LAMA2; (-) strand; PAM type: NRG; PAM sequence: AAG
ctgtggttcctggcatctcc

SEQ ID NO: 107738 - DNA, 20 bp, Artificial Sequence
  Description of Artificial Sequence: Synthetic oligonucleotide
  Target: LAMA2; (-) strand; PAM type: NRG; PAM sequence: TGG
ctttcagactctgtggttcc

SEQ ID NO: 107739 - DNA, 20 bp, Artificial Sequence
  Description of Artificial Sequence: Synthetic oligonucleotide
  Target: LAMA2; (-) strand; PAM type: NRG; PAM sequence: TGG
agaccctctttcagactctg

SEQ ID NO: 107740 - DNA, 20 bp, Artificial Sequence
  Description of Artificial Sequence: Synthetic oligonucleotide
  Target: LAMA2; (-) strand; PAM type: NRG; PAM sequence: CAG
agggctgtgagaccctcttt

SEQ ID NO: 107741 - DNA, 20 bp, Artificial Sequence
  Description of Artificial Sequence: Synthetic oligonucleotide
  Target: LAMA2; (-) strand; PAM type: NRG; PAM sequence: GAG
actccctgagccagggctgt

SEQ ID NO: 107742 - DNA, 20 bp, Artificial Sequence
  Description of Artificial Sequence: Synthetic oligonucleotide
  Target: LAMA2; (-) strand; PAM type: NRG; PAM sequence: GGG
cctatggactccctgagcca

SEQ ID NO: 107743 - DNA, 20 bp, Artificial Sequence
  Description of Artificial Sequence: Synthetic oligonucleotide
  Target: LAMA2; (-) strand; PAM type: NRG; PAM sequence: AGG
acctatggactccctgagcc

SEQ ID NO: 107744 - DNA, 20 bp, Artificial Sequence
  Description of Artificial Sequence: Synthetic oligonucleotide
  Target: LAMA2; (-) strand; PAM type: NRG; PAM sequence: CAG
gacctatggactccctgagc

SEQ ID NO: 107745 - DNA, 20 bp, Artificial Sequence
  Description of Artificial Sequence: Synthetic oligonucleotide
  Target: LAMA2; (-) strand; PAM type: NRG; PAM sequence: GAG
ctgagacctatggactccct

SEQ ID NO: 107746 - DNA, 20 bp, Artificial Sequence
  Description of Artificial Sequence: Synthetic oligonucleotide
  Target: LAMA2; (-) strand; PAM type: NRG; PAM sequence: TGG
ttttggggagctgagaccta

SEQ ID NO: 107747 - DNA, 20 bp, Artificial Sequence
  Description of Artificial Sequence: Synthetic oligonucleotide
  Target: LAMA2; (-) strand; PAM type: NRG; PAM sequence: GAG
ctgtggccttttggggagct

SEQ ID NO: 107748 - DNA, 20 bp, Artificial Sequence
  Description of Artificial Sequence: Synthetic oligonucleotide
  Target: LAMA2; (-) strand; PAM type: NRG; PAM sequence: GAG
aagggctgtggccttttggg

SEQ ID NO: 107749 - DNA, 20 bp, Artificial Sequence
  Description of Artificial Sequence: Synthetic oligonucleotide
  Target: LAMA2; (-) strand; PAM type: NRG; PAM sequence: GGG
agaagggctgtggccttttg

SEQ ID NO: 107750 - DNA, 20 bp, Artificial Sequence
  Description of Artificial Sequence: Synthetic oligonucleotide
  Target: LAMA2; (-) strand; PAM type: NRG; PAM sequence: GGG
gagaagggctgtggcctttt

SEQ ID NO: 107751 - DNA, 20 bp, Artificial Sequence
  Description of Artificial Sequence: Synthetic oligonucleotide
  Target: LAMA2; (-) strand; PAM type: NRG; PAM sequence: TGG
agagaagggctgtggccttt

SEQ ID NO: 107752 - DNA, 20 bp, Artificial Sequence
  Description of Artificial Sequence: Synthetic oligonucleotide
  Target: LAMA2; (-) strand; PAM type: NRG; PAM sequence: TGG
tgagcaggagagaagggctg

SEQ ID NO: 107753 - DNA, 20 bp, Artificial Sequence
  Description of Artificial Sequence: Synthetic oligonucleotide
  Target: LAMA2; (-) strand; PAM type: NRG; PAM sequence: GGG
cagcaatgagcaggagagaa

SEQ ID NO: 107754 - DNA, 20 bp, Artificial Sequence
  Description of Artificial Sequence: Synthetic oligonucleotide
  Target: LAMA2; (-) strand; PAM type: NRG; PAM sequence: AGG
acagcaatgagcaggagaga

SEQ ID NO: 107755 - DNA, 20 bp, Artificial Sequence
  Description of Artificial Sequence: Synthetic oligonucleotide
  Target: LAMA2; (-) strand; PAM type: NRG; PAM sequence: AAG
gacagcaatgagcaggagag

SEQ ID NO: 107756 - DNA, 20 bp, Artificial Sequence
  Description of Artificial Sequence: Synthetic oligonucleotide
  Target: LAMA2; (-) strand; PAM type: NRG; PAM sequence: GAG
gttgacagcaatgagcagga

SEQ ID NO: 107757 - DNA, 20 bp, Artificial Sequence
  Description of Artificial Sequence: Synthetic oligonucleotide
  Target: LAMA2; (-) strand; PAM type: NRG; PAM sequence: GAG
atgttgacagcaatgagcag

SEQ ID NO: 107758 - DNA, 20 bp, Artificial Sequence
  Description of Artificial Sequence: Synthetic oligonucleotide
  Target: LAMA2; (-) strand; PAM type: NRG; PAM sequence: AGG
ccatgttgacagcaatgagc

SEQ ID NO: 107759 - DNA, 20 bp, Artificial Sequence
  Description of Artificial Sequence: Synthetic oligonucleotide
  Target: LAMA2; (-) strand; PAM type: NRG; PAM sequence: CAG
accatgttgacagcaatgag

SEQ ID NO: 107760 - DNA, 20 bp, Artificial Sequence
  Description of Artificial Sequence: Synthetic oligonucleotide
  Target: LAMA2; (-) strand; PAM type: NRG; PAM sequence: GAG
ctcaccatgttgacagcaat

SEQ ID NO: 107761 - DNA, 20 bp, Artificial Sequence
  Description of Artificial Sequence: Synthetic oligonucleotide
  Target: LAMA2; (-) strand; PAM type: NRG; PAM sequence: CAG
tccccagctcaccatgttga

SEQ ID NO: 107762 - DNA, 20 bp, Artificial Sequence
  Description of Artificial Sequence: Synthetic oligonucleotide
  Target: LAMA2; (-) strand; PAM type: NRG; PAM sequence: CAG
ttgaaacacacccccttccc

SEQ ID NO: 107763 - DNA, 20 bp, Artificial Sequence
  Description of Artificial Sequence: Synthetic oligonucleotide
  Target: LAMA2; (-) strand; PAM type: NRG; PAM sequence: GGG
agagagctacaacacaaaca

SEQ ID NO: 107764 - DNA, 20 bp, Artificial Sequence
  Description of Artificial Sequence: Synthetic oligonucleotide
  Target: LAMA2; (-) strand; PAM type: NRG; PAM sequence: AGG
gagagagctacaacacaaac

SEQ ID NO: 107765 - DNA, 20 bp, Artificial Sequence
  Description of Artificial Sequence: Synthetic oligonucleotide
  Target: LAMA2; (-) strand; PAM type: NRG; PAM sequence: CAG
tgagagagctacaacacaaa

SEQ ID NO: 107766 - DNA, 20 bp, Artificial Sequence
  Description of Artificial Sequence: Synthetic oligonucleotide
  Target: LAMA2; (-) strand; PAM type: NRG; PAM sequence: GAG
cgcaaatggtggaaatgaga

SEQ ID NO: 107767 - DNA, 20 bp, Artificial Sequence
  Description of Artificial Sequence: Synthetic oligonucleotide
  Target: LAMA2; (-) strand; PAM type: NRG; PAM sequence: GAG
cccgcaaatggtggaaatga

SEQ ID NO: 107768 - DNA, 20 bp, Artificial Sequence
  Description of Artificial Sequence: Synthetic oligonucleotide
  Target: LAMA2; (-) strand; PAM type: NRG; PAM sequence: GAG
cccccgcaaatggtggaaat

SEQ ID NO: 107769 - DNA, 20 bp, Artificial Sequence
  Description of Artificial Sequence: Synthetic oligonucleotide
  Target: LAMA2; (-) strand; PAM type: NRG; PAM sequence: TGG
tgggacccccccgcaaatgg

SEQ ID NO: 107770 - DNA, 20 bp, Artificial Sequence
  Description of Artificial Sequence: Synthetic oligonucleotide
  Target: LAMA2; (-) strand; PAM type: NRG; PAM sequence: TGG
acttgggacccccccgcaaa

SEQ ID NO: 107771 - DNA, 20 bp, Artificial Sequence
  Description of Artificial Sequence: Synthetic oligonucleotide
  Target: LAMA2; (-) strand; PAM type: NRG; PAM sequence: GGG
aggatgtgggacaagaactt

SEQ ID NO: 107772 - DNA, 20 bp, Artificial Sequence
  Description of Artificial Sequence: Synthetic oligonucleotide
  Target: LAMA2; (-) strand; PAM type: NRG; PAM sequence: TGG
caggatgtgggacaagaact

SEQ ID NO: 107773 - DNA, 20 bp, Artificial Sequence
  Description of Artificial Sequence: Synthetic oligonucleotide
  Target: LAMA2; (-) strand; PAM type: NRG; PAM sequence: AAG
attcttccaggatgtgggac

SEQ ID NO: 107774 - DNA, 20 bp, Artificial Sequence
  Description of Artificial Sequence: Synthetic oligonucleotide
  Target: LAMA2; (-) strand; PAM type: NRG; PAM sequence: GGG
acctcattcttccaggatgt

SEQ ID NO: 107775 - DNA, 20 bp, Artificial Sequence
  Description of Artificial Sequence: Synthetic oligonucleotide
  Target: LAMA2; (-) strand; PAM type: NRG; PAM sequence: TGG
aacctcattcttccaggatg

SEQ ID NO: 107776 - DNA, 20 bp, Artificial Sequence
  Description of Artificial Sequence: Synthetic oligonucleotide
  Target: LAMA2; (-) strand; PAM type: NRG; PAM sequence: AGG
tctgcaaacctcattcttcc

SEQ ID NO: 107777 - DNA, 20 bp, Artificial Sequence
  Description of Artificial Sequence: Synthetic oligonucleotide
  Target: LAMA2; (-) strand; PAM type: NRG; PAM sequence: CAG
gtctgcaaacctcattcttc

SEQ ID NO: 107778 - DNA, 20 bp, Artificial Sequence
  Description of Artificial Sequence: Synthetic oligonucleotide
  Target: LAMA2; (-) strand; PAM type: NRG; PAM sequence: CAG
tcttcaccttgctaaccctc

SEQ ID NO: 107779 - DNA, 20 bp, Artificial Sequence
  Description of Artificial Sequence: Synthetic oligonucleotide
  Target: LAMA2; (-) strand; PAM type: NRG; PAM sequence: AAG
agttgcactgtcactcaata

SEQ ID NO: 107780 - DNA, 20 bp, Artificial Sequence
  Description of Artificial Sequence: Synthetic oligonucleotide
  Target: LAMA2; (-) strand; PAM type: NRG; PAM sequence: GAG
acccatttcaggcctcctga

SEQ ID NO: 107781 - DNA, 20 bp, Artificial Sequence
  Description of Artificial Sequence: Synthetic oligonucleotide
  Target: LAMA2; (-) strand; PAM type: NRG; PAM sequence: GAG
ctacccatttcaggcctcct

SEQ ID NO: 107782 - DNA, 20 bp, Artificial Sequence
  Description of Artificial Sequence: Synthetic oligonucleotide
  Target: LAMA2; (-) strand; PAM type: NRG; PAM sequence: AGG
ggaacggagctacccatttc

SEQ ID NO: 107783 - DNA, 20 bp, Artificial Sequence
  Description of Artificial Sequence: Synthetic oligonucleotide
  Target: LAMA2; (-) strand; PAM type: NRG; PAM sequence: CAG
tggaacggagctacccattt

SEQ ID NO: 107784 - DNA, 20 bp, Artificial Sequence
  Description of Artificial Sequence: Synthetic oligonucleotide
  Target: LAMA2; (-) strand; PAM type: NRG; PAM sequence: GAG
aattacctgcctgtggaacg

SEQ ID NO: 107785 - DNA, 20 bp, Artificial Sequence
  Description of Artificial Sequence: Synthetic oligonucleotide
  Target: LAMA2; (-) strand; PAM type: NRG; PAM sequence: CGG
ggaattacctgcctgtggaa

SEQ ID NO: 107786 - DNA, 20 bp, Artificial Sequence
  Description of Artificial Sequence: Synthetic oligonucleotide
  Target: LAMA2; (-) strand; PAM type: NRG; PAM sequence: TGG
atgctggaattacctgcctg

SEQ ID NO: 107787 - DNA, 20 bp, Artificial Sequence
  Description of Artificial Sequence: Synthetic oligonucleotide
  Target: LAMA2; (-) strand; PAM type: NRG; PAM sequence: TGG
tgagggtgctgcacagatgc

SEQ ID NO: 107788 - DNA, 20 bp, Artificial Sequence
  Description of Artificial Sequence: Synthetic oligonucleotide
  Target: LAMA2; (-) strand; PAM type: NRG; PAM sequence: CAG
cctctgttgagggtgctgca

SEQ ID NO: 107789 - DNA, 20 bp, Artificial Sequence
  Description of Artificial Sequence: Synthetic oligonucleotide
  Target: LAMA2; (-) strand; PAM type: NRG; PAM sequence: GGG
gtgtgtctcacctctgttga

SEQ ID NO: 107790 - DNA, 20 bp, Artificial Sequence
  Description of Artificial Sequence: Synthetic oligonucleotide
  Target: LAMA2; (-) strand; PAM type: NRG; PAM sequence: AGG
tgtgtgtctcacctctgttg

SEQ ID NO: 107791 - DNA, 20 bp, Artificial Sequence
  Description of Artificial Sequence: Synthetic oligonucleotide
  Target: LAMA2; (-) strand; PAM type: NRG; PAM sequence: GAG
ctgtgtgtctcacctctgtt

SEQ ID NO: 107792 - DNA, 20 bp, Artificial Sequence
  Description of Artificial Sequence: Synthetic oligonucleotide
  Target: LAMA2; (-) strand; PAM type: NRG; PAM sequence: GAG
gatgatctacctgtggatag

SEQ ID NO: 107793 - DNA, 20 bp, Artificial Sequence
  Description of Artificial Sequence: Synthetic oligonucleotide
  Target: LAMA2; (-) strand; PAM type: NRG; PAM sequence: AGG
aggatgatctacctgtggat

SEQ ID NO: 107794 - DNA, 20 bp, Artificial Sequence
  Description of Artificial Sequence: Synthetic oligonucleotide
  Target: LAMA2; (-) strand; PAM type: NRG; PAM sequence: TAG
caggatgatctacctgtgga

SEQ ID NO: 107795 - DNA, 20 bp, Artificial Sequence
  Description of Artificial Sequence: Synthetic oligonucleotide
  Target: LAMA2; (-) strand; PAM type: NRG; PAM sequence: TGG
acaacaggatgatctacctg

SEQ ID NO: 107796 - DNA, 20 bp, Artificial Sequence
  Description of Artificial Sequence: Synthetic oligonucleotide
  Target: LAMA2; (-) strand; PAM type: NRG; PAM sequence: AGG
gccagacgtgggcagacaac

SEQ ID NO: 107797 - DNA, 20 bp, Artificial Sequence
  Description of Artificial Sequence: Synthetic oligonucleotide
  Target: LAMA2; (-) strand; PAM type: NRG; PAM sequence: CAG
agccagacgtgggcagacaa

SEQ ID NO: 107798 - DNA, 20 bp, Artificial Sequence
  Description of Artificial Sequence: Synthetic oligonucleotide
  Target: LAMA2; (-) strand; PAM type: NRG; PAM sequence: CAG
cggactcagccagacgtggg

SEQ ID NO: 107799 - DNA, 20 bp, Artificial Sequence
  Description of Artificial Sequence: Synthetic oligonucleotide
  Target: LAMA2; (-) strand; PAM type: NRG; PAM sequence: GGG
ccccggactcagccagacgt

SEQ ID NO: 107800 - DNA, 20 bp, Artificial Sequence
  Description of Artificial Sequence: Synthetic oligonucleotide
  Target: LAMA2; (-) strand; PAM type: NRG; PAM sequence: TGG
accccggactcagccagacg

SEQ ID NO: 107801 - DNA, 20 bp, Artificial Sequence
  Description of Artificial Sequence: Synthetic oligonucleotide
  Target: LAMA2; (-) strand; PAM type: NRG; PAM sequence: CAG
taaaaaaccccggactcagc

SEQ ID NO: 107802 - DNA, 20 bp, Artificial Sequence
  Description of Artificial Sequence: Synthetic oligonucleotide
  Target: LAMA2; (-) strand; PAM type: NRG; PAM sequence: CAG
cccataaaaaaccccggact

SEQ ID NO: 107803 - DNA, 20 bp, Artificial Sequence
  Description of Artificial Sequence: Synthetic oligonucleotide
  Target: LAMA2; (-) strand; PAM type: NRG; PAM sequence: CGG
ctgaggcccataaaaaaccc

SEQ ID NO: 107804 - DNA, 20 bp, Artificial Sequence
  Description of Artificial Sequence: Synthetic oligonucleotide
  Target: LAMA2; (-) strand; PAM type: NRG; PAM sequence: AGG
catacacttcctcccctctg

SEQ ID NO: 107805 - DNA, 20 bp, Artificial Sequence
  Description of Artificial Sequence: Synthetic oligonucleotide
  Target: LAMA2; (-) strand; PAM type: NRG; PAM sequence: GAG
gcatacacttcctcccctct

SEQ ID NO: 107806 - DNA, 20 bp, Artificial Sequence
  Description of Artificial Sequence: Synthetic oligonucleotide
  Target: LAMA2; (-) strand; PAM type: NRG; PAM sequence: CAG
atggccacccatggaccaat

SEQ ID NO: 107807 - DNA, 20 bp, Artificial Sequence
  Description of Artificial Sequence: Synthetic oligonucleotide
  Target: LAMA2; (-) strand; PAM type: NRG; PAM sequence: TGG
ggccagctcatggccaccca

SEQ ID NO: 107808 - DNA, 20 bp, Artificial Sequence
  Description of Artificial Sequence: Synthetic oligonucleotide
  Target: LAMA2; (-) strand; PAM type: NRG; PAM sequence: TGG
gctttttttgggccagctca

SEQ ID NO: 107809 - DNA, 20 bp, Artificial Sequence
  Description of Artificial Sequence: Synthetic oligonucleotide
  Target: LAMA2; (-) strand; PAM type: NRG; PAM sequence: CAG
ttatggtgctttttttgggc

SEQ ID NO: 107810 - DNA, 20 bp, Artificial Sequence
  Description of Artificial Sequence: Synthetic oligonucleotide
  Target: LAMA2; (-) strand; PAM type: NRG; PAM sequence: GGG
gaacttatggtgcttttttt

SEQ ID NO: 107811 - DNA, 20 bp, Artificial Sequence
  Description of Artificial Sequence: Synthetic oligonucleotide
  Target: LAMA2; (-) strand; PAM type: NRG; PAM sequence: TGG
agaacttatggtgctttttt

SEQ ID NO: 107812 - DNA, 20 bp, Artificial Sequence
  Description of Artificial Sequence: Synthetic oligonucleotide
  Target: LAMA2; (-) strand; PAM type: NRG; PAM sequence: TGG
caaactggagtgagaactta

SEQ ID NO: 107813 - DNA, 20 bp, Artificial Sequence
  Description of Artificial Sequence: Synthetic oligonucleotide
  Target: LAMA2; (-) strand; PAM type: NRG; PAM sequence: GAG
tcggttccacaaactggagt

SEQ ID NO: 107814 - DNA, 20 bp, Artificial Sequence
  Description of Artificial Sequence: Synthetic oligonucleotide
  Target: LAMA2; (-) strand; PAM type: NRG; PAM sequence: GAG
actgtcggttccacaaactg

SEQ ID NO: 107815 - DNA, 20 bp, Artificial Sequence
  Description of Artificial Sequence: Synthetic oligonucleotide
  Target: LAMA2; (-) strand; PAM type: NRG; PAM sequence: TGG
ggactgtcggttccacaaac

SEQ ID NO: 107816 - DNA, 20 bp, Artificial Sequence
  Description of Artificial Sequence: Synthetic oligonucleotide
  Target: LAMA2; (-) strand; PAM type: NRG; PAM sequence: CGG
aaggaagggggctggactgt

SEQ ID NO: 107817 - DNA, 20 bp, Artificial Sequence
  Description of Artificial Sequence: Synthetic oligonucleotide
  Target: LAMA2; (-) strand; PAM type: NRG; PAM sequence: TGG
actgcctgaaggaagggggc

SEQ ID NO: 107818 - DNA, 20 bp, Artificial Sequence
  Description of Artificial Sequence: Synthetic oligonucleotide
  Target: LAMA2; (-) strand; PAM type: NRG; PAM sequence: GGG
agggactgcctgaaggaagg

SEQ ID NO: 107819 - DNA, 20 bp, Artificial Sequence
  Description of Artificial Sequence: Synthetic oligonucleotide
  Target: LAMA2; (-) strand; PAM type: NRG; PAM sequence: GGG
cagggactgcctgaaggaag

SEQ ID NO: 107820 - DNA, 20 bp, Artificial Sequence
  Description of Artificial Sequence: Synthetic oligonucleotide
  Target: LAMA2; (-) strand; PAM type: NRG; PAM sequence: GGG
ccagggactgcctgaaggaa

SEQ ID NO: 107821 - DNA, 20 bp, Artificial Sequence
  Description of Artificial Sequence: Synthetic oligonucleotide
  Target: LAMA2; (-) strand; PAM type: NRG; PAM sequence: AGG
gccagggactgcctgaagga

SEQ ID NO: 107822 - DNA, 20 bp, Artificial Sequence
  Description of Artificial Sequence: Synthetic oligonucleotide
  Target: LAMA2; (-) strand; PAM type: NRG; PAM sequence: AAG
agccagggactgcctgaagg

SEQ ID NO: 107823 - DNA, 20 bp, Artificial Sequence
  Description of Artificial Sequence: Synthetic oligonucleotide
  Target: LAMA2; (-) strand; PAM type: NRG; PAM sequence: AGG
tcaagccagggactgcctga

SEQ ID NO: 107824 - DNA, 20 bp, Artificial Sequence
  Description of Artificial Sequence: Synthetic oligonucleotide
  Target: LAMA2; (-) strand; PAM type: NRG; PAM sequence: AAG
ttcaagccagggactgcctg

SEQ ID NO: 107825 - DNA, 20 bp, Artificial Sequence
  Description of Artificial Sequence: Synthetic oligonucleotide
  Target: LAMA2; (-) strand; PAM type: NRG; PAM sequence: GGG
gaagctccaccttcaagcca

SEQ ID NO: 107826 - DNA, 20 bp, Artificial Sequence
  Description of Artificial Sequence: Synthetic oligonucleotide
  Target: LAMA2; (-) strand; PAM type: NRG; PAM sequence: AGG
tgaagctccaccttcaagcc

SEQ ID NO: 107827 - DNA, 20 bp, Artificial Sequence
  Description of Artificial Sequence: Synthetic oligonucleotide
  Target: LAMA2; (-) strand; PAM type: NRG; PAM sequence: CAG
gtgaagctccaccttcaagc

SEQ ID NO: 107828 - DNA, 20 bp, Artificial Sequence
  Description of Artificial Sequence: Synthetic oligonucleotide
  Target: LAMA2; (-) strand; PAM type: NRG; PAM sequence: AAG
ctcagtgaagctccaccttc

SEQ ID NO: 107829 - DNA, 20 bp, Artificial Sequence
  Description of Artificial Sequence: Synthetic oligonucleotide
  Target: LAMA2; (-) strand; PAM type: NRG; PAM sequence: AAG
aaaggggtgggccctcagtg

SEQ ID NO: 107830 - DNA, 20 bp, Artificial Sequence
  Description of Artificial Sequence: Synthetic oligonucleotide
  Target: LAMA2; (-) strand; PAM type: NRG; PAM sequence: CAG
ggtggaaaggggtgggccct

SEQ ID NO: 107831 - DNA, 20 bp, Artificial Sequence
  Description of Artificial Sequence: Synthetic oligonucleotide
  Target: LAMA2; (-) strand; PAM type: NRG; PAM sequence: GGG
gttcctgggtggaaaggggt

SEQ ID NO: 107832 - DNA, 20 bp, Artificial Sequence
  Description of Artificial Sequence: Synthetic oligonucleotide
  Target: LAMA2; (-) strand; PAM type: NRG; PAM sequence: TGG
ggttcctgggtggaaagggg

SEQ ID NO: 107833 - DNA, 20 bp, Artificial Sequence
  Description of Artificial Sequence: Synthetic oligonucleotide
  Target: LAMA2; (-) strand; PAM type: NRG; PAM sequence: GGG
acaggttcctgggtggaaag

SEQ ID NO: 107834 - DNA, 20 bp, Artificial Sequence
  Description of Artificial Sequence: Synthetic oligonucleotide
  Target: LAMA2; (-) strand; PAM type: NRG; PAM sequence: GGG
tacaggttcctgggtggaaa

SEQ ID NO: 107835 - DNA, 20 bp, Artificial Sequence
  Description of Artificial Sequence: Synthetic oligonucleotide
  Target: LAMA2; (-) strand; PAM type: NRG; PAM sequence: AGG
atacaggttcctgggtggaa

SEQ ID NO: 107836 - DNA, 20 bp, Artificial Sequence
  Description of Artificial Sequence: Synthetic oligonucleotide
  Target: LAMA2; (-) strand; PAM type: NRG; PAM sequence: AAG
catacaggttcctgggtgga

SEQ ID NO: 107837 - DNA, 20 bp, Artificial Sequence
  Description of Artificial Sequence: Synthetic oligonucleotide
  Target: LAMA2; (-) strand; PAM type: NRG; PAM sequence: TGG
gaggcatacaggttcctggg

SEQ ID NO: 107838 - DNA, 20 bp, Artificial Sequence
  Description of Artificial Sequence: Synthetic oligonucleotide
  Target: LAMA2; (-) strand; PAM type: NRG; PAM sequence: GGG
caggaggcatacaggttcct

SEQ ID NO: 107839 - DNA, 20 bp, Artificial Sequence
  Description of Artificial Sequence: Synthetic oligonucleotide
  Target: LAMA2; (-) strand; PAM type: NRG; PAM sequence: TGG
gcaggaggcatacaggttcc

SEQ ID NO: 107840 - DNA, 20 bp, Artificial Sequence
  Description of Artificial Sequence: Synthetic oligonucleotide
  Target: LAMA2; (-) strand; PAM type: NRG; PAM sequence: AGG
ggtggtggcaggaggcatac

SEQ ID NO: 107841 - DNA, 20 bp, Artificial Sequence
  Description of Artificial Sequence: Synthetic oligonucleotide
  Target: LAMA2; (-) strand; PAM type: NRG; PAM sequence: CAG
tggtggtggcaggaggcata

SEQ ID NO: 107842 - DNA, 20 bp, Artificial Sequence
  Description of Artificial Sequence: Synthetic oligonucleotide
  Target: LAMA2; (-) strand; PAM type: NRG; PAM sequence: AGG
ggcaggttggtggtggcagg

SEQ ID NO: 107843 - DNA, 20 bp, Artificial Sequence
  Description of Artificial Sequence: Synthetic oligonucleotide
  Target: LAMA2; (-) strand; PAM type: NRG; PAM sequence: GAG
tggcaggttggtggtggcag

SEQ ID NO: 107844 - DNA, 20 bp, Artificial Sequence
  Description of Artificial Sequence: Synthetic oligonucleotide
  Target: LAMA2; (-) strand; PAM type: NRG; PAM sequence: AGG
gatggcaggttggtggtggc

SEQ ID NO: 107845 - DNA, 20 bp, Artificial Sequence
  Description of Artificial Sequence: Synthetic oligonucleotide
  Target: LAMA2; (-) strand; PAM type: NRG; PAM sequence: CAG
ggatggcaggttggtggtgg

SEQ ID NO: 107846 - DNA, 20 bp, Artificial Sequence
  Description of Artificial Sequence: Synthetic oligonucleotide
  Target: LAMA2; (-) strand; PAM type: NRG; PAM sequence: TGG
cgtggatggcaggttggtgg

SEQ ID NO: 107847 - DNA, 20 bp, Artificial Sequence
  Description of Artificial Sequence: Synthetic oligonucleotide
  Target: LAMA2; (-) strand; PAM type: NRG; PAM sequence: TGG
cgccgtggatggcaggttgg

SEQ ID NO: 107848 - DNA, 20 bp, Artificial Sequence
  Description of Artificial Sequence: Synthetic oligonucleotide
  Target: LAMA2; (-) strand; PAM type: NRG; PAM sequence: TGG
gggcgccgtggatggcaggt

SEQ ID NO: 107849 - DNA, 20 bp, Artificial Sequence
  Description of Artificial Sequence: Synthetic oligonucleotide
  Target: LAMA2; (-) strand; PAM type: NRG; PAM sequence: AGG
cagtgggcgccgtggatggc

SEQ ID NO: 107850 - DNA, 20 bp, Artificial Sequence
  Description of Artificial Sequence: Synthetic oligonucleotide
  Target: LAMA2; (-) strand; PAM type: NRG; PAM sequence: CAG
ccagtgggcgccgtggatgg

SEQ ID NO: 107851 - DNA, 20 bp, Artificial Sequence
  Description of Artificial Sequence: Synthetic oligonucleotide
  Target: LAMA2; (-) strand; PAM type: NRG; PAM sequence: TGG
gtgccagtgggcgccgtgga

SEQ ID NO: 107852 - DNA, 20 bp, Artificial Sequence
  Description of Artificial Sequence: Synthetic oligonucleotide
  Target: LAMA2; (-) strand; PAM type: NRG; PAM sequence: TGG
ctgggtgccagtgggcgccg

SEQ ID NO: 107853 - DNA, 20 bp, Artificial Sequence
  Description of Artificial Sequence: Synthetic oligonucleotide
  Target: LAMA2; (-) strand; PAM type: NRG; PAM sequence: GGG
tgaacagcctgggtgccagt

SEQ ID NO: 107854 - DNA, 20 bp, Artificial Sequence
  Description of Artificial Sequence: Synthetic oligonucleotide
  Target: LAMA2; (-) strand; PAM type: NRG; PAM sequence: TGG
atgaacagcctgggtgccag

SEQ ID NO: 107855 - DNA, 20 bp, Artificial Sequence
  Description of Artificial Sequence: Synthetic oligonucleotide
  Target: LAMA2; (-) strand; PAM type: NRG; PAM sequence: CAG
ggcatgaacagcctgggtgc

SEQ ID NO: 107856 - DNA, 20 bp, Artificial Sequence
  Description of Artificial Sequence: Synthetic oligonucleotide
  Target: LAMA2; (-) strand; PAM type: NRG; PAM sequence: GGG
accctaggcatgaacagcct

SEQ ID NO: 107857 - DNA, 20 bp, Artificial Sequence
  Description of Artificial Sequence: Synthetic oligonucleotide
  Target: LAMA2; (-) strand; PAM type: NRG; PAM sequence: TGG
gaccctaggcatgaacagcc

SEQ ID NO: 107858 - DNA, 20 bp, Artificial Sequence
  Description of Artificial Sequence: Synthetic oligonucleotide
  Target: LAMA2; (-) strand; PAM type: NRG; PAM sequence: CAG
aaggtgaccctaggcatgaa

SEQ ID NO: 107859 - DNA, 20 bp, Artificial Sequence
  Description of Artificial Sequence: Synthetic oligonucleotide
  Target: LAMA2; (-) strand; PAM type: NRG; PAM sequence: AGG
atgggcctgaaggtgaccct

SEQ ID NO: 107860 - DNA, 20 bp, Artificial Sequence
  Description of Artificial Sequence: Synthetic oligonucleotide
  Target: LAMA2; (-) strand; PAM type: NRG; PAM sequence: TAG
catgggcctgaaggtgaccc

SEQ ID NO: 107861 - DNA, 20 bp, Artificial Sequence
  Description of Artificial Sequence: Synthetic oligonucleotide
  Target: LAMA2; (-) strand; PAM type: NRG; PAM sequence: AGG
gtggctctgcatgggcctga

SEQ ID NO: 107862 - DNA, 20 bp, Artificial Sequence
  Description of Artificial Sequence: Synthetic oligonucleotide
  Target: LAMA2; (-) strand; PAM type: NRG; PAM sequence: AAG
ggtggctctgcatgggcctg

SEQ ID NO: 107863 - DNA, 20 bp, Artificial Sequence
  Description of Artificial Sequence: Synthetic oligonucleotide
  Target: LAMA2; (-) strand; PAM type: NRG; PAM sequence: GGG
agttgagggtggctctgcat

SEQ ID NO: 107864 - DNA, 20 bp, Artificial Sequence
  Description of Artificial Sequence: Synthetic oligonucleotide
  Target: LAMA2; (-) strand; PAM type: NRG; PAM sequence: TGG
gagttgagggtggctctgca

SEQ ID NO: 107865 - DNA, 20 bp, Artificial Sequence
  Description of Artificial Sequence: Synthetic oligonucleotide
  Target: LAMA2; (-) strand; PAM type: NRG; PAM sequence: TGG
ggccaagggggagttgaggg

SEQ ID NO: 107866 - DNA, 20 bp, Artificial Sequence
  Description of Artificial Sequence: Synthetic oligonucleotide
  Target: LAMA2; (-) strand; PAM type: NRG; PAM sequence: GGG
ggaggccaagggggagttga

SEQ ID NO: 107867 - DNA, 20 bp, Artificial Sequence
  Description of Artificial Sequence: Synthetic oligonucleotide
  Target: LAMA2; (-) strand; PAM type: NRG; PAM sequence: AGG
gggaggccaagggggagttg

SEQ ID NO: 107868 - DNA, 20 bp, Artificial Sequence
  Description of Artificial Sequence: Synthetic oligonucleotide
  Target: LAMA2; (-) strand; PAM type: NRG; PAM sequence: GAG
agggaggccaagggggagtt

SEQ ID NO: 107869 - DNA, 20 bp, Artificial Sequence
  Description of Artificial Sequence: Synthetic oligonucleotide
  Target: LAMA2; (-) strand; PAM type: NRG; PAM sequence: GAG
acattagggaggccaagggg

SEQ ID NO: 107870 - DNA, 20 bp, Artificial Sequence
  Description of Artificial Sequence: Synthetic oligonucleotide
  Target: LAMA2; (-) strand; PAM type: NRG; PAM sequence: GGG
gcacattagggaggccaagg

SEQ ID NO: 107871 - DNA, 20 bp, Artificial Sequence
  Description of Artificial Sequence: Synthetic oligonucleotide
  Target: LAMA2; (-) strand; PAM type: NRG; PAM sequence: GGG
agcacattagggaggccaag

SEQ ID NO: 107872 - DNA, 20 bp, Artificial Sequence
  Description of Artificial Sequence: Synthetic oligonucleotide
  Target: LAMA2; (-) strand; PAM type: NRG; PAM sequence: GGG
gagcacattagggaggccaa

SEQ ID NO: 107873 - DNA, 20 bp, Artificial Sequence
  Description of Artificial Sequence: Synthetic oligonucleotide
  Target: LAMA2; (-) strand; PAM type: NRG; PAM sequence: AGG
ggagcacattagggaggcca

SEQ ID NO: 107874 - DNA, 20 bp, Artificial Sequence
  Description of Artificial Sequence: Synthetic oligonucleotide
  Target: LAMA2; (-) strand; PAM type: NRG; PAM sequence: AAG
aggagcacattagggaggcc

SEQ ID NO: 107875 - DNA, 20 bp, Artificial Sequence
  Description of Artificial Sequence: Synthetic oligonucleotide
  Target: LAMA2; (-) strand; PAM type: NRG; PAM sequence: AGG
tgccaaggagcacattaggg

SEQ ID NO: 107876 - DNA, 20 bp, Artificial Sequence
  Description of Artificial Sequence: Synthetic oligonucleotide
  Target: LAMA2; (-) strand; PAM type: NRG; PAM sequence: GAG
gtgccaaggagcacattagg

SEQ ID NO: 107877 - DNA, 20 bp, Artificial Sequence
  Description of Artificial Sequence: Synthetic oligonucleotide
  Target: LAMA2; (-) strand; PAM type: NRG; PAM sequence: GGG
gggtgccaaggagcacatta

SEQ ID NO: 107878 - DNA, 20 bp, Artificial Sequence
  Description of Artificial Sequence: Synthetic oligonucleotide
  Target: LAMA2; (-) strand; PAM type: NRG; PAM sequence: AGG
tgggtgccaaggagcacatt

SEQ ID NO: 107879 - DNA, 20 bp, Artificial Sequence
  Description of Artificial Sequence: Synthetic oligonucleotide
  Target: LAMA2; (-) strand; PAM type: NRG; PAM sequence: TAG
ttgggtgccaaggagcacat

SEQ ID NO: 107880 - DNA, 20 bp, Artificial Sequence
  Description of Artificial Sequence: Synthetic oligonucleotide
  Target: LAMA2; (-) strand; PAM type: NRG; PAM sequence: GAG
tctggattttgggtgccaag

SEQ ID NO: 107881 - DNA, 20 bp, Artificial Sequence
  Description of Artificial Sequence: Synthetic oligonucleotide
  Target: LAMA2; (-) strand; PAM type: NRG; PAM sequence: AGG
cttctggattttgggtgcca

SEQ ID NO: 107882 - DNA, 20 bp, Artificial Sequence
  Description of Artificial Sequence: Synthetic oligonucleotide
  Target: LAMA2; (-) strand; PAM type: NRG; PAM sequence: AAG
ccttctggattttgggtgcc

SEQ ID NO: 107883 - DNA, 20 bp, Artificial Sequence
  Description of Artificial Sequence: Synthetic oligonucleotide
  Target: LAMA2; (-) strand; PAM type: NRG; PAM sequence: GGG
cttggccccttctggatttt

SEQ ID NO: 107884 - DNA, 20 bp, Artificial Sequence
  Description of Artificial Sequence: Synthetic oligonucleotide
  Target: LAMA2; (-) strand; PAM type: NRG; PAM sequence: TGG
tcttggccccttctggattt

SEQ ID NO: 107885 - DNA, 20 bp, Artificial Sequence
  Description of Artificial Sequence: Synthetic oligonucleotide
  Target: LAMA2; (-) strand; PAM type: NRG; PAM sequence: TGG
cctactatcttggccccttc

SEQ ID NO: 107886 - DNA, 20 bp, Artificial Sequence
  Description of Artificial Sequence: Synthetic oligonucleotide
  Target: LAMA2; (-) strand; PAM type: NRG; PAM sequence: TGG
actctagccccctactatct

SEQ ID NO: 107887 - DNA, 20 bp, Artificial Sequence
  Description of Artificial Sequence: Synthetic oligonucleotide
  Target: LAMA2; (-) strand; PAM type: NRG; PAM sequence: TAG
tcggggcagcactgacactc

SEQ ID NO: 107888 - DNA, 20 bp, Artificial Sequence
  Description of Artificial Sequence: Synthetic oligonucleotide
  Target: LAMA2; (-) strand; PAM type: NRG; PAM sequence: CAG
aggtgtgcatatgctcgggg

SEQ ID NO: 107889 - DNA, 20 bp, Artificial Sequence
  Description of Artificial Sequence: Synthetic oligonucleotide
  Target: LAMA2; (-) strand; PAM type: NRG; PAM sequence: GGG
gccaggtgtgcatatgctcg

SEQ ID NO: 107890 - DNA, 20 bp, Artificial Sequence
  Description of Artificial Sequence: Synthetic oligonucleotide
  Target: LAMA2; (-) strand; PAM type: NRG; PAM sequence: GGG
agccaggtgtgcatatgctc

SEQ ID NO: 107891 - DNA, 20 bp, Artificial Sequence
  Description of Artificial Sequence: Synthetic oligonucleotide
  Target: LAMA2; (-) strand; PAM type: NRG; PAM sequence: CGG
cagccaggtgtgcatatgct

SEQ ID NO: 107892 - DNA, 20 bp, Artificial Sequence
  Description of Artificial Sequence: Synthetic oligonucleotide
  Target: LAMA2; (-) strand; PAM type: NRG; PAM sequence: AGG
gaggctgttgcaacccagcc

SEQ ID NO: 107893 - DNA, 20 bp, Artificial Sequence
  Description of Artificial Sequence: Synthetic oligonucleotide
  Target: LAMA2; (-) strand; PAM type: NRG; PAM sequence: CAG
tgaggctgttgcaacccagc

SEQ ID NO: 107894 - DNA, 20 bp, Artificial Sequence
  Description of Artificial Sequence: Synthetic oligonucleotide
  Target: LAMA2; (-) strand; PAM type: NRG; PAM sequence: CAG
aagctgaggctgttgcaacc

SEQ ID NO: 107895 - DNA, 20 bp, Artificial Sequence
  Description of Artificial Sequence: Synthetic oligonucleotide
  Target: LAMA2; (-) strand; PAM type: NRG; PAM sequence: AGG
ctgatttcagagcaaagctg

SEQ ID NO: 107896 - DNA, 20 bp, Artificial Sequence
  Description of Artificial Sequence: Synthetic oligonucleotide
  Target: LAMA2; (-) strand; PAM type: NRG; PAM sequence: GAG
gctgatttcagagcaaagct

SEQ ID NO: 107897 - DNA, 20 bp, Artificial Sequence
  Description of Artificial Sequence: Synthetic oligonucleotide
  Target: LAMA2; (-) strand; PAM type: NRG; PAM sequence: AAG
cccaggctgatttcagagca

SEQ ID NO: 107898 - DNA, 20 bp, Artificial Sequence
  Description of Artificial Sequence: Synthetic oligonucleotide
  Target: LAMA2; (-) strand; PAM type: NRG; PAM sequence: GAG
cggcacccaggctgatttca

SEQ ID NO: 107899 - DNA, 20 bp, Artificial Sequence
  Description of Artificial Sequence: Synthetic oligonucleotide
  Target: LAMA2; (-) strand; PAM type: NRG; PAM sequence: CAG
cccggcacccaggctgattt

SEQ ID NO: 107900 - DNA, 20 bp, Artificial Sequence
  Description of Artificial Sequence: Synthetic oligonucleotide
  Target: LAMA2; (-) strand; PAM type: NRG; PAM sequence: AGG
tctcactgttcccggcaccc

SEQ ID NO: 107901 - DNA, 20 bp, Artificial Sequence
  Description of Artificial Sequence: Synthetic oligonucleotide
  Target: LAMA2; (-) strand; PAM type: NRG; PAM sequence: CAG
ctctcactgttcccggcacc

SEQ ID NO: 107902 - DNA, 20 bp, Artificial Sequence
  Description of Artificial Sequence: Synthetic oligonucleotide
  Target: LAMA2; (-) strand; PAM type: NRG; PAM sequence: CGG
tcctggtctctcactgttcc

SEQ ID NO: 107903 - DNA, 20 bp, Artificial Sequence
  Description of Artificial Sequence: Synthetic oligonucleotide
  Target: LAMA2; (-) strand; PAM type: NRG; PAM sequence: TGG
aagtgcccgctccttcttcc

SEQ ID NO: 107904 - DNA, 20 bp, Artificial Sequence
  Description of Artificial Sequence: Synthetic oligonucleotide
  Target: LAMA2; (-) strand; PAM type: NRG; PAM sequence: AAG
ctcttcccctacaggctcag

SEQ ID NO: 107905 - DNA, 20 bp, Artificial Sequence
  Description of Artificial Sequence: Synthetic oligonucleotide
  Target: LAMA2; (-) strand; PAM type: NRG; PAM sequence: CAG
cctctcttcccctacaggct

SEQ ID NO: 107906 - DNA, 20 bp, Artificial Sequence
  Description of Artificial Sequence: Synthetic oligonucleotide
  Target: LAMA2; (-) strand; PAM type: NRG; PAM sequence: AGG
agccacctctcttcccctac

SEQ ID NO: 107907 - DNA, 20 bp, Artificial Sequence
  Description of Artificial Sequence: Synthetic oligonucleotide
  Target: LAMA2; (-) strand; PAM type: NRG; PAM sequence: CAG
cagccacctctcttccccta

SEQ ID NO: 107908 - DNA, 20 bp, Artificial Sequence
  Description of Artificial Sequence: Synthetic oligonucleotide
  Target: LAMA2; (-) strand; PAM type: NRG; PAM sequence: CAG
cccaggcatccctgtgccct

SEQ ID NO: 107909 - DNA, 20 bp, Artificial Sequence
  Description of Artificial Sequence: Synthetic oligonucleotide
  Target: LAMA2; (-) strand; PAM type: NRG; PAM sequence: AGG
acccagccagctgtggaccc

SEQ ID NO: 107910 - DNA, 20 bp, Artificial Sequence
  Description of Artificial Sequence: Synthetic oligonucleotide
  Target: LAMA2; (-) strand; PAM type: NRG; PAM sequence: CAG
cacccagccagctgtggacc

SEQ ID NO: 107911 - DNA, 20 bp, Artificial Sequence
  Description of Artificial Sequence: Synthetic oligonucleotide
  Target: LAMA2; (-) strand; PAM type: NRG; PAM sequence: TGG
tgcagccacccagccagctg

SEQ ID NO: 107912 - DNA, 20 bp, Artificial Sequence
  Description of Artificial Sequence: Synthetic oligonucleotide
  Target: LAMA2; (-) strand; PAM type: NRG; PAM sequence: CAG
tgcagctgcagccacccagc

SEQ ID NO: 107913 - DNA, 20 bp, Artificial Sequence
  Description of Artificial Sequence: Synthetic oligonucleotide
  Target: LAMA2; (-) strand; PAM type: NRG; PAM sequence: CAG
tgggtgcagctgcagccacc

SEQ ID NO: 107914 - DNA, 20 bp, Artificial Sequence
  Description of Artificial Sequence: Synthetic oligonucleotide
  Target: LAMA2; (-) strand; PAM type: NRG; PAM sequence: CAG
tgccctactgggtgcagctg

SEQ ID NO: 107915 - DNA, 20 bp, Artificial Sequence
  Description of Artificial Sequence: Synthetic oligonucleotide
  Target: LAMA2; (-) strand; PAM type: NRG; PAM sequence: CAG
gaaccctgccctactgggtg

SEQ ID NO: 107916 - DNA, 20 bp, Artificial Sequence
  Description of Artificial Sequence: Synthetic oligonucleotide
  Target: LAMA2; (-) strand; PAM type: NRG; PAM sequence: GGG
tgggggaaccctgccctact

SEQ ID NO: 107917 - DNA, 20 bp, Artificial Sequence
  Description of Artificial Sequence: Synthetic oligonucleotide
  Target: LAMA2; (-) strand; PAM type: NRG; PAM sequence: TGG
gtgggggaaccctgccctac

SEQ ID NO: 107918 - DNA, 20 bp, Artificial Sequence
  Description of Artificial Sequence: Synthetic oligonucleotide
  Target: LAMA2; (-) strand; PAM type: NRG; PAM sequence: GGG
cccttccgagttgaaggtgg

SEQ ID NO: 107919 - DNA, 20 bp, Artificial Sequence
  Description of Artificial Sequence: Synthetic oligonucleotide
  Target: LAMA2; (-) strand; PAM type: NRG; PAM sequence: GGG
ccccttccgagttgaaggtg

SEQ ID NO: 107920 - DNA, 20 bp, Artificial Sequence
  Description of Artificial Sequence: Synthetic oligonucleotide
  Target: LAMA2; (-) strand; PAM type: NRG; PAM sequence: GGG
tccccttccgagttgaaggt

SEQ ID NO: 107921 - DNA, 20 bp, Artificial Sequence
  Description of Artificial Sequence: Synthetic oligonucleotide
  Target: LAMA2; (-) strand; PAM type: NRG; PAM sequence: TGG
gtccccttccgagttgaagg

SEQ ID NO: 107922 - DNA, 20 bp, Artificial Sequence
  Description of Artificial Sequence: Synthetic oligonucleotide
  Target: LAMA2; (-) strand; PAM type: NRG; PAM sequence: AGG
catgtccccttccgagttga

SEQ ID NO: 107923 - DNA, 20 bp, Artificial Sequence
  Description of Artificial Sequence: Synthetic oligonucleotide
  Target: LAMA2; (-) strand; PAM type: NRG; PAM sequence: AAG
ccatgtccccttccgagttg

SEQ ID NO: 107924 - DNA, 20 bp, Artificial Sequence
  Description of Artificial Sequence: Synthetic oligonucleotide
  Target: LAMA2; (-) strand; PAM type: NRG; PAM sequence: GAG
tgggagccatgtccccttcc

SEQ ID NO: 107925 - DNA, 20 bp, Artificial Sequence
  Description of Artificial Sequence: Synthetic oligonucleotide
  Target: LAMA2; (-) strand; PAM type: NRG; PAM sequence: GAG
tgggagccaggaacaagtgg

SEQ ID NO: 107926 - DNA, 20 bp, Artificial Sequence
  Description of Artificial Sequence: Synthetic oligonucleotide
  Target: LAMA2; (-) strand; PAM type: NRG; PAM sequence: GGG
ggtgggagccaggaacaagt

SEQ ID NO: 107927 - DNA, 20 bp, Artificial Sequence
  Description of Artificial Sequence: Synthetic oligonucleotide
  Target: LAMA2; (-) strand; PAM type: NRG; PAM sequence: TGG
tggtgggagccaggaacaag

SEQ ID NO: 107928 - DNA, 20 bp, Artificial Sequence
  Description of Artificial Sequence: Synthetic oligonucleotide
  Target: LAMA2; (-) strand; PAM type: NRG; PAM sequence: AAG
agctggtgggagccaggaac

SEQ ID NO: 107929 - DNA, 20 bp, Artificial Sequence
  Description of Artificial Sequence: Synthetic oligonucleotide
  Target: LAMA2; (-) strand; PAM type: NRG; PAM sequence: AGG
ccacagagctggtgggagcc

SEQ ID NO: 107930 - DNA, 20 bp, Artificial Sequence
  Description of Artificial Sequence: Synthetic oligonucleotide
  Target: LAMA2; (-) strand; PAM type: NRG; PAM sequence: CAG
tccacagagctggtgggagc

SEQ ID NO: 107931 - DNA, 20 bp, Artificial Sequence
  Description of Artificial Sequence: Synthetic oligonucleotide
  Target: LAMA2; (-) strand; PAM type: NRG; PAM sequence: GAG
gtgctccacagagctggtgg

SEQ ID NO: 107932 - DNA, 20 bp, Artificial Sequence
  Description of Artificial Sequence: Synthetic oligonucleotide
  Target: LAMA2; (-) strand; PAM type: NRG; PAM sequence: GGG
ttgtgctccacagagctggt

SEQ ID NO: 107933 - DNA, 20 bp, Artificial Sequence
  Description of Artificial Sequence: Synthetic oligonucleotide
  Target: LAMA2; (-) strand; PAM type: NRG; PAM sequence: TGG
tttgtgctccacagagctgg

SEQ ID NO: 107934 - DNA, 20 bp, Artificial Sequence
  Description of Artificial Sequence: Synthetic oligonucleotide
  Target: LAMA2; (-) strand; PAM type: NRG; PAM sequence: TGG
ggctttgtgctccacagagc

SEQ ID NO: 107935 - DNA, 20 bp, Artificial Sequence
  Description of Artificial Sequence: Synthetic oligonucleotide
  Target: LAMA2; (-) strand; PAM type: NRG; PAM sequence: GAG
gtctggctttgtgctccaca

SEQ ID NO: 107936 - DNA, 20 bp, Artificial Sequence
  Description of Artificial Sequence: Synthetic oligonucleotide
  Target: LAMA2; (-) strand; PAM type: NRG; PAM sequence: CAG
ctgtctggctttgtgctcca

SEQ ID NO: 107937 - DNA, 20 bp, Artificial Sequence
  Description of Artificial Sequence: Synthetic oligonucleotide
  Target: LAMA2; (-) strand; PAM type: NRG; PAM sequence: TGG
aatggcagtgtcagcctgtc

SEQ ID NO: 107938 - DNA, 20 bp, Artificial Sequence
  Description of Artificial Sequence: Synthetic oligonucleotide
  Target: LAMA2; (-) strand; PAM type: NRG; PAM sequence: CAG
ggtctcagtaatggcagtgt

SEQ ID NO: 107939 - DNA, 20 bp, Artificial Sequence
  Description of Artificial Sequence: Synthetic oligonucleotide
  Target: LAMA2; (-) strand; PAM type: NRG; PAM sequence: CAG
caagagggtctcagtaatgg

SEQ ID NO: 107940 - DNA, 20 bp, Artificial Sequence
  Description of Artificial Sequence: Synthetic oligonucleotide
  Target: LAMA2; (-) strand; PAM type: NRG; PAM sequence: TGG
gagcaagagggtctcagtaa

SEQ ID NO: 107941 - DNA, 20 bp, Artificial Sequence
  Description of Artificial Sequence: Synthetic oligonucleotide
  Target: LAMA2; (-) strand; PAM type: NRG; PAM sequence: CAG
ttctgagagcaagagggtct

SEQ ID NO: 107942 - DNA, 20 bp, Artificial Sequence
  Description of Artificial Sequence: Synthetic oligonucleotide
  Target: LAMA2; (-) strand; PAM type: NRG; PAM sequence: GGG
aaactcttctgagagcaaga

SEQ ID NO: 107943 - DNA, 20 bp, Artificial Sequence
  Description of Artificial Sequence: Synthetic oligonucleotide
  Target: LAMA2; (-) strand; PAM type: NRG; PAM sequence: AGG
aaaactcttctgagagcaag

SEQ ID NO: 107944 - DNA, 20 bp, Artificial Sequence
  Description of Artificial Sequence: Synthetic oligonucleotide
  Target: LAMA2; (-) strand; PAM type: NRG; PAM sequence: GAG
gaaaactcttctgagagcaa

SEQ ID NO: 107945 - DNA, 20 bp, Artificial Sequence
  Description of Artificial Sequence: Synthetic oligonucleotide
  Target: LAMA2; (-) strand; PAM type: NRG; PAM sequence: AAG
atgaaaactcttctgagagc

SEQ ID NO: 107946 - DNA, 20 bp, Artificial Sequence
  Description of Artificial Sequence: Synthetic oligonucleotide
  Target: LAMA2; (-) strand; PAM type: NRG; PAM sequence: GAG
ggcgatgaaaactcttctga

SEQ ID NO: 107947 - DNA, 20 bp, Artificial Sequence
  Description of Artificial Sequence: Synthetic oligonucleotide
  Target: LAMA2; (-) strand; PAM type: NRG; PAM sequence: GAG
caggcgatgaaaactcttct

SEQ ID NO: 107948 - DNA, 20 bp, Artificial Sequence
  Description of Artificial Sequence: Synthetic oligonucleotide
  Target: LAMA2; (-) strand; PAM type: NRG; PAM sequence: AGG
gcagtgaaaacagagggagc

SEQ ID NO: 107949 - DNA, 20 bp, Artificial Sequence
  Description of Artificial Sequence: Synthetic oligonucleotide
  Target: LAMA2; (-) strand; PAM type: NRG; PAM sequence: CAG
agcagtgaaaacagagggag

SEQ ID NO: 107950 - DNA, 20 bp, Artificial Sequence
  Description of Artificial Sequence: Synthetic oligonucleotide
  Target: LAMA2; (-) strand; PAM type: NRG; PAM sequence: GAG
ccaagcagtgaaaacagagg

SEQ ID NO: 107951 - DNA, 20 bp, Artificial Sequence
  Description of Artificial Sequence: Synthetic oligonucleotide
  Target: LAMA2; (-) strand; PAM type: NRG; PAM sequence: GGG
caccaagcagtgaaaacaga

SEQ ID NO: 107952 - DNA, 20 bp, Artificial Sequence
  Description of Artificial Sequence: Synthetic oligonucleotide
  Target: LAMA2; (-) strand; PAM type: NRG; PAM sequence: AGG
tcaccaagcagtgaaaacag

SEQ ID NO: 107953 - DNA, 20 bp, Artificial Sequence
  Description of Artificial Sequence: Synthetic oligonucleotide
  Target: LAMA2; (-) strand; PAM type: NRG; PAM sequence: GAG
gtcaccaagcagtgaaaaca

SEQ ID NO: 107954 - DNA, 20 bp, Artificial Sequence
  Description of Artificial Sequence: Synthetic oligonucleotide
  Target: LAMA2; (-) strand; PAM type: NRG; PAM sequence: CAG
cagtcaccaagcagtgaaaa

SEQ ID NO: 107955 - DNA, 20 bp, Artificial Sequence
  Description of Artificial Sequence: Synthetic oligonucleotide
  Target: LAMA2; (-) strand; PAM type: NRG; PAM sequence: CAG
aaaacaccacagtcaccaag

SEQ ID NO: 107956 - DNA, 20 bp, Artificial Sequence
  Description of Artificial Sequence: Synthetic oligonucleotide
  Target: LAMA2; (-) strand; PAM type: NRG; PAM sequence: AAG
aacaaaacaccacagtcacc

SEQ ID NO: 107957 - DNA, 20 bp, Artificial Sequence
  Description of Artificial Sequence: Synthetic oligonucleotide
  Target: LAMA2; (-) strand; PAM type: NRG; PAM sequence: CAG
aggaacaaaacaaaacacca

SEQ ID NO: 107958 - DNA, 20 bp, Artificial Sequence
  Description of Artificial Sequence: Synthetic oligonucleotide
  Target: LAMA2; (-) strand; PAM type: NRG; PAM sequence: AGG
cttttctgagaaaaggaaat

SEQ ID NO: 107959 - DNA, 20 bp, Artificial Sequence
  Description of Artificial Sequence: Synthetic oligonucleotide
  Target: LAMA2; (-) strand; PAM type: NRG; PAM sequence: TAG
tcttttctgagaaaaggaaa

SEQ ID NO: 107960 - DNA, 20 bp, Artificial Sequence
  Description of Artificial Sequence: Synthetic oligonucleotide
  Target: LAMA2; (-) strand; PAM type: NRG; PAM sequence: AGG
agactttcttttctgagaaa

SEQ ID NO: 107961 - DNA, 20 bp, Artificial Sequence
  Description of Artificial Sequence: Synthetic oligonucleotide
  Target: LAMA2; (-) strand; PAM type: NRG; PAM sequence: AAG
aagactttcttttctgagaa

SEQ ID NO: 107962 - DNA, 20 bp, Artificial Sequence
  Description of Artificial Sequence: Synthetic oligonucleotide
  Target: LAMA2; (-) strand; PAM type: NRG; PAM sequence: GAG
ttctaaagactttcttttct

SEQ ID NO: 107963 - DNA, 20 bp, Artificial Sequence
  Description of Artificial Sequence: Synthetic oligonucleotide
  Target: LAMA2; (-) strand; PAM type: NRG; PAM sequence: AAG
cagcttaaattttaattcta

SEQ ID NO: 107964 - DNA, 20 bp, Artificial Sequence
  Description of Artificial Sequence: Synthetic oligonucleotide
  Target: LAMA2; (-) strand; PAM type: NRG; PAM sequence: CAG
ggggagaggggatctattgt

SEQ ID NO: 107965 - DNA, 20 bp, Artificial Sequence
  Description of Artificial Sequence: Synthetic oligonucleotide
  Target: LAMA2; (-) strand; PAM type: NRG; PAM sequence: GGG
tttctgctccctggggagag

SEQ ID NO: 107966 - DNA, 20 bp, Artificial Sequence
  Description of Artificial Sequence: Synthetic oligonucleotide
  Target: LAMA2; (-) strand; PAM type: NRG; PAM sequence: GGG
atttctgctccctggggaga

SEQ ID NO: 107967 - DNA, 20 bp, Artificial Sequence
  Description of Artificial Sequence: Synthetic oligonucleotide
  Target: LAMA2; (-) strand; PAM type: NRG; PAM sequence: AGG
tatttctgctccctggggag

SEQ ID NO: 107968 - DNA, 20 bp, Artificial Sequence
  Description of Artificial Sequence: Synthetic oligonucleotide
  Target: LAMA2; (-) strand; PAM type: NRG; PAM sequence: GAG
atatttctgctccctgggga

SEQ ID NO: 107969 - DNA, 20 bp, Artificial Sequence
  Description of Artificial Sequence: Synthetic oligonucleotide
  Target: LAMA2; (-) strand; PAM type: NRG; PAM sequence: GAG
ccatatttctgctccctggg

SEQ ID NO: 107970 - DNA, 20 bp, Artificial Sequence
  Description of Artificial Sequence: Synthetic oligonucleotide
  Target: LAMA2; (-) strand; PAM type: NRG; PAM sequence: GGG
atccatatttctgctccctg

SEQ ID NO: 107971 - DNA, 20 bp, Artificial Sequence
  Description of Artificial Sequence: Synthetic oligonucleotide
  Target: LAMA2; (-) strand; PAM type: NRG; PAM sequence: GGG
tatccatatttctgctccct

SEQ ID NO: 107972 - DNA, 20 bp, Artificial Sequence
  Description of Artificial Sequence: Synthetic oligonucleotide
  Target: LAMA2; (-) strand; PAM type: NRG; PAM sequence: TGG
atatccatatttctgctccc

SEQ ID NO: 107973 - DNA, 20 bp, Artificial Sequence
  Description of Artificial Sequence: Synthetic oligonucleotide
  Target: LAMA2; (-) strand; PAM type: NRG; PAM sequence: GGG
cgaaacactcaagaccttta

SEQ ID NO: 107974 - DNA, 20 bp, Artificial Sequence
  Description of Artificial Sequence: Synthetic oligonucleotide
  Target: LAMA2; (-) strand; PAM type: NRG; PAM sequence: AGG
ccgaaacactcaagaccttt

SEQ ID NO: 107975 - DNA, 20 bp, Artificial Sequence
  Description of Artificial Sequence: Synthetic oligonucleotide
  Target: LAMA2; (-) strand; PAM type: NRG; PAM sequence: TAG
accgaaacactcaagacctt

SEQ ID NO: 107976 - DNA, 20 bp, Artificial Sequence
  Description of Artificial Sequence: Synthetic oligonucleotide
  Target: LAMA2; (-) strand; PAM type: NRG; PAM sequence: AAG
agtgaaagaccgaaacactc

SEQ ID NO: 107977 - DNA, 20 bp, Artificial Sequence
  Description of Artificial Sequence: Synthetic oligonucleotide
  Target: LAMA2; (-) strand; PAM type: NRG; PAM sequence: AAG
tattgagtataaaatagtga

SEQ ID NO: 107978 - DNA, 20 bp, Artificial Sequence
  Description of Artificial Sequence: Synthetic oligonucleotide
  Target: LAMA2; (-) strand; PAM type: NRG; PAM sequence: TAG
atggaatattgagtataaaa

SEQ ID NO: 107979 - DNA, 20 bp, Artificial Sequence
  Description of Artificial Sequence: Synthetic oligonucleotide
  Target: LAMA2; (-) strand; PAM type: NRG; PAM sequence: GAG
gataaaaatcatggaatatt

SEQ ID NO: 107980 - DNA, 20 bp, Artificial Sequence
  Description of Artificial Sequence: Synthetic oligonucleotide
  Target: LAMA2; (-) strand; PAM type: NRG; PAM sequence: TGG
gcatatctagataaaaatca

SEQ ID NO: 107981 - DNA, 20 bp, Artificial Sequence
  Description of Artificial Sequence: Synthetic oligonucleotide
  Target: LAMA2; (-) strand; PAM type: NRG; PAM sequence: TAG
tgttgtccaccaggcatatc

SEQ ID NO: 107982 - DNA, 20 bp, Artificial Sequence
  Description of Artificial Sequence: Synthetic oligonucleotide
  Target: LAMA2; (-) strand; PAM type: NRG; PAM sequence: AGG
gcgatcacctgttgtccacc

SEQ ID NO: 107983 - DNA, 20 bp, Artificial Sequence
  Description of Artificial Sequence: Synthetic oligonucleotide
  Target: LAMA2; (-) strand; PAM type: NRG; PAM sequence: CAG
ggcgatcacctgttgtccac

SEQ ID NO: 107984 - DNA, 20 bp, Artificial Sequence
  Description of Artificial Sequence: Synthetic oligonucleotide
  Target: LAMA2; (-) strand; PAM type: NRG; PAM sequence: TGG
tgggagggacaacctatatt

SEQ ID NO: 107985 - DNA, 20 bp, Artificial Sequence
  Description of Artificial Sequence: Synthetic oligonucleotide
  Target: LAMA2; (-) strand; PAM type: NRG; PAM sequence: GGG
atcagaatttggagatggga

SEQ ID NO: 107986 - DNA, 20 bp, Artificial Sequence
  Description of Artificial Sequence: Synthetic oligonucleotide
  Target: LAMA2; (-) strand; PAM type: NRG; PAM sequence: AGG
catcagaatttggagatggg

SEQ ID NO: 107987 - DNA, 20 bp, Artificial Sequence
  Description of Artificial Sequence: Synthetic oligonucleotide
  Target: LAMA2; (-) strand; PAM type: NRG; PAM sequence: GAG
gcatcagaatttggagatgg

SEQ ID NO: 107988 - DNA, 20 bp, Artificial Sequence
  Description of Artificial Sequence: Synthetic oligonucleotide
  Target: LAMA2; (-) strand; PAM type: NRG; PAM sequence: GGG
tagcatcagaatttggagat

SEQ ID NO: 107989 - DNA, 20 bp, Artificial Sequence
  Description of Artificial Sequence: Synthetic oligonucleotide
  Target: LAMA2; (-) strand; PAM type: NRG; PAM sequence: TGG
ctagcatcagaatttggaga

SEQ ID NO: 107990 - DNA, 20 bp, Artificial Sequence
  Description of Artificial Sequence: Synthetic oligonucleotide
  Target: LAMA2; (-) strand; PAM type: NRG; PAM sequence: GAG
atttctagcatcagaatttg

SEQ ID NO: 107991 - DNA, 20 bp, Artificial Sequence
  Description of Artificial Sequence: Synthetic oligonucleotide
  Target: LAMA2; (-) strand; PAM type: NRG; PAM sequence: TGG
tgatttctagcatcagaatt

SEQ ID NO: 107992 - DNA, 20 bp, Artificial Sequence
  Description of Artificial Sequence: Synthetic oligonucleotide
  Target: LAMA2; (-) strand; PAM type: NRG; PAM sequence: CAG
ccattcctgatttctagcat

SEQ ID NO: 107993 - DNA, 20 bp, Artificial Sequence
  Description of Artificial Sequence: Synthetic oligonucleotide
  Target: LAMA2; (-) strand; PAM type: NRG; PAM sequence: TAG
tcatagccattcctgatttc

SEQ ID NO: 107994 - DNA, 20 bp, Artificial Sequence
  Description of Artificial Sequence: Synthetic oligonucleotide
  Target: LAMA2; (-) strand; PAM type: NRG; PAM sequence: TAG
tctgaaaatctggactatca

SEQ ID NO: 107995 - DNA, 20 bp, Artificial Sequence
  Description of Artificial Sequence: Synthetic oligonucleotide
  Target: LAMA2; (-) strand; PAM type: NRG; PAM sequence: TGG
tcttatcaattctgaaaatc

SEQ ID NO: 107996 - DNA, 20 bp, Artificial Sequence
  Description of Artificial Sequence: Synthetic oligonucleotide
  Target: LAMA2; (-) strand; PAM type: NRG; PAM sequence: GGG
ttcaacttccgtatctctta

SEQ ID NO: 107997 - DNA, 20 bp, Artificial Sequence
  Description of Artificial Sequence: Synthetic oligonucleotide
  Target: LAMA2; (-) strand; PAM type: NRG; PAM sequence: AGG
gttcaacttccgtatctctt

SEQ ID NO: 107998 - DNA, 20 bp, Artificial Sequence
  Description of Artificial Sequence: Synthetic oligonucleotide
  Target: LAMA2; (-) strand; PAM type: NRG; PAM sequence: TAG
tgttcaacttccgtatctct

SEQ ID NO: 107999 - DNA, 20 bp, Artificial Sequence
  Description of Artificial Sequence: Synthetic oligonucleotide
  Target: LAMA2; (-) strand; PAM type: NRG; PAM sequence: AAG
tcaaactaaacagggaaaga

SEQ ID NO: 108000 - DNA, 20 bp, Artificial Sequence
  Description of Artificial Sequence: Synthetic oligonucleotide
  Target: LAMA2; (-) strand; PAM type: NRG; PAM sequence: AAG
gatctcaaactaaacaggga

SEQ ID NO: 108001 - DNA, 20 bp, Artificial Sequence
  Description of Artificial Sequence: Synthetic oligonucleotide
  Target: LAMA2; (-) strand; PAM type: NRG; PAM sequence: GGG
acatgatctcaaactaaaca

SEQ ID NO: 108002 - DNA, 20 bp, Artificial Sequence
  Description of Artificial Sequence: Synthetic oligonucleotide
  Target: LAMA2; (-) strand; PAM type: NRG; PAM sequence: AGG
cacatgatctcaaactaaac

SEQ ID NO: 108003 - DNA, 20 bp, Artificial Sequence
  Description of Artificial Sequence: Synthetic oligonucleotide
  Target: LAMA2; (-) strand; PAM type: NRG; PAM sequence: CAG
acacatgatctcaaactaaa

SEQ ID NO: 108004 - DNA, 20 bp, Artificial Sequence
  Description of Artificial Sequence: Synthetic oligonucleotide
  Target: LAMA2; (-) strand; PAM type: NRG; PAM sequence: CAG
tcaatttaattagaagtttc

SEQ ID NO: 108005 - DNA, 20 bp, Artificial Sequence
  Description of Artificial Sequence: Synthetic oligonucleotide
  Target: LAMA2; (-) strand; PAM type: NRG; PAM sequence: AAG
tcttccctcaatttaattag

SEQ ID NO: 108006 - DNA, 20 bp, Artificial Sequence
  Description of Artificial Sequence: Synthetic oligonucleotide
  Target: LAMA2; (-) strand; PAM type: NRG; PAM sequence: TAG
gcatcttccctcaatttaat

SEQ ID NO: 108007 - DNA, 20 bp, Artificial Sequence
  Description of Artificial Sequence: Synthetic oligonucleotide
  Target: LAMA2; (-) strand; PAM type: NRG; PAM sequence: TAG
attcccaaattctggcctgc

SEQ ID NO: 108008 - DNA, 20 bp, Artificial Sequence
  Description of Artificial Sequence: Synthetic oligonucleotide
  Target: LAMA2; (-) strand; PAM type: NRG; PAM sequence: TGG
atcatctaattcccaaattc

SEQ ID NO: 108009 - DNA, 20 bp, Artificial Sequence
  Description of Artificial Sequence: Synthetic oligonucleotide
  Target: LAMA2; (-) strand; PAM type: NRG; PAM sequence: CAG
atatgtattgaatttggagc

SEQ ID NO: 108010 - DNA, 20 bp, Artificial Sequence
  Description of Artificial Sequence: Synthetic oligonucleotide
  Target: LAMA2; (-) strand; PAM type: NRG; PAM sequence: GAG
gacaatatgtattgaatttg

SEQ ID NO: 108011 - DNA, 20 bp, Artificial Sequence
  Description of Artificial Sequence: Synthetic oligonucleotide
  Target: LAMA2; (-) strand; PAM type: NRG; PAM sequence: TGG
tagacaatatgtattgaatt

SEQ ID NO: 108012 - DNA, 20 bp, Artificial Sequence
  Description of Artificial Sequence: Synthetic oligonucleotide
  Target: LAMA2; (-) strand; PAM type: NRG; PAM sequence: TAG
aggtgacacagctaattaca

SEQ ID NO: 108013 - DNA, 20 bp, Artificial Sequence
  Description of Artificial Sequence: Synthetic oligonucleotide
  Target: LAMA2; (-) strand; PAM type: NRG; PAM sequence: CAG
tattggtacattaggtgaca

SEQ ID NO: 108014 - DNA, 20 bp, Artificial Sequence
  Description of Artificial Sequence: Synthetic oligonucleotide
  Target: LAMA2; (-) strand; PAM type: NRG; PAM sequence: AGG
aaaggcattattggtacatt

SEQ ID NO: 108015 - DNA, 20 bp, Artificial Sequence
  Description of Artificial Sequence: Synthetic oligonucleotide
  Target: LAMA2; (-) strand; PAM type: NRG; PAM sequence: TAG
aaaaggcattattggtacat

SEQ ID NO: 108016 - DNA, 20 bp, Artificial Sequence
  Description of Artificial Sequence: Synthetic oligonucleotide
  Target: LAMA2; (-) strand; PAM type: NRG; PAM sequence: TGG
gtttcttgaaaaggcattat

SEQ ID NO: 108017 - DNA, 20 bp, Artificial Sequence
  Description of Artificial Sequence: Synthetic oligonucleotide
  Target: LAMA2; (-) strand; PAM type: NRG; PAM sequence: AGG
ctgcacagtgtttcttgaaa

SEQ ID NO: 108018 - DNA, 20 bp, Artificial Sequence
  Description of Artificial Sequence: Synthetic oligonucleotide
  Target: LAMA2; (-) strand; PAM type: NRG; PAM sequence: AAG
actgcacagtgtttcttgaa

SEQ ID NO: 108019 - DNA, 20 bp, Artificial Sequence
  Description of Artificial Sequence: Synthetic oligonucleotide
  Target: LAMA2; (-) strand; PAM type: NRG; PAM sequence: CAG
aggaatcagaacagactgca

SEQ ID NO: 108020 - DNA, 20 bp, Artificial Sequence
  Description of Artificial Sequence: Synthetic oligonucleotide
  Target: LAMA2; (-) strand; PAM type: NRG; PAM sequence: CAG
agccaatggaggaatcagaa

SEQ ID NO: 108021 - DNA, 20 bp, Artificial Sequence
  Description of Artificial Sequence: Synthetic oligonucleotide
  Target: LAMA2; (-) strand; PAM type: NRG; PAM sequence: CAG
aattaagccaatggaggaat

SEQ ID NO: 108022 - DNA, 20 bp, Artificial Sequence
  Description of Artificial Sequence: Synthetic oligonucleotide
  Target: LAMA2; (-) strand; PAM type: NRG; PAM sequence: AGG
tataggaattaagccaatgg

SEQ ID NO: 108023 - DNA, 20 bp, Artificial Sequence
  Description of Artificial Sequence: Synthetic oligonucleotide
  Target: LAMA2; (-) strand; PAM type: NRG; PAM sequence: GAG
ttataggaattaagccaatg

SEQ ID NO: 108024 - DNA, 20 bp, Artificial Sequence
  Description of Artificial Sequence: Synthetic oligonucleotide
  Target: LAMA2; (-) strand; PAM type: NRG; PAM sequence: TGG
tattataggaattaagccaa

SEQ ID NO: 108025 - DNA, 20 bp, Artificial Sequence
  Description of Artificial Sequence: Synthetic oligonucleotide
  Target: LAMA2; (-) strand; PAM type: NRG; PAM sequence: AAG
ctatatttattataggaatt

SEQ ID NO: 108026 - DNA, 20 bp, Artificial Sequence
  Description of Artificial Sequence: Synthetic oligonucleotide
  Target: LAMA2; (-) strand; PAM type: NRG; PAM sequence: AGG
ttggaaactatatttattat

SEQ ID NO: 108027 - DNA, 20 bp, Artificial Sequence
  Description of Artificial Sequence: Synthetic oligonucleotide
  Target: LAMA2; (-) strand; PAM type: NRG; PAM sequence: TAG
tttggaaactatatttatta

SEQ ID NO: 108028 - DNA, 20 bp, Artificial Sequence
  Description of Artificial Sequence: Synthetic oligonucleotide
  Target: LAMA2; (-) strand; PAM type: NRG; PAM sequence: TGG
gaaaattaagttataaactt

SEQ ID NO: 108029 - DNA, 20 bp, Artificial Sequence
  Description of Artificial Sequence: Synthetic oligonucleotide
  Target: LAMA2; (-) strand; PAM type: NRG; PAM sequence: AAG
ataaataaattctgaaaatt

SEQ ID NO: 108030 - DNA, 20 bp, Artificial Sequence
  Description of Artificial Sequence: Synthetic oligonucleotide
  Target: LAMA2; (-) strand; PAM type: NRG; PAM sequence: AAG
cacaatgtatacttatttca

SEQ ID NO: 108031 - DNA, 20 bp, Artificial Sequence
  Description of Artificial Sequence: Synthetic oligonucleotide
  Target: LAMA2; (-) strand; PAM type: NRG; PAM sequence: TAG
tatttttaaatacctcgatt

SEQ ID NO: 108032 - DNA, 20 bp, Artificial Sequence
  Description of Artificial Sequence: Synthetic oligonucleotide
  Target: LAMA2; (-) strand; PAM type: NRG; PAM sequence: TAG
aaaatgaccagtatgtgagg

SEQ ID NO: 108033 - DNA, 20 bp, Artificial Sequence
  Description of Artificial Sequence: Synthetic oligonucleotide
  Target: LAMA2; (-) strand; PAM type: NRG; PAM sequence: AGG
agaaaaatgaccagtatgtg

SEQ ID NO: 108034 - DNA, 20 bp, Artificial Sequence
  Description of Artificial Sequence: Synthetic oligonucleotide
  Target: LAMA2; (-) strand; PAM type: NRG; PAM sequence: GAG
cagaaaaatgaccagtatgt

SEQ ID NO: 108035 - DNA, 20 bp, Artificial Sequence
  Description of Artificial Sequence: Synthetic oligonucleotide
  Target: LAMA2; (-) strand; PAM type: NRG; PAM sequence: CAG
tctcaacacagaaaaatgac

SEQ ID NO: 108036 - DNA, 20 bp, Artificial Sequence
  Description of Artificial Sequence: Synthetic oligonucleotide
  Target: LAMA2; (-) strand; PAM type: NRG; PAM sequence: CAG
gattttaagtgttctcaaca

SEQ ID NO: 108037 - DNA, 20 bp, Artificial Sequence
  Description of Artificial Sequence: Synthetic oligonucleotide
  Target: LAMA2; (-) strand; PAM type: NRG; PAM sequence: AAG
ttgctaagagagtagatttt

SEQ ID NO: 108038 - DNA, 20 bp, Artificial Sequence
  Description of Artificial Sequence: Synthetic oligonucleotide
  Target: LAMA2; (-) strand; PAM type: NRG; PAM sequence: TAG
gcatggctttgctaagagag

SEQ ID NO: 108039 - DNA, 20 bp, Artificial Sequence
  Description of Artificial Sequence: Synthetic oligonucleotide
  Target: LAMA2; (-) strand; PAM type: NRG; PAM sequence: GAG
ccagcatggctttgctaaga

SEQ ID NO: 108040 - DNA, 20 bp, Artificial Sequence
  Description of Artificial Sequence: Synthetic oligonucleotide
  Target: LAMA2; (-) strand; PAM type: NRG; PAM sequence: GAG
agccagcatggctttgctaa

SEQ ID NO: 108041 - DNA, 20 bp, Artificial Sequence
  Description of Artificial Sequence: Synthetic oligonucleotide
  Target: LAMA2; (-) strand; PAM type: NRG; PAM sequence: AAG
aaagccagcatggctttgct

SEQ ID NO: 108042 - DNA, 20 bp, Artificial Sequence
  Description of Artificial Sequence: Synthetic oligonucleotide
  Target: LAMA2; (-) strand; PAM type: NRG; PAM sequence: TGG
aaaaatcactaaagccagca

SEQ ID NO: 108043 - DNA, 20 bp, Artificial Sequence
  Description of Artificial Sequence: Synthetic oligonucleotide
  Target: LAMA2; (-) strand; PAM type: NRG; PAM sequence: CAG
aaaaaaaaaatcactaaagc

SEQ ID NO: 108044 - DNA, 20 bp, Artificial Sequence
  Description of Artificial Sequence: Synthetic oligonucleotide
  Target: LAMA2; (-) strand; PAM type: NRG; PAM sequence: AAG
tacaaaaaaaaaaatcacta

SEQ ID NO: 108045 - DNA, 20 bp, Artificial Sequence
  Description of Artificial Sequence: Synthetic oligonucleotide
  Target: LAMA2; (-) strand; PAM type: NRG; PAM sequence: GAG
aaaattattgacccaaatga

SEQ ID NO: 108046 - DNA, 20 bp, Artificial Sequence
  Description of Artificial Sequence: Synthetic oligonucleotide
  Target: LAMA2; (-) strand; PAM type: NRG; PAM sequence: GAG
aaaaaattattgacccaaat

SEQ ID NO: 108047 - DNA, 20 bp, Artificial Sequence
  Description of Artificial Sequence: Synthetic oligonucleotide
  Target: LAMA2; (-) strand; PAM type: NRG; PAM sequence: TAG
atttatttctctgcttccaa

SEQ ID NO: 108048 - DNA, 20 bp, Artificial Sequence
  Description of Artificial Sequence: Synthetic oligonucleotide
  Target: LAMA2; (-) strand; PAM type: NRG; PAM sequence: GGG
ttttaaatacatctaaggct

SEQ ID NO: 108049 - DNA, 20 bp, Artificial Sequence
  Description of Artificial Sequence: Synthetic oligonucleotide
  Target: LAMA2; (-) strand; PAM type: NRG; PAM sequence: TGG
cttttaaatacatctaaggc

SEQ ID NO: 108050 - DNA, 20 bp, Artificial Sequence
  Description of Artificial Sequence: Synthetic oligonucleotide
  Target: LAMA2; (-) strand; PAM type: NRG; PAM sequence: AGG
tgaacttttaaatacatcta

SEQ ID NO: 108051 - DNA, 20 bp, Artificial Sequence
  Description of Artificial Sequence: Synthetic oligonucleotide
  Target: LAMA2; (-) strand; PAM type: NRG; PAM sequence: AAG
ctgaacttttaaatacatct

SEQ ID NO: 108052 - DNA, 20 bp, Artificial Sequence
  Description of Artificial Sequence: Synthetic oligonucleotide
  Target: LAMA2; (-) strand; PAM type: NRG; PAM sequence: GAG
cgactgatgacacaaaccct

SEQ ID NO: 108053 - DNA, 20 bp, Artificial Sequence
  Description of Artificial Sequence: Synthetic oligonucleotide
  Target: LAMA2; (-) strand; PAM type: NRG; PAM sequence: GAG
cattgtggcattgttcaaaa

SEQ ID NO: 108054 - DNA, 20 bp, Artificial Sequence
  Description of Artificial Sequence: Synthetic oligonucleotide
  Target: LAMA2; (-) strand; PAM type: NRG; PAM sequence: AAG
tgcattgtggcattgttcaa

SEQ ID NO: 108055 - DNA, 20 bp, Artificial Sequence
  Description of Artificial Sequence: Synthetic oligonucleotide
  Target: LAMA2; (-) strand; PAM type: NRG; PAM sequence: TGG
atcaaacttagattgcattg

SEQ ID NO: 108056 - DNA, 20 bp, Artificial Sequence
  Description of Artificial Sequence: Synthetic oligonucleotide
  Target: LAMA2; (-) strand; PAM type: NRG; PAM sequence: TAG
gaagaaaattagatcaaact

SEQ ID NO: 108057 - DNA, 20 bp, Artificial Sequence
  Description of Artificial Sequence: Synthetic oligonucleotide
  Target: LAMA2; (-) strand; PAM type: NRG; PAM sequence: TAG
attattgtcttgaagaaaat

SEQ ID NO: 108058 - DNA, 20 bp, Artificial Sequence
  Description of Artificial Sequence: Synthetic oligonucleotide
  Target: LAMA2; (-) strand; PAM type: NRG; PAM sequence: AAG
ccaagagcattattgtcttg

SEQ ID NO: 108059 - DNA, 20 bp, Artificial Sequence
  Description of Artificial Sequence: Synthetic oligonucleotide
  Target: LAMA2; (-) strand; PAM type: NRG; PAM sequence: GAG
agcaggtaggatggcaccaa

SEQ ID NO: 108060 - DNA, 20 bp, Artificial Sequence
  Description of Artificial Sequence: Synthetic oligonucleotide
  Target: LAMA2; (-) strand; PAM type: NRG; PAM sequence: AAG
agagcaggtaggatggcacc

SEQ ID NO: 108061 - DNA, 20 bp, Artificial Sequence
  Description of Artificial Sequence: Synthetic oligonucleotide
  Target: LAMA2; (-) strand; PAM type: NRG; PAM sequence: TGG
atcataaagagcaggtagga

SEQ ID NO: 108062 - DNA, 20 bp, Artificial Sequence
  Description of Artificial Sequence: Synthetic oligonucleotide
  Target: LAMA2; (-) strand; PAM type: NRG; PAM sequence: AGG
agaaatcataaagagcaggt

SEQ ID NO: 108063 - DNA, 20 bp, Artificial Sequence
  Description of Artificial Sequence: Synthetic oligonucleotide
  Target: LAMA2; (-) strand; PAM type: NRG; PAM sequence: TAG
tagaaatcataaagagcagg

SEQ ID NO: 108064 - DNA, 20 bp, Artificial Sequence
  Description of Artificial Sequence: Synthetic oligonucleotide
  Target: LAMA2; (-) strand; PAM type: NRG; PAM sequence: AGG
gggtagaaatcataaagagc

SEQ ID NO: 108065 - DNA, 20 bp, Artificial Sequence
  Description of Artificial Sequence: Synthetic oligonucleotide
  Target: LAMA2; (-) strand; PAM type: NRG; PAM sequence: CAG
cgggtagaaatcataaagag

SEQ ID NO: 108066 - DNA, 20 bp, Artificial Sequence
  Description of Artificial Sequence: Synthetic oligonucleotide
  Target: LAMA2; (-) strand; PAM type: NRG; PAM sequence: GAG
ctacgggtagaaatcataaa

SEQ ID NO: 108067 - DNA, 20 bp, Artificial Sequence
  Description of Artificial Sequence: Synthetic oligonucleotide
  Target: LAMA2; (-) strand; PAM type: NRG; PAM sequence: AAG
acctacgggtagaaatcata

SEQ ID NO: 108068 - DNA, 20 bp, Artificial Sequence
  Description of Artificial Sequence: Synthetic oligonucleotide
  Target: LAMA2; (-) strand; PAM type: NRG; PAM sequence: TAG
ttgattattctacctacggg

SEQ ID NO: 108069 - DNA, 20 bp, Artificial Sequence
  Description of Artificial Sequence: Synthetic oligonucleotide
  Target: LAMA2; (-) strand; PAM type: NRG; PAM sequence: GGG
ctcttgattattctacctac

SEQ ID NO: 108070 - DNA, 20 bp, Artificial Sequence
  Description of Artificial Sequence: Synthetic oligonucleotide
  Target: LAMA2; (-) strand; PAM type: NRG; PAM sequence: CGG
cctcttgattattctaccta

SEQ ID NO: 108071 - DNA, 20 bp, Artificial Sequence
  Description of Artificial Sequence: Synthetic oligonucleotide
  Target: LAMA2; (-) strand; PAM type: NRG; PAM sequence: CAG
ttttccctctagttaatgtc

SEQ ID NO: 108072 - DNA, 20 bp, Artificial Sequence
  Description of Artificial Sequence: Synthetic oligonucleotide
  Target: LAMA2; (-) strand; PAM type: NRG; PAM sequence: TAG
agggcttcgaattttccctc

SEQ ID NO: 108073 - DNA, 20 bp, Artificial Sequence
  Description of Artificial Sequence: Synthetic oligonucleotide
  Target: LAMA2; (-) strand; PAM type: NRG; PAM sequence: GGG
agttagataccattcttaga

SEQ ID NO: 108074 - DNA, 20 bp, Artificial Sequence
  Description of Artificial Sequence: Synthetic oligonucleotide
  Target: LAMA2; (-) strand; PAM type: NRG; PAM sequence: AGG
aagttagataccattcttag

SEQ ID NO: 108075 - DNA, 20 bp, Artificial Sequence
  Description of Artificial Sequence: Synthetic oligonucleotide
  Target: LAMA2; (-) strand; PAM type: NRG; PAM sequence: GAG
taagttagataccattctta

SEQ ID NO: 108076 - DNA, 20 bp, Artificial Sequence
  Description of Artificial Sequence: Synthetic oligonucleotide
  Target: LAMA2; (-) strand; PAM type: NRG; PAM sequence: TAG
attaagttagataccattct

SEQ ID NO: 108077 - DNA, 20 bp, Artificial Sequence
  Description of Artificial Sequence: Synthetic oligonucleotide
  Target: LAMA2; (-) strand; PAM type: NRG; PAM sequence: TAG
tggagaggtgtctattaagt

SEQ ID NO: 108078 - DNA, 20 bp, Artificial Sequence
  Description of Artificial Sequence: Synthetic oligonucleotide
  Target: LAMA2; (-) strand; PAM type: NRG; PAM sequence: AAG
gtaatggagaggtgtctatt

SEQ ID NO: 108079 - DNA, 20 bp, Artificial Sequence
  Description of Artificial Sequence: Synthetic oligonucleotide
  Target: LAMA2; (-) strand; PAM type: NRG; PAM sequence: AGG
tttgagtaaaggtaatggag

SEQ ID NO: 108080 - DNA, 20 bp, Artificial Sequence
  Description of Artificial Sequence: Synthetic oligonucleotide
  Target: LAMA2; (-) strand; PAM type: NRG; PAM sequence: GAG
ttttgagtaaaggtaatgga

SEQ ID NO: 108081 - DNA, 20 bp, Artificial Sequence
  Description of Artificial Sequence: Synthetic oligonucleotide
  Target: LAMA2; (-) strand; PAM type: NRG; PAM sequence: GAG
agttttgagtaaaggtaatg

SEQ ID NO: 108082 - DNA, 20 bp, Artificial Sequence
  Description of Artificial Sequence: Synthetic oligonucleotide
  Target: LAMA2; (-) strand; PAM type: NRG; PAM sequence: TGG
ttagttttgagtaaaggtaa

SEQ ID NO: 108083 - DNA, 20 bp, Artificial Sequence
  Description of Artificial Sequence: Synthetic oligonucleotide
  Target: LAMA2; (-) strand; PAM type: NRG; PAM sequence: AGG
agagtcttagttttgagtaa

SEQ ID NO: 108084 - DNA, 20 bp, Artificial Sequence
  Description of Artificial Sequence: Synthetic oligonucleotide
  Target: LAMA2; (-) strand; PAM type: NRG; PAM sequence: AAG
aagagtcttagttttgagta

SEQ ID NO: 108085 - DNA, 20 bp, Artificial Sequence
  Description of Artificial Sequence: Synthetic oligonucleotide
  Target: LAMA2; (-) strand; PAM type: NRG; PAM sequence: GAG
ccacaaagagtcttagtttt

SEQ ID NO: 108086 - DNA, 20 bp, Artificial Sequence
  Description of Artificial Sequence: Synthetic oligonucleotide
  Target: LAMA2; (-) strand; PAM type: NRG; PAM sequence: TAG
gcccataccacaaagagtct

SEQ ID NO: 108087 - DNA, 20 bp, Artificial Sequence
  Description of Artificial Sequence: Synthetic oligonucleotide
  Target: LAMA2; (-) strand; PAM type: NRG; PAM sequence: GAG
gggtgggcccataccacaaa

SEQ ID NO: 108088 - DNA, 20 bp, Artificial Sequence
  Description of Artificial Sequence: Synthetic oligonucleotide
  Target: LAMA2; (-) strand; PAM type: NRG; PAM sequence: AAG
tggggtgggcccataccaca

SEQ ID NO: 108089 - DNA, 20 bp, Artificial Sequence
  Description of Artificial Sequence: Synthetic oligonucleotide
  Target: LAMA2; (-) strand; PAM type: NRG; PAM sequence: GGG
ctggctactagaggtggggt

SEQ ID NO: 108090 - DNA, 20 bp, Artificial Sequence
  Description of Artificial Sequence: Synthetic oligonucleotide
  Target: LAMA2; (-) strand; PAM type: NRG; PAM sequence: TGG
gctggctactagaggtgggg

SEQ ID NO: 108091 - DNA, 20 bp, Artificial Sequence
  Description of Artificial Sequence: Synthetic oligonucleotide
  Target: LAMA2; (-) strand; PAM type: NRG; PAM sequence: GGG
gcagctggctactagaggtg

SEQ ID NO: 108092 - DNA, 20 bp, Artificial Sequence
  Description of Artificial Sequence: Synthetic oligonucleotide
  Target: LAMA2; (-) strand; PAM type: NRG; PAM sequence: GGG
agcagctggctactagaggt

SEQ ID NO: 108093 - DNA, 20 bp, Artificial Sequence
  Description of Artificial Sequence: Synthetic oligonucleotide
  Target: LAMA2; (-) strand; PAM type: NRG; PAM sequence: TGG
tagcagctggctactagagg

SEQ ID NO: 108094 - DNA, 20 bp, Artificial Sequence
  Description of Artificial Sequence: Synthetic oligonucleotide
  Target: LAMA2; (-) strand; PAM type: NRG; PAM sequence: AGG
gactagcagctggctactag

SEQ ID NO: 108095 - DNA, 20 bp, Artificial Sequence
  Description of Artificial Sequence: Synthetic oligonucleotide
  Target: LAMA2; (-) strand; PAM type: NRG; PAM sequence: GAG
ggactagcagctggctacta

SEQ ID NO: 108096 - DNA, 20 bp, Artificial Sequence
  Description of Artificial Sequence: Synthetic oligonucleotide
  Target: LAMA2; (-) strand; PAM type: NRG; PAM sequence: TAG
ctggactagcagctggctac

SEQ ID NO: 108097 - DNA, 20 bp, Artificial Sequence
  Description of Artificial Sequence: Synthetic oligonucleotide
  Target: LAMA2; (-) strand; PAM type: NRG; PAM sequence: TGG
acagacactggactagcagc

SEQ ID NO: 108098 - DNA, 20 bp, Artificial Sequence
  Description of Artificial Sequence: Synthetic oligonucleotide
  Target: LAMA2; (-) strand; PAM type: NRG; PAM sequence: CAG
tgagacagacactggactag

SEQ ID NO: 108099 - DNA, 20 bp, Artificial Sequence
  Description of Artificial Sequence: Synthetic oligonucleotide
  Target: LAMA2; (-) strand; PAM type: NRG; PAM sequence: TAG
cagtgagacagacactggac

SEQ ID NO: 108100 - DNA, 20 bp, Artificial Sequence
  Description of Artificial Sequence: Synthetic oligonucleotide
  Target: LAMA2; (-) strand; PAM type: NRG; PAM sequence: TGG
tgcttcagtgagacagacac

SEQ ID NO: 108101 - DNA, 20 bp, Artificial Sequence
  Description of Artificial Sequence: Synthetic oligonucleotide
  Target: LAMA2; (-) strand; PAM type: NRG; PAM sequence: CAG
actagactgcttcagtgaga

SEQ ID NO: 108102 - DNA, 20 bp, Artificial Sequence
  Description of Artificial Sequence: Synthetic oligonucleotide
  Target: LAMA2; (-) strand; PAM type: NRG; PAM sequence: GAG
taccactagactgcttcagt

SEQ ID NO: 108103 - DNA, 20 bp, Artificial Sequence
  Description of Artificial Sequence: Synthetic oligonucleotide
  Target: LAMA2; (-) strand; PAM type: NRG; PAM sequence: CAG
tgtgtaccactagactgctt

SEQ ID NO: 108104 - DNA, 20 bp, Artificial Sequence
  Description of Artificial Sequence: Synthetic oligonucleotide
  Target: LAMA2; (-) strand; PAM type: NRG; PAM sequence: TAG
tcagtacctatgtgtaccac

SEQ ID NO: 108105 - DNA, 20 bp, Artificial Sequence
  Description of Artificial Sequence: Synthetic oligonucleotide
  Target: LAMA2; (-) strand; PAM type: NRG; PAM sequence: CAG
gcatgacagacataattgct

SEQ ID NO: 108106 - DNA, 20 bp, Artificial Sequence
  Description of Artificial Sequence: Synthetic oligonucleotide
  Target: LAMA2; (-) strand; PAM type: NRG; PAM sequence: CAG
tttcctcaattacagcatga

SEQ ID NO: 108107 - DNA, 20 bp, Artificial Sequence
  Description of Artificial Sequence: Synthetic oligonucleotide
  Target: LAMA2; (-) strand; PAM type: NRG; PAM sequence: CAG
aggatggttttcctcaatta

SEQ ID NO: 108108 - DNA, 20 bp, Artificial Sequence
  Description of Artificial Sequence: Synthetic oligonucleotide
  Target: LAMA2; (-) strand; PAM type: NRG; PAM sequence: TGG
aatataaaatgaagtaagga

SEQ ID NO: 108109 - DNA, 20 bp, Artificial Sequence
  Description of Artificial Sequence: Synthetic oligonucleotide
  Target: LAMA2; (-) strand; PAM type: NRG; PAM sequence: AGG
caaaaatataaaatgaagta

SEQ ID NO: 108110 - DNA, 20 bp, Artificial Sequence
  Description of Artificial Sequence: Synthetic oligonucleotide
  Target: LAMA2; (-) strand; PAM type: NRG; PAM sequence: AAG
tcaaaaatataaaatgaagt

SEQ ID NO: 108111 - DNA, 20 bp, Artificial Sequence
  Description of Artificial Sequence: Synthetic oligonucleotide
  Target: LAMA2; (-) strand; PAM type: NRG; PAM sequence: AAG
gcattcaaaaatataaaatg

SEQ ID NO: 108112 - DNA, 20 bp, Artificial Sequence
  Description of Artificial Sequence: Synthetic oligonucleotide
  Target: LAMA2; (-) strand; PAM type: NRG; PAM sequence: GAG
accaagaaggacaatcaagg

SEQ ID NO: 108113 - DNA, 20 bp, Artificial Sequence
  Description of Artificial Sequence: Synthetic oligonucleotide
  Target: LAMA2; (-) strand; PAM type: NRG; PAM sequence: GGG
acaccaagaaggacaatcaa

SEQ ID NO: 108114 - DNA, 20 bp, Artificial Sequence
  Description of Artificial Sequence: Synthetic oligonucleotide
  Target: LAMA2; (-) strand; PAM type: NRG; PAM sequence: AGG
aacaccaagaaggacaatca

SEQ ID NO: 108115 - DNA, 20 bp, Artificial Sequence
  Description of Artificial Sequence: Synthetic oligonucleotide
  Target: LAMA2; (-) strand; PAM type: NRG; PAM sequence: AAG
gaacaccaagaaggacaatc

SEQ ID NO: 108116 - DNA, 20 bp, Artificial Sequence
  Description of Artificial Sequence: Synthetic oligonucleotide
  Target: LAMA2; (-) strand; PAM type: NRG; PAM sequence: AGG
gctttatgggaacaccaaga

SEQ ID NO: 108117 - DNA, 20 bp, Artificial Sequence
  Description of Artificial Sequence: Synthetic oligonucleotide
  Target: LAMA2; (-) strand; PAM type: NRG; PAM sequence: AAG
agctttatgggaacaccaag

SEQ ID NO: 108118 - DNA, 20 bp, Artificial Sequence
  Description of Artificial Sequence: Synthetic oligonucleotide
  Target: LAMA2; (-) strand; PAM type: NRG; PAM sequence: AAG
tttagctttatgggaacacc

SEQ ID NO: 108119 - DNA, 20 bp, Artificial Sequence
  Description of Artificial Sequence: Synthetic oligonucleotide
  Target: LAMA2; (-) strand; PAM type: NRG; PAM sequence: GGG
gtgtgaatttttagctttat

SEQ ID NO: 108120 - DNA, 20 bp, Artificial Sequence
  Description of Artificial Sequence: Synthetic oligonucleotide
  Target: LAMA2; (-) strand; PAM type: NRG; PAM sequence: TGG
agtgtgaatttttagcttta

SEQ ID NO: 108121 - DNA, 20 bp, Artificial Sequence
  Description of Artificial Sequence: Synthetic oligonucleotide
  Target: LAMA2; (-) strand; PAM type: NRG; PAM sequence: TAG
aattcgtgagtgtgaatttt

SEQ ID NO: 108122 - DNA, 20 bp, Artificial Sequence
  Description of Artificial Sequence: Synthetic oligonucleotide
  Target: LAMA2; (-) strand; PAM type: NRG; PAM sequence: GAG
catgataatttaaaattcgt

SEQ ID NO: 108123 - DNA, 20 bp, Artificial Sequence
  Description of Artificial Sequence: Synthetic oligonucleotide
  Target: LAMA2; (-) strand; PAM type: NRG; PAM sequence: AGG
aggagactcagtgataaaat

SEQ ID NO: 108124 - DNA, 20 bp, Artificial Sequence
  Description of Artificial Sequence: Synthetic oligonucleotide
  Target: LAMA2; (-) strand; PAM type: NRG; PAM sequence: TAG
aaggagactcagtgataaaa

SEQ ID NO: 108125 - DNA, 20 bp, Artificial Sequence
  Description of Artificial Sequence: Synthetic oligonucleotide
  Target: LAMA2; (-) strand; PAM type: NRG; PAM sequence: CAG
ctgagcactcaaaggagact

SEQ ID NO: 108126 - DNA, 20 bp, Artificial Sequence
  Description of Artificial Sequence: Synthetic oligonucleotide
  Target: LAMA2; (-) strand; PAM type: NRG; PAM sequence: GAG
aagcagctgagcactcaaag

SEQ ID NO: 108127 - DNA, 20 bp, Artificial Sequence
  Description of Artificial Sequence: Synthetic oligonucleotide
  Target: LAMA2; (-) strand; PAM type: NRG; PAM sequence: AGG
gaaagcagctgagcactcaa

SEQ ID NO: 108128 - DNA, 20 bp, Artificial Sequence
  Description of Artificial Sequence: Synthetic oligonucleotide
  Target: LAMA2; (-) strand; PAM type: NRG; PAM sequence: AAG
tgaaagcagctgagcactca

SEQ ID NO: 108129 - DNA, 20 bp, Artificial Sequence
  Description of Artificial Sequence: Synthetic oligonucleotide
  Target: LAMA2; (-) strand; PAM type: NRG; PAM sequence: GAG
tgtcaagattgaaagcagct

SEQ ID NO: 108130 - DNA, 20 bp, Artificial Sequence
  Description of Artificial Sequence: Synthetic oligonucleotide
  Target: LAMA2; (-) strand; PAM type: NRG; PAM sequence: CAG
gtatctgtcaagattgaaag

SEQ ID NO: 108131 - DNA, 20 bp, Artificial Sequence
  Description of Artificial Sequence: Synthetic oligonucleotide
  Target: LAMA2; (-) strand; PAM type: NRG; PAM sequence: AAG
tgagtatctgtcaagattga

SEQ ID NO: 108132 - DNA, 20 bp, Artificial Sequence
  Description of Artificial Sequence: Synthetic oligonucleotide
  Target: LAMA2; (-) strand; PAM type: NRG; PAM sequence: AAG
gggtcagatgagtatctgtc

SEQ ID NO: 108133 - DNA, 20 bp, Artificial Sequence
  Description of Artificial Sequence: Synthetic oligonucleotide
  Target: LAMA2; (-) strand; PAM type: NRG; PAM sequence: GAG
gggtggtagatgggtcagat

SEQ ID NO: 108134 - DNA, 20 bp, Artificial Sequence
  Description of Artificial Sequence: Synthetic oligonucleotide
  Target: LAMA2; (-) strand; PAM type: NRG; PAM sequence: CAG
cctaagggtggtagatgggt

SEQ ID NO: 108135 - DNA, 20 bp, Artificial Sequence
  Description of Artificial Sequence: Synthetic oligonucleotide
  Target: LAMA2; (-) strand; PAM type: NRG; PAM sequence: GGG
ataccctaagggtggtagat

SEQ ID NO: 108136 - DNA, 20 bp, Artificial Sequence
  Description of Artificial Sequence: Synthetic oligonucleotide
  Target: LAMA2; (-) strand; PAM type: NRG; PAM sequence: TGG
cataccctaagggtggtaga

SEQ ID NO: 108137 - DNA, 20 bp, Artificial Sequence
  Description of Artificial Sequence: Synthetic oligonucleotide
  Target: LAMA2; (-) strand; PAM type: NRG; PAM sequence: TAG
atagcataccctaagggtgg

SEQ ID NO: 108138 - DNA, 20 bp, Artificial Sequence
  Description of Artificial Sequence: Synthetic oligonucleotide
  Target: LAMA2; (-) strand; PAM type: NRG; PAM sequence: TGG
cgcatagcataccctaaggg

SEQ ID NO: 108139 - DNA, 20 bp, Artificial Sequence
  Description of Artificial Sequence: Synthetic oligonucleotide
  Target: LAMA2; (-) strand; PAM type: NRG; PAM sequence: GGG
catcgcatagcataccctaa

SEQ ID NO: 108140 - DNA, 20 bp, Artificial Sequence
  Description of Artificial Sequence: Synthetic oligonucleotide
  Target: LAMA2; (-) strand; PAM type: NRG; PAM sequence: AGG
gcatcgcatagcatacccta

SEQ ID NO: 108141 - DNA, 20 bp, Artificial Sequence
  Description of Artificial Sequence: Synthetic oligonucleotide
  Target: LAMA2; (-) strand; PAM type: NRG; PAM sequence: AAG
ggcatcgcatagcataccct

SEQ ID NO: 108142 - DNA, 20 bp, Artificial Sequence
  Description of Artificial Sequence: Synthetic oligonucleotide
  Target: LAMA2; (-) strand; PAM type: NRG; PAM sequence: TAG
tgtaggtccctggcatcgca

SEQ ID NO: 108143 - DNA, 20 bp, Artificial Sequence
  Description of Artificial Sequence: Synthetic oligonucleotide
  Target: LAMA2; (-) strand; PAM type: NRG; PAM sequence: TGG
cttaaaaggctgtaggtccc

SEQ ID NO: 108144 - DNA, 20 bp, Artificial Sequence
  Description of Artificial Sequence: Synthetic oligonucleotide
  Target: LAMA2; (-) strand; PAM type: NRG; PAM sequence: AGG
aaaatctcttaaaaggctgt

SEQ ID NO: 108145 - DNA, 20 bp, Artificial Sequence
  Description of Artificial Sequence: Synthetic oligonucleotide
  Target: LAMA2; (-) strand; PAM type: NRG; PAM sequence: TAG
aaaaatctcttaaaaggctg

SEQ ID NO: 108146 - DNA, 20 bp, Artificial Sequence
  Description of Artificial Sequence: Synthetic oligonucleotide
  Target: LAMA2; (-) strand; PAM type: NRG; PAM sequence: AGG
ttggtcaaaaatctcttaaa

SEQ ID NO: 108147 - DNA, 20 bp, Artificial Sequence
  Description of Artificial Sequence: Synthetic oligonucleotide
  Target: LAMA2; (-) strand; PAM type: NRG; PAM sequence: AAG
tttggtcaaaaatctcttaa

SEQ ID NO: 108148 - DNA, 20 bp, Artificial Sequence
  Description of Artificial Sequence: Synthetic oligonucleotide
  Target: LAMA2; (-) strand; PAM type: NRG; PAM sequence: TGG
acaccccaaagagacggctt

SEQ ID NO: 108149 - DNA, 20 bp, Artificial Sequence
  Description of Artificial Sequence: Synthetic oligonucleotide
  Target: LAMA2; (-) strand; PAM type: NRG; PAM sequence: CGG
caagaaacaccccaaagaga

SEQ ID NO: 108150 - DNA, 20 bp, Artificial Sequence
  Description of Artificial Sequence: Synthetic oligonucleotide
  Target: LAMA2; (-) strand; PAM type: NRG; PAM sequence: GAG
gagtcaagaaacaccccaaa

SEQ ID NO: 108151 - DNA, 20 bp, Artificial Sequence
  Description of Artificial Sequence: Synthetic oligonucleotide
  Target: LAMA2; (-) strand; PAM type: NRG; PAM sequence: AAG
atgagtcaagaaacacccca

SEQ ID NO: 108152 - DNA, 20 bp, Artificial Sequence
  Description of Artificial Sequence: Synthetic oligonucleotide
  Target: LAMA2; (-) strand; PAM type: NRG; PAM sequence: AAG
taatgagtaaaaaatgagtc

SEQ ID NO: 108153 - DNA, 20 bp, Artificial Sequence
  Description of Artificial Sequence: Synthetic oligonucleotide
  Target: LAMA2; (-) strand; PAM type: NRG; PAM sequence: GAG
ttaaataatgagtaaaaaat

SEQ ID NO: 108154 - DNA, 20 bp, Artificial Sequence
  Description of Artificial Sequence: Synthetic oligonucleotide
  Target: LAMA2; (-) strand; PAM type: NRG; PAM sequence: GAG
ggttattaaaattaaataat

SEQ ID NO: 108155 - DNA, 20 bp, Artificial Sequence
  Description of Artificial Sequence: Synthetic oligonucleotide
  Target: LAMA2; (-) strand; PAM type: NRG; PAM sequence: AGG
tgtacatttttaagtactat

SEQ ID NO: 108156 - DNA, 20 bp, Artificial Sequence
  Description of Artificial Sequence: Synthetic oligonucleotide
  Target: LAMA2; (-) strand; PAM type: NRG; PAM sequence: TAG
ctgtacatttttaagtacta

SEQ ID NO: 108157 - DNA, 20 bp, Artificial Sequence
  Description of Artificial Sequence: Synthetic oligonucleotide
  Target: LAMA2; (-) strand; PAM type: NRG; PAM sequence: AAG
atatagtactgtacattttt

SEQ ID NO: 108158 - DNA, 20 bp, Artificial Sequence
  Description of Artificial Sequence: Synthetic oligonucleotide
  Target: LAMA2; (-) strand; PAM type: NRG; PAM sequence: TAG
aatttttaaggtgctttata

SEQ ID NO: 108159 - DNA, 20 bp, Artificial Sequence
  Description of Artificial Sequence: Synthetic oligonucleotide
  Target: LAMA2; (-) strand; PAM type: NRG; PAM sequence: AGG
tcaccatgcatcaattttta

SEQ ID NO: 108160 - DNA, 20 bp, Artificial Sequence
  Description of Artificial Sequence: Synthetic oligonucleotide
  Target: LAMA2; (-) strand; PAM type: NRG; PAM sequence: AAG
atcaccatgcatcaattttt

SEQ ID NO: 108161 - DNA, 20 bp, Artificial Sequence
  Description of Artificial Sequence: Synthetic oligonucleotide
  Target: LAMA2; (-) strand; PAM type: NRG; PAM sequence: AAG
atcatacacaattttaaaat

SEQ ID NO: 108162 - DNA, 20 bp, Artificial Sequence
  Description of Artificial Sequence: Synthetic oligonucleotide
  Target: LAMA2; (-) strand; PAM type: NRG; PAM sequence: AAG
ctattttctataatagacat

SEQ ID NO: 108163 - DNA, 20 bp, Artificial Sequence
  Description of Artificial Sequence: Synthetic oligonucleotide
  Target: LAMA2; (-) strand; PAM type: NRG; PAM sequence: TAG
gtatttcctattttctataa

SEQ ID NO: 108164 - DNA, 20 bp, Artificial Sequence
  Description of Artificial Sequence: Synthetic oligonucleotide
  Target: LAMA2; (-) strand; PAM type: NRG; PAM sequence: AAG
gatatacaatgatattacaa

SEQ ID NO: 108165 - DNA, 20 bp, Artificial Sequence
  Description of Artificial Sequence: Synthetic oligonucleotide
  Target: LAMA2; (-) strand; PAM type: NRG; PAM sequence: TAG
tgcataggaaaagatatgag

SEQ ID NO: 108166 - DNA, 20 bp, Artificial Sequence
  Description of Artificial Sequence: Synthetic oligonucleotide
  Target: LAMA2; (-) strand; PAM type: NRG; PAM sequence: GAG
atttgcataggaaaagatat

SEQ ID NO: 108167 - DNA, 20 bp, Artificial Sequence
  Description of Artificial Sequence: Synthetic oligonucleotide
  Target: LAMA2; (-) strand; PAM type: NRG; PAM sequence: AAG
aaaaactatttgcataggaa

SEQ ID NO: 108168 - DNA, 20 bp, Artificial Sequence
  Description of Artificial Sequence: Synthetic oligonucleotide
  Target: LAMA2; (-) strand; PAM type: NRG; PAM sequence: AGG
tgtagaaaaactatttgcat

SEQ ID NO: 108169 - DNA, 20 bp, Artificial Sequence
  Description of Artificial Sequence: Synthetic oligonucleotide
  Target: LAMA2; (-) strand; PAM type: NRG; PAM sequence: TAG
ttgtagaaaaactatttgca

SEQ ID NO: 108170 - DNA, 20 bp, Artificial Sequence
  Description of Artificial Sequence: Synthetic oligonucleotide
  Target: LAMA2; (-) strand; PAM type: NRG; PAM sequence: TAG
atataaatatcacccatttg

SEQ ID NO: 108171 - DNA, 20 bp, Artificial Sequence
  Description of Artificial Sequence: Synthetic oligonucleotide
  Target: LAMA2; (-) strand; PAM type: NRG; PAM sequence: CAG
tcccatagtaagttatgaaa

SEQ ID NO: 108172 - DNA, 20 bp, Artificial Sequence
  Description of Artificial Sequence: Synthetic oligonucleotide
  Target: LAMA2; (-) strand; PAM type: NRG; PAM sequence: AAG
gtgatgttcattcccatagt

SEQ ID NO: 108173 - DNA, 20 bp, Artificial Sequence
  Description of Artificial Sequence: Synthetic oligonucleotide
  Target: LAMA2; (-) strand; PAM type: NRG; PAM sequence: TAG
gtatgtgatgttcattccca

SEQ ID NO: 108174 - DNA, 20 bp, Artificial Sequence
  Description of Artificial Sequence: Synthetic oligonucleotide
  Target: LAMA2; (-) strand; PAM type: NRG; PAM sequence: GAG
cattttaaaaatatattttt

SEQ ID NO: 108175 - DNA, 20 bp, Artificial Sequence
  Description of Artificial Sequence: Synthetic oligonucleotide
  Target: LAMA2; (-) strand; PAM type: NRG; PAM sequence: TAG
tgatgtaaattctcagaatc

SEQ ID NO: 108176 - DNA, 20 bp, Artificial Sequence
  Description of Artificial Sequence: Synthetic oligonucleotide
  Target: LAMA2; (-) strand; PAM type: NRG; PAM sequence: CAG
ataataatgatgtaaattct

SEQ ID NO: 108177 - DNA, 20 bp, Artificial Sequence
  Description of Artificial Sequence: Synthetic oligonucleotide
  Target: LAMA2; (-) strand; PAM type: NRG; PAM sequence: AGG
tagactatgaatcaaaatca

SEQ ID NO: 108178 - DNA, 20 bp, Artificial Sequence
  Description of Artificial Sequence: Synthetic oligonucleotide
  Target: LAMA2; (-) strand; PAM type: NRG; PAM sequence: AAG
ttagactatgaatcaaaatc

SEQ ID NO: 108179 - DNA, 20 bp, Artificial Sequence
  Description of Artificial Sequence: Synthetic oligonucleotide
  Target: LAMA2; (-) strand; PAM type: NRG; PAM sequence: TAG
aaatttagagtttggtatgt

SEQ ID NO: 108180 - DNA, 20 bp, Artificial Sequence
  Description of Artificial Sequence: Synthetic oligonucleotide
  Target: LAMA2; (-) strand; PAM type: NRG; PAM sequence: TGG
aacagaagaaatttagagtt

SEQ ID NO: 108181 - DNA, 20 bp, Artificial Sequence
  Description of Artificial Sequence: Synthetic oligonucleotide
  Target: LAMA2; (-) strand; PAM type: NRG; PAM sequence: GAG
tgagtaacagaagaaattta

SEQ ID NO: 108182 - DNA, 20 bp, Artificial Sequence
  Description of Artificial Sequence: Synthetic oligonucleotide
  Target: LAMA2; (-) strand; PAM type: NRG; PAM sequence: TAG
agtgagtaacagaagaaatt

SEQ ID NO: 108183 - DNA, 20 bp, Artificial Sequence
  Description of Artificial Sequence: Synthetic oligonucleotide
  Target: LAMA2; (-) strand; PAM type: NRG; PAM sequence: AAG
ttatgtaaagtgagtaacag

SEQ ID NO: 108184 - DNA, 20 bp, Artificial Sequence
  Description of Artificial Sequence: Synthetic oligonucleotide
  Target: LAMA2; (-) strand; PAM type: NRG; PAM sequence: CAG
tgtttatgtaaagtgagtaa

SEQ ID NO: 108185 - DNA, 20 bp, Artificial Sequence
  Description of Artificial Sequence: Synthetic oligonucleotide
  Target: LAMA2; (-) strand; PAM type: NRG; PAM sequence: GAG
gcaatgtgtttatgtaaagt

SEQ ID NO: 108186 - DNA, 20 bp, Artificial Sequence
  Description of Artificial Sequence: Synthetic oligonucleotide
  Target: LAMA2; (-) strand; PAM type: NRG; PAM sequence: AAG
ggctgcaatgtgtttatgta

SEQ ID NO: 108187 - DNA, 20 bp, Artificial Sequence
  Description of Artificial Sequence: Synthetic oligonucleotide
  Target: LAMA2; (-) strand; PAM type: NRG; PAM sequence: TGG
tatatgtaagggttggtgac

SEQ ID NO: 108188 - DNA, 20 bp, Artificial Sequence
  Description of Artificial Sequence: Synthetic oligonucleotide
  Target: LAMA2; (-) strand; PAM type: NRG; PAM sequence: TGG
gcagggatatatgtaagggt

SEQ ID NO: 108189 - DNA, 20 bp, Artificial Sequence
  Description of Artificial Sequence: Synthetic oligonucleotide
  Target: LAMA2; (-) strand; PAM type: NRG; PAM sequence: GGG
ctgtgcagggatatatgtaa

SEQ ID NO: 108190 - DNA, 20 bp, Artificial Sequence
  Description of Artificial Sequence: Synthetic oligonucleotide
  Target: LAMA2; (-) strand; PAM type: NRG; PAM sequence: AGG
actgtgcagggatatatgta

SEQ ID NO: 108191 - DNA, 20 bp, Artificial Sequence
  Description of Artificial Sequence: Synthetic oligonucleotide
  Target: LAMA2; (-) strand; PAM type: NRG; PAM sequence: AAG
aactgtgcagggatatatgt

SEQ ID NO: 108192 - DNA, 20 bp, Artificial Sequence
  Description of Artificial Sequence: Synthetic oligonucleotide
  Target: LAMA2; (-) strand; PAM type: NRG; PAM sequence: GGG
aaaactgctcaaactgtgca

SEQ ID NO: 108193 - DNA, 20 bp, Artificial Sequence
  Description of Artificial Sequence: Synthetic oligonucleotide
  Target: LAMA2; (-) strand; PAM type: NRG; PAM sequence: AGG
gaaaactgctcaaactgtgc

SEQ ID NO: 108194 - DNA, 20 bp, Artificial Sequence
  Description of Artificial Sequence: Synthetic oligonucleotide
  Target: LAMA2; (-) strand; PAM type: NRG; PAM sequence: CAG
agaaaactgctcaaactgtg

SEQ ID NO: 108195 - DNA, 20 bp, Artificial Sequence
  Description of Artificial Sequence: Synthetic oligonucleotide
  Target: LAMA2; (-) strand; PAM type: NRG; PAM sequence: AAG
aattaaaaatattttcaata

SEQ ID NO: 108196 - DNA, 20 bp, Artificial Sequence
  Description of Artificial Sequence: Synthetic oligonucleotide
  Target: LAMA2; (-) strand; PAM type: NRG; PAM sequence: AAG
tccacaggggttaatgtgcc

SEQ ID NO: 108197 - DNA, 20 bp, Artificial Sequence
  Description of Artificial Sequence: Synthetic oligonucleotide
  Target: LAMA2; (-) strand; PAM type: NRG; PAM sequence: GGG
agtcttacacatttccacag

SEQ ID NO: 108198 - DNA, 20 bp, Artificial Sequence
  Description of Artificial Sequence: Synthetic oligonucleotide
  Target: LAMA2; (-) strand; PAM type: NRG; PAM sequence: GGG
aagtcttacacatttccaca

SEQ ID NO: 108199 - DNA, 20 bp, Artificial Sequence
  Description of Artificial Sequence: Synthetic oligonucleotide
  Target: LAMA2; (-) strand; PAM type: NRG; PAM sequence: AGG
gaagtcttacacatttccac

SEQ ID NO: 108200 - DNA, 20 bp, Artificial Sequence
  Description of Artificial Sequence: Synthetic oligonucleotide
  Target: LAMA2; (-) strand; PAM type: NRG; PAM sequence: CAG
agaagtcttacacatttcca

SEQ ID NO: 108201 - DNA, 20 bp, Artificial Sequence
  Description of Artificial Sequence: Synthetic oligonucleotide
  Target: LAMA2; (-) strand; PAM type: NRG; PAM sequence: AAG
aataatttattttagaagag

SEQ ID NO: 108202 - DNA, 20 bp, Artificial Sequence
  Description of Artificial Sequence: Synthetic oligonucleotide
  Target: LAMA2; (-) strand; PAM type: NRG; PAM sequence: GAG
tgaaataatttattttagaa

SEQ ID NO: 108203 - DNA, 20 bp, Artificial Sequence
  Description of Artificial Sequence: Synthetic oligonucleotide
  Target: LAMA2; (-) strand; PAM type: NRG; PAM sequence: AAG
tatgaaataatttattttag

SEQ ID NO: 108204 - DNA, 20 bp, Artificial Sequence
  Description of Artificial Sequence: Synthetic oligonucleotide
  Target: LAMA2; (-) strand; PAM type: NRG; PAM sequence: TAG
ctttatgaaataatttattt

SEQ ID NO: 108205 - DNA, 20 bp, Artificial Sequence
  Description of Artificial Sequence: Synthetic oligonucleotide
  Target: LAMA2; (-) strand; PAM type: NRG; PAM sequence: TGG
taactaaaaattcatcagca

SEQ ID NO: 108206 - DNA, 20 bp, Artificial Sequence
  Description of Artificial Sequence: Synthetic oligonucleotide
  Target: LAMA2; (-) strand; PAM type: NRG; PAM sequence: CAG
agtagtaactaaaaattcat

SEQ ID NO: 108207 - DNA, 20 bp, Artificial Sequence
  Description of Artificial Sequence: Synthetic oligonucleotide
  Target: LAMA2; (-) strand; PAM type: NRG; PAM sequence: TAG
tgtttactttttaaagacag

SEQ ID NO: 108208 - DNA, 20 bp, Artificial Sequence
  Description of Artificial Sequence: Synthetic oligonucleotide
  Target: LAMA2; (-) strand; PAM type: NRG; PAM sequence: CAG
ttttgtttactttttaaaga

SEQ ID NO: 108209 - DNA, 20 bp, Artificial Sequence
  Description of Artificial Sequence: Synthetic oligonucleotide
  Target: LAMA2; (-) strand; PAM type: NRG; PAM sequence: AAG
gtttttttgtttacttttta

SEQ ID NO: 108210 - DNA, 20 bp, Artificial Sequence
  Description of Artificial Sequence: Synthetic oligonucleotide
  Target: LAMA2; (-) strand; PAM type: NRG; PAM sequence: AAG
attgaaagagttggctgtaa

SEQ ID NO: 108211 - DNA, 20 bp, Artificial Sequence
  Description of Artificial Sequence: Synthetic oligonucleotide
  Target: LAMA2; (-) strand; PAM type: NRG; PAM sequence: TGG
tttgaactcattgaaagagt

SEQ ID NO: 108212 - DNA, 20 bp, Artificial Sequence
  Description of Artificial Sequence: Synthetic oligonucleotide
  Target: LAMA2; (-) strand; PAM type: NRG; PAM sequence: GAG
aatttttgaactcattgaaa

SEQ ID NO: 108213 - DNA, 20 bp, Artificial Sequence
  Description of Artificial Sequence: Synthetic oligonucleotide
  Target: LAMA2; (-) strand; PAM type: NRG; PAM sequence: AAG
gaaatttttgaactcattga

SEQ ID NO: 108214 - DNA, 20 bp, Artificial Sequence
  Description of Artificial Sequence: Synthetic oligonucleotide
  Target: LAMA2; (-) strand; PAM type: NRG; PAM sequence: GAG
cccaaattacttttttatta

SEQ ID NO: 108215 - DNA, 20 bp, Artificial Sequence
  Description of Artificial Sequence: Synthetic oligonucleotide
  Target: LAMA2; (-) strand; PAM type: NRG; PAM sequence: TAG
tccccaaattacttttttat

SEQ ID NO: 108216 - DNA, 20 bp, Artificial Sequence
  Description of Artificial Sequence: Synthetic oligonucleotide
  Target: LAMA2; (-) strand; PAM type: NRG; PAM sequence: AAG
ttctaaacaagcaagtttaa

SEQ ID NO: 108217 - DNA, 20 bp, Artificial Sequence
  Description of Artificial Sequence: Synthetic oligonucleotide
  Target: LAMA2; (-) strand; PAM type: NRG; PAM sequence: AAG
cagtgattttctaaacaagc

SEQ ID NO: 108218 - DNA, 20 bp, Artificial Sequence
  Description of Artificial Sequence: Synthetic oligonucleotide
  Target: LAMA2; (-) strand; PAM type: NRG; PAM sequence: AAG
accccagtgattttctaaac

SEQ ID NO: 108219 - DNA, 20 bp, Artificial Sequence
  Description of Artificial Sequence: Synthetic oligonucleotide
  Target: LAMA2; (-) strand; PAM type: NRG; PAM sequence: CAG
aggctgactaacctgtaccc

SEQ ID NO: 108220 - DNA, 20 bp, Artificial Sequence
  Description of Artificial Sequence: Synthetic oligonucleotide
  Target: LAMA2; (-) strand; PAM type: NRG; PAM sequence: AGG
aaggcaagttagagtttatc

SEQ ID NO: 108221 - DNA, 20 bp, Artificial Sequence
  Description of Artificial Sequence: Synthetic oligonucleotide
  Target: LAMA2; (-) strand; PAM type: NRG; PAM sequence: CAG
gaaggcaagttagagtttat

SEQ ID NO: 108222 - DNA, 20 bp, Artificial Sequence
  Description of Artificial Sequence: Synthetic oligonucleotide
  Target: LAMA2; (-) strand; PAM type: NRG; PAM sequence: GAG
ggaggtgtgaaggcaagtta

SEQ ID NO: 108223 - DNA, 20 bp, Artificial Sequence
  Description of Artificial Sequence: Synthetic oligonucleotide
  Target: LAMA2; (-) strand; PAM type: NRG; PAM sequence: TAG
agggaggtgtgaaggcaagt

SEQ ID NO: 108224 - DNA, 20 bp, Artificial Sequence
  Description of Artificial Sequence: Synthetic oligonucleotide
  Target: LAMA2; (-) strand; PAM type: NRG; PAM sequence: AAG
gaggagggaggtgtgaaggc

SEQ ID NO: 108225 - DNA, 20 bp, Artificial Sequence
  Description of Artificial Sequence: Synthetic oligonucleotide
  Target: LAMA2; (-) strand; PAM type: NRG; PAM sequence: AGG
gctggaggagggaggtgtga

SEQ ID NO: 108226 - DNA, 20 bp, Artificial Sequence
  Description of Artificial Sequence: Synthetic oligonucleotide
  Target: LAMA2; (-) strand; PAM type: NRG; PAM sequence: AAG
tgctggaggagggaggtgtg

SEQ ID NO: 108227 - DNA, 20 bp, Artificial Sequence
  Description of Artificial Sequence: Synthetic oligonucleotide
  Target: LAMA2; (-) strand; PAM type: NRG; PAM sequence: AGG
gaggctctgctggaggaggg

SEQ ID NO: 108228 - DNA, 20 bp, Artificial Sequence
  Description of Artificial Sequence: Synthetic oligonucleotide
  Target: LAMA2; (-) strand; PAM type: NRG; PAM sequence: GAG
ggaggctctgctggaggagg

SEQ ID NO: 108229 - DNA, 20 bp, Artificial Sequence
  Description of Artificial Sequence: Synthetic oligonucleotide
  Target: LAMA2; (-) strand; PAM type: NRG; PAM sequence: GGG
gaggaggctctgctggagga

SEQ ID NO: 108230 - DNA, 20 bp, Artificial Sequence
  Description of Artificial Sequence: Synthetic oligonucleotide
  Target: LAMA2; (-) strand; PAM type: NRG; PAM sequence: AGG
agaggaggctctgctggagg

SEQ ID NO: 108231 - DNA, 20 bp, Artificial Sequence
  Description of Artificial Sequence: Synthetic oligonucleotide
  Target: LAMA2; (-) strand; PAM type: NRG; PAM sequence: GAG
cagaggaggctctgctggag

SEQ ID NO: 108232 - DNA, 20 bp, Artificial Sequence
  Description of Artificial Sequence: Synthetic oligonucleotide
  Target: LAMA2; (-) strand; PAM type: NRG; PAM sequence: AGG
gtcagaggaggctctgctgg

SEQ ID NO: 108233 - DNA, 20 bp, Artificial Sequence
  Description of Artificial Sequence: Synthetic oligonucleotide
  Target: LAMA2; (-) strand; PAM type: NRG; PAM sequence: GAG
tgtcagaggaggctctgctg

SEQ ID NO: 108234 - DNA, 20 bp, Artificial Sequence
  Description of Artificial Sequence: Synthetic oligonucleotide
  Target: LAMA2; (-) strand; PAM type: NRG; PAM sequence: TGG
gctgtcagaggaggctctgc

SEQ ID NO: 108235 - DNA, 20 bp, Artificial Sequence
  Description of Artificial Sequence: Synthetic oligonucleotide
  Target: LAMA2; (-) strand; PAM type: NRG; PAM sequence: AGG
agatgtttggctgtcagagg

SEQ ID NO: 108236 - DNA, 20 bp, Artificial Sequence
  Description of Artificial Sequence: Synthetic oligonucleotide
  Target: LAMA2; (-) strand; PAM type: NRG; PAM sequence: GAG
tagatgtttggctgtcagag

SEQ ID NO: 108237 - DNA, 20 bp, Artificial Sequence
  Description of Artificial Sequence: Synthetic oligonucleotide
  Target: LAMA2; (-) strand; PAM type: NRG; PAM sequence: AGG
cctagatgtttggctgtcag

SEQ ID NO: 108238 - DNA, 20 bp, Artificial Sequence
  Description of Artificial Sequence: Synthetic oligonucleotide
  Target: LAMA2; (-) strand; PAM type: NRG; PAM sequence: GAG
gcctagatgtttggctgtca

SEQ ID NO: 108239 - DNA, 20 bp, Artificial Sequence
  Description of Artificial Sequence: Synthetic oligonucleotide
  Target: LAMA2; (-) strand; PAM type: NRG; PAM sequence: CAG
atgcctagatgtttggctgt

SEQ ID NO: 108240 - DNA, 20 bp, Artificial Sequence
  Description of Artificial Sequence: Synthetic oligonucleotide
  Target: LAMA2; (-) strand; PAM type: NRG; PAM sequence: TGG
cacagaaatgcctagatgtt

SEQ ID NO: 108241 - DNA, 20 bp, Artificial Sequence
  Description of Artificial Sequence: Synthetic oligonucleotide
  Target: LAMA2; (-) strand; PAM type: NRG; PAM sequence: TAG
taatggaacacagaaatgcc

SEQ ID NO: 108242 - DNA, 20 bp, Artificial Sequence
  Description of Artificial Sequence: Synthetic oligonucleotide
  Target: LAMA2; (-) strand; PAM type: NRG; PAM sequence: CAG
atcattaccataatggaaca

SEQ ID NO: 108243 - DNA, 20 bp, Artificial Sequence
  Description of Artificial Sequence: Synthetic oligonucleotide
  Target: LAMA2; (-) strand; PAM type: NRG; PAM sequence: TGG
aaagacaatcattaccataa

SEQ ID NO: 108244 - DNA, 20 bp, Artificial Sequence
  Description of Artificial Sequence: Synthetic oligonucleotide
  Target: LAMA2; (-) strand; PAM type: NRG; PAM sequence: AAG
aatatagtcacttataaaaa

SEQ ID NO: 108245 - DNA, 20 bp, Artificial Sequence
  Description of Artificial Sequence: Synthetic oligonucleotide
  Target: LAMA2; (-) strand; PAM type: NRG; PAM sequence: TAG
agaggaaagacaaacaaata

SEQ ID NO: 108246 - DNA, 20 bp, Artificial Sequence
  Description of Artificial Sequence: Synthetic oligonucleotide
  Target: LAMA2; (-) strand; PAM type: NRG; PAM sequence: AAG
ctggagtggagggaagagga

SEQ ID NO: 108247 - DNA, 20 bp, Artificial Sequence
  Description of Artificial Sequence: Synthetic oligonucleotide
  Target: LAMA2; (-) strand; PAM type: NRG; PAM sequence: AGG
ggaactggagtggagggaag

SEQ ID NO: 108248 - DNA, 20 bp, Artificial Sequence
  Description of Artificial Sequence: Synthetic oligonucleotide
  Target: LAMA2; (-) strand; PAM type: NRG; PAM sequence: GAG
tggaactggagtggagggaa

SEQ ID NO: 108249 - DNA, 20 bp, Artificial Sequence
  Description of Artificial Sequence: Synthetic oligonucleotide
  Target: LAMA2; (-) strand; PAM type: NRG; PAM sequence: AAG
aatggaactggagtggaggg

SEQ ID NO: 108250 - DNA, 20 bp, Artificial Sequence
  Description of Artificial Sequence: Synthetic oligonucleotide
  Target: LAMA2; (-) strand; PAM type: NRG; PAM sequence: GGG
cctaatggaactggagtgga

SEQ ID NO: 108251 - DNA, 20 bp, Artificial Sequence
  Description of Artificial Sequence: Synthetic oligonucleotide
  Target: LAMA2; (-) strand; PAM type: NRG; PAM sequence: AGG
ccctaatggaactggagtgg

SEQ ID NO: 108252 - DNA, 20 bp, Artificial Sequence
  Description of Artificial Sequence: Synthetic oligonucleotide
  Target: LAMA2; (-) strand; PAM type: NRG; PAM sequence: GAG
tccctaatggaactggagtg

SEQ ID NO: 108253 - DNA, 20 bp, Artificial Sequence
  Description of Artificial Sequence: Synthetic oligonucleotide
  Target: LAMA2; (-) strand; PAM type: NRG; PAM sequence: TGG
cttccctaatggaactggag

SEQ ID NO: 108254 - DNA, 20 bp, Artificial Sequence
  Description of Artificial Sequence: Synthetic oligonucleotide
  Target: LAMA2; (-) strand; PAM type: NRG; PAM sequence: GAG
tgccttccctaatggaactg

SEQ ID NO: 108255 - DNA, 20 bp, Artificial Sequence
  Description of Artificial Sequence: Synthetic oligonucleotide
  Target: LAMA2; (-) strand; PAM type: NRG; PAM sequence: TGG
tatgccttccctaatggaac

SEQ ID NO: 108256 - DNA, 20 bp, Artificial Sequence
  Description of Artificial Sequence: Synthetic oligonucleotide
  Target: LAMA2; (-) strand; PAM type: NRG; PAM sequence: TGG
aaagactatgccttccctaa

SEQ ID NO: 108257 - DNA, 20 bp, Artificial Sequence
  Description of Artificial Sequence: Synthetic oligonucleotide
  Target: LAMA2; (-) strand; PAM type: NRG; PAM sequence: AAG
caccaaatattcaaaatgga

SEQ ID NO: 108258 - DNA, 20 bp, Artificial Sequence
  Description of Artificial Sequence: Synthetic oligonucleotide
  Target: LAMA2; (-) strand; PAM type: NRG; PAM sequence: TGG
caagcaccaaatattcaaaa

SEQ ID NO: 108259 - DNA, 20 bp, Artificial Sequence
  Description of Artificial Sequence: Synthetic oligonucleotide
  Target: LAMA2; (-) strand; PAM type: NRG; PAM sequence: AAG
caaaactttttatttatctc

SEQ ID NO: 108260 - DNA, 20 bp, Artificial Sequence
  Description of Artificial Sequence: Synthetic oligonucleotide
  Target: LAMA2; (-) strand; PAM type: NRG; PAM sequence: AAG
actgccattgattaatagat

SEQ ID NO: 108261 - DNA, 20 bp, Artificial Sequence
  Description of Artificial Sequence: Synthetic oligonucleotide
  Target: LAMA2; (-) strand; PAM type: NRG; PAM sequence: TAG
agcatactgccattgattaa

SEQ ID NO: 108262 - DNA, 20 bp, Artificial Sequence
  Description of Artificial Sequence: Synthetic oligonucleotide
  Target: LAMA2; (-) strand; PAM type: NRG; PAM sequence: AAG
attcataattactcttgcta

SEQ ID NO: 108263 - DNA, 20 bp, Artificial Sequence
  Description of Artificial Sequence: Synthetic oligonucleotide
  Target: LAMA2; (-) strand; PAM type: NRG; PAM sequence: TAG
ttcctcttcctactacttat

SEQ ID NO: 108264 - DNA, 20 bp, Artificial Sequence
  Description of Artificial Sequence: Synthetic oligonucleotide
  Target: LAMA2; (-) strand; PAM type: NRG; PAM sequence: TAG
aattgcattttaatacatgt

SEQ ID NO: 108265 - DNA, 20 bp, Artificial Sequence
  Description of Artificial Sequence: Synthetic oligonucleotide
  Target: LAMA2; (-) strand; PAM type: NRG; PAM sequence: TGG
ttaggattcaacagatgact

SEQ ID NO: 108266 - DNA, 20 bp, Artificial Sequence
  Description of Artificial Sequence: Synthetic oligonucleotide
  Target: LAMA2; (-) strand; PAM type: NRG; PAM sequence: CAG
taaagtctgttaggattcaa

SEQ ID NO: 108267 - DNA, 20 bp, Artificial Sequence
  Description of Artificial Sequence: Synthetic oligonucleotide
  Target: LAMA2; (-) strand; PAM type: NRG; PAM sequence: AGG
atgaaattataaagtctgtt

SEQ ID NO: 108268 - DNA, 20 bp, Artificial Sequence
  Description of Artificial Sequence: Synthetic oligonucleotide
  Target: LAMA2; (-) strand; PAM type: NRG; PAM sequence: TAG
aatgaaattataaagtctgt

SEQ ID NO: 108269 - DNA, 20 bp, Artificial Sequence
  Description of Artificial Sequence: Synthetic oligonucleotide
  Target: LAMA2; (-) strand; PAM type: NRG; PAM sequence: AAG
caggaaaaaatgaaattata

SEQ ID NO: 108270 - DNA, 20 bp, Artificial Sequence
  Description of Artificial Sequence: Synthetic oligonucleotide
  Target: LAMA2; (-) strand; PAM type: NRG; PAM sequence: AGG
atttaaaacgtcattatagc

SEQ ID NO: 108271 - DNA, 20 bp, Artificial Sequence
  Description of Artificial Sequence: Synthetic oligonucleotide
  Target: LAMA2; (-) strand; PAM type: NRG; PAM sequence: CAG
aatttaaaacgtcattatag

SEQ ID NO: 108272 - DNA, 20 bp, Artificial Sequence
  Description of Artificial Sequence: Synthetic oligonucleotide
  Target: LAMA2; (-) strand; PAM type: NRG; PAM sequence: TAG
gataatttaaaacgtcatta

SEQ ID NO: 108273 - DNA, 20 bp, Artificial Sequence
  Description of Artificial Sequence: Synthetic oligonucleotide
  Target: LAMA2; (-) strand; PAM type: NRG; PAM sequence: GAG
ataattgtttaagaaaatgt

SEQ ID NO: 108274 - DNA, 20 bp, Artificial Sequence
  Description of Artificial Sequence: Synthetic oligonucleotide
  Target: LAMA2; (-) strand; PAM type: NRG; PAM sequence: AAG
ttattagttaataattgttt

SEQ ID NO: 108275 - DNA, 20 bp, Artificial Sequence
  Description of Artificial Sequence: Synthetic oligonucleotide
  Target: LAMA2; (-) strand; PAM type: NRG; PAM sequence: TAG
aagttgctgtatgtttttat

SEQ ID NO: 108276 - DNA, 20 bp, Artificial Sequence
  Description of Artificial Sequence: Synthetic oligonucleotide
  Target: LAMA2; (-) strand; PAM type: NRG; PAM sequence: AAG
aacagagtctatttttatgt

SEQ ID NO: 108277 - DNA, 20 bp, Artificial Sequence
  Description of Artificial Sequence: Synthetic oligonucleotide
  Target: LAMA2; (-) strand; PAM type: NRG; PAM sequence: GAG
caactatatcatgcaaaaca

SEQ ID NO: 108278 - DNA, 20 bp, Artificial Sequence
  Description of Artificial Sequence: Synthetic oligonucleotide
  Target: LAMA2; (-) strand; PAM type: NRG; PAM sequence: CAG
ttcaactatatcatgcaaaa

SEQ ID NO: 108279 - DNA, 20 bp, Artificial Sequence
  Description of Artificial Sequence: Synthetic oligonucleotide
  Target: LAMA2; (-) strand; PAM type: NRG; PAM sequence: AAG
attcatacatatggatatac

SEQ ID NO: 108280 - DNA, 20 bp, Artificial Sequence
  Description of Artificial Sequence: Synthetic oligonucleotide
  Target: LAMA2; (-) strand; PAM type: NRG; PAM sequence: TGG
tatatatatattcatacata

SEQ ID NO: 108281 - DNA, 20 bp, Artificial Sequence
  Description of Artificial Sequence: Synthetic oligonucleotide
  Target: LAMA2; (-) strand; PAM type: NRG; PAM sequence: GAG
attcttggtattctctttct

SEQ ID NO: 108282 - DNA, 20 bp, Artificial Sequence
  Description of Artificial Sequence: Synthetic oligonucleotide
  Target: LAMA2; (-) strand; PAM type: NRG; PAM sequence: TGG
ttttttaaacaataaattct

SEQ ID NO: 108283 - DNA, 20 bp, Artificial Sequence
  Description of Artificial Sequence: Synthetic oligonucleotide
  Target: LAMA2; (-) strand; PAM type: NRG; PAM sequence: AGG
ttttgtttcttgctttttag

SEQ ID NO: 108284 - DNA, 20 bp, Artificial Sequence
  Description of Artificial Sequence: Synthetic oligonucleotide
  Target: LAMA2; (-) strand; PAM type: NRG; PAM sequence: GAG
attttgtttcttgcttttta

SEQ ID NO: 108285 - DNA, 20 bp, Artificial Sequence
  Description of Artificial Sequence: Synthetic oligonucleotide
  Target: LAMA2; (-) strand; PAM type: NRG; PAM sequence: TAG
atattttgtttcttgctttt

SEQ ID NO: 108286 - DNA, 20 bp, Artificial Sequence
  Description of Artificial Sequence: Synthetic oligonucleotide
  Target: LAMA2; (-) strand; PAM type: NRG; PAM sequence: AAG
aatgagattctttgagttgc

SEQ ID NO: 108287 - DNA, 20 bp, Artificial Sequence
  Description of Artificial Sequence: Synthetic oligonucleotide
  Target: LAMA2; (-) strand; PAM type: NRG; PAM sequence: GAG
aaatataaatgagattcttt

SEQ ID NO: 108288 - DNA, 20 bp, Artificial Sequence
  Description of Artificial Sequence: Synthetic oligonucleotide
  Target: LAMA2; (-) strand; PAM type: NRG; PAM sequence: GAG
agcatatgtgaaatataaat

SEQ ID NO: 108289 - DNA, 20 bp, Artificial Sequence
  Description of Artificial Sequence: Synthetic oligonucleotide
  Target: LAMA2; (-) strand; PAM type: NRG; PAM sequence: CAG
gagttcctgagctgtgtcta

SEQ ID NO: 108290 - DNA, 20 bp, Artificial Sequence
  Description of Artificial Sequence: Synthetic oligonucleotide
  Target: LAMA2; (-) strand; PAM type: NRG; PAM sequence: GAG
agcatcacatctgagttcct

SEQ ID NO: 108291 - DNA, 20 bp, Artificial Sequence
  Description of Artificial Sequence: Synthetic oligonucleotide
  Target: LAMA2; (-) strand; PAM type: NRG; PAM sequence: GAG
tattcataagcatcacatct

SEQ ID NO: 108292 - DNA, 20 bp, Artificial Sequence
  Description of Artificial Sequence: Synthetic oligonucleotide
  Target: LAMA2; (-) strand; PAM type: NRG; PAM sequence: AAG
tatactttatacatattcat

SEQ ID NO: 108293 - DNA, 20 bp, Artificial Sequence
  Description of Artificial Sequence: Synthetic oligonucleotide
  Target: LAMA2; (-) strand; PAM type: NRG; PAM sequence: AAG
gtgatgaagcagcattttct

SEQ ID NO: 108294 - DNA, 20 bp, Artificial Sequence
  Description of Artificial Sequence: Synthetic oligonucleotide
  Target: LAMA2; (-) strand; PAM type: NRG; PAM sequence: CAG
tatcaggacaggtgatgaag

SEQ ID NO: 108295 - DNA, 20 bp, Artificial Sequence
  Description of Artificial Sequence: Synthetic oligonucleotide
  Target: LAMA2; (-) strand; PAM type: NRG; PAM sequence: AAG
caatatcaggacaggtgatg

SEQ ID NO: 108296 - DNA, 20 bp, Artificial Sequence
  Description of Artificial Sequence: Synthetic oligonucleotide
  Target: LAMA2; (-) strand; PAM type: NRG; PAM sequence: AGG
cacatcaacaatatcaggac

SEQ ID NO: 108297 - DNA, 20 bp, Artificial Sequence
  Description of Artificial Sequence: Synthetic oligonucleotide
  Target: LAMA2; (-) strand; PAM type: NRG; PAM sequence: CAG
gcacatcaacaatatcagga

SEQ ID NO: 108298 - DNA, 20 bp, Artificial Sequence
  Description of Artificial Sequence: Synthetic oligonucleotide
  Target: LAMA2; (-) strand; PAM type: NRG; PAM sequence: AGG
tgaagcacatcaacaatatc

SEQ ID NO: 108299 - DNA, 20 bp, Artificial Sequence
  Description of Artificial Sequence: Synthetic oligonucleotide
  Target: LAMA2; (-) strand; PAM type: NRG; PAM sequence: CAG
ttgaagcacatcaacaatat

SEQ ID NO: 108300 - DNA, 20 bp, Artificial Sequence
  Description of Artificial Sequence: Synthetic oligonucleotide
  Target: LAMA2; (-) strand; PAM type: NRG; PAM sequence: AAG
cattgcttggtaagttattg

SEQ ID NO: 108301 - DNA, 20 bp, Artificial Sequence
  Description of Artificial Sequence: Synthetic oligonucleotide
  Target: LAMA2; (-) strand; PAM type: NRG; PAM sequence: AAG
cttttccagcattgcttggt

SEQ ID NO: 108302 - DNA, 20 bp, Artificial Sequence
  Description of Artificial Sequence: Synthetic oligonucleotide
  Target: LAMA2; (-) strand; PAM type: NRG; PAM sequence: TGG
gaaccttttccagcattgct

SEQ ID NO: 108303 - DNA, 20 bp, Artificial Sequence
  Description of Artificial Sequence: Synthetic oligonucleotide
  Target: LAMA2; (-) strand; PAM type: NRG; PAM sequence: CAG
aatttggagagaaccttttc

SEQ ID NO: 108304 - DNA, 20 bp, Artificial Sequence
  Description of Artificial Sequence: Synthetic oligonucleotide
  Target: LAMA2; (-) strand; PAM type: NRG; PAM sequence: GAG
tcaactcactggaatttgga

SEQ ID NO: 108305 - DNA, 20 bp, Artificial Sequence
  Description of Artificial Sequence: Synthetic oligonucleotide
  Target: LAMA2; (-) strand; PAM type: NRG; PAM sequence: GAG
tttcaactcactggaatttg

SEQ ID NO: 108306 - DNA, 20 bp, Artificial Sequence
  Description of Artificial Sequence: Synthetic oligonucleotide
  Target: LAMA2; (-) strand; PAM type: NRG; PAM sequence: TGG
cgtttcaactcactggaatt

SEQ ID NO: 108307 - DNA, 20 bp, Artificial Sequence
  Description of Artificial Sequence: Synthetic oligonucleotide
  Target: LAMA2; (-) strand; PAM type: NRG; PAM sequence: TGG
aaagcaccgtttcaactcac

SEQ ID NO: 108308 - DNA, 20 bp, Artificial Sequence
  Description of Artificial Sequence: Synthetic oligonucleotide
  Target: LAMA2; (-) strand; PAM type: NRG; PAM sequence: AAG
actaacatgttatgggtgaa

SEQ ID NO: 108309 - DNA, 20 bp, Artificial Sequence
  Description of Artificial Sequence: Synthetic oligonucleotide
  Target: LAMA2; (-) strand; PAM type: NRG; PAM sequence: GGG
ggaaaacactaacatgttat

SEQ ID NO: 108310 - DNA, 20 bp, Artificial Sequence
  Description of Artificial Sequence: Synthetic oligonucleotide
  Target: LAMA2; (-) strand; PAM type: NRG; PAM sequence: TGG
tggaaaacactaacatgtta

SEQ ID NO: 108311 - DNA, 20 bp, Artificial Sequence
  Description of Artificial Sequence: Synthetic oligonucleotide
  Target: LAMA2; (-) strand; PAM type: NRG; PAM sequence: TGG
cttttcacatgataagggaa

SEQ ID NO: 108312 - DNA, 20 bp, Artificial Sequence
  Description of Artificial Sequence: Synthetic oligonucleotide
  Target: LAMA2; (-) strand; PAM type: NRG; PAM sequence: GGG
acaggcttttcacatgataa

SEQ ID NO: 108313 - DNA, 20 bp, Artificial Sequence
  Description of Artificial Sequence: Synthetic oligonucleotide
  Target: LAMA2; (-) strand; PAM type: NRG; PAM sequence: AGG
gacaggcttttcacatgata

SEQ ID NO: 108314 - DNA, 20 bp, Artificial Sequence
  Description of Artificial Sequence: Synthetic oligonucleotide
  Target: LAMA2; (-) strand; PAM type: NRG; PAM sequence: AAG
ggacaggcttttcacatgat

SEQ ID NO: 108315 - DNA, 20 bp, Artificial Sequence
  Description of Artificial Sequence: Synthetic oligonucleotide
  Target: LAMA2; (-) strand; PAM type: NRG; PAM sequence: AGG
gcaatctgggtttaaaggac

SEQ ID NO: 108316 - DNA, 20 bp, Artificial Sequence
  Description of Artificial Sequence: Synthetic oligonucleotide
  Target: LAMA2; (-) strand; PAM type: NRG; PAM sequence: CAG
agcaatctgggtttaaagga

SEQ ID NO: 108317 - DNA, 20 bp, Artificial Sequence
  Description of Artificial Sequence: Synthetic oligonucleotide
  Target: LAMA2; (-) strand; PAM type: NRG; PAM sequence: AGG
tgccagcaatctgggtttaa

SEQ ID NO: 108318 - DNA, 20 bp, Artificial Sequence
  Description of Artificial Sequence: Synthetic oligonucleotide
  Target: LAMA2; (-) strand; PAM type: NRG; PAM sequence: AAG
ctgccagcaatctgggttta

SEQ ID NO: 108319 - DNA, 20 bp, Artificial Sequence
  Description of Artificial Sequence: Synthetic oligonucleotide
  Target: LAMA2; (-) strand; PAM type: NRG; PAM sequence: GGG
aagcagtctgccagcaatct

SEQ ID NO: 108320 - DNA, 20 bp, Artificial Sequence
  Description of Artificial Sequence: Synthetic oligonucleotide
  Target: LAMA2; (-) strand; PAM type: NRG; PAM sequence: TGG
caagcagtctgccagcaatc

SEQ ID NO: 108321 - DNA, 20 bp, Artificial Sequence
  Description of Artificial Sequence: Synthetic oligonucleotide
  Target: LAMA2; (-) strand; PAM type: NRG; PAM sequence: CAG
gtcagttacaagcagtctgc

SEQ ID NO: 108322 - DNA, 20 bp, Artificial Sequence
  Description of Artificial Sequence: Synthetic oligonucleotide
  Target: LAMA2; (-) strand; PAM type: NRG; PAM sequence: CAG
atacaactgtcagttacaag

SEQ ID NO: 108323 - DNA, 20 bp, Artificial Sequence
  Description of Artificial Sequence: Synthetic oligonucleotide
  Target: LAMA2; (-) strand; PAM type: NRG; PAM sequence: AAG
ggcatacaactgtcagttac

SEQ ID NO: 108324 - DNA, 20 bp, Artificial Sequence
  Description of Artificial Sequence: Synthetic oligonucleotide
  Target: LAMA2; (-) strand; PAM type: NRG; PAM sequence: CAG
agcttatggcatacaactgt

SEQ ID NO: 108325 - DNA, 20 bp, Artificial Sequence
  Description of Artificial Sequence: Synthetic oligonucleotide
  Target: LAMA2; (-) strand; PAM type: NRG; PAM sequence: TGG
atattaaagtaaagagctta

SEQ ID NO: 108326 - DNA, 20 bp, Artificial Sequence
  Description of Artificial Sequence: Synthetic oligonucleotide
  Target: LAMA2; (-) strand; PAM type: NRG; PAM sequence: GAG
ctctaaaatattaaagtaaa

SEQ ID NO: 108327 - DNA, 20 bp, Artificial Sequence
  Description of Artificial Sequence: Synthetic oligonucleotide
  Target: LAMA2; (-) strand; PAM type: NRG; PAM sequence: AAG
ctctctaaaatattaaagta

SEQ ID NO: 108328 - DNA, 20 bp, Artificial Sequence
  Description of Artificial Sequence: Synthetic oligonucleotide
  Target: LAMA2; (-) strand; PAM type: NRG; PAM sequence: AAG
agaagctctctaaaatatta

SEQ ID NO: 108329 - DNA, 20 bp, Artificial Sequence
  Description of Artificial Sequence: Synthetic oligonucleotide
  Target: LAMA2; (-) strand; PAM type: NRG; PAM sequence: AAG
acatgcctcaatgtttcaag

SEQ ID NO: 108330 - DNA, 20 bp, Artificial Sequence
  Description of Artificial Sequence: Synthetic oligonucleotide
  Target: LAMA2; (-) strand; PAM type: NRG; PAM sequence: AAG
aagacatgcctcaatgtttc

SEQ ID NO: 108331 - DNA, 20 bp, Artificial Sequence
  Description of Artificial Sequence: Synthetic oligonucleotide
  Target: LAMA2; (-) strand; PAM type: NRG; PAM sequence: AAG
aatcaagagatttggaggaa

SEQ ID NO: 108332 - DNA, 20 bp, Artificial Sequence
  Description of Artificial Sequence: Synthetic oligonucleotide
  Target: LAMA2; (-) strand; PAM type: NRG; PAM sequence: AGG
ttaaaaatcaagagatttgg

SEQ ID NO: 108333 - DNA, 20 bp, Artificial Sequence
  Description of Artificial Sequence: Synthetic oligonucleotide
  Target: LAMA2; (-) strand; PAM type: NRG; PAM sequence: GAG
gttaaaaatcaagagatttg

SEQ ID NO: 108334 - DNA, 20 bp, Artificial Sequence
  Description of Artificial Sequence: Synthetic oligonucleotide
  Target: LAMA2; (-) strand; PAM type: NRG; PAM sequence: TGG
aggttaaaaatcaagagatt

SEQ ID NO: 108335 - DNA, 20 bp, Artificial Sequence
  Description of Artificial Sequence: Synthetic oligonucleotide
  Target: LAMA2; (-) strand; PAM type: NRG; PAM sequence: GAG
attgagaggttaaaaatcaa

SEQ ID NO: 108336 - DNA, 20 bp, Artificial Sequence
  Description of Artificial Sequence: Synthetic oligonucleotide
  Target: LAMA2; (-) strand; PAM type: NRG; PAM sequence: AAG
gaattgagaggttaaaaatc

SEQ ID NO: 108337 - DNA, 20 bp, Artificial Sequence
  Description of Artificial Sequence: Synthetic oligonucleotide
  Target: LAMA2; (-) strand; PAM type: NRG; PAM sequence: AGG
gcaagcaccgtggaattgag

SEQ ID NO: 108338 - DNA, 20 bp, Artificial Sequence
  Description of Artificial Sequence: Synthetic oligonucleotide
  Target: LAMA2; (-) strand; PAM type: NRG; PAM sequence: GAG
tgcaagcaccgtggaattga

SEQ ID NO: 108339 - DNA, 20 bp, Artificial Sequence
  Description of Artificial Sequence: Synthetic oligonucleotide
  Target: LAMA2; (-) strand; PAM type: NRG; PAM sequence: GAG
catgcaagcaccgtggaatt

SEQ ID NO: 108340 - DNA, 20 bp, Artificial Sequence
  Description of Artificial Sequence: Synthetic oligonucleotide
  Target: LAMA2; (-) strand; PAM type: NRG; PAM sequence: TGG
gtcacctcatgcaagcaccg

SEQ ID NO: 108341 - DNA, 20 bp, Artificial Sequence
  Description of Artificial Sequence: Synthetic oligonucleotide
  Target: LAMA2; (-) strand; PAM type: NRG; PAM sequence: AAG
agagaatagtcacctcatgc

SEQ ID NO: 108342 - DNA, 20 bp, Artificial Sequence
  Description of Artificial Sequence: Synthetic oligonucleotide
  Target: LAMA2; (-) strand; PAM type: NRG; PAM sequence: TAG
ataggccagagaaaagagaa

SEQ ID NO: 108343 - DNA, 20 bp, Artificial Sequence
  Description of Artificial Sequence: Synthetic oligonucleotide
  Target: LAMA2; (-) strand; PAM type: NRG; PAM sequence: GAG
atagtataggccagagaaaa

SEQ ID NO: 108344 - DNA, 20 bp, Artificial Sequence
  Description of Artificial Sequence: Synthetic oligonucleotide
  Target: LAMA2; (-) strand; PAM type: NRG; PAM sequence: AAG
taatagtataggccagagaa

SEQ ID NO: 108345 - DNA, 20 bp, Artificial Sequence
  Description of Artificial Sequence: Synthetic oligonucleotide
  Target: LAMA2; (-) strand; PAM type: NRG; PAM sequence: GAG
tattgtaatagtataggcca

SEQ ID NO: 108346 - DNA, 20 bp, Artificial Sequence
  Description of Artificial Sequence: Synthetic oligonucleotide
  Target: LAMA2; (-) strand; PAM type: NRG; PAM sequence: CAG
gttattgtaatagtataggc

SEQ ID NO: 108347 - DNA, 20 bp, Artificial Sequence
  Description of Artificial Sequence: Synthetic oligonucleotide
  Target: LAMA2; (-) strand; PAM type: NRG; PAM sequence: AGG
attggttattgtaatagtat

SEQ ID NO: 108348 - DNA, 20 bp, Artificial Sequence
  Description of Artificial Sequence: Synthetic oligonucleotide
  Target: LAMA2; (-) strand; PAM type: NRG; PAM sequence: TAG
aattggttattgtaatagta

SEQ ID NO: 108349 - DNA, 20 bp, Artificial Sequence
  Description of Artificial Sequence: Synthetic oligonucleotide
  Target: LAMA2; (-) strand; PAM type: NRG; PAM sequence: TAG
ccatcaattggttattgtaa

SEQ ID NO: 108350 - DNA, 20 bp, Artificial Sequence
  Description of Artificial Sequence: Synthetic oligonucleotide
  Target: LAMA2; (-) strand; PAM type: NRG; PAM sequence: TGG
ggaaaaaaggagccatcaat

SEQ ID NO: 108351 - DNA, 20 bp, Artificial Sequence
  Description of Artificial Sequence: Synthetic oligonucleotide
  Target: LAMA2; (-) strand; PAM type: NRG; PAM sequence: GAG
gcagctgtgtgggaaaaaag

SEQ ID NO: 108352 - DNA, 20 bp, Artificial Sequence
  Description of Artificial Sequence: Synthetic oligonucleotide
  Target: LAMA2; (-) strand; PAM type: NRG; PAM sequence: AGG
gggcagctgtgtgggaaaaa

SEQ ID NO: 108353 - DNA, 20 bp, Artificial Sequence
  Description of Artificial Sequence: Synthetic oligonucleotide
  Target: LAMA2; (-) strand; PAM type: NRG; PAM sequence: AAG
tgggcagctgtgtgggaaaa

SEQ ID NO: 108354 - DNA, 20 bp, Artificial Sequence
  Description of Artificial Sequence: Synthetic oligonucleotide
  Target: LAMA2; (-) strand; PAM type: NRG; PAM sequence: GGG
gatgaattgggcagctgtgt

SEQ ID NO: 108355 - DNA, 20 bp, Artificial Sequence
  Description of Artificial Sequence: Synthetic oligonucleotide
  Target: LAMA2; (-) strand; PAM type: NRG; PAM sequence: TGG
agatgaattgggcagctgtg

SEQ ID NO: 108356 - DNA, 20 bp, Artificial Sequence
  Description of Artificial Sequence: Synthetic oligonucleotide
  Target: LAMA2; (-) strand; PAM type: NRG; PAM sequence: CAG
gtccaagaagatgaattggg

SEQ ID NO: 108357 - DNA, 20 bp, Artificial Sequence
  Description of Artificial Sequence: Synthetic oligonucleotide
  Target: LAMA2; (-) strand; PAM type: NRG; PAM sequence: GGG
gtagtccaagaagatgaatt

SEQ ID NO: 108358 - DNA, 20 bp, Artificial Sequence
  Description of Artificial Sequence: Synthetic oligonucleotide
  Target: LAMA2; (-) strand; PAM type: NRG; PAM sequence: TGG
tgtagtccaagaagatgaat

SEQ ID NO: 108359 - DNA, 20 bp, Artificial Sequence
  Description of Artificial Sequence: Synthetic oligonucleotide
  Target: LAMA2; (-) strand; PAM type: NRG; PAM sequence: AAG
gatcagagctgtagtccaag

SEQ ID NO: 108360 - DNA, 20 bp, Artificial Sequence
  Description of Artificial Sequence: Synthetic oligonucleotide
  Target: LAMA2; (-) strand; PAM type: NRG; PAM sequence: AAG
tgtgatcagagctgtagtcc

SEQ ID NO: 108361 - DNA, 20 bp, Artificial Sequence
  Description of Artificial Sequence: Synthetic oligonucleotide
  Target: LAMA2; (-) strand; PAM type: NRG; PAM sequence: TAG
ggagagtgtgatcagagctg

SEQ ID NO: 108362 - DNA, 20 bp, Artificial Sequence
  Description of Artificial Sequence: Synthetic oligonucleotide
  Target: LAMA2; (-) strand; PAM type: NRG; PAM sequence: GAG
tgagtaggagagtgtgatca

SEQ ID NO: 108363 - DNA, 20 bp, Artificial Sequence
  Description of Artificial Sequence: Synthetic oligonucleotide
  Target: LAMA2; (-) strand; PAM type: NRG; PAM sequence: CAG
tctgagtaggagagtgtgat

SEQ ID NO: 108364 - DNA, 20 bp, Artificial Sequence
  Description of Artificial Sequence: Synthetic oligonucleotide
  Target: LAMA2; (-) strand; PAM type: NRG; PAM sequence: GAG
ttgaaagtttctgagtagga

SEQ ID NO: 108365 - DNA, 20 bp, Artificial Sequence
  Description of Artificial Sequence: Synthetic oligonucleotide
  Target: LAMA2; (-) strand; PAM type: NRG; PAM sequence: GAG
ccttgaaagtttctgagtag

SEQ ID NO: 108366 - DNA, 20 bp, Artificial Sequence
  Description of Artificial Sequence: Synthetic oligonucleotide
  Target: LAMA2; (-) strand; PAM type: NRG; PAM sequence: AGG
ggccttgaaagtttctgagt

SEQ ID NO: 108367 - DNA, 20 bp, Artificial Sequence
  Description of Artificial Sequence: Synthetic oligonucleotide
  Target: LAMA2; (-) strand; PAM type: NRG; PAM sequence: TAG
aggccttgaaagtttctgag

SEQ ID NO: 108368 - DNA, 20 bp, Artificial Sequence
  Description of Artificial Sequence: Synthetic oligonucleotide
  Target: LAMA2; (-) strand; PAM type: NRG; PAM sequence: GAG
tggaggccttgaaagtttct

SEQ ID NO: 108369 - DNA, 20 bp, Artificial Sequence
  Description of Artificial Sequence: Synthetic oligonucleotide
  Target: LAMA2; (-) strand; PAM type: NRG; PAM sequence: AAG
gagcaatttggaggccttga

SEQ ID NO: 108370 - DNA, 20 bp, Artificial Sequence
  Description of Artificial Sequence: Synthetic oligonucleotide
  Target: LAMA2; (-) strand; PAM type: NRG; PAM sequence: AGG
ctgggcaatgagcaatttgg

SEQ ID NO: 108371 - DNA, 20 bp, Artificial Sequence
  Description of Artificial Sequence: Synthetic oligonucleotide
  Target: LAMA2; (-) strand; PAM type: NRG; PAM sequence: GAG
actgggcaatgagcaatttg

SEQ ID NO: 108372 - DNA, 20 bp, Artificial Sequence
  Description of Artificial Sequence: Synthetic oligonucleotide
  Target: LAMA2; (-) strand; PAM type: NRG; PAM sequence: TGG
aaactgggcaatgagcaatt

SEQ ID NO: 108373 - DNA, 20 bp, Artificial Sequence
  Description of Artificial Sequence: Synthetic oligonucleotide
  Target: LAMA2; (-) strand; PAM type: NRG; PAM sequence: GAG
gagtaaggaaactgggcaat

SEQ ID NO: 108374 - DNA, 20 bp, Artificial Sequence
  Description of Artificial Sequence: Synthetic oligonucleotide
  Target: LAMA2; (-) strand; PAM type: NRG; PAM sequence: GGG
aatgtgcgagtaaggaaact

SEQ ID NO: 108375 - DNA, 20 bp, Artificial Sequence
  Description of Artificial Sequence: Synthetic oligonucleotide
  Target: LAMA2; (-) strand; PAM type: NRG; PAM sequence: TGG
gaatgtgcgagtaaggaaac

SEQ ID NO: 108376 - DNA, 20 bp, Artificial Sequence
  Description of Artificial Sequence: Synthetic oligonucleotide
  Target: LAMA2; (-) strand; PAM type: NRG; PAM sequence: AGG
aaggtttgaatgtgcgagta

SEQ ID NO: 108377 - DNA, 20 bp, Artificial Sequence
  Description of Artificial Sequence: Synthetic oligonucleotide
  Target: LAMA2; (-) strand; PAM type: NRG; PAM sequence: AAG
gaaggtttgaatgtgcgagt

SEQ ID NO: 108378 - DNA, 20 bp, Artificial Sequence
  Description of Artificial Sequence: Synthetic oligonucleotide
  Target: LAMA2; (-) strand; PAM type: NRG; PAM sequence: GAG
tctggaaggtttgaatgtgc

SEQ ID NO: 108379 - DNA, 20 bp, Artificial Sequence
  Description of Artificial Sequence: Synthetic oligonucleotide
  Target: LAMA2; (-) strand; PAM type: NRG; PAM sequence: AGG
ggtcagagtcaatttctgga

SEQ ID NO: 108380 - DNA, 20 bp, Artificial Sequence
  Description of Artificial Sequence: Synthetic oligonucleotide
  Target: LAMA2; (-) strand; PAM type: NRG; PAM sequence: AAG
aggtcagagtcaatttctgg

SEQ ID NO: 108381 - DNA, 20 bp, Artificial Sequence
  Description of Artificial Sequence: Synthetic oligonucleotide
  Target: LAMA2; (-) strand; PAM type: NRG; PAM sequence: TGG
gacaggtcagagtcaatttc

SEQ ID NO: 108382 - DNA, 20 bp, Artificial Sequence
  Description of Artificial Sequence: Synthetic oligonucleotide
  Target: LAMA2; (-) strand; PAM type: NRG; PAM sequence: GAG
taaggctattagacaggtca

SEQ ID NO: 108383 - DNA, 20 bp, Artificial Sequence
  Description of Artificial Sequence: Synthetic oligonucleotide
  Target: LAMA2; (-) strand; PAM type: NRG; PAM sequence: CAG
agtaaggctattagacaggt

SEQ ID NO: 108384 - DNA, 20 bp, Artificial Sequence
  Description of Artificial Sequence: Synthetic oligonucleotide
  Target: LAMA2; (-) strand; PAM type: NRG; PAM sequence: AGG
gagaagtaaggctattagac

SEQ ID NO: 108385 - DNA, 20 bp, Artificial Sequence
  Description of Artificial Sequence: Synthetic oligonucleotide
  Target: LAMA2; (-) strand; PAM type: NRG; PAM sequence: CAG
ggagaagtaaggctattaga

SEQ ID NO: 108386 - DNA, 20 bp, Artificial Sequence
  Description of Artificial Sequence: Synthetic oligonucleotide
  Target: LAMA2; (-) strand; PAM type: NRG; PAM sequence: TAG
atgtggagaagtaaggctat

SEQ ID NO: 108387 - DNA, 20 bp, Artificial Sequence
  Description of Artificial Sequence: Synthetic oligonucleotide
  Target: LAMA2; (-) strand; PAM type: NRG; PAM sequence: AGG
aagggcaatgtggagaagta

SEQ ID NO: 108388 - DNA, 20 bp, Artificial Sequence
  Description of Artificial Sequence: Synthetic oligonucleotide
  Target: LAMA2; (-) strand; PAM type: NRG; PAM sequence: AAG
caagggcaatgtggagaagt

SEQ ID NO: 108389 - DNA, 20 bp, Artificial Sequence
  Description of Artificial Sequence: Synthetic oligonucleotide
  Target: LAMA2; (-) strand; PAM type: NRG; PAM sequence: AAG
tcgtcaagggcaatgtggag

SEQ ID NO: 108390 - DNA, 20 bp, Artificial Sequence
  Description of Artificial Sequence: Synthetic oligonucleotide
  Target: LAMA2; (-) strand; PAM type: NRG; PAM sequence: GAG
ggttcgtcaagggcaatgtg

SEQ ID NO: 108391 - DNA, 20 bp, Artificial Sequence
  Description of Artificial Sequence: Synthetic oligonucleotide
  Target: LAMA2; (-) strand; PAM type: NRG; PAM sequence: TGG
agggttcgtcaagggcaatg

SEQ ID NO: 108392 - DNA, 20 bp, Artificial Sequence
  Description of Artificial Sequence: Synthetic oligonucleotide
  Target: LAMA2; (-) strand; PAM type: NRG; PAM sequence: GGG
aagtttgtagggttcgtcaa

SEQ ID NO: 108393 - DNA, 20 bp, Artificial Sequence
  Description of Artificial Sequence: Synthetic oligonucleotide
  Target: LAMA2; (-) strand; PAM type: NRG; PAM sequence: AGG
taagtttgtagggttcgtca

SEQ ID NO: 108394 - DNA, 20 bp, Artificial Sequence
  Description of Artificial Sequence: Synthetic oligonucleotide
  Target: LAMA2; (-) strand; PAM type: NRG; PAM sequence: AAG
ctaagtttgtagggttcgtc

SEQ ID NO: 108395 - DNA, 20 bp, Artificial Sequence
  Description of Artificial Sequence: Synthetic oligonucleotide
  Target: LAMA2; (-) strand; PAM type: NRG; PAM sequence: GGG
ttcagctccctaagtttgta

SEQ ID NO: 108396 - DNA, 20 bp, Artificial Sequence
  Description of Artificial Sequence: Synthetic oligonucleotide
  Target: LAMA2; (-) strand; PAM type: NRG; PAM sequence: AGG
tttcagctccctaagtttgt

SEQ ID NO: 108397 - DNA, 20 bp, Artificial Sequence
  Description of Artificial Sequence: Synthetic oligonucleotide
  Target: LAMA2; (-) strand; PAM type: NRG; PAM sequence: TAG
atttcagctccctaagtttg

SEQ ID NO: 108398 - DNA, 20 bp, Artificial Sequence
  Description of Artificial Sequence: Synthetic oligonucleotide
  Target: LAMA2; (-) strand; PAM type: NRG; PAM sequence: AAG
agcgagtatttcagctccct

SEQ ID NO: 108399 - DNA, 20 bp, Artificial Sequence
  Description of Artificial Sequence: Synthetic oligonucleotide
  Target: LAMA2; (-) strand; PAM type: NRG; PAM sequence: CAG
ggatgtgagagcgagtattt

SEQ ID NO: 108400 - DNA, 20 bp, Artificial Sequence
  Description of Artificial Sequence: Synthetic oligonucleotide
  Target: LAMA2; (-) strand; PAM type: NRG; PAM sequence: GAG
tgatgtgtggatgtgagagc

SEQ ID NO: 108401 - DNA, 20 bp, Artificial Sequence
  Description of Artificial Sequence: Synthetic oligonucleotide
  Target: LAMA2; (-) strand; PAM type: NRG; PAM sequence: GAG
cttttgatgtgtggatgtga

SEQ ID NO: 108402 - DNA, 20 bp, Artificial Sequence
  Description of Artificial Sequence: Synthetic oligonucleotide
  Target: LAMA2; (-) strand; PAM type: NRG; PAM sequence: GAG
gacttttgatgtgtggatgt

SEQ ID NO: 108403 - DNA, 20 bp, Artificial Sequence
  Description of Artificial Sequence: Synthetic oligonucleotide
  Target: LAMA2; (-) strand; PAM type: NRG; PAM sequence: TGG
aggcagggacttttgatgtg

SEQ ID NO: 108404 - DNA, 20 bp, Artificial Sequence
  Description of Artificial Sequence: Synthetic oligonucleotide
  Target: LAMA2; (-) strand; PAM type: NRG; PAM sequence: GGG
gaaaggcagggaggcaggca

SEQ ID NO: 108405 - DNA, 20 bp, Artificial Sequence
  Description of Artificial Sequence: Synthetic oligonucleotide
  Target: LAMA2; (-) strand; PAM type: NRG; PAM sequence: AGG
ggaaaggcagggaggcaggc

SEQ ID NO: 108406 - DNA, 20 bp, Artificial Sequence
  Description of Artificial Sequence: Synthetic oligonucleotide
  Target: LAMA2; (-) strand; PAM type: NRG; PAM sequence: CAG
aggaaaggcagggaggcagg

SEQ ID NO: 108407 - DNA, 20 bp, Artificial Sequence
  Description of Artificial Sequence: Synthetic oligonucleotide
  Target: LAMA2; (-) strand; PAM type: NRG; PAM sequence: AGG
ataaggaaaggcagggaggc

SEQ ID NO: 108408 - DNA, 20 bp, Artificial Sequence
  Description of Artificial Sequence: Synthetic oligonucleotide
  Target: LAMA2; (-) strand; PAM type: NRG; PAM sequence: CAG
tataaggaaaggcagggagg

SEQ ID NO: 108409 - DNA, 20 bp, Artificial Sequence
  Description of Artificial Sequence: Synthetic oligonucleotide
  Target: LAMA2; (-) strand; PAM type: NRG; PAM sequence: AGG
tagtataaggaaaggcaggg

SEQ ID NO: 108410 - DNA, 20 bp, Artificial Sequence
  Description of Artificial Sequence: Synthetic oligonucleotide
  Target: LAMA2; (-) strand; PAM type: NRG; PAM sequence: GAG
atagtataaggaaaggcagg

SEQ ID NO: 108411 - DNA, 20 bp, Artificial Sequence
  Description of Artificial Sequence: Synthetic oligonucleotide
  Target: LAMA2; (-) strand; PAM type: NRG; PAM sequence: GGG
aaatagtataaggaaaggca

SEQ ID NO: 108412 - DNA, 20 bp, Artificial Sequence
  Description of Artificial Sequence: Synthetic oligonucleotide
  Target: LAMA2; (-) strand; PAM type: NRG; PAM sequence: AGG
gaaatagtataaggaaaggc

SEQ ID NO: 108413 - DNA, 20 bp, Artificial Sequence
  Description of Artificial Sequence: Synthetic oligonucleotide
  Target: LAMA2; (-) strand; PAM type: NRG; PAM sequence: CAG
agaaatagtataaggaaagg

SEQ ID NO: 108414 - DNA, 20 bp, Artificial Sequence
  Description of Artificial Sequence: Synthetic oligonucleotide
  Target: LAMA2; (-) strand; PAM type: NRG; PAM sequence: AGG
agtagaaatagtataaggaa

SEQ ID NO: 108415 - DNA, 20 bp, Artificial Sequence
  Description of Artificial Sequence: Synthetic oligonucleotide
  Target: LAMA2; (-) strand; PAM type: NRG; PAM sequence: AAG
tagtagaaatagtataagga

SEQ ID NO: 108416 - DNA, 20 bp, Artificial Sequence
  Description of Artificial Sequence: Synthetic oligonucleotide
  Target: LAMA2; (-) strand; PAM type: NRG; PAM sequence: AGG
gatatagtagaaatagtata

SEQ ID NO: 108417 - DNA, 20 bp, Artificial Sequence
  Description of Artificial Sequence: Synthetic oligonucleotide
  Target: LAMA2; (-) strand; PAM type: NRG; PAM sequence: AAG
agatatagtagaaatagtat

SEQ ID NO: 108418 - DNA, 20 bp, Artificial Sequence
  Description of Artificial Sequence: Synthetic oligonucleotide
  Target: LAMA2; (-) strand; PAM type: NRG; PAM sequence: TAG
tgtagaagatatagtagaaa

SEQ ID NO: 108419 - DNA, 20 bp, Artificial Sequence
  Description of Artificial Sequence: Synthetic oligonucleotide
  Target: LAMA2; (-) strand; PAM type: NRG; PAM sequence: TAG
caggaatgtagaagatatag

SEQ ID NO: 108420 - DNA, 20 bp, Artificial Sequence
  Description of Artificial Sequence: Synthetic oligonucleotide
  Target: LAMA2; (-) strand; PAM type: NRG; PAM sequence: TAG
atacaggaatgtagaagata

SEQ ID NO: 108421 - DNA, 20 bp, Artificial Sequence
  Description of Artificial Sequence: Synthetic oligonucleotide
  Target: LAMA2; (-) strand; PAM type: NRG; PAM sequence: AAG
tagtatatacaggaatgtag

SEQ ID NO: 108422 - DNA, 20 bp, Artificial Sequence
  Description of Artificial Sequence: Synthetic oligonucleotide
  Target: LAMA2; (-) strand; PAM type: NRG; PAM sequence: TAG
aggtagtatatacaggaatg

SEQ ID NO: 108423 - DNA, 20 bp, Artificial Sequence
  Description of Artificial Sequence: Synthetic oligonucleotide
  Target: LAMA2; (-) strand; PAM type: NRG; PAM sequence: AGG
aggagacaggtagtatatac

SEQ ID NO: 108424 - DNA, 20 bp, Artificial Sequence
  Description of Artificial Sequence: Synthetic oligonucleotide
  Target: LAMA2; (-) strand; PAM type: NRG; PAM sequence: CAG
aaggagacaggtagtatata

SEQ ID NO: 108425 - DNA, 20 bp, Artificial Sequence
  Description of Artificial Sequence: Synthetic oligonucleotide
  Target: LAMA2; (-) strand; PAM type: NRG; PAM sequence: TAG
ctcagatgaaaggagacagg

SEQ ID NO: 108426 - DNA, 20 bp, Artificial Sequence
  Description of Artificial Sequence: Synthetic oligonucleotide
  Target: LAMA2; (-) strand; PAM type: NRG; PAM sequence: AGG
ttgctcagatgaaaggagac

SEQ ID NO: 108427 - DNA, 20 bp, Artificial Sequence
  Description of Artificial Sequence: Synthetic oligonucleotide
  Target: LAMA2; (-) strand; PAM type: NRG; PAM sequence: CAG
cttgctcagatgaaaggaga

SEQ ID NO: 108428 - DNA, 20 bp, Artificial Sequence
  Description of Artificial Sequence: Synthetic oligonucleotide
  Target: LAMA2; (-) strand; PAM type: NRG; PAM sequence: GAG
attccttgctcagatgaaag

SEQ ID NO: 108429 - DNA, 20 bp, Artificial Sequence
  Description of Artificial Sequence: Synthetic oligonucleotide
  Target: LAMA2; (-) strand; PAM type: NRG; PAM sequence: AGG
ccattccttgctcagatgaa

SEQ ID NO: 108430 - DNA, 20 bp, Artificial Sequence
  Description of Artificial Sequence: Synthetic oligonucleotide
  Target: LAMA2; (-) strand; PAM type: NRG; PAM sequence: AAG
accattccttgctcagatga

SEQ ID NO: 108431 - DNA, 20 bp, Artificial Sequence
  Description of Artificial Sequence: Synthetic oligonucleotide
  Target: LAMA2; (-) strand; PAM type: NRG; PAM sequence: CAG
ttagtcaaccattccttgct

SEQ ID NO: 108432 - DNA, 20 bp, Artificial Sequence
  Description of Artificial Sequence: Synthetic oligonucleotide
  Target: LAMA2; (-) strand; PAM type: NRG; PAM sequence: TAG
gtgatttcttcctggatcct

SEQ ID NO: 108433 - DNA, 20 bp, Artificial Sequence
  Description of Artificial Sequence: Synthetic oligonucleotide
  Target: LAMA2; (-) strand; PAM type: NRG; PAM sequence: TGG
ggaagtcagtgatttcttcc

SEQ ID NO: 108434 - DNA, 20 bp, Artificial Sequence
  Description of Artificial Sequence: Synthetic oligonucleotide
  Target: LAMA2; (-) strand; PAM type: NRG; PAM sequence: CAG
ttccctgctttttaggaagt

SEQ ID NO: 108435 - DNA, 20 bp, Artificial Sequence
  Description of Artificial Sequence: Synthetic oligonucleotide
  Target: LAMA2; (-) strand; PAM type: NRG; PAM sequence: AAG
ttttttccctgctttttagg

SEQ ID NO: 108436 - DNA, 20 bp, Artificial Sequence
  Description of Artificial Sequence: Synthetic oligonucleotide
  Target: LAMA2; (-) strand; PAM type: NRG; PAM sequence: AGG
tttttttttccctgcttttt

SEQ ID NO: 108437 - DNA, 20 bp, Artificial Sequence
  Description of Artificial Sequence: Synthetic oligonucleotide
  Target: LAMA2; (-) strand; PAM type: NRG; PAM sequence: TAG
atttttttttccctgctttt

SEQ ID NO: 108438 - DNA, 20 bp, Artificial Sequence
  Description of Artificial Sequence: Synthetic oligonucleotide
  Target: LAMA2; (-) strand; PAM type: NRG; PAM sequence: AGG
atcacctgctctttgcttcc

SEQ ID NO: 108439 - DNA, 20 bp, Artificial Sequence
  Description of Artificial Sequence: Synthetic oligonucleotide
  Target: LAMA2; (-) strand; PAM type: NRG; PAM sequence: CAG
tatcacctgctctttgcttc

SEQ ID NO: 108440 - DNA, 20 bp, Artificial Sequence
  Description of Artificial Sequence: Synthetic oligonucleotide
  Target: LAMA2; (-) strand; PAM type: NRG; PAM sequence: CAG
ctgaaggctatgtactgata

SEQ ID NO: 108441 - DNA, 20 bp, Artificial Sequence
  Description of Artificial Sequence: Synthetic oligonucleotide
  Target: LAMA2; (-) strand; PAM type: NRG; PAM sequence: AGG
aacatgacagccctgactga

SEQ ID NO: 108442 - DNA, 20 bp, Artificial Sequence
  Description of Artificial Sequence: Synthetic oligonucleotide
  Target: LAMA2; (-) strand; PAM type: NRG; PAM sequence: AAG
aaacatgacagccctgactg

SEQ ID NO: 108443 - DNA, 20 bp, Artificial Sequence
  Description of Artificial Sequence: Synthetic oligonucleotide
  Target: LAMA2; (-) strand; PAM type: NRG; PAM sequence: CAG
accttcatccagaaacatga

SEQ ID NO: 108444 - DNA, 20 bp, Artificial Sequence
  Description of Artificial Sequence: Synthetic oligonucleotide
  Target: LAMA2; (-) strand; PAM type: NRG; PAM sequence: CAG
ctggctcttgcaccttcatc

SEQ ID NO: 108445 - DNA, 20 bp, Artificial Sequence
  Description of Artificial Sequence: Synthetic oligonucleotide
  Target: LAMA2; (-) strand; PAM type: NRG; PAM sequence: TGG
tcaatgtattgattttccac

SEQ ID NO: 108446 - DNA, 20 bp, Artificial Sequence
  Description of Artificial Sequence: Synthetic oligonucleotide
  Target: LAMA2; (-) strand; PAM type: NRG; PAM sequence: TGG
ttttttctgattagtctggc

SEQ ID NO: 108447 - DNA, 20 bp, Artificial Sequence
  Description of Artificial Sequence: Synthetic oligonucleotide
  Target: LAMA2; (-) strand; PAM type: NRG; PAM sequence: TGG
tgatttttttctgattagtc

SEQ ID NO: 108448 - DNA, 20 bp, Artificial Sequence
  Description of Artificial Sequence: Synthetic oligonucleotide
  Target: LAMA2; (-) strand; PAM type: NRG; PAM sequence: TAG
ttttctgatttttttctgat

SEQ ID NO: 108449 - DNA, 20 bp, Artificial Sequence
  Description of Artificial Sequence: Synthetic oligonucleotide
  Target: LAMA2; (-) strand; PAM type: NRG; PAM sequence: TGG
gtattcctgatattggtagt

SEQ ID NO: 108450 - DNA, 20 bp, Artificial Sequence
  Description of Artificial Sequence: Synthetic oligonucleotide
  Target: LAMA2; (-) strand; PAM type: NRG; PAM sequence: TAG
tcttgtattcctgatattgg

SEQ ID NO: 108451 - DNA, 20 bp, Artificial Sequence
  Description of Artificial Sequence: Synthetic oligonucleotide
  Target: LAMA2; (-) strand; PAM type: NRG; PAM sequence: TGG
acctcttgtattcctgatat

SEQ ID NO: 108452 - DNA, 20 bp, Artificial Sequence
  Description of Artificial Sequence: Synthetic oligonucleotide
  Target: LAMA2; (-) strand; PAM type: NRG; PAM sequence: TAG
tttactatctgcagaagttg

SEQ ID NO: 108453 - DNA, 20 bp, Artificial Sequence
  Description of Artificial Sequence: Synthetic oligonucleotide
  Target: LAMA2; (-) strand; PAM type: NRG; PAM sequence: AAG
acatcctttactatctgcag

SEQ ID NO: 108454 - DNA, 20 bp, Artificial Sequence
  Description of Artificial Sequence: Synthetic oligonucleotide
  Target: LAMA2; (-) strand; PAM type: NRG; PAM sequence: CAG
ttaacatcctttactatctg

SEQ ID NO: 108455 - DNA, 20 bp, Artificial Sequence
  Description of Artificial Sequence: Synthetic oligonucleotide
  Target: LAMA2; (-) strand; PAM type: NRG; PAM sequence: AAG
ttggtagtttgtgattttca

SEQ ID NO: 108456 - DNA, 20 bp, Artificial Sequence
  Description of Artificial Sequence: Synthetic oligonucleotide
  Target: LAMA2; (-) strand; PAM type: NRG; PAM sequence: TAG
tatttatctgtgagttttgg

SEQ ID NO: 108457 - DNA, 20 bp, Artificial Sequence
  Description of Artificial Sequence: Synthetic oligonucleotide
  Target: LAMA2; (-) strand; PAM type: NRG; PAM sequence: TGG
gattatttatctgtgagttt

SEQ ID NO: 108458 - DNA, 20 bp, Artificial Sequence
  Description of Artificial Sequence: Synthetic oligonucleotide
  Target: LAMA2; (-) strand; PAM type: NRG; PAM sequence: GAG
tattcagattatttatctgt

SEQ ID NO: 108459 - DNA, 20 bp, Artificial Sequence
  Description of Artificial Sequence: Synthetic oligonucleotide
  Target: LAMA2; (-) strand; PAM type: NRG; PAM sequence: CAG
ctaatgaatatagaactatt

SEQ ID NO: 108460 - DNA, 20 bp, Artificial Sequence
  Description of Artificial Sequence: Synthetic oligonucleotide
  Target: LAMA2; (-) strand; PAM type: NRG; PAM sequence: TAG
attaaattctctaatgaata

SEQ ID NO: 108461 - DNA, 20 bp, Artificial Sequence
  Description of Artificial Sequence: Synthetic oligonucleotide
  Target: LAMA2; (-) strand; PAM type: NRG; PAM sequence: AGG
aactgaatttgtgtgtgtga

SEQ ID NO: 108462 - DNA, 20 bp, Artificial Sequence
  Description of Artificial Sequence: Synthetic oligonucleotide
  Target: LAMA2; (-) strand; PAM type: NRG; PAM sequence: AAG
gaactgaatttgtgtgtgtg

SEQ ID NO: 108463 - DNA, 20 bp, Artificial Sequence
  Description of Artificial Sequence: Synthetic oligonucleotide
  Target: LAMA2; (-) strand; PAM type: NRG; PAM sequence: TGG
aattcacaagtaaagtcatc

SEQ ID NO: 108464 - DNA, 20 bp, Artificial Sequence
  Description of Artificial Sequence: Synthetic oligonucleotide
  Target: LAMA2; (-) strand; PAM type: NRG; PAM sequence: AAG
tttggtggaattcacaagta

SEQ ID NO: 108465 - DNA, 20 bp, Artificial Sequence
  Description of Artificial Sequence: Synthetic oligonucleotide
  Target: LAMA2; (-) strand; PAM type: NRG; PAM sequence: AAG
aaatatttggtggaattcac

SEQ ID NO: 108466 - DNA, 20 bp, Artificial Sequence
  Description of Artificial Sequence: Synthetic oligonucleotide
  Target: LAMA2; (-) strand; PAM type: NRG; PAM sequence: TGG
tttcttcattaaatatttgg

SEQ ID NO: 108467 - DNA, 20 bp, Artificial Sequence
  Description of Artificial Sequence: Synthetic oligonucleotide
  Target: LAMA2; (-) strand; PAM type: NRG; PAM sequence: TGG
ttatttcttcattaaatatt

SEQ ID NO: 108468 - DNA, 20 bp, Artificial Sequence
  Description of Artificial Sequence: Synthetic oligonucleotide
  Target: LAMA2; (-) strand; PAM type: NRG; PAM sequence: GAG
tcctcttcaattttctgaaa

SEQ ID NO: 108469 - DNA, 20 bp, Artificial Sequence
  Description of Artificial Sequence: Synthetic oligonucleotide
  Target: LAMA2; (-) strand; PAM type: NRG; PAM sequence: AAG
tctcctcttcaattttctga

SEQ ID NO: 108470 - DNA, 20 bp, Artificial Sequence
  Description of Artificial Sequence: Synthetic oligonucleotide
  Target: LAMA2; (-) strand; PAM type: NRG; PAM sequence: TGG
ctggcctcgtagaatgaggt

SEQ ID NO: 108471 - DNA, 20 bp, Artificial Sequence
  Description of Artificial Sequence: Synthetic oligonucleotide
  Target: LAMA2; (-) strand; PAM type: NRG; PAM sequence: AGG
aatactggcctcgtagaatg

SEQ ID NO: 108472 - DNA, 20 bp, Artificial Sequence
  Description of Artificial Sequence: Synthetic oligonucleotide
  Target: LAMA2; (-) strand; PAM type: NRG; PAM sequence: GAG
taatactggcctcgtagaat

SEQ ID NO: 108473 - DNA, 20 bp, Artificial Sequence
  Description of Artificial Sequence: Synthetic oligonucleotide
  Target: LAMA2; (-) strand; PAM type: NRG; PAM sequence: TAG
tcagagtaatactggcctcg

SEQ ID NO: 108474 - DNA, 20 bp, Artificial Sequence
  Description of Artificial Sequence: Synthetic oligonucleotide
  Target: LAMA2; (-) strand; PAM type: NRG; PAM sequence: TGG
cattggtatcagagtaatac

SEQ ID NO: 108475 - DNA, 20 bp, Artificial Sequence
  Description of Artificial Sequence: Synthetic oligonucleotide
  Target: LAMA2; (-) strand; PAM type: NRG; PAM sequence: GAG
tttgtctgccattggtatca

SEQ ID NO: 108476 - DNA, 20 bp, Artificial Sequence
  Description of Artificial Sequence: Synthetic oligonucleotide
  Target: LAMA2; (-) strand; PAM type: NRG; PAM sequence: CAG
tctttgtctgccattggtat

SEQ ID NO: 108477 - DNA, 20 bp, Artificial Sequence
  Description of Artificial Sequence: Synthetic oligonucleotide
  Target: LAMA2; (-) strand; PAM type: NRG; PAM sequence: TGG
aaactatctttgtctgccat

SEQ ID NO: 108478 - DNA, 20 bp, Artificial Sequence
  Description of Artificial Sequence: Synthetic oligonucleotide
  Target: LAMA2; (-) strand; PAM type: NRG; PAM sequence: GGG
tttacatctatgttcatgga

SEQ ID NO: 108479 - DNA, 20 bp, Artificial Sequence
  Description of Artificial Sequence: Synthetic oligonucleotide
  Target: LAMA2; (-) strand; PAM type: NRG; PAM sequence: AGG
ttttacatctatgttcatgg

SEQ ID NO: 108480 - DNA, 20 bp, Artificial Sequence
  Description of Artificial Sequence: Synthetic oligonucleotide
  Target: LAMA2; (-) strand; PAM type: NRG; PAM sequence: GAG
cttttacatctatgttcatg

SEQ ID NO: 108481 - DNA, 20 bp, Artificial Sequence
  Description of Artificial Sequence: Synthetic oligonucleotide
  Target: LAMA2; (-) strand; PAM type: NRG; PAM sequence: TGG
aacttttacatctatgttca

SEQ ID NO: 108482 - DNA, 20 bp, Artificial Sequence
  Description of Artificial Sequence: Synthetic oligonucleotide
  Target: LAMA2; (-) strand; PAM type: NRG; PAM sequence: TAG
taatcctttgagtaaatcat

SEQ ID NO: 108483 - DNA, 20 bp, Artificial Sequence
  Description of Artificial Sequence: Synthetic oligonucleotide
  Target: LAMA2; (-) strand; PAM type: NRG; PAM sequence: GAG
gtgatcatgtataatccttt

SEQ ID NO: 108484 - DNA, 20 bp, Artificial Sequence
  Description of Artificial Sequence: Synthetic oligonucleotide
  Target: LAMA2; (-) strand; PAM type: NRG; PAM sequence: TAG
atcctggcattaatatcatt

SEQ ID NO: 108485 - DNA, 20 bp, Artificial Sequence
  Description of Artificial Sequence: Synthetic oligonucleotide
  Target: LAMA2; (-) strand; PAM type: NRG; PAM sequence: TGG
attaaaccaatcttacatcc

SEQ ID NO: 108486 - DNA, 20 bp, Artificial Sequence
  Description of Artificial Sequence: Synthetic oligonucleotide
  Target: LAMA2; (-) strand; PAM type: NRG; PAM sequence: TGG
ttgctttttagtttgctata

SEQ ID NO: 108487 - DNA, 20 bp, Artificial Sequence
  Description of Artificial Sequence: Synthetic oligonucleotide
  Target: LAMA2; (-) strand; PAM type: NRG; PAM sequence: TAG
tgattatatagtttgctttt

SEQ ID NO: 108488 - DNA, 20 bp, Artificial Sequence
  Description of Artificial Sequence: Synthetic oligonucleotide
  Target: LAMA2; (-) strand; PAM type: NRG; PAM sequence: TAG
tatcaattgaggtgattata

SEQ ID NO: 108489 - DNA, 20 bp, Artificial Sequence
  Description of Artificial Sequence: Synthetic oligonucleotide
  Target: LAMA2; (-) strand; PAM type: NRG; PAM sequence: AGG
tgcctttgctgtatcaattg

SEQ ID NO: 108490 - DNA, 20 bp, Artificial Sequence
  Description of Artificial Sequence: Synthetic oligonucleotide
  Target: LAMA2; (-) strand; PAM type: NRG; PAM sequence: GAG
atgcctttgctgtatcaatt

SEQ ID NO: 108491 - DNA, 20 bp, Artificial Sequence
  Description of Artificial Sequence: Synthetic oligonucleotide
  Target: LAMA2; (-) strand; PAM type: NRG; PAM sequence: TAG
aggcagtttttaaaaaaaaa

SEQ ID NO: 108492 - DNA, 20 bp, Artificial Sequence
  Description of Artificial Sequence: Synthetic oligonucleotide
  Target: LAMA2; (-) strand; PAM type: NRG; PAM sequence: CAG
gttcccctactcttagtagg

SEQ ID NO: 108493 - DNA, 20 bp, Artificial Sequence
  Description of Artificial Sequence: Synthetic oligonucleotide
  Target: LAMA2; (-) strand; PAM type: NRG; PAM sequence: AGG
gaagttcccctactcttagt

SEQ ID NO: 108494 - DNA, 20 bp, Artificial Sequence
  Description of Artificial Sequence: Synthetic oligonucleotide
  Target: LAMA2; (-) strand; PAM type: NRG; PAM sequence: TAG
tgaagttcccctactcttag

SEQ ID NO: 108495 - DNA, 20 bp, Artificial Sequence
  Description of Artificial Sequence: Synthetic oligonucleotide
  Target: LAMA2; (-) strand; PAM type: NRG; PAM sequence: TAG
tagtgaagttcccctactct

SEQ ID NO: 108496 - DNA, 20 bp, Artificial Sequence
  Description of Artificial Sequence: Synthetic oligonucleotide
  Target: LAMA2; (-) strand; PAM type: NRG; PAM sequence: AAG
tttatagtgatcaggtagtg

SEQ ID NO: 108497 - DNA, 20 bp, Artificial Sequence
  Description of Artificial Sequence: Synthetic oligonucleotide
  Target: LAMA2; (-) strand; PAM type: NRG; PAM sequence: TAG
aggtttttatagtgatcagg

SEQ ID NO: 108498 - DNA, 20 bp, Artificial Sequence
  Description of Artificial Sequence: Synthetic oligonucleotide
  Target: LAMA2; (-) strand; PAM type: NRG; PAM sequence: AGG
aataggtttttatagtgatc

SEQ ID NO: 108499 - DNA, 20 bp, Artificial Sequence
  Description of Artificial Sequence: Synthetic oligonucleotide
  Target: LAMA2; (-) strand; PAM type: NRG; PAM sequence: CAG
aaataggtttttatagtgat

SEQ ID NO: 108500 - DNA, 20 bp, Artificial Sequence
  Description of Artificial Sequence: Synthetic oligonucleotide
  Target: LAMA2; (-) strand; PAM type: NRG; PAM sequence: TAG
ttttaaaaaataggttttta

SEQ ID NO: 108501 - DNA, 20 bp, Artificial Sequence
  Description of Artificial Sequence: Synthetic oligonucleotide
  Target: LAMA2; (-) strand; PAM type: NRG; PAM sequence: AGG
gttaggtttttttaaaaaat

SEQ ID NO: 108502 - DNA, 20 bp, Artificial Sequence
  Description of Artificial Sequence: Synthetic oligonucleotide
  Target: LAMA2; (-) strand; PAM type: NRG; PAM sequence: TAG
tgttaggtttttttaaaaaa

SEQ ID NO: 108503 - DNA, 20 bp, Artificial Sequence
  Description of Artificial Sequence: Synthetic oligonucleotide
  Target: LAMA2; (-) strand; PAM type: NRG; PAM sequence: AGG
taagtatgattttagctgtt

SEQ ID NO: 108504 - DNA, 20 bp, Artificial Sequence
  Description of Artificial Sequence: Synthetic oligonucleotide
  Target: LAMA2; (-) strand; PAM type: NRG; PAM sequence: TAG
ctaagtatgattttagctgt

SEQ ID NO: 108505 - DNA, 20 bp, Artificial Sequence
  Description of Artificial Sequence: Synthetic oligonucleotide
  Target: LAMA2; (-) strand; PAM type: NRG; PAM sequence: TAG
tcttgtgctaagtatgattt

SEQ ID NO: 108506 - DNA, 20 bp, Artificial Sequence
  Description of Artificial Sequence: Synthetic oligonucleotide
  Target: LAMA2; (-) strand; PAM type: NRG; PAM sequence: AAG
cctaatcttagtcttgtgct

SEQ ID NO: 108507 - DNA, 20 bp, Artificial Sequence
  Description of Artificial Sequence: Synthetic oligonucleotide
  Target: LAMA2; (-) strand; PAM type: NRG; PAM sequence: TAG
ccttgccttcttcctaatct

SEQ ID NO: 108508 - DNA, 20 bp, Artificial Sequence
  Description of Artificial Sequence: Synthetic oligonucleotide
  Target: LAMA2; (-) strand; PAM type: NRG; PAM sequence: CAG
ttaaatggaagtaatggaag

SEQ ID NO: 108509 - DNA, 20 bp, Artificial Sequence
  Description of Artificial Sequence: Synthetic oligonucleotide
  Target: LAMA2; (-) strand; PAM type: NRG; PAM sequence: AAG
atgttaaatggaagtaatgg

SEQ ID NO: 108510 - DNA, 20 bp, Artificial Sequence
  Description of Artificial Sequence: Synthetic oligonucleotide
  Target: LAMA2; (-) strand; PAM type: NRG; PAM sequence: TGG
acaatgttaaatggaagtaa

SEQ ID NO: 108511 - DNA, 20 bp, Artificial Sequence
  Description of Artificial Sequence: Synthetic oligonucleotide
  Target: LAMA2; (-) strand; PAM type: NRG; PAM sequence: AAG
tctagtacaatgttaaatgg

SEQ ID NO: 108512 - DNA, 20 bp, Artificial Sequence
  Description of Artificial Sequence: Synthetic oligonucleotide
  Target: LAMA2; (-) strand; PAM type: NRG; PAM sequence: TGG
ctctctagtacaatgttaaa

SEQ ID NO: 108513 - DNA, 20 bp, Artificial Sequence
  Description of Artificial Sequence: Synthetic oligonucleotide
  Target: LAMA2; (-) strand; PAM type: NRG; PAM sequence: TAG
cttgtactggttagtctctc

SEQ ID NO: 108514 - DNA, 20 bp, Artificial Sequence
  Description of Artificial Sequence: Synthetic oligonucleotide
  Target: LAMA2; (-) strand; PAM type: NRG; PAM sequence: TAG
ttcttgccccttgtactggt

SEQ ID NO: 108515 - DNA, 20 bp, Artificial Sequence
  Description of Artificial Sequence: Synthetic oligonucleotide
  Target: LAMA2; (-) strand; PAM type: NRG; PAM sequence: TGG
ctttttcttgccccttgtac

SEQ ID NO: 108516 - DNA, 20 bp, Artificial Sequence
  Description of Artificial Sequence: Synthetic oligonucleotide
  Target: LAMA2; (-) strand; PAM type: NRG; PAM sequence: TGG
tttgtacttatttttcaatc

SEQ ID NO: 108517 - DNA, 20 bp, Artificial Sequence
  Description of Artificial Sequence: Synthetic oligonucleotide
  Target: LAMA2; (-) strand; PAM type: NRG; PAM sequence: TAG
attttatgcttagacttcta

SEQ ID NO: 108518 - DNA, 20 bp, Artificial Sequence
  Description of Artificial Sequence: Synthetic oligonucleotide
  Target: LAMA2; (-) strand; PAM type: NRG; PAM sequence: TAG
aaccaccaggattttatgct

SEQ ID NO: 108519 - DNA, 20 bp, Artificial Sequence
  Description of Artificial Sequence: Synthetic oligonucleotide
  Target: LAMA2; (-) strand; PAM type: NRG; PAM sequence: AGG
ggttacaggcatgaaccacc

SEQ ID NO: 108520 - DNA, 20 bp, Artificial Sequence
  Description of Artificial Sequence: Synthetic oligonucleotide
  Target: LAMA2; (-) strand; PAM type: NRG; PAM sequence: CAG
gggttacaggcatgaaccac

SEQ ID NO: 108521 - DNA, 20 bp, Artificial Sequence
  Description of Artificial Sequence: Synthetic oligonucleotide
  Target: LAMA2; (-) strand; PAM type: NRG; PAM sequence: AGG
tcctaaagcactagggttac

SEQ ID NO: 108522 - DNA, 20 bp, Artificial Sequence
  Description of Artificial Sequence: Synthetic oligonucleotide
  Target: LAMA2; (-) strand; PAM type: NRG; PAM sequence: CAG
ctcctaaagcactagggtta

SEQ ID NO: 108523 - DNA, 20 bp, Artificial Sequence
  Description of Artificial Sequence: Synthetic oligonucleotide
  Target: LAMA2; (-) strand; PAM type: NRG; PAM sequence: GGG
ctcagcctcctaaagcacta

SEQ ID NO: 108524 - DNA, 20 bp, Artificial Sequence
  Description of Artificial Sequence: Synthetic oligonucleotide
  Target: LAMA2; (-) strand; PAM type: NRG; PAM sequence: AGG
cctcagcctcctaaagcact

SEQ ID NO: 108525 - DNA, 20 bp, Artificial Sequence
  Description of Artificial Sequence: Synthetic oligonucleotide
  Target: LAMA2; (-) strand; PAM type: NRG; PAM sequence: TAG
gcctcagcctcctaaagcac

SEQ ID NO: 108526 - DNA, 20 bp, Artificial Sequence
  Description of Artificial Sequence: Synthetic oligonucleotide
  Target: LAMA2; (-) strand; PAM type: NRG; PAM sequence: AAG
ccacctgcctcagcctccta

SEQ ID NO: 108527 - DNA, 20 bp, Artificial Sequence
  Description of Artificial Sequence: Synthetic oligonucleotide
  Target: LAMA2; (-) strand; PAM type: NRG; PAM sequence: CAG
ctcaagcaatccacctgcct

SEQ ID NO: 108528 - DNA, 20 bp, Artificial Sequence
  Description of Artificial Sequence: Synthetic oligonucleotide
  Target: LAMA2; (-) strand; PAM type: NRG; PAM sequence: AAG
agtctcaaactcttggcctc

SEQ ID NO: 108529 - DNA, 20 bp, Artificial Sequence
  Description of Artificial Sequence: Synthetic oligonucleotide
  Target: LAMA2; (-) strand; PAM type: NRG; PAM sequence: TGG
cccagctagtctcaaactct

SEQ ID NO: 108530 - DNA, 20 bp, Artificial Sequence
  Description of Artificial Sequence: Synthetic oligonucleotide
  Target: LAMA2; (-) strand; PAM type: NRG; PAM sequence: TAG
gtcttgctatgttgcccagc

SEQ ID NO: 108531 - DNA, 20 bp, Artificial Sequence
  Description of Artificial Sequence: Synthetic oligonucleotide
  Target: LAMA2; (-) strand; PAM type: NRG; PAM sequence: CAG
tgaggtcttgctatgttgcc

SEQ ID NO: 108532 - DNA, 20 bp, Artificial Sequence
  Description of Artificial Sequence: Synthetic oligonucleotide
  Target: LAMA2; (-) strand; PAM type: NRG; PAM sequence: AGG
tttttttggttgtagagatg

SEQ ID NO: 108533 - DNA, 20 bp, Artificial Sequence
  Description of Artificial Sequence: Synthetic oligonucleotide
  Target: LAMA2; (-) strand; PAM type: NRG; PAM sequence: GAG
ttttttttggttgtagagat

SEQ ID NO: 108534 - DNA, 20 bp, Artificial Sequence
  Description of Artificial Sequence: Synthetic oligonucleotide
  Target: LAMA2; (-) strand; PAM type: NRG; PAM sequence: GAG
aaactttttttttggttgta

SEQ ID NO: 108535 - DNA, 20 bp, Artificial Sequence
  Description of Artificial Sequence: Synthetic oligonucleotide
  Target: LAMA2; (-) strand; PAM type: NRG; PAM sequence: TAG
ttaaactttttttttggttg

SEQ ID NO: 108536 - DNA, 20 bp, Artificial Sequence
  Description of Artificial Sequence: Synthetic oligonucleotide
  Target: LAMA2; (-) strand; PAM type: NRG; PAM sequence: TGG
tgctttttaaactttttttt

SEQ ID NO: 108537 - DNA, 20 bp, Artificial Sequence
  Description of Artificial Sequence: Synthetic oligonucleotide
  Target: LAMA2; (-) strand; PAM type: NRG; PAM sequence: TAG
agtaacttttttttaataga

SEQ ID NO: 108538 - DNA, 20 bp, Artificial Sequence
  Description of Artificial Sequence: Synthetic oligonucleotide
  Target: LAMA2; (-) strand; PAM type: NRG; PAM sequence: TAG
ttctagtaacttttttttaa

SEQ ID NO: 108539 - DNA, 20 bp, Artificial Sequence
  Description of Artificial Sequence: Synthetic oligonucleotide
  Target: LAMA2; (-) strand; PAM type: NRG; PAM sequence: TAG
gtaagctcacttattagttc

SEQ ID NO: 108540 - DNA, 20 bp, Artificial Sequence
  Description of Artificial Sequence: Synthetic oligonucleotide
  Target: LAMA2; (-) strand; PAM type: NRG; PAM sequence: TAG
acattggtaagctcacttat

SEQ ID NO: 108541 - DNA, 20 bp, Artificial Sequence
  Description of Artificial Sequence: Synthetic oligonucleotide
  Target: LAMA2; (-) strand; PAM type: NRG; PAM sequence: AAG
ttgtaccttataacattggt

SEQ ID NO: 108542 - DNA, 20 bp, Artificial Sequence
  Description of Artificial Sequence: Synthetic oligonucleotide
  Target: LAMA2; (-) strand; PAM type: NRG; PAM sequence: TGG
gatgttgtaccttataacat

SEQ ID NO: 108543 - DNA, 20 bp, Artificial Sequence
  Description of Artificial Sequence: Synthetic oligonucleotide
  Target: LAMA2; (-) strand; PAM type: NRG; PAM sequence: TAG
aaatgactgattttcacata

SEQ ID NO: 108544 - DNA, 20 bp, Artificial Sequence
  Description of Artificial Sequence: Synthetic oligonucleotide
  Target: LAMA2; (-) strand; PAM type: NRG; PAM sequence: CAG
aacttccaacgtatccttgc

SEQ ID NO: 108545 - DNA, 20 bp, Artificial Sequence
  Description of Artificial Sequence: Synthetic oligonucleotide
  Target: LAMA2; (-) strand; PAM type: NRG; PAM sequence: GGG
tccagagtattcagtgtagg

SEQ ID NO: 108546 - DNA, 20 bp, Artificial Sequence
  Description of Artificial Sequence: Synthetic oligonucleotide
  Target: LAMA2; (-) strand; PAM type: NRG; PAM sequence: GGG
ctccagagtattcagtgtag

SEQ ID NO: 108547 - DNA, 20 bp, Artificial Sequence
  Description of Artificial Sequence: Synthetic oligonucleotide
  Target: LAMA2; (-) strand; PAM type: NRG; PAM sequence: GGG
tctccagagtattcagtgta

SEQ ID NO: 108548 - DNA, 20 bp, Artificial Sequence
  Description of Artificial Sequence: Synthetic oligonucleotide
  Target: LAMA2; (-) strand; PAM type: NRG; PAM sequence: AGG
atctccagagtattcagtgt

SEQ ID NO: 108549 - DNA, 20 bp, Artificial Sequence
  Description of Artificial Sequence: Synthetic oligonucleotide
  Target: LAMA2; (-) strand; PAM type: NRG; PAM sequence: TAG
tatctccagagtattcagtg

SEQ ID NO: 108550 - DNA, 20 bp, Artificial Sequence
  Description of Artificial Sequence: Synthetic oligonucleotide
  Target: LAMA2; (-) strand; PAM type: NRG; PAM sequence: CAG
ttatttatctccagagtatt

SEQ ID NO: 108551 - DNA, 20 bp, Artificial Sequence
  Description of Artificial Sequence: Synthetic oligonucleotide
  Target: LAMA2; (-) strand; PAM type: NRG; PAM sequence: GAG
ttttcttttatttatctcca

SEQ ID NO: 108552 - DNA, 20 bp, Artificial Sequence
  Description of Artificial Sequence: Synthetic oligonucleotide
  Target: LAMA2; (-) strand; PAM type: NRG; PAM sequence: CAG
gattttcttttatttatctc

SEQ ID NO: 108553 - DNA, 20 bp, Artificial Sequence
  Description of Artificial Sequence: Synthetic oligonucleotide
  Target: LAMA2; (-) strand; PAM type: NRG; PAM sequence: TAG
ggtatatctcttgatttatt

SEQ ID NO: 108554 - DNA, 20 bp, Artificial Sequence
  Description of Artificial Sequence: Synthetic oligonucleotide
  Target: LAMA2; (-) strand; PAM type: NRG; PAM sequence: TGG
aatcttctgatctatgaaca

SEQ ID NO: 108555 - DNA, 20 bp, Artificial Sequence
  Description of Artificial Sequence: Synthetic oligonucleotide
  Target: LAMA2; (-) strand; PAM type: NRG; PAM sequence: AGG
tatgtataaactaggattat

SEQ ID NO: 108556 - DNA, 20 bp, Artificial Sequence
  Description of Artificial Sequence: Synthetic oligonucleotide
  Target: LAMA2; (-) strand; PAM type: NRG; PAM sequence: TAG
atatgtataaactaggatta

SEQ ID NO: 108557 - DNA, 20 bp, Artificial Sequence
  Description of Artificial Sequence: Synthetic oligonucleotide
  Target: LAMA2; (-) strand; PAM type: NRG; PAM sequence: AGG
taggtcaatatgtataaact

SEQ ID NO: 108558 - DNA, 20 bp, Artificial Sequence
  Description of Artificial Sequence: Synthetic oligonucleotide
  Target: LAMA2; (-) strand; PAM type: NRG; PAM sequence: TAG
gtaggtcaatatgtataaac

SEQ ID NO: 108559 - DNA, 20 bp, Artificial Sequence
  Description of Artificial Sequence: Synthetic oligonucleotide
  Target: LAMA2; (-) strand; PAM type: NRG; PAM sequence: AGG
tgggattgcattgaatgtgt

SEQ ID NO: 108560 - DNA, 20 bp, Artificial Sequence
  Description of Artificial Sequence: Synthetic oligonucleotide
  Target: LAMA2; (-) strand; PAM type: NRG; PAM sequence: TAG
ctgggattgcattgaatgtg

SEQ ID NO: 108561 - DNA, 20 bp, Artificial Sequence
  Description of Artificial Sequence: Synthetic oligonucleotide
  Target: LAMA2; (-) strand; PAM type: NRG; PAM sequence: GGG
accttgctaggatttttact

SEQ ID NO: 108562 - DNA, 20 bp, Artificial Sequence
  Description of Artificial Sequence: Synthetic oligonucleotide
  Target: LAMA2; (-) strand; PAM type: NRG; PAM sequence: TGG
aaccttgctaggatttttac

SEQ ID NO: 108563 - DNA, 20 bp, Artificial Sequence
  Description of Artificial Sequence: Synthetic oligonucleotide
  Target: LAMA2; (-) strand; PAM type: NRG; PAM sequence: AGG
ttttaggaaaaaaccttgct

SEQ ID NO: 108564 - DNA, 20 bp, Artificial Sequence
  Description of Artificial Sequence: Synthetic oligonucleotide
  Target: LAMA2; (-) strand; PAM type: NRG; PAM sequence: TAG
tttttaggaaaaaaccttgc

SEQ ID NO: 108565 - DNA, 20 bp, Artificial Sequence
  Description of Artificial Sequence: Synthetic oligonucleotide
  Target: LAMA2; (-) strand; PAM type: NRG; PAM sequence: AGG
aaacatatctgtaaattttt

SEQ ID NO: 108566 - DNA, 20 bp, Artificial Sequence
  Description of Artificial Sequence: Synthetic oligonucleotide
  Target: LAMA2; (-) strand; PAM type: NRG; PAM sequence: TAG
aaaacatatctgtaaatttt

SEQ ID NO: 108567 - DNA, 20 bp, Artificial Sequence
  Description of Artificial Sequence: Synthetic oligonucleotide
  Target: LAMA2; (-) strand; PAM type: NRG; PAM sequence: TAG
tagtaagtattgaagtcagg

SEQ ID NO: 108568 - DNA, 20 bp, Artificial Sequence
  Description of Artificial Sequence: Synthetic oligonucleotide
  Target: LAMA2; (-) strand; PAM type: NRG; PAM sequence: AGG
tggtagtaagtattgaagtc

SEQ ID NO: 108569 - DNA, 20 bp, Artificial Sequence
  Description of Artificial Sequence: Synthetic oligonucleotide
  Target: LAMA2; (-) strand; PAM type: NRG; PAM sequence: CAG
ttggtagtaagtattgaagt

SEQ ID NO: 108570 - DNA, 20 bp, Artificial Sequence
  Description of Artificial Sequence: Synthetic oligonucleotide
  Target: LAMA2; (-) strand; PAM type: NRG; PAM sequence: AAG
tagcttggtagtaagtattg

SEQ ID NO: 108571 - DNA, 20 bp, Artificial Sequence
  Description of Artificial Sequence: Synthetic oligonucleotide
  Target: LAMA2; (-) strand; PAM type: NRG; PAM sequence: AAG
gattaccatagcttggtagt

SEQ ID NO: 108572 - DNA, 20 bp, Artificial Sequence
  Description of Artificial Sequence: Synthetic oligonucleotide
  Target: LAMA2; (-) strand; PAM type: NRG; PAM sequence: TAG
ctctgattaccatagcttgg

SEQ ID NO: 108573 - DNA, 20 bp, Artificial Sequence
  Description of Artificial Sequence: Synthetic oligonucleotide
  Target: LAMA2; (-) strand; PAM type: NRG; PAM sequence: TGG
attctctgattaccatagct

SEQ ID NO: 108574 - DNA, 20 bp, Artificial Sequence
  Description of Artificial Sequence: Synthetic oligonucleotide
  Target: LAMA2; (-) strand; PAM type: NRG; PAM sequence: TAG
accacattctctgattacca

SEQ ID NO: 108575 - DNA, 20 bp, Artificial Sequence
  Description of Artificial Sequence: Synthetic oligonucleotide
  Target: LAMA2; (-) strand; PAM type: NRG; PAM sequence: TGG
tacatgtctggatctatatc

SEQ ID NO: 108576 - DNA, 20 bp, Artificial Sequence
  Description of Artificial Sequence: Synthetic oligonucleotide
  Target: LAMA2; (-) strand; PAM type: NRG; PAM sequence: TGG
atcatttgaccatacatgtc

SEQ ID NO: 108577 - DNA, 20 bp, Artificial Sequence
  Description of Artificial Sequence: Synthetic oligonucleotide
  Target: LAMA2; (-) strand; PAM type: NRG; PAM sequence: TAG
tggatattcaattcctctag

SEQ ID NO: 108578 - DNA, 20 bp, Artificial Sequence
  Description of Artificial Sequence: Synthetic oligonucleotide
  Target: LAMA2; (-) strand; PAM type: NRG; PAM sequence: TAG
tcatggatattcaattcctc

SEQ ID NO: 108579 - DNA, 20 bp, Artificial Sequence
  Description of Artificial Sequence: Synthetic oligonucleotide
  Target: LAMA2; (-) strand; PAM type: NRG; PAM sequence: TGG
attttttttgttgttgttca

SEQ ID NO: 108580 - DNA, 20 bp, Artificial Sequence
  Description of Artificial Sequence: Synthetic oligonucleotide
  Target: LAMA2; (-) strand; PAM type: NRG; PAM sequence: AAG
atggtgcaagatacagactg

SEQ ID NO: 108581 - DNA, 20 bp, Artificial Sequence
  Description of Artificial Sequence: Synthetic oligonucleotide
  Target: LAMA2; (-) strand; PAM type: NRG; PAM sequence: CAG
ttggaatatggtgcaagata

SEQ ID NO: 108582 - DNA, 20 bp, Artificial Sequence
  Description of Artificial Sequence: Synthetic oligonucleotide
  Target: LAMA2; (-) strand; PAM type: NRG; PAM sequence: AAG
ttaattttggaatatggtgc

SEQ ID NO: 108583 - DNA, 20 bp, Artificial Sequence
  Description of Artificial Sequence: Synthetic oligonucleotide
  Target: LAMA2; (-) strand; PAM type: NRG; PAM sequence: TGG
tttgagttaattttggaata

SEQ ID NO: 108584 - DNA, 20 bp, Artificial Sequence
  Description of Artificial Sequence: Synthetic oligonucleotide
  Target: LAMA2; (-) strand; PAM type: NRG; PAM sequence: TGG
catctcttttgagttaattt

SEQ ID NO: 108585 - DNA, 20 bp, Artificial Sequence
  Description of Artificial Sequence: Synthetic oligonucleotide
  Target: LAMA2; (-) strand; PAM type: NRG; PAM sequence: GAG
ttaggtctagcatctctttt

SEQ ID NO: 108586 - DNA, 20 bp, Artificial Sequence
  Description of Artificial Sequence: Synthetic oligonucleotide
  Target: LAMA2; (-) strand; PAM type: NRG; PAM sequence: TAG
ttatgttttacagttaggtc

SEQ ID NO: 108587 - DNA, 20 bp, Artificial Sequence
  Description of Artificial Sequence: Synthetic oligonucleotide
  Target: LAMA2; (-) strand; PAM type: NRG; PAM sequence: AGG
tatttttatgttttacagtt

SEQ ID NO: 108588 - DNA, 20 bp, Artificial Sequence
  Description of Artificial Sequence: Synthetic oligonucleotide
  Target: LAMA2; (-) strand; PAM type: NRG; PAM sequence: TAG
atatttttatgttttacagt

SEQ ID NO: 108589 - DNA, 20 bp, Artificial Sequence
  Description of Artificial Sequence: Synthetic oligonucleotide
  Target: LAMA2; (-) strand; PAM type: NRG; PAM sequence: CAG
ttttatatttttatgtttta

SEQ ID NO: 108590 - DNA, 20 bp, Artificial Sequence
  Description of Artificial Sequence: Synthetic oligonucleotide
  Target: LAMA2; (-) strand; PAM type: NRG; PAM sequence: TAG
agatttttcttatatatttt

SEQ ID NO: 108591 - DNA, 20 bp, Artificial Sequence
  Description of Artificial Sequence: Synthetic oligonucleotide
  Target: LAMA2; (-) strand; PAM type: NRG; PAM sequence: AAG
ttgctttacccaagatcaca

SEQ ID NO: 108592 - DNA, 20 bp, Artificial Sequence
  Description of Artificial Sequence: Synthetic oligonucleotide
  Target: LAMA2; (-) strand; PAM type: NRG; PAM sequence: AAG
taagaatctttgctttaccc

SEQ ID NO: 108593 - DNA, 20 bp, Artificial Sequence
  Description of Artificial Sequence: Synthetic oligonucleotide
  Target: LAMA2; (-) strand; PAM type: NRG; PAM sequence: AAG
atgcttttggtggtgtatct

SEQ ID NO: 108594 - DNA, 20 bp, Artificial Sequence
  Description of Artificial Sequence: Synthetic oligonucleotide
  Target: LAMA2; (-) strand; PAM type: NRG; PAM sequence: TGG
ttttgaggatatgcttttgg

SEQ ID NO: 108595 - DNA, 20 bp, Artificial Sequence
  Description of Artificial Sequence: Synthetic oligonucleotide
  Target: LAMA2; (-) strand; PAM type: NRG; PAM sequence: TGG
tccttttgaggatatgcttt

SEQ ID NO: 108596 - DNA, 20 bp, Artificial Sequence
  Description of Artificial Sequence: Synthetic oligonucleotide
  Target: LAMA2; (-) strand; PAM type: NRG; PAM sequence: AGG
ttaattttgttttccttttg

SEQ ID NO: 108597 - DNA, 20 bp, Artificial Sequence
  Description of Artificial Sequence: Synthetic oligonucleotide
  Target: LAMA2; (-) strand; PAM type: NRG; PAM sequence: GAG
gttaattttgttttcctttt

SEQ ID NO: 108598 - DNA, 20 bp, Artificial Sequence
  Description of Artificial Sequence: Synthetic oligonucleotide
  Target: LAMA2; (-) strand; PAM type: NRG; PAM sequence: AAG
tctcaattttgatgaaattt

SEQ ID NO: 108599 - DNA, 20 bp, Artificial Sequence
  Description of Artificial Sequence: Synthetic oligonucleotide
  Target: LAMA2; (-) strand; PAM type: NRG; PAM sequence: AAG
tttttttttttgaagggaag

SEQ ID NO: 108600 - DNA, 20 bp, Artificial Sequence
  Description of Artificial Sequence: Synthetic oligonucleotide
  Target: LAMA2; (-) strand; PAM type: NRG; PAM sequence: AAG
gcttttttttttttgaaggg

SEQ ID NO: 108601 - DNA, 20 bp, Artificial Sequence
  Description of Artificial Sequence: Synthetic oligonucleotide
  Target: LAMA2; (-) strand; PAM type: NRG; PAM sequence: GGG
agtgcttttttttttttgaa

SEQ ID NO: 108602 - DNA, 20 bp, Artificial Sequence
  Description of Artificial Sequence: Synthetic oligonucleotide
  Target: LAMA2; (-) strand; PAM type: NRG; PAM sequence: AGG
aagtgcttttttttttttga

SEQ ID NO: 108603 - DNA, 20 bp, Artificial Sequence
  Description of Artificial Sequence: Synthetic oligonucleotide
  Target: LAMA2; (-) strand; PAM type: NRG; PAM sequence: AAG
aaagtgcttttttttttttg

SEQ ID NO: 108604 - DNA, 20 bp, Artificial Sequence
  Description of Artificial Sequence: Synthetic oligonucleotide
  Target: LAMA2; (-) strand; PAM type: NRG; PAM sequence: AAG
ttatcttttcattttcttaa

SEQ ID NO: 108605 - DNA, 20 bp, Artificial Sequence
  Description of Artificial Sequence: Synthetic oligonucleotide
  Target: LAMA2; (-) strand; PAM type: NRG; PAM sequence: TAG
aaatatattctactagtttg

SEQ ID NO: 108606 - DNA, 20 bp, Artificial Sequence
  Description of Artificial Sequence: Synthetic oligonucleotide
  Target: LAMA2; (-) strand; PAM type: NRG; PAM sequence: TAG
aatttggaaatatattctac

SEQ ID NO: 108607 - DNA, 20 bp, Artificial Sequence
  Description of Artificial Sequence: Synthetic oligonucleotide
  Target: LAMA2; (-) strand; PAM type: NRG; PAM sequence: TGG
cctttatcagatatgtaatt

SEQ ID NO: 108608 - DNA, 20 bp, Artificial Sequence
  Description of Artificial Sequence: Synthetic oligonucleotide
  Target: LAMA2; (-) strand; PAM type: NRG; PAM sequence: CAG
tctggatatgggtcctttat

SEQ ID NO: 108609 - DNA, 20 bp, Artificial Sequence
  Description of Artificial Sequence: Synthetic oligonucleotide
  Target: LAMA2; (-) strand; PAM type: NRG; PAM sequence: GGG
catatgaataatctggatat

SEQ ID NO: 108610 - DNA, 20 bp, Artificial Sequence
  Description of Artificial Sequence: Synthetic oligonucleotide
  Target: LAMA2; (-) strand; PAM type: NRG; PAM sequence: TGG
acatatgaataatctggata

SEQ ID NO: 108611 - DNA, 20 bp, Artificial Sequence
  Description of Artificial Sequence: Synthetic oligonucleotide
  Target: LAMA2; (-) strand; PAM type: NRG; PAM sequence: TGG
aatgatacatatgaataatc

SEQ ID NO: 108612 - DNA, 20 bp, Artificial Sequence
  Description of Artificial Sequence: Synthetic oligonucleotide
  Target: LAMA2; (-) strand; PAM type: NRG; PAM sequence: GAG
ggttatttgctcttattttt

SEQ ID NO: 108613 - DNA, 20 bp, Artificial Sequence
  Description of Artificial Sequence: Synthetic oligonucleotide
  Target: LAMA2; (-) strand; PAM type: NRG; PAM sequence: GGG
tcttttgttcaaattttctt

SEQ ID NO: 108614 - DNA, 20 bp, Artificial Sequence
  Description of Artificial Sequence: Synthetic oligonucleotide
  Target: LAMA2; (-) strand; PAM type: NRG; PAM sequence: TGG
atcttttgttcaaattttct

SEQ ID NO: 108615 - DNA, 20 bp, Artificial Sequence
  Description of Artificial Sequence: Synthetic oligonucleotide
  Target: LAMA2; (-) strand; PAM type: NRG; PAM sequence: TGG
tgcttattttccaccttctt

SEQ ID NO: 108616 - DNA, 20 bp, Artificial Sequence
  Description of Artificial Sequence: Synthetic oligonucleotide
  Target: LAMA2; (-) strand; PAM type: NRG; PAM sequence: GAG
tccttatgactaataacatt

SEQ ID NO: 108617 - DNA, 20 bp, Artificial Sequence
  Description of Artificial Sequence: Synthetic oligonucleotide
  Target: LAMA2; (-) strand; PAM type: NRG; PAM sequence: TGG
attctaactggtcatcattt

SEQ ID NO: 108618 - DNA, 20 bp, Artificial Sequence
  Description of Artificial Sequence: Synthetic oligonucleotide
  Target: LAMA2; (-) strand; PAM type: NRG; PAM sequence: TGG
aaaattttagacattctaac

SEQ ID NO: 108619 - DNA, 20 bp, Artificial Sequence
  Description of Artificial Sequence: Synthetic oligonucleotide
  Target: LAMA2; (-) strand; PAM type: NRG; PAM sequence: TAG
taacctgtcttttaaaattt

SEQ ID NO: 108620 - DNA, 20 bp, Artificial Sequence
  Description of Artificial Sequence: Synthetic oligonucleotide
  Target: LAMA2; (-) strand; PAM type: NRG; PAM sequence: TGG
cctacatctttgttgatact

SEQ ID NO: 108621 - DNA, 20 bp, Artificial Sequence
  Description of Artificial Sequence: Synthetic oligonucleotide
  Target: LAMA2; (-) strand; PAM type: NRG; PAM sequence: GAG
ttcccatcaccagtgtatga

SEQ ID NO: 108622 - DNA, 20 bp, Artificial Sequence
  Description of Artificial Sequence: Synthetic oligonucleotide
  Target: LAMA2; (-) strand; PAM type: NRG; PAM sequence: GAG
tattcccatcaccagtgtat

SEQ ID NO: 108623 - DNA, 20 bp, Artificial Sequence
  Description of Artificial Sequence: Synthetic oligonucleotide
  Target: LAMA2; (-) strand; PAM type: NRG; PAM sequence: CAG
actatttatattcccatcac

SEQ ID NO: 108624 - DNA, 20 bp, Artificial Sequence
  Description of Artificial Sequence: Synthetic oligonucleotide
  Target: LAMA2; (-) strand; PAM type: NRG; PAM sequence: AAG
aattatcaacctgttttcta

SEQ ID NO: 108625 - DNA, 20 bp, Artificial Sequence
  Description of Artificial Sequence: Synthetic oligonucleotide
  Target: LAMA2; (-) strand; PAM type: NRG; PAM sequence: AAG
taatttatgtttacgttttt

SEQ ID NO: 108626 - DNA, 20 bp, Artificial Sequence
  Description of Artificial Sequence: Synthetic oligonucleotide
  Target: LAMA2; (-) strand; PAM type: NRG; PAM sequence: TGG
agcagaatggctggatcata

SEQ ID NO: 108627 - DNA, 20 bp, Artificial Sequence
  Description of Artificial Sequence: Synthetic oligonucleotide
  Target: LAMA2; (-) strand; PAM type: NRG; PAM sequence: TGG
atacacagaagcagaatggc

SEQ ID NO: 108628 - DNA, 20 bp, Artificial Sequence
  Description of Artificial Sequence: Synthetic oligonucleotide
  Target: LAMA2; (-) strand; PAM type: NRG; PAM sequence: TGG
gtaaatacacagaagcagaa

SEQ ID NO: 108629 - DNA, 20 bp, Artificial Sequence
  Description of Artificial Sequence: Synthetic oligonucleotide
  Target: LAMA2; (-) strand; PAM type: NRG; PAM sequence: CAG
ttggagtaaatacacagaag

SEQ ID NO: 108630 - DNA, 20 bp, Artificial Sequence
  Description of Artificial Sequence: Synthetic oligonucleotide
  Target: LAMA2; (-) strand; PAM type: NRG; PAM sequence: AAG
atcttggagtaaatacacag

SEQ ID NO: 108631 - DNA, 20 bp, Artificial Sequence
  Description of Artificial Sequence: Synthetic oligonucleotide
  Target: LAMA2; (-) strand; PAM type: NRG; PAM sequence: CAG
tttatcttggagtaaataca

SEQ ID NO: 108632 - DNA, 20 bp, Artificial Sequence
  Description of Artificial Sequence: Synthetic oligonucleotide
  Target: LAMA2; (-) strand; PAM type: NRG; PAM sequence: GAG
atatgccatcatttatcttg

SEQ ID NO: 108633 - DNA, 20 bp, Artificial Sequence
  Description of Artificial Sequence: Synthetic oligonucleotide
  Target: LAMA2; (-) strand; PAM type: NRG; PAM sequence: TGG
acatatgccatcatttatct

SEQ ID NO: 108634 - DNA, 20 bp, Artificial Sequence
  Description of Artificial Sequence: Synthetic oligonucleotide
  Target: LAMA2; (-) strand; PAM type: NRG; PAM sequence: GGG
acatctgtgtacaaattttt

SEQ ID NO: 108635 - DNA, 20 bp, Artificial Sequence
  Description of Artificial Sequence: Synthetic oligonucleotide
  Target: LAMA2; (-) strand; PAM type: NRG; PAM sequence: TGG
cacatctgtgtacaaatttt

SEQ ID NO: 108636 - DNA, 20 bp, Artificial Sequence
  Description of Artificial Sequence: Synthetic oligonucleotide
  Target: LAMA2; (-) strand; PAM type: NRG; PAM sequence: GGG
ttggtaattatttcatcata

SEQ ID NO: 108637 - DNA, 20 bp, Artificial Sequence
  Description of Artificial Sequence: Synthetic oligonucleotide
  Target: LAMA2; (-) strand; PAM type: NRG; PAM sequence: AGG
attggtaattatttcatcat

SEQ ID NO: 108638 - DNA, 20 bp, Artificial Sequence
  Description of Artificial Sequence: Synthetic oligonucleotide
  Target: LAMA2; (-) strand; PAM type: NRG; PAM sequence: TAG
tattggtaattatttcatca

SEQ ID NO: 108639 - DNA, 20 bp, Artificial Sequence
  Description of Artificial Sequence: Synthetic oligonucleotide
  Target: LAMA2; (-) strand; PAM type: NRG; PAM sequence: TGG
ccatatttgatcctttttat

SEQ ID NO: 108640 - DNA, 20 bp, Artificial Sequence
  Description of Artificial Sequence: Synthetic oligonucleotide
  Target: LAMA2; (-) strand; PAM type: NRG; PAM sequence: TAG
ctggcttctttcactcaaca

SEQ ID NO: 108641 - DNA, 20 bp, Artificial Sequence
  Description of Artificial Sequence: Synthetic oligonucleotide
  Target: LAMA2; (-) strand; PAM type: NRG; PAM sequence: TGG
gcatgtactctctttttgtc

SEQ ID NO: 108642 - DNA, 20 bp, Artificial Sequence
  Description of Artificial Sequence: Synthetic oligonucleotide
  Target: LAMA2; (-) strand; PAM type: NRG; PAM sequence: TGG
ttcatagaattttatacaaa

SEQ ID NO: 108643 - DNA, 20 bp, Artificial Sequence
  Description of Artificial Sequence: Synthetic oligonucleotide
  Target: LAMA2; (-) strand; PAM type: NRG; PAM sequence: TAG
cactgtaggtttgcatttca

SEQ ID NO: 108644 - DNA, 20 bp, Artificial Sequence
  Description of Artificial Sequence: Synthetic oligonucleotide
  Target: LAMA2; (-) strand; PAM type: NRG; PAM sequence: AGG
gatctgctttccatcactgt

SEQ ID NO: 108645 - DNA, 20 bp, Artificial Sequence
  Description of Artificial Sequence: Synthetic oligonucleotide
  Target: LAMA2; (-) strand; PAM type: NRG; PAM sequence: TAG
tgatctgctttccatcactg

SEQ ID NO: 108646 - DNA, 20 bp, Artificial Sequence
  Description of Artificial Sequence: Synthetic oligonucleotide
  Target: LAMA2; (-) strand; PAM type: NRG; PAM sequence: CAG
ccttctcttccctctgtccc

SEQ ID NO: 108647 - DNA, 20 bp, Artificial Sequence
  Description of Artificial Sequence: Synthetic oligonucleotide
  Target: LAMA2; (-) strand; PAM type: NRG; PAM sequence: GAG
ccattaccacaaccatggta

SEQ ID NO: 108648 - DNA, 20 bp, Artificial Sequence
  Description of Artificial Sequence: Synthetic oligonucleotide
  Target: LAMA2; (-) strand; PAM type: NRG; PAM sequence: TAG
gaccattaccacaaccatgg

SEQ ID NO: 108649 - DNA, 20 bp, Artificial Sequence
  Description of Artificial Sequence: Synthetic oligonucleotide
  Target: LAMA2; (-) strand; PAM type: NRG; PAM sequence: TGG
tgagaccattaccacaacca

SEQ ID NO: 108650 - DNA, 20 bp, Artificial Sequence
  Description of Artificial Sequence: Synthetic oligonucleotide
  Target: LAMA2; (-) strand; PAM type: NRG; PAM sequence: GAG
ttttgaatatgtacacccat

SEQ ID NO: 108651 - DNA, 20 bp, Artificial Sequence
  Description of Artificial Sequence: Synthetic oligonucleotide
  Target: LAMA2; (-) strand; PAM type: NRG; PAM sequence: AAG
aaaccaatttacaattggat

SEQ ID NO: 108652 - DNA, 20 bp, Artificial Sequence
  Description of Artificial Sequence: Synthetic oligonucleotide
  Target: LAMA2; (-) strand; PAM type: NRG; PAM sequence: TGG
catgcaaaccaatttacaat

SEQ ID NO: 108653 - DNA, 20 bp, Artificial Sequence
  Description of Artificial Sequence: Synthetic oligonucleotide
  Target: LAMA2; (-) strand; PAM type: NRG; PAM sequence: TGG
tacttttattgagttaaaac

SEQ ID NO: 108654 - DNA, 20 bp, Artificial Sequence
  Description of Artificial Sequence: Synthetic oligonucleotide
  Target: LAMA2; (-) strand; PAM type: NRG; PAM sequence: GAG
tactgtttaatacttttatt

SEQ ID NO: 108655 - DNA, 20 bp, Artificial Sequence
  Description of Artificial Sequence: Synthetic oligonucleotide
  Target: LAMA2; (-) strand; PAM type: NRG; PAM sequence: GAG
ttgtggagggactatgacca

SEQ ID NO: 108656 - DNA, 20 bp, Artificial Sequence
  Description of Artificial Sequence: Synthetic oligonucleotide
  Target: LAMA2; (-) strand; PAM type: NRG; PAM sequence: CAG
aattgtggagggactatgac

SEQ ID NO: 108657 - DNA, 20 bp, Artificial Sequence
  Description of Artificial Sequence: Synthetic oligonucleotide
  Target: LAMA2; (-) strand; PAM type: NRG; PAM sequence: GGG
taagttgtggaaattgtgga

SEQ ID NO: 108658 - DNA, 20 bp, Artificial Sequence
  Description of Artificial Sequence: Synthetic oligonucleotide
  Target: LAMA2; (-) strand; PAM type: NRG; PAM sequence: AGG
ctaagttgtggaaattgtgg

SEQ ID NO: 108659 - DNA, 20 bp, Artificial Sequence
  Description of Artificial Sequence: Synthetic oligonucleotide
  Target: LAMA2; (-) strand; PAM type: NRG; PAM sequence: GAG
tctaagttgtggaaattgtg

SEQ ID NO: 108660 - DNA, 20 bp, Artificial Sequence
  Description of Artificial Sequence: Synthetic oligonucleotide
  Target: LAMA2; (-) strand; PAM type: NRG; PAM sequence: TGG
aatctaagttgtggaaattg

SEQ ID NO: 108661 - DNA, 20 bp, Artificial Sequence
  Description of Artificial Sequence: Synthetic oligonucleotide
  Target: LAMA2; (-) strand; PAM type: NRG; PAM sequence: TGG
agaggctaaaatctaagttg

SEQ ID NO: 108662 - DNA, 20 bp, Artificial Sequence
  Description of Artificial Sequence: Synthetic oligonucleotide
  Target: LAMA2; (-) strand; PAM type: NRG; PAM sequence: AAG
agtgaaagaggctaaaatct

SEQ ID NO: 108663 - DNA, 20 bp, Artificial Sequence
  Description of Artificial Sequence: Synthetic oligonucleotide
  Target: LAMA2; (-) strand; PAM type: NRG; PAM sequence: AGG
ggcccaaacaacagtgaaag

SEQ ID NO: 108664 - DNA, 20 bp, Artificial Sequence
  Description of Artificial Sequence: Synthetic oligonucleotide
  Target: LAMA2; (-) strand; PAM type: NRG; PAM sequence: GAG
tggcccaaacaacagtgaaa

SEQ ID NO: 108665 - DNA, 20 bp, Artificial Sequence
  Description of Artificial Sequence: Synthetic oligonucleotide
  Target: LAMA2; (-) strand; PAM type: NRG; PAM sequence: AAG
gatggcccaaacaacagtga

SEQ ID NO: 108666 - DNA, 20 bp, Artificial Sequence
  Description of Artificial Sequence: Synthetic oligonucleotide
  Target: LAMA2; (-) strand; PAM type: NRG; PAM sequence: CAG
gaggaagatggcccaaacaa

SEQ ID NO: 108667 - DNA, 20 bp, Artificial Sequence
  Description of Artificial Sequence: Synthetic oligonucleotide
  Target: LAMA2; (-) strand; PAM type: NRG; PAM sequence: TGG
taagagagaaaagaggaaga

SEQ ID NO: 108668 - DNA, 20 bp, Artificial Sequence
  Description of Artificial Sequence: Synthetic oligonucleotide
  Target: LAMA2; (-) strand; PAM type: NRG; PAM sequence: AAG
ttggtaagagagaaaagagg

SEQ ID NO: 108669 - DNA, 20 bp, Artificial Sequence
  Description of Artificial Sequence: Synthetic oligonucleotide
  Target: LAMA2; (-) strand; PAM type: NRG; PAM sequence: AGG
gaattggtaagagagaaaag

SEQ ID NO: 108670 - DNA, 20 bp, Artificial Sequence
  Description of Artificial Sequence: Synthetic oligonucleotide
  Target: LAMA2; (-) strand; PAM type: NRG; PAM sequence: GAG
ggaattggtaagagagaaaa

SEQ ID NO: 108671 - DNA, 20 bp, Artificial Sequence
  Description of Artificial Sequence: Synthetic oligonucleotide
  Target: LAMA2; (-) strand; PAM type: NRG; PAM sequence: AAG
atggaattggtaagagagaa

SEQ ID NO: 108672 - DNA, 20 bp, Artificial Sequence
  Description of Artificial Sequence: Synthetic oligonucleotide
  Target: LAMA2; (-) strand; PAM type: NRG; PAM sequence: GAG
aataaatggaattggtaaga

SEQ ID NO: 108673 - DNA, 20 bp, Artificial Sequence
  Description of Artificial Sequence: Synthetic oligonucleotide
  Target: LAMA2; (-) strand; PAM type: NRG; PAM sequence: GAG
aaaataaatggaattggtaa

SEQ ID NO: 108674 - DNA, 20 bp, Artificial Sequence
  Description of Artificial Sequence: Synthetic oligonucleotide
  Target: LAMA2; (-) strand; PAM type: NRG; PAM sequence: AAG
agaaaataaatggaattggt

SEQ ID NO: 108675 - DNA, 20 bp, Artificial Sequence
  Description of Artificial Sequence: Synthetic oligonucleotide
  Target: LAMA2; (-) strand; PAM type: NRG; PAM sequence: TGG
aaaaagaaaataaatggaat

SEQ ID NO: 108676 - DNA, 20 bp, Artificial Sequence
  Description of Artificial Sequence: Synthetic oligonucleotide
  Target: LAMA2; (-) strand; PAM type: NRG; PAM sequence: TGG
aatttaaaaaagaaaataaa

SEQ ID NO: 108677 - DNA, 20 bp, Artificial Sequence
  Description of Artificial Sequence: Synthetic oligonucleotide
  Target: LAMA2; (-) strand; PAM type: NRG; PAM sequence: AAG
aaagtaaaaagaatttaaaa

SEQ ID NO: 108678 - DNA, 20 bp, Artificial Sequence
  Description of Artificial Sequence: Synthetic oligonucleotide
  Target: LAMA2; (-) strand; PAM type: NRG; PAM sequence: AAG
aaaaattaaaaaaaagtaaa

SEQ ID NO: 108679 - DNA, 20 bp, Artificial Sequence
  Description of Artificial Sequence: Synthetic oligonucleotide
  Target: LAMA2; (-) strand; PAM type: NRG; PAM sequence: AAG
aagtttcaaaaattaaaaaa

SEQ ID NO: 108680 - DNA, 20 bp, Artificial Sequence
  Description of Artificial Sequence: Synthetic oligonucleotide
  Target: LAMA2; (-) strand; PAM type: NRG; PAM sequence: AAG
tacctttgaacctaaaatac

SEQ ID NO: 108681 - DNA, 20 bp, Artificial Sequence
  Description of Artificial Sequence: Synthetic oligonucleotide
  Target: LAMA2; (-) strand; PAM type: NRG; PAM sequence: GAG
acaacaaacctccatgacaa

SEQ ID NO: 108682 - DNA, 20 bp, Artificial Sequence
  Description of Artificial Sequence: Synthetic oligonucleotide
  Target: LAMA2; (-) strand; PAM type: NRG; PAM sequence: AAG
atacaacaaacctccatgac

SEQ ID NO: 108683 - DNA, 20 bp, Artificial Sequence
  Description of Artificial Sequence: Synthetic oligonucleotide
  Target: LAMA2; (-) strand; PAM type: NRG; PAM sequence: TAG
taactattgggtagtagact

SEQ ID NO: 108684 - DNA, 20 bp, Artificial Sequence
  Description of Artificial Sequence: Synthetic oligonucleotide
  Target: LAMA2; (-) strand; PAM type: NRG; PAM sequence: TAG
gaaaaataactattgggtag

SEQ ID NO: 108685 - DNA, 20 bp, Artificial Sequence
  Description of Artificial Sequence: Synthetic oligonucleotide
  Target: LAMA2; (-) strand; PAM type: NRG; PAM sequence: TAG
agagaaaaataactattggg

SEQ ID NO: 108686 - DNA, 20 bp, Artificial Sequence
  Description of Artificial Sequence: Synthetic oligonucleotide
  Target: LAMA2; (-) strand; PAM type: NRG; PAM sequence: GGG
aacagagaaaaataactatt

SEQ ID NO: 108687 - DNA, 20 bp, Artificial Sequence
  Description of Artificial Sequence: Synthetic oligonucleotide
  Target: LAMA2; (-) strand; PAM type: NRG; PAM sequence: TGG
aaacagagaaaaataactat

SEQ ID NO: 108688 - DNA, 20 bp, Artificial Sequence
  Description of Artificial Sequence: Synthetic oligonucleotide
  Target: LAMA2; (-) strand; PAM type: NRG; PAM sequence: GAG
tgggaggagggagagaaaca

SEQ ID NO: 108689 - DNA, 20 bp, Artificial Sequence
  Description of Artificial Sequence: Synthetic oligonucleotide
  Target: LAMA2; (-) strand; PAM type: NRG; PAM sequence: CAG
agtgggaggagggagagaaa

SEQ ID NO: 108690 - DNA, 20 bp, Artificial Sequence
  Description of Artificial Sequence: Synthetic oligonucleotide
  Target: LAMA2; (-) strand; PAM type: NRG; PAM sequence: GAG
gtagctagtgggaggaggga

SEQ ID NO: 108691 - DNA, 20 bp, Artificial Sequence
  Description of Artificial Sequence: Synthetic oligonucleotide
  Target: LAMA2; (-) strand; PAM type: NRG; PAM sequence: GAG
gggtagctagtgggaggagg

SEQ ID NO: 108692 - DNA, 20 bp, Artificial Sequence
  Description of Artificial Sequence: Synthetic oligonucleotide
  Target: LAMA2; (-) strand; PAM type: NRG; PAM sequence: GGG
gagggtagctagtgggagga

SEQ ID NO: 108693 - DNA, 20 bp, Artificial Sequence
  Description of Artificial Sequence: Synthetic oligonucleotide
  Target: LAMA2; (-) strand; PAM type: NRG; PAM sequence: AGG
tgagggtagctagtgggagg

SEQ ID NO: 108694 - DNA, 20 bp, Artificial Sequence
  Description of Artificial Sequence: Synthetic oligonucleotide
  Target: LAMA2; (-) strand; PAM type: NRG; PAM sequence: GAG
ttgagggtagctagtgggag

SEQ ID NO: 108695 - DNA, 20 bp, Artificial Sequence
  Description of Artificial Sequence: Synthetic oligonucleotide
  Target: LAMA2; (-) strand; PAM type: NRG; PAM sequence: AGG
acttgagggtagctagtggg

SEQ ID NO: 108696 - DNA, 20 bp, Artificial Sequence
  Description of Artificial Sequence: Synthetic oligonucleotide
  Target: LAMA2; (-) strand; PAM type: NRG; PAM sequence: GAG
tacttgagggtagctagtgg

SEQ ID NO: 108697 - DNA, 20 bp, Artificial Sequence
  Description of Artificial Sequence: Synthetic oligonucleotide
  Target: LAMA2; (-) strand; PAM type: NRG; PAM sequence: GGG
cctacttgagggtagctagt

SEQ ID NO: 108698 - DNA, 20 bp, Artificial Sequence
  Description of Artificial Sequence: Synthetic oligonucleotide
  Target: LAMA2; (-) strand; PAM type: NRG; PAM sequence: TGG
gcctacttgagggtagctag

SEQ ID NO: 108699 - DNA, 20 bp, Artificial Sequence
  Description of Artificial Sequence: Synthetic oligonucleotide
  Target: LAMA2; (-) strand; PAM type: NRG; PAM sequence: TAG
gaggcctacttgagggtagc

SEQ ID NO: 108700 - DNA, 20 bp, Artificial Sequence
  Description of Artificial Sequence: Synthetic oligonucleotide
  Target: LAMA2; (-) strand; PAM type: NRG; PAM sequence: TAG
caccgaggcctacttgaggg

SEQ ID NO: 108701 - DNA, 20 bp, Artificial Sequence
  Description of Artificial Sequence: Synthetic oligonucleotide
  Target: LAMA2; (-) strand; PAM type: NRG; PAM sequence: GGG
atacaccgaggcctacttga

SEQ ID NO: 108702 - DNA, 20 bp, Artificial Sequence
  Description of Artificial Sequence: Synthetic oligonucleotide
  Target: LAMA2; (-) strand; PAM type: NRG; PAM sequence: AGG
catacaccgaggcctacttg

SEQ ID NO: 108703 - DNA, 20 bp, Artificial Sequence
  Description of Artificial Sequence: Synthetic oligonucleotide
  Target: LAMA2; (-) strand; PAM type: NRG; PAM sequence: GAG
acatacaccgaggcctactt

SEQ ID NO: 108704 - DNA, 20 bp, Artificial Sequence
  Description of Artificial Sequence: Synthetic oligonucleotide
  Target: LAMA2; (-) strand; PAM type: NRG; PAM sequence: AGG
ggggagaacaacatacaccg

SEQ ID NO: 108705 - DNA, 20 bp, Artificial Sequence
  Description of Artificial Sequence: Synthetic oligonucleotide
  Target: LAMA2; (-) strand; PAM type: NRG; PAM sequence: GAG
aggggagaacaacatacacc

SEQ ID NO: 108706 - DNA, 20 bp, Artificial Sequence
  Description of Artificial Sequence: Synthetic oligonucleotide
  Target: LAMA2; (-) strand; PAM type: NRG; PAM sequence: GAG
gaacatatggacacaaaggg

SEQ ID NO: 108707 - DNA, 20 bp, Artificial Sequence
  Description of Artificial Sequence: Synthetic oligonucleotide
  Target: LAMA2; (-) strand; PAM type: NRG; PAM sequence: GGG
gagaacatatggacacaaag

SEQ ID NO: 108708 - DNA, 20 bp, Artificial Sequence
  Description of Artificial Sequence: Synthetic oligonucleotide
  Target: LAMA2; (-) strand; PAM type: NRG; PAM sequence: GGG
tgagaacatatggacacaaa

SEQ ID NO: 108709 - DNA, 20 bp, Artificial Sequence
  Description of Artificial Sequence: Synthetic oligonucleotide
  Target: LAMA2; (-) strand; PAM type: NRG; PAM sequence: AGG
atgagaacatatggacacaa

SEQ ID NO: 108710 - DNA, 20 bp, Artificial Sequence
  Description of Artificial Sequence: Synthetic oligonucleotide
  Target: LAMA2; (-) strand; PAM type: NRG; PAM sequence: AAG
gatgagaacatatggacaca

SEQ ID NO: 108711 - DNA, 20 bp, Artificial Sequence
  Description of Artificial Sequence: Synthetic oligonucleotide
  Target: LAMA2; (-) strand; PAM type: NRG; PAM sequence: TGG
agctaaatgatgagaacata

SEQ ID NO: 108712 - DNA, 20 bp, Artificial Sequence
  Description of Artificial Sequence: Synthetic oligonucleotide
  Target: LAMA2; (-) strand; PAM type: NRG; PAM sequence: GAG
ataagtgggagctaaatgat

SEQ ID NO: 108713 - DNA, 20 bp, Artificial Sequence
  Description of Artificial Sequence: Synthetic oligonucleotide
  Target: LAMA2; (-) strand; PAM type: NRG; PAM sequence: GAG
atgttctcatttataagtgg

SEQ ID NO: 108714 - DNA, 20 bp, Artificial Sequence
  Description of Artificial Sequence: Synthetic oligonucleotide
  Target: LAMA2; (-) strand; PAM type: NRG; PAM sequence: GGG
gcatgttctcatttataagt

SEQ ID NO: 108715 - DNA, 20 bp, Artificial Sequence
  Description of Artificial Sequence: Synthetic oligonucleotide
  Target: LAMA2; (-) strand; PAM type: NRG; PAM sequence: TGG
agcatgttctcatttataag

SEQ ID NO: 108716 - DNA, 20 bp, Artificial Sequence
  Description of Artificial Sequence: Synthetic oligonucleotide
  Target: LAMA2; (-) strand; PAM type: NRG; PAM sequence: AAG
tacagcatgttctcatttat

SEQ ID NO: 108717 - DNA, 20 bp, Artificial Sequence
  Description of Artificial Sequence: Synthetic oligonucleotide
  Target: LAMA2; (-) strand; PAM type: NRG; PAM sequence: CAG
caggaacagaaaatcaaata

SEQ ID NO: 108718 - DNA, 20 bp, Artificial Sequence
  Description of Artificial Sequence: Synthetic oligonucleotide
  Target: LAMA2; (-) strand; PAM type: NRG; PAM sequence: CAG
ttagcaaactaatgcaggaa

SEQ ID NO: 108719 - DNA, 20 bp, Artificial Sequence
  Description of Artificial Sequence: Synthetic oligonucleotide
  Target: LAMA2; (-) strand; PAM type: NRG; PAM sequence: AGG
tattcttagcaaactaatgc

SEQ ID NO: 108720 - DNA, 20 bp, Artificial Sequence
  Description of Artificial Sequence: Synthetic oligonucleotide
  Target: LAMA2; (-) strand; PAM type: NRG; PAM sequence: CAG
ttattcttagcaaactaatg

SEQ ID NO: 108721 - DNA, 20 bp, Artificial Sequence
  Description of Artificial Sequence: Synthetic oligonucleotide
  Target: LAMA2; (-) strand; PAM type: NRG; PAM sequence: TAG
gagttggaggccattattct

SEQ ID NO: 108722 - DNA, 20 bp, Artificial Sequence
  Description of Artificial Sequence: Synthetic oligonucleotide
  Target: LAMA2; (-) strand; PAM type: NRG; PAM sequence: AGG
aggaacatggatggagttgg

SEQ ID NO: 108723 - DNA, 20 bp, Artificial Sequence
  Description of Artificial Sequence: Synthetic oligonucleotide
  Target: LAMA2; (-) strand; PAM type: NRG; PAM sequence: GAG
caggaacatggatggagttg

SEQ ID NO: 108724 - DNA, 20 bp, Artificial Sequence
  Description of Artificial Sequence: Synthetic oligonucleotide
  Target: LAMA2; (-) strand; PAM type: NRG; PAM sequence: TGG
tgcaggaacatggatggagt

SEQ ID NO: 108725 - DNA, 20 bp, Artificial Sequence
  Description of Artificial Sequence: Synthetic oligonucleotide
  Target: LAMA2; (-) strand; PAM type: NRG; PAM sequence: GAG
cctttgcaggaacatggatg

SEQ ID NO: 108726 - DNA, 20 bp, Artificial Sequence
  Description of Artificial Sequence: Synthetic oligonucleotide
  Target: LAMA2; (-) strand; PAM type: NRG; PAM sequence: TGG
gtcctttgcaggaacatgga

SEQ ID NO: 108727 - DNA, 20 bp, Artificial Sequence
  Description of Artificial Sequence: Synthetic oligonucleotide
  Target: LAMA2; (-) strand; PAM type: NRG; PAM sequence: TGG
tcatgtcctttgcaggaaca

SEQ ID NO: 108728 - DNA, 20 bp, Artificial Sequence
  Description of Artificial Sequence: Synthetic oligonucleotide
  Target: LAMA2; (-) strand; PAM type: NRG; PAM sequence: AGG
aatgcaatcatgtcctttgc

SEQ ID NO: 108729 - DNA, 20 bp, Artificial Sequence
  Description of Artificial Sequence: Synthetic oligonucleotide
  Target: LAMA2; (-) strand; PAM type: NRG; PAM sequence: CAG
gaatgcaatcatgtcctttg

SEQ ID NO: 108730 - DNA, 20 bp, Artificial Sequence
  Description of Artificial Sequence: Synthetic oligonucleotide
  Target: LAMA2; (-) strand; PAM type: NRG; PAM sequence: CAG
atacaccatggaatactatg

SEQ ID NO: 108731 - DNA, 20 bp, Artificial Sequence
  Description of Artificial Sequence: Synthetic oligonucleotide
  Target: LAMA2; (-) strand; PAM type: NRG; PAM sequence: TGG
aatgtggtacatatacacca

SEQ ID NO: 108732 - DNA, 20 bp, Artificial Sequence
  Description of Artificial Sequence: Synthetic oligonucleotide
  Target: LAMA2; (-) strand; PAM type: NRG; PAM sequence: TGG
cagactggataaataaaatg

SEQ ID NO: 108733 - DNA, 20 bp, Artificial Sequence
  Description of Artificial Sequence: Synthetic oligonucleotide
  Target: LAMA2; (-) strand; PAM type: NRG; PAM sequence: TGG
gaatagcatcagcggcagac

SEQ ID NO: 108734 - DNA, 20 bp, Artificial Sequence
  Description of Artificial Sequence: Synthetic oligonucleotide
  Target: LAMA2; (-) strand; PAM type: NRG; PAM sequence: CAG
ataaggaatagcatcagcgg

SEQ ID NO: 108735 - DNA, 20 bp, Artificial Sequence
  Description of Artificial Sequence: Synthetic oligonucleotide
  Target: LAMA2; (-) strand; PAM type: NRG; PAM sequence: CGG
aaaataaggaatagcatcag

SEQ ID NO: 108736 - DNA, 20 bp, Artificial Sequence
  Description of Artificial Sequence: Synthetic oligonucleotide
  Target: LAMA2; (-) strand; PAM type: NRG; PAM sequence: CAG
aagaaaataaggaatagcat

SEQ ID NO: 108737 - DNA, 20 bp, Artificial Sequence
  Description of Artificial Sequence: Synthetic oligonucleotide
  Target: LAMA2; (-) strand; PAM type: NRG; PAM sequence: TAG
gagcataagaaaataaggaa

SEQ ID NO: 108738 - DNA, 20 bp, Artificial Sequence
  Description of Artificial Sequence: Synthetic oligonucleotide
  Target: LAMA2; (-) strand; PAM type: NRG; PAM sequence: AGG
ttgctgagcataagaaaata

SEQ ID NO: 108739 - DNA, 20 bp, Artificial Sequence
  Description of Artificial Sequence: Synthetic oligonucleotide
  Target: LAMA2; (-) strand; PAM type: NRG; PAM sequence: AAG
tttgctgagcataagaaaat

SEQ ID NO: 108740 - DNA, 20 bp, Artificial Sequence
  Description of Artificial Sequence: Synthetic oligonucleotide
  Target: LAMA2; (-) strand; PAM type: NRG; PAM sequence: AAG
aaggttgatttgctgagcat

SEQ ID NO: 108741 - DNA, 20 bp, Artificial Sequence
  Description of Artificial Sequence: Synthetic oligonucleotide
  Target: LAMA2; (-) strand; PAM type: NRG; PAM sequence: GAG
agagaaaaggttgatttgct

SEQ ID NO: 108742 - DNA, 20 bp, Artificial Sequence
  Description of Artificial Sequence: Synthetic oligonucleotide
  Target: LAMA2; (-) strand; PAM type: NRG; PAM sequence: AGG
aggattaaagtggagagaaa

SEQ ID NO: 108743 - DNA, 20 bp, Artificial Sequence
  Description of Artificial Sequence: Synthetic oligonucleotide
  Target: LAMA2; (-) strand; PAM type: NRG; PAM sequence: AAG
caggattaaagtggagagaa

SEQ ID NO: 108744 - DNA, 20 bp, Artificial Sequence
  Description of Artificial Sequence: Synthetic oligonucleotide
  Target: LAMA2; (-) strand; PAM type: NRG; PAM sequence: GAG
aggcacaggattaaagtgga

SEQ ID NO: 108745 - DNA, 20 bp, Artificial Sequence
  Description of Artificial Sequence: Synthetic oligonucleotide
  Target: LAMA2; (-) strand; PAM type: NRG; PAM sequence: GAG
tgaggcacaggattaaagtg

SEQ ID NO: 108746 - DNA, 20 bp, Artificial Sequence
  Description of Artificial Sequence: Synthetic oligonucleotide
  Target: LAMA2; (-) strand; PAM type: NRG; PAM sequence: TGG
agtgaggcacaggattaaag

SEQ ID NO: 108747 - DNA, 20 bp, Artificial Sequence
  Description of Artificial Sequence: Synthetic oligonucleotide
  Target: LAMA2; (-) strand; PAM type: NRG; PAM sequence: AAG
caaagtgaggcacaggatta

SEQ ID NO: 108748 - DNA, 20 bp, Artificial Sequence
  Description of Artificial Sequence: Synthetic oligonucleotide
  Target: LAMA2; (-) strand; PAM type: NRG; PAM sequence: AGG
aggtgtgcaaagtgaggcac

SEQ ID NO: 108749 - DNA, 20 bp, Artificial Sequence
  Description of Artificial Sequence: Synthetic oligonucleotide
  Target: LAMA2; (-) strand; PAM type: NRG; PAM sequence: CAG
caggtgtgcaaagtgaggca

SEQ ID NO: 108750 - DNA, 20 bp, Artificial Sequence
  Description of Artificial Sequence: Synthetic oligonucleotide
  Target: LAMA2; (-) strand; PAM type: NRG; PAM sequence: AGG
aacttcaggtgtgcaaagtg

SEQ ID NO: 108751 - DNA, 20 bp, Artificial Sequence
  Description of Artificial Sequence: Synthetic oligonucleotide
  Target: LAMA2; (-) strand; PAM type: NRG; PAM sequence: GAG
taacttcaggtgtgcaaagt

SEQ ID NO: 108752 - DNA, 20 bp, Artificial Sequence
  Description of Artificial Sequence: Synthetic oligonucleotide
  Target: LAMA2; (-) strand; PAM type: NRG; PAM sequence: AAG
aagctaacttcaggtgtgca

SEQ ID NO: 108753 - DNA, 20 bp, Artificial Sequence
  Description of Artificial Sequence: Synthetic oligonucleotide
  Target: LAMA2; (-) strand; PAM type: NRG; PAM sequence: AGG
ataattttaaagctaacttc

SEQ ID NO: 108754 - DNA, 20 bp, Artificial Sequence
  Description of Artificial Sequence: Synthetic oligonucleotide
  Target: LAMA2; (-) strand; PAM type: NRG; PAM sequence: CAG
cataattttaaagctaactt

SEQ ID NO: 108755 - DNA, 20 bp, Artificial Sequence
  Description of Artificial Sequence: Synthetic oligonucleotide
  Target: LAMA2; (-) strand; PAM type: NRG; PAM sequence: AAG
atttaaaagtcataatttta

SEQ ID NO: 108756 - DNA, 20 bp, Artificial Sequence
  Description of Artificial Sequence: Synthetic oligonucleotide
  Target: LAMA2; (-) strand; PAM type: NRG; PAM sequence: AAG
gtaatctgacaagcatttaa

SEQ ID NO: 108757 - DNA, 20 bp, Artificial Sequence
  Description of Artificial Sequence: Synthetic oligonucleotide
  Target: LAMA2; (-) strand; PAM type: NRG; PAM sequence: AAG
ttgtaagaatgtaatctgac

SEQ ID NO: 108758 - DNA, 20 bp, Artificial Sequence
  Description of Artificial Sequence: Synthetic oligonucleotide
  Target: LAMA2; (-) strand; PAM type: NRG; PAM sequence: AAG
gagtgtgaatacctttttgt

SEQ ID NO: 108759 - DNA, 20 bp, Artificial Sequence
  Description of Artificial Sequence: Synthetic oligonucleotide
  Target: LAMA2; (-) strand; PAM type: NRG; PAM sequence: GAG
cagctttccccagtgccttg

SEQ ID NO: 108760 - DNA, 20 bp, Artificial Sequence
  Description of Artificial Sequence: Synthetic oligonucleotide
  Target: LAMA2; (-) strand; PAM type: NRG; PAM sequence: TGG
aacagctttccccagtgcct

SEQ ID NO: 108761 - DNA, 20 bp, Artificial Sequence
  Description of Artificial Sequence: Synthetic oligonucleotide
  Target: LAMA2; (-) strand; PAM type: NRG; PAM sequence: CAG
aaaaagaaaacagctttccc

SEQ ID NO: 108762 - DNA, 20 bp, Artificial Sequence
  Description of Artificial Sequence: Synthetic oligonucleotide
  Target: LAMA2; (-) strand; PAM type: NRG; PAM sequence: CAG
aactagacaaaaaaagaaaa

SEQ ID NO: 108763 - DNA, 20 bp, Artificial Sequence
  Description of Artificial Sequence: Synthetic oligonucleotide
  Target: LAMA2; (-) strand; PAM type: NRG; PAM sequence: AAG
tagatgaaactagacaaaaa

SEQ ID NO: 108764 - DNA, 20 bp, Artificial Sequence
  Description of Artificial Sequence: Synthetic oligonucleotide
  Target: LAMA2; (-) strand; PAM type: NRG; PAM sequence: TAG
tttatagtactagatgaaac

SEQ ID NO: 108765 - DNA, 20 bp, Artificial Sequence
  Description of Artificial Sequence: Synthetic oligonucleotide
  Target: LAMA2; (-) strand; PAM type: NRG; PAM sequence: TAG
atataggccatttatagtac

SEQ ID NO: 108766 - DNA, 20 bp, Artificial Sequence
  Description of Artificial Sequence: Synthetic oligonucleotide
  Target: LAMA2; (-) strand; PAM type: NRG; PAM sequence: TAG
aagataatataggccattta

SEQ ID NO: 108767 - DNA, 20 bp, Artificial Sequence
  Description of Artificial Sequence: Synthetic oligonucleotide
  Target: LAMA2; (-) strand; PAM type: NRG; PAM sequence: AGG
ctgaattgtcaagataatat

SEQ ID NO: 108768 - DNA, 20 bp, Artificial Sequence
  Description of Artificial Sequence: Synthetic oligonucleotide
  Target: LAMA2; (-) strand; PAM type: NRG; PAM sequence: TAG
cctgaattgtcaagataata

SEQ ID NO: 108769 - DNA, 20 bp, Artificial Sequence
  Description of Artificial Sequence: Synthetic oligonucleotide
  Target: LAMA2; (-) strand; PAM type: NRG; PAM sequence: AAG
taatacaatcctgaattgtc

SEQ ID NO: 108770 - DNA, 20 bp, Artificial Sequence
  Description of Artificial Sequence: Synthetic oligonucleotide
  Target: LAMA2; (-) strand; PAM type: NRG; PAM sequence: AGG
ttattgtggtaaaataacca

SEQ ID NO: 108771 - DNA, 20 bp, Artificial Sequence
  Description of Artificial Sequence: Synthetic oligonucleotide
  Target: LAMA2; (-) strand; PAM type: NRG; PAM sequence: AAG
cttattgtggtaaaataacc

SEQ ID NO: 108772 - DNA, 20 bp, Artificial Sequence
  Description of Artificial Sequence: Synthetic oligonucleotide
  Target: LAMA2; (-) strand; PAM type: NRG; PAM sequence: TGG
agtagatgccaaccttattg

SEQ ID NO: 108773 - DNA, 20 bp, Artificial Sequence
  Description of Artificial Sequence: Synthetic oligonucleotide
  Target: LAMA2; (-) strand; PAM type: NRG; PAM sequence: TAG
agaggtaaagtaggtctcag

SEQ ID NO: 108774 - DNA, 20 bp, Artificial Sequence
  Description of Artificial Sequence: Synthetic oligonucleotide
  Target: LAMA2; (-) strand; PAM type: NRG; PAM sequence: CAG
tatagaggtaaagtaggtct

SEQ ID NO: 108775 - DNA, 20 bp, Artificial Sequence
  Description of Artificial Sequence: Synthetic oligonucleotide
  Target: LAMA2; (-) strand; PAM type: NRG; PAM sequence: AGG
aaaatgtatagaggtaaagt

SEQ ID NO: 108776 - DNA, 20 bp, Artificial Sequence
  Description of Artificial Sequence: Synthetic oligonucleotide
  Target: LAMA2; (-) strand; PAM type: NRG; PAM sequence: TAG
taaaatgtatagaggtaaag

SEQ ID NO: 108777 - DNA, 20 bp, Artificial Sequence
  Description of Artificial Sequence: Synthetic oligonucleotide
  Target: LAMA2; (-) strand; PAM type: NRG; PAM sequence: AAG
ggataaaatgtatagaggta

SEQ ID NO: 108778 - DNA, 20 bp, Artificial Sequence
  Description of Artificial Sequence: Synthetic oligonucleotide
  Target: LAMA2; (-) strand; PAM type: NRG; PAM sequence: AGG
gaaagggataaaatgtatag

SEQ ID NO: 108779 - DNA, 20 bp, Artificial Sequence
  Description of Artificial Sequence: Synthetic oligonucleotide
  Target: LAMA2; (-) strand; PAM type: NRG; PAM sequence: GAG
ggaaagggataaaatgtata

SEQ ID NO: 108780 - DNA, 20 bp, Artificial Sequence
  Description of Artificial Sequence: Synthetic oligonucleotide
  Target: LAMA2; (-) strand; PAM type: NRG; PAM sequence: TAG
ttggaaagggataaaatgta

SEQ ID NO: 108781 - DNA, 20 bp, Artificial Sequence
  Description of Artificial Sequence: Synthetic oligonucleotide
  Target: LAMA2; (-) strand; PAM type: NRG; PAM sequence: GGG
agtctgagtcaatttggaaa

SEQ ID NO: 108782 - DNA, 20 bp, Artificial Sequence
  Description of Artificial Sequence: Synthetic oligonucleotide
  Target: LAMA2; (-) strand; PAM type: NRG; PAM sequence: AGG
gagtctgagtcaatttggaa

SEQ ID NO: 108783 - DNA, 20 bp, Artificial Sequence
  Description of Artificial Sequence: Synthetic oligonucleotide
  Target: LAMA2; (-) strand; PAM type: NRG; PAM sequence: AAG
ggagtctgagtcaatttgga

SEQ ID NO: 108784 - DNA, 20 bp, Artificial Sequence
  Description of Artificial Sequence: Synthetic oligonucleotide
  Target: LAMA2; (-) strand; PAM type: NRG; PAM sequence: TGG
ctcaggagtctgagtcaatt

SEQ ID NO: 108785 - DNA, 20 bp, Artificial Sequence
  Description of Artificial Sequence: Synthetic oligonucleotide
  Target: LAMA2; (-) strand; PAM type: NRG; PAM sequence: GAG
tttttgaagctcaggagtct

SEQ ID NO: 108786 - DNA, 20 bp, Artificial Sequence
  Description of Artificial Sequence: Synthetic oligonucleotide
  Target: LAMA2; (-) strand; PAM type: NRG; PAM sequence: GAG
gaggaatttttgaagctcag

SEQ ID NO: 108787 - DNA, 20 bp, Artificial Sequence
  Description of Artificial Sequence: Synthetic oligonucleotide
  Target: LAMA2; (-) strand; PAM type: NRG; PAM sequence: AGG
gagaggaatttttgaagctc

SEQ ID NO: 108788 - DNA, 20 bp, Artificial Sequence
  Description of Artificial Sequence: Synthetic oligonucleotide
  Target: LAMA2; (-) strand; PAM type: NRG; PAM sequence: CAG
agagaggaatttttgaagct

SEQ ID NO: 108789 - DNA, 20 bp, Artificial Sequence
  Description of Artificial Sequence: Synthetic oligonucleotide
  Target: LAMA2; (-) strand; PAM type: NRG; PAM sequence: AAG
agtggagagaggaatttttg

SEQ ID NO: 108790 - DNA, 20 bp, Artificial Sequence
  Description of Artificial Sequence: Synthetic oligonucleotide
  Target: LAMA2; (-) strand; PAM type: NRG; PAM sequence: AGG
aaactctaaaaagtggagag

SEQ ID NO: 108791 - DNA, 20 bp, Artificial Sequence
  Description of Artificial Sequence: Synthetic oligonucleotide
  Target: LAMA2; (-) strand; PAM type: NRG; PAM sequence: GAG
aaaactctaaaaagtggaga

SEQ ID NO: 108792 - DNA, 20 bp, Artificial Sequence
  Description of Artificial Sequence: Synthetic oligonucleotide
  Target: LAMA2; (-) strand; PAM type: NRG; PAM sequence: GAG
agaaaactctaaaaagtgga

SEQ ID NO: 108793 - DNA, 20 bp, Artificial Sequence
  Description of Artificial Sequence: Synthetic oligonucleotide
  Target: LAMA2; (-) strand; PAM type: NRG; PAM sequence: GAG
agagaaaactctaaaaagtg

SEQ ID NO: 108794 - DNA, 20 bp, Artificial Sequence
  Description of Artificial Sequence: Synthetic oligonucleotide
  Target: LAMA2; (-) strand; PAM type: NRG; PAM sequence: TGG
gaagagaaaactctaaaaag

SEQ ID NO: 108795 - DNA, 20 bp, Artificial Sequence
  Description of Artificial Sequence: Synthetic oligonucleotide
  Target: LAMA2; (-) strand; PAM type: NRG; PAM sequence: AAG
agagaagagaaaactctaaa

SEQ ID NO: 108796 - DNA, 20 bp, Artificial Sequence
  Description of Artificial Sequence: Synthetic oligonucleotide
  Target: LAMA2; (-) strand; PAM type: NRG; PAM sequence: GAG
ccgacaatgagcaaagagaa

SEQ ID NO: 108797 - DNA, 20 bp, Artificial Sequence
  Description of Artificial Sequence: Synthetic oligonucleotide
  Target: LAMA2; (-) strand; PAM type: NRG; PAM sequence: AAG
gtccgacaatgagcaaagag

SEQ ID NO: 108798 - DNA, 20 bp, Artificial Sequence
  Description of Artificial Sequence: Synthetic oligonucleotide
  Target: LAMA2; (-) strand; PAM type: NRG; PAM sequence: GAG
tctgtccgacaatgagcaaa

SEQ ID NO: 108799 - DNA, 20 bp, Artificial Sequence
  Description of Artificial Sequence: Synthetic oligonucleotide
  Target: LAMA2; (-) strand; PAM type: NRG; PAM sequence: AAG
aatctgtccgacaatgagca

SEQ ID NO: 108800 - DNA, 20 bp, Artificial Sequence
  Description of Artificial Sequence: Synthetic oligonucleotide
  Target: LAMA2; (-) strand; PAM type: NRG; PAM sequence: GAG
ctgacaatctgtccgacaat

SEQ ID NO: 108801 - DNA, 20 bp, Artificial Sequence
  Description of Artificial Sequence: Synthetic oligonucleotide
  Target: LAMA2; (-) strand; PAM type: NRG; PAM sequence: CAG
catgaaaacagcagaagtga

SEQ ID NO: 108802 - DNA, 20 bp, Artificial Sequence
  Description of Artificial Sequence: Synthetic oligonucleotide
  Target: LAMA2; (-) strand; PAM type: NRG; PAM sequence: AAG
caaacacatgaaaacagcag

SEQ ID NO: 108803 - DNA, 20 bp, Artificial Sequence
  Description of Artificial Sequence: Synthetic oligonucleotide
  Target: LAMA2; (-) strand; PAM type: NRG; PAM sequence: CAG
aaacaaacacatgaaaacag

SEQ ID NO: 108804 - DNA, 20 bp, Artificial Sequence
  Description of Artificial Sequence: Synthetic oligonucleotide
  Target: LAMA2; (-) strand; PAM type: NRG; PAM sequence: CAG
tctaaacaaacacatgaaaa

SEQ ID NO: 108805 - DNA, 20 bp, Artificial Sequence
  Description of Artificial Sequence: Synthetic oligonucleotide
  Target: LAMA2; (-) strand; PAM type: NRG; PAM sequence: AAG
ttacaatgaaagaatgtgtg

SEQ ID NO: 108806 - DNA, 20 bp, Artificial Sequence
  Description of Artificial Sequence: Synthetic oligonucleotide
  Target: LAMA2; (-) strand; PAM type: NRG; PAM sequence: AAG
gagacaggaaattacaatga

SEQ ID NO: 108807 - DNA, 20 bp, Artificial Sequence
  Description of Artificial Sequence: Synthetic oligonucleotide
  Target: LAMA2; (-) strand; PAM type: NRG; PAM sequence: AGG
aatcaaaacaatttagagac

SEQ ID NO: 108808 - DNA, 20 bp, Artificial Sequence
  Description of Artificial Sequence: Synthetic oligonucleotide
  Target: LAMA2; (-) strand; PAM type: NRG; PAM sequence: CAG
gaatcaaaacaatttagaga

SEQ ID NO: 108809 - DNA, 20 bp, Artificial Sequence
  Description of Artificial Sequence: Synthetic oligonucleotide
  Target: LAMA2; (-) strand; PAM type: NRG; PAM sequence: GAG
ttctgaatcaaaacaattta

SEQ ID NO: 108810 - DNA, 20 bp, Artificial Sequence
  Description of Artificial Sequence: Synthetic oligonucleotide
  Target: LAMA2; (-) strand; PAM type: NRG; PAM sequence: TAG
ttttctgaatcaaaacaatt

SEQ ID NO: 108811 - DNA, 20 bp, Artificial Sequence
  Description of Artificial Sequence: Synthetic oligonucleotide
  Target: LAMA2; (-) strand; PAM type: NRG; PAM sequence: AGG
atttttactcccttggttat

SEQ ID NO: 108812 - DNA, 20 bp, Artificial Sequence
  Description of Artificial Sequence: Synthetic oligonucleotide
  Target: LAMA2; (-) strand; PAM type: NRG; PAM sequence: TAG
catttttactcccttggtta

SEQ ID NO: 108813 - DNA, 20 bp, Artificial Sequence
  Description of Artificial Sequence: Synthetic oligonucleotide
  Target: LAMA2; (-) strand; PAM type: NRG; PAM sequence: TGG
acacgtcatttttactccct

SEQ ID NO: 108814 - DNA, 20 bp, Artificial Sequence
  Description of Artificial Sequence: Synthetic oligonucleotide
  Target: LAMA2; (-) strand; PAM type: NRG; PAM sequence: CAG
taagcctcaggttacccact

SEQ ID NO: 108815 - DNA, 20 bp, Artificial Sequence
  Description of Artificial Sequence: Synthetic oligonucleotide
  Target: LAMA2; (-) strand; PAM type: NRG; PAM sequence: AGG
taactcacgaagtaagcctc

SEQ ID NO: 108816 - DNA, 20 bp, Artificial Sequence
  Description of Artificial Sequence: Synthetic oligonucleotide
  Target: LAMA2; (-) strand; PAM type: NRG; PAM sequence: CAG
ttaactcacgaagtaagcct

SEQ ID NO: 108817 - DNA, 20 bp, Artificial Sequence
  Description of Artificial Sequence: Synthetic oligonucleotide
  Target: LAMA2; (-) strand; PAM type: NRG; PAM sequence: AAG
tgtactttaactcacgaagt

SEQ ID NO: 108818 - DNA, 20 bp, Artificial Sequence
  Description of Artificial Sequence: Synthetic oligonucleotide
  Target: LAMA2; (-) strand; PAM type: NRG; PAM sequence: AAG
gcaatgtactttaactcacg

SEQ ID NO: 108819 - DNA, 20 bp, Artificial Sequence
  Description of Artificial Sequence: Synthetic oligonucleotide
  Target: LAMA2; (-) strand; PAM type: NRG; PAM sequence: CAG
gagtgtcaaaattaatgaca

SEQ ID NO: 108820 - DNA, 20 bp, Artificial Sequence
  Description of Artificial Sequence: Synthetic oligonucleotide
  Target: LAMA2; (-) strand; PAM type: NRG; PAM sequence: GAG
catcttggaaaaaaaaaaaa

SEQ ID NO: 108821 - DNA, 20 bp, Artificial Sequence
  Description of Artificial Sequence: Synthetic oligonucleotide
  Target: LAMA2; (-) strand; PAM type: NRG; PAM sequence: AAG
ttcatcttggaaaaaaaaaa

SEQ ID NO: 108822 - DNA, 20 bp, Artificial Sequence
  Description of Artificial Sequence: Synthetic oligonucleotide
  Target: LAMA2; (-) strand; PAM type: NRG; PAM sequence: TGG
cacataagtgtcattcatct

SEQ ID NO: 108823 - DNA, 20 bp, Artificial Sequence
  Description of Artificial Sequence: Synthetic oligonucleotide
  Target: LAMA2; (-) strand; PAM type: NRG; PAM sequence: AAG
tagatacagtaacatcacat

SEQ ID NO: 108824 - DNA, 20 bp, Artificial Sequence
  Description of Artificial Sequence: Synthetic oligonucleotide
  Target: LAMA2; (-) strand; PAM type: NRG; PAM sequence: CAG
gttctcttgggaattagata

SEQ ID NO: 108825 - DNA, 20 bp, Artificial Sequence
  Description of Artificial Sequence: Synthetic oligonucleotide
  Target: LAMA2; (-) strand; PAM type: NRG; PAM sequence: TAG
gctacagttctcttgggaat

SEQ ID NO: 108826 - DNA, 20 bp, Artificial Sequence
  Description of Artificial Sequence: Synthetic oligonucleotide
  Target: LAMA2; (-) strand; PAM type: NRG; PAM sequence: GGG
ctcattgctacagttctctt

SEQ ID NO: 108827 - DNA, 20 bp, Artificial Sequence
  Description of Artificial Sequence: Synthetic oligonucleotide
  Target: LAMA2; (-) strand; PAM type: NRG; PAM sequence: TGG
tctcattgctacagttctct

SEQ ID NO: 108828 - DNA, 20 bp, Artificial Sequence
  Description of Artificial Sequence: Synthetic oligonucleotide
  Target: LAMA2; (-) strand; PAM type: NRG; PAM sequence: CAG
aacaggaattctcattgcta

SEQ ID NO: 108829 - DNA, 20 bp, Artificial Sequence
  Description of Artificial Sequence: Synthetic oligonucleotide
  Target: LAMA2; (-) strand; PAM type: NRG; PAM sequence: AGG
tgttttctgctgggaaaaac

SEQ ID NO: 108830 - DNA, 20 bp, Artificial Sequence
  Description of Artificial Sequence: Synthetic oligonucleotide
  Target: LAMA2; (-) strand; PAM type: NRG; PAM sequence: CAG
atgttttctgctgggaaaaa

SEQ ID NO: 108831 - DNA, 20 bp, Artificial Sequence
  Description of Artificial Sequence: Synthetic oligonucleotide
  Target: LAMA2; (-) strand; PAM type: NRG; PAM sequence: GGG
aactgatgatgttttctgct

SEQ ID NO: 108832 - DNA, 20 bp, Artificial Sequence
  Description of Artificial Sequence: Synthetic oligonucleotide
  Target: LAMA2; (-) strand; PAM type: NRG; PAM sequence: TGG
aaactgatgatgttttctgc

SEQ ID NO: 108833 - DNA, 20 bp, Artificial Sequence
  Description of Artificial Sequence: Synthetic oligonucleotide
  Target: LAMA2; (-) strand; PAM type: NRG; PAM sequence: CAG
aaccttggcaaattattctc

SEQ ID NO: 108834 - DNA, 20 bp, Artificial Sequence
  Description of Artificial Sequence: Synthetic oligonucleotide
  Target: LAMA2; (-) strand; PAM type: NRG; PAM sequence: TGG
gttcttgcaaaagacaacct

SEQ ID NO: 108835 - DNA, 20 bp, Artificial Sequence
  Description of Artificial Sequence: Synthetic oligonucleotide
  Target: LAMA2; (-) strand; PAM type: NRG; PAM sequence: AAG
actgaacatagttcttgcaa

SEQ ID NO: 108836 - DNA, 20 bp, Artificial Sequence
  Description of Artificial Sequence: Synthetic oligonucleotide
  Target: LAMA2; (-) strand; PAM type: NRG; PAM sequence: TAG
ataaaaaagaacactgaaca

SEQ ID NO: 108837 - DNA, 20 bp, Artificial Sequence
  Description of Artificial Sequence: Synthetic oligonucleotide
  Target: LAMA2; (-) strand; PAM type: NRG; PAM sequence: AAG
aaacatctacataaataaaa

SEQ ID NO: 108838 - DNA, 20 bp, Artificial Sequence
  Description of Artificial Sequence: Synthetic oligonucleotide
  Target: LAMA2; (-) strand; PAM type: NRG; PAM sequence: TGG
atatctacaaaaagatatat

SEQ ID NO: 108839 - DNA, 20 bp, Artificial Sequence
  Description of Artificial Sequence: Synthetic oligonucleotide
  Target: LAMA2; (-) strand; PAM type: NRG; PAM sequence: AAG
aatgctatcatatctacaaa

SEQ ID NO: 108840 - DNA, 20 bp, Artificial Sequence
  Description of Artificial Sequence: Synthetic oligonucleotide
  Target: LAMA2; (-) strand; PAM type: NRG; PAM sequence: CAG
ataattgattgctcatagaa

SEQ ID NO: 108841 - DNA, 20 bp, Artificial Sequence
  Description of Artificial Sequence: Synthetic oligonucleotide
  Target: LAMA2; (-) strand; PAM type: NRG; PAM sequence: TAG
ggtaaataattgattgctca

SEQ ID NO: 108842 - DNA, 20 bp, Artificial Sequence
  Description of Artificial Sequence: Synthetic oligonucleotide
  Target: LAMA2; (-) strand; PAM type: NRG; PAM sequence: AGG
gtattattctaacagctttc

SEQ ID NO: 108843 - DNA, 20 bp, Artificial Sequence
  Description of Artificial Sequence: Synthetic oligonucleotide
  Target: LAMA2; (-) strand; PAM type: NRG; PAM sequence: CAG
tgtattattctaacagcttt

SEQ ID NO: 108844 - DNA, 20 bp, Artificial Sequence
  Description of Artificial Sequence: Synthetic oligonucleotide
  Target: LAMA2; (-) strand; PAM type: NRG; PAM sequence: CAG
attttaatgtattattctaa

SEQ ID NO: 108845 - DNA, 20 bp, Artificial Sequence
  Description of Artificial Sequence: Synthetic oligonucleotide
  Target: LAMA2; (-) strand; PAM type: NRG; PAM sequence: TGG
tacagaacttggtatggctg

SEQ ID NO: 108846 - DNA, 20 bp, Artificial Sequence
  Description of Artificial Sequence: Synthetic oligonucleotide
  Target: LAMA2; (-) strand; PAM type: NRG; PAM sequence: TGG
aaagattacagaacttggta

SEQ ID NO: 108847 - DNA, 20 bp, Artificial Sequence
  Description of Artificial Sequence: Synthetic oligonucleotide
  Target: LAMA2; (-) strand; PAM type: NRG; PAM sequence: TGG
ctagaaaagattacagaact

SEQ ID NO: 108848 - DNA, 20 bp, Artificial Sequence
  Description of Artificial Sequence: Synthetic oligonucleotide
  Target: LAMA2; (-) strand; PAM type: NRG; PAM sequence: CAG
cattaaactagaaaagatta

SEQ ID NO: 108849 - DNA, 20 bp, Artificial Sequence
  Description of Artificial Sequence: Synthetic oligonucleotide
  Target: LAMA2; (-) strand; PAM type: NRG; PAM sequence: AAG
atttgaacattaaactagaa

SEQ ID NO: 108850 - DNA, 20 bp, Artificial Sequence
  Description of Artificial Sequence: Synthetic oligonucleotide
  Target: LAMA2; (-) strand; PAM type: NRG; PAM sequence: TAG
acattatttgaacattaaac

SEQ ID NO: 108851 - DNA, 20 bp, Artificial Sequence
  Description of Artificial Sequence: Synthetic oligonucleotide
  Target: LAMA2; (-) strand; PAM type: NRG; PAM sequence: CAG
cttagttacattatttttat

SEQ ID NO: 108852 - DNA, 20 bp, Artificial Sequence
  Description of Artificial Sequence: Synthetic oligonucleotide
  Target: LAMA2; (-) strand; PAM type: NRG; PAM sequence: TAG
taaaggcatctggactgcct

SEQ ID NO: 108853 - DNA, 20 bp, Artificial Sequence
  Description of Artificial Sequence: Synthetic oligonucleotide
  Target: LAMA2; (-) strand; PAM type: NRG; PAM sequence: TGG
taacactcgttaaaggcatc

SEQ ID NO: 108854 - DNA, 20 bp, Artificial Sequence
  Description of Artificial Sequence: Synthetic oligonucleotide
  Target: LAMA2; (-) strand; PAM type: NRG; PAM sequence: AGG
acagacataacactcgttaa

SEQ ID NO: 108855 - DNA, 20 bp, Artificial Sequence
  Description of Artificial Sequence: Synthetic oligonucleotide
  Target: LAMA2; (-) strand; PAM type: NRG; PAM sequence: AAG
cacagacataacactcgtta

SEQ ID NO: 108856 - DNA, 20 bp, Artificial Sequence
  Description of Artificial Sequence: Synthetic oligonucleotide
  Target: LAMA2; (-) strand; PAM type: NRG; PAM sequence: CAG
aatctgaactcagattatca

SEQ ID NO: 108857 - DNA, 20 bp, Artificial Sequence
  Description of Artificial Sequence: Synthetic oligonucleotide
  Target: LAMA2; (-) strand; PAM type: NRG; PAM sequence: CAG
tgaagatataaatctgaact

SEQ ID NO: 108858 - DNA, 20 bp, Artificial Sequence
  Description of Artificial Sequence: Synthetic oligonucleotide
  Target: LAMA2; (-) strand; PAM type: NRG; PAM sequence: AAG
gtgctaaatacttactgttg

SEQ ID NO: 108859 - DNA, 20 bp, Artificial Sequence
  Description of Artificial Sequence: Synthetic oligonucleotide
  Target: LAMA2; (-) strand; PAM type: NRG; PAM sequence: GAG
caagtgcaagaagggttgga

SEQ ID NO: 108860 - DNA, 20 bp, Artificial Sequence
  Description of Artificial Sequence: Synthetic oligonucleotide
  Target: LAMA2; (-) strand; PAM type: NRG; PAM sequence: GAG
tgcaagtgcaagaagggttg

SEQ ID NO: 108861 - DNA, 20 bp, Artificial Sequence
  Description of Artificial Sequence: Synthetic oligonucleotide
  Target: LAMA2; (-) strand; PAM type: NRG; PAM sequence: TGG
attgcaagtgcaagaagggt

SEQ ID NO: 108862 - DNA, 20 bp, Artificial Sequence
  Description of Artificial Sequence: Synthetic oligonucleotide
  Target: LAMA2; (-) strand; PAM type: NRG; PAM sequence: GGG
aagtattgcaagtgcaagaa

SEQ ID NO: 108863 - DNA, 20 bp, Artificial Sequence
  Description of Artificial Sequence: Synthetic oligonucleotide
  Target: LAMA2; (-) strand; PAM type: NRG; PAM sequence: AGG
aaagtattgcaagtgcaaga

SEQ ID NO: 108864 - DNA, 20 bp, Artificial Sequence
  Description of Artificial Sequence: Synthetic oligonucleotide
  Target: LAMA2; (-) strand; PAM type: NRG; PAM sequence: AAG
aaaagtattgcaagtgcaag

SEQ ID NO: 108865 - DNA, 20 bp, Artificial Sequence
  Description of Artificial Sequence: Synthetic oligonucleotide
  Target: LAMA2; (-) strand; PAM type: NRG; PAM sequence: AAG
tggaaaagtattgcaagtgc

SEQ ID NO: 108866 - DNA, 20 bp, Artificial Sequence
  Description of Artificial Sequence: Synthetic oligonucleotide
  Target: LAMA2; (-) strand; PAM type: NRG; PAM sequence: AAG
ttaaattggaaaagtattgc

SEQ ID NO: 108867 - DNA, 20 bp, Artificial Sequence
  Description of Artificial Sequence: Synthetic oligonucleotide
  Target: LAMA2; (-) strand; PAM type: NRG; PAM sequence: AAG
gtgtaaattttaaattggaa

SEQ ID NO: 108868 - DNA, 20 bp, Artificial Sequence
  Description of Artificial Sequence: Synthetic oligonucleotide
  Target: LAMA2; (-) strand; PAM type: NRG; PAM sequence: TGG
cttatgtgtaaattttaaat

SEQ ID NO: 108869 - DNA, 20 bp, Artificial Sequence
  Description of Artificial Sequence: Synthetic oligonucleotide
  Target: LAMA2; (-) strand; PAM type: NRG; PAM sequence: AGG
taccaagagataaatcaaac

SEQ ID NO: 108870 - DNA, 20 bp, Artificial Sequence
  Description of Artificial Sequence: Synthetic oligonucleotide
  Target: LAMA2; (-) strand; PAM type: NRG; PAM sequence: CAG
ataccaagagataaatcaaa

SEQ ID NO: 108871 - DNA, 20 bp, Artificial Sequence
  Description of Artificial Sequence: Synthetic oligonucleotide
  Target: LAMA2; (-) strand; PAM type: NRG; PAM sequence: GAG
acataattcatatataccaa

SEQ ID NO: 108872 - DNA, 20 bp, Artificial Sequence
  Description of Artificial Sequence: Synthetic oligonucleotide
  Target: LAMA2; (-) strand; PAM type: NRG; PAM sequence: AAG
ttacataattcatatatacc

SEQ ID NO: 108873 - DNA, 20 bp, Artificial Sequence
  Description of Artificial Sequence: Synthetic oligonucleotide
  Target: LAMA2; (-) strand; PAM type: NRG; PAM sequence: CAG
ttttaatagtgtttgctcct

SEQ ID NO: 108874 - DNA, 20 bp, Artificial Sequence
  Description of Artificial Sequence: Synthetic oligonucleotide
  Target: LAMA2; (-) strand; PAM type: NRG; PAM sequence: TAG
tgtctagttacccattttaa

SEQ ID NO: 108875 - DNA, 20 bp, Artificial Sequence
  Description of Artificial Sequence: Synthetic oligonucleotide
  Target: LAMA2; (-) strand; PAM type: NRG; PAM sequence: TAG
gaatgtttaacttgaatgtc

SEQ ID NO: 108876 - DNA, 20 bp, Artificial Sequence
  Description of Artificial Sequence: Synthetic oligonucleotide
  Target: LAMA2; (-) strand; PAM type: NRG; PAM sequence: AGG
taatagaatgatatgggaaa

SEQ ID NO: 108877 - DNA, 20 bp, Artificial Sequence
  Description of Artificial Sequence: Synthetic oligonucleotide
  Target: LAMA2; (-) strand; PAM type: NRG; PAM sequence: AAG
ttaatagaatgatatgggaa

SEQ ID NO: 108878 - DNA, 20 bp, Artificial Sequence
  Description of Artificial Sequence: Synthetic oligonucleotide
  Target: LAMA2; (-) strand; PAM type: NRG; PAM sequence: GGG
caaagttaatagaatgatat

SEQ ID NO: 108879 - DNA, 20 bp, Artificial Sequence
  Description of Artificial Sequence: Synthetic oligonucleotide
  Target: LAMA2; (-) strand; PAM type: NRG; PAM sequence: TGG
acaaagttaatagaatgata

SEQ ID NO: 108880 - DNA, 20 bp, Artificial Sequence
  Description of Artificial Sequence: Synthetic oligonucleotide
  Target: LAMA2; (-) strand; PAM type: NRG; PAM sequence: TAG
aaaaggtgacacaaagttaa

SEQ ID NO: 108881 - DNA, 20 bp, Artificial Sequence
  Description of Artificial Sequence: Synthetic oligonucleotide
  Target: LAMA2; (-) strand; PAM type: NRG; PAM sequence: AAG
agattaaaaaaggtgacaca

SEQ ID NO: 108882 - DNA, 20 bp, Artificial Sequence
  Description of Artificial Sequence: Synthetic oligonucleotide
  Target: LAMA2; (-) strand; PAM type: NRG; PAM sequence: AGG
gtttagactcagattaaaaa

SEQ ID NO: 108883 - DNA, 20 bp, Artificial Sequence
  Description of Artificial Sequence: Synthetic oligonucleotide
  Target: LAMA2; (-) strand; PAM type: NRG; PAM sequence: AAG
tgtttagactcagattaaaa

SEQ ID NO: 108884 - DNA, 20 bp, Artificial Sequence
  Description of Artificial Sequence: Synthetic oligonucleotide
  Target: LAMA2; (-) strand; PAM type: NRG; PAM sequence: CAG
aagatatatttgtttagact

SEQ ID NO: 108885 - DNA, 20 bp, Artificial Sequence
  Description of Artificial Sequence: Synthetic oligonucleotide
  Target: LAMA2; (-) strand; PAM type: NRG; PAM sequence: TAG
caagcaaagatatatttgtt

SEQ ID NO: 108886 - DNA, 20 bp, Artificial Sequence
  Description of Artificial Sequence: Synthetic oligonucleotide
  Target: LAMA2; (-) strand; PAM type: NRG; PAM sequence: AAG
gccacaattatctccaagca

SEQ ID NO: 108887 - DNA, 20 bp, Artificial Sequence
  Description of Artificial Sequence: Synthetic oligonucleotide
  Target: LAMA2; (-) strand; PAM type: NRG; PAM sequence: AAG
tctgagccacaattatctcc

SEQ ID NO: 108888 - DNA, 20 bp, Artificial Sequence
  Description of Artificial Sequence: Synthetic oligonucleotide
  Target: LAMA2; (-) strand; PAM type: NRG; PAM sequence: GAG
tcttctaaatgacaatctct

SEQ ID NO: 108889 - DNA, 20 bp, Artificial Sequence
  Description of Artificial Sequence: Synthetic oligonucleotide
  Target: LAMA2; (-) strand; PAM type: NRG; PAM sequence: TGG
aaatgcatcttaaagcggta

SEQ ID NO: 108890 - DNA, 20 bp, Artificial Sequence
  Description of Artificial Sequence: Synthetic oligonucleotide
  Target: LAMA2; (-) strand; PAM type: NRG; PAM sequence: CGG
ttaaaaaatgcatcttaaag

SEQ ID NO: 108891 - DNA, 20 bp, Artificial Sequence
  Description of Artificial Sequence: Synthetic oligonucleotide
  Target: LAMA2; (-) strand; PAM type: NRG; PAM sequence: AAG
cttttaaaaaatgcatctta

SEQ ID NO: 108892 - DNA, 20 bp, Artificial Sequence
  Description of Artificial Sequence: Synthetic oligonucleotide
  Target: LAMA2; (-) strand; PAM type: NRG; PAM sequence: AAG
tcccaagtgctgaaatgaga

SEQ ID NO: 108893 - DNA, 20 bp, Artificial Sequence
  Description of Artificial Sequence: Synthetic oligonucleotide
  Target: LAMA2; (-) strand; PAM type: NRG; PAM sequence: GAG
tatctcccaagtgctgaaat

SEQ ID NO: 108894 - DNA, 20 bp, Artificial Sequence
  Description of Artificial Sequence: Synthetic oligonucleotide
  Target: LAMA2; (-) strand; PAM type: NRG; PAM sequence: AAG
gagcatttcctgtatctccc

SEQ ID NO: 108895 - DNA, 20 bp, Artificial Sequence
  Description of Artificial Sequence: Synthetic oligonucleotide
  Target: LAMA2; (-) strand; PAM type: NRG; PAM sequence: GAG
ctagttgtggactgagaggg

SEQ ID NO: 108896 - DNA, 20 bp, Artificial Sequence
  Description of Artificial Sequence: Synthetic oligonucleotide
  Target: LAMA2; (-) strand; PAM type: NRG; PAM sequence: GGG
ctctagttgtggactgagag

SEQ ID NO: 108897 - DNA, 20 bp, Artificial Sequence
  Description of Artificial Sequence: Synthetic oligonucleotide
  Target: LAMA2; (-) strand; PAM type: NRG; PAM sequence: GGG
actctagttgtggactgaga

SEQ ID NO: 108898 - DNA, 20 bp, Artificial Sequence
  Description of Artificial Sequence: Synthetic oligonucleotide
  Target: LAMA2; (-) strand; PAM type: NRG; PAM sequence: AGG
cactctagttgtggactgag

SEQ ID NO: 108899 - DNA, 20 bp, Artificial Sequence
  Description of Artificial Sequence: Synthetic oligonucleotide
  Target: LAMA2; (-) strand; PAM type: NRG; PAM sequence: GAG
tcactctagttgtggactga

SEQ ID NO: 108900 - DNA, 20 bp, Artificial Sequence
  Description of Artificial Sequence: Synthetic oligonucleotide
  Target: LAMA2; (-) strand; PAM type: NRG; PAM sequence: GAG
tttcactctagttgtggact

SEQ ID NO: 108901 - DNA, 20 bp, Artificial Sequence
  Description of Artificial Sequence: Synthetic oligonucleotide
  Target: LAMA2; (-) strand; PAM type: NRG; PAM sequence: TGG
agcaaatttcactctagttg

SEQ ID NO: 108902 - DNA, 20 bp, Artificial Sequence
  Description of Artificial Sequence: Synthetic oligonucleotide
  Target: LAMA2; (-) strand; PAM type: NRG; PAM sequence: TAG
tccttaagcaaatttcactc

SEQ ID NO: 108903 - DNA, 20 bp, Artificial Sequence
  Description of Artificial Sequence: Synthetic oligonucleotide
  Target: LAMA2; (-) strand; PAM type: NRG; PAM sequence: AAG
catcccctgactttatcctt

SEQ ID NO: 108904 - DNA, 20 bp, Artificial Sequence
  Description of Artificial Sequence: Synthetic oligonucleotide
  Target: LAMA2; (-) strand; PAM type: NRG; PAM sequence: AAG
ctacagaagtcaagcaaatt

SEQ ID NO: 108905 - DNA, 20 bp, Artificial Sequence
  Description of Artificial Sequence: Synthetic oligonucleotide
  Target: LAMA2; (-) strand; PAM type: NRG; PAM sequence: AAG
tatgacgtgctacagaagtc

SEQ ID NO: 108906 - DNA, 20 bp, Artificial Sequence
  Description of Artificial Sequence: Synthetic oligonucleotide
  Target: LAMA2; (-) strand; PAM type: NRG; PAM sequence: AAG
agcattatgacgtgctacag

SEQ ID NO: 108907 - DNA, 20 bp, Artificial Sequence
  Description of Artificial Sequence: Synthetic oligonucleotide
  Target: LAMA2; (-) strand; PAM type: NRG; PAM sequence: CAG
agcagcattatgacgtgcta

SEQ ID NO: 108908 - DNA, 20 bp, Artificial Sequence
  Description of Artificial Sequence: Synthetic oligonucleotide
  Target: LAMA2; (-) strand; PAM type: NRG; PAM sequence: CAG
gttgtaaggacataactgag

SEQ ID NO: 108909 - DNA, 20 bp, Artificial Sequence
  Description of Artificial Sequence: Synthetic oligonucleotide
  Target: LAMA2; (-) strand; PAM type: NRG; PAM sequence: GAG
ggtgttgtaaggacataact

SEQ ID NO: 108910 - DNA, 20 bp, Artificial Sequence
  Description of Artificial Sequence: Synthetic oligonucleotide
  Target: LAMA2; (-) strand; PAM type: NRG; PAM sequence: AGG
tgataactggcggtgttgta

SEQ ID NO: 108911 - DNA, 20 bp, Artificial Sequence
  Description of Artificial Sequence: Synthetic oligonucleotide
  Target: LAMA2; (-) strand; PAM type: NRG; PAM sequence: AAG
atgataactggcggtgttgt

SEQ ID NO: 108912 - DNA, 20 bp, Artificial Sequence
  Description of Artificial Sequence: Synthetic oligonucleotide
  Target: LAMA2; (-) strand; PAM type: NRG; PAM sequence: CGG
actcgatgcatgataactgg

SEQ ID NO: 108913 - DNA, 20 bp, Artificial Sequence
  Description of Artificial Sequence: Synthetic oligonucleotide
  Target: LAMA2; (-) strand; PAM type: NRG; PAM sequence: TGG
gtgactcgatgcatgataac

SEQ ID NO: 108914 - DNA, 20 bp, Artificial Sequence
  Description of Artificial Sequence: Synthetic oligonucleotide
  Target: LAMA2; (-) strand; PAM type: NRG; PAM sequence: AAG
atggaaattaagagatgcag

SEQ ID NO: 108915 - DNA, 20 bp, Artificial Sequence
  Description of Artificial Sequence: Synthetic oligonucleotide
  Target: LAMA2; (-) strand; PAM type: NRG; PAM sequence: CAG
actatggaaattaagagatg

SEQ ID NO: 108916 - DNA, 20 bp, Artificial Sequence
  Description of Artificial Sequence: Synthetic oligonucleotide
  Target: LAMA2; (-) strand; PAM type: NRG; PAM sequence: GAG
cataacactatggaaattaa

SEQ ID NO: 108917 - DNA, 20 bp, Artificial Sequence
  Description of Artificial Sequence: Synthetic oligonucleotide
  Target: LAMA2; (-) strand; PAM type: NRG; PAM sequence: AAG
agcataacactatggaaatt

SEQ ID NO: 108918 - DNA, 20 bp, Artificial Sequence
  Description of Artificial Sequence: Synthetic oligonucleotide
  Target: LAMA2; (-) strand; PAM type: NRG; PAM sequence: TGG
attaggagagcataacacta

SEQ ID NO: 108919 - DNA, 20 bp, Artificial Sequence
  Description of Artificial Sequence: Synthetic oligonucleotide
  Target: LAMA2; (-) strand; PAM type: NRG; PAM sequence: GAG
aggaaaaggagaaattagga

SEQ ID NO: 108920 - DNA, 20 bp, Artificial Sequence
  Description of Artificial Sequence: Synthetic oligonucleotide
  Target: LAMA2; (-) strand; PAM type: NRG; PAM sequence: GAG
agaggaaaaggagaaattag

SEQ ID NO: 108921 - DNA, 20 bp, Artificial Sequence
  Description of Artificial Sequence: Synthetic oligonucleotide
  Target: LAMA2; (-) strand; PAM type: NRG; PAM sequence: AGG
acagaggaaaaggagaaatt

SEQ ID NO: 108922 - DNA, 20 bp, Artificial Sequence
  Description of Artificial Sequence: Synthetic oligonucleotide
  Target: LAMA2; (-) strand; PAM type: NRG; PAM sequence: TAG
cacagaggaaaaggagaaat

SEQ ID NO: 108923 - DNA, 20 bp, Artificial Sequence
  Description of Artificial Sequence: Synthetic oligonucleotide
  Target: LAMA2; (-) strand; PAM type: NRG; PAM sequence: GAG
ggcattccacagaggaaaag

SEQ ID NO: 108924 - DNA, 20 bp, Artificial Sequence
  Description of Artificial Sequence: Synthetic oligonucleotide
  Target: LAMA2; (-) strand; PAM type: NRG; PAM sequence: AGG
ctggcattccacagaggaaa

SEQ ID NO: 108925 - DNA, 20 bp, Artificial Sequence
  Description of Artificial Sequence: Synthetic oligonucleotide
  Target: LAMA2; (-) strand; PAM type: NRG; PAM sequence: AAG
actggcattccacagaggaa

SEQ ID NO: 108926 - DNA, 20 bp, Artificial Sequence
  Description of Artificial Sequence: Synthetic oligonucleotide
  Target: LAMA2; (-) strand; PAM type: NRG; PAM sequence: AGG
aggtgactggcattccacag

SEQ ID NO: 108927 - DNA, 20 bp, Artificial Sequence
  Description of Artificial Sequence: Synthetic oligonucleotide
  Target: LAMA2; (-) strand; PAM type: NRG; PAM sequence: GAG
aaggtgactggcattccaca

SEQ ID NO: 108928 - DNA, 20 bp, Artificial Sequence
  Description of Artificial Sequence: Synthetic oligonucleotide
  Target: LAMA2; (-) strand; PAM type: NRG; PAM sequence: CAG
gcaaggtgactggcattcca

SEQ ID NO: 108929 - DNA, 20 bp, Artificial Sequence
  Description of Artificial Sequence: Synthetic oligonucleotide
  Target: LAMA2; (-) strand; PAM type: NRG; PAM sequence: TGG
agtggagctggcaaggtgac

SEQ ID NO: 108930 - DNA, 20 bp, Artificial Sequence
  Description of Artificial Sequence: Synthetic oligonucleotide
  Target: LAMA2; (-) strand; PAM type: NRG; PAM sequence: AGG
cagagaaagtggagctggca

SEQ ID NO: 108931 - DNA, 20 bp, Artificial Sequence
  Description of Artificial Sequence: Synthetic oligonucleotide
  Target: LAMA2; (-) strand; PAM type: NRG; PAM sequence: AAG
gcagagaaagtggagctggc

SEQ ID NO: 108932 - DNA, 20 bp, Artificial Sequence
  Description of Artificial Sequence: Synthetic oligonucleotide
  Target: LAMA2; (-) strand; PAM type: NRG; PAM sequence: TGG
gtaggcagagaaagtggagc

SEQ ID NO: 108933 - DNA, 20 bp, Artificial Sequence
  Description of Artificial Sequence: Synthetic oligonucleotide
  Target: LAMA2; (-) strand; PAM type: NRG; PAM sequence: GAG
gggagtaggcagagaaagtg

SEQ ID NO: 108934 - DNA, 20 bp, Artificial Sequence
  Description of Artificial Sequence: Synthetic oligonucleotide
  Target: LAMA2; (-) strand; PAM type: NRG; PAM sequence: TGG
tagggagtaggcagagaaag

SEQ ID NO: 108935 - DNA, 20 bp, Artificial Sequence
  Description of Artificial Sequence: Synthetic oligonucleotide
  Target: LAMA2; (-) strand; PAM type: NRG; PAM sequence: AAG
gtttagggagtaggcagaga

SEQ ID NO: 108936 - DNA, 20 bp, Artificial Sequence
  Description of Artificial Sequence: Synthetic oligonucleotide
  Target: LAMA2; (-) strand; PAM type: NRG; PAM sequence: GAG
caatgtttagggagtaggca

SEQ ID NO: 108937 - DNA, 20 bp, Artificial Sequence
  Description of Artificial Sequence: Synthetic oligonucleotide
  Target: LAMA2; (-) strand; PAM type: NRG; PAM sequence: CAG
ttcaatgtttagggagtagg

SEQ ID NO: 108938 - DNA, 20 bp, Artificial Sequence
  Description of Artificial Sequence: Synthetic oligonucleotide
  Target: LAMA2; (-) strand; PAM type: NRG; PAM sequence: AGG
aacttcaatgtttagggagt

SEQ ID NO: 108939 - DNA, 20 bp, Artificial Sequence
  Description of Artificial Sequence: Synthetic oligonucleotide
  Target: LAMA2; (-) strand; PAM type: NRG; PAM sequence: TAG
gaacttcaatgtttagggag

SEQ ID NO: 108940 - DNA, 20 bp, Artificial Sequence
  Description of Artificial Sequence: Synthetic oligonucleotide
  Target: LAMA2; (-) strand; PAM type: NRG; PAM sequence: GAG
taggaacttcaatgtttagg

SEQ ID NO: 108941 - DNA, 20 bp, Artificial Sequence
  Description of Artificial Sequence: Synthetic oligonucleotide
  Target: LAMA2; (-) strand; PAM type: NRG; PAM sequence: GGG
cttaggaacttcaatgttta

SEQ ID NO: 108942 - DNA, 20 bp, Artificial Sequence
  Description of Artificial Sequence: Synthetic oligonucleotide
  Target: LAMA2; (-) strand; PAM type: NRG; PAM sequence: AGG
tcttaggaacttcaatgttt

SEQ ID NO: 108943 - DNA, 20 bp, Artificial Sequence
  Description of Artificial Sequence: Synthetic oligonucleotide
  Target: LAMA2; (-) strand; PAM type: NRG; PAM sequence: TAG
ttcttaggaacttcaatgtt

SEQ ID NO: 108944 - DNA, 20 bp, Artificial Sequence
  Description of Artificial Sequence: Synthetic oligonucleotide
  Target: LAMA2; (-) strand; PAM type: NRG; PAM sequence: AGG
agatctagaacagagttctt

SEQ ID NO: 108945 - DNA, 20 bp, Artificial Sequence
  Description of Artificial Sequence: Synthetic oligonucleotide
  Target: LAMA2; (-) strand; PAM type: NRG; PAM sequence: TAG
aagatctagaacagagttct

SEQ ID NO: 108946 - DNA, 20 bp, Artificial Sequence
  Description of Artificial Sequence: Synthetic oligonucleotide
  Target: LAMA2; (-) strand; PAM type: NRG; PAM sequence: GAG
tgagaagaagatctagaaca

SEQ ID NO: 108947 - DNA, 20 bp, Artificial Sequence
  Description of Artificial Sequence: Synthetic oligonucleotide
  Target: LAMA2; (-) strand; PAM type: NRG; PAM sequence: CAG
tatgagaagaagatctagaa

SEQ ID NO: 108948 - DNA, 20 bp, Artificial Sequence
  Description of Artificial Sequence: Synthetic oligonucleotide
  Target: LAMA2; (-) strand; PAM type: NRG; PAM sequence: TAG
tacggtatgagaagaagatc

SEQ ID NO: 108949 - DNA, 20 bp, Artificial Sequence
  Description of Artificial Sequence: Synthetic oligonucleotide
  Target: LAMA2; (-) strand; PAM type: NRG; PAM sequence: AAG
gtttattacggtatgagaag

SEQ ID NO: 108950 - DNA, 20 bp, Artificial Sequence
  Description of Artificial Sequence: Synthetic oligonucleotide
  Target: LAMA2; (-) strand; PAM type: NRG; PAM sequence: AAG
actgtttattacggtatgag

SEQ ID NO: 108951 - DNA, 20 bp, Artificial Sequence
  Description of Artificial Sequence: Synthetic oligonucleotide
  Target: LAMA2; (-) strand; PAM type: NRG; PAM sequence: GAG
gagactgtttattacggtat

SEQ ID NO: 108952 - DNA, 20 bp, Artificial Sequence
  Description of Artificial Sequence: Synthetic oligonucleotide
  Target: LAMA2; (-) strand; PAM type: NRG; PAM sequence: CGG
agttaggagactgtttatta

SEQ ID NO: 108953 - DNA, 20 bp, Artificial Sequence
  Description of Artificial Sequence: Synthetic oligonucleotide
  Target: LAMA2; (-) strand; PAM type: NRG; PAM sequence: GAG
tattcggtagttaaagttag

SEQ ID NO: 108954 - DNA, 20 bp, Artificial Sequence
  Description of Artificial Sequence: Synthetic oligonucleotide
  Target: LAMA2; (-) strand; PAM type: NRG; PAM sequence: AGG
catattcggtagttaaagtt

SEQ ID NO: 108955 - DNA, 20 bp, Artificial Sequence
  Description of Artificial Sequence: Synthetic oligonucleotide
  Target: LAMA2; (-) strand; PAM type: NRG; PAM sequence: TAG
acatattcggtagttaaagt

SEQ ID NO: 108956 - DNA, 20 bp, Artificial Sequence
  Description of Artificial Sequence: Synthetic oligonucleotide
  Target: LAMA2; (-) strand; PAM type: NRG; PAM sequence: AAG
tagcacatattcggtagtta

SEQ ID NO: 108957 - DNA, 20 bp, Artificial Sequence
  Description of Artificial Sequence: Synthetic oligonucleotide
  Target: LAMA2; (-) strand; PAM type: NRG; PAM sequence: TAG
aattattagcacatattcgg

SEQ ID NO: 108958 - DNA, 20 bp, Artificial Sequence
  Description of Artificial Sequence: Synthetic oligonucleotide
  Target: LAMA2; (-) strand; PAM type: NRG; PAM sequence: CGG
gtaaattattagcacatatt

SEQ ID NO: 108959 - DNA, 20 bp, Artificial Sequence
  Description of Artificial Sequence: Synthetic oligonucleotide
  Target: LAMA2; (-) strand; PAM type: NRG; PAM sequence: TAG
gatatagaattgtaaattat

SEQ ID NO: 108960 - DNA, 20 bp, Artificial Sequence
  Description of Artificial Sequence: Synthetic oligonucleotide
  Target: LAMA2; (-) strand; PAM type: NRG; PAM sequence: TAG
agagctctgggctgcagata

SEQ ID NO: 108961 - DNA, 20 bp, Artificial Sequence
  Description of Artificial Sequence: Synthetic oligonucleotide
  Target: LAMA2; (-) strand; PAM type: NRG; PAM sequence: CAG
taggaaagagctctgggctg

SEQ ID NO: 108962 - DNA, 20 bp, Artificial Sequence
  Description of Artificial Sequence: Synthetic oligonucleotide
  Target: LAMA2; (-) strand; PAM type: NRG; PAM sequence: GGG
tgcctttaggaaagagctct

SEQ ID NO: 108963 - DNA, 20 bp, Artificial Sequence
  Description of Artificial Sequence: Synthetic oligonucleotide
  Target: LAMA2; (-) strand; PAM type: NRG; PAM sequence: TGG
ttgcctttaggaaagagctc

SEQ ID NO: 108964 - DNA, 20 bp, Artificial Sequence
  Description of Artificial Sequence: Synthetic oligonucleotide
  Target: LAMA2; (-) strand; PAM type: NRG; PAM sequence: GAG
cagagtttgcctttaggaaa

SEQ ID NO: 108965 - DNA, 20 bp, Artificial Sequence
  Description of Artificial Sequence: Synthetic oligonucleotide
  Target: LAMA2; (-) strand; PAM type: NRG; PAM sequence: AAG
cacagagtttgcctttagga

SEQ ID NO: 108966 - DNA, 20 bp, Artificial Sequence
  Description of Artificial Sequence: Synthetic oligonucleotide
  Target: LAMA2; (-) strand; PAM type: NRG; PAM sequence: AGG
ggtacacagagtttgccttt

SEQ ID NO: 108967 - DNA, 20 bp, Artificial Sequence
  Description of Artificial Sequence: Synthetic oligonucleotide
  Target: LAMA2; (-) strand; PAM type: NRG; PAM sequence: TAG
tggtacacagagtttgcctt

SEQ ID NO: 108968 - DNA, 20 bp, Artificial Sequence
  Description of Artificial Sequence: Synthetic oligonucleotide
  Target: LAMA2; (-) strand; PAM type: NRG; PAM sequence: GAG
cagaaggcagttggtacaca

SEQ ID NO: 108969 - DNA, 20 bp, Artificial Sequence
  Description of Artificial Sequence: Synthetic oligonucleotide
  Target: LAMA2; (-) strand; PAM type: NRG; PAM sequence: CAG
tccagaaggcagttggtaca

SEQ ID NO: 108970 - DNA, 20 bp, Artificial Sequence
  Description of Artificial Sequence: Synthetic oligonucleotide
  Target: LAMA2; (-) strand; PAM type: NRG; PAM sequence: TGG
ggagggatccagaaggcagt

SEQ ID NO: 108971 - DNA, 20 bp, Artificial Sequence
  Description of Artificial Sequence: Synthetic oligonucleotide
  Target: LAMA2; (-) strand; PAM type: NRG; PAM sequence: CAG
gagtggagggatccagaagg

SEQ ID NO: 108972 - DNA, 20 bp, Artificial Sequence
  Description of Artificial Sequence: Synthetic oligonucleotide
  Target: LAMA2; (-) strand; PAM type: NRG; PAM sequence: AGG
atggagtggagggatccaga

SEQ ID NO: 108973 - DNA, 20 bp, Artificial Sequence
  Description of Artificial Sequence: Synthetic oligonucleotide
  Target: LAMA2; (-) strand; PAM type: NRG; PAM sequence: AAG
aatggagtggagggatccag

SEQ ID NO: 108974 - DNA, 20 bp, Artificial Sequence
  Description of Artificial Sequence: Synthetic oligonucleotide
  Target: LAMA2; (-) strand; PAM type: NRG; PAM sequence: CAG
aataatggagtggagggatc

SEQ ID NO: 108975 - DNA, 20 bp, Artificial Sequence
  Description of Artificial Sequence: Synthetic oligonucleotide
  Target: LAMA2; (-) strand; PAM type: NRG; PAM sequence: GGG
ccatagaataatggagtgga

SEQ ID NO: 108976 - DNA, 20 bp, Artificial Sequence
  Description of Artificial Sequence: Synthetic oligonucleotide
  Target: LAMA2; (-) strand; PAM type: NRG; PAM sequence: AGG
accatagaataatggagtgg

SEQ ID NO: 108977 - DNA, 20 bp, Artificial Sequence
  Description of Artificial Sequence: Synthetic oligonucleotide
  Target: LAMA2; (-) strand; PAM type: NRG; PAM sequence: GAG
aaccatagaataatggagtg

SEQ ID NO: 108978 - DNA, 20 bp, Artificial Sequence
  Description of Artificial Sequence: Synthetic oligonucleotide
  Target: LAMA2; (-) strand; PAM type: NRG; PAM sequence: TGG
aaaaccatagaataatggag

SEQ ID NO: 108979 - DNA, 20 bp, Artificial Sequence
  Description of Artificial Sequence: Synthetic oligonucleotide
  Target: LAMA2; (-) strand; PAM type: NRG; PAM sequence: GAG
tctaaaaccatagaataatg

SEQ ID NO: 108980 - DNA, 20 bp, Artificial Sequence
  Description of Artificial Sequence: Synthetic oligonucleotide
  Target: LAMA2; (-) strand; PAM type: NRG; PAM sequence: TGG
catctaaaaccatagaataa

SEQ ID NO: 108981 - DNA, 20 bp, Artificial Sequence
  Description of Artificial Sequence: Synthetic oligonucleotide
  Target: LAMA2; (-) strand; PAM type: NRG; PAM sequence: TAG
atgtcatacatctaaaacca

SEQ ID NO: 108982 - DNA, 20 bp, Artificial Sequence
  Description of Artificial Sequence: Synthetic oligonucleotide
  Target: LAMA2; (-) strand; PAM type: NRG; PAM sequence: CAG
gaggacctgttgcctgtgga

SEQ ID NO: 108983 - DNA, 20 bp, Artificial Sequence
  Description of Artificial Sequence: Synthetic oligonucleotide
  Target: LAMA2; (-) strand; PAM type: NRG; PAM sequence: TGG
ccccgaggacctgttgcctg

SEQ ID NO: 108984 - DNA, 20 bp, Artificial Sequence
  Description of Artificial Sequence: Synthetic oligonucleotide
  Target: LAMA2; (-) strand; PAM type: NRG; PAM sequence: AGG
tcttcctttaataaaccccg

SEQ ID NO: 108985 - DNA, 20 bp, Artificial Sequence
  Description of Artificial Sequence: Synthetic oligonucleotide
  Target: LAMA2; (-) strand; PAM type: NRG; PAM sequence: GAG
atcttcctttaataaacccc

SEQ ID NO: 108986 - DNA, 20 bp, Artificial Sequence
  Description of Artificial Sequence: Synthetic oligonucleotide
  Target: LAMA2; (-) strand; PAM type: NRG; PAM sequence: TGG
gcttttctgaagacagcctt

SEQ ID NO: 108987 - DNA, 20 bp, Artificial Sequence
  Description of Artificial Sequence: Synthetic oligonucleotide
  Target: LAMA2; (-) strand; PAM type: NRG; PAM sequence: CAG
tcctgaagcttttctgaaga

SEQ ID NO: 108988 - DNA, 20 bp, Artificial Sequence
  Description of Artificial Sequence: Synthetic oligonucleotide
  Target: LAMA2; (-) strand; PAM type: NRG; PAM sequence: AAG
agaatcctgaagcttttctg

SEQ ID NO: 108989 - DNA, 20 bp, Artificial Sequence
  Description of Artificial Sequence: Synthetic oligonucleotide
  Target: LAMA2; (-) strand; PAM type: NRG; PAM sequence: AAG
tggcttcgttaagaatcctg

SEQ ID NO: 108990 - DNA, 20 bp, Artificial Sequence
  Description of Artificial Sequence: Synthetic oligonucleotide
  Target: LAMA2; (-) strand; PAM type: NRG; PAM sequence: AAG
gctaacttcttggcttcgtt

SEQ ID NO: 108991 - DNA, 20 bp, Artificial Sequence
  Description of Artificial Sequence: Synthetic oligonucleotide
  Target: LAMA2; (-) strand; PAM type: NRG; PAM sequence: TGG
tacatcatttgctaacttct

SEQ ID NO: 108992 - DNA, 20 bp, Artificial Sequence
  Description of Artificial Sequence: Synthetic oligonucleotide
  Target: LAMA2; (-) strand; PAM type: NRG; PAM sequence: TGG
ctggaatataataaaaacta

SEQ ID NO: 108993 - DNA, 20 bp, Artificial Sequence
  Description of Artificial Sequence: Synthetic oligonucleotide
  Target: LAMA2; (-) strand; PAM type: NRG; PAM sequence: TGG
tcagtaacaacccgattaac

SEQ ID NO: 108994 - DNA, 20 bp, Artificial Sequence
  Description of Artificial Sequence: Synthetic oligonucleotide
  Target: LAMA2; (-) strand; PAM type: NRG; PAM sequence: CAG
agtgtgatagaatatcttat

SEQ ID NO: 108995 - DNA, 20 bp, Artificial Sequence
  Description of Artificial Sequence: Synthetic oligonucleotide
  Target: LAMA2; (-) strand; PAM type: NRG; PAM sequence: TAG
tacattctccaatagtgtga

SEQ ID NO: 108996 - DNA, 20 bp, Artificial Sequence
  Description of Artificial Sequence: Synthetic oligonucleotide
  Target: LAMA2; (-) strand; PAM type: NRG; PAM sequence: TAG
aaagaaattacattctccaa

SEQ ID NO: 108997 - DNA, 20 bp, Artificial Sequence
  Description of Artificial Sequence: Synthetic oligonucleotide
  Target: LAMA2; (-) strand; PAM type: NRG; PAM sequence: AAG
tcatcacaaaaatcatgcta

SEQ ID NO: 108998 - DNA, 20 bp, Artificial Sequence
  Description of Artificial Sequence: Synthetic oligonucleotide
  Target: LAMA2; (-) strand; PAM type: NRG; PAM sequence: TAG
tacttgcattaaatagatta

SEQ ID NO: 108999 - DNA, 20 bp, Artificial Sequence
  Description of Artificial Sequence: Synthetic oligonucleotide
  Target: LAMA2; (-) strand; PAM type: NRG; PAM sequence: TAG
gaaagtttacttgcattaaa

SEQ ID NO: 109000 - DNA, 20 bp, Artificial Sequence
  Description of Artificial Sequence: Synthetic oligonucleotide
  Target: LAMA2; (-) strand; PAM type: NRG; PAM sequence: AAG
attttgtaaaactagtgaga

SEQ ID NO: 109001 - DNA, 20 bp, Artificial Sequence
  Description of Artificial Sequence: Synthetic oligonucleotide
  Target: LAMA2; (-) strand; PAM type: NRG; PAM sequence: GAG
caacattttgtaaaactagt

SEQ ID NO: 109002 - DNA, 20 bp, Artificial Sequence
  Description of Artificial Sequence: Synthetic oligonucleotide
  Target: LAMA2; (-) strand; PAM type: NRG; PAM sequence: TAG
tagacaacattttgtaaaac

SEQ ID NO: 109003 - DNA, 20 bp, Artificial Sequence
  Description of Artificial Sequence: Synthetic oligonucleotide
  Target: LAMA2; (-) strand; PAM type: NRG; PAM sequence: TAG
cctacttgaagtgagatagg

SEQ ID NO: 109004 - DNA, 20 bp, Artificial Sequence
  Description of Artificial Sequence: Synthetic oligonucleotide
  Target: LAMA2; (-) strand; PAM type: NRG; PAM sequence: AGG
taccctacttgaagtgagat

SEQ ID NO: 109005 - DNA, 20 bp, Artificial Sequence
  Description of Artificial Sequence: Synthetic oligonucleotide
  Target: LAMA2; (-) strand; PAM type: NRG; PAM sequence: TAG
ttaccctacttgaagtgaga

SEQ ID NO: 109006 - DNA, 20 bp, Artificial Sequence
  Description of Artificial Sequence: Synthetic oligonucleotide
  Target: LAMA2; (-) strand; PAM type: NRG; PAM sequence: GAG
gatattaccctacttgaagt

SEQ ID NO: 109007 - DNA, 20 bp, Artificial Sequence
  Description of Artificial Sequence: Synthetic oligonucleotide
  Target: LAMA2; (-) strand; PAM type: NRG; PAM sequence: AAG
atgagatattaccctacttg

SEQ ID NO: 109008 - DNA, 20 bp, Artificial Sequence
  Description of Artificial Sequence: Synthetic oligonucleotide
  Target: LAMA2; (-) strand; PAM type: NRG; PAM sequence: GAG
aaataagacttacaaattat

SEQ ID NO: 109009 - DNA, 20 bp, Artificial Sequence
  Description of Artificial Sequence: Synthetic oligonucleotide
  Target: LAMA2; (-) strand; PAM type: NRG; PAM sequence: AAG
tgaagtgatgctatagaaat

SEQ ID NO: 109010 - DNA, 20 bp, Artificial Sequence
  Description of Artificial Sequence: Synthetic oligonucleotide
  Target: LAMA2; (-) strand; PAM type: NRG; PAM sequence: TAG
atataggtgaagtgatgcta

SEQ ID NO: 109011 - DNA, 20 bp, Artificial Sequence
  Description of Artificial Sequence: Synthetic oligonucleotide
  Target: LAMA2; (-) strand; PAM type: NRG; PAM sequence: AAG
ctatacattagatataggtg

SEQ ID NO: 109012 - DNA, 20 bp, Artificial Sequence
  Description of Artificial Sequence: Synthetic oligonucleotide
  Target: LAMA2; (-) strand; PAM type: NRG; PAM sequence: AGG
agttactatacattagatat

SEQ ID NO: 109013 - DNA, 20 bp, Artificial Sequence
  Description of Artificial Sequence: Synthetic oligonucleotide
  Target: LAMA2; (-) strand; PAM type: NRG; PAM sequence: TAG
aagttactatacattagata

SEQ ID NO: 109014 - DNA, 20 bp, Artificial Sequence
  Description of Artificial Sequence: Synthetic oligonucleotide
  Target: LAMA2; (-) strand; PAM type: NRG; PAM sequence: TAG
cactaaaagttactatacat

SEQ ID NO: 109015 - DNA, 20 bp, Artificial Sequence
  Description of Artificial Sequence: Synthetic oligonucleotide
  Target: LAMA2; (-) strand; PAM type: NRG; PAM sequence: AAG
ttaaaaacttattacactaa

SEQ ID NO: 109016 - DNA, 20 bp, Artificial Sequence
  Description of Artificial Sequence: Synthetic oligonucleotide
  Target: LAMA2; (-) strand; PAM type: NRG; PAM sequence: GGG
tgagccactatggctggcct

SEQ ID NO: 109017 - DNA, 20 bp, Artificial Sequence
  Description of Artificial Sequence: Synthetic oligonucleotide
  Target: LAMA2; (-) strand; PAM type: NRG; PAM sequence: TGG
gtgagccactatggctggcc

SEQ ID NO: 109018 - DNA, 20 bp, Artificial Sequence
  Description of Artificial Sequence: Synthetic oligonucleotide
  Target: LAMA2; (-) strand; PAM type: NRG; PAM sequence: TGG
caggtgtgagccactatggc

SEQ ID NO: 109019 - DNA, 20 bp, Artificial Sequence
  Description of Artificial Sequence: Synthetic oligonucleotide
  Target: LAMA2; (-) strand; PAM type: NRG; PAM sequence: TGG
atcacaggtgtgagccacta

SEQ ID NO: 109020 - DNA, 20 bp, Artificial Sequence
  Description of Artificial Sequence: Synthetic oligonucleotide
  Target: LAMA2; (-) strand; PAM type: NRG; PAM sequence: GAG
agcactagaatcacaggtgt

SEQ ID NO: 109021 - DNA, 20 bp, Artificial Sequence
  Description of Artificial Sequence: Synthetic oligonucleotide
  Target: LAMA2; (-) strand; PAM type: NRG; PAM sequence: AGG
tccctaagcactagaatcac

SEQ ID NO: 109022 - DNA, 20 bp, Artificial Sequence
  Description of Artificial Sequence: Synthetic oligonucleotide
  Target: LAMA2; (-) strand; PAM type: NRG; PAM sequence: CAG
ctccctaagcactagaatca

SEQ ID NO: 109023 - DNA, 20 bp, Artificial Sequence
  Description of Artificial Sequence: Synthetic oligonucleotide
  Target: LAMA2; (-) strand; PAM type: NRG; PAM sequence: TAG
gcctcggcctccctaagcac

SEQ ID NO: 109024 - DNA, 20 bp, Artificial Sequence
  Description of Artificial Sequence: Synthetic oligonucleotide
  Target: LAMA2; (-) strand; PAM type: NRG; PAM sequence: AAG
cctcctgcctcggcctccct

SEQ ID NO: 109025 - DNA, 20 bp, Artificial Sequence
  Description of Artificial Sequence: Synthetic oligonucleotide
  Target: LAMA2; (-) strand; PAM type: NRG; PAM sequence: CGG
accaagggatcctcctgcct

SEQ ID NO: 109026 - DNA, 20 bp, Artificial Sequence
  Description of Artificial Sequence: Synthetic oligonucleotide
  Target: LAMA2; (-) strand; PAM type: NRG; PAM sequence: GGG
tctcaaattcttggcaccaa

SEQ ID NO: 109027 - DNA, 20 bp, Artificial Sequence
  Description of Artificial Sequence: Synthetic oligonucleotide
  Target: LAMA2; (-) strand; PAM type: NRG; PAM sequence: AGG
gtctcaaattcttggcacca

SEQ ID NO: 109028 - DNA, 20 bp, Artificial Sequence
  Description of Artificial Sequence: Synthetic oligonucleotide
  Target: LAMA2; (-) strand; PAM type: NRG; PAM sequence: AAG
ggtctcaaattcttggcacc

SEQ ID NO: 109029 - DNA, 20 bp, Artificial Sequence
  Description of Artificial Sequence: Synthetic oligonucleotide
  Target: LAMA2; (-) strand; PAM type: NRG; PAM sequence: TGG
cccggctggtctcaaattct

SEQ ID NO: 109030 - DNA, 20 bp, Artificial Sequence
  Description of Artificial Sequence: Synthetic oligonucleotide
  Target: LAMA2; (-) strand; PAM type: NRG; PAM sequence: TGG
tcttgctatgtttccccggc

SEQ ID NO: 109031 - DNA, 20 bp, Artificial Sequence
  Description of Artificial Sequence: Synthetic oligonucleotide
  Target: LAMA2; (-) strand; PAM type: NRG; PAM sequence: CGG
aggatcttgctatgtttccc

SEQ ID NO: 109032 - DNA, 20 bp, Artificial Sequence
  Description of Artificial Sequence: Synthetic oligonucleotide
  Target: LAMA2; (-) strand; PAM type: NRG; PAM sequence: AGG
aaaaaatgttttgtagagac

SEQ ID NO: 109033 - DNA, 20 bp, Artificial Sequence
  Description of Artificial Sequence: Synthetic oligonucleotide
  Target: LAMA2; (-) strand; PAM type: NRG; PAM sequence: CAG
taaaaaatgttttgtagaga

SEQ ID NO: 109034 - DNA, 20 bp, Artificial Sequence
  Description of Artificial Sequence: Synthetic oligonucleotide
  Target: LAMA2; (-) strand; PAM type: NRG; PAM sequence: GAG
tttttaaaaaatgttttgta

SEQ ID NO: 109035 - DNA, 20 bp, Artificial Sequence
  Description of Artificial Sequence: Synthetic oligonucleotide
  Target: LAMA2; (-) strand; PAM type: NRG; PAM sequence: TAG
aatttttaaaaaatgttttg

SEQ ID NO: 109036 - DNA, 20 bp, Artificial Sequence
  Description of Artificial Sequence: Synthetic oligonucleotide
  Target: LAMA2; (-) strand; PAM type: NRG; PAM sequence: TAG
tcctggctcagccttccaag

SEQ ID NO: 109037 - DNA, 20 bp, Artificial Sequence
  Description of Artificial Sequence: Synthetic oligonucleotide
  Target: LAMA2; (-) strand; PAM type: NRG; PAM sequence: AAG
tcctcctggctcagccttcc

SEQ ID NO: 109038 - DNA, 20 bp, Artificial Sequence
  Description of Artificial Sequence: Synthetic oligonucleotide
  Target: LAMA2; (-) strand; PAM type: NRG; PAM sequence: CAG
ctaaagcgatcctcctggct

SEQ ID NO: 109039 - DNA, 20 bp, Artificial Sequence
  Description of Artificial Sequence: Synthetic oligonucleotide
  Target: LAMA2; (-) strand; PAM type: NRG; PAM sequence: TGG
ctgggctaaagcgatcctcc

SEQ ID NO: 109040 - DNA, 20 bp, Artificial Sequence
  Description of Artificial Sequence: Synthetic oligonucleotide
  Target: LAMA2; (-) strand; PAM type: NRG; PAM sequence: AAG
aacttcacgcccctgggcta

SEQ ID NO: 109041 - DNA, 20 bp, Artificial Sequence
  Description of Artificial Sequence: Synthetic oligonucleotide
  Target: LAMA2; (-) strand; PAM type: NRG; PAM sequence: GGG
cacggtaacttcacgcccct

SEQ ID NO: 109042 - DNA, 20 bp, Artificial Sequence
  Description of Artificial Sequence: Synthetic oligonucleotide
  Target: LAMA2; (-) strand; PAM type: NRG; PAM sequence: TGG
tcacggtaacttcacgcccc

SEQ ID NO: 109043 - DNA, 20 bp, Artificial Sequence
  Description of Artificial Sequence: Synthetic oligonucleotide
  Target: LAMA2; (-) strand; PAM type: NRG; PAM sequence: CGG
agtagtgtgatcacaactca

SEQ ID NO: 109044 - DNA, 20 bp, Artificial Sequence
  Description of Artificial Sequence: Synthetic oligonucleotide
  Target: LAMA2; (-) strand; PAM type: NRG; PAM sequence: TAG
ttacccaggctggtgtacag

SEQ ID NO: 109045 - DNA, 20 bp, Artificial Sequence
  Description of Artificial Sequence: Synthetic oligonucleotide
  Target: LAMA2; (-) strand; PAM type: NRG; PAM sequence: CAG
ctgttacccaggctggtgta

SEQ ID NO: 109046 - DNA, 20 bp, Artificial Sequence
  Description of Artificial Sequence: Synthetic oligonucleotide
  Target: LAMA2; (-) strand; PAM type: NRG; PAM sequence: TGG
tcttactctgttacccaggc

SEQ ID NO: 109047 - DNA, 20 bp, Artificial Sequence
  Description of Artificial Sequence: Synthetic oligonucleotide
  Target: LAMA2; (-) strand; PAM type: NRG; PAM sequence: AGG
aggatcttactctgttaccc

SEQ ID NO: 109048 - DNA, 20 bp, Artificial Sequence
  Description of Artificial Sequence: Synthetic oligonucleotide
  Target: LAMA2; (-) strand; PAM type: NRG; PAM sequence: CAG
caggatcttactctgttacc

SEQ ID NO: 109049 - DNA, 20 bp, Artificial Sequence
  Description of Artificial Sequence: Synthetic oligonucleotide
  Target: LAMA2; (-) strand; PAM type: NRG; PAM sequence: AGG
ttgtttttctttttagagac

SEQ ID NO: 109050 - DNA, 20 bp, Artificial Sequence
  Description of Artificial Sequence: Synthetic oligonucleotide
  Target: LAMA2; (-) strand; PAM type: NRG; PAM sequence: CAG
tttgtttttctttttagaga

SEQ ID NO: 109051 - DNA, 20 bp, Artificial Sequence
  Description of Artificial Sequence: Synthetic oligonucleotide
  Target: LAMA2; (-) strand; PAM type: NRG; PAM sequence: GAG
taattttgtttttcttttta

SEQ ID NO: 109052 - DNA, 20 bp, Artificial Sequence
  Description of Artificial Sequence: Synthetic oligonucleotide
  Target: LAMA2; (-) strand; PAM type: NRG; PAM sequence: TAG
tttaattttgtttttctttt

SEQ ID NO: 109053 - DNA, 20 bp, Artificial Sequence
  Description of Artificial Sequence: Synthetic oligonucleotide
  Target: LAMA2; (-) strand; PAM type: NRG; PAM sequence: AAG
gcgagacttcatctcagaaa

SEQ ID NO: 109054 - DNA, 20 bp, Artificial Sequence
  Description of Artificial Sequence: Synthetic oligonucleotide
  Target: LAMA2; (-) strand; PAM type: NRG; PAM sequence: CAG
gacagagcgagacttcatct

SEQ ID NO: 109055 - DNA, 20 bp, Artificial Sequence
  Description of Artificial Sequence: Synthetic oligonucleotide
  Target: LAMA2; (-) strand; PAM type: NRG; PAM sequence: GAG
tccagcctggttgacagagc

SEQ ID NO: 109056 - DNA, 20 bp, Artificial Sequence
  Description of Artificial Sequence: Synthetic oligonucleotide
  Target: LAMA2; (-) strand; PAM type: NRG; PAM sequence: GAG
gcactccagcctggttgaca

SEQ ID NO: 109057 - DNA, 20 bp, Artificial Sequence
  Description of Artificial Sequence: Synthetic oligonucleotide
  Target: LAMA2; (-) strand; PAM type: NRG; PAM sequence: CAG
ctgcactccagcctggttga

SEQ ID NO: 109058 - DNA, 20 bp, Artificial Sequence
  Description of Artificial Sequence: Synthetic oligonucleotide
  Target: LAMA2; (-) strand; PAM type: NRG; PAM sequence: TGG
cgcaccactgcactccagcc

SEQ ID NO: 109059 - DNA, 20 bp, Artificial Sequence
  Description of Artificial Sequence: Synthetic oligonucleotide
  Target: LAMA2; (-) strand; PAM type: NRG; PAM sequence: CAG
aagatcgcaccactgcactc

SEQ ID NO: 109060 - DNA, 20 bp, Artificial Sequence
  Description of Artificial Sequence: Synthetic oligonucleotide
  Target: LAMA2; (-) strand; PAM type: NRG; PAM sequence: AAG
gacagaggctgcagtgagcc

SEQ ID NO: 109061 - DNA, 20 bp, Artificial Sequence
  Description of Artificial Sequence: Synthetic oligonucleotide
  Target: LAMA2; (-) strand; PAM type: NRG; PAM sequence: GAG
tgggagacagaggctgcagt

SEQ ID NO: 109062 - DNA, 20 bp, Artificial Sequence
  Description of Artificial Sequence: Synthetic oligonucleotide
  Target: LAMA2; (-) strand; PAM type: NRG; PAM sequence: CAG
aacctgggagacagaggctg

SEQ ID NO: 109063 - DNA, 20 bp, Artificial Sequence
  Description of Artificial Sequence: Synthetic oligonucleotide
  Target: LAMA2; (-) strand; PAM type: NRG; PAM sequence: AGG
cacttgaacctgggagacag

SEQ ID NO: 109064 - DNA, 20 bp, Artificial Sequence
  Description of Artificial Sequence: Synthetic oligonucleotide
  Target: LAMA2; (-) strand; PAM type: NRG; PAM sequence: GAG
tcacttgaacctgggagaca

SEQ ID NO: 109065 - DNA, 20 bp, Artificial Sequence
  Description of Artificial Sequence: Synthetic oligonucleotide
  Target: LAMA2; (-) strand; PAM type: NRG; PAM sequence: CAG
aatcacttgaacctgggaga

SEQ ID NO: 109066 - DNA, 20 bp, Artificial Sequence
  Description of Artificial Sequence: Synthetic oligonucleotide
  Target: LAMA2; (-) strand; PAM type: NRG; PAM sequence: GAG
ggacaatcacttgaacctgg

SEQ ID NO: 109067 - DNA, 20 bp, Artificial Sequence
  Description of Artificial Sequence: Synthetic oligonucleotide
  Target: LAMA2; (-) strand; PAM type: NRG; PAM sequence: GGG
caggacaatcacttgaacct

SEQ ID NO: 109068 - DNA, 20 bp, Artificial Sequence
  Description of Artificial Sequence: Synthetic oligonucleotide
  Target: LAMA2; (-) strand; PAM type: NRG; PAM sequence: TGG
gcaggacaatcacttgaacc

SEQ ID NO: 109069 - DNA, 20 bp, Artificial Sequence
  Description of Artificial Sequence: Synthetic oligonucleotide
  Target: LAMA2; (-) strand; PAM type: NRG; PAM sequence: AGG
tgtaatcccagatatgaggc

SEQ ID NO: 109070 - DNA, 20 bp, Artificial Sequence
  Description of Artificial Sequence: Synthetic oligonucleotide
  Target: LAMA2; (-) strand; PAM type: NRG; PAM sequence: CAG
ctgtaatcccagatatgagg

SEQ ID NO: 109071 - DNA, 20 bp, Artificial Sequence
  Description of Artificial Sequence: Synthetic oligonucleotide
  Target: LAMA2; (-) strand; PAM type: NRG; PAM sequence: AGG
cacctgtaatcccagatatg

SEQ ID NO: 109072 - DNA, 20 bp, Artificial Sequence
  Description of Artificial Sequence: Synthetic oligonucleotide
  Target: LAMA2; (-) strand; PAM type: NRG; PAM sequence: GAG
gcacctgtaatcccagatat

SEQ ID NO: 109073 - DNA, 20 bp, Artificial Sequence
  Description of Artificial Sequence: Synthetic oligonucleotide
  Target: LAMA2; (-) strand; PAM type: NRG; PAM sequence: CAG
gtggcatgcacctgtaatcc

SEQ ID NO: 109074 - DNA, 20 bp, Artificial Sequence
  Description of Artificial Sequence: Synthetic oligonucleotide
  Target: LAMA2; (-) strand; PAM type: NRG; PAM sequence: TGG
caaagattagccaggtgtgg

SEQ ID NO: 109075 - DNA, 20 bp, Artificial Sequence
  Description of Artificial Sequence: Synthetic oligonucleotide
  Target: LAMA2; (-) strand; PAM type: NRG; PAM sequence: TGG
atgcaaagattagccaggtg

SEQ ID NO: 109076 - DNA, 20 bp, Artificial Sequence
  Description of Artificial Sequence: Synthetic oligonucleotide
  Target: LAMA2; (-) strand; PAM type: NRG; PAM sequence: AGG
tcaaaatgcaaagattagcc

SEQ ID NO: 109077 - DNA, 20 bp, Artificial Sequence
  Description of Artificial Sequence: Synthetic oligonucleotide
  Target: LAMA2; (-) strand; PAM type: NRG; PAM sequence: CAG
ctcaaaatgcaaagattagc

SEQ ID NO: 109078 - DNA, 20 bp, Artificial Sequence
  Description of Artificial Sequence: Synthetic oligonucleotide
  Target: LAMA2; (-) strand; PAM type: NRG; PAM sequence: TAG
tctactcaaaatgcaaagat

SEQ ID NO: 109079 - DNA, 20 bp, Artificial Sequence
  Description of Artificial Sequence: Synthetic oligonucleotide
  Target: LAMA2; (-) strand; PAM type: NRG; PAM sequence: AAG
ctgtctctactcaaaatgca

SEQ ID NO: 109080 - DNA, 20 bp, Artificial Sequence
  Description of Artificial Sequence: Synthetic oligonucleotide
  Target: LAMA2; (-) strand; PAM type: NRG; PAM sequence: TGG
caagaccagcctggtcaaca

SEQ ID NO: 109081 - DNA, 20 bp, Artificial Sequence
  Description of Artificial Sequence: Synthetic oligonucleotide
  Target: LAMA2; (-) strand; PAM type: NRG; PAM sequence: TGG
tcaggagttcaagaccagcc

SEQ ID NO: 109082 - DNA, 20 bp, Artificial Sequence
  Description of Artificial Sequence: Synthetic oligonucleotide
  Target: LAMA2; (-) strand; PAM type: NRG; PAM sequence: CAG
tgaggtcaggagttcaagac

SEQ ID NO: 109083 - DNA, 20 bp, Artificial Sequence
  Description of Artificial Sequence: Synthetic oligonucleotide
  Target: LAMA2; (-) strand; PAM type: NRG; PAM sequence: AAG
tcacttgaggtcaggagttc

SEQ ID NO: 109084 - DNA, 20 bp, Artificial Sequence
  Description of Artificial Sequence: Synthetic oligonucleotide
  Target: LAMA2; (-) strand; PAM type: NRG; PAM sequence: GAG
ggaggatcacttgaggtcag

SEQ ID NO: 109085 - DNA, 20 bp, Artificial Sequence
  Description of Artificial Sequence: Synthetic oligonucleotide
  Target: LAMA2; (-) strand; PAM type: NRG; PAM sequence: AGG
cgggaggatcacttgaggtc

SEQ ID NO: 109086 - DNA, 20 bp, Artificial Sequence
  Description of Artificial Sequence: Synthetic oligonucleotide
  Target: LAMA2; (-) strand; PAM type: NRG; PAM sequence: CAG
gcgggaggatcacttgaggt

SEQ ID NO: 109087 - DNA, 20 bp, Artificial Sequence
  Description of Artificial Sequence: Synthetic oligonucleotide
  Target: LAMA2; (-) strand; PAM type: NRG; PAM sequence: AGG
cgaggcgggaggatcacttg

SEQ ID NO: 109088 - DNA, 20 bp, Artificial Sequence
  Description of Artificial Sequence: Synthetic oligonucleotide
  Target: LAMA2; (-) strand; PAM type: NRG; PAM sequence: GAG
ccgaggcgggaggatcactt

SEQ ID NO: 109089 - DNA, 20 bp, Artificial Sequence
  Description of Artificial Sequence: Synthetic oligonucleotide
  Target: LAMA2; (-) strand; PAM type: NRG; PAM sequence: AGG
ctttgggaggccgaggcggg

SEQ ID NO: 109090 - DNA, 20 bp, Artificial Sequence
  Description of Artificial Sequence: Synthetic oligonucleotide
  Target: LAMA2; (-) strand; PAM type: NRG; PAM sequence: GAG
actttgggaggccgaggcgg

SEQ ID NO: 109091 - DNA, 20 bp, Artificial Sequence
  Description of Artificial Sequence: Synthetic oligonucleotide
  Target: LAMA2; (-) strand; PAM type: NRG; PAM sequence: GGG
gcactttgggaggccgaggc

SEQ ID NO: 109092 - DNA, 20 bp, Artificial Sequence
  Description of Artificial Sequence: Synthetic oligonucleotide
  Target: LAMA2; (-) strand; PAM type: NRG; PAM sequence: CGG
agcactttgggaggccgagg

SEQ ID NO: 109093 - DNA, 20 bp, Artificial Sequence
  Description of Artificial Sequence: Synthetic oligonucleotide
  Target: LAMA2; (-) strand; PAM type: NRG; PAM sequence: AGG
ctcagcactttgggaggccg

SEQ ID NO: 109094 - DNA, 20 bp, Artificial Sequence
  Description of Artificial Sequence: Synthetic oligonucleotide
  Target: LAMA2; (-) strand; PAM type: NRG; PAM sequence: GAG
tctcagcactttgggaggcc

SEQ ID NO: 109095 - DNA, 20 bp, Artificial Sequence
  Description of Artificial Sequence: Synthetic oligonucleotide
  Target: LAMA2; (-) strand; PAM type: NRG; PAM sequence: AGG
tgtaatctcagcactttggg

SEQ ID NO: 109096 - DNA, 20 bp, Artificial Sequence
  Description of Artificial Sequence: Synthetic oligonucleotide
  Target: LAMA2; (-) strand; PAM type: NRG; PAM sequence: GAG
ctgtaatctcagcactttgg

SEQ ID NO: 109097 - DNA, 20 bp, Artificial Sequence
  Description of Artificial Sequence: Synthetic oligonucleotide
  Target: LAMA2; (-) strand; PAM type: NRG; PAM sequence: GGG
atctgtaatctcagcacttt

SEQ ID NO: 109098 - DNA, 20 bp, Artificial Sequence
  Description of Artificial Sequence: Synthetic oligonucleotide
  Target: LAMA2; (-) strand; PAM type: NRG; PAM sequence: TGG
catctgtaatctcagcactt

SEQ ID NO: 109099 - DNA, 20 bp, Artificial Sequence
  Description of Artificial Sequence: Synthetic oligonucleotide
  Target: LAMA2; (-) strand; PAM type: NRG; PAM sequence: CAG
gtggctcacatctgtaatct

SEQ ID NO: 109100 - DNA, 20 bp, Artificial Sequence
  Description of Artificial Sequence: Synthetic oligonucleotide
  Target: LAMA2; (-) strand; PAM type: NRG; PAM sequence: TGG
gtatttagggccgggcacgg

SEQ ID NO: 109101 - DNA, 20 bp, Artificial Sequence
  Description of Artificial Sequence: Synthetic oligonucleotide
  Target: LAMA2; (-) strand; PAM type: NRG; PAM sequence: CGG
aatgtatttagggccgggca

SEQ ID NO: 109102 - DNA, 20 bp, Artificial Sequence
  Description of Artificial Sequence: Synthetic oligonucleotide
  Target: LAMA2; (-) strand; PAM type: NRG; PAM sequence: GGG
agaaaaatgtatttagggcc

SEQ ID NO: 109103 - DNA, 20 bp, Artificial Sequence
  Description of Artificial Sequence: Synthetic oligonucleotide
  Target: LAMA2; (-) strand; PAM type: NRG; PAM sequence: CGG
aagaaaaatgtatttagggc

SEQ ID NO: 109104 - DNA, 20 bp, Artificial Sequence
  Description of Artificial Sequence: Synthetic oligonucleotide
  Target: LAMA2; (-) strand; PAM type: NRG; PAM sequence: GGG
atacaagaaaaatgtattta

SEQ ID NO: 109105 - DNA, 20 bp, Artificial Sequence
  Description of Artificial Sequence: Synthetic oligonucleotide
  Target: LAMA2; (-) strand; PAM type: NRG; PAM sequence: AGG
aatacaagaaaaatgtattt

SEQ ID NO: 109106 - DNA, 20 bp, Artificial Sequence
  Description of Artificial Sequence: Synthetic oligonucleotide
  Target: LAMA2; (-) strand; PAM type: NRG; PAM sequence: TAG
aaatacaagaaaaatgtatt

SEQ ID NO: 109107 - DNA, 20 bp, Artificial Sequence
  Description of Artificial Sequence: Synthetic oligonucleotide
  Target: LAMA2; (-) strand; PAM type: NRG; PAM sequence: AAG
ctgaatcagaaataaaatac

SEQ ID NO: 109108 - DNA, 20 bp, Artificial Sequence
  Description of Artificial Sequence: Synthetic oligonucleotide
  Target: LAMA2; (-) strand; PAM type: NRG; PAM sequence: CAG
gtgcattttgattcctgaat

SEQ ID NO: 109109 - DNA, 20 bp, Artificial Sequence
  Description of Artificial Sequence: Synthetic oligonucleotide
  Target: LAMA2; (-) strand; PAM type: NRG; PAM sequence: TAG
taaaacccataatatggcag

SEQ ID NO: 109110 - DNA, 20 bp, Artificial Sequence
  Description of Artificial Sequence: Synthetic oligonucleotide
  Target: LAMA2; (-) strand; PAM type: NRG; PAM sequence: CAG
acataaaacccataatatgg

SEQ ID NO: 109111 - DNA, 20 bp, Artificial Sequence
  Description of Artificial Sequence: Synthetic oligonucleotide
  Target: LAMA2; (-) strand; PAM type: NRG; PAM sequence: TGG
ttaacataaaacccataata

SEQ ID NO: 109112 - DNA, 20 bp, Artificial Sequence
  Description of Artificial Sequence: Synthetic oligonucleotide
  Target: LAMA2; (-) strand; PAM type: NRG; PAM sequence: CAG
gtaatggctcatatagagag

SEQ ID NO: 109113 - DNA, 20 bp, Artificial Sequence
  Description of Artificial Sequence: Synthetic oligonucleotide
  Target: LAMA2; (-) strand; PAM type: NRG; PAM sequence: GAG
attgtaatggctcatataga

SEQ ID NO: 109114 - DNA, 20 bp, Artificial Sequence
  Description of Artificial Sequence: Synthetic oligonucleotide
  Target: LAMA2; (-) strand; PAM type: NRG; PAM sequence: GAG
taattgtaatggctcatata

SEQ ID NO: 109115 - DNA, 20 bp, Artificial Sequence
  Description of Artificial Sequence: Synthetic oligonucleotide
  Target: LAMA2; (-) strand; PAM type: NRG; PAM sequence: TAG
aataattgtaatggctcata

SEQ ID NO: 109116 - DNA, 20 bp, Artificial Sequence
  Description of Artificial Sequence: Synthetic oligonucleotide
  Target: LAMA2; (-) strand; PAM type: NRG; PAM sequence: TGG
gcataaaataataattgtaa

SEQ ID NO: 109117 - DNA, 20 bp, Artificial Sequence
  Description of Artificial Sequence: Synthetic oligonucleotide
  Target: LAMA2; (-) strand; PAM type: NRG; PAM sequence: AAG
tcaaatgggagacaagagat

SEQ ID NO: 109118 - DNA, 20 bp, Artificial Sequence
  Description of Artificial Sequence: Synthetic oligonucleotide
  Target: LAMA2; (-) strand; PAM type: NRG; PAM sequence: GAG
gcaattcaaatgggagacaa

SEQ ID NO: 109119 - DNA, 20 bp, Artificial Sequence
  Description of Artificial Sequence: Synthetic oligonucleotide
  Target: LAMA2; (-) strand; PAM type: NRG; PAM sequence: AAG
tggcaattcaaatgggagac

SEQ ID NO: 109120 - DNA, 20 bp, Artificial Sequence
  Description of Artificial Sequence: Synthetic oligonucleotide
  Target: LAMA2; (-) strand; PAM type: NRG; PAM sequence: GAG
acaggtggcaattcaaatgg

SEQ ID NO: 109121 - DNA, 20 bp, Artificial Sequence
  Description of Artificial Sequence: Synthetic oligonucleotide
  Target: LAMA2; (-) strand; PAM type: NRG; PAM sequence: GGG
aaacaggtggcaattcaaat

SEQ ID NO: 109122 - DNA, 20 bp, Artificial Sequence
  Description of Artificial Sequence: Synthetic oligonucleotide
  Target: LAMA2; (-) strand; PAM type: NRG; PAM sequence: TGG
gaaacaggtggcaattcaaa

SEQ ID NO: 109123 - DNA, 20 bp, Artificial Sequence
  Description of Artificial Sequence: Synthetic oligonucleotide
  Target: LAMA2; (-) strand; PAM type: NRG; PAM sequence: TGG
aaactgaagagagaaacagg

SEQ ID NO: 109124 - DNA, 20 bp, Artificial Sequence
  Description of Artificial Sequence: Synthetic oligonucleotide
  Target: LAMA2; (-) strand; PAM type: NRG; PAM sequence: AGG
atgaaactgaagagagaaac

SEQ ID NO: 109125 - DNA, 20 bp, Artificial Sequence
  Description of Artificial Sequence: Synthetic oligonucleotide
  Target: LAMA2; (-) strand; PAM type: NRG; PAM sequence: CAG
aatgaaactgaagagagaaa

SEQ ID NO: 109126 - DNA, 20 bp, Artificial Sequence
  Description of Artificial Sequence: Synthetic oligonucleotide
  Target: LAMA2; (-) strand; PAM type: NRG; PAM sequence: GAG
gtagggaatgaaactgaaga

SEQ ID NO: 109127 - DNA, 20 bp, Artificial Sequence
  Description of Artificial Sequence: Synthetic oligonucleotide
  Target: LAMA2; (-) strand; PAM type: NRG; PAM sequence: GAG
tggtagggaatgaaactgaa

SEQ ID NO: 109128 - DNA, 20 bp, Artificial Sequence
  Description of Artificial Sequence: Synthetic oligonucleotide
  Target: LAMA2; (-) strand; PAM type: NRG; PAM sequence: AAG
aatggtagggaatgaaactg

SEQ ID NO: 109129 - DNA, 20 bp, Artificial Sequence
  Description of Artificial Sequence: Synthetic oligonucleotide
  Target: LAMA2; (-) strand; PAM type: NRG; PAM sequence: GGG
atatgagacagaaaatggta

SEQ ID NO: 109130 - DNA, 20 bp, Artificial Sequence
  Description of Artificial Sequence: Synthetic oligonucleotide
  Target: LAMA2; (-) strand; PAM type: NRG; PAM sequence: AGG
gatatgagacagaaaatggt

SEQ ID NO: 109131 - DNA, 20 bp, Artificial Sequence
  Description of Artificial Sequence: Synthetic oligonucleotide
  Target: LAMA2; (-) strand; PAM type: NRG; PAM sequence: TAG
agatatgagacagaaaatgg

SEQ ID NO: 109132 - DNA, 20 bp, Artificial Sequence
  Description of Artificial Sequence: Synthetic oligonucleotide
  Target: LAMA2; (-) strand; PAM type: NRG; PAM sequence: TGG
gacagatatgagacagaaaa

SEQ ID NO: 109133 - DNA, 20 bp, Artificial Sequence
  Description of Artificial Sequence: Synthetic oligonucleotide
  Target: LAMA2; (-) strand; PAM type: NRG; PAM sequence: CAG
gtagggagacagatatgaga

SEQ ID NO: 109134 - DNA, 20 bp, Artificial Sequence
  Description of Artificial Sequence: Synthetic oligonucleotide
  Target: LAMA2; (-) strand; PAM type: NRG; PAM sequence: GAG
aagggtagggagacagatat

SEQ ID NO: 109135 - DNA, 20 bp, Artificial Sequence
  Description of Artificial Sequence: Synthetic oligonucleotide
  Target: LAMA2; (-) strand; PAM type: NRG; PAM sequence: CAG
cttaggtaagggtagggaga

SEQ ID NO: 109136 - DNA, 20 bp, Artificial Sequence
  Description of Artificial Sequence: Synthetic oligonucleotide
  Target: LAMA2; (-) strand; PAM type: NRG; PAM sequence: GAG
aatacttaggtaagggtagg

SEQ ID NO: 109137 - DNA, 20 bp, Artificial Sequence
  Description of Artificial Sequence: Synthetic oligonucleotide
  Target: LAMA2; (-) strand; PAM type: NRG; PAM sequence: GGG
tgaatacttaggtaagggta

SEQ ID NO: 109138 - DNA, 20 bp, Artificial Sequence
  Description of Artificial Sequence: Synthetic oligonucleotide
  Target: LAMA2; (-) strand; PAM type: NRG; PAM sequence: AGG
atgaatacttaggtaagggt

SEQ ID NO: 109139 - DNA, 20 bp, Artificial Sequence
  Description of Artificial Sequence: Synthetic oligonucleotide
  Target: LAMA2; (-) strand; PAM type: NRG; PAM sequence: TAG
tatgaatacttaggtaaggg

SEQ ID NO: 109140 - DNA, 20 bp, Artificial Sequence
  Description of Artificial Sequence: Synthetic oligonucleotide
  Target: LAMA2; (-) strand; PAM type: NRG; PAM sequence: GGG
aattatgaatacttaggtaa

SEQ ID NO: 109141 - DNA, 20 bp, Artificial Sequence
  Description of Artificial Sequence: Synthetic oligonucleotide
  Target: LAMA2; (-) strand; PAM type: NRG; PAM sequence: AGG
gaattatgaatacttaggta

SEQ ID NO: 109142 - DNA, 20 bp, Artificial Sequence
  Description of Artificial Sequence: Synthetic oligonucleotide
  Target: LAMA2; (-) strand; PAM type: NRG; PAM sequence: AAG
ggaattatgaatacttaggt

SEQ ID NO: 109143 - DNA, 20 bp, Artificial Sequence
  Description of Artificial Sequence: Synthetic oligonucleotide
  Target: LAMA2; (-) strand; PAM type: NRG; PAM sequence: AGG
gggaggaattatgaatactt

SEQ ID NO: 109144 - DNA, 20 bp, Artificial Sequence
  Description of Artificial Sequence: Synthetic oligonucleotide
  Target: LAMA2; (-) strand; PAM type: NRG; PAM sequence: TAG
tgggaggaattatgaatact

SEQ ID NO: 109145 - DNA, 20 bp, Artificial Sequence
  Description of Artificial Sequence: Synthetic oligonucleotide
  Target: LAMA2; (-) strand; PAM type: NRG; PAM sequence: AGG
ggaatagtagcatgtttggg

SEQ ID NO: 109146 - DNA, 20 bp, Artificial Sequence
  Description of Artificial Sequence: Synthetic oligonucleotide
  Target: LAMA2; (-) strand; PAM type: NRG; PAM sequence: GAG
tggaatagtagcatgtttgg

SEQ ID NO: 109147 - DNA, 20 bp, Artificial Sequence
  Description of Artificial Sequence: Synthetic oligonucleotide
  Target: LAMA2; (-) strand; PAM type: NRG; PAM sequence: GGG
cttggaatagtagcatgttt

SEQ ID NO: 109148 - DNA, 20 bp, Artificial Sequence
  Description of Artificial Sequence: Synthetic oligonucleotide
  Target: LAMA2; (-) strand; PAM type: NRG; PAM sequence: TGG
gcttggaatagtagcatgtt

SEQ ID NO: 109149 - DNA, 20 bp, Artificial Sequence
  Description of Artificial Sequence: Synthetic oligonucleotide
  Target: LAMA2; (-) strand; PAM type: NRG; PAM sequence: TAG
aacatgaaggcttggaatag

SEQ ID NO: 109150 - DNA, 20 bp, Artificial Sequence
  Description of Artificial Sequence: Synthetic oligonucleotide
  Target: LAMA2; (-) strand; PAM type: NRG; PAM sequence: TAG
gaaaacatgaaggcttggaa

SEQ ID NO: 109151 - DNA, 20 bp, Artificial Sequence
  Description of Artificial Sequence: Synthetic oligonucleotide
  Target: LAMA2; (-) strand; PAM type: NRG; PAM sequence: TGG
atactgaaaacatgaaggct

SEQ ID NO: 109152 - DNA, 20 bp, Artificial Sequence
  Description of Artificial Sequence: Synthetic oligonucleotide
  Target: LAMA2; (-) strand; PAM type: NRG; PAM sequence: AGG
aaataatactgaaaacatga

SEQ ID NO: 109153 - DNA, 20 bp, Artificial Sequence
  Description of Artificial Sequence: Synthetic oligonucleotide
  Target: LAMA2; (-) strand; PAM type: NRG; PAM sequence: AAG
gaaataatactgaaaacatg

SEQ ID NO: 109154 - DNA, 20 bp, Artificial Sequence
  Description of Artificial Sequence: Synthetic oligonucleotide
  Target: LAMA2; (-) strand; PAM type: NRG; PAM sequence: AAG
ggatggggcattccaagggg

SEQ ID NO: 109155 - DNA, 20 bp, Artificial Sequence
  Description of Artificial Sequence: Synthetic oligonucleotide
  Target: LAMA2; (-) strand; PAM type: NRG; PAM sequence: GGG
gaaggatggggcattccaag

SEQ ID NO: 109156 - DNA, 20 bp, Artificial Sequence
  Description of Artificial Sequence: Synthetic oligonucleotide
  Target: LAMA2; (-) strand; PAM type: NRG; PAM sequence: GGG
tgaaggatggggcattccaa

SEQ ID NO: 109157 - DNA, 20 bp, Artificial Sequence
  Description of Artificial Sequence: Synthetic oligonucleotide
  Target: LAMA2; (-) strand; PAM type: NRG; PAM sequence: AGG
gtgaaggatggggcattcca

SEQ ID NO: 109158 - DNA, 20 bp, Artificial Sequence
  Description of Artificial Sequence: Synthetic oligonucleotide
  Target: LAMA2; (-) strand; PAM type: NRG; PAM sequence: AAG
ggtgaaggatggggcattcc

SEQ ID NO: 109159 - DNA, 20 bp, Artificial Sequence
  Description of Artificial Sequence: Synthetic oligonucleotide
  Target: LAMA2; (-) strand; PAM type: NRG; PAM sequence: GGG
aagaagagaggtgaaggatg

SEQ ID NO: 109160 - DNA, 20 bp, Artificial Sequence
  Description of Artificial Sequence: Synthetic oligonucleotide
  Target: LAMA2; (-) strand; PAM type: NRG; PAM sequence: GGG
aaagaagagaggtgaaggat

SEQ ID NO: 109161 - DNA, 20 bp, Artificial Sequence
  Description of Artificial Sequence: Synthetic oligonucleotide
  Target: LAMA2; (-) strand; PAM type: NRG; PAM sequence: TGG
caaagaagagaggtgaagga

SEQ ID NO: 109162 - DNA, 20 bp, Artificial Sequence
  Description of Artificial Sequence: Synthetic oligonucleotide
  Target: LAMA2; (-) strand; PAM type: NRG; PAM sequence: AGG
taggcaaagaagagaggtga

SEQ ID NO: 109163 - DNA, 20 bp, Artificial Sequence
  Description of Artificial Sequence: Synthetic oligonucleotide
  Target: LAMA2; (-) strand; PAM type: NRG; PAM sequence: AAG
ttaggcaaagaagagaggtg

SEQ ID NO: 109164 - DNA, 20 bp, Artificial Sequence
  Description of Artificial Sequence: Synthetic oligonucleotide
  Target: LAMA2; (-) strand; PAM type: NRG; PAM sequence: AGG
agcagttaggcaaagaagag

SEQ ID NO: 109165 - DNA, 20 bp, Artificial Sequence
  Description of Artificial Sequence: Synthetic oligonucleotide
  Target: LAMA2; (-) strand; PAM type: NRG; PAM sequence: GAG
aagcagttaggcaaagaaga

SEQ ID NO: 109166 - DNA, 20 bp, Artificial Sequence
  Description of Artificial Sequence: Synthetic oligonucleotide
  Target: LAMA2; (-) strand; PAM type: NRG; PAM sequence: GAG
gaaagcagttaggcaaagaa

SEQ ID NO: 109167 - DNA, 20 bp, Artificial Sequence
  Description of Artificial Sequence: Synthetic oligonucleotide
  Target: LAMA2; (-) strand; PAM type: NRG; PAM sequence: AAG
aagaaagcagttaggcaaag

SEQ ID NO: 109168 - DNA, 20 bp, Artificial Sequence
  Description of Artificial Sequence: Synthetic oligonucleotide
  Target: LAMA2; (-) strand; PAM type: NRG; PAM sequence: AAG
tggaagaaagcagttaggca

SEQ ID NO: 109169 - DNA, 20 bp, Artificial Sequence
  Description of Artificial Sequence: Synthetic oligonucleotide
  Target: LAMA2; (-) strand; PAM type: NRG; PAM sequence: AGG
aggtctggaagaaagcagtt

SEQ ID NO: 109170 - DNA, 20 bp, Artificial Sequence
  Description of Artificial Sequence: Synthetic oligonucleotide
  Target: LAMA2; (-) strand; PAM type: NRG; PAM sequence: TAG
aaggtctggaagaaagcagt

SEQ ID NO: 109171 - DNA, 20 bp, Artificial Sequence
  Description of Artificial Sequence: Synthetic oligonucleotide
  Target: LAMA2; (-) strand; PAM type: NRG; PAM sequence: CAG
cctgaaggtctggaagaaag

SEQ ID NO: 109172 - DNA, 20 bp, Artificial Sequence
  Description of Artificial Sequence: Synthetic oligonucleotide
  Target: LAMA2; (-) strand; PAM type: NRG; PAM sequence: AAG
aatcctgaaggtctggaaga

SEQ ID NO: 109173 - DNA, 20 bp, Artificial Sequence
  Description of Artificial Sequence: Synthetic oligonucleotide
  Target: LAMA2; (-) strand; PAM type: NRG; PAM sequence: AAG
actaaatcctgaaggtctgg

SEQ ID NO: 109174 - DNA, 20 bp, Artificial Sequence
  Description of Artificial Sequence: Synthetic oligonucleotide
  Target: LAMA2; (-) strand; PAM type: NRG; PAM sequence: TGG
tgaactaaatcctgaaggtc

SEQ ID NO: 109175 - DNA, 20 bp, Artificial Sequence
  Description of Artificial Sequence: Synthetic oligonucleotide
  Target: LAMA2; (-) strand; PAM type: NRG; PAM sequence: AGG
gcatttgaactaaatcctga

SEQ ID NO: 109176 - DNA, 20 bp, Artificial Sequence
  Description of Artificial Sequence: Synthetic oligonucleotide
  Target: LAMA2; (-) strand; PAM type: NRG; PAM sequence: AAG
ggcatttgaactaaatcctg

SEQ ID NO: 109177 - DNA, 20 bp, Artificial Sequence
  Description of Artificial Sequence: Synthetic oligonucleotide
  Target: LAMA2; (-) strand; PAM type: NRG; PAM sequence: TGG
gttaggtttcctggaaatga

SEQ ID NO: 109178 - DNA, 20 bp, Artificial Sequence
  Description of Artificial Sequence: Synthetic oligonucleotide
  Target: LAMA2; (-) strand; PAM type: NRG; PAM sequence: TGG
agatgaggtgttaggtttcc

SEQ ID NO: 109179 - DNA, 20 bp, Artificial Sequence
  Description of Artificial Sequence: Synthetic oligonucleotide
  Target: LAMA2; (-) strand; PAM type: NRG; PAM sequence: AGG
tgtaaatcagatgaggtgtt

SEQ ID NO: 109180 - DNA, 20 bp, Artificial Sequence
  Description of Artificial Sequence: Synthetic oligonucleotide
  Target: LAMA2; (-) strand; PAM type: NRG; PAM sequence: TAG
atgtaaatcagatgaggtgt

SEQ ID NO: 109181 - DNA, 20 bp, Artificial Sequence
  Description of Artificial Sequence: Synthetic oligonucleotide
  Target: LAMA2; (-) strand; PAM type: NRG; PAM sequence: AGG
gggggcatgtaaatcagatg

SEQ ID NO: 109182 - DNA, 20 bp, Artificial Sequence
  Description of Artificial Sequence: Synthetic oligonucleotide
  Target: LAMA2; (-) strand; PAM type: NRG; PAM sequence: GAG
agggggcatgtaaatcagat

SEQ ID NO: 109183 - DNA, 20 bp, Artificial Sequence
  Description of Artificial Sequence: Synthetic oligonucleotide
  Target: LAMA2; (-) strand; PAM type: NRG; PAM sequence: CAG
cagagagggggcatgtaaat

SEQ ID NO: 109184 - DNA, 20 bp, Artificial Sequence
  Description of Artificial Sequence: Synthetic oligonucleotide
  Target: LAMA2; (-) strand; PAM type: NRG; PAM sequence: GGG
agaaaactataccagagagg

SEQ ID NO: 109185 - DNA, 20 bp, Artificial Sequence
  Description of Artificial Sequence: Synthetic oligonucleotide
  Target: LAMA2; (-) strand; PAM type: NRG; PAM sequence: GGG
gagaaaactataccagagag

SEQ ID NO: 109186 - DNA, 20 bp, Artificial Sequence
  Description of Artificial Sequence: Synthetic oligonucleotide
  Target: LAMA2; (-) strand; PAM type: NRG; PAM sequence: GGG
tgagaaaactataccagaga

SEQ ID NO: 109187 - DNA, 20 bp, Artificial Sequence
  Description of Artificial Sequence: Synthetic oligonucleotide
  Target: LAMA2; (-) strand; PAM type: NRG; PAM sequence: AGG
atgagaaaactataccagag

SEQ ID NO: 109188 - DNA, 20 bp, Artificial Sequence
  Description of Artificial Sequence: Synthetic oligonucleotide
  Target: LAMA2; (-) strand; PAM type: NRG; PAM sequence: GAG
tatgagaaaactataccaga

SEQ ID NO: 109189 - DNA, 20 bp, Artificial Sequence
  Description of Artificial Sequence: Synthetic oligonucleotide
  Target: LAMA2; (-) strand; PAM type: NRG; PAM sequence: GAG
cctatgagaaaactatacca

SEQ ID NO: 109190 - DNA, 20 bp, Artificial Sequence
  Description of Artificial Sequence: Synthetic oligonucleotide
  Target: LAMA2; (-) strand; PAM type: NRG; PAM sequence: CAG
agcctatgagaaaactatac

SEQ ID NO: 109191 - DNA, 20 bp, Artificial Sequence
  Description of Artificial Sequence: Synthetic oligonucleotide
  Target: LAMA2; (-) strand; PAM type: NRG; PAM sequence: GAG
tggtggtttgacaagcctat

SEQ ID NO: 109192 - DNA, 20 bp, Artificial Sequence
  Description of Artificial Sequence: Synthetic oligonucleotide
  Target: LAMA2; (-) strand; PAM type: NRG; PAM sequence: AAG
catgattgtggtggtttgac

SEQ ID NO: 109193 - DNA, 20 bp, Artificial Sequence
  Description of Artificial Sequence: Synthetic oligonucleotide
  Target: LAMA2; (-) strand; PAM type: NRG; PAM sequence: TGG
taattagtccatgattgtgg

SEQ ID NO: 109194 - DNA, 20 bp, Artificial Sequence
  Description of Artificial Sequence: Synthetic oligonucleotide
  Target: LAMA2; (-) strand; PAM type: NRG; PAM sequence: TGG
tattaattagtccatgattg

SEQ ID NO: 109195 - DNA, 20 bp, Artificial Sequence
  Description of Artificial Sequence: Synthetic oligonucleotide
  Target: LAMA2; (-) strand; PAM type: NRG; PAM sequence: TAG
aaagaagatggaatattaat

SEQ ID NO: 109196 - DNA, 20 bp, Artificial Sequence
  Description of Artificial Sequence: Synthetic oligonucleotide
  Target: LAMA2; (-) strand; PAM type: NRG; PAM sequence: TGG
ttaaaaattgtaaaagaaga

SEQ ID NO: 109197 - DNA, 20 bp, Artificial Sequence
  Description of Artificial Sequence: Synthetic oligonucleotide
  Target: LAMA2; (-) strand; PAM type: NRG; PAM sequence: AAG
agttttaaaaattgtaaaag

SEQ ID NO: 109198 - DNA, 20 bp, Artificial Sequence
  Description of Artificial Sequence: Synthetic oligonucleotide
  Target: LAMA2; (-) strand; PAM type: NRG; PAM sequence: AAG
aaaagttttaaaaattgtaa

SEQ ID NO: 109199 - DNA, 20 bp, Artificial Sequence
  Description of Artificial Sequence: Synthetic oligonucleotide
  Target: LAMA2; (-) strand; PAM type: NRG; PAM sequence: AAG
tctgttatgcatcaataaaa

SEQ ID NO: 109200 - DNA, 20 bp, Artificial Sequence
  Description of Artificial Sequence: Synthetic oligonucleotide
  Target: LAMA2; (-) strand; PAM type: NRG; PAM sequence: TGG
catgtctttcctcaagaaga

SEQ ID NO: 109201 - DNA, 20 bp, Artificial Sequence
  Description of Artificial Sequence: Synthetic oligonucleotide
  Target: LAMA2; (-) strand; PAM type: NRG; PAM sequence: AAG
accccatgtctttcctcaag

SEQ ID NO: 109202 - DNA, 20 bp, Artificial Sequence
  Description of Artificial Sequence: Synthetic oligonucleotide
  Target: LAMA2; (-) strand; PAM type: NRG; PAM sequence: AAG
aaaaccccatgtctttcctc

SEQ ID NO: 109203 - DNA, 20 bp, Artificial Sequence
  Description of Artificial Sequence: Synthetic oligonucleotide
  Target: LAMA2; (-) strand; PAM type: NRG; PAM sequence: TAG
gcatactagaaatacacagt

SEQ ID NO: 109204 - DNA, 20 bp, Artificial Sequence
  Description of Artificial Sequence: Synthetic oligonucleotide
  Target: LAMA2; (-) strand; PAM type: NRG; PAM sequence: CAG
ttatgcatactagaaataca

SEQ ID NO: 109205 - DNA, 20 bp, Artificial Sequence
  Description of Artificial Sequence: Synthetic oligonucleotide
  Target: LAMA2; (-) strand; PAM type: NRG; PAM sequence: TAG
ctagtcactattatgcatac

SEQ ID NO: 109206 - DNA, 20 bp, Artificial Sequence
  Description of Artificial Sequence: Synthetic oligonucleotide
  Target: LAMA2; (-) strand; PAM type: NRG; PAM sequence: TAG
aagtatttcctcatttgagc

SEQ ID NO: 109207 - DNA, 20 bp, Artificial Sequence
  Description of Artificial Sequence: Synthetic oligonucleotide
  Target: LAMA2; (-) strand; PAM type: NRG; PAM sequence: GAG
aaataagtatttcctcattt

SEQ ID NO: 109208 - DNA, 20 bp, Artificial Sequence
  Description of Artificial Sequence: Synthetic oligonucleotide
  Target: LAMA2; (-) strand; PAM type: NRG; PAM sequence: AAG
caccatttattgtaaaaaat

SEQ ID NO: 109209 - DNA, 20 bp, Artificial Sequence
  Description of Artificial Sequence: Synthetic oligonucleotide
  Target: LAMA2; (-) strand; PAM type: NRG; PAM sequence: AAG
ctttctaagataagtaagat

SEQ ID NO: 109210 - DNA, 20 bp, Artificial Sequence
  Description of Artificial Sequence: Synthetic oligonucleotide
  Target: LAMA2; (-) strand; PAM type: NRG; PAM sequence: AAG
cttctctttctaagataagt

SEQ ID NO: 109211 - DNA, 20 bp, Artificial Sequence
  Description of Artificial Sequence: Synthetic oligonucleotide
  Target: LAMA2; (-) strand; PAM type: NRG; PAM sequence: AAG
acctcttctctttctaagat

SEQ ID NO: 109212 - DNA, 20 bp, Artificial Sequence
  Description of Artificial Sequence: Synthetic oligonucleotide
  Target: LAMA2; (-) strand; PAM type: NRG; PAM sequence: AAG
ttaaaacctcttctctttct

SEQ ID NO: 109213 - DNA, 20 bp, Artificial Sequence
  Description of Artificial Sequence: Synthetic oligonucleotide
  Target: LAMA2; (-) strand; PAM type: NRG; PAM sequence: GAG
atttcatatcagcttctact

SEQ ID NO: 109214 - DNA, 20 bp, Artificial Sequence
  Description of Artificial Sequence: Synthetic oligonucleotide
  Target: LAMA2; (-) strand; PAM type: NRG; PAM sequence: CAG
tagaacttgtaatttcatat

SEQ ID NO: 109215 - DNA, 20 bp, Artificial Sequence
  Description of Artificial Sequence: Synthetic oligonucleotide
  Target: LAMA2; (-) strand; PAM type: NRG; PAM sequence: TAG
aattttacttataatcgaga

SEQ ID NO: 109216 - DNA, 20 bp, Artificial Sequence
  Description of Artificial Sequence: Synthetic oligonucleotide
  Target: LAMA2; (-) strand; PAM type: NRG; PAM sequence: GAG
ttaaaattttacttataatc

SEQ ID NO: 109217 - DNA, 20 bp, Artificial Sequence
  Description of Artificial Sequence: Synthetic oligonucleotide
  Target: LAMA2; (-) strand; PAM type: NRG; PAM sequence: AAG
cacctgtaatacacagcctg

SEQ ID NO: 109218 - DNA, 20 bp, Artificial Sequence
  Description of Artificial Sequence: Synthetic oligonucleotide
  Target: LAMA2; (-) strand; PAM type: NRG; PAM sequence: CAG
tttatttcacctgtaataca

SEQ ID NO: 109219 - DNA, 20 bp, Artificial Sequence
  Description of Artificial Sequence: Synthetic oligonucleotide
  Target: LAMA2; (-) strand; PAM type: NRG; PAM sequence: GAG
agcagaattatgtgtgtagg

SEQ ID NO: 109220 - DNA, 20 bp, Artificial Sequence
  Description of Artificial Sequence: Synthetic oligonucleotide
  Target: LAMA2; (-) strand; PAM type: NRG; PAM sequence: GGG
tgagcagaattatgtgtgta

SEQ ID NO: 109221 - DNA, 20 bp, Artificial Sequence
  Description of Artificial Sequence: Synthetic oligonucleotide
  Target: LAMA2; (-) strand; PAM type: NRG; PAM sequence: AGG
ctgagcagaattatgtgtgt

SEQ ID NO: 109222 - DNA, 20 bp, Artificial Sequence
  Description of Artificial Sequence: Synthetic oligonucleotide
  Target: LAMA2; (-) strand; PAM type: NRG; PAM sequence: TAG
gctgagcagaattatgtgtg

SEQ ID NO: 109223 - DNA, 20 bp, Artificial Sequence
  Description of Artificial Sequence: Synthetic oligonucleotide
  Target: LAMA2; (-) strand; PAM type: NRG; PAM sequence: CAG
aataagaggtacctgctgag

SEQ ID NO: 109224 - DNA, 20 bp, Artificial Sequence
  Description of Artificial Sequence: Synthetic oligonucleotide
  Target: LAMA2; (-) strand; PAM type: NRG; PAM sequence: GAG
tgtaataagaggtacctgct

SEQ ID NO: 109225 - DNA, 20 bp, Artificial Sequence
  Description of Artificial Sequence: Synthetic oligonucleotide
  Target: LAMA2; (-) strand; PAM type: NRG; PAM sequence: AGG
attcttcagattgtaataag

SEQ ID NO: 109226 - DNA, 20 bp, Artificial Sequence
  Description of Artificial Sequence: Synthetic oligonucleotide
  Target: LAMA2; (-) strand; PAM type: NRG; PAM sequence: GAG
cattcttcagattgtaataa

SEQ ID NO: 109227 - DNA, 20 bp, Artificial Sequence
  Description of Artificial Sequence: Synthetic oligonucleotide
  Target: LAMA2; (-) strand; PAM type: NRG; PAM sequence: AAG
gtcattcttcagattgtaat

SEQ ID NO: 109228 - DNA, 20 bp, Artificial Sequence
  Description of Artificial Sequence: Synthetic oligonucleotide
  Target: LAMA2; (-) strand; PAM type: NRG; PAM sequence: CAG
ggcttcttacagtcattctt

SEQ ID NO: 109229 - DNA, 20 bp, Artificial Sequence
  Description of Artificial Sequence: Synthetic oligonucleotide
  Target: LAMA2; (-) strand; PAM type: NRG; PAM sequence: CAG
acacaggttttggcttctta

SEQ ID NO: 109230 - DNA, 20 bp, Artificial Sequence
  Description of Artificial Sequence: Synthetic oligonucleotide
  Target: LAMA2; (-) strand; PAM type: NRG; PAM sequence: TGG
tccaataggaacacaggttt

SEQ ID NO: 109231 - DNA, 20 bp, Artificial Sequence
  Description of Artificial Sequence: Synthetic oligonucleotide
  Target: LAMA2; (-) strand; PAM type: NRG; PAM sequence: AGG
catttgtccaataggaacac

SEQ ID NO: 109232 - DNA, 20 bp, Artificial Sequence
  Description of Artificial Sequence: Synthetic oligonucleotide
  Target: LAMA2; (-) strand; PAM type: NRG; PAM sequence: CAG
ccatttgtccaataggaaca

SEQ ID NO: 109233 - DNA, 20 bp, Artificial Sequence
  Description of Artificial Sequence: Synthetic oligonucleotide
  Target: LAMA2; (-) strand; PAM type: NRG; PAM sequence: AGG
attgagtccatttgtccaat

SEQ ID NO: 109234 - DNA, 20 bp, Artificial Sequence
  Description of Artificial Sequence: Synthetic oligonucleotide
  Target: LAMA2; (-) strand; PAM type: NRG; PAM sequence: TAG
gattgagtccatttgtccaa

SEQ ID NO: 109235 - DNA, 20 bp, Artificial Sequence
  Description of Artificial Sequence: Synthetic oligonucleotide
  Target: LAMA2; (-) strand; PAM type: NRG; PAM sequence: GAG
gaccgcaaagtcacgggatt

SEQ ID NO: 109236 - DNA, 20 bp, Artificial Sequence
  Description of Artificial Sequence: Synthetic oligonucleotide
  Target: LAMA2; (-) strand; PAM type: NRG; PAM sequence: GGG
aggagtgaccgcaaagtcac

SEQ ID NO: 109237 - DNA, 20 bp, Artificial Sequence
  Description of Artificial Sequence: Synthetic oligonucleotide
  Target: LAMA2; (-) strand; PAM type: NRG; PAM sequence: CGG
aaggagtgaccgcaaagtca

SEQ ID NO: 109238 - DNA, 20 bp, Artificial Sequence
  Description of Artificial Sequence: Synthetic oligonucleotide
  Target: LAMA2; (-) strand; PAM type: NRG; PAM sequence: AAG
gataggaaggagtgaccgca

SEQ ID NO: 109239 - DNA, 20 bp, Artificial Sequence
  Description of Artificial Sequence: Synthetic oligonucleotide
  Target: LAMA2; (-) strand; PAM type: NRG; PAM sequence: GAG
caagggtatgagataggaag

SEQ ID NO: 109240 - DNA, 20 bp, Artificial Sequence
  Description of Artificial Sequence: Synthetic oligonucleotide
  Target: LAMA2; (-) strand; PAM type: NRG; PAM sequence: AGG
ggcaagggtatgagatagga

SEQ ID NO: 109241 - DNA, 20 bp, Artificial Sequence
  Description of Artificial Sequence: Synthetic oligonucleotide
  Target: LAMA2; (-) strand; PAM type: NRG; PAM sequence: AAG
gggcaagggtatgagatagg

SEQ ID NO: 109242 - DNA, 20 bp, Artificial Sequence
  Description of Artificial Sequence: Synthetic oligonucleotide
  Target: LAMA2; (-) strand; PAM type: NRG; PAM sequence: AGG
cctgggcaagggtatgagat

SEQ ID NO: 109243 - DNA, 20 bp, Artificial Sequence
  Description of Artificial Sequence: Synthetic oligonucleotide
  Target: LAMA2; (-) strand; PAM type: NRG; PAM sequence: TAG
ccctgggcaagggtatgaga

SEQ ID NO: 109244 - DNA, 20 bp, Artificial Sequence
  Description of Artificial Sequence: Synthetic oligonucleotide
  Target: LAMA2; (-) strand; PAM type: NRG; PAM sequence: GAG
ccagccctgggcaagggtat

SEQ ID NO: 109245 - DNA, 20 bp, Artificial Sequence
  Description of Artificial Sequence: Synthetic oligonucleotide
  Target: LAMA2; (-) strand; PAM type: NRG; PAM sequence: GGG
ctattcccagccctgggcaa

SEQ ID NO: 109246 - DNA, 20 bp, Artificial Sequence
  Description of Artificial Sequence: Synthetic oligonucleotide
  Target: LAMA2; (-) strand; PAM type: NRG; PAM sequence: AGG
cctattcccagccctgggca

SEQ ID NO: 109247 - DNA, 20 bp, Artificial Sequence
  Description of Artificial Sequence: Synthetic oligonucleotide
  Target: LAMA2; (-) strand; PAM type: NRG; PAM sequence: AAG
ccctattcccagccctgggc

SEQ ID NO: 109248 - DNA, 20 bp, Artificial Sequence
  Description of Artificial Sequence: Synthetic oligonucleotide
  Target: LAMA2; (-) strand; PAM type: NRG; PAM sequence: GGG
tcctccctattcccagccct

SEQ ID NO: 109249 - DNA, 20 bp, Artificial Sequence
  Description of Artificial Sequence: Synthetic oligonucleotide
  Target: LAMA2; (-) strand; PAM type: NRG; PAM sequence: TGG
ttcctccctattcccagccc

SEQ ID NO: 109250 - DNA, 20 bp, Artificial Sequence
  Description of Artificial Sequence: Synthetic oligonucleotide
  Target: LAMA2; (-) strand; PAM type: NRG; PAM sequence: CAG
gctcccttcctccctattcc

SEQ ID NO: 109251 - DNA, 20 bp, Artificial Sequence
  Description of Artificial Sequence: Synthetic oligonucleotide
  Target: LAMA2; (-) strand; PAM type: NRG; PAM sequence: TGG
taaaatcttaaagacaggat

SEQ ID NO: 109252 - DNA, 20 bp, Artificial Sequence
  Description of Artificial Sequence: Synthetic oligonucleotide
  Target: LAMA2; (-) strand; PAM type: NRG; PAM sequence: AGG
attattaaaatcttaaagac

SEQ ID NO: 109253 - DNA, 20 bp, Artificial Sequence
  Description of Artificial Sequence: Synthetic oligonucleotide
  Target: LAMA2; (-) strand; PAM type: NRG; PAM sequence: CAG
tattattaaaatcttaaaga

SEQ ID NO: 109254 - DNA, 20 bp, Artificial Sequence
  Description of Artificial Sequence: Synthetic oligonucleotide
  Target: LAMA2; (-) strand; PAM type: NRG; PAM sequence: AAG
ctggtattattaaaatctta

SEQ ID NO: 109255 - DNA, 20 bp, Artificial Sequence
  Description of Artificial Sequence: Synthetic oligonucleotide
  Target: LAMA2; (-) strand; PAM type: NRG; PAM sequence: TGG
tagaggcgagggcacggccc

SEQ ID NO: 109256 - DNA, 20 bp, Artificial Sequence
  Description of Artificial Sequence: Synthetic oligonucleotide
  Target: LAMA2; (-) strand; PAM type: NRG; PAM sequence: CGG
gggaaatagaggcgagggca

SEQ ID NO: 109257 - DNA, 20 bp, Artificial Sequence
  Description of Artificial Sequence: Synthetic oligonucleotide
  Target: LAMA2; (-) strand; PAM type: NRG; PAM sequence: GGG
ttgtggggaaatagaggcga

SEQ ID NO: 109258 - DNA, 20 bp, Artificial Sequence
  Description of Artificial Sequence: Synthetic oligonucleotide
  Target: LAMA2; (-) strand; PAM type: NRG; PAM sequence: AGG
tttgtggggaaatagaggcg

SEQ ID NO: 109259 - DNA, 20 bp, Artificial Sequence
  Description of Artificial Sequence: Synthetic oligonucleotide
  Target: LAMA2; (-) strand; PAM type: NRG; PAM sequence: GAG
gtttgtggggaaatagaggc

SEQ ID NO: 109260 - DNA, 20 bp, Artificial Sequence
  Description of Artificial Sequence: Synthetic oligonucleotide
  Target: LAMA2; (-) strand; PAM type: NRG; PAM sequence: AGG
cagtgtttgtggggaaatag

SEQ ID NO: 109261 - DNA, 20 bp, Artificial Sequence
  Description of Artificial Sequence: Synthetic oligonucleotide
  Target: LAMA2; (-) strand; PAM type: NRG; PAM sequence: GAG
ccagtgtttgtggggaaata

SEQ ID NO: 109262 - DNA, 20 bp, Artificial Sequence
  Description of Artificial Sequence: Synthetic oligonucleotide
  Target: LAMA2; (-) strand; PAM type: NRG; PAM sequence: TAG
taccagtgtttgtggggaaa

SEQ ID NO: 109263 - DNA, 20 bp, Artificial Sequence
  Description of Artificial Sequence: Synthetic oligonucleotide
  Target: LAMA2; (-) strand; PAM type: NRG; PAM sequence: GGG
ttataataccagtgtttgtg

SEQ ID NO: 109264 - DNA, 20 bp, Artificial Sequence
  Description of Artificial Sequence: Synthetic oligonucleotide
  Target: LAMA2; (-) strand; PAM type: NRG; PAM sequence: GGG
tttataataccagtgtttgt

SEQ ID NO: 109265 - DNA, 20 bp, Artificial Sequence
  Description of Artificial Sequence: Synthetic oligonucleotide
  Target: LAMA2; (-) strand; PAM type: NRG; PAM sequence: TGG
ttttataataccagtgtttg

SEQ ID NO: 109266 - DNA, 20 bp, Artificial Sequence
  Description of Artificial Sequence: Synthetic oligonucleotide
  Target: LAMA2; (-) strand; PAM type: NRG; PAM sequence: CAG
tttcttcatttttataatac

SEQ ID NO: 109267 - DNA, 20 bp, Artificial Sequence
  Description of Artificial Sequence: Synthetic oligonucleotide
  Target: LAMA2; (-) strand; PAM type: NRG; PAM sequence: TGG
tttttctcttggaaaaaaaa

SEQ ID NO: 109268 - DNA, 20 bp, Artificial Sequence
  Description of Artificial Sequence: Synthetic oligonucleotide
  Target: LAMA2; (-) strand; PAM type: NRG; PAM sequence: TGG
ctttagatttctttttctct

SEQ ID NO: 109269 - DNA, 20 bp, Artificial Sequence
  Description of Artificial Sequence: Synthetic oligonucleotide
  Target: LAMA2; (-) strand; PAM type: NRG; PAM sequence: TAG
cttcctacaatgcttgtctt

SEQ ID NO: 109270 - DNA, 20 bp, Artificial Sequence
  Description of Artificial Sequence: Synthetic oligonucleotide
  Target: LAMA2; (-) strand; PAM type: NRG; PAM sequence: GGG
ttattacttgagtagtttgt

SEQ ID NO: 109271 - DNA, 20 bp, Artificial Sequence
  Description of Artificial Sequence: Synthetic oligonucleotide
  Target: LAMA2; (-) strand; PAM type: NRG; PAM sequence: TGG
attattacttgagtagtttg

SEQ ID NO: 109272 - DNA, 20 bp, Artificial Sequence
  Description of Artificial Sequence: Synthetic oligonucleotide
  Target: LAMA2; (-) strand; PAM type: NRG; PAM sequence: TAG
tagaggaattattacttgag

SEQ ID NO: 109273 - DNA, 20 bp, Artificial Sequence
  Description of Artificial Sequence: Synthetic oligonucleotide
  Target: LAMA2; (-) strand; PAM type: NRG; PAM sequence: GAG
ttctagaggaattattactt

SEQ ID NO: 109274 - DNA, 20 bp, Artificial Sequence
  Description of Artificial Sequence: Synthetic oligonucleotide
  Target: LAMA2; (-) strand; PAM type: NRG; PAM sequence: AGG
gccttggcttggttttctag

SEQ ID NO: 109275 - DNA, 20 bp, Artificial Sequence
  Description of Artificial Sequence: Synthetic oligonucleotide
  Target: LAMA2; (-) strand; PAM type: NRG; PAM sequence: GAG
agccttggcttggttttcta

SEQ ID NO: 109276 - DNA, 20 bp, Artificial Sequence
  Description of Artificial Sequence: Synthetic oligonucleotide
  Target: LAMA2; (-) strand; PAM type: NRG; PAM sequence: TAG
atagccttggcttggttttc

SEQ ID NO: 109277 - DNA, 20 bp, Artificial Sequence
  Description of Artificial Sequence: Synthetic oligonucleotide
  Target: LAMA2; (-) strand; PAM type: NRG; PAM sequence: TGG
tctccgtcatagccttggct

SEQ ID NO: 109278 - DNA, 20 bp, Artificial Sequence
  Description of Artificial Sequence: Synthetic oligonucleotide
  Target: LAMA2; (-) strand; PAM type: NRG; PAM sequence: TGG
tcccatctccgtcatagcct

SEQ ID NO: 109279 - DNA, 20 bp, Artificial Sequence
  Description of Artificial Sequence: Synthetic oligonucleotide
  Target: LAMA2; (-) strand; PAM type: NRG; PAM sequence: TAG
aaacattcccatctccgtca

SEQ ID NO: 109280 - DNA, 20 bp, Artificial Sequence
  Description of Artificial Sequence: Synthetic oligonucleotide
  Target: LAMA2; (-) strand; PAM type: NRG; PAM sequence: AAG
gagaaatgtcataatgtagc

SEQ ID NO: 109281 - DNA, 20 bp, Artificial Sequence
  Description of Artificial Sequence: Synthetic oligonucleotide
  Target: LAMA2; (-) strand; PAM type: NRG; PAM sequence: TAG
atcagagaaatgtcataatg

SEQ ID NO: 109282 - DNA, 20 bp, Artificial Sequence
  Description of Artificial Sequence: Synthetic oligonucleotide
  Target: LAMA2; (-) strand; PAM type: NRG; PAM sequence: GAG
ccgtaattggccacaaatca

SEQ ID NO: 109283 - DNA, 20 bp, Artificial Sequence
  Description of Artificial Sequence: Synthetic oligonucleotide
  Target: LAMA2; (-) strand; PAM type: NRG; PAM sequence: CAG
ctccgtaattggccacaaat

SEQ ID NO: 109284 - DNA, 20 bp, Artificial Sequence
  Description of Artificial Sequence: Synthetic oligonucleotide
  Target: LAMA2; (-) strand; PAM type: NRG; PAM sequence: TGG
cattttataacctccgtaat

SEQ ID NO: 109285 - DNA, 20 bp, Artificial Sequence
  Description of Artificial Sequence: Synthetic oligonucleotide
  Target: LAMA2; (-) strand; PAM type: NRG; PAM sequence: CAG
tatggcatttccctgattaa

SEQ ID NO: 109286 - DNA, 20 bp, Artificial Sequence
  Description of Artificial Sequence: Synthetic oligonucleotide
  Target: LAMA2; (-) strand; PAM type: NRG; PAM sequence: TGG
cagttcctggtagtaatata

SEQ ID NO: 109287 - DNA, 20 bp, Artificial Sequence
  Description of Artificial Sequence: Synthetic oligonucleotide
  Target: LAMA2; (-) strand; PAM type: NRG; PAM sequence: TAG
cctatttcagcagttcctgg

SEQ ID NO: 109288 - DNA, 20 bp, Artificial Sequence
  Description of Artificial Sequence: Synthetic oligonucleotide
  Target: LAMA2; (-) strand; PAM type: NRG; PAM sequence: TGG
gggcctatttcagcagttcc

SEQ ID NO: 109289 - DNA, 20 bp, Artificial Sequence
  Description of Artificial Sequence: Synthetic oligonucleotide
  Target: LAMA2; (-) strand; PAM type: NRG; PAM sequence: CAG
ctctgtagggcctatttcag

SEQ ID NO: 109290 - DNA, 20 bp, Artificial Sequence
  Description of Artificial Sequence: Synthetic oligonucleotide
  Target: LAMA2; (-) strand; PAM type: NRG; PAM sequence: CAG
ttgctctgtagggcctattt

SEQ ID NO: 109291 - DNA, 20 bp, Artificial Sequence
  Description of Artificial Sequence: Synthetic oligonucleotide
  Target: LAMA2; (-) strand; PAM type: NRG; PAM sequence: GGG
gtcaagagttttgctctgta

SEQ ID NO: 109292 - DNA, 20 bp, Artificial Sequence
  Description of Artificial Sequence: Synthetic oligonucleotide
  Target: LAMA2; (-) strand; PAM type: NRG; PAM sequence: AGG
tgtcaagagttttgctctgt

SEQ ID NO: 109293 - DNA, 20 bp, Artificial Sequence
  Description of Artificial Sequence: Synthetic oligonucleotide
  Target: LAMA2; (-) strand; PAM type: NRG; PAM sequence: TAG
ctgtcaagagttttgctctg

SEQ ID NO: 109294 - DNA, 20 bp, Artificial Sequence
  Description of Artificial Sequence: Synthetic oligonucleotide
  Target: LAMA2; (-) strand; PAM type: NRG; PAM sequence: GAG
attttaatagctgctgtcaa

SEQ ID NO: 109295 - DNA, 20 bp, Artificial Sequence
  Description of Artificial Sequence: Synthetic oligonucleotide
  Target: LAMA2; (-) strand; PAM type: NRG; PAM sequence: AAG
ctattttaatagctgctgtc

SEQ ID NO: 109296 - DNA, 20 bp, Artificial Sequence
  Description of Artificial Sequence: Synthetic oligonucleotide
  Target: LAMA2; (-) strand; PAM type: NRG; PAM sequence: TAG
tgactaaatctctattttaa

SEQ ID NO: 109297 - DNA, 20 bp, Artificial Sequence
  Description of Artificial Sequence: Synthetic oligonucleotide
  Target: LAMA2; (-) strand; PAM type: NRG; PAM sequence: GAG
aactccaggcaccatagaga

SEQ ID NO: 109298 - DNA, 20 bp, Artificial Sequence
  Description of Artificial Sequence: Synthetic oligonucleotide
  Target: LAMA2; (-) strand; PAM type: NRG; PAM sequence: GAG
ctaactccaggcaccataga

SEQ ID NO: 109299 - DNA, 20 bp, Artificial Sequence
  Description of Artificial Sequence: Synthetic oligonucleotide
  Target: LAMA2; (-) strand; PAM type: NRG; PAM sequence: GAG
ttctaactccaggcaccata

SEQ ID NO: 109300 - DNA, 20 bp, Artificial Sequence
  Description of Artificial Sequence: Synthetic oligonucleotide
  Target: LAMA2; (-) strand; PAM type: NRG; PAM sequence: TAG
ccttctaactccaggcacca

SEQ ID NO: 109301 - DNA, 20 bp, Artificial Sequence
  Description of Artificial Sequence: Synthetic oligonucleotide
  Target: LAMA2; (-) strand; PAM type: NRG; PAM sequence: AGG
tttttattccttctaactcc

SEQ ID NO: 109302 - DNA, 20 bp, Artificial Sequence
  Description of Artificial Sequence: Synthetic oligonucleotide
  Target: LAMA2; (-) strand; PAM type: NRG; PAM sequence: CAG
atttttattccttctaactc

SEQ ID NO: 109303 - DNA, 20 bp, Artificial Sequence
  Description of Artificial Sequence: Synthetic oligonucleotide
  Target: LAMA2; (-) strand; PAM type: NRG; PAM sequence: TGG
tagaaatatggagggtatac

SEQ ID NO: 109304 - DNA, 20 bp, Artificial Sequence
  Description of Artificial Sequence: Synthetic oligonucleotide
  Target: LAMA2; (-) strand; PAM type: NRG; PAM sequence: GGG
caacaaattagaaatatgga

SEQ ID NO: 109305 - DNA, 20 bp, Artificial Sequence
  Description of Artificial Sequence: Synthetic oligonucleotide
  Target: LAMA2; (-) strand; PAM type: NRG; PAM sequence: AGG
gcaacaaattagaaatatgg

SEQ ID NO: 109306 - DNA, 20 bp, Artificial Sequence
  Description of Artificial Sequence: Synthetic oligonucleotide
  Target: LAMA2; (-) strand; PAM type: NRG; PAM sequence: GAG
agcaacaaattagaaatatg

SEQ ID NO: 109307 - DNA, 20 bp, Artificial Sequence
  Description of Artificial Sequence: Synthetic oligonucleotide
  Target: LAMA2; (-) strand; PAM type: NRG; PAM sequence: TGG
caagcaacaaattagaaata

SEQ ID NO: 109308 - DNA, 20 bp, Artificial Sequence
  Description of Artificial Sequence: Synthetic oligonucleotide
  Target: LAMA2; (-) strand; PAM type: NRG; PAM sequence: TAG
aattgaaccaagcaacaaat

SEQ ID NO: 109309 - DNA, 20 bp, Artificial Sequence
  Description of Artificial Sequence: Synthetic oligonucleotide
  Target: LAMA2; (-) strand; PAM type: NRG; PAM sequence: AAG
gaactgtactgaattgaacc

SEQ ID NO: 109310 - DNA, 20 bp, Artificial Sequence
  Description of Artificial Sequence: Synthetic oligonucleotide
  Target: LAMA2; (-) strand; PAM type: NRG; PAM sequence: AAG
tactaagtcattcatgactg

SEQ ID NO: 109311 - DNA, 20 bp, Artificial Sequence
  Description of Artificial Sequence: Synthetic oligonucleotide
  Target: LAMA2; (-) strand; PAM type: NRG; PAM sequence: AAG
aaatggcagggagcagtact

SEQ ID NO: 109312 - DNA, 20 bp, Artificial Sequence
  Description of Artificial Sequence: Synthetic oligonucleotide
  Target: LAMA2; (-) strand; PAM type: NRG; PAM sequence: CAG
agcataaaaatggcagggag

SEQ ID NO: 109313 - DNA, 20 bp, Artificial Sequence
  Description of Artificial Sequence: Synthetic oligonucleotide
  Target: LAMA2; (-) strand; PAM type: NRG; PAM sequence: GAG
gacagcataaaaatggcagg

SEQ ID NO: 109314 - DNA, 20 bp, Artificial Sequence
  Description of Artificial Sequence: Synthetic oligonucleotide
  Target: LAMA2; (-) strand; PAM type: NRG; PAM sequence: GGG
aggacagcataaaaatggca

SEQ ID NO: 109315 - DNA, 20 bp, Artificial Sequence
  Description of Artificial Sequence: Synthetic oligonucleotide
  Target: LAMA2; (-) strand; PAM type: NRG; PAM sequence: AGG
aaggacagcataaaaatggc

SEQ ID NO: 109316 - DNA, 20 bp, Artificial Sequence
  Description of Artificial Sequence: Synthetic oligonucleotide
  Target: LAMA2; (-) strand; PAM type: NRG; PAM sequence: CAG
caaggacagcataaaaatgg

SEQ ID NO: 109317 - DNA, 20 bp, Artificial Sequence
  Description of Artificial Sequence: Synthetic oligonucleotide
  Target: LAMA2; (-) strand; PAM type: NRG; PAM sequence: TGG
aggcaaggacagcataaaaa

SEQ ID NO: 109318 - DNA, 20 bp, Artificial Sequence
  Description of Artificial Sequence: Synthetic oligonucleotide
  Target: LAMA2; (-) strand; PAM type: NRG; PAM sequence: CAG
agattccctcaaggcaagga

SEQ ID NO: 109319 - DNA, 20 bp, Artificial Sequence
  Description of Artificial Sequence: Synthetic oligonucleotide
  Target: LAMA2; (-) strand; PAM type: NRG; PAM sequence: AGG
gttcagattccctcaaggca

SEQ ID NO: 109320 - DNA, 20 bp, Artificial Sequence
  Description of Artificial Sequence: Synthetic oligonucleotide
  Target: LAMA2; (-) strand; PAM type: NRG; PAM sequence: AAG
agttcagattccctcaaggc

SEQ ID NO: 109321 - DNA, 20 bp, Artificial Sequence
  Description of Artificial Sequence: Synthetic oligonucleotide
  Target: LAMA2; (-) strand; PAM type: NRG; PAM sequence: AGG
ggcaagttcagattccctca

SEQ ID NO: 109322 - DNA, 20 bp, Artificial Sequence
  Description of Artificial Sequence: Synthetic oligonucleotide
  Target: LAMA2; (-) strand; PAM type: NRG; PAM sequence: AAG
cggcaagttcagattccctc

SEQ ID NO: 109323 - DNA, 20 bp, Artificial Sequence
  Description of Artificial Sequence: Synthetic oligonucleotide
  Target: LAMA2; (-) strand; PAM type: NRG; PAM sequence: CAG
caaattgctcccggcaagtt

SEQ ID NO: 109324 - DNA, 20 bp, Artificial Sequence
  Description of Artificial Sequence: Synthetic oligonucleotide
  Target: LAMA2; (-) strand; PAM type: NRG; PAM sequence: AAG
caaaacaaattgctcccggc

SEQ ID NO: 109325 - DNA, 20 bp, Artificial Sequence
  Description of Artificial Sequence: Synthetic oligonucleotide
  Target: LAMA2; (-) strand; PAM type: NRG; PAM sequence: CGG
aaagcaaaacaaattgctcc

SEQ ID NO: 109326 - DNA, 20 bp, Artificial Sequence
  Description of Artificial Sequence: Synthetic oligonucleotide
  Target: LAMA2; (-) strand; PAM type: NRG; PAM sequence: AAG
atgtatattcaaaaattaaa

SEQ ID NO: 109327 - DNA, 20 bp, Artificial Sequence
  Description of Artificial Sequence: Synthetic oligonucleotide
  Target: LAMA2; (-) strand; PAM type: NRG; PAM sequence: CAG
aagggcaaatttacttttaa

SEQ ID NO: 109328 - DNA, 20 bp, Artificial Sequence
  Description of Artificial Sequence: Synthetic oligonucleotide
  Target: LAMA2; (-) strand; PAM type: NRG; PAM sequence: GGG
caaatctcaaactcacacaa

SEQ ID NO: 109329 - DNA, 20 bp, Artificial Sequence
  Description of Artificial Sequence: Synthetic oligonucleotide
  Target: LAMA2; (-) strand; PAM type: NRG; PAM sequence: AGG
tcaaatctcaaactcacaca

SEQ ID NO: 109330 - DNA, 20 bp, Artificial Sequence
  Description of Artificial Sequence: Synthetic oligonucleotide
  Target: LAMA2; (-) strand; PAM type: NRG; PAM sequence: AAG
ttcaaatctcaaactcacac

SEQ ID NO: 109331 - DNA, 20 bp, Artificial Sequence
  Description of Artificial Sequence: Synthetic oligonucleotide
  Target: LAMA2; (-) strand; PAM type: NRG; PAM sequence: AGG
tcgatcagtgcaatgtagac

SEQ ID NO: 109332 - DNA, 20 bp, Artificial Sequence
  Description of Artificial Sequence: Synthetic oligonucleotide
  Target: LAMA2; (-) strand; PAM type: NRG; PAM sequence: CAG
ttcgatcagtgcaatgtaga

SEQ ID NO: 109333 - DNA, 20 bp, Artificial Sequence
  Description of Artificial Sequence: Synthetic oligonucleotide
  Target: LAMA2; (-) strand; PAM type: NRG; PAM sequence: TAG
aacattcgatcagtgcaatg

SEQ ID NO: 109334 - DNA, 20 bp, Artificial Sequence
  Description of Artificial Sequence: Synthetic oligonucleotide
  Target: LAMA2; (-) strand; PAM type: NRG; PAM sequence: CAG
tatctccacaaacattcgat

SEQ ID NO: 109335 - DNA, 20 bp, Artificial Sequence
  Description of Artificial Sequence: Synthetic oligonucleotide
  Target: LAMA2; (-) strand; PAM type: NRG; PAM sequence: AAG
ttcagtcatcaatttgtacc

SEQ ID NO: 109336 - DNA, 20 bp, Artificial Sequence
  Description of Artificial Sequence: Synthetic oligonucleotide
  Target: LAMA2; (-) strand; PAM type: NRG; PAM sequence: CAG
aattcatcttttcactcttt

SEQ ID NO: 109337 - DNA, 20 bp, Artificial Sequence
  Description of Artificial Sequence: Synthetic oligonucleotide
  Target: LAMA2; (-) strand; PAM type: NRG; PAM sequence: TGG
agcagtgttcattcacctgg

SEQ ID NO: 109338 - DNA, 20 bp, Artificial Sequence
  Description of Artificial Sequence: Synthetic oligonucleotide
  Target: LAMA2; (-) strand; PAM type: NRG; PAM sequence: TGG
caaagcagtgttcattcacc

SEQ ID NO: 109339 - DNA, 20 bp, Artificial Sequence
  Description of Artificial Sequence: Synthetic oligonucleotide
  Target: LAMA2; (-) strand; PAM type: NRG; PAM sequence: CAG
tttcttgtctatctgcaaag

SEQ ID NO: 109340 - DNA, 20 bp, Artificial Sequence
  Description of Artificial Sequence: Synthetic oligonucleotide
  Target: LAMA2; (-) strand; PAM type: NRG; PAM sequence: AAG
aaatttcttgtctatctgca

SEQ ID NO: 109341 - DNA, 20 bp, Artificial Sequence
  Description of Artificial Sequence: Synthetic oligonucleotide
  Target: LAMA2; (-) strand; PAM type: NRG; PAM sequence: CGG
agggcatgagccactgcgcc

SEQ ID NO: 109342 - DNA, 20 bp, Artificial Sequence
  Description of Artificial Sequence: Synthetic oligonucleotide
  Target: LAMA2; (-) strand; PAM type: NRG; PAM sequence: GAG
atgctggaattacagggcat

SEQ ID NO: 109343 - DNA, 20 bp, Artificial Sequence
  Description of Artificial Sequence: Synthetic oligonucleotide
  Target: LAMA2; (-) strand; PAM type: NRG; PAM sequence: GGG
cccaaaatgctggaattaca

SEQ ID NO: 109344 - DNA, 20 bp, Artificial Sequence
  Description of Artificial Sequence: Synthetic oligonucleotide
  Target: LAMA2; (-) strand; PAM type: NRG; PAM sequence: AGG
tcccaaaatgctggaattac

SEQ ID NO: 109345 - DNA, 20 bp, Artificial Sequence
  Description of Artificial Sequence: Synthetic oligonucleotide
  Target: LAMA2; (-) strand; PAM type: NRG; PAM sequence: CAG
ctcccaaaatgctggaatta

SEQ ID NO: 109346 - DNA, 20 bp, Artificial Sequence
  Description of Artificial Sequence: Synthetic oligonucleotide
  Target: LAMA2; (-) strand; PAM type: NRG; PAM sequence: TGG
gcctcggcctcccaaaatgc

SEQ ID NO: 109347 - DNA, 20 bp, Artificial Sequence
  Description of Artificial Sequence: Synthetic oligonucleotide
  Target: LAMA2; (-) strand; PAM type: NRG; PAM sequence: CGG
tcccacttctctgcctgcct

SEQ ID NO: 109348 - DNA, 20 bp, Artificial Sequence
  Description of Artificial Sequence: Synthetic oligonucleotide
  Target: LAMA2; (-) strand; PAM type: NRG; PAM sequence: AAG
aacctctgcctcctgggctc

SEQ ID NO: 109349 - DNA, 20 bp, Artificial Sequence
  Description of Artificial Sequence: Synthetic oligonucleotide
  Target: LAMA2; (-) strand; PAM type: NRG; PAM sequence: GGG
cactgcaacctctgcctcct

SEQ ID NO: 109350 - DNA, 20 bp, Artificial Sequence
  Description of Artificial Sequence: Synthetic oligonucleotide
  Target: LAMA2; (-) strand; PAM type: NRG; PAM sequence: TGG
tcactgcaacctctgcctcc

SEQ ID NO: 109351 - DNA, 20 bp, Artificial Sequence
  Description of Artificial Sequence: Synthetic oligonucleotide
  Target: LAMA2; (-) strand; PAM type: NRG; PAM sequence: TGG
agagtgcaatggagcgatct

SEQ ID NO: 109352 - DNA, 20 bp, Artificial Sequence
  Description of Artificial Sequence: Synthetic oligonucleotide
  Target: LAMA2; (-) strand; PAM type: NRG; PAM sequence: GAG
acccaggctagagtgcaatg

SEQ ID NO: 109353 - DNA, 20 bp, Artificial Sequence
  Description of Artificial Sequence: Synthetic oligonucleotide
  Target: LAMA2; (-) strand; PAM type: NRG; PAM sequence: TGG
tcacccaggctagagtgcaa

SEQ ID NO: 109354 - DNA, 20 bp, Artificial Sequence
  Description of Artificial Sequence: Synthetic oligonucleotide
  Target: LAMA2; (-) strand; PAM type: NRG; PAM sequence: GAG
tcactctgtcacccaggcta

SEQ ID NO: 109355 - DNA, 20 bp, Artificial Sequence
  Description of Artificial Sequence: Synthetic oligonucleotide
  Target: LAMA2; (-) strand; PAM type: NRG; PAM sequence: TAG
tctcactctgtcacccaggc

SEQ ID NO: 109356 - DNA, 20 bp, Artificial Sequence
  Description of Artificial Sequence: Synthetic oligonucleotide
  Target: LAMA2; (-) strand; PAM type: NRG; PAM sequence: AGG
aggctctcactctgtcaccc

SEQ ID NO: 109357 - DNA, 20 bp, Artificial Sequence
  Description of Artificial Sequence: Synthetic oligonucleotide
  Target: LAMA2; (-) strand; PAM type: NRG; PAM sequence: CAG
caggctctcactctgtcacc

SEQ ID NO: 109358 - DNA, 20 bp, Artificial Sequence
  Description of Artificial Sequence: Synthetic oligonucleotide
  Target: LAMA2; (-) strand; PAM type: NRG; PAM sequence: AGG
aattaattattatttgagac

SEQ ID NO: 109359 - DNA, 20 bp, Artificial Sequence
  Description of Artificial Sequence: Synthetic oligonucleotide
  Target: LAMA2; (-) strand; PAM type: NRG; PAM sequence: CAG
taattaattattatttgaga

SEQ ID NO: 109360 - DNA, 20 bp, Artificial Sequence
  Description of Artificial Sequence: Synthetic oligonucleotide
  Target: LAMA2; (-) strand; PAM type: NRG; PAM sequence: GAG
taattaattaattattattt

SEQ ID NO: 109361 - DNA, 20 bp, Artificial Sequence
  Description of Artificial Sequence: Synthetic oligonucleotide
  Target: LAMA2; (-) strand; PAM type: NRG; PAM sequence: TGG
attccatgagaaaatgaagt

SEQ ID NO: 109362 - DNA, 20 bp, Artificial Sequence
  Description of Artificial Sequence: Synthetic oligonucleotide
  Target: LAMA2; (-) strand; PAM type: NRG; PAM sequence: AAG
acacattccatgagaaaatg

SEQ ID NO: 109363 - DNA, 20 bp, Artificial Sequence
  Description of Artificial Sequence: Synthetic oligonucleotide
  Target: LAMA2; (-) strand; PAM type: NRG; PAM sequence: GAG
ttgcctcgtacacattccat

SEQ ID NO: 109364 - DNA, 20 bp, Artificial Sequence
  Description of Artificial Sequence: Synthetic oligonucleotide
  Target: LAMA2; (-) strand; PAM type: NRG; PAM sequence: AGG
ctcaaacttttaataaacca

SEQ ID NO: 109365 - DNA, 20 bp, Artificial Sequence
  Description of Artificial Sequence: Synthetic oligonucleotide
  Target: LAMA2; (-) strand; PAM type: NRG; PAM sequence: AAG
tctcaaacttttaataaacc

SEQ ID NO: 109366 - DNA, 20 bp, Artificial Sequence
  Description of Artificial Sequence: Synthetic oligonucleotide
  Target: LAMA2; (-) strand; PAM type: NRG; PAM sequence: AAG
aaagttagtcaatataaggt

SEQ ID NO: 109367 - DNA, 20 bp, Artificial Sequence
  Description of Artificial Sequence: Synthetic oligonucleotide
  Target: LAMA2; (-) strand; PAM type: NRG; PAM sequence: AGG
ctgaaaagttagtcaatata

SEQ ID NO: 109368 - DNA, 20 bp, Artificial Sequence
  Description of Artificial Sequence: Synthetic oligonucleotide
  Target: LAMA2; (-) strand; PAM type: NRG; PAM sequence: AAG
actgaaaagttagtcaatat

SEQ ID NO: 109369 - DNA, 20 bp, Artificial Sequence
  Description of Artificial Sequence: Synthetic oligonucleotide
  Target: LAMA2; (-) strand; PAM type: NRG; PAM sequence: TAG
aggaaataaaactgaaaagt

SEQ ID NO: 109370 - DNA, 20 bp, Artificial Sequence
  Description of Artificial Sequence: Synthetic oligonucleotide
  Target: LAMA2; (-) strand; PAM type: NRG; PAM sequence: AAG
aagaaggaaataaaactgaa

SEQ ID NO: 109371 - DNA, 20 bp, Artificial Sequence
  Description of Artificial Sequence: Synthetic oligonucleotide
  Target: LAMA2; (-) strand; PAM type: NRG; PAM sequence: AGG
aaattggggataaattaaga

SEQ ID NO: 109372 - DNA, 20 bp, Artificial Sequence
  Description of Artificial Sequence: Synthetic oligonucleotide
  Target: LAMA2; (-) strand; PAM type: NRG; PAM sequence: AAG
aaaattggggataaattaag

SEQ ID NO: 109373 - DNA, 20 bp, Artificial Sequence
  Description of Artificial Sequence: Synthetic oligonucleotide
  Target: LAMA2; (-) strand; PAM type: NRG; PAM sequence: AAG
acaaaaattggggataaatt

SEQ ID NO: 109374 - DNA, 20 bp, Artificial Sequence
  Description of Artificial Sequence: Synthetic oligonucleotide
  Target: LAMA2; (-) strand; PAM type: NRG; PAM sequence: GGG
ttgggcaaagacaaaaattg

SEQ ID NO: 109375 - DNA, 20 bp, Artificial Sequence
  Description of Artificial Sequence: Synthetic oligonucleotide
  Target: LAMA2; (-) strand; PAM type: NRG; PAM sequence: GGG
cttgggcaaagacaaaaatt

SEQ ID NO: 109376 - DNA, 20 bp, Artificial Sequence
  Description of Artificial Sequence: Synthetic oligonucleotide
  Target: LAMA2; (-) strand; PAM type: NRG; PAM sequence: TGG
tcttgggcaaagacaaaaat

SEQ ID NO: 109377 - DNA, 20 bp, Artificial Sequence
  Description of Artificial Sequence: Synthetic oligonucleotide
  Target: LAMA2; (-) strand; PAM type: NRG; PAM sequence: AAG
aatttcatttatcttgggca

SEQ ID NO: 109378 - DNA, 20 bp, Artificial Sequence
  Description of Artificial Sequence: Synthetic oligonucleotide
  Target: LAMA2; (-) strand; PAM type: NRG; PAM sequence: GGG
taaataatttcatttatctt

SEQ ID NO: 109379 - DNA, 20 bp, Artificial Sequence
  Description of Artificial Sequence: Synthetic oligonucleotide
  Target: LAMA2; (-) strand; PAM type: NRG; PAM sequence: TGG
ttaaataatttcatttatct

SEQ ID NO: 109380 - DNA, 20 bp, Artificial Sequence
  Description of Artificial Sequence: Synthetic oligonucleotide
  Target: LAMA2; (-) strand; PAM type: NRG; PAM sequence: AAG
atgttacctattatttttct

SEQ ID NO: 109381 - DNA, 20 bp, Artificial Sequence
  Description of Artificial Sequence: Synthetic oligonucleotide
  Target: LAMA2; (-) strand; PAM type: NRG; PAM sequence: TGG
caggtgcgagccaccgcacc

SEQ ID NO: 109382 - DNA, 20 bp, Artificial Sequence
  Description of Artificial Sequence: Synthetic oligonucleotide
  Target: LAMA2; (-) strand; PAM type: NRG; PAM sequence: GAG
agtgttaggattacaggtgc

SEQ ID NO: 109383 - DNA, 20 bp, Artificial Sequence
  Description of Artificial Sequence: Synthetic oligonucleotide
  Target: LAMA2; (-) strand; PAM type: NRG; PAM sequence: AGG
tcccgaagtgttaggattac

SEQ ID NO: 109384 - DNA, 20 bp, Artificial Sequence
  Description of Artificial Sequence: Synthetic oligonucleotide
  Target: LAMA2; (-) strand; PAM type: NRG; PAM sequence: CAG
ctcccgaagtgttaggatta

SEQ ID NO: 109385 - DNA, 20 bp, Artificial Sequence
  Description of Artificial Sequence: Synthetic oligonucleotide
  Target: LAMA2; (-) strand; PAM type: NRG; PAM sequence: AGG
cctcggtctcccgaagtgtt

SEQ ID NO: 109386 - DNA, 20 bp, Artificial Sequence
  Description of Artificial Sequence: Synthetic oligonucleotide
  Target: LAMA2; (-) strand; PAM type: NRG; PAM sequence: TAG
acctcggtctcccgaagtgt

SEQ ID NO: 109387 - DNA, 20 bp, Artificial Sequence
  Description of Artificial Sequence: Synthetic oligonucleotide
  Target: LAMA2; (-) strand; PAM type: NRG; PAM sequence: AAG
ctgcccacctcggtctcccg

SEQ ID NO: 109388 - DNA, 20 bp, Artificial Sequence
  Description of Artificial Sequence: Synthetic oligonucleotide
  Target: LAMA2; (-) strand; PAM type: NRG; PAM sequence: CGG
ctcaggtgatctgcccacct

SEQ ID NO: 109389 - DNA, 20 bp, Artificial Sequence
  Description of Artificial Sequence: Synthetic oligonucleotide
  Target: LAMA2; (-) strand; PAM type: NRG; PAM sequence: AGG
ggtctcaaactccttacctc

SEQ ID NO: 109390 - DNA, 20 bp, Artificial Sequence
  Description of Artificial Sequence: Synthetic oligonucleotide
  Target: LAMA2; (-) strand; PAM type: NRG; PAM sequence: CAG
tggtctcaaactccttacct

SEQ ID NO: 109391 - DNA, 20 bp, Artificial Sequence
  Description of Artificial Sequence: Synthetic oligonucleotide
  Target: LAMA2; (-) strand; PAM type: NRG; PAM sequence: TGG
tttcaccacgctggccatgc

SEQ ID NO: 109392 - DNA, 20 bp, Artificial Sequence
  Description of Artificial Sequence: Synthetic oligonucleotide
  Target: LAMA2; (-) strand; PAM type: NRG; PAM sequence: TGG
gagacagggtttcaccacgc

SEQ ID NO: 109393 - DNA, 20 bp, Artificial Sequence
  Description of Artificial Sequence: Synthetic oligonucleotide
  Target: LAMA2; (-) strand; PAM type: NRG; PAM sequence: GGG
ttgcgtttttagtagagaca

SEQ ID NO: 109394 - DNA, 20 bp, Artificial Sequence
  Description of Artificial Sequence: Synthetic oligonucleotide
  Target: LAMA2; (-) strand; PAM type: NRG; PAM sequence: AGG
tttgcgtttttagtagagac

SEQ ID NO: 109395 - DNA, 20 bp, Artificial Sequence
  Description of Artificial Sequence: Synthetic oligonucleotide
  Target: LAMA2; (-) strand; PAM type: NRG; PAM sequence: CAG
ttttgcgtttttagtagaga

SEQ ID NO: 109396 - DNA, 20 bp, Artificial Sequence
  Description of Artificial Sequence: Synthetic oligonucleotide
  Target: LAMA2; (-) strand; PAM type: NRG; PAM sequence: GAG
taatttttgcgtttttagta

SEQ ID NO: 109397 - DNA, 20 bp, Artificial Sequence
  Description of Artificial Sequence: Synthetic oligonucleotide
  Target: LAMA2; (-) strand; PAM type: NRG; PAM sequence: TAG
gctaatttttgcgtttttag

SEQ ID NO: 109398 - DNA, 20 bp, Artificial Sequence
  Description of Artificial Sequence: Synthetic oligonucleotide
  Target: LAMA2; (-) strand; PAM type: NRG; PAM sequence: TAG
ccagctaatttttgcgtttt

SEQ ID NO: 109399 - DNA, 20 bp, Artificial Sequence
  Description of Artificial Sequence: Synthetic oligonucleotide
  Target: LAMA2; (-) strand; PAM type: NRG; PAM sequence: CAG
caggcacccaccaccatgcc

SEQ ID NO: 109400 - DNA, 20 bp, Artificial Sequence
  Description of Artificial Sequence: Synthetic oligonucleotide
  Target: LAMA2; (-) strand; PAM type: NRG; PAM sequence: AGG
tcctgagtagctgggattac

SEQ ID NO: 109401 - DNA, 20 bp, Artificial Sequence
  Description of Artificial Sequence: Synthetic oligonucleotide
  Target: LAMA2; (-) strand; PAM type: NRG; PAM sequence: CAG
ctcctgagtagctgggatta

SEQ ID NO: 109402 - DNA, 20 bp, Artificial Sequence
  Description of Artificial Sequence: Synthetic oligonucleotide
  Target: LAMA2; (-) strand; PAM type: NRG; PAM sequence: GGG
cctcagcctcctgagtagct

SEQ ID NO: 109403 - DNA, 20 bp, Artificial Sequence
  Description of Artificial Sequence: Synthetic oligonucleotide
  Target: LAMA2; (-) strand; PAM type: NRG; PAM sequence: TGG
acctcagcctcctgagtagc

SEQ ID NO: 109404 - DNA, 20 bp, Artificial Sequence
  Description of Artificial Sequence: Synthetic oligonucleotide
  Target: LAMA2; (-) strand; PAM type: NRG; PAM sequence: TAG
tcctacctcagcctcctgag

SEQ ID NO: 109405 - DNA, 20 bp, Artificial Sequence
  Description of Artificial Sequence: Synthetic oligonucleotide
  Target: LAMA2; (-) strand; PAM type: NRG; PAM sequence: GAG
ttctcctacctcagcctcct

SEQ ID NO: 109406 - DNA, 20 bp, Artificial Sequence
  Description of Artificial Sequence: Synthetic oligonucleotide
  Target: LAMA2; (-) strand; PAM type: NRG; PAM sequence: CAG
ttccagcaattctcctacct

SEQ ID NO: 109407 - DNA, 20 bp, Artificial Sequence
  Description of Artificial Sequence: Synthetic oligonucleotide
  Target: LAMA2; (-) strand; PAM type: NRG; PAM sequence: CAG
aacctccgtatcctgggttc

SEQ ID NO: 109408 - DNA, 20 bp, Artificial Sequence
  Description of Artificial Sequence: Synthetic oligonucleotide
  Target: LAMA2; (-) strand; PAM type: NRG; PAM sequence: GGG
cactgtaacctccgtatcct

SEQ ID NO: 109409 - DNA, 20 bp, Artificial Sequence
  Description of Artificial Sequence: Synthetic oligonucleotide
  Target: LAMA2; (-) strand; PAM type: NRG; PAM sequence: TGG
tcactgtaacctccgtatcc

SEQ ID NO: 109410 - DNA, 20 bp, Artificial Sequence
  Description of Artificial Sequence: Synthetic oligonucleotide
  Target: LAMA2; (-) strand; PAM type: NRG; PAM sequence: CAG
gaagtgcagtggcgcaatct

SEQ ID NO: 109411 - DNA, 20 bp, Artificial Sequence
  Description of Artificial Sequence: Synthetic oligonucleotide
  Target: LAMA2; (-) strand; PAM type: NRG; PAM sequence: TGG
ttgcccaggctgaagtgcag

SEQ ID NO: 109412 - DNA, 20 bp, Artificial Sequence
  Description of Artificial Sequence: Synthetic oligonucleotide
  Target: LAMA2; (-) strand; PAM type: NRG; PAM sequence: CAG
ctgttgcccaggctgaagtg

SEQ ID NO: 109413 - DNA, 20 bp, Artificial Sequence
  Description of Artificial Sequence: Synthetic oligonucleotide
  Target: LAMA2; (-) strand; PAM type: NRG; PAM sequence: AAG
tcactctgttgcccaggctg

SEQ ID NO: 109414 - DNA, 20 bp, Artificial Sequence
  Description of Artificial Sequence: Synthetic oligonucleotide
  Target: LAMA2; (-) strand; PAM type: NRG; PAM sequence: AGG
agagtctcactctgttgccc

SEQ ID NO: 109415 - DNA, 20 bp, Artificial Sequence
  Description of Artificial Sequence: Synthetic oligonucleotide
  Target: LAMA2; (-) strand; PAM type: NRG; PAM sequence: CAG
tagagtctcactctgttgcc

SEQ ID NO: 109416 - DNA, 20 bp, Artificial Sequence
  Description of Artificial Sequence: Synthetic oligonucleotide
  Target: LAMA2; (-) strand; PAM type: NRG; PAM sequence: GAG
tttttttttttttttagata

SEQ ID NO: 109417 - DNA, 20 bp, Artificial Sequence
  Description of Artificial Sequence: Synthetic oligonucleotide
  Target: LAMA2; (-) strand; PAM type: NRG; PAM sequence: TAG
tttttttttttttttttaga

SEQ ID NO: 109418 - DNA, 20 bp, Artificial Sequence
  Description of Artificial Sequence: Synthetic oligonucleotide
  Target: LAMA2; (-) strand; PAM type: NRG; PAM sequence: TAG
tagttttttttttttttttt

SEQ ID NO: 109419 - DNA, 20 bp, Artificial Sequence
  Description of Artificial Sequence: Synthetic oligonucleotide
  Target: LAMA2; (-) strand; PAM type: NRG; PAM sequence: TAG
tattttataggtatgttacc

SEQ ID NO: 109420 - DNA, 20 bp, Artificial Sequence
  Description of Artificial Sequence: Synthetic oligonucleotide
  Target: LAMA2; (-) strand; PAM type: NRG; PAM sequence: AGG
tcctgtgttatctattttat

SEQ ID NO: 109421 - DNA, 20 bp, Artificial Sequence
  Description of Artificial Sequence: Synthetic oligonucleotide
  Target: LAMA2; (-) strand; PAM type: NRG; PAM sequence: TAG
ttcctgtgttatctatttta

SEQ ID NO: 109422 - DNA, 20 bp, Artificial Sequence
  Description of Artificial Sequence: Synthetic oligonucleotide
  Target: LAMA2; (-) strand; PAM type: NRG; PAM sequence: AGG
gtcatagatctccagggaat

SEQ ID NO: 109423 - DNA, 20 bp, Artificial Sequence
  Description of Artificial Sequence: Synthetic oligonucleotide
  Target: LAMA2; (-) strand; PAM type: NRG; PAM sequence: TAG
tgtcatagatctccagggaa

SEQ ID NO: 109424 - DNA, 20 bp, Artificial Sequence
  Description of Artificial Sequence: Synthetic oligonucleotide
  Target: LAMA2; (-) strand; PAM type: NRG; PAM sequence: GGG
tgagctgtcatagatctcca

SEQ ID NO: 109425 - DNA, 20 bp, Artificial Sequence
  Description of Artificial Sequence: Synthetic oligonucleotide
  Target: LAMA2; (-) strand; PAM type: NRG; PAM sequence: AGG
atgagctgtcatagatctcc

SEQ ID NO: 109426 - DNA, 20 bp, Artificial Sequence
  Description of Artificial Sequence: Synthetic oligonucleotide
  Target: LAMA2; (-) strand; PAM type: NRG; PAM sequence: CAG
aatgagctgtcatagatctc

SEQ ID NO: 109427 - DNA, 20 bp, Artificial Sequence
  Description of Artificial Sequence: Synthetic oligonucleotide
  Target: LAMA2; (-) strand; PAM type: NRG; PAM sequence: TAG
tcctttaaaatgagctgtca

SEQ ID NO: 109428 - DNA, 20 bp, Artificial Sequence
  Description of Artificial Sequence: Synthetic oligonucleotide
  Target: LAMA2; (-) strand; PAM type: NRG; PAM sequence: GAG
caaaccgcctcctttaaaat

SEQ ID NO: 109429 - DNA, 20 bp, Artificial Sequence
  Description of Artificial Sequence: Synthetic oligonucleotide
  Target: LAMA2; (-) strand; PAM type: NRG; PAM sequence: GAG
accacaggctacagtgctat

SEQ ID NO: 109430 - DNA, 20 bp, Artificial Sequence
  Description of Artificial Sequence: Synthetic oligonucleotide
  Target: LAMA2; (-) strand; PAM type: NRG; PAM sequence: CAG
taattatataccacaggcta

SEQ ID NO: 109431 - DNA, 20 bp, Artificial Sequence
  Description of Artificial Sequence: Synthetic oligonucleotide
  Target: LAMA2; (-) strand; PAM type: NRG; PAM sequence: AGG
taactgtaattatataccac

SEQ ID NO: 109432 - DNA, 20 bp, Artificial Sequence
  Description of Artificial Sequence: Synthetic oligonucleotide
  Target: LAMA2; (-) strand; PAM type: NRG; PAM sequence: CAG
ttaactgtaattatatacca

SEQ ID NO: 109433 - DNA, 20 bp, Artificial Sequence
  Description of Artificial Sequence: Synthetic oligonucleotide
  Target: LAMA2; (-) strand; PAM type: NRG; PAM sequence: GGG
ccaacccctgcattggtcaa

SEQ ID NO: 109434 - DNA, 20 bp, Artificial Sequence
  Description of Artificial Sequence: Synthetic oligonucleotide
  Target: LAMA2; (-) strand; PAM type: NRG; PAM sequence: AGG
tccaacccctgcattggtca

SEQ ID NO: 109435 - DNA, 20 bp, Artificial Sequence
  Description of Artificial Sequence: Synthetic oligonucleotide
  Target: LAMA2; (-) strand; PAM type: NRG; PAM sequence: AAG
ctccaacccctgcattggtc

SEQ ID NO: 109436 - DNA, 20 bp, Artificial Sequence
  Description of Artificial Sequence: Synthetic oligonucleotide
  Target: LAMA2; (-) strand; PAM type: NRG; PAM sequence: TGG
atgctctccaacccctgcat

SEQ ID NO: 109437 - DNA, 20 bp, Artificial Sequence
  Description of Artificial Sequence: Synthetic oligonucleotide
  Target: LAMA2; (-) strand; PAM type: NRG; PAM sequence: GGG
atggattttcaactgtgcag

SEQ ID NO: 109438 - DNA, 20 bp, Artificial Sequence
  Description of Artificial Sequence: Synthetic oligonucleotide
  Target: LAMA2; (-) strand; PAM type: NRG; PAM sequence: GGG
catggattttcaactgtgca

SEQ ID NO: 109439 - DNA, 20 bp, Artificial Sequence
  Description of Artificial Sequence: Synthetic oligonucleotide
  Target: LAMA2; (-) strand; PAM type: NRG; PAM sequence: AGG
acatggattttcaactgtgc

SEQ ID NO: 109440 - DNA, 20 bp, Artificial Sequence
  Description of Artificial Sequence: Synthetic oligonucleotide
  Target: LAMA2; (-) strand; PAM type: NRG; PAM sequence: CAG
tacatggattttcaactgtg

SEQ ID NO: 109441 - DNA, 20 bp, Artificial Sequence
  Description of Artificial Sequence: Synthetic oligonucleotide
  Target: LAMA2; (-) strand; PAM type: NRG; PAM sequence: TGG
gaagagtctaatgttataca

SEQ ID NO: 109442 - DNA, 20 bp, Artificial Sequence
  Description of Artificial Sequence: Synthetic oligonucleotide
  Target: LAMA2; (-) strand; PAM type: NRG; PAM sequence: GAG
ttagttatgaagtttatgaa

SEQ ID NO: 109443 - DNA, 20 bp, Artificial Sequence
  Description of Artificial Sequence: Synthetic oligonucleotide
  Target: LAMA2; (-) strand; PAM type: NRG; PAM sequence: AAG
gtttagttatgaagtttatg

SEQ ID NO: 109444 - DNA, 20 bp, Artificial Sequence
  Description of Artificial Sequence: Synthetic oligonucleotide
  Target: LAMA2; (-) strand; PAM type: NRG; PAM sequence: AAG
tgttatgaagtttagttatg

SEQ ID NO: 109445 - DNA, 20 bp, Artificial Sequence
  Description of Artificial Sequence: Synthetic oligonucleotide
  Target: LAMA2; (-) strand; PAM type: NRG; PAM sequence: TAG
aaagtttatgttatgaagtt

SEQ ID NO: 109446 - DNA, 20 bp, Artificial Sequence
  Description of Artificial Sequence: Synthetic oligonucleotide
  Target: LAMA2; (-) strand; PAM type: NRG; PAM sequence: AAG
tttataaagtttatgttatg

SEQ ID NO: 109447 - DNA, 20 bp, Artificial Sequence
  Description of Artificial Sequence: Synthetic oligonucleotide
  Target: LAMA2; (-) strand; PAM type: NRG; PAM sequence: AAG
gattctttttttagtttata

SEQ ID NO: 109448 - DNA, 20 bp, Artificial Sequence
  Description of Artificial Sequence: Synthetic oligonucleotide
  Target: LAMA2; (-) strand; PAM type: NRG; PAM sequence: TAG
ttgggaatagattctttttt

SEQ ID NO: 109449 - DNA, 20 bp, Artificial Sequence
  Description of Artificial Sequence: Synthetic oligonucleotide
  Target: LAMA2; (-) strand; PAM type: NRG; PAM sequence: TAG
tcattatttgggcttgggaa

SEQ ID NO: 109450 - DNA, 20 bp, Artificial Sequence
  Description of Artificial Sequence: Synthetic oligonucleotide
  Target: LAMA2; (-) strand; PAM type: NRG; PAM sequence: GGG
ctgattcattatttgggctt

SEQ ID NO: 109451 - DNA, 20 bp, Artificial Sequence
  Description of Artificial Sequence: Synthetic oligonucleotide
  Target: LAMA2; (-) strand; PAM type: NRG; PAM sequence: TGG
actgattcattatttgggct

SEQ ID NO: 109452 - DNA, 20 bp, Artificial Sequence
  Description of Artificial Sequence: Synthetic oligonucleotide
  Target: LAMA2; (-) strand; PAM type: NRG; PAM sequence: GGG
aatgcactgattcattattt

SEQ ID NO: 109453 - DNA, 20 bp, Artificial Sequence
  Description of Artificial Sequence: Synthetic oligonucleotide
  Target: LAMA2; (-) strand; PAM type: NRG; PAM sequence: TGG
caatgcactgattcattatt

SEQ ID NO: 109454 - DNA, 20 bp, Artificial Sequence
  Description of Artificial Sequence: Synthetic oligonucleotide
  Target: LAMA2; (-) strand; PAM type: NRG; PAM sequence: AAG
gtgggacagcaccatatgtc

SEQ ID NO: 109455 - DNA, 20 bp, Artificial Sequence
  Description of Artificial Sequence: Synthetic oligonucleotide
  Target: LAMA2; (-) strand; PAM type: NRG; PAM sequence: CAG
atactgttctctgtgtggga

SEQ ID NO: 109456 - DNA, 20 bp, Artificial Sequence
  Description of Artificial Sequence: Synthetic oligonucleotide
  Target: LAMA2; (-) strand; PAM type: NRG; PAM sequence: GGG
tttcatactgttctctgtgt

SEQ ID NO: 109457 - DNA, 20 bp, Artificial Sequence
  Description of Artificial Sequence: Synthetic oligonucleotide
  Target: LAMA2; (-) strand; PAM type: NRG; PAM sequence: TGG
gtttcatactgttctctgtg

SEQ ID NO: 109458 - DNA, 20 bp, Artificial Sequence
  Description of Artificial Sequence: Synthetic oligonucleotide
  Target: LAMA2; (-) strand; PAM type: NRG; PAM sequence: TGG
gtttgataaaacttaatgat

SEQ ID NO: 109459 - DNA, 20 bp, Artificial Sequence
  Description of Artificial Sequence: Synthetic oligonucleotide
  Target: LAMA2; (-) strand; PAM type: NRG; PAM sequence: TGG
tatagaaggaaggcttcaac

SEQ ID NO: 109460 - DNA, 20 bp, Artificial Sequence
  Description of Artificial Sequence: Synthetic oligonucleotide
  Target: LAMA2; (-) strand; PAM type: NRG; PAM sequence: AGG
aggaccactgtatagaagga

SEQ ID NO: 109461 - DNA, 20 bp, Artificial Sequence
  Description of Artificial Sequence: Synthetic oligonucleotide
  Target: LAMA2; (-) strand; PAM type: NRG; PAM sequence: AAG
gaggaccactgtatagaagg

SEQ ID NO: 109462 - DNA, 20 bp, Artificial Sequence
  Description of Artificial Sequence: Synthetic oligonucleotide
  Target: LAMA2; (-) strand; PAM type: NRG; PAM sequence: AGG
ttggaggaccactgtataga

SEQ ID NO: 109463 - DNA, 20 bp, Artificial Sequence
  Description of Artificial Sequence: Synthetic oligonucleotide
  Target: LAMA2; (-) strand; PAM type: NRG; PAM sequence: AAG
tttggaggaccactgtatag

SEQ ID NO: 109464 - DNA, 20 bp, Artificial Sequence
  Description of Artificial Sequence: Synthetic oligonucleotide
  Target: LAMA2; (-) strand; PAM type: NRG; PAM sequence: TAG
gtgtttggaggaccactgta

SEQ ID NO: 109465 - DNA, 20 bp, Artificial Sequence
  Description of Artificial Sequence: Synthetic oligonucleotide
  Target: LAMA2; (-) strand; PAM type: NRG; PAM sequence: AGG
cggaatgactgagtgtttgg

SEQ ID NO: 109466 - DNA, 20 bp, Artificial Sequence
  Description of Artificial Sequence: Synthetic oligonucleotide
  Target: LAMA2; (-) strand; PAM type: NRG; PAM sequence: GAG
acggaatgactgagtgtttg

SEQ ID NO: 109467 - DNA, 20 bp, Artificial Sequence
  Description of Artificial Sequence: Synthetic oligonucleotide
  Target: LAMA2; (-) strand; PAM type: NRG; PAM sequence: TGG
gaacggaatgactgagtgtt

SEQ ID NO: 109468 - DNA, 20 bp, Artificial Sequence
  Description of Artificial Sequence: Synthetic oligonucleotide
  Target: LAMA2; (-) strand; PAM type: NRG; PAM sequence: GAG
cttgtctgaacggaatgact

SEQ ID NO: 109469 - DNA, 20 bp, Artificial Sequence
  Description of Artificial Sequence: Synthetic oligonucleotide
  Target: LAMA2; (-) strand; PAM type: NRG; PAM sequence: CGG
tcaagacccacttgtctgaa

SEQ ID NO: 109470 - DNA, 20 bp, Artificial Sequence
  Description of Artificial Sequence: Synthetic oligonucleotide
  Target: LAMA2; (-) strand; PAM type: NRG; PAM sequence: AAG
tccatgatctcagaatcttc

SEQ ID NO: 109471 - DNA, 20 bp, Artificial Sequence
  Description of Artificial Sequence: Synthetic oligonucleotide
  Target: LAMA2; (-) strand; PAM type: NRG; PAM sequence: CAG
gtgtattacatccatgatct

SEQ ID NO: 109472 - DNA, 20 bp, Artificial Sequence
  Description of Artificial Sequence: Synthetic oligonucleotide
  Target: LAMA2; (-) strand; PAM type: NRG; PAM sequence: AAG
ctcaacaggttagcgtttgc

SEQ ID NO: 109473 - DNA, 20 bp, Artificial Sequence
  Description of Artificial Sequence: Synthetic oligonucleotide
  Target: LAMA2; (-) strand; PAM type: NRG; PAM sequence: TAG
aacacagaatctcaacaggt

SEQ ID NO: 109474 - DNA, 20 bp, Artificial Sequence
  Description of Artificial Sequence: Synthetic oligonucleotide
  Target: LAMA2; (-) strand; PAM type: NRG; PAM sequence: AGG
taataacacagaatctcaac

SEQ ID NO: 109475 - DNA, 20 bp, Artificial Sequence
  Description of Artificial Sequence: Synthetic oligonucleotide
  Target: LAMA2; (-) strand; PAM type: NRG; PAM sequence: CAG
ataataacacagaatctcaa

SEQ ID NO: 109476 - DNA, 20 bp, Artificial Sequence
  Description of Artificial Sequence: Synthetic oligonucleotide
  Target: LAMA2; (-) strand; PAM type: NRG; PAM sequence: CAG
taaaatataaaataataaca

SEQ ID NO: 109477 - DNA, 20 bp, Artificial Sequence
  Description of Artificial Sequence: Synthetic oligonucleotide
  Target: LAMA2; (-) strand; PAM type: NRG; PAM sequence: CAG
ttagcagcactgcagtattc

SEQ ID NO: 109478 - DNA, 20 bp, Artificial Sequence
  Description of Artificial Sequence: Synthetic oligonucleotide
  Target: LAMA2; (-) strand; PAM type: NRG; PAM sequence: CAG
actttggtttagcagcactg

SEQ ID NO: 109479 - DNA, 20 bp, Artificial Sequence
  Description of Artificial Sequence: Synthetic oligonucleotide
  Target: LAMA2; (-) strand; PAM type: NRG; PAM sequence: CAG
tatatcatactttggtttag

SEQ ID NO: 109480 - DNA, 20 bp, Artificial Sequence
  Description of Artificial Sequence: Synthetic oligonucleotide
  Target: LAMA2; (-) strand; PAM type: NRG; PAM sequence: TAG
tcctatatcatactttggtt

SEQ ID NO: 109481 - DNA, 20 bp, Artificial Sequence
  Description of Artificial Sequence: Synthetic oligonucleotide
  Target: LAMA2; (-) strand; PAM type: NRG; PAM sequence: TGG
tgcactcctatatcatactt

SEQ ID NO: 109482 - DNA, 20 bp, Artificial Sequence
  Description of Artificial Sequence: Synthetic oligonucleotide
  Target: LAMA2; (-) strand; PAM type: NRG; PAM sequence: TAG
ttaataataaaaggatccct

SEQ ID NO: 109483 - DNA, 20 bp, Artificial Sequence
  Description of Artificial Sequence: Synthetic oligonucleotide
  Target: LAMA2; (-) strand; PAM type: NRG; PAM sequence: AGG
agtatatctttaataataaa

SEQ ID NO: 109484 - DNA, 20 bp, Artificial Sequence
  Description of Artificial Sequence: Synthetic oligonucleotide
  Target: LAMA2; (-) strand; PAM type: NRG; PAM sequence: AAG
gagtatatctttaataataa

SEQ ID NO: 109485 - DNA, 20 bp, Artificial Sequence
  Description of Artificial Sequence: Synthetic oligonucleotide
  Target: LAMA2; (-) strand; PAM type: NRG; PAM sequence: GAG
gtaatatgcaaattcaaaag

SEQ ID NO: 109486 - DNA, 20 bp, Artificial Sequence
  Description of Artificial Sequence: Synthetic oligonucleotide
  Target: LAMA2; (-) strand; PAM type: NRG; PAM sequence: AGG
gggtaatatgcaaattcaaa

SEQ ID NO: 109487 - DNA, 20 bp, Artificial Sequence
  Description of Artificial Sequence: Synthetic oligonucleotide
  Target: LAMA2; (-) strand; PAM type: NRG; PAM sequence: AAG
agggtaatatgcaaattcaa

SEQ ID NO: 109488 - DNA, 20 bp, Artificial Sequence
  Description of Artificial Sequence: Synthetic oligonucleotide
  Target: LAMA2; (-) strand; PAM type: NRG; PAM sequence: GGG
gaaaggctgattcaggcaaa

SEQ ID NO: 109489 - DNA, 20 bp, Artificial Sequence
  Description of Artificial Sequence: Synthetic oligonucleotide
  Target: LAMA2; (-) strand; PAM type: NRG; PAM sequence: AGG
ggaaaggctgattcaggcaa

SEQ ID NO: 109490 - DNA, 20 bp, Artificial Sequence
  Description of Artificial Sequence: Synthetic oligonucleotide
  Target: LAMA2; (-) strand; PAM type: NRG; PAM sequence: AAG
tggaaaggctgattcaggca

SEQ ID NO: 109491 - DNA, 20 bp, Artificial Sequence
  Description of Artificial Sequence: Synthetic oligonucleotide
  Target: LAMA2; (-) strand; PAM type: NRG; PAM sequence: AGG
tgctatggaaaggctgattc

SEQ ID NO: 109492 - DNA, 20 bp, Artificial Sequence
  Description of Artificial Sequence: Synthetic oligonucleotide
  Target: LAMA2; (-) strand; PAM type: NRG; PAM sequence: CAG
ctgctatggaaaggctgatt

SEQ ID NO: 109493 - DNA, 20 bp, Artificial Sequence
  Description of Artificial Sequence: Synthetic oligonucleotide
  Target: LAMA2; (-) strand; PAM type: NRG; PAM sequence: AGG
tttgcatgcctgctatggaa

SEQ ID NO: 109494 - DNA, 20 bp, Artificial Sequence
  Description of Artificial Sequence: Synthetic oligonucleotide
  Target: LAMA2; (-) strand; PAM type: NRG; PAM sequence: AAG
ttttgcatgcctgctatgga

SEQ ID NO: 109495 - DNA, 20 bp, Artificial Sequence
  Description of Artificial Sequence: Synthetic oligonucleotide
  Target: LAMA2; (-) strand; PAM type: NRG; PAM sequence: TGG
tgtcttttgcatgcctgcta

SEQ ID NO: 109496 - DNA, 20 bp, Artificial Sequence
  Description of Artificial Sequence: Synthetic oligonucleotide
  Target: LAMA2; (-) strand; PAM type: NRG; PAM sequence: CAG
taaaattgtggtcaatagag

SEQ ID NO: 109497 - DNA, 20 bp, Artificial Sequence
  Description of Artificial Sequence: Synthetic oligonucleotide
  Target: LAMA2; (-) strand; PAM type: NRG; PAM sequence: GAG
gtctaaaattgtggtcaata

SEQ ID NO: 109498 - DNA, 20 bp, Artificial Sequence
  Description of Artificial Sequence: Synthetic oligonucleotide
  Target: LAMA2; (-) strand; PAM type: NRG; PAM sequence: TAG
tagtctaaaattgtggtcaa

SEQ ID NO: 109499 - DNA, 20 bp, Artificial Sequence
  Description of Artificial Sequence: Synthetic oligonucleotide
  Target: LAMA2; (-) strand; PAM type: NRG; PAM sequence: TGG
atccttttagtctaaaattg

SEQ ID NO: 109500 - DNA, 20 bp, Artificial Sequence
  Description of Artificial Sequence: Synthetic oligonucleotide
  Target: LAMA2; (-) strand; PAM type: NRG; PAM sequence: TAG
caggcttaatttcatccttt

SEQ ID NO: 109501 - DNA, 20 bp, Artificial Sequence
  Description of Artificial Sequence: Synthetic oligonucleotide
  Target: LAMA2; (-) strand; PAM type: NRG; PAM sequence: AGG
cacagtaggccaggggaccc

SEQ ID NO: 109502 - DNA, 20 bp, Artificial Sequence
  Description of Artificial Sequence: Synthetic oligonucleotide
  Target: LAMA2; (-) strand; PAM type: NRG; PAM sequence: CAG
ccacagtaggccaggggacc

SEQ ID NO: 109503 - DNA, 20 bp, Artificial Sequence
  Description of Artificial Sequence: Synthetic oligonucleotide
  Target: LAMA2; (-) strand; PAM type: NRG; PAM sequence: GGG
tccagaccacagtaggccag

SEQ ID NO: 109504 - DNA, 20 bp, Artificial Sequence
  Description of Artificial Sequence: Synthetic oligonucleotide
  Target: LAMA2; (-) strand; PAM type: NRG; PAM sequence: GGG
ctccagaccacagtaggcca

SEQ ID NO: 109505 - DNA, 20 bp, Artificial Sequence
  Description of Artificial Sequence: Synthetic oligonucleotide
  Target: LAMA2; (-) strand; PAM type: NRG; PAM sequence: AGG
tctccagaccacagtaggcc

SEQ ID NO: 109506 - DNA, 20 bp, Artificial Sequence
  Description of Artificial Sequence: Synthetic oligonucleotide
  Target: LAMA2; (-) strand; PAM type: NRG; PAM sequence: CAG
ttctccagaccacagtaggc

SEQ ID NO: 109507 - DNA, 20 bp, Artificial Sequence
  Description of Artificial Sequence: Synthetic oligonucleotide
  Target: LAMA2; (-) strand; PAM type: NRG; PAM sequence: AGG
tttgttctccagaccacagt

SEQ ID NO: 109508 - DNA, 20 bp, Artificial Sequence
  Description of Artificial Sequence: Synthetic oligonucleotide
  Target: LAMA2; (-) strand; PAM type: NRG; PAM sequence: TAG
ctttgttctccagaccacag

SEQ ID NO: 109509 - DNA, 20 bp, Artificial Sequence
  Description of Artificial Sequence: Synthetic oligonucleotide
  Target: LAMA2; (-) strand; PAM type: NRG; PAM sequence: CAG
ctgctttgttctccagacca

SEQ ID NO: 109510 - DNA, 20 bp, Artificial Sequence
  Description of Artificial Sequence: Synthetic oligonucleotide
  Target: LAMA2; (-) strand; PAM type: NRG; PAM sequence: CAG
gaaaagactgctttgttctc

SEQ ID NO: 109511 - DNA, 20 bp, Artificial Sequence
  Description of Artificial Sequence: Synthetic oligonucleotide
  Target: LAMA2; (-) strand; PAM type: NRG; PAM sequence: AAG
atcagcaatttcacctggaa

SEQ ID NO: 109512 - DNA, 20 bp, Artificial Sequence
  Description of Artificial Sequence: Synthetic oligonucleotide
  Target: LAMA2; (-) strand; PAM type: NRG; PAM sequence: TGG
gagggatcagcaatttcacc

SEQ ID NO: 109513 - DNA, 20 bp, Artificial Sequence
  Description of Artificial Sequence: Synthetic oligonucleotide
  Target: LAMA2; (-) strand; PAM type: NRG; PAM sequence: CAG
caaaactttgtatgagggat

SEQ ID NO: 109514 - DNA, 20 bp, Artificial Sequence
  Description of Artificial Sequence: Synthetic oligonucleotide
  Target: LAMA2; (-) strand; PAM type: NRG; PAM sequence: GGG
ggaatcaaaactttgtatga

SEQ ID NO: 109515 - DNA, 20 bp, Artificial Sequence
  Description of Artificial Sequence: Synthetic oligonucleotide
  Target: LAMA2; (-) strand; PAM type: NRG; PAM sequence: AGG
aggaatcaaaactttgtatg

SEQ ID NO: 109516 - DNA, 20 bp, Artificial Sequence
  Description of Artificial Sequence: Synthetic oligonucleotide
  Target: LAMA2; (-) strand; PAM type: NRG; PAM sequence: GAG
gaggaatcaaaactttgtat

SEQ ID NO: 109517 - DNA, 20 bp, Artificial Sequence
  Description of Artificial Sequence: Synthetic oligonucleotide
  Target: LAMA2; (-) strand; PAM type: NRG; PAM sequence: AGG
caccattcacactctaaagg

SEQ ID NO: 109518 - DNA, 20 bp, Artificial Sequence
  Description of Artificial Sequence: Synthetic oligonucleotide
  Target: LAMA2; (-) strand; PAM type: NRG; PAM sequence: GAG
ccaccattcacactctaaag

SEQ ID NO: 109519 - DNA, 20 bp, Artificial Sequence
  Description of Artificial Sequence: Synthetic oligonucleotide
  Target: LAMA2; (-) strand; PAM type: NRG; PAM sequence: AGG
ttccaccattcacactctaa

SEQ ID NO: 109520 - DNA, 20 bp, Artificial Sequence
  Description of Artificial Sequence: Synthetic oligonucleotide
  Target: LAMA2; (-) strand; PAM type: NRG; PAM sequence: AAG
tttccaccattcacactcta

SEQ ID NO: 109521 - DNA, 20 bp, Artificial Sequence
  Description of Artificial Sequence: Synthetic oligonucleotide
  Target: LAMA2; (-) strand; PAM type: NRG; PAM sequence: TGG
tctctaatggaagtccaccc

SEQ ID NO: 109522 - DNA, 20 bp, Artificial Sequence
  Description of Artificial Sequence: Synthetic oligonucleotide
  Target: LAMA2; (-) strand; PAM type: NRG; PAM sequence: AAG
tattgttttttctctaatgg

SEQ ID NO: 109523 - DNA, 20 bp, Artificial Sequence
  Description of Artificial Sequence: Synthetic oligonucleotide
  Target: LAMA2; (-) strand; PAM type: NRG; PAM sequence: TGG
acttattgttttttctctaa

SEQ ID NO: 109524 - DNA, 20 bp, Artificial Sequence
  Description of Artificial Sequence: Synthetic oligonucleotide
  Target: LAMA2; (-) strand; PAM type: NRG; PAM sequence: TAG
cttagggataatctttccaa

SEQ ID NO: 109525 - DNA, 20 bp, Artificial Sequence
  Description of Artificial Sequence: Synthetic oligonucleotide
  Target: LAMA2; (-) strand; PAM type: NRG; PAM sequence: GGG
caagctacgtctcgctctta

SEQ ID NO: 109526 - DNA, 20 bp, Artificial Sequence
  Description of Artificial Sequence: Synthetic oligonucleotide
  Target: LAMA2; (-) strand; PAM type: NRG; PAM sequence: AGG
acaagctacgtctcgctctt

SEQ ID NO: 109527 - DNA, 20 bp, Artificial Sequence
  Description of Artificial Sequence: Synthetic oligonucleotide
  Target: LAMA2; (-) strand; PAM type: NRG; PAM sequence: TAG
gacaagctacgtctcgctct

SEQ ID NO: 109528 - DNA, 20 bp, Artificial Sequence
  Description of Artificial Sequence: Synthetic oligonucleotide
  Target: LAMA2; (-) strand; PAM type: NRG; PAM sequence: AAG
atggtggggttggatatgac

SEQ ID NO: 109529 - DNA, 20 bp, Artificial Sequence
  Description of Artificial Sequence: Synthetic oligonucleotide
  Target: LAMA2; (-) strand; PAM type: NRG; PAM sequence: TGG
ctctactcacatggtggggt

SEQ ID NO: 109530 - DNA, 20 bp, Artificial Sequence
  Description of Artificial Sequence: Synthetic oligonucleotide
  Target: LAMA2; (-) strand; PAM type: NRG; PAM sequence: GGG
tgtcctctactcacatggtg

SEQ ID NO: 109531 - DNA, 20 bp, Artificial Sequence
  Description of Artificial Sequence: Synthetic oligonucleotide
  Target: LAMA2; (-) strand; PAM type: NRG; PAM sequence: GGG
ttgtcctctactcacatggt

SEQ ID NO: 109532 - DNA, 20 bp, Artificial Sequence
  Description of Artificial Sequence: Synthetic oligonucleotide
  Target: LAMA2; (-) strand; PAM type: NRG; PAM sequence: TGG
cttgtcctctactcacatgg

SEQ ID NO: 109533 - DNA, 20 bp, Artificial Sequence
  Description of Artificial Sequence: Synthetic oligonucleotide
  Target: LAMA2; (-) strand; PAM type: NRG; PAM sequence: TGG
tttcttgtcctctactcaca

SEQ ID NO: 109534 - DNA, 20 bp, Artificial Sequence
  Description of Artificial Sequence: Synthetic oligonucleotide
  Target: LAMA2; (-) strand; PAM type: NRG; PAM sequence: GAG
cttgctgagatgatatacag

SEQ ID NO: 109535 - DNA, 20 bp, Artificial Sequence
  Description of Artificial Sequence: Synthetic oligonucleotide
  Target: LAMA2; (-) strand; PAM type: NRG; PAM sequence: AGG
ctcttgctgagatgatatac

SEQ ID NO: 109536 - DNA, 20 bp, Artificial Sequence
  Description of Artificial Sequence: Synthetic oligonucleotide
  Target: LAMA2; (-) strand; PAM type: NRG; PAM sequence: CAG
tctcttgctgagatgatata

SEQ ID NO: 109537 - DNA, 20 bp, Artificial Sequence
  Description of Artificial Sequence: Synthetic oligonucleotide
  Target: LAMA2; (-) strand; PAM type: NRG; PAM sequence: GAG
acaggcctttgtctcttgct

SEQ ID NO: 109538 - DNA, 20 bp, Artificial Sequence
  Description of Artificial Sequence: Synthetic oligonucleotide
  Target: LAMA2; (-) strand; PAM type: NRG; PAM sequence: AGG
aagccccatttttattgcac

SEQ ID NO: 109539 - DNA, 20 bp, Artificial Sequence
  Description of Artificial Sequence: Synthetic oligonucleotide
  Target: LAMA2; (-) strand; PAM type: NRG; PAM sequence: CAG
taagccccatttttattgca

SEQ ID NO: 109540 - DNA, 20 bp, Artificial Sequence
  Description of Artificial Sequence: Synthetic oligonucleotide
  Target: LAMA2; (-) strand; PAM type: NRG; PAM sequence: AAG
ccagataagtttttagctct

SEQ ID NO: 109541 - DNA, 20 bp, Artificial Sequence
  Description of Artificial Sequence: Synthetic oligonucleotide
  Target: LAMA2; (-) strand; PAM type: NRG; PAM sequence: TAG
acaaagcccagataagtttt

SEQ ID NO: 109542 - DNA, 20 bp, Artificial Sequence
  Description of Artificial Sequence: Synthetic oligonucleotide
  Target: LAMA2; (-) strand; PAM type: NRG; PAM sequence: AAG
acacacaacaaagcccagat

SEQ ID NO: 109543 - DNA, 20 bp, Artificial Sequence
  Description of Artificial Sequence: Synthetic oligonucleotide
  Target: LAMA2; (-) strand; PAM type: NRG; PAM sequence: CAG
tctgaacacacaacaaagcc

SEQ ID NO: 109544 - DNA, 20 bp, Artificial Sequence
  Description of Artificial Sequence: Synthetic oligonucleotide
  Target: LAMA2; (-) strand; PAM type: NRG; PAM sequence: AAG
ctgattctgaacacacaaca

SEQ ID NO: 109545 - DNA, 20 bp, Artificial Sequence
  Description of Artificial Sequence: Synthetic oligonucleotide
  Target: LAMA2; (-) strand; PAM type: NRG; PAM sequence: CAG
caaaaaacgccatagaatct

SEQ ID NO: 109546 - DNA, 20 bp, Artificial Sequence
  Description of Artificial Sequence: Synthetic oligonucleotide
  Target: LAMA2; (-) strand; PAM type: NRG; PAM sequence: TAG
cttacttgcaaaaaacgcca

SEQ ID NO: 109547 - DNA, 20 bp, Artificial Sequence
  Description of Artificial Sequence: Synthetic oligonucleotide
  Target: LAMA2; (-) strand; PAM type: NRG; PAM sequence: TGG
aaggcatttctgtttatttc

SEQ ID NO: 109548 - DNA, 20 bp, Artificial Sequence
  Description of Artificial Sequence: Synthetic oligonucleotide
  Target: LAMA2; (-) strand; PAM type: NRG; PAM sequence: AGG
gttatctgtaagtctcttga

SEQ ID NO: 109549 - DNA, 20 bp, Artificial Sequence
  Description of Artificial Sequence: Synthetic oligonucleotide
  Target: LAMA2; (-) strand; PAM type: NRG; PAM sequence: AAG
tgttatctgtaagtctcttg

SEQ ID NO: 109550 - DNA, 20 bp, Artificial Sequence
  Description of Artificial Sequence: Synthetic oligonucleotide
  Target: LAMA2; (-) strand; PAM type: NRG; PAM sequence: AAG
catccctttatgttatctgt

SEQ ID NO: 109551 - DNA, 20 bp, Artificial Sequence
  Description of Artificial Sequence: Synthetic oligonucleotide
  Target: LAMA2; (-) strand; PAM type: NRG; PAM sequence: AGG
aatagtctttggtttaacac

SEQ ID NO: 109552 - DNA, 20 bp, Artificial Sequence
  Description of Artificial Sequence: Synthetic oligonucleotide
  Target: LAMA2; (-) strand; PAM type: NRG; PAM sequence: CAG
aaatagtctttggtttaaca

SEQ ID NO: 109553 - DNA, 20 bp, Artificial Sequence
  Description of Artificial Sequence: Synthetic oligonucleotide
  Target: LAMA2; (-) strand; PAM type: NRG; PAM sequence: TGG
taaataagacaaatagtctt

SEQ ID NO: 109554 - DNA, 20 bp, Artificial Sequence
  Description of Artificial Sequence: Synthetic oligonucleotide
  Target: LAMA2; (-) strand; PAM type: NRG; PAM sequence: TAG
atacctttaaataagacaaa

SEQ ID NO: 109555 - DNA, 20 bp, Artificial Sequence
  Description of Artificial Sequence: Synthetic oligonucleotide
  Target: LAMA2; (-) strand; PAM type: NRG; PAM sequence: AAG
gagtttgaatacctttaaat

SEQ ID NO: 109556 - DNA, 20 bp, Artificial Sequence
  Description of Artificial Sequence: Synthetic oligonucleotide
  Target: LAMA2; (-) strand; PAM type: NRG; PAM sequence: GAG
ttttgcccagcaagaaaatt

SEQ ID NO: 109557 - DNA, 20 bp, Artificial Sequence
  Description of Artificial Sequence: Synthetic oligonucleotide
  Target: LAMA2; (-) strand; PAM type: NRG; PAM sequence: AAG
cttgttttcttttgcccagc

SEQ ID NO: 109558 - DNA, 20 bp, Artificial Sequence
  Description of Artificial Sequence: Synthetic oligonucleotide
  Target: LAMA2; (-) strand; PAM type: NRG; PAM sequence: CAG
caggcttgttttcttttgcc

SEQ ID NO: 109559 - DNA, 20 bp, Artificial Sequence
  Description of Artificial Sequence: Synthetic oligonucleotide
  Target: LAMA2; (-) strand; PAM type: NRG; PAM sequence: AGG
catggtgactgtgggcttgc

SEQ ID NO: 109560 - DNA, 20 bp, Artificial Sequence
  Description of Artificial Sequence: Synthetic oligonucleotide
  Target: LAMA2; (-) strand; PAM type: NRG; PAM sequence: CAG
acatggtgactgtgggcttg

SEQ ID NO: 109561 - DNA, 20 bp, Artificial Sequence
  Description of Artificial Sequence: Synthetic oligonucleotide
  Target: LAMA2; (-) strand; PAM type: NRG; PAM sequence: GGG
ctctaggacatggtgactgt

SEQ ID NO: 109562 - DNA, 20 bp, Artificial Sequence
  Description of Artificial Sequence: Synthetic oligonucleotide
  Target: LAMA2; (-) strand; PAM type: NRG; PAM sequence: TGG
cctctaggacatggtgactg

SEQ ID NO: 109563 - DNA, 20 bp, Artificial Sequence
  Description of Artificial Sequence: Synthetic oligonucleotide
  Target: LAMA2; (-) strand; PAM type: NRG; PAM sequence: TGG
catttggctcctctaggaca

SEQ ID NO: 109564 - DNA, 20 bp, Artificial Sequence
  Description of Artificial Sequence: Synthetic oligonucleotide
  Target: LAMA2; (-) strand; PAM type: NRG; PAM sequence: AGG
cacctgcatttggctcctct

SEQ ID NO: 109565 - DNA, 20 bp, Artificial Sequence
  Description of Artificial Sequence: Synthetic oligonucleotide
  Target: LAMA2; (-) strand; PAM type: NRG; PAM sequence: TAG
acacctgcatttggctcctc

SEQ ID NO: 109566 - DNA, 20 bp, Artificial Sequence
  Description of Artificial Sequence: Synthetic oligonucleotide
  Target: LAMA2; (-) strand; PAM type: NRG; PAM sequence: TGG
cagacatcaacacctgcatt

SEQ ID NO: 109567 - DNA, 20 bp, Artificial Sequence
  Description of Artificial Sequence: Synthetic oligonucleotide
  Target: LAMA2; (-) strand; PAM type: NRG; PAM sequence: CAG
gaatgaaaaactaaaaccac

SEQ ID NO: 109568 - DNA, 20 bp, Artificial Sequence
  Description of Artificial Sequence: Synthetic oligonucleotide
  Target: LAMA2; (-) strand; PAM type: NRG; PAM sequence: TGG
ggagtcccctctgcagccag

SEQ ID NO: 109569 - DNA, 20 bp, Artificial Sequence
  Description of Artificial Sequence: Synthetic oligonucleotide
  Target: LAMA2; (-) strand; PAM type: NRG; PAM sequence: CAG
aagggagtcccctctgcagc

SEQ ID NO: 109570 - DNA, 20 bp, Artificial Sequence
  Description of Artificial Sequence: Synthetic oligonucleotide
  Target: LAMA2; (-) strand; PAM type: NRG; PAM sequence: CAG
ataaaagggagtcccctctg

SEQ ID NO: 109571 - DNA, 20 bp, Artificial Sequence
  Description of Artificial Sequence: Synthetic oligonucleotide
  Target: LAMA2; (-) strand; PAM type: NRG; PAM sequence: GAG
caggatattgggataaaagg

SEQ ID NO: 109572 - DNA, 20 bp, Artificial Sequence
  Description of Artificial Sequence: Synthetic oligonucleotide
  Target: LAMA2; (-) strand; PAM type: NRG; PAM sequence: GGG
ttcaggatattgggataaaa

SEQ ID NO: 109573 - DNA, 20 bp, Artificial Sequence
  Description of Artificial Sequence: Synthetic oligonucleotide
  Target: LAMA2; (-) strand; PAM type: NRG; PAM sequence: AGG
attcaggatattgggataaa

SEQ ID NO: 109574 - DNA, 20 bp, Artificial Sequence
  Description of Artificial Sequence: Synthetic oligonucleotide
  Target: LAMA2; (-) strand; PAM type: NRG; PAM sequence: AAG
gattcaggatattgggataa

SEQ ID NO: 109575 - DNA, 20 bp, Artificial Sequence
  Description of Artificial Sequence: Synthetic oligonucleotide
  Target: LAMA2; (-) strand; PAM type: NRG; PAM sequence: GGG
ctgcaaagattcaggatatt

SEQ ID NO: 109576 - DNA, 20 bp, Artificial Sequence
  Description of Artificial Sequence: Synthetic oligonucleotide
  Target: LAMA2; (-) strand; PAM type: NRG; PAM sequence: TGG
tctgcaaagattcaggatat

SEQ ID NO: 109577 - DNA, 20 bp, Artificial Sequence
  Description of Artificial Sequence: Synthetic oligonucleotide
  Target: LAMA2; (-) strand; PAM type: NRG; PAM sequence: AGG
agcaggttctgcaaagattc

SEQ ID NO: 109578 - DNA, 20 bp, Artificial Sequence
  Description of Artificial Sequence: Synthetic oligonucleotide
  Target: LAMA2; (-) strand; PAM type: NRG; PAM sequence: CAG
tagcaggttctgcaaagatt

SEQ ID NO: 109579 - DNA, 20 bp, Artificial Sequence
  Description of Artificial Sequence: Synthetic oligonucleotide
  Target: LAMA2; (-) strand; PAM type: NRG; PAM sequence: AAG
gtctggtagcaggttctgca

SEQ ID NO: 109580 - DNA, 20 bp, Artificial Sequence
  Description of Artificial Sequence: Synthetic oligonucleotide
  Target: LAMA2; (-) strand; PAM type: NRG; PAM sequence: AGG
aggtgtacttgtctggtagc

SEQ ID NO: 109581 - DNA, 20 bp, Artificial Sequence
  Description of Artificial Sequence: Synthetic oligonucleotide
  Target: LAMA2; (-) strand; PAM type: NRG; PAM sequence: CAG
aaggtgtacttgtctggtag

SEQ ID NO: 109582 - DNA, 20 bp, Artificial Sequence
  Description of Artificial Sequence: Synthetic oligonucleotide
  Target: LAMA2; (-) strand; PAM type: NRG; PAM sequence: TAG
gggaaggtgtacttgtctgg

SEQ ID NO: 109583 - DNA, 20 bp, Artificial Sequence
  Description of Artificial Sequence: Synthetic oligonucleotide
  Target: LAMA2; (-) strand; PAM type: NRG; PAM sequence: TGG
ggagggaaggtgtacttgtc

SEQ ID NO: 109584 - DNA, 20 bp, Artificial Sequence
  Description of Artificial Sequence: Synthetic oligonucleotide
  Target: LAMA2; (-) strand; PAM type: NRG; PAM sequence: AGG
gagcttcaggaaaggaggga

SEQ ID NO: 109585 - DNA, 20 bp, Artificial Sequence
  Description of Artificial Sequence: Synthetic oligonucleotide
  Target: LAMA2; (-) strand; PAM type: NRG; PAM sequence: AAG
ggagcttcaggaaaggaggg

SEQ ID NO: 109586 - DNA, 20 bp, Artificial Sequence
  Description of Artificial Sequence: Synthetic oligonucleotide
  Target: LAMA2; (-) strand; PAM type: NRG; PAM sequence: GGG
gtaggagcttcaggaaagga

SEQ ID NO: 109587 - DNA, 20 bp, Artificial Sequence
  Description of Artificial Sequence: Synthetic oligonucleotide
  Target: LAMA2; (-) strand; PAM type: NRG; PAM sequence: AGG
agtaggagcttcaggaaagg

SEQ ID NO: 109588 - DNA, 20 bp, Artificial Sequence
  Description of Artificial Sequence: Synthetic oligonucleotide
  Target: LAMA2; (-) strand; PAM type: NRG; PAM sequence: GAG
tagtaggagcttcaggaaag

SEQ ID NO: 109589 - DNA, 20 bp, Artificial Sequence
  Description of Artificial Sequence: Synthetic oligonucleotide
  Target: LAMA2; (-) strand; PAM type: NRG; PAM sequence: AGG
catagtaggagcttcaggaa

SEQ ID NO: 109590 - DNA, 20 bp, Artificial Sequence
  Description of Artificial Sequence: Synthetic oligonucleotide
  Target: LAMA2; (-) strand; PAM type: NRG; PAM sequence: AAG
tcatagtaggagcttcagga

SEQ ID NO: 109591 - DNA, 20 bp, Artificial Sequence
  Description of Artificial Sequence: Synthetic oligonucleotide
  Target: LAMA2; (-) strand; PAM type: NRG; PAM sequence: AGG
ggggtcatagtaggagcttc

SEQ ID NO: 109592 - DNA, 20 bp, Artificial Sequence
  Description of Artificial Sequence: Synthetic oligonucleotide
  Target: LAMA2; (-) strand; PAM type: NRG; PAM sequence: CAG
gggggtcatagtaggagctt

SEQ ID NO: 109593 - DNA, 20 bp, Artificial Sequence
  Description of Artificial Sequence: Synthetic oligonucleotide
  Target: LAMA2; (-) strand; PAM type: NRG; PAM sequence: GAG
ccactagggggtcatagtag

SEQ ID NO: 109594 - DNA, 20 bp, Artificial Sequence
  Description of Artificial Sequence: Synthetic oligonucleotide
  Target: LAMA2; (-) strand; PAM type: NRG; PAM sequence: AGG
tcccactagggggtcatagt

SEQ ID NO: 109595 - DNA, 20 bp, Artificial Sequence
  Description of Artificial Sequence: Synthetic oligonucleotide
  Target: LAMA2; (-) strand; PAM type: NRG; PAM sequence: TAG
ctcccactagggggtcatag

SEQ ID NO: 109596 - DNA, 20 bp, Artificial Sequence
  Description of Artificial Sequence: Synthetic oligonucleotide
  Target: LAMA2; (-) strand; PAM type: NRG; PAM sequence: TAG
ttcctcccactagggggtca

SEQ ID NO: 109597 - DNA, 20 bp, Artificial Sequence
  Description of Artificial Sequence: Synthetic oligonucleotide
  Target: LAMA2; (-) strand; PAM type: NRG; PAM sequence: GGG
atgctcttcctcccactagg

SEQ ID NO: 109598 - DNA, 20 bp, Artificial Sequence
  Description of Artificial Sequence: Synthetic oligonucleotide
  Target: LAMA2; (-) strand; PAM type: NRG; PAM sequence: GGG
tatgctcttcctcccactag

SEQ ID NO: 109599 - DNA, 20 bp, Artificial Sequence
  Description of Artificial Sequence: Synthetic oligonucleotide
  Target: LAMA2; (-) strand; PAM type: NRG; PAM sequence: GGG
atatgctcttcctcccacta

SEQ ID NO: 109600 - DNA, 20 bp, Artificial Sequence
  Description of Artificial Sequence: Synthetic oligonucleotide
  Target: LAMA2; (-) strand; PAM type: NRG; PAM sequence: AGG
catatgctcttcctcccact

SEQ ID NO: 109601 - DNA, 20 bp, Artificial Sequence
  Description of Artificial Sequence: Synthetic oligonucleotide
  Target: LAMA2; (-) strand; PAM type: NRG; PAM sequence: TAG
gcatatgctcttcctcccac

SEQ ID NO: 109602 - DNA, 20 bp, Artificial Sequence
  Description of Artificial Sequence: Synthetic oligonucleotide
  Target: LAMA2; (-) strand; PAM type: NRG; PAM sequence: AAG
aattagatcttgttcgcaat

SEQ ID NO: 109603 - DNA, 20 bp, Artificial Sequence
  Description of Artificial Sequence: Synthetic oligonucleotide
  Target: LAMA2; (-) strand; PAM type: NRG; PAM sequence: TAG
ctgatctgaaagtaagaaat

SEQ ID NO: 109604 - DNA, 20 bp, Artificial Sequence
  Description of Artificial Sequence: Synthetic oligonucleotide
  Target: LAMA2; (-) strand; PAM type: NRG; PAM sequence: AAG
ccctcttctgatctgaaagt

SEQ ID NO: 109605 - DNA, 20 bp, Artificial Sequence
  Description of Artificial Sequence: Synthetic oligonucleotide
  Target: LAMA2; (-) strand; PAM type: NRG; PAM sequence: AAG
gaaaccctcttctgatctga

SEQ ID NO: 109606 - DNA, 20 bp, Artificial Sequence
  Description of Artificial Sequence: Synthetic oligonucleotide
  Target: LAMA2; (-) strand; PAM type: NRG; PAM sequence: GAG
tcacagggagtcaggttatg

SEQ ID NO: 109607 - DNA, 20 bp, Artificial Sequence
  Description of Artificial Sequence: Synthetic oligonucleotide
  Target: LAMA2; (-) strand; PAM type: NRG; PAM sequence: TGG
tttcacagggagtcaggtta

SEQ ID NO: 109608 - DNA, 20 bp, Artificial Sequence
  Description of Artificial Sequence: Synthetic oligonucleotide
  Target: LAMA2; (-) strand; PAM type: NRG; PAM sequence: AGG
tgactgtttcacagggagtc

SEQ ID NO: 109609 - DNA, 20 bp, Artificial Sequence
  Description of Artificial Sequence: Synthetic oligonucleotide
  Target: LAMA2; (-) strand; PAM type: NRG; PAM sequence: CAG
atgactgtttcacagggagt

SEQ ID NO: 109610 - DNA, 20 bp, Artificial Sequence
  Description of Artificial Sequence: Synthetic oligonucleotide
  Target: LAMA2; (-) strand; PAM type: NRG; PAM sequence: GAG
agagatgactgtttcacagg

SEQ ID NO: 109611 - DNA, 20 bp, Artificial Sequence
  Description of Artificial Sequence: Synthetic oligonucleotide
  Target: LAMA2; (-) strand; PAM type: NRG; PAM sequence: GGG
tcagagatgactgtttcaca

SEQ ID NO: 109612 - DNA, 20 bp, Artificial Sequence
  Description of Artificial Sequence: Synthetic oligonucleotide
  Target: LAMA2; (-) strand; PAM type: NRG; PAM sequence: AGG
ctcagagatgactgtttcac

SEQ ID NO: 109613 - DNA, 20 bp, Artificial Sequence
  Description of Artificial Sequence: Synthetic oligonucleotide
  Target: LAMA2; (-) strand; PAM type: NRG; PAM sequence: CAG
cctcagagatgactgtttca

SEQ ID NO: 109614 - DNA, 20 bp, Artificial Sequence
  Description of Artificial Sequence: Synthetic oligonucleotide
  Target: LAMA2; (-) strand; PAM type: NRG; PAM sequence: GAG
gaccacatatgggaacctca

SEQ ID NO: 109615 - DNA, 20 bp, Artificial Sequence
  Description of Artificial Sequence: Synthetic oligonucleotide
  Target: LAMA2; (-) strand; PAM type: NRG; PAM sequence: CAG
gtgaccacatatgggaacct

SEQ ID NO: 109616 - DNA, 20 bp, Artificial Sequence
  Description of Artificial Sequence: Synthetic oligonucleotide
  Target: LAMA2; (-) strand; PAM type: NRG; PAM sequence: GGG
atactagagtgaccacatat

SEQ ID NO: 109617 - DNA, 20 bp, Artificial Sequence
  Description of Artificial Sequence: Synthetic oligonucleotide
  Target: LAMA2; (-) strand; PAM type: NRG; PAM sequence: TGG
catactagagtgaccacata

SEQ ID NO: 109618 - DNA, 20 bp, Artificial Sequence
  Description of Artificial Sequence: Synthetic oligonucleotide
  Target: LAMA2; (-) strand; PAM type: NRG; PAM sequence: GAG
acagacagacatacatacta

SEQ ID NO: 109619 - DNA, 20 bp, Artificial Sequence
  Description of Artificial Sequence: Synthetic oligonucleotide
  Target: LAMA2; (-) strand; PAM type: NRG; PAM sequence: TAG
gcacagacagacatacatac

SEQ ID NO: 109620 - DNA, 20 bp, Artificial Sequence
  Description of Artificial Sequence: Synthetic oligonucleotide
  Target: LAMA2; (-) strand; PAM type: NRG; PAM sequence: CAG
gattacttattctgcacaga

SEQ ID NO: 109621 - DNA, 20 bp, Artificial Sequence
  Description of Artificial Sequence: Synthetic oligonucleotide
  Target: LAMA2; (-) strand; PAM type: NRG; PAM sequence: CAG
atctgattacttattctgca

SEQ ID NO: 109622 - DNA, 20 bp, Artificial Sequence
  Description of Artificial Sequence: Synthetic oligonucleotide
  Target: LAMA2; (-) strand; PAM type: NRG; PAM sequence: GGG
ctagtagctgtcacaagttt

SEQ ID NO: 109623 - DNA, 20 bp, Artificial Sequence
  Description of Artificial Sequence: Synthetic oligonucleotide
  Target: LAMA2; (-) strand; PAM type: NRG; PAM sequence: TGG
cctagtagctgtcacaagtt

SEQ ID NO: 109624 - DNA, 20 bp, Artificial Sequence
  Description of Artificial Sequence: Synthetic oligonucleotide
  Target: LAMA2; (-) strand; PAM type: NRG; PAM sequence: AAG
ctttccctagtagctgtcac

SEQ ID NO: 109625 - DNA, 20 bp, Artificial Sequence
  Description of Artificial Sequence: Synthetic oligonucleotide
  Target: LAMA2; (-) strand; PAM type: NRG; PAM sequence: TAG
ctgtgcttccctttccctag

SEQ ID NO: 109626 - DNA, 20 bp, Artificial Sequence
  Description of Artificial Sequence: Synthetic oligonucleotide
  Target: LAMA2; (-) strand; PAM type: NRG; PAM sequence: TAG
ctcctgtgcttccctttccc

SEQ ID NO: 109627 - DNA, 20 bp, Artificial Sequence
  Description of Artificial Sequence: Synthetic oligonucleotide
  Target: LAMA2; (-) strand; PAM type: NRG; PAM sequence: TAG
ttcctgaacctttatatttc

SEQ ID NO: 109628 - DNA, 20 bp, Artificial Sequence
  Description of Artificial Sequence: Synthetic oligonucleotide
  Target: LAMA2; (-) strand; PAM type: NRG; PAM sequence: CGG
ttggtgacaatgattcggaa

SEQ ID NO: 109629 - DNA, 20 bp, Artificial Sequence
  Description of Artificial Sequence: Synthetic oligonucleotide
  Target: LAMA2; (-) strand; PAM type: NRG; PAM sequence: CGG
tgaatttggtgacaatgatt

SEQ ID NO: 109630 - DNA, 20 bp, Artificial Sequence
  Description of Artificial Sequence: Synthetic oligonucleotide
  Target: LAMA2; (-) strand; PAM type: NRG; PAM sequence: TGG
atgcaggcaatcattgaatt

SEQ ID NO: 109631 - DNA, 20 bp, Artificial Sequence
  Description of Artificial Sequence: Synthetic oligonucleotide
  Target: LAMA2; (-) strand; PAM type: NRG; PAM sequence: AGG
tccaattttctgcattatgc

SEQ ID NO: 109632 - DNA, 20 bp, Artificial Sequence
  Description of Artificial Sequence: Synthetic oligonucleotide
  Target: LAMA2; (-) strand; PAM type: NRG; PAM sequence: CAG
ctccaattttctgcattatg

SEQ ID NO: 109633 - DNA, 20 bp, Artificial Sequence
  Description of Artificial Sequence: Synthetic oligonucleotide
  Target: LAMA2; (-) strand; PAM type: NRG; PAM sequence: TAG
cacccaatctttgtacttct

SEQ ID NO: 109634 - DNA, 20 bp, Artificial Sequence
  Description of Artificial Sequence: Synthetic oligonucleotide
  Target: LAMA2; (-) strand; PAM type: NRG; PAM sequence: AGG
tccagcaaattgatttgata

SEQ ID NO: 109635 - DNA, 20 bp, Artificial Sequence
  Description of Artificial Sequence: Synthetic oligonucleotide
  Target: LAMA2; (-) strand; PAM type: NRG; PAM sequence: AAG
ctccagcaaattgatttgat

SEQ ID NO: 109636 - DNA, 20 bp, Artificial Sequence
  Description of Artificial Sequence: Synthetic oligonucleotide
  Target: LAMA2; (-) strand; PAM type: NRG; PAM sequence: CAG
gtatttctctcctaggtctc

SEQ ID NO: 109637 - DNA, 20 bp, Artificial Sequence
  Description of Artificial Sequence: Synthetic oligonucleotide
  Target: LAMA2; (-) strand; PAM type: NRG; PAM sequence: AGG
tacaactgtatttctctcct

SEQ ID NO: 109638 - DNA, 20 bp, Artificial Sequence
  Description of Artificial Sequence: Synthetic oligonucleotide
  Target: LAMA2; (-) strand; PAM type: NRG; PAM sequence: TAG
ctacaactgtatttctctcc

SEQ ID NO: 109639 - DNA, 20 bp, Artificial Sequence
  Description of Artificial Sequence: Synthetic oligonucleotide
  Target: LAMA2; (-) strand; PAM type: NRG; PAM sequence: AAG
acccgagtgaggaagaatag

SEQ ID NO: 109640 - DNA, 20 bp, Artificial Sequence
  Description of Artificial Sequence: Synthetic oligonucleotide
  Target: LAMA2; (-) strand; PAM type: NRG; PAM sequence: TAG
agcacccgagtgaggaagaa

SEQ ID NO: 109641 - DNA, 20 bp, Artificial Sequence
  Description of Artificial Sequence: Synthetic oligonucleotide
  Target: LAMA2; (-) strand; PAM type: NRG; PAM sequence: AAG
agaagagcacccgagtgagg

SEQ ID NO: 109642 - DNA, 20 bp, Artificial Sequence
  Description of Artificial Sequence: Synthetic oligonucleotide
  Target: LAMA2; (-) strand; PAM type: NRG; PAM sequence: AGG
gaaagaagagcacccgagtg

SEQ ID NO: 109643 - DNA, 20 bp, Artificial Sequence
  Description of Artificial Sequence: Synthetic oligonucleotide
  Target: LAMA2; (-) strand; PAM type: NRG; PAM sequence: GAG
ggaaagaagagcacccgagt

SEQ ID NO: 109644 - DNA, 20 bp, Artificial Sequence
  Description of Artificial Sequence: Synthetic oligonucleotide
  Target: LAMA2; (-) strand; PAM type: NRG; PAM sequence: GAG
ggtaggaaagaagagcaccc

SEQ ID NO: 109645 - DNA, 20 bp, Artificial Sequence
  Description of Artificial Sequence: Synthetic oligonucleotide
  Target: LAMA2; (-) strand; PAM type: NRG; PAM sequence: GAG
gagacctgggtaggaaagaa

SEQ ID NO: 109646 - DNA, 20 bp, Artificial Sequence
  Description of Artificial Sequence: Synthetic oligonucleotide
  Target: LAMA2; (-) strand; PAM type: NRG; PAM sequence: AAG
ttgagacctgggtaggaaag

SEQ ID NO: 109647 - DNA, 20 bp, Artificial Sequence
  Description of Artificial Sequence: Synthetic oligonucleotide
  Target: LAMA2; (-) strand; PAM type: NRG; PAM sequence: AAG
atcttgagacctgggtagga

SEQ ID NO: 109648 - DNA, 20 bp, Artificial Sequence
  Description of Artificial Sequence: Synthetic oligonucleotide
  Target: LAMA2; (-) strand; PAM type: NRG; PAM sequence: AGG
caggatcttgagacctgggt

SEQ ID NO: 109649 - DNA, 20 bp, Artificial Sequence
  Description of Artificial Sequence: Synthetic oligonucleotide
  Target: LAMA2; (-) strand; PAM type: NRG; PAM sequence: TAG
gcaggatcttgagacctggg

SEQ ID NO: 109650 - DNA, 20 bp, Artificial Sequence
  Description of Artificial Sequence: Synthetic oligonucleotide
  Target: LAMA2; (-) strand; PAM type: NRG; PAM sequence: GGG
agtgcaggatcttgagacct

SEQ ID NO: 109651 - DNA, 20 bp, Artificial Sequence
  Description of Artificial Sequence: Synthetic oligonucleotide
  Target: LAMA2; (-) strand; PAM type: NRG; PAM sequence: TGG
cagtgcaggatcttgagacc

SEQ ID NO: 109652 - DNA, 20 bp, Artificial Sequence
  Description of Artificial Sequence: Synthetic oligonucleotide
  Target: LAMA2; (-) strand; PAM type: NRG; PAM sequence: GAG
aatacccagtgcaggatctt

SEQ ID NO: 109653 - DNA, 20 bp, Artificial Sequence
  Description of Artificial Sequence: Synthetic oligonucleotide
  Target: LAMA2; (-) strand; PAM type: NRG; PAM sequence: AGG
tcaacctaaatacccagtgc

SEQ ID NO: 109654 - DNA, 20 bp, Artificial Sequence
  Description of Artificial Sequence: Synthetic oligonucleotide
  Target: LAMA2; (-) strand; PAM type: NRG; PAM sequence: CAG
gtcaacctaaatacccagtg

SEQ ID NO: 109655 - DNA, 20 bp, Artificial Sequence
  Description of Artificial Sequence: Synthetic oligonucleotide
  Target: LAMA2; (-) strand; PAM type: NRG; PAM sequence: CAG
cctaagtcaacctaaatacc

SEQ ID NO: 109656 - DNA, 20 bp, Artificial Sequence
  Description of Artificial Sequence: Synthetic oligonucleotide
  Target: LAMA2; (-) strand; PAM type: NRG; PAM sequence: AAG
ttctaaagaccctgtcccct

SEQ ID NO: 109657 - DNA, 20 bp, Artificial Sequence
  Description of Artificial Sequence: Synthetic oligonucleotide
  Target: LAMA2; (-) strand; PAM type: NRG; PAM sequence: AAG
ttggcttcttgagatttcta

SEQ ID NO: 109658 - DNA, 20 bp, Artificial Sequence
  Description of Artificial Sequence: Synthetic oligonucleotide
  Target: LAMA2; (-) strand; PAM type: NRG; PAM sequence: GAG
tgttcagattttggcttctt

SEQ ID NO: 109659 - DNA, 20 bp, Artificial Sequence
  Description of Artificial Sequence: Synthetic oligonucleotide
  Target: LAMA2; (-) strand; PAM type: NRG; PAM sequence: TGG
aagtgactgtgttcagattt

SEQ ID NO: 109660 - DNA, 20 bp, Artificial Sequence
  Description of Artificial Sequence: Synthetic oligonucleotide
  Target: LAMA2; (-) strand; PAM type: NRG; PAM sequence: CAG
caggcataagtgactgtgtt

SEQ ID NO: 109661 - DNA, 20 bp, Artificial Sequence
  Description of Artificial Sequence: Synthetic oligonucleotide
  Target: LAMA2; (-) strand; PAM type: NRG; PAM sequence: AAG
ggacctgggattacaggcat

SEQ ID NO: 109662 - DNA, 20 bp, Artificial Sequence
  Description of Artificial Sequence: Synthetic oligonucleotide
  Target: LAMA2; (-) strand; PAM type: NRG; PAM sequence: AGG
ttgaaaggacctgggattac

SEQ ID NO: 109663 - DNA, 20 bp, Artificial Sequence
  Description of Artificial Sequence: Synthetic oligonucleotide
  Target: LAMA2; (-) strand; PAM type: NRG; PAM sequence: CAG
tttgaaaggacctgggatta

SEQ ID NO: 109664 - DNA, 20 bp, Artificial Sequence
  Description of Artificial Sequence: Synthetic oligonucleotide
  Target: LAMA2; (-) strand; PAM type: NRG; PAM sequence: GGG
gattacttttgaaaggacct

SEQ ID NO: 109665 - DNA, 20 bp, Artificial Sequence
  Description of Artificial Sequence: Synthetic oligonucleotide
  Target: LAMA2; (-) strand; PAM type: NRG; PAM sequence: TGG
tgattacttttgaaaggacc

SEQ ID NO: 109666 - DNA, 20 bp, Artificial Sequence
  Description of Artificial Sequence: Synthetic oligonucleotide
  Target: LAMA2; (-) strand; PAM type: NRG; PAM sequence: AGG
gaaatgtgattacttttgaa

SEQ ID NO: 109667 - DNA, 20 bp, Artificial Sequence
  Description of Artificial Sequence: Synthetic oligonucleotide
  Target: LAMA2; (-) strand; PAM type: NRG; PAM sequence: AAG
ggaaatgtgattacttttga

SEQ ID NO: 109668 - DNA, 20 bp, Artificial Sequence
  Description of Artificial Sequence: Synthetic oligonucleotide
  Target: LAMA2; (-) strand; PAM type: NRG; PAM sequence: TGG
attcacaagggtgaaattca

SEQ ID NO: 109669 - DNA, 20 bp, Artificial Sequence
  Description of Artificial Sequence: Synthetic oligonucleotide
  Target: LAMA2; (-) strand; PAM type: NRG; PAM sequence: GGG
aaagaatgccccattcacaa

SEQ ID NO: 109670 - DNA, 20 bp, Artificial Sequence
  Description of Artificial Sequence: Synthetic oligonucleotide
  Target: LAMA2; (-) strand; PAM type: NRG; PAM sequence: AGG
gaaagaatgccccattcaca

SEQ ID NO: 109671 - DNA, 20 bp, Artificial Sequence
  Description of Artificial Sequence: Synthetic oligonucleotide
  Target: LAMA2; (-) strand; PAM type: NRG; PAM sequence: AAG
tgaaagaatgccccattcac

SEQ ID NO: 109672 - DNA, 20 bp, Artificial Sequence
  Description of Artificial Sequence: Synthetic oligonucleotide
  Target: LAMA2; (-) strand; PAM type: NRG; PAM sequence: AAG
ggcacaaataaatgccctga

SEQ ID NO: 109673 - DNA, 20 bp, Artificial Sequence
  Description of Artificial Sequence: Synthetic oligonucleotide
  Target: LAMA2; (-) strand; PAM type: NRG; PAM sequence: GGG
attttttattaatatgaata

SEQ ID NO: 109674 - DNA, 20 bp, Artificial Sequence
  Description of Artificial Sequence: Synthetic oligonucleotide
  Target: LAMA2; (-) strand; PAM type: NRG; PAM sequence: AGG
tattttttattaatatgaat

SEQ ID NO: 109675 - DNA, 20 bp, Artificial Sequence
  Description of Artificial Sequence: Synthetic oligonucleotide
  Target: LAMA2; (-) strand; PAM type: NRG; PAM sequence: TAG
ttattttttattaatatgaa

SEQ ID NO: 109676 - DNA, 20 bp, Artificial Sequence
  Description of Artificial Sequence: Synthetic oligonucleotide
  Target: LAMA2; (-) strand; PAM type: NRG; PAM sequence: TGG
atccagttgagtttctcaaa

SEQ ID NO: 109677 - DNA, 20 bp, Artificial Sequence
  Description of Artificial Sequence: Synthetic oligonucleotide
  Target: LAMA2; (-) strand; PAM type: NRG; PAM sequence: GAG
tattcaaattccatccagtt

SEQ ID NO: 109678 - DNA, 20 bp, Artificial Sequence
  Description of Artificial Sequence: Synthetic oligonucleotide
  Target: LAMA2; (-) strand; PAM type: NRG; PAM sequence: CAG
ttgactattcaaattccatc

SEQ ID NO: 109679 - DNA, 20 bp, Artificial Sequence
  Description of Artificial Sequence: Synthetic oligonucleotide
  Target: LAMA2; (-) strand; PAM type: NRG; PAM sequence: TGG
acgatttttataaattttaa

SEQ ID NO: 109680 - DNA, 20 bp, Artificial Sequence
  Description of Artificial Sequence: Synthetic oligonucleotide
  Target: LAMA2; (-) strand; PAM type: NRG; PAM sequence: GGG
tcacttttcaactaaatatc

SEQ ID NO: 109681 - DNA, 20 bp, Artificial Sequence
  Description of Artificial Sequence: Synthetic oligonucleotide
  Target: LAMA2; (-) strand; PAM type: NRG; PAM sequence: CGG
ctcacttttcaactaaatat

SEQ ID NO: 109682 - DNA, 20 bp, Artificial Sequence
  Description of Artificial Sequence: Synthetic oligonucleotide
  Target: LAMA2; (-) strand; PAM type: NRG; PAM sequence: AAG
aattacttggtccagaacct

SEQ ID NO: 109683 - DNA, 20 bp, Artificial Sequence
  Description of Artificial Sequence: Synthetic oligonucleotide
  Target: LAMA2; (-) strand; PAM type: NRG; PAM sequence: CAG
tttatttaaattacttggtc

SEQ ID NO: 109684 - DNA, 20 bp, Artificial Sequence
  Description of Artificial Sequence: Synthetic oligonucleotide
  Target: LAMA2; (-) strand; PAM type: NRG; PAM sequence: TGG
ccttttttatttaaattact

SEQ ID NO: 109685 - DNA, 20 bp, Artificial Sequence
  Description of Artificial Sequence: Synthetic oligonucleotide
  Target: LAMA2; (-) strand; PAM type: NRG; PAM sequence: CAG
attgtcctggtgtgttttac

SEQ ID NO: 109686 - DNA, 20 bp, Artificial Sequence
  Description of Artificial Sequence: Synthetic oligonucleotide
  Target: LAMA2; (-) strand; PAM type: NRG; PAM sequence: TGG
cattggtttgaaaattgtcc

SEQ ID NO: 109687 - DNA, 20 bp, Artificial Sequence
  Description of Artificial Sequence: Synthetic oligonucleotide
  Target: LAMA2; (-) strand; PAM type: NRG; PAM sequence: TGG
aaaaggtaacacactgacat

SEQ ID NO: 109688 - DNA, 20 bp, Artificial Sequence
  Description of Artificial Sequence: Synthetic oligonucleotide
  Target: LAMA2; (-) strand; PAM type: NRG; PAM sequence: AGG
taccataggcagtaagtaaa

SEQ ID NO: 109689 - DNA, 20 bp, Artificial Sequence
  Description of Artificial Sequence: Synthetic oligonucleotide
  Target: LAMA2; (-) strand; PAM type: NRG; PAM sequence: AAG
ttaccataggcagtaagtaa

SEQ ID NO: 109690 - DNA, 20 bp, Artificial Sequence
  Description of Artificial Sequence: Synthetic oligonucleotide
  Target: LAMA2; (-) strand; PAM type: NRG; PAM sequence: AAG
ctggatttaccataggcagt

SEQ ID NO: 109691 - DNA, 20 bp, Artificial Sequence
  Description of Artificial Sequence: Synthetic oligonucleotide
  Target: LAMA2; (-) strand; PAM type: NRG; PAM sequence: CAG
agtgctggatttaccatagg

SEQ ID NO: 109692 - DNA, 20 bp, Artificial Sequence
  Description of Artificial Sequence: Synthetic oligonucleotide
  Target: LAMA2; (-) strand; PAM type: NRG; PAM sequence: AGG
gaaagtgctggatttaccat

SEQ ID NO: 109693 - DNA, 20 bp, Artificial Sequence
  Description of Artificial Sequence: Synthetic oligonucleotide
  Target: LAMA2; (-) strand; PAM type: NRG; PAM sequence: TAG
agaaagtgctggatttacca

SEQ ID NO: 109694 - DNA, 20 bp, Artificial Sequence
  Description of Artificial Sequence: Synthetic oligonucleotide
  Target: LAMA2; (-) strand; PAM type: NRG; PAM sequence: TGG
ggagatgtatgagaaagtgc

SEQ ID NO: 109695 - DNA, 20 bp, Artificial Sequence
  Description of Artificial Sequence: Synthetic oligonucleotide
  Target: LAMA2; (-) strand; PAM type: NRG; PAM sequence: AAG
aaactgggagatgtatgaga

SEQ ID NO: 109696 - DNA, 20 bp, Artificial Sequence
  Description of Artificial Sequence: Synthetic oligonucleotide
  Target: LAMA2; (-) strand; PAM type: NRG; PAM sequence: GAG
aaataaactgggagatgtat

SEQ ID NO: 109697 - DNA, 20 bp, Artificial Sequence
  Description of Artificial Sequence: Synthetic oligonucleotide
  Target: LAMA2; (-) strand; PAM type: NRG; PAM sequence: GAG
tgatatgagaaataaactgg

SEQ ID NO: 109698 - DNA, 20 bp, Artificial Sequence
  Description of Artificial Sequence: Synthetic oligonucleotide
  Target: LAMA2; (-) strand; PAM type: NRG; PAM sequence: GGG
actgatatgagaaataaact

SEQ ID NO: 109699 - DNA, 20 bp, Artificial Sequence
  Description of Artificial Sequence: Synthetic oligonucleotide
  Target: LAMA2; (-) strand; PAM type: NRG; PAM sequence: TGG
gactgatatgagaaataaac

SEQ ID NO: 109700 - DNA, 20 bp, Artificial Sequence
  Description of Artificial Sequence: Synthetic oligonucleotide
  Target: LAMA2; (-) strand; PAM type: NRG; PAM sequence: GAG
ttccttcatgtgactgatat

SEQ ID NO: 109701 - DNA, 20 bp, Artificial Sequence
  Description of Artificial Sequence: Synthetic oligonucleotide
  Target: LAMA2; (-) strand; PAM type: NRG; PAM sequence: AAG
ctttttacatatggcaaata

SEQ ID NO: 109702 - DNA, 20 bp, Artificial Sequence
  Description of Artificial Sequence: Synthetic oligonucleotide
  Target: LAMA2; (-) strand; PAM type: NRG; PAM sequence: TGG
tttctgtccctttttacata

SEQ ID NO: 109703 - DNA, 20 bp, Artificial Sequence
  Description of Artificial Sequence: Synthetic oligonucleotide
  Target: LAMA2; (-) strand; PAM type: NRG; PAM sequence: GGG
gacacagagttggaagatgt

SEQ ID NO: 109704 - DNA, 20 bp, Artificial Sequence
  Description of Artificial Sequence: Synthetic oligonucleotide
  Target: LAMA2; (-) strand; PAM type: NRG; PAM sequence: TGG
ggacacagagttggaagatg

SEQ ID NO: 109705 - DNA, 20 bp, Artificial Sequence
  Description of Artificial Sequence: Synthetic oligonucleotide
  Target: LAMA2; (-) strand; PAM type: NRG; PAM sequence: AAG
actataggacacagagttgg

SEQ ID NO: 109706 - DNA, 20 bp, Artificial Sequence
  Description of Artificial Sequence: Synthetic oligonucleotide
  Target: LAMA2; (-) strand; PAM type: NRG; PAM sequence: TGG
atcactataggacacagagt

SEQ ID NO: 109707 - DNA, 20 bp, Artificial Sequence
  Description of Artificial Sequence: Synthetic oligonucleotide
  Target: LAMA2; (-) strand; PAM type: NRG; PAM sequence: GAG
tgaaatcactataggacaca

SEQ ID NO: 109708 - DNA, 20 bp, Artificial Sequence
  Description of Artificial Sequence: Synthetic oligonucleotide
  Target: LAMA2; (-) strand; PAM type: NRG; PAM sequence: CAG
aatgaaatcactataggaca

SEQ ID NO: 109709 - DNA, 20 bp, Artificial Sequence
  Description of Artificial Sequence: Synthetic oligonucleotide
  Target: LAMA2; (-) strand; PAM type: NRG; PAM sequence: AGG
tggtacaatgaaatcactat

SEQ ID NO: 109710 - DNA, 20 bp, Artificial Sequence
  Description of Artificial Sequence: Synthetic oligonucleotide
  Target: LAMA2; (-) strand; PAM type: NRG; PAM sequence: TAG
ctggtacaatgaaatcacta

SEQ ID NO: 109711 - DNA, 20 bp, Artificial Sequence
  Description of Artificial Sequence: Synthetic oligonucleotide
  Target: LAMA2; (-) strand; PAM type: NRG; PAM sequence: TGG
tatttctctgaaatctagtc

SEQ ID NO: 109712 - DNA, 20 bp, Artificial Sequence
  Description of Artificial Sequence: Synthetic oligonucleotide
  Target: LAMA2; (-) strand; PAM type: NRG; PAM sequence: TAG
cacagtatttctctgaaatc

SEQ ID NO: 109713 - DNA, 20 bp, Artificial Sequence
  Description of Artificial Sequence: Synthetic oligonucleotide
  Target: LAMA2; (-) strand; PAM type: NRG; PAM sequence: CAG
ctcaaaataaaactgctaca

SEQ ID NO: 109714 - DNA, 20 bp, Artificial Sequence
  Description of Artificial Sequence: Synthetic oligonucleotide
  Target: LAMA2; (-) strand; PAM type: NRG; PAM sequence: TAG
aaattagggcttagttatat

SEQ ID NO: 109715 - DNA, 20 bp, Artificial Sequence
  Description of Artificial Sequence: Synthetic oligonucleotide
  Target: LAMA2; (-) strand; PAM type: NRG; PAM sequence: TAG
gctaaatataaattagggct

SEQ ID NO: 109716 - DNA, 20 bp, Artificial Sequence
  Description of Artificial Sequence: Synthetic oligonucleotide
  Target: LAMA2; (-) strand; PAM type: NRG; PAM sequence: GGG
atgatgctaaatataaatta

SEQ ID NO: 109717 - DNA, 20 bp, Artificial Sequence
  Description of Artificial Sequence: Synthetic oligonucleotide
  Target: LAMA2; (-) strand; PAM type: NRG; PAM sequence: AGG
catgatgctaaatataaatt

SEQ ID NO: 109718 - DNA, 20 bp, Artificial Sequence
  Description of Artificial Sequence: Synthetic oligonucleotide
  Target: LAMA2; (-) strand; PAM type: NRG; PAM sequence: TAG
acatgatgctaaatataaat

SEQ ID NO: 109719 - DNA, 20 bp, Artificial Sequence
  Description of Artificial Sequence: Synthetic oligonucleotide
  Target: LAMA2; (-) strand; PAM type: NRG; PAM sequence: CAG
tcacttgcattaataatgag

SEQ ID NO: 109720 - DNA, 20 bp, Artificial Sequence
  Description of Artificial Sequence: Synthetic oligonucleotide
  Target: LAMA2; (-) strand; PAM type: NRG; PAM sequence: GAG
aagtcacttgcattaataat

SEQ ID NO: 109721 - DNA, 20 bp, Artificial Sequence
  Description of Artificial Sequence: Synthetic oligonucleotide
  Target: LAMA2; (-) strand; PAM type: NRG; PAM sequence: AAG
aaatcgcagggcagagttgc

SEQ ID NO: 109722 - DNA, 20 bp, Artificial Sequence
  Description of Artificial Sequence: Synthetic oligonucleotide
  Target: LAMA2; (-) strand; PAM type: NRG; PAM sequence: GAG
agaataaaaatcgcagggca

SEQ ID NO: 109723 - DNA, 20 bp, Artificial Sequence
  Description of Artificial Sequence: Synthetic oligonucleotide
  Target: LAMA2; (-) strand; PAM type: NRG; PAM sequence: CAG
ccagaataaaaatcgcaggg

SEQ ID NO: 109724 - DNA, 20 bp, Artificial Sequence
  Description of Artificial Sequence: Synthetic oligonucleotide
  Target: LAMA2; (-) strand; PAM type: NRG; PAM sequence: GGG
tatccagaataaaaatcgca

SEQ ID NO: 109725 - DNA, 20 bp, Artificial Sequence
  Description of Artificial Sequence: Synthetic oligonucleotide
  Target: LAMA2; (-) strand; PAM type: NRG; PAM sequence: AGG
atatccagaataaaaatcgc

SEQ ID NO: 109726 - DNA, 20 bp, Artificial Sequence
  Description of Artificial Sequence: Synthetic oligonucleotide
  Target: LAMA2; (-) strand; PAM type: NRG; PAM sequence: CAG
tatatccagaataaaaatcg

SEQ ID NO: 109727 - DNA, 20 bp, Artificial Sequence
  Description of Artificial Sequence: Synthetic oligonucleotide
  Target: LAMA2; (-) strand; PAM type: NRG; PAM sequence: CAG
tggcacaagatagatatatc

SEQ ID NO: 109728 - DNA, 20 bp, Artificial Sequence
  Description of Artificial Sequence: Synthetic oligonucleotide
  Target: LAMA2; (-) strand; PAM type: NRG; PAM sequence: TAG
cccattgaaatggcacaaga

SEQ ID NO: 109729 - DNA, 20 bp, Artificial Sequence
  Description of Artificial Sequence: Synthetic oligonucleotide
  Target: LAMA2; (-) strand; PAM type: NRG; PAM sequence: AAG
catgcccattgaaatggcac

SEQ ID NO: 109730 - DNA, 20 bp, Artificial Sequence
  Description of Artificial Sequence: Synthetic oligonucleotide
  Target: LAMA2; (-) strand; PAM type: NRG; PAM sequence: TGG
ttgtcacatgcccattgaaa

SEQ ID NO: 109731 - DNA, 20 bp, Artificial Sequence
  Description of Artificial Sequence: Synthetic oligonucleotide
  Target: LAMA2; (-) strand; PAM type: NRG; PAM sequence: CAG
gtcgactgggaacacaatga

SEQ ID NO: 109732 - DNA, 20 bp, Artificial Sequence
  Description of Artificial Sequence: Synthetic oligonucleotide
  Target: LAMA2; (-) strand; PAM type: NRG; PAM sequence: GGG
cagagtagcaagggtcgact

SEQ ID NO: 109733 - DNA, 20 bp, Artificial Sequence
  Description of Artificial Sequence: Synthetic oligonucleotide
  Target: LAMA2; (-) strand; PAM type: NRG; PAM sequence: TGG
gcagagtagcaagggtcgac

SEQ ID NO: 109734 - DNA, 20 bp, Artificial Sequence
  Description of Artificial Sequence: Synthetic oligonucleotide
  Target: LAMA2; (-) strand; PAM type: NRG; PAM sequence: GGG
tggaagcagcagagtagcaa

SEQ ID NO: 109735 - DNA, 20 bp, Artificial Sequence
  Description of Artificial Sequence: Synthetic oligonucleotide
  Target: LAMA2; (-) strand; PAM type: NRG; PAM sequence: AGG
atggaagcagcagagtagca

SEQ ID NO: 109736 - DNA, 20 bp, Artificial Sequence
  Description of Artificial Sequence: Synthetic oligonucleotide
  Target: LAMA2; (-) strand; PAM type: NRG; PAM sequence: AAG
aatggaagcagcagagtagc

SEQ ID NO: 109737 - DNA, 20 bp, Artificial Sequence
  Description of Artificial Sequence: Synthetic oligonucleotide
  Target: LAMA2; (-) strand; PAM type: NRG; PAM sequence: TAG
agggaatggaagcagcagag

SEQ ID NO: 109738 - DNA, 20 bp, Artificial Sequence
  Description of Artificial Sequence: Synthetic oligonucleotide
  Target: LAMA2; (-) strand; PAM type: NRG; PAM sequence: GAG
atgagggaatggaagcagca

SEQ ID NO: 109739 - DNA, 20 bp, Artificial Sequence
  Description of Artificial Sequence: Synthetic oligonucleotide
  Target: LAMA2; (-) strand; PAM type: NRG; PAM sequence: CAG
caatgagggaatggaagcag

SEQ ID NO: 109740 - DNA, 20 bp, Artificial Sequence
  Description of Artificial Sequence: Synthetic oligonucleotide
  Target: LAMA2; (-) strand; PAM type: NRG; PAM sequence: CAG
tcacaatgagggaatggaag

SEQ ID NO: 109741 - DNA, 20 bp, Artificial Sequence
  Description of Artificial Sequence: Synthetic oligonucleotide
  Target: LAMA2; (-) strand; PAM type: NRG; PAM sequence: AAG
gactcacaatgagggaatgg

SEQ ID NO: 109742 - DNA, 20 bp, Artificial Sequence
  Description of Artificial Sequence: Synthetic oligonucleotide
  Target: LAMA2; (-) strand; PAM type: NRG; PAM sequence: TGG
caggactcacaatgagggaa

SEQ ID NO: 109743 - DNA, 20 bp, Artificial Sequence
  Description of Artificial Sequence: Synthetic oligonucleotide
  Target: LAMA2; (-) strand; PAM type: NRG; PAM sequence: GGG
aaaagcaggactcacaatga

SEQ ID NO: 109744 - DNA, 20 bp, Artificial Sequence
  Description of Artificial Sequence: Synthetic oligonucleotide
  Target: LAMA2; (-) strand; PAM type: NRG; PAM sequence: AGG
caaaagcaggactcacaatg

SEQ ID NO: 109745 - DNA, 20 bp, Artificial Sequence
  Description of Artificial Sequence: Synthetic oligonucleotide
  Target: LAMA2; (-) strand; PAM type: NRG; PAM sequence: GAG
gcaaaagcaggactcacaat

SEQ ID NO: 109746 - DNA, 20 bp, Artificial Sequence
  Description of Artificial Sequence: Synthetic oligonucleotide
  Target: LAMA2; (-) strand; PAM type: NRG; PAM sequence: AGG
agaattagtttggcaaaagc

SEQ ID NO: 109747 - DNA, 20 bp, Artificial Sequence
  Description of Artificial Sequence: Synthetic oligonucleotide
  Target: LAMA2; (-) strand; PAM type: NRG; PAM sequence: CAG
tagaattagtttggcaaaag

SEQ ID NO: 109748 - DNA, 20 bp, Artificial Sequence
  Description of Artificial Sequence: Synthetic oligonucleotide
  Target: LAMA2; (-) strand; PAM type: NRG; PAM sequence: AAG
tgctagaattagtttggcaa

SEQ ID NO: 109749 - DNA, 20 bp, Artificial Sequence
  Description of Artificial Sequence: Synthetic oligonucleotide
  Target: LAMA2; (-) strand; PAM type: NRG; PAM sequence: TGG
aaaatgtgctagaattagtt

SEQ ID NO: 109750 - DNA, 20 bp, Artificial Sequence
  Description of Artificial Sequence: Synthetic oligonucleotide
  Target: LAMA2; (-) strand; PAM type: NRG; PAM sequence: TAG
gaagaaaaatgtgctagaat

SEQ ID NO: 109751 - DNA, 20 bp, Artificial Sequence
  Description of Artificial Sequence: Synthetic oligonucleotide
  Target: LAMA2; (-) strand; PAM type: NRG; PAM sequence: TAG
agagtagaagaaaaatgtgc

SEQ ID NO: 109752 - DNA, 20 bp, Artificial Sequence
  Description of Artificial Sequence: Synthetic oligonucleotide
  Target: LAMA2; (-) strand; PAM type: NRG; PAM sequence: AAG
atctcctcctcatagagtag

SEQ ID NO: 109753 - DNA, 20 bp, Artificial Sequence
  Description of Artificial Sequence: Synthetic oligonucleotide
  Target: LAMA2; (-) strand; PAM type: NRG; PAM sequence: TAG
ctcatctcctcctcatagag

SEQ ID NO: 109754 - DNA, 20 bp, Artificial Sequence
  Description of Artificial Sequence: Synthetic oligonucleotide
  Target: LAMA2; (-) strand; PAM type: NRG; PAM sequence: GAG
tttctcatctcctcctcata

SEQ ID NO: 109755 - DNA, 20 bp, Artificial Sequence
  Description of Artificial Sequence: Synthetic oligonucleotide
  Target: LAMA2; (-) strand; PAM type: NRG; PAM sequence: TAG
cctttctcatctcctcctca

SEQ ID NO: 109756 - DNA, 20 bp, Artificial Sequence
  Description of Artificial Sequence: Synthetic oligonucleotide
  Target: LAMA2; (-) strand; PAM type: NRG; PAM sequence: TGG
cacacatacgtctttaagtc

SEQ ID NO: 109757 - DNA, 20 bp, Artificial Sequence
  Description of Artificial Sequence: Synthetic oligonucleotide
  Target: LAMA2; (-) strand; PAM type: NRG; PAM sequence: AAG
ctacacacacatacgtcttt

SEQ ID NO: 109758 - DNA, 20 bp, Artificial Sequence
  Description of Artificial Sequence: Synthetic oligonucleotide
  Target: LAMA2; (-) strand; PAM type: NRG; PAM sequence: AGG
tcacatccaccaaaactcaa

SEQ ID NO: 109759 - DNA, 20 bp, Artificial Sequence
  Description of Artificial Sequence: Synthetic oligonucleotide
  Target: LAMA2; (-) strand; PAM type: NRG; PAM sequence: AAG
atcacatccaccaaaactca

SEQ ID NO: 109760 - DNA, 20 bp, Artificial Sequence
  Description of Artificial Sequence: Synthetic oligonucleotide
  Target: LAMA2; (-) strand; PAM type: NRG; PAM sequence: AAG
gtcattctactttctctcta

SEQ ID NO: 109761 - DNA, 20 bp, Artificial Sequence
  Description of Artificial Sequence: Synthetic oligonucleotide
  Target: LAMA2; (-) strand; PAM type: NRG; PAM sequence: TAG
caaacccaataacagaagcc

SEQ ID NO: 109762 - DNA, 20 bp, Artificial Sequence
  Description of Artificial Sequence: Synthetic oligonucleotide
  Target: LAMA2; (-) strand; PAM type: NRG; PAM sequence: AAG
gctctcaaacccaataacag

SEQ ID NO: 109763 - DNA, 20 bp, Artificial Sequence
  Description of Artificial Sequence: Synthetic oligonucleotide
  Target: LAMA2; (-) strand; PAM type: NRG; PAM sequence: CAG
tcagctctcaaacccaataa

SEQ ID NO: 109764 - DNA, 20 bp, Artificial Sequence
  Description of Artificial Sequence: Synthetic oligonucleotide
  Target: LAMA2; (-) strand; PAM type: NRG; PAM sequence: CAG
attccctctccttattcctt

SEQ ID NO: 109765 - DNA, 20 bp, Artificial Sequence
  Description of Artificial Sequence: Synthetic oligonucleotide
  Target: LAMA2; (-) strand; PAM type: NRG; PAM sequence: TAG
taatccatagttttattttc

SEQ ID NO: 109766 - DNA, 20 bp, Artificial Sequence
  Description of Artificial Sequence: Synthetic oligonucleotide
  Target: LAMA2; (-) strand; PAM type: NRG; PAM sequence: TAG
aagatttaatttataatcca

SEQ ID NO: 109767 - DNA, 20 bp, Artificial Sequence
  Description of Artificial Sequence: Synthetic oligonucleotide
  Target: LAMA2; (-) strand; PAM type: NRG; PAM sequence: AAG
gatttctggagaataagaag

SEQ ID NO: 109768 - DNA, 20 bp, Artificial Sequence
  Description of Artificial Sequence: Synthetic oligonucleotide
  Target: LAMA2; (-) strand; PAM type: NRG; PAM sequence: AAG
tgtgatttctggagaataag

SEQ ID NO: 109769 - DNA, 20 bp, Artificial Sequence
  Description of Artificial Sequence: Synthetic oligonucleotide
  Target: LAMA2; (-) strand; PAM type: NRG; PAM sequence: AAG
acttgtgatttctggagaat

SEQ ID NO: 109770 - DNA, 20 bp, Artificial Sequence
  Description of Artificial Sequence: Synthetic oligonucleotide
  Target: LAMA2; (-) strand; PAM type: NRG; PAM sequence: GAG
ttttttacttgtgatttctg

SEQ ID NO: 109771 - DNA, 20 bp, Artificial Sequence
  Description of Artificial Sequence: Synthetic oligonucleotide
  Target: LAMA2; (-) strand; PAM type: NRG; PAM sequence: TGG
atttttttacttgtgatttc

SEQ ID NO: 109772 - DNA, 20 bp, Artificial Sequence
  Description of Artificial Sequence: Synthetic oligonucleotide
  Target: LAMA2; (-) strand; PAM type: NRG; PAM sequence: AAG
atagaattatcgatagttaa

SEQ ID NO: 109773 - DNA, 20 bp, Artificial Sequence
  Description of Artificial Sequence: Synthetic oligonucleotide
  Target: LAMA2; (-) strand; PAM type: NRG; PAM sequence: TAG
tgaagacatagaattatcga

SEQ ID NO: 109774 - DNA, 20 bp, Artificial Sequence
  Description of Artificial Sequence: Synthetic oligonucleotide
  Target: LAMA2; (-) strand; PAM type: NRG; PAM sequence: TAG
ttgtaacaagggtgaagaca

SEQ ID NO: 109775 - DNA, 20 bp, Artificial Sequence
  Description of Artificial Sequence: Synthetic oligonucleotide
  Target: LAMA2; (-) strand; PAM type: NRG; PAM sequence: AAG
tttgaattgtaacaagggtg

SEQ ID NO: 109776 - DNA, 20 bp, Artificial Sequence
  Description of Artificial Sequence: Synthetic oligonucleotide
  Target: LAMA2; (-) strand; PAM type: NRG; PAM sequence: GGG
ttcagtttgaattgtaacaa

SEQ ID NO: 109777 - DNA, 20 bp, Artificial Sequence
  Description of Artificial Sequence: Synthetic oligonucleotide
  Target: LAMA2; (-) strand; PAM type: NRG; PAM sequence: AGG
attcagtttgaattgtaaca

SEQ ID NO: 109778 - DNA, 20 bp, Artificial Sequence
  Description of Artificial Sequence: Synthetic oligonucleotide
  Target: LAMA2; (-) strand; PAM type: NRG; PAM sequence: AAG
gattcagtttgaattgtaac

SEQ ID NO: 109779 - DNA, 20 bp, Artificial Sequence
  Description of Artificial Sequence: Synthetic oligonucleotide
  Target: LAMA2; (-) strand; PAM type: NRG; PAM sequence: CAG
aagaaagaactcttgtgatt

SEQ ID NO: 109780 - DNA, 20 bp, Artificial Sequence
  Description of Artificial Sequence: Synthetic oligonucleotide
  Target: LAMA2; (-) strand; PAM type: NRG; PAM sequence: AAG
atccataactaaaagtaaga

SEQ ID NO: 109781 - DNA, 20 bp, Artificial Sequence
  Description of Artificial Sequence: Synthetic oligonucleotide
  Target: LAMA2; (-) strand; PAM type: NRG; PAM sequence: AAG
gtgtatccataactaaaagt

SEQ ID NO: 109782 - DNA, 20 bp, Artificial Sequence
  Description of Artificial Sequence: Synthetic oligonucleotide
  Target: LAMA2; (-) strand; PAM type: NRG; PAM sequence: AAG
catagtgtatccataactaa

SEQ ID NO: 109783 - DNA, 20 bp, Artificial Sequence
  Description of Artificial Sequence: Synthetic oligonucleotide
  Target: LAMA2; (-) strand; PAM type: NRG; PAM sequence: TAG
aataaaagacagaggaggca

SEQ ID NO: 109784 - DNA, 20 bp, Artificial Sequence
  Description of Artificial Sequence: Synthetic oligonucleotide
  Target: LAMA2; (-) strand; PAM type: NRG; PAM sequence: AGG
ttttaaataaaagacagagg

SEQ ID NO: 109785 - DNA, 20 bp, Artificial Sequence
  Description of Artificial Sequence: Synthetic oligonucleotide
  Target: LAMA2; (-) strand; PAM type: NRG; PAM sequence: GAG
attttaaataaaagacagag

SEQ ID NO: 109786 - DNA, 20 bp, Artificial Sequence
  Description of Artificial Sequence: Synthetic oligonucleotide
  Target: LAMA2; (-) strand; PAM type: NRG; PAM sequence: AGG
tgattttaaataaaagacag

SEQ ID NO: 109787 - DNA, 20 bp, Artificial Sequence
  Description of Artificial Sequence: Synthetic oligonucleotide
  Target: LAMA2; (-) strand; PAM type: NRG; PAM sequence: GAG
ctgattttaaataaaagaca

SEQ ID NO: 109788 - DNA, 20 bp, Artificial Sequence
  Description of Artificial Sequence: Synthetic oligonucleotide
  Target: LAMA2; (-) strand; PAM type: NRG; PAM sequence: CAG
ggctgattttaaataaaaga

SEQ ID NO: 109789 - DNA, 20 bp, Artificial Sequence
  Description of Artificial Sequence: Synthetic oligonucleotide
  Target: LAMA2; (-) strand; PAM type: NRG; PAM sequence: AAG
cctgggctgattttaaataa

SEQ ID NO: 109790 - DNA, 20 bp, Artificial Sequence
  Description of Artificial Sequence: Synthetic oligonucleotide
  Target: LAMA2; (-) strand; PAM type: NRG; PAM sequence: GGG
ctagaaaaataagcactcct

SEQ ID NO: 109791 - DNA, 20 bp, Artificial Sequence
  Description of Artificial Sequence: Synthetic oligonucleotide
  Target: LAMA2; (-) strand; PAM type: NRG; PAM sequence: TGG
cctagaaaaataagcactcc

SEQ ID NO: 109792 - DNA, 20 bp, Artificial Sequence
  Description of Artificial Sequence: Synthetic oligonucleotide
  Target: LAMA2; (-) strand; PAM type: NRG; PAM sequence: AAG
cgaggaaaacctagaaaaat

SEQ ID NO: 109793 - DNA, 20 bp, Artificial Sequence
  Description of Artificial Sequence: Synthetic oligonucleotide
  Target: LAMA2; (-) strand; PAM type: NRG; PAM sequence: TAG
aaataatagcgaggaaaacc

SEQ ID NO: 109794 - DNA, 20 bp, Artificial Sequence
  Description of Artificial Sequence: Synthetic oligonucleotide
  Target: LAMA2; (-) strand; PAM type: NRG; PAM sequence: AGG
gaacttacaaaataatagcg

SEQ ID NO: 109795 - DNA, 20 bp, Artificial Sequence
  Description of Artificial Sequence: Synthetic oligonucleotide
  Target: LAMA2; (-) strand; PAM type: NRG; PAM sequence: GAG
ggaacttacaaaataatagc

SEQ ID NO: 109796 - DNA, 20 bp, Artificial Sequence
  Description of Artificial Sequence: Synthetic oligonucleotide
  Target: LAMA2; (-) strand; PAM type: NRG; PAM sequence: TAG
aaatggaacttacaaaataa

SEQ ID NO: 109797 - DNA, 20 bp, Artificial Sequence
  Description of Artificial Sequence: Synthetic oligonucleotide
  Target: LAMA2; (-) strand; PAM type: NRG; PAM sequence: TGG
aagaattgcagatttcaaaa

SEQ ID NO: 109798 - DNA, 20 bp, Artificial Sequence
  Description of Artificial Sequence: Synthetic oligonucleotide
  Target: LAMA2; (-) strand; PAM type: NRG; PAM sequence: CAG
agctattcagagaagaattg

SEQ ID NO: 109799 - DNA, 20 bp, Artificial Sequence
  Description of Artificial Sequence: Synthetic oligonucleotide
  Target: LAMA2; (-) strand; PAM type: NRG; PAM sequence: AAG
tgagtagaagctattcagag

SEQ ID NO: 109800 - DNA, 20 bp, Artificial Sequence
  Description of Artificial Sequence: Synthetic oligonucleotide
  Target: LAMA2; (-) strand; PAM type: NRG; PAM sequence: GAG
agatgagtagaagctattca

SEQ ID NO: 109801 - DNA, 20 bp, Artificial Sequence
  Description of Artificial Sequence: Synthetic oligonucleotide
  Target: LAMA2; (-) strand; PAM type: NRG; PAM sequence: CAG
ttagatgagtagaagctatt

SEQ ID NO: 109802 - DNA, 20 bp, Artificial Sequence
  Description of Artificial Sequence: Synthetic oligonucleotide
  Target: LAMA2; (-) strand; PAM type: NRG; PAM sequence: AAG
tgatagaattagatgagtag

SEQ ID NO: 109803 - DNA, 20 bp, Artificial Sequence
  Description of Artificial Sequence: Synthetic oligonucleotide
  Target: LAMA2; (-) strand; PAM type: NRG; PAM sequence: TAG
tggtgatagaattagatgag

SEQ ID NO: 109804 - DNA, 20 bp, Artificial Sequence
  Description of Artificial Sequence: Synthetic oligonucleotide
  Target: LAMA2; (-) strand; PAM type: NRG; PAM sequence: GAG
ctttggtgatagaattagat

SEQ ID NO: 109805 - DNA, 20 bp, Artificial Sequence
  Description of Artificial Sequence: Synthetic oligonucleotide
  Target: LAMA2; (-) strand; PAM type: NRG; PAM sequence: TAG
tgtagctttggtgatagaat

SEQ ID NO: 109806 - DNA, 20 bp, Artificial Sequence
  Description of Artificial Sequence: Synthetic oligonucleotide
  Target: LAMA2; (-) strand; PAM type: NRG; PAM sequence: TAG
acattttgtagctttggtga

SEQ ID NO: 109807 - DNA, 20 bp, Artificial Sequence
  Description of Artificial Sequence: Synthetic oligonucleotide
  Target: LAMA2; (-) strand; PAM type: NRG; PAM sequence: TGG
atctaaacattttgtagctt

SEQ ID NO: 109808 - DNA, 20 bp, Artificial Sequence
  Description of Artificial Sequence: Synthetic oligonucleotide
  Target: LAMA2; (-) strand; PAM type: NRG; PAM sequence: TAG
aactacatctaaacattttg

SEQ ID NO: 109809 - DNA, 20 bp, Artificial Sequence
  Description of Artificial Sequence: Synthetic oligonucleotide
  Target: LAMA2; (-) strand; PAM type: NRG; PAM sequence: TGG
cctttttctaaagtagtttc

SEQ ID NO: 109810 - DNA, 20 bp, Artificial Sequence
  Description of Artificial Sequence: Synthetic oligonucleotide
  Target: LAMA2; (-) strand; PAM type: NRG; PAM sequence: TAG
ctgatcacctttttctaaag

SEQ ID NO: 109811 - DNA, 20 bp, Artificial Sequence
  Description of Artificial Sequence: Synthetic oligonucleotide
  Target: LAMA2; (-) strand; PAM type: NRG; PAM sequence: AAG
acgctgatcacctttttcta

SEQ ID NO: 109812 - DNA, 20 bp, Artificial Sequence
  Description of Artificial Sequence: Synthetic oligonucleotide
  Target: LAMA2; (-) strand; PAM type: NRG; PAM sequence: CAG
ctgatttttttttaatgttt

SEQ ID NO: 109813 - DNA, 20 bp, Artificial Sequence
  Description of Artificial Sequence: Synthetic oligonucleotide
  Target: LAMA2; (-) strand; PAM type: NRG; PAM sequence: AAG
cattttttttttgtactagc

SEQ ID NO: 109814 - DNA, 20 bp, Artificial Sequence
  Description of Artificial Sequence: Synthetic oligonucleotide
  Target: LAMA2; (-) strand; PAM type: NRG; PAM sequence: TAG
tctgcattttttttttgtac

SEQ ID NO: 109815 - DNA, 20 bp, Artificial Sequence
  Description of Artificial Sequence: Synthetic oligonucleotide
  Target: LAMA2; (-) strand; PAM type: NRG; PAM sequence: AAG
ctgctgcctctcaagttcca

SEQ ID NO: 109816 - DNA, 20 bp, Artificial Sequence
  Description of Artificial Sequence: Synthetic oligonucleotide
  Target: LAMA2; (-) strand; PAM type: NRG; PAM sequence: AAG
tatttttactgctgcctctc

SEQ ID NO: 109817 - DNA, 20 bp, Artificial Sequence
  Description of Artificial Sequence: Synthetic oligonucleotide
  Target: LAMA2; (-) strand; PAM type: NRG; PAM sequence: AAG
ttattcagaagactgacctg

SEQ ID NO: 109818 - DNA, 20 bp, Artificial Sequence
  Description of Artificial Sequence: Synthetic oligonucleotide
  Target: LAMA2; (-) strand; PAM type: NRG; PAM sequence: AAG
caactgggccaattattcag

SEQ ID NO: 109819 - DNA, 20 bp, Artificial Sequence
  Description of Artificial Sequence: Synthetic oligonucleotide
  Target: LAMA2; (-) strand; PAM type: NRG; PAM sequence: CAG
gaacaactgggccaattatt

SEQ ID NO: 109820 - DNA, 20 bp, Artificial Sequence
  Description of Artificial Sequence: Synthetic oligonucleotide
  Target: LAMA2; (-) strand; PAM type: NRG; PAM sequence: GGG
aaaatgctggctgaacaact

SEQ ID NO: 109821 - DNA, 20 bp, Artificial Sequence
  Description of Artificial Sequence: Synthetic oligonucleotide
  Target: LAMA2; (-) strand; PAM type: NRG; PAM sequence: TGG
caaaatgctggctgaacaac

SEQ ID NO: 109822 - DNA, 20 bp, Artificial Sequence
  Description of Artificial Sequence: Synthetic oligonucleotide
  Target: LAMA2; (-) strand; PAM type: NRG; PAM sequence: TGG
gcattctgatagcaaaatgc

SEQ ID NO: 109823 - DNA, 20 bp, Artificial Sequence
  Description of Artificial Sequence: Synthetic oligonucleotide
  Target: LAMA2; (-) strand; PAM type: NRG; PAM sequence: TAG
taccactttctgcattctga

SEQ ID NO: 109824 - DNA, 20 bp, Artificial Sequence
  Description of Artificial Sequence: Synthetic oligonucleotide
  Target: LAMA2; (-) strand; PAM type: NRG; PAM sequence: GGG
ttaatttgaagggtatccct

SEQ ID NO: 109825 - DNA, 20 bp, Artificial Sequence
  Description of Artificial Sequence: Synthetic oligonucleotide
  Target: LAMA2; (-) strand; PAM type: NRG; PAM sequence: TGG
attaatttgaagggtatccc

SEQ ID NO: 109826 - DNA, 20 bp, Artificial Sequence
  Description of Artificial Sequence: Synthetic oligonucleotide
  Target: LAMA2; (-) strand; PAM type: NRG; PAM sequence: GGG
agaaagatcattaatttgaa

SEQ ID NO: 109827 - DNA, 20 bp, Artificial Sequence
  Description of Artificial Sequence: Synthetic oligonucleotide
  Target: LAMA2; (-) strand; PAM type: NRG; PAM sequence: AGG
gagaaagatcattaatttga

SEQ ID NO: 109828 - DNA, 20 bp, Artificial Sequence
  Description of Artificial Sequence: Synthetic oligonucleotide
  Target: LAMA2; (-) strand; PAM type: NRG; PAM sequence: AAG
tgagaaagatcattaatttg

SEQ ID NO: 109829 - DNA, 20 bp, Artificial Sequence
  Description of Artificial Sequence: Synthetic oligonucleotide
  Target: LAMA2; (-) strand; PAM type: NRG; PAM sequence: AAG
gatattcatgtatggtgaga

SEQ ID NO: 109830 - DNA, 20 bp, Artificial Sequence
  Description of Artificial Sequence: Synthetic oligonucleotide
  Target: LAMA2; (-) strand; PAM type: NRG; PAM sequence: GAG
gcaagatattcatgtatggt

SEQ ID NO: 109831 - DNA, 20 bp, Artificial Sequence
  Description of Artificial Sequence: Synthetic oligonucleotide
  Target: LAMA2; (-) strand; PAM type: NRG; PAM sequence: TGG
gcaagcaagatattcatgta

SEQ ID NO: 109832 - DNA, 20 bp, Artificial Sequence
  Description of Artificial Sequence: Synthetic oligonucleotide
  Target: LAMA2; (-) strand; PAM type: NRG; PAM sequence: AAG
attcaaatgttctggcaagc

SEQ ID NO: 109833 - DNA, 20 bp, Artificial Sequence
  Description of Artificial Sequence: Synthetic oligonucleotide
  Target: LAMA2; (-) strand; PAM type: NRG; PAM sequence: AAG
gagcattcaaatgttctggc

SEQ ID NO: 109834 - DNA, 20 bp, Artificial Sequence
  Description of Artificial Sequence: Synthetic oligonucleotide
  Target: LAMA2; (-) strand; PAM type: NRG; PAM sequence: TGG
aatggagcattcaaatgttc

SEQ ID NO: 109835 - DNA, 20 bp, Artificial Sequence
  Description of Artificial Sequence: Synthetic oligonucleotide
  Target: LAMA2; (-) strand; PAM type: NRG; PAM sequence: GAG
atttagtttttaaaataatg

SEQ ID NO: 109836 - DNA, 20 bp, Artificial Sequence
  Description of Artificial Sequence: Synthetic oligonucleotide
  Target: LAMA2; (-) strand; PAM type: NRG; PAM sequence: TGG
ggatttagtttttaaaataa

SEQ ID NO: 109837 - DNA, 20 bp, Artificial Sequence
  Description of Artificial Sequence: Synthetic oligonucleotide
  Target: LAMA2; (-) strand; PAM type: NRG; PAM sequence: TAG
cttagcttcttgattggatt

SEQ ID NO: 109838 - DNA, 20 bp, Artificial Sequence
  Description of Artificial Sequence: Synthetic oligonucleotide
  Target: LAMA2; (-) strand; PAM type: NRG; PAM sequence: TGG
tcatttcttagcttcttgat

SEQ ID NO: 109839 - DNA, 20 bp, Artificial Sequence
  Description of Artificial Sequence: Synthetic oligonucleotide
  Target: LAMA2; (-) strand; PAM type: NRG; PAM sequence: TAG
actgtagaaatttcatttct

SEQ ID NO: 109840 - DNA, 20 bp, Artificial Sequence
  Description of Artificial Sequence: Synthetic oligonucleotide
  Target: LAMA2; (-) strand; PAM type: NRG; PAM sequence: TAG
cacttaagaaaatggaactg

SEQ ID NO: 109841 - DNA, 20 bp, Artificial Sequence
  Description of Artificial Sequence: Synthetic oligonucleotide
  Target: LAMA2; (-) strand; PAM type: NRG; PAM sequence: TGG
gtcttcaacacttaagaaaa

SEQ ID NO: 109842 - DNA, 20 bp, Artificial Sequence
  Description of Artificial Sequence: Synthetic oligonucleotide
  Target: LAMA2; (-) strand; PAM type: NRG; PAM sequence: AAG
cttgaaagtcttcaacactt

SEQ ID NO: 109843 - DNA, 20 bp, Artificial Sequence
  Description of Artificial Sequence: Synthetic oligonucleotide
  Target: LAMA2; (-) strand; PAM type: NRG; PAM sequence: AAG
ctcttttgatattagcttga

SEQ ID NO: 109844 - DNA, 20 bp, Artificial Sequence
  Description of Artificial Sequence: Synthetic oligonucleotide
  Target: LAMA2; (-) strand; PAM type: NRG; PAM sequence: TAG
aagggctgctcttttgatat

SEQ ID NO: 109845 - DNA, 20 bp, Artificial Sequence
  Description of Artificial Sequence: Synthetic oligonucleotide
  Target: LAMA2; (-) strand; PAM type: NRG; PAM sequence: GGG
acaaattctttgagaataaa

SEQ ID NO: 109846 - DNA, 20 bp, Artificial Sequence
  Description of Artificial Sequence: Synthetic oligonucleotide
  Target: LAMA2; (-) strand; PAM type: NRG; PAM sequence: AGG
tacaaattctttgagaataa

SEQ ID NO: 109847 - DNA, 20 bp, Artificial Sequence
  Description of Artificial Sequence: Synthetic oligonucleotide
  Target: LAMA2; (-) strand; PAM type: NRG; PAM sequence: AAG
atacaaattctttgagaata

SEQ ID NO: 109848 - DNA, 20 bp, Artificial Sequence
  Description of Artificial Sequence: Synthetic oligonucleotide
  Target: LAMA2; (-) strand; PAM type: NRG; PAM sequence: GAG
gatatctatacaaattcttt

SEQ ID NO: 109849 - DNA, 20 bp, Artificial Sequence
  Description of Artificial Sequence: Synthetic oligonucleotide
  Target: LAMA2; (-) strand; PAM type: NRG; PAM sequence: CAG
catactctctgaaataaagc

SEQ ID NO: 109850 - DNA, 20 bp, Artificial Sequence
  Description of Artificial Sequence: Synthetic oligonucleotide
  Target: LAMA2; (-) strand; PAM type: NRG; PAM sequence: AAG
aaagcatactctctgaaata

SEQ ID NO: 109851 - DNA, 20 bp, Artificial Sequence
  Description of Artificial Sequence: Synthetic oligonucleotide
  Target: LAMA2; (-) strand; PAM type: NRG; PAM sequence: AAG
atctttggataggctaccaa

SEQ ID NO: 109852 - DNA, 20 bp, Artificial Sequence
  Description of Artificial Sequence: Synthetic oligonucleotide
  Target: LAMA2; (-) strand; PAM type: NRG; PAM sequence: AGG
ctaaaataaaatctttggat

SEQ ID NO: 109853 - DNA, 20 bp, Artificial Sequence
  Description of Artificial Sequence: Synthetic oligonucleotide
  Target: LAMA2; (-) strand; PAM type: NRG; PAM sequence: TAG
actaaaataaaatctttgga

SEQ ID NO: 109854 - DNA, 20 bp, Artificial Sequence
  Description of Artificial Sequence: Synthetic oligonucleotide
  Target: LAMA2; (-) strand; PAM type: NRG; PAM sequence: TGG
ttatactaaaataaaatctt

SEQ ID NO: 109855 - DNA, 20 bp, Artificial Sequence
  Description of Artificial Sequence: Synthetic oligonucleotide
  Target: LAMA2; (-) strand; PAM type: NRG; PAM sequence: TGG
aaatatactttccaagtaat

SEQ ID NO: 109856 - DNA, 20 bp, Artificial Sequence
  Description of Artificial Sequence: Synthetic oligonucleotide
  Target: LAMA2; (-) strand; PAM type: NRG; PAM sequence: AAG
gcccacaaaatatactttcc

SEQ ID NO: 109857 - DNA, 20 bp, Artificial Sequence
  Description of Artificial Sequence: Synthetic oligonucleotide
  Target: LAMA2; (-) strand; PAM type: NRG; PAM sequence: AAG
atattattattttcaattct

SEQ ID NO: 109858 - DNA, 20 bp, Artificial Sequence
  Description of Artificial Sequence: Synthetic oligonucleotide
  Target: LAMA2; (-) strand; PAM type: NRG; PAM sequence: CAG
aaacatcaatatgtctagtt

SEQ ID NO: 109859 - DNA, 20 bp, Artificial Sequence
  Description of Artificial Sequence: Synthetic oligonucleotide
  Target: LAMA2; (-) strand; PAM type: NRG; PAM sequence: TAG
ctctaaaacatcaatatgtc

SEQ ID NO: 109860 - DNA, 20 bp, Artificial Sequence
  Description of Artificial Sequence: Synthetic oligonucleotide
  Target: LAMA2; (-) strand; PAM type: NRG; PAM sequence: CGG
taaaatattccagcaaagca

SEQ ID NO: 109861 - DNA, 20 bp, Artificial Sequence
  Description of Artificial Sequence: Synthetic oligonucleotide
  Target: LAMA2; (-) strand; PAM type: NRG; PAM sequence: AAG
aagcataaaatattccagca

SEQ ID NO: 109862 - DNA, 20 bp, Artificial Sequence
  Description of Artificial Sequence: Synthetic oligonucleotide
  Target: LAMA2; (-) strand; PAM type: NRG; PAM sequence: CAG
aaacaaagcataaaatattc

SEQ ID NO: 109863 - DNA, 20 bp, Artificial Sequence
  Description of Artificial Sequence: Synthetic oligonucleotide
  Target: LAMA2; (-) strand; PAM type: NRG; PAM sequence: AAG
cctgacatcactgaaaaaca

SEQ ID NO: 109864 - DNA, 20 bp, Artificial Sequence
  Description of Artificial Sequence: Synthetic oligonucleotide
  Target: LAMA2; (-) strand; PAM type: NRG; PAM sequence: AAG
tgttgttaaattccaagcca

SEQ ID NO: 109865 - DNA, 20 bp, Artificial Sequence
  Description of Artificial Sequence: Synthetic oligonucleotide
  Target: LAMA2; (-) strand; PAM type: NRG; PAM sequence: AAG
agtgtctgttgttaaattcc

SEQ ID NO: 109866 - DNA, 20 bp, Artificial Sequence
  Description of Artificial Sequence: Synthetic oligonucleotide
  Target: LAMA2; (-) strand; PAM type: NRG; PAM sequence: AAG
taagcacataacattgttta

SEQ ID NO: 109867 - DNA, 20 bp, Artificial Sequence
  Description of Artificial Sequence: Synthetic oligonucleotide
  Target: LAMA2; (-) strand; PAM type: NRG; PAM sequence: AAG
actacagattatactaatat

SEQ ID NO: 109868 - DNA, 20 bp, Artificial Sequence
  Description of Artificial Sequence: Synthetic oligonucleotide
  Target: LAMA2; (-) strand; PAM type: NRG; PAM sequence: CAG
cttaaacttctgttatacta

SEQ ID NO: 109869 - DNA, 20 bp, Artificial Sequence
  Description of Artificial Sequence: Synthetic oligonucleotide
  Target: LAMA2; (-) strand; PAM type: NRG; PAM sequence: CAG
catataaagggttttatagg

SEQ ID NO: 109870 - DNA, 20 bp, Artificial Sequence
  Description of Artificial Sequence: Synthetic oligonucleotide
  Target: LAMA2; (-) strand; PAM type: NRG; PAM sequence: AGG
cttcatataaagggttttat

SEQ ID NO: 109871 - DNA, 20 bp, Artificial Sequence
  Description of Artificial Sequence: Synthetic oligonucleotide
  Target: LAMA2; (-) strand; PAM type: NRG; PAM sequence: TAG
acttcatataaagggtttta

SEQ ID NO: 109872 - DNA, 20 bp, Artificial Sequence
  Description of Artificial Sequence: Synthetic oligonucleotide
  Target: LAMA2; (-) strand; PAM type: NRG; PAM sequence: GGG
ttcactccacttcatataaa

SEQ ID NO: 109873 - DNA, 20 bp, Artificial Sequence
  Description of Artificial Sequence: Synthetic oligonucleotide
  Target: LAMA2; (-) strand; PAM type: NRG; PAM sequence: AGG
attcactccacttcatataa

SEQ ID NO: 109874 - DNA, 20 bp, Artificial Sequence
  Description of Artificial Sequence: Synthetic oligonucleotide
  Target: LAMA2; (-) strand; PAM type: NRG; PAM sequence: AAG
gattcactccacttcatata

SEQ ID NO: 109875 - DNA, 20 bp, Artificial Sequence
  Description of Artificial Sequence: Synthetic oligonucleotide
  Target: LAMA2; (-) strand; PAM type: NRG; PAM sequence: GGG
ctggatgtgaagaagagtac

SEQ ID NO: 109876 - DNA, 20 bp, Artificial Sequence
  Description of Artificial Sequence: Synthetic oligonucleotide
  Target: LAMA2; (-) strand; PAM type: NRG; PAM sequence: CGG
tctggatgtgaagaagagta

SEQ ID NO: 109877 - DNA, 20 bp, Artificial Sequence
  Description of Artificial Sequence: Synthetic oligonucleotide
  Target: LAMA2; (-) strand; PAM type: NRG; PAM sequence: GAG
cggtgtctggatgtgaagaa

SEQ ID NO: 109878 - DNA, 20 bp, Artificial Sequence
  Description of Artificial Sequence: Synthetic oligonucleotide
  Target: LAMA2; (-) strand; PAM type: NRG; PAM sequence: AAG
atcggtgtctggatgtgaag

SEQ ID NO: 109879 - DNA, 20 bp, Artificial Sequence
  Description of Artificial Sequence: Synthetic oligonucleotide
  Target: LAMA2; (-) strand; PAM type: NRG; PAM sequence: AAG
actatcggtgtctggatgtg

SEQ ID NO: 109880 - DNA, 20 bp, Artificial Sequence
  Description of Artificial Sequence: Synthetic oligonucleotide
  Target: LAMA2; (-) strand; PAM type: NRG; PAM sequence: TGG
gattctgaactatcggtgtc

SEQ ID NO: 109881 - DNA, 20 bp, Artificial Sequence
  Description of Artificial Sequence: Synthetic oligonucleotide
  Target: LAMA2; (-) strand; PAM type: NRG; PAM sequence: CGG
gatggaggattctgaactat

SEQ ID NO: 109882 - DNA, 20 bp, Artificial Sequence
  Description of Artificial Sequence: Synthetic oligonucleotide
  Target: LAMA2; (-) strand; PAM type: NRG; PAM sequence: AGG
agggaaaggtggatagatgg

SEQ ID NO: 109883 - DNA, 20 bp, Artificial Sequence
  Description of Artificial Sequence: Synthetic oligonucleotide
  Target: LAMA2; (-) strand; PAM type: NRG; PAM sequence: GAG
aagggaaaggtggatagatg

SEQ ID NO: 109884 - DNA, 20 bp, Artificial Sequence
  Description of Artificial Sequence: Synthetic oligonucleotide
  Target: LAMA2; (-) strand; PAM type: NRG; PAM sequence: TGG
caaagggaaaggtggataga

SEQ ID NO: 109885 - DNA, 20 bp, Artificial Sequence
  Description of Artificial Sequence: Synthetic oligonucleotide
  Target: LAMA2; (-) strand; PAM type: NRG; PAM sequence: TAG
atagcaaagggaaaggtgga

SEQ ID NO: 109886 - DNA, 20 bp, Artificial Sequence
  Description of Artificial Sequence: Synthetic oligonucleotide
  Target: LAMA2; (-) strand; PAM type: NRG; PAM sequence: TGG
aagaatagcaaagggaaagg

SEQ ID NO: 109887 - DNA, 20 bp, Artificial Sequence
  Description of Artificial Sequence: Synthetic oligonucleotide
  Target: LAMA2; (-) strand; PAM type: NRG; PAM sequence: AGG
gtgaagaatagcaaagggaa

SEQ ID NO: 109888 - DNA, 20 bp, Artificial Sequence
  Description of Artificial Sequence: Synthetic oligonucleotide
  Target: LAMA2; (-) strand; PAM type: NRG; PAM sequence: AAG
tgtgaagaatagcaaaggga

SEQ ID NO: 109889 - DNA, 20 bp, Artificial Sequence
  Description of Artificial Sequence: Synthetic oligonucleotide
  Target: LAMA2; (-) strand; PAM type: NRG; PAM sequence: GGG
catctgtgaagaatagcaaa

SEQ ID NO: 109890 - DNA, 20 bp, Artificial Sequence
  Description of Artificial Sequence: Synthetic oligonucleotide
  Target: LAMA2; (-) strand; PAM type: NRG; PAM sequence: AGG
gcatctgtgaagaatagcaa

SEQ ID NO: 109891 - DNA, 20 bp, Artificial Sequence
  Description of Artificial Sequence: Synthetic oligonucleotide
  Target: LAMA2; (-) strand; PAM type: NRG; PAM sequence: AAG
tgcatctgtgaagaatagca

SEQ ID NO: 109892 - DNA, 20 bp, Artificial Sequence
  Description of Artificial Sequence: Synthetic oligonucleotide
  Target: LAMA2; (-) strand; PAM type: NRG; PAM sequence: TAG
tggcctgcatctgtgaagaa

SEQ ID NO: 109893 - DNA, 20 bp, Artificial Sequence
  Description of Artificial Sequence: Synthetic oligonucleotide
  Target: LAMA2; (-) strand; PAM type: NRG; PAM sequence: AAG
tttgttggcctgcatctgtg

SEQ ID NO: 109894 - DNA, 20 bp, Artificial Sequence
  Description of Artificial Sequence: Synthetic oligonucleotide
  Target: LAMA2; (-) strand; PAM type: NRG; PAM sequence: TGG
agaactatcctcatctttgt

SEQ ID NO: 109895 - DNA, 20 bp, Artificial Sequence
  Description of Artificial Sequence: Synthetic oligonucleotide
  Target: LAMA2; (-) strand; PAM type: NRG; PAM sequence: GAG
gtgcaggccatgggcagctg

SEQ ID NO: 109896 - DNA, 20 bp, Artificial Sequence
  Description of Artificial Sequence: Synthetic oligonucleotide
  Target: LAMA2; (-) strand; PAM type: NRG; PAM sequence: TGG
ctgtgcaggccatgggcagc

SEQ ID NO: 109897 - DNA, 20 bp, Artificial Sequence
  Description of Artificial Sequence: Synthetic oligonucleotide
  Target: LAMA2; (-) strand; PAM type: NRG; PAM sequence: CAG
ggaactgtgcaggccatggg

SEQ ID NO: 109898 - DNA, 20 bp, Artificial Sequence
  Description of Artificial Sequence: Synthetic oligonucleotide
  Target: LAMA2; (-) strand; PAM type: NRG; PAM sequence: GGG
agaggaactgtgcaggccat

SEQ ID NO: 109899 - DNA, 20 bp, Artificial Sequence
  Description of Artificial Sequence: Synthetic oligonucleotide
  Target: LAMA2; (-) strand; PAM type: NRG; PAM sequence: TGG
tagaggaactgtgcaggcca

SEQ ID NO: 109900 - DNA, 20 bp, Artificial Sequence
  Description of Artificial Sequence: Synthetic oligonucleotide
  Target: LAMA2; (-) strand; PAM type: NRG; PAM sequence: AGG
gctcattagaggaactgtgc

SEQ ID NO: 109901 - DNA, 20 bp, Artificial Sequence
  Description of Artificial Sequence: Synthetic oligonucleotide
  Target: LAMA2; (-) strand; PAM type: NRG; PAM sequence: CAG
ggctcattagaggaactgtg

SEQ ID NO: 109902 - DNA, 20 bp, Artificial Sequence
  Description of Artificial Sequence: Synthetic oligonucleotide
  Target: LAMA2; (-) strand; PAM type: NRG; PAM sequence: AGG
ttgtgcatgtggctcattag

SEQ ID NO: 109903 - DNA, 20 bp, Artificial Sequence
  Description of Artificial Sequence: Synthetic oligonucleotide
  Target: LAMA2; (-) strand; PAM type: NRG; PAM sequence: GAG
gttgtgcatgtggctcatta

SEQ ID NO: 109904 - DNA, 20 bp, Artificial Sequence
  Description of Artificial Sequence: Synthetic oligonucleotide
  Target: LAMA2; (-) strand; PAM type: NRG; PAM sequence: TAG
aggttgtgcatgtggctcat

SEQ ID NO: 109905 - DNA, 20 bp, Artificial Sequence
  Description of Artificial Sequence: Synthetic oligonucleotide
  Target: LAMA2; (-) strand; PAM type: NRG; PAM sequence: TGG
cctctcagaggttgtgcatg

SEQ ID NO: 109906 - DNA, 20 bp, Artificial Sequence
  Description of Artificial Sequence: Synthetic oligonucleotide
  Target: LAMA2; (-) strand; PAM type: NRG; PAM sequence: AGG
tgtgtgcacacccctctcag

SEQ ID NO: 109907 - DNA, 20 bp, Artificial Sequence
  Description of Artificial Sequence: Synthetic oligonucleotide
  Target: LAMA2; (-) strand; PAM type: NRG; PAM sequence: GAG
ctgtgtgcacacccctctca

SEQ ID NO: 109908 - DNA, 20 bp, Artificial Sequence
  Description of Artificial Sequence: Synthetic oligonucleotide
  Target: LAMA2; (-) strand; PAM type: NRG; PAM sequence: CAG
gactgtgtgcacacccctct

SEQ ID NO: 109909 - DNA, 20 bp, Artificial Sequence
  Description of Artificial Sequence: Synthetic oligonucleotide
  Target: LAMA2; (-) strand; PAM type: NRG; PAM sequence: CAG
cccaaagaatagagctacag

SEQ ID NO: 109910 - DNA, 20 bp, Artificial Sequence
  Description of Artificial Sequence: Synthetic oligonucleotide
  Target: LAMA2; (-) strand; PAM type: NRG; PAM sequence: CAG
cgccccaaagaatagagcta

SEQ ID NO: 109911 - DNA, 20 bp, Artificial Sequence
  Description of Artificial Sequence: Synthetic oligonucleotide
  Target: LAMA2; (-) strand; PAM type: NRG; PAM sequence: GAG
agaatacgccccaaagaata

SEQ ID NO: 109912 - DNA, 20 bp, Artificial Sequence
  Description of Artificial Sequence: Synthetic oligonucleotide
  Target: LAMA2; (-) strand; PAM type: NRG; PAM sequence: TAG
agagaatacgccccaaagaa

SEQ ID NO: 109913 - DNA, 20 bp, Artificial Sequence
  Description of Artificial Sequence: Synthetic oligonucleotide
  Target: LAMA2; (-) strand; PAM type: NRG; PAM sequence: AAG
gtgggagagaatacgcccca

SEQ ID NO: 109914 - DNA, 20 bp, Artificial Sequence
  Description of Artificial Sequence: Synthetic oligonucleotide
  Target: LAMA2; (-) strand; PAM type: NRG; PAM sequence: GAG
cccagagaaggcaggtggga

SEQ ID NO: 109915 - DNA, 20 bp, Artificial Sequence
  Description of Artificial Sequence: Synthetic oligonucleotide
  Target: LAMA2; (-) strand; PAM type: NRG; PAM sequence: GAG
tacccagagaaggcaggtgg

SEQ ID NO: 109916 - DNA, 20 bp, Artificial Sequence
  Description of Artificial Sequence: Synthetic oligonucleotide
  Target: LAMA2; (-) strand; PAM type: NRG; PAM sequence: GGG
ggtacccagagaaggcaggt

SEQ ID NO: 109917 - DNA, 20 bp, Artificial Sequence
  Description of Artificial Sequence: Synthetic oligonucleotide
  Target: LAMA2; (-) strand; PAM type: NRG; PAM sequence: TGG
tggtacccagagaaggcagg

SEQ ID NO: 109918 - DNA, 20 bp, Artificial Sequence
  Description of Artificial Sequence: Synthetic oligonucleotide
  Target: LAMA2; (-) strand; PAM type: NRG; PAM sequence: AGG
tcctggtacccagagaaggc

SEQ ID NO: 109919 - DNA, 20 bp, Artificial Sequence
  Description of Artificial Sequence: Synthetic oligonucleotide
  Target: LAMA2; (-) strand; PAM type: NRG; PAM sequence: CAG
ttcctggtacccagagaagg

SEQ ID NO: 109920 - DNA, 20 bp, Artificial Sequence
  Description of Artificial Sequence: Synthetic oligonucleotide
  Target: LAMA2; (-) strand; PAM type: NRG; PAM sequence: AGG
actttcctggtacccagaga

SEQ ID NO: 109921 - DNA, 20 bp, Artificial Sequence
  Description of Artificial Sequence: Synthetic oligonucleotide
  Target: LAMA2; (-) strand; PAM type: NRG; PAM sequence: AAG
cactttcctggtacccagag

SEQ ID NO: 109922 - DNA, 20 bp, Artificial Sequence
  Description of Artificial Sequence: Synthetic oligonucleotide
  Target: LAMA2; (-) strand; PAM type: NRG; PAM sequence: GAG
catcactttcctggtaccca

SEQ ID NO: 109923 - DNA, 20 bp, Artificial Sequence
  Description of Artificial Sequence: Synthetic oligonucleotide
  Target: LAMA2; (-) strand; PAM type: NRG; PAM sequence: CAG
ttcatcactttcctggtacc

SEQ ID NO: 109924 - DNA, 20 bp, Artificial Sequence
  Description of Artificial Sequence: Synthetic oligonucleotide
  Target: LAMA2; (-) strand; PAM type: NRG; PAM sequence: TGG
actgattttcatcactttcc

SEQ ID NO: 109925 - DNA, 20 bp, Artificial Sequence
  Description of Artificial Sequence: Synthetic oligonucleotide
  Target: LAMA2; (-) strand; PAM type: NRG; PAM sequence: AAG
tcatgttatttgtcaacacc

SEQ ID NO: 109926 - DNA, 20 bp, Artificial Sequence
  Description of Artificial Sequence: Synthetic oligonucleotide
  Target: LAMA2; (-) strand; PAM type: NRG; PAM sequence: AAG
cttaaaccacctaactgggg

SEQ ID NO: 109927 - DNA, 20 bp, Artificial Sequence
  Description of Artificial Sequence: Synthetic oligonucleotide
  Target: LAMA2; (-) strand; PAM type: NRG; PAM sequence: GGG
aaacttaaaccacctaactg

SEQ ID NO: 109928 - DNA, 20 bp, Artificial Sequence
  Description of Artificial Sequence: Synthetic oligonucleotide
  Target: LAMA2; (-) strand; PAM type: NRG; PAM sequence: GGG
aaaacttaaaccacctaact

SEQ ID NO: 109929 - DNA, 20 bp, Artificial Sequence
  Description of Artificial Sequence: Synthetic oligonucleotide
  Target: LAMA2; (-) strand; PAM type: NRG; PAM sequence: TGG
aaaaacttaaaccacctaac

SEQ ID NO: 109930 - DNA, 20 bp, Artificial Sequence
  Description of Artificial Sequence: Synthetic oligonucleotide
  Target: LAMA2; (-) strand; PAM type: NRG; PAM sequence: TGG
cattttatacccggttgtgc

SEQ ID NO: 109931 - DNA, 20 bp, Artificial Sequence
  Description of Artificial Sequence: Synthetic oligonucleotide
  Target: LAMA2; (-) strand; PAM type: NRG; PAM sequence: CGG
aaaacttctcattttatacc

SEQ ID NO: 109932 - DNA, 20 bp, Artificial Sequence
  Description of Artificial Sequence: Synthetic oligonucleotide
  Target: LAMA2; (-) strand; PAM type: NRG; PAM sequence: GGG
ggcagttaatagtgccgtga

SEQ ID NO: 109933 - DNA, 20 bp, Artificial Sequence
  Description of Artificial Sequence: Synthetic oligonucleotide
  Target: LAMA2; (-) strand; PAM type: NRG; PAM sequence: AGG
aggcagttaatagtgccgtg

SEQ ID NO: 109934 - DNA, 20 bp, Artificial Sequence
  Description of Artificial Sequence: Synthetic oligonucleotide
  Target: LAMA2; (-) strand; PAM type: NRG; PAM sequence: GAG
gaggcagttaatagtgccgt

SEQ ID NO: 109935 - DNA, 20 bp, Artificial Sequence
  Description of Artificial Sequence: Synthetic oligonucleotide
  Target: LAMA2; (-) strand; PAM type: NRG; PAM sequence: TAG
ggaatgaatgaggcagttaa

SEQ ID NO: 109936 - DNA, 20 bp, Artificial Sequence
  Description of Artificial Sequence: Synthetic oligonucleotide
  Target: LAMA2; (-) strand; PAM type: NRG; PAM sequence: CAG
gaaactgggaatgaatgagg

SEQ ID NO: 109937 - DNA, 20 bp, Artificial Sequence
  Description of Artificial Sequence: Synthetic oligonucleotide
  Target: LAMA2; (-) strand; PAM type: NRG; PAM sequence: AGG
gtagaaactgggaatgaatg

SEQ ID NO: 109938 - DNA, 20 bp, Artificial Sequence
  Description of Artificial Sequence: Synthetic oligonucleotide
  Target: LAMA2; (-) strand; PAM type: NRG; PAM sequence: GAG
ggtagaaactgggaatgaat

SEQ ID NO: 109939 - DNA, 20 bp, Artificial Sequence
  Description of Artificial Sequence: Synthetic oligonucleotide
  Target: LAMA2; (-) strand; PAM type: NRG; PAM sequence: GGG
attaatagtgggtagaaact

SEQ ID NO: 109940 - DNA, 20 bp, Artificial Sequence
  Description of Artificial Sequence: Synthetic oligonucleotide
  Target: LAMA2; (-) strand; PAM type: NRG; PAM sequence: TGG
aattaatagtgggtagaaac

SEQ ID NO: 109941 - DNA, 20 bp, Artificial Sequence
  Description of Artificial Sequence: Synthetic oligonucleotide
  Target: LAMA2; (-) strand; PAM type: NRG; PAM sequence: TAG
ttacagtaattaatagtggg

SEQ ID NO: 109942 - DNA, 20 bp, Artificial Sequence
  Description of Artificial Sequence: Synthetic oligonucleotide
  Target: LAMA2; (-) strand; PAM type: NRG; PAM sequence: GGG
cctttacagtaattaatagt

SEQ ID NO: 109943 - DNA, 20 bp, Artificial Sequence
  Description of Artificial Sequence: Synthetic oligonucleotide
  Target: LAMA2; (-) strand; PAM type: NRG; PAM sequence: TGG
acctttacagtaattaatag

SEQ ID NO: 109944 - DNA, 20 bp, Artificial Sequence
  Description of Artificial Sequence: Synthetic oligonucleotide
  Target: LAMA2; (-) strand; PAM type: NRG; PAM sequence: TAG
aaaacctttacagtaattaa

SEQ ID NO: 109945 - DNA, 20 bp, Artificial Sequence
  Description of Artificial Sequence: Synthetic oligonucleotide
  Target: LAMA2; (-) strand; PAM type: NRG; PAM sequence: CAG
gaacatgccaaaaaccttta

SEQ ID NO: 109946 - DNA, 20 bp, Artificial Sequence
  Description of Artificial Sequence: Synthetic oligonucleotide
  Target: LAMA2; (-) strand; PAM type: NRG; PAM sequence: AAG
ctggtgggagctgggtagag

SEQ ID NO: 109947 - DNA, 20 bp, Artificial Sequence
  Description of Artificial Sequence: Synthetic oligonucleotide
  Target: LAMA2; (-) strand; PAM type: NRG; PAM sequence: GAG
gggctggtgggagctgggta

SEQ ID NO: 109948 - DNA, 20 bp, Artificial Sequence
  Description of Artificial Sequence: Synthetic oligonucleotide
  Target: LAMA2; (-) strand; PAM type: NRG; PAM sequence: TAG
aggggctggtgggagctggg

SEQ ID NO: 109949 - DNA, 20 bp, Artificial Sequence
  Description of Artificial Sequence: Synthetic oligonucleotide
  Target: LAMA2; (-) strand; PAM type: NRG; PAM sequence: GGG
ggtaggggctggtgggagct

SEQ ID NO: 109950 - DNA, 20 bp, Artificial Sequence
  Description of Artificial Sequence: Synthetic oligonucleotide
  Target: LAMA2; (-) strand; PAM type: NRG; PAM sequence: TGG
tggtaggggctggtgggagc

SEQ ID NO: 109951 - DNA, 20 bp, Artificial Sequence
  Description of Artificial Sequence: Synthetic oligonucleotide
  Target: LAMA2; (-) strand; PAM type: NRG; PAM sequence: GAG
ggcatggtaggggctggtgg

SEQ ID NO: 109952 - DNA, 20 bp, Artificial Sequence
  Description of Artificial Sequence: Synthetic oligonucleotide
  Target: LAMA2; (-) strand; PAM type: NRG; PAM sequence: GGG
ttggcatggtaggggctggt

SEQ ID NO: 109953 - DNA, 20 bp, Artificial Sequence
  Description of Artificial Sequence: Synthetic oligonucleotide
  Target: LAMA2; (-) strand; PAM type: NRG; PAM sequence: TGG
tttggcatggtaggggctgg

SEQ ID NO: 109954 - DNA, 20 bp, Artificial Sequence
  Description of Artificial Sequence: Synthetic oligonucleotide
  Target: LAMA2; (-) strand; PAM type: NRG; PAM sequence: TGG
gcatttggcatggtaggggc

SEQ ID NO: 109955 - DNA, 20 bp, Artificial Sequence
  Description of Artificial Sequence: Synthetic oligonucleotide
  Target: LAMA2; (-) strand; PAM type: NRG; PAM sequence: GGG
acaagcatttggcatggtag

SEQ ID NO: 109956 - DNA, 20 bp, Artificial Sequence
  Description of Artificial Sequence: Synthetic oligonucleotide
  Target: LAMA2; (-) strand; PAM type: NRG; PAM sequence: GGG
tacaagcatttggcatggta

SEQ ID NO: 109957 - DNA, 20 bp, Artificial Sequence
  Description of Artificial Sequence: Synthetic oligonucleotide
  Target: LAMA2; (-) strand; PAM type: NRG; PAM sequence: AGG
atacaagcatttggcatggt

SEQ ID NO: 109958 - DNA, 20 bp, Artificial Sequence
  Description of Artificial Sequence: Synthetic oligonucleotide
  Target: LAMA2; (-) strand; PAM type: NRG; PAM sequence: TAG
tatacaagcatttggcatgg

SEQ ID NO: 109959 - DNA, 20 bp, Artificial Sequence
  Description of Artificial Sequence: Synthetic oligonucleotide
  Target: LAMA2; (-) strand; PAM type: NRG; PAM sequence: TGG
acatatacaagcatttggca

SEQ ID NO: 109960 - DNA, 20 bp, Artificial Sequence
  Description of Artificial Sequence: Synthetic oligonucleotide
  Target: LAMA2; (-) strand; PAM type: NRG; PAM sequence: TGG
ctgacacatatacaagcatt

SEQ ID NO: 109961 - DNA, 20 bp, Artificial Sequence
  Description of Artificial Sequence: Synthetic oligonucleotide
  Target: LAMA2; (-) strand; PAM type: NRG; PAM sequence: AAG
atatatgctgacacatatac

SEQ ID NO: 109962 - DNA, 20 bp, Artificial Sequence
  Description of Artificial Sequence: Synthetic oligonucleotide
  Target: LAMA2; (-) strand; PAM type: NRG; PAM sequence: AAG
acctttccatgaaaataagc

SEQ ID NO: 109963 - DNA, 20 bp, Artificial Sequence
  Description of Artificial Sequence: Synthetic oligonucleotide
  Target: LAMA2; (-) strand; PAM type: NRG; PAM sequence: AAG
taagacctttccatgaaaat

SEQ ID NO: 109964 - DNA, 20 bp, Artificial Sequence
  Description of Artificial Sequence: Synthetic oligonucleotide
  Target: LAMA2; (-) strand; PAM type: NRG; PAM sequence: AAG
atggatgtgaaataaacctt

SEQ ID NO: 109965 - DNA, 20 bp, Artificial Sequence
  Description of Artificial Sequence: Synthetic oligonucleotide
  Target: LAMA2; (-) strand; PAM type: NRG; PAM sequence: TGG
aagaagtagatgagcggata

SEQ ID NO: 109966 - DNA, 20 bp, Artificial Sequence
  Description of Artificial Sequence: Synthetic oligonucleotide
  Target: LAMA2; (-) strand; PAM type: NRG; PAM sequence: CGG
tataaaaagaagtagatgag

SEQ ID NO: 109967 - DNA, 20 bp, Artificial Sequence
  Description of Artificial Sequence: Synthetic oligonucleotide
  Target: LAMA2; (-) strand; PAM type: NRG; PAM sequence: GAG
atctataaaaagaagtagat

SEQ ID NO: 109968 - DNA, 20 bp, Artificial Sequence
  Description of Artificial Sequence: Synthetic oligonucleotide
  Target: LAMA2; (-) strand; PAM type: NRG; PAM sequence: TAG
gtgcaatctataaaaagaag

SEQ ID NO: 109969 - DNA, 20 bp, Artificial Sequence
  Description of Artificial Sequence: Synthetic oligonucleotide
  Target: LAMA2; (-) strand; PAM type: NRG; PAM sequence: AAG
caggtgcaatctataaaaag

SEQ ID NO: 109970 - DNA, 20 bp, Artificial Sequence
  Description of Artificial Sequence: Synthetic oligonucleotide
  Target: LAMA2; (-) strand; PAM type: NRG; PAM sequence: AAG
gtacaggtgcaatctataaa

SEQ ID NO: 109971 - DNA, 20 bp, Artificial Sequence
  Description of Artificial Sequence: Synthetic oligonucleotide
  Target: LAMA2; (-) strand; PAM type: NRG; PAM sequence: AGG
gcatgttcatacaatggtac

SEQ ID NO: 109972 - DNA, 20 bp, Artificial Sequence
  Description of Artificial Sequence: Synthetic oligonucleotide
  Target: LAMA2; (-) strand; PAM type: NRG; PAM sequence: CAG
agcatgttcatacaatggta

SEQ ID NO: 109973 - DNA, 20 bp, Artificial Sequence
  Description of Artificial Sequence: Synthetic oligonucleotide
  Target: LAMA2; (-) strand; PAM type: NRG; PAM sequence: TGG
cacacagcatgttcatacaa

SEQ ID NO: 109974 - DNA, 20 bp, Artificial Sequence
  Description of Artificial Sequence: Synthetic oligonucleotide
  Target: LAMA2; (-) strand; PAM type: NRG; PAM sequence: CAG
aagtgctgtttatatccaca

SEQ ID NO: 109975 - DNA, 20 bp, Artificial Sequence
  Description of Artificial Sequence: Synthetic oligonucleotide
  Target: LAMA2; (-) strand; PAM type: NRG; PAM sequence: AAG
aaaataccctaataagatta

SEQ ID NO: 109976 - DNA, 20 bp, Artificial Sequence
  Description of Artificial Sequence: Synthetic oligonucleotide
  Target: LAMA2; (-) strand; PAM type: NRG; PAM sequence: AAG
gggaataaaaataccctaat

SEQ ID NO: 109977 - DNA, 20 bp, Artificial Sequence
  Description of Artificial Sequence: Synthetic oligonucleotide
  Target: LAMA2; (-) strand; PAM type: NRG; PAM sequence: GGG
tgtaataaaaaaaaggaggg

SEQ ID NO: 109978 - DNA, 20 bp, Artificial Sequence
  Description of Artificial Sequence: Synthetic oligonucleotide
  Target: LAMA2; (-) strand; PAM type: NRG; PAM sequence: GGG
ttgtaataaaaaaaaggagg

SEQ ID NO: 109979 - DNA, 20 bp, Artificial Sequence
  Description of Artificial Sequence: Synthetic oligonucleotide
  Target: LAMA2; (-) strand; PAM type: NRG; PAM sequence: GGG
tttgtaataaaaaaaaggag

SEQ ID NO: 109980 - DNA, 20 bp, Artificial Sequence
  Description of Artificial Sequence: Synthetic oligonucleotide
  Target: LAMA2; (-) strand; PAM type: NRG; PAM sequence: GGG
atttgtaataaaaaaaagga

SEQ ID NO: 109981 - DNA, 20 bp, Artificial Sequence
  Description of Artificial Sequence: Synthetic oligonucleotide
  Target: LAMA2; (-) strand; PAM type: NRG; PAM sequence: AGG
catttgtaataaaaaaaagg

SEQ ID NO: 109982 - DNA, 20 bp, Artificial Sequence
  Description of Artificial Sequence: Synthetic oligonucleotide
  Target: LAMA2; (-) strand; PAM type: NRG; PAM sequence: GAG
tcatttgtaataaaaaaaag

SEQ ID NO: 109983 - DNA, 20 bp, Artificial Sequence
  Description of Artificial Sequence: Synthetic oligonucleotide
  Target: LAMA2; (-) strand; PAM type: NRG; PAM sequence: AGG
cttcatttgtaataaaaaaa

SEQ ID NO: 109984 - DNA, 20 bp, Artificial Sequence
  Description of Artificial Sequence: Synthetic oligonucleotide
  Target: LAMA2; (-) strand; PAM type: NRG; PAM sequence: AAG
tcttcatttgtaataaaaaa

SEQ ID NO: 109985 - DNA, 20 bp, Artificial Sequence
  Description of Artificial Sequence: Synthetic oligonucleotide
  Target: LAMA2; (-) strand; PAM type: NRG; PAM sequence: TAG
ttatctttggggatactcat

SEQ ID NO: 109986 - DNA, 20 bp, Artificial Sequence
  Description of Artificial Sequence: Synthetic oligonucleotide
  Target: LAMA2; (-) strand; PAM type: NRG; PAM sequence: GGG
ctgtaaaagatttatctttg

SEQ ID NO: 109987 - DNA, 20 bp, Artificial Sequence
  Description of Artificial Sequence: Synthetic oligonucleotide
  Target: LAMA2; (-) strand; PAM type: NRG; PAM sequence: GGG
cctgtaaaagatttatcttt

SEQ ID NO: 109988 - DNA, 20 bp, Artificial Sequence
  Description of Artificial Sequence: Synthetic oligonucleotide
  Target: LAMA2; (-) strand; PAM type: NRG; PAM sequence: TGG
acctgtaaaagatttatctt

SEQ ID NO: 109989 - DNA, 20 bp, Artificial Sequence
  Description of Artificial Sequence: Synthetic oligonucleotide
  Target: LAMA2; (-) strand; PAM type: NRG; PAM sequence: AAG
acccttcaatatacctgtaa

SEQ ID NO: 109990 - DNA, 20 bp, Artificial Sequence
  Description of Artificial Sequence: Synthetic oligonucleotide
  Target: LAMA2; (-) strand; PAM type: NRG; PAM sequence: TAG
tggtttggcaattctactga

SEQ ID NO: 109991 - DNA, 20 bp, Artificial Sequence
  Description of Artificial Sequence: Synthetic oligonucleotide
  Target: LAMA2; (-) strand; PAM type: NRG; PAM sequence: TGG
aaatagacatgtatttggtt

SEQ ID NO: 109992 - DNA, 20 bp, Artificial Sequence
  Description of Artificial Sequence: Synthetic oligonucleotide
  Target: LAMA2; (-) strand; PAM type: NRG; PAM sequence: TGG
attttaaatagacatgtatt

SEQ ID NO: 109993 - DNA, 20 bp, Artificial Sequence
  Description of Artificial Sequence: Synthetic oligonucleotide
  Target: LAMA2; (-) strand; PAM type: NRG; PAM sequence: TAG
aagtttattagaattttaaa

SEQ ID NO: 109994 - DNA, 20 bp, Artificial Sequence
  Description of Artificial Sequence: Synthetic oligonucleotide
  Target: LAMA2; (-) strand; PAM type: NRG; PAM sequence: TAG
gagcaagttaataagtttat

SEQ ID NO: 109995 - DNA, 20 bp, Artificial Sequence
  Description of Artificial Sequence: Synthetic oligonucleotide
  Target: LAMA2; (-) strand; PAM type: NRG; PAM sequence: AAG
tgtttgaagagcaagttaat

SEQ ID NO: 109996 - DNA, 20 bp, Artificial Sequence
  Description of Artificial Sequence: Synthetic oligonucleotide
  Target: LAMA2; (-) strand; PAM type: NRG; PAM sequence: AAG
gattccattgtttgaagagc

SEQ ID NO: 109997 - DNA, 20 bp, Artificial Sequence
  Description of Artificial Sequence: Synthetic oligonucleotide
  Target: LAMA2; (-) strand; PAM type: NRG; PAM sequence: GAG
gattgattccattgtttgaa

SEQ ID NO: 109998 - DNA, 20 bp, Artificial Sequence
  Description of Artificial Sequence: Synthetic oligonucleotide
  Target: LAMA2; (-) strand; PAM type: NRG; PAM sequence: AAG
cagattgattccattgtttg

SEQ ID NO: 109999 - DNA, 20 bp, Artificial Sequence
  Description of Artificial Sequence: Synthetic oligonucleotide
  Target: LAMA2; (-) strand; PAM type: NRG; PAM sequence: CAG
caagagtgctagtggacgtg

SEQ ID NO: 110000 - DNA, 20 bp, Artificial Sequence
  Description of Artificial Sequence: Synthetic oligonucleotide
  Target: LAMA2; (-) strand; PAM type: NRG; PAM sequence: TGG
agtgttcacaagagtgctag

SEQ ID NO: 110001 - DNA, 20 bp, Artificial Sequence
  Description of Artificial Sequence: Synthetic oligonucleotide
  Target: LAMA2; (-) strand; PAM type: NRG; PAM sequence: TAG
ccaagtgttcacaagagtgc

SEQ ID NO: 110002 - DNA, 20 bp, Artificial Sequence
  Description of Artificial Sequence: Synthetic oligonucleotide
  Target: LAMA2; (-) strand; PAM type: NRG; PAM sequence: GAG
ataatgccaagtgttcacaa

SEQ ID NO: 110003 - DNA, 20 bp, Artificial Sequence
  Description of Artificial Sequence: Synthetic oligonucleotide
  Target: LAMA2; (-) strand; PAM type: NRG; PAM sequence: AAG
tgataatgccaagtgttcac

SEQ ID NO: 110004 - DNA, 20 bp, Artificial Sequence
  Description of Artificial Sequence: Synthetic oligonucleotide
  Target: LAMA2; (-) strand; PAM type: NRG; PAM sequence: AAG
attaaatgtatgataatgcc

SEQ ID NO: 110005 - DNA, 20 bp, Artificial Sequence
  Description of Artificial Sequence: Synthetic oligonucleotide
  Target: LAMA2; (-) strand; PAM type: NRG; PAM sequence: GGG
atttcttatttttgagattg

SEQ ID NO: 110006 - DNA, 20 bp, Artificial Sequence
  Description of Artificial Sequence: Synthetic oligonucleotide
  Target: LAMA2; (-) strand; PAM type: NRG; PAM sequence: GGG
catttcttatttttgagatt

SEQ ID NO: 110007 - DNA, 20 bp, Artificial Sequence
  Description of Artificial Sequence: Synthetic oligonucleotide
  Target: LAMA2; (-) strand; PAM type: NRG; PAM sequence: TGG
tcatttcttatttttgagat

SEQ ID NO: 110008 - DNA, 20 bp, Artificial Sequence
  Description of Artificial Sequence: Synthetic oligonucleotide
  Target: LAMA2; (-) strand; PAM type: NRG; PAM sequence: GAG
agatgtcatttcttattttt

SEQ ID NO: 110009 - DNA, 20 bp, Artificial Sequence
  Description of Artificial Sequence: Synthetic oligonucleotide
  Target: LAMA2; (-) strand; PAM type: NRG; PAM sequence: AAG
ctgtaaaactaagcaacagt

SEQ ID NO: 110010 - DNA, 20 bp, Artificial Sequence
  Description of Artificial Sequence: Synthetic oligonucleotide
  Target: LAMA2; (-) strand; PAM type: NRG; PAM sequence: CAG
agaactgtaaaactaagcaa

SEQ ID NO: 110011 - DNA, 20 bp, Artificial Sequence
  Description of Artificial Sequence: Synthetic oligonucleotide
  Target: LAMA2; (-) strand; PAM type: NRG; PAM sequence: AAG
tcataaagaactgtaaaact

SEQ ID NO: 110012 - DNA, 20 bp, Artificial Sequence
  Description of Artificial Sequence: Synthetic oligonucleotide
  Target: LAMA2; (-) strand; PAM type: NRG; PAM sequence: AAG
aagcactcaagattatcata

SEQ ID NO: 110013 - DNA, 20 bp, Artificial Sequence
  Description of Artificial Sequence: Synthetic oligonucleotide
  Target: LAMA2; (-) strand; PAM type: NRG; PAM sequence: AAG
gaaattcgtaaaaagcactc

SEQ ID NO: 110014 - DNA, 20 bp, Artificial Sequence
  Description of Artificial Sequence: Synthetic oligonucleotide
  Target: LAMA2; (-) strand; PAM type: NRG; PAM sequence: AAG
tcatttatgaaattcgtaaa

SEQ ID NO: 110015 - DNA, 20 bp, Artificial Sequence
  Description of Artificial Sequence: Synthetic oligonucleotide
  Target: LAMA2; (-) strand; PAM type: NRG; PAM sequence: TAG
gaggaaaatataagaatacg

SEQ ID NO: 110016 - DNA, 20 bp, Artificial Sequence
  Description of Artificial Sequence: Synthetic oligonucleotide
  Target: LAMA2; (-) strand; PAM type: NRG; PAM sequence: AAG
aaggataatgaggaaaatat

SEQ ID NO: 110017 - DNA, 20 bp, Artificial Sequence
  Description of Artificial Sequence: Synthetic oligonucleotide
  Target: LAMA2; (-) strand; PAM type: NRG; PAM sequence: AGG
ccatatttttaaggataatg

SEQ ID NO: 110018 - DNA, 20 bp, Artificial Sequence
  Description of Artificial Sequence: Synthetic oligonucleotide
  Target: LAMA2; (-) strand; PAM type: NRG; PAM sequence: GAG
tccatatttttaaggataat

SEQ ID NO: 110019 - DNA, 20 bp, Artificial Sequence
  Description of Artificial Sequence: Synthetic oligonucleotide
  Target: LAMA2; (-) strand; PAM type: NRG; PAM sequence: AGG
caaagtgttccatattttta

SEQ ID NO: 110020 - DNA, 20 bp, Artificial Sequence
  Description of Artificial Sequence: Synthetic oligonucleotide
  Target: LAMA2; (-) strand; PAM type: NRG; PAM sequence: AAG
gcaaagtgttccatattttt

SEQ ID NO: 110021 - DNA, 20 bp, Artificial Sequence
  Description of Artificial Sequence: Synthetic oligonucleotide
  Target: LAMA2; (-) strand; PAM type: NRG; PAM sequence: AAG
aactggcaggcaaatatgca

SEQ ID NO: 110022 - DNA, 20 bp, Artificial Sequence
  Description of Artificial Sequence: Synthetic oligonucleotide
  Target: LAMA2; (-) strand; PAM type: NRG; PAM sequence: AGG
tgtctatgtgcaaaactggc

SEQ ID NO: 110023 - DNA, 20 bp, Artificial Sequence
  Description of Artificial Sequence: Synthetic oligonucleotide
  Target: LAMA2; (-) strand; PAM type: NRG; PAM sequence: CAG
ttgtctatgtgcaaaactgg

SEQ ID NO: 110024 - DNA, 20 bp, Artificial Sequence
  Description of Artificial Sequence: Synthetic oligonucleotide
  Target: LAMA2; (-) strand; PAM type: NRG; PAM sequence: TGG
gcattgtctatgtgcaaaac

SEQ ID NO: 110025 - DNA, 20 bp, Artificial Sequence
  Description of Artificial Sequence: Synthetic oligonucleotide
  Target: LAMA2; (-) strand; PAM type: NRG; PAM sequence: TAG
tgtaattattcagagtagaa

SEQ ID NO: 110026 - DNA, 20 bp, Artificial Sequence
  Description of Artificial Sequence: Synthetic oligonucleotide
  Target: LAMA2; (-) strand; PAM type: NRG; PAM sequence: TAG
caagttgtaattattcagag

SEQ ID NO: 110027 - DNA, 20 bp, Artificial Sequence
  Description of Artificial Sequence: Synthetic oligonucleotide
  Target: LAMA2; (-) strand; PAM type: NRG; PAM sequence: GAG
aaccaagttgtaattattca

SEQ ID NO: 110028 - DNA, 20 bp, Artificial Sequence
  Description of Artificial Sequence: Synthetic oligonucleotide
  Target: LAMA2; (-) strand; PAM type: NRG; PAM sequence: CAG
ataaccaagttgtaattatt

SEQ ID NO: 110029 - DNA, 20 bp, Artificial Sequence
  Description of Artificial Sequence: Synthetic oligonucleotide
  Target: LAMA2; (-) strand; PAM type: NRG; PAM sequence: AAG
cctaagcaacatatataacc

SEQ ID NO: 110030 - DNA, 20 bp, Artificial Sequence
  Description of Artificial Sequence: Synthetic oligonucleotide
  Target: LAMA2; (-) strand; PAM type: NRG; PAM sequence: AAG
aaatcagagaagcctcacct

SEQ ID NO: 110031 - DNA, 20 bp, Artificial Sequence
  Description of Artificial Sequence: Synthetic oligonucleotide
  Target: LAMA2; (-) strand; PAM type: NRG; PAM sequence: AAG
cacagttacagaaatcagag

SEQ ID NO: 110032 - DNA, 20 bp, Artificial Sequence
  Description of Artificial Sequence: Synthetic oligonucleotide
  Target: LAMA2; (-) strand; PAM type: NRG; PAM sequence: GAG
ggtcacagttacagaaatca

SEQ ID NO: 110033 - DNA, 20 bp, Artificial Sequence
  Description of Artificial Sequence: Synthetic oligonucleotide
  Target: LAMA2; (-) strand; PAM type: NRG; PAM sequence: CAG
ttggtcacagttacagaaat

SEQ ID NO: 110034 - DNA, 20 bp, Artificial Sequence
  Description of Artificial Sequence: Synthetic oligonucleotide
  Target: LAMA2; (-) strand; PAM type: NRG; PAM sequence: CAG
aaagaaattggtcacagtta

SEQ ID NO: 110035 - DNA, 20 bp, Artificial Sequence
  Description of Artificial Sequence: Synthetic oligonucleotide
  Target: LAMA2; (-) strand; PAM type: NRG; PAM sequence: CAG
tgtcttaaagaaattggtca

SEQ ID NO: 110036 - DNA, 20 bp, Artificial Sequence
  Description of Artificial Sequence: Synthetic oligonucleotide
  Target: LAMA2; (-) strand; PAM type: NRG; PAM sequence: TGG
ctttgttgtcttaaagaaat

SEQ ID NO: 110037 - DNA, 20 bp, Artificial Sequence
  Description of Artificial Sequence: Synthetic oligonucleotide
  Target: LAMA2; (-) strand; PAM type: NRG; PAM sequence: AAG
ttttctcctttgttgtctta

SEQ ID NO: 110038 - DNA, 20 bp, Artificial Sequence
  Description of Artificial Sequence: Synthetic oligonucleotide
  Target: LAMA2; (-) strand; PAM type: NRG; PAM sequence: TAG
gattagtagagcattttggg

SEQ ID NO: 110039 - DNA, 20 bp, Artificial Sequence
  Description of Artificial Sequence: Synthetic oligonucleotide
  Target: LAMA2; (-) strand; PAM type: NRG; PAM sequence: GGG
agggattagtagagcatttt

SEQ ID NO: 110040 - DNA, 20 bp, Artificial Sequence
  Description of Artificial Sequence: Synthetic oligonucleotide
  Target: LAMA2; (-) strand; PAM type: NRG; PAM sequence: TGG
tagggattagtagagcattt

SEQ ID NO: 110041 - DNA, 20 bp, Artificial Sequence
  Description of Artificial Sequence: Synthetic oligonucleotide
  Target: LAMA2; (-) strand; PAM type: NRG; PAM sequence: GAG
gtcaaaactagggattagta

SEQ ID NO: 110042 - DNA, 20 bp, Artificial Sequence
  Description of Artificial Sequence: Synthetic oligonucleotide
  Target: LAMA2; (-) strand; PAM type: NRG; PAM sequence: TAG
tagtcaaaactagggattag

SEQ ID NO: 110043 - DNA, 20 bp, Artificial Sequence
  Description of Artificial Sequence: Synthetic oligonucleotide
  Target: LAMA2; (-) strand; PAM type: NRG; PAM sequence: TAG
tgatagtcaaaactagggat

SEQ ID NO: 110044 - DNA, 20 bp, Artificial Sequence
  Description of Artificial Sequence: Synthetic oligonucleotide
  Target: LAMA2; (-) strand; PAM type: NRG; PAM sequence: GGG
aggattgatagtcaaaacta

SEQ ID NO: 110045 - DNA, 20 bp, Artificial Sequence
  Description of Artificial Sequence: Synthetic oligonucleotide
  Target: LAMA2; (-) strand; PAM type: NRG; PAM sequence: AGG
aaggattgatagtcaaaact

SEQ ID NO: 110046 - DNA, 20 bp, Artificial Sequence
  Description of Artificial Sequence: Synthetic oligonucleotide
  Target: LAMA2; (-) strand; PAM type: NRG; PAM sequence: TAG
caaggattgatagtcaaaac

SEQ ID NO: 110047 - DNA, 20 bp, Artificial Sequence
  Description of Artificial Sequence: Synthetic oligonucleotide
  Target: LAMA2; (-) strand; PAM type: NRG; PAM sequence: TAG
tgcattctaccaaggattga

SEQ ID NO: 110048 - DNA, 20 bp, Artificial Sequence
  Description of Artificial Sequence: Synthetic oligonucleotide
  Target: LAMA2; (-) strand; PAM type: NRG; PAM sequence: AGG
ctaactactgcattctacca

SEQ ID NO: 110049 - DNA, 20 bp, Artificial Sequence
  Description of Artificial Sequence: Synthetic oligonucleotide
  Target: LAMA2; (-) strand; PAM type: NRG; PAM sequence: AAG
gctaactactgcattctacc

SEQ ID NO: 110050 - DNA, 20 bp, Artificial Sequence
  Description of Artificial Sequence: Synthetic oligonucleotide
  Target: LAMA2; (-) strand; PAM type: NRG; PAM sequence: TAG
tggtggtattcaaatccaca

SEQ ID NO: 110051 - DNA, 20 bp, Artificial Sequence
  Description of Artificial Sequence: Synthetic oligonucleotide
  Target: LAMA2; (-) strand; PAM type: NRG; PAM sequence: TGG
tggttaataaatggcagtgg

SEQ ID NO: 110052 - DNA, 20 bp, Artificial Sequence
  Description of Artificial Sequence: Synthetic oligonucleotide
  Target: LAMA2; (-) strand; PAM type: NRG; PAM sequence: TGG
gcatggttaataaatggcag

SEQ ID NO: 110053 - DNA, 20 bp, Artificial Sequence
  Description of Artificial Sequence: Synthetic oligonucleotide
  Target: LAMA2; (-) strand; PAM type: NRG; PAM sequence: CAG
cttgcatggttaataaatgg

SEQ ID NO: 110054 - DNA, 20 bp, Artificial Sequence
  Description of Artificial Sequence: Synthetic oligonucleotide
  Target: LAMA2; (-) strand; PAM type: NRG; PAM sequence: TGG
aagcttgcatggttaataaa

SEQ ID NO: 110055 - DNA, 20 bp, Artificial Sequence
  Description of Artificial Sequence: Synthetic oligonucleotide
  Target: LAMA2; (-) strand; PAM type: NRG; PAM sequence: TGG
gtaaatttcctaagcttgca

SEQ ID NO: 110056 - DNA, 20 bp, Artificial Sequence
  Description of Artificial Sequence: Synthetic oligonucleotide
  Target: LAMA2; (-) strand; PAM type: NRG; PAM sequence: AAG
agaagttgagtaaatttcct

SEQ ID NO: 110057 - DNA, 20 bp, Artificial Sequence
  Description of Artificial Sequence: Synthetic oligonucleotide
  Target: LAMA2; (-) strand; PAM type: NRG; PAM sequence: GAG
aattgagacttagagaagtt

SEQ ID NO: 110058 - DNA, 20 bp, Artificial Sequence
  Description of Artificial Sequence: Synthetic oligonucleotide
  Target: LAMA2; (-) strand; PAM type: NRG; PAM sequence: AAG
gaggaaattgagacttagag

SEQ ID NO: 110059 - DNA, 20 bp, Artificial Sequence
  Description of Artificial Sequence: Synthetic oligonucleotide
  Target: LAMA2; (-) strand; PAM type: NRG; PAM sequence: GAG
aatgaggaaattgagactta

SEQ ID NO: 110060 - DNA, 20 bp, Artificial Sequence
  Description of Artificial Sequence: Synthetic oligonucleotide
  Target: LAMA2; (-) strand; PAM type: NRG; PAM sequence: TAG
caaatgaggaaattgagact

SEQ ID NO: 110061 - DNA, 20 bp, Artificial Sequence
  Description of Artificial Sequence: Synthetic oligonucleotide
  Target: LAMA2; (-) strand; PAM type: NRG; PAM sequence: GAG
aatttacaaatgaggaaatt

SEQ ID NO: 110062 - DNA, 20 bp, Artificial Sequence
  Description of Artificial Sequence: Synthetic oligonucleotide
  Target: LAMA2; (-) strand; PAM type: NRG; PAM sequence: AGG
ttatctccaatttacaaatg

SEQ ID NO: 110063 - DNA, 20 bp, Artificial Sequence
  Description of Artificial Sequence: Synthetic oligonucleotide
  Target: LAMA2; (-) strand; PAM type: NRG; PAM sequence: GAG
attatctccaatttacaaat

SEQ ID NO: 110064 - DNA, 20 bp, Artificial Sequence
  Description of Artificial Sequence: Synthetic oligonucleotide
  Target: LAMA2; (-) strand; PAM type: NRG; PAM sequence: GGG
tagtgttcttcagtttcagt

SEQ ID NO: 110065 - DNA, 20 bp, Artificial Sequence
  Description of Artificial Sequence: Synthetic oligonucleotide
  Target: LAMA2; (-) strand; PAM type: NRG; PAM sequence: TGG
ttagtgttcttcagtttcag

SEQ ID NO: 110066 - DNA, 20 bp, Artificial Sequence
  Description of Artificial Sequence: Synthetic oligonucleotide
  Target: LAMA2; (-) strand; PAM type: NRG; PAM sequence: CAG
catttagtgttcttcagttt

SEQ ID NO: 110067 - DNA, 20 bp, Artificial Sequence
  Description of Artificial Sequence: Synthetic oligonucleotide
  Target: LAMA2; (-) strand; PAM type: NRG; PAM sequence: CAG
tacacgcatttagtgttctt

SEQ ID NO: 110068 - DNA, 20 bp, Artificial Sequence
  Description of Artificial Sequence: Synthetic oligonucleotide
  Target: LAMA2; (-) strand; PAM type: NRG; PAM sequence: TAG
atgtgtatgttacacgcatt

SEQ ID NO: 110069 - DNA, 20 bp, Artificial Sequence
  Description of Artificial Sequence: Synthetic oligonucleotide
  Target: LAMA2; (-) strand; PAM type: NRG; PAM sequence: AAG
tagtaagagtaatgcctgac

SEQ ID NO: 110070 - DNA, 20 bp, Artificial Sequence
  Description of Artificial Sequence: Synthetic oligonucleotide
  Target: LAMA2; (-) strand; PAM type: NRG; PAM sequence: GAG
gatggacaagtatttagtaa

SEQ ID NO: 110071 - DNA, 20 bp, Artificial Sequence
  Description of Artificial Sequence: Synthetic oligonucleotide
  Target: LAMA2; (-) strand; PAM type: NRG; PAM sequence: AAG
aggatggacaagtatttagt

SEQ ID NO: 110072 - DNA, 20 bp, Artificial Sequence
  Description of Artificial Sequence: Synthetic oligonucleotide
  Target: LAMA2; (-) strand; PAM type: NRG; PAM sequence: TAG
ggataggatggacaagtatt

SEQ ID NO: 110073 - DNA, 20 bp, Artificial Sequence
  Description of Artificial Sequence: Synthetic oligonucleotide
  Target: LAMA2; (-) strand; PAM type: NRG; PAM sequence: AAG
ccctcctggataggatggac

SEQ ID NO: 110074 - DNA, 20 bp, Artificial Sequence
  Description of Artificial Sequence: Synthetic oligonucleotide
  Target: LAMA2; (-) strand; PAM type: NRG; PAM sequence: TGG
ctagtccctcctggatagga

SEQ ID NO: 110075 - DNA, 20 bp, Artificial Sequence
  Description of Artificial Sequence: Synthetic oligonucleotide
  Target: LAMA2; (-) strand; PAM type: NRG; PAM sequence: AGG
tgttctagtccctcctggat

SEQ ID NO: 110076 - DNA, 20 bp, Artificial Sequence
  Description of Artificial Sequence: Synthetic oligonucleotide
  Target: LAMA2; (-) strand; PAM type: NRG; PAM sequence: TAG
ttgttctagtccctcctgga

SEQ ID NO: 110077 - DNA, 20 bp, Artificial Sequence
  Description of Artificial Sequence: Synthetic oligonucleotide
  Target: LAMA2; (-) strand; PAM type: NRG; PAM sequence: TGG
gaagttgttctagtccctcc

SEQ ID NO: 110078 - DNA, 20 bp, Artificial Sequence
  Description of Artificial Sequence: Synthetic oligonucleotide
  Target: LAMA2; (-) strand; PAM type: NRG; PAM sequence: TAG
ccaagaaagagaagttgttc

SEQ ID NO: 110079 - DNA, 20 bp, Artificial Sequence
  Description of Artificial Sequence: Synthetic oligonucleotide
  Target: LAMA2; (-) strand; PAM type: NRG; PAM sequence: AAG
gagaaaggaccaagaaagag

SEQ ID NO: 110080 - DNA, 20 bp, Artificial Sequence
  Description of Artificial Sequence: Synthetic oligonucleotide
  Target: LAMA2; (-) strand; PAM type: NRG; PAM sequence: GAG
actgagaaaggaccaagaaa

SEQ ID NO: 110081 - DNA, 20 bp, Artificial Sequence
  Description of Artificial Sequence: Synthetic oligonucleotide
  Target: LAMA2; (-) strand; PAM type: NRG; PAM sequence: AAG
ccactgagaaaggaccaaga

SEQ ID NO: 110082 - DNA, 20 bp, Artificial Sequence
  Description of Artificial Sequence: Synthetic oligonucleotide
  Target: LAMA2; (-) strand; PAM type: NRG; PAM sequence: AAG
aggaccactgagaaaggacc

SEQ ID NO: 110083 - DNA, 20 bp, Artificial Sequence
  Description of Artificial Sequence: Synthetic oligonucleotide
  Target: LAMA2; (-) strand; PAM type: NRG; PAM sequence: AGG
gtgaggaggaccactgagaa

SEQ ID NO: 110084 - DNA, 20 bp, Artificial Sequence
  Description of Artificial Sequence: Synthetic oligonucleotide
  Target: LAMA2; (-) strand; PAM type: NRG; PAM sequence: AAG
agtgaggaggaccactgaga

SEQ ID NO: 110085 - DNA, 20 bp, Artificial Sequence
  Description of Artificial Sequence: Synthetic oligonucleotide
  Target: LAMA2; (-) strand; PAM type: NRG; PAM sequence: GAG
cccaagtgaggaggaccact

SEQ ID NO: 110086 - DNA, 20 bp, Artificial Sequence
  Description of Artificial Sequence: Synthetic oligonucleotide
  Target: LAMA2; (-) strand; PAM type: NRG; PAM sequence: AGG
gacagagtccccaagtgagg

SEQ ID NO: 110087 - DNA, 20 bp, Artificial Sequence
  Description of Artificial Sequence: Synthetic oligonucleotide
  Target: LAMA2; (-) strand; PAM type: NRG; PAM sequence: GAG
agacagagtccccaagtgag

SEQ ID NO: 110088 - DNA, 20 bp, Artificial Sequence
  Description of Artificial Sequence: Synthetic oligonucleotide
  Target: LAMA2; (-) strand; PAM type: NRG; PAM sequence: AGG
caagacagagtccccaagtg

SEQ ID NO: 110089 - DNA, 20 bp, Artificial Sequence
  Description of Artificial Sequence: Synthetic oligonucleotide
  Target: LAMA2; (-) strand; PAM type: NRG; PAM sequence: GAG
acaagacagagtccccaagt

SEQ ID NO: 110090 - DNA, 20 bp, Artificial Sequence
  Description of Artificial Sequence: Synthetic oligonucleotide
  Target: LAMA2; (-) strand; PAM type: NRG; PAM sequence: AAG
aaatacaagacagagtcccc

SEQ ID NO: 110091 - DNA, 20 bp, Artificial Sequence
  Description of Artificial Sequence: Synthetic oligonucleotide
  Target: LAMA2; (-) strand; PAM type: NRG; PAM sequence: GAG
caacatgtaaatacaagaca

SEQ ID NO: 110092 - DNA, 20 bp, Artificial Sequence
  Description of Artificial Sequence: Synthetic oligonucleotide
  Target: LAMA2; (-) strand; PAM type: NRG; PAM sequence: CAG
tgcaacatgtaaatacaaga

SEQ ID NO: 110093 - DNA, 20 bp, Artificial Sequence
  Description of Artificial Sequence: Synthetic oligonucleotide
  Target: LAMA2; (-) strand; PAM type: NRG; PAM sequence: AAG
gaaatgcaacatgtaaatac

SEQ ID NO: 110094 - DNA, 20 bp, Artificial Sequence
  Description of Artificial Sequence: Synthetic oligonucleotide
  Target: LAMA2; (-) strand; PAM type: NRG; PAM sequence: CAG
aattgtttaaattagctcca

SEQ ID NO: 110095 - DNA, 20 bp, Artificial Sequence
  Description of Artificial Sequence: Synthetic oligonucleotide
  Target: LAMA2; (-) strand; PAM type: NRG; PAM sequence: TAG
tgcgtactaattgtttaaat

SEQ ID NO: 110096 - DNA, 20 bp, Artificial Sequence
  Description of Artificial Sequence: Synthetic oligonucleotide
  Target: LAMA2; (-) strand; PAM type: NRG; PAM sequence: GGG
tatgccataaaaattgtttt

SEQ ID NO: 110097 - DNA, 20 bp, Artificial Sequence
  Description of Artificial Sequence: Synthetic oligonucleotide
  Target: LAMA2; (-) strand; PAM type: NRG; PAM sequence: TGG
ttatgccataaaaattgttt

SEQ ID NO: 110098 - DNA, 20 bp, Artificial Sequence
  Description of Artificial Sequence: Synthetic oligonucleotide
  Target: LAMA2; (-) strand; PAM type: NRG; PAM sequence: TAG
ttttttaggtaaatttttaa

SEQ ID NO: 110099 - DNA, 20 bp, Artificial Sequence
  Description of Artificial Sequence: Synthetic oligonucleotide
  Target: LAMA2; (-) strand; PAM type: NRG; PAM sequence: AGG
gatacaacagctcatttttt

SEQ ID NO: 110100 - DNA, 20 bp, Artificial Sequence
  Description of Artificial Sequence: Synthetic oligonucleotide
  Target: LAMA2; (-) strand; PAM type: NRG; PAM sequence: TAG
ggatacaacagctcattttt

SEQ ID NO: 110101 - DNA, 20 bp, Artificial Sequence
  Description of Artificial Sequence: Synthetic oligonucleotide
  Target: LAMA2; (-) strand; PAM type: NRG; PAM sequence: CAG
cctctcttgactggatacaa

SEQ ID NO: 110102 - DNA, 20 bp, Artificial Sequence
  Description of Artificial Sequence: Synthetic oligonucleotide
  Target: LAMA2; (-) strand; PAM type: NRG; PAM sequence: TGG
tattatttacctctcttgac

SEQ ID NO: 110103 - DNA, 20 bp, Artificial Sequence
  Description of Artificial Sequence: Synthetic oligonucleotide
  Target: LAMA2; (-) strand; PAM type: NRG; PAM sequence: TAG
ctttttcttacatcatttat

SEQ ID NO: 110104 - DNA, 20 bp, Artificial Sequence
  Description of Artificial Sequence: Synthetic oligonucleotide
  Target: LAMA2; (-) strand; PAM type: NRG; PAM sequence: GAG
tatatcttaagactgaaatg

SEQ ID NO: 110105 - DNA, 20 bp, Artificial Sequence
  Description of Artificial Sequence: Synthetic oligonucleotide
  Target: LAMA2; (-) strand; PAM type: NRG; PAM sequence: TGG
aatatatcttaagactgaaa

SEQ ID NO: 110106 - DNA, 20 bp, Artificial Sequence
  Description of Artificial Sequence: Synthetic oligonucleotide
  Target: LAMA2; (-) strand; PAM type: NRG; PAM sequence: AAG
ttaaactgcaaatatatctt

SEQ ID NO: 110107 - DNA, 20 bp, Artificial Sequence
  Description of Artificial Sequence: Synthetic oligonucleotide
  Target: LAMA2; (-) strand; PAM type: NRG; PAM sequence: AGG
taagtttagaaatcttactc

SEQ ID NO: 110108 - DNA, 20 bp, Artificial Sequence
  Description of Artificial Sequence: Synthetic oligonucleotide
  Target: LAMA2; (-) strand; PAM type: NRG; PAM sequence: CAG
ataagtttagaaatcttact

SEQ ID NO: 110109 - DNA, 20 bp, Artificial Sequence
  Description of Artificial Sequence: Synthetic oligonucleotide
  Target: LAMA2; (-) strand; PAM type: NRG; PAM sequence: TAG
ccaatctgttgatataagtt

SEQ ID NO: 110110 - DNA, 20 bp, Artificial Sequence
  Description of Artificial Sequence: Synthetic oligonucleotide
  Target: LAMA2; (-) strand; PAM type: NRG; PAM sequence: AAG
aagatccaatctgttgatat

SEQ ID NO: 110111 - DNA, 20 bp, Artificial Sequence
  Description of Artificial Sequence: Synthetic oligonucleotide
  Target: LAMA2; (-) strand; PAM type: NRG; PAM sequence: AAG
cattaaggggaaagaaaata

SEQ ID NO: 110112 - DNA, 20 bp, Artificial Sequence
  Description of Artificial Sequence: Synthetic oligonucleotide
  Target: LAMA2; (-) strand; PAM type: NRG; PAM sequence: AAG
atttgaaatcattaagggga

SEQ ID NO: 110113 - DNA, 20 bp, Artificial Sequence
  Description of Artificial Sequence: Synthetic oligonucleotide
  Target: LAMA2; (-) strand; PAM type: NRG; PAM sequence: GGG
taaaatttgaaatcattaag

SEQ ID NO: 110114 - DNA, 20 bp, Artificial Sequence
  Description of Artificial Sequence: Synthetic oligonucleotide
  Target: LAMA2; (-) strand; PAM type: NRG; PAM sequence: GGG
gtaaaatttgaaatcattaa

SEQ ID NO: 110115 - DNA, 20 bp, Artificial Sequence
  Description of Artificial Sequence: Synthetic oligonucleotide
  Target: LAMA2; (-) strand; PAM type: NRG; PAM sequence: AGG
agtaaaatttgaaatcatta

SEQ ID NO: 110116 - DNA, 20 bp, Artificial Sequence
  Description of Artificial Sequence: Synthetic oligonucleotide
  Target: LAMA2; (-) strand; PAM type: NRG; PAM sequence: AAG
gagtaaaatttgaaatcatt

SEQ ID NO: 110117 - DNA, 20 bp, Artificial Sequence
  Description of Artificial Sequence: Synthetic oligonucleotide
  Target: LAMA2; (-) strand; PAM type: NRG; PAM sequence: GAG
ttcgagtacaacaatataaa

SEQ ID NO: 110118 - DNA, 20 bp, Artificial Sequence
  Description of Artificial Sequence: Synthetic oligonucleotide
  Target: LAMA2; (-) strand; PAM type: NRG; PAM sequence: AAG
aattcgagtacaacaatata

SEQ ID NO: 110119 - DNA, 20 bp, Artificial Sequence
  Description of Artificial Sequence: Synthetic oligonucleotide
  Target: LAMA2; (-) strand; PAM type: NRG; PAM sequence: GAG
taactaagcagtttaaattc

SEQ ID NO: 110120 - DNA, 20 bp, Artificial Sequence
  Description of Artificial Sequence: Synthetic oligonucleotide
  Target: LAMA2; (-) strand; PAM type: NRG; PAM sequence: CAG
atattgtaatagtaactaag

SEQ ID NO: 110121 - DNA, 20 bp, Artificial Sequence
  Description of Artificial Sequence: Synthetic oligonucleotide
  Target: LAMA2; (-) strand; PAM type: NRG; PAM sequence: AAG
tttatattgtaatagtaact

SEQ ID NO: 110122 - DNA, 20 bp, Artificial Sequence
  Description of Artificial Sequence: Synthetic oligonucleotide
  Target: LAMA2; (-) strand; PAM type: NRG; PAM sequence: TAG
tagattaatttatattgtaa

SEQ ID NO: 110123 - DNA, 20 bp, Artificial Sequence
  Description of Artificial Sequence: Synthetic oligonucleotide
  Target: LAMA2; (-) strand; PAM type: NRG; PAM sequence: TAG
ttttaatattctctaaactt

SEQ ID NO: 110124 - DNA, 20 bp, Artificial Sequence
  Description of Artificial Sequence: Synthetic oligonucleotide
  Target: LAMA2; (-) strand; PAM type: NRG; PAM sequence: TAG
gttttctagctgctttccac

SEQ ID NO: 110125 - DNA, 20 bp, Artificial Sequence
  Description of Artificial Sequence: Synthetic oligonucleotide
  Target: LAMA2; (-) strand; PAM type: NRG; PAM sequence: TAG
tattacatatataagttttc

SEQ ID NO: 110126 - DNA, 20 bp, Artificial Sequence
  Description of Artificial Sequence: Synthetic oligonucleotide
  Target: LAMA2; (-) strand; PAM type: NRG; PAM sequence: AAG
taatttaatattacatatat

SEQ ID NO: 110127 - DNA, 20 bp, Artificial Sequence
  Description of Artificial Sequence: Synthetic oligonucleotide
  Target: LAMA2; (-) strand; PAM type: NRG; PAM sequence: GAG
ttcaaaaatgccatttgcta

SEQ ID NO: 110128 - DNA, 20 bp, Artificial Sequence
  Description of Artificial Sequence: Synthetic oligonucleotide
  Target: LAMA2; (-) strand; PAM type: NRG; PAM sequence: TAG
tattcaaaaatgccatttgc

SEQ ID NO: 110129 - DNA, 20 bp, Artificial Sequence
  Description of Artificial Sequence: Synthetic oligonucleotide
  Target: LAMA2; (-) strand; PAM type: NRG; PAM sequence: TAG
gtttttttctcttgatactt

SEQ ID NO: 110130 - DNA, 20 bp, Artificial Sequence
  Description of Artificial Sequence: Synthetic oligonucleotide
  Target: LAMA2; (-) strand; PAM type: NRG; PAM sequence: TAG
tgggtccaataaattttata

SEQ ID NO: 110131 - DNA, 20 bp, Artificial Sequence
  Description of Artificial Sequence: Synthetic oligonucleotide
  Target: LAMA2; (-) strand; PAM type: NRG; PAM sequence: GGG
aaacaatatttttacaaatt

SEQ ID NO: 110132 - DNA, 20 bp, Artificial Sequence
  Description of Artificial Sequence: Synthetic oligonucleotide
  Target: LAMA2; (-) strand; PAM type: NRG; PAM sequence: TGG
aaaacaatatttttacaaat

SEQ ID NO: 110133 - DNA, 20 bp, Artificial Sequence
  Description of Artificial Sequence: Synthetic oligonucleotide
  Target: LAMA2; (-) strand; PAM type: NRG; PAM sequence: AAG
taatagtcatttttctcata

SEQ ID NO: 110134 - DNA, 20 bp, Artificial Sequence
  Description of Artificial Sequence: Synthetic oligonucleotide
  Target: LAMA2; (-) strand; PAM type: NRG; PAM sequence: TAG
atttagcacatatctgataa

SEQ ID NO: 110135 - DNA, 20 bp, Artificial Sequence
  Description of Artificial Sequence: Synthetic oligonucleotide
  Target: LAMA2; (-) strand; PAM type: NRG; PAM sequence: TAG
agaaatggaaaaacaacatt

SEQ ID NO: 110136 - DNA, 20 bp, Artificial Sequence
  Description of Artificial Sequence: Synthetic oligonucleotide
  Target: LAMA2; (-) strand; PAM type: NRG; PAM sequence: TGG
aaaaatacacattaaagaaa

SEQ ID NO: 110137 - DNA, 20 bp, Artificial Sequence
  Description of Artificial Sequence: Synthetic oligonucleotide
  Target: LAMA2; (-) strand; PAM type: NRG; PAM sequence: AAG
ttggacaaaaatacacatta

SEQ ID NO: 110138 - DNA, 20 bp, Artificial Sequence
  Description of Artificial Sequence: Synthetic oligonucleotide
  Target: LAMA2; (-) strand; PAM type: NRG; PAM sequence: TGG
aatatttgttaatatttatt

SEQ ID NO: 110139 - DNA, 20 bp, Artificial Sequence
  Description of Artificial Sequence: Synthetic oligonucleotide
  Target: LAMA2; (-) strand; PAM type: NRG; PAM sequence: CAG
ttagcagaatcctccaactt

SEQ ID NO: 110140 - DNA, 20 bp, Artificial Sequence
  Description of Artificial Sequence: Synthetic oligonucleotide
  Target: LAMA2; (-) strand; PAM type: NRG; PAM sequence: CAG
tctcagatatgattgtttag

SEQ ID NO: 110141 - DNA, 20 bp, Artificial Sequence
  Description of Artificial Sequence: Synthetic oligonucleotide
  Target: LAMA2; (-) strand; PAM type: NRG; PAM sequence: TAG
aaatctcagatatgattgtt

SEQ ID NO: 110142 - DNA, 20 bp, Artificial Sequence
  Description of Artificial Sequence: Synthetic oligonucleotide
  Target: LAMA2; (-) strand; PAM type: NRG; PAM sequence: CAG
ggattagattttcaaaatct

SEQ ID NO: 110143 - DNA, 20 bp, Artificial Sequence
  Description of Artificial Sequence: Synthetic oligonucleotide
  Target: LAMA2; (-) strand; PAM type: NRG; PAM sequence: TAG
accaaaatgaatcattggat

SEQ ID NO: 110144 - DNA, 20 bp, Artificial Sequence
  Description of Artificial Sequence: Synthetic oligonucleotide
  Target: LAMA2; (-) strand; PAM type: NRG; PAM sequence: TGG
ttattaccaaaatgaatcat

SEQ ID NO: 110145 - DNA, 20 bp, Artificial Sequence
  Description of Artificial Sequence: Synthetic oligonucleotide
  Target: LAMA2; (-) strand; PAM type: NRG; PAM sequence: TAG
agaagaaacctccaaagaat

SEQ ID NO: 110146 - DNA, 20 bp, Artificial Sequence
  Description of Artificial Sequence: Synthetic oligonucleotide
  Target: LAMA2; (-) strand; PAM type: NRG; PAM sequence: AAG
ctatagagaagaaacctcca

SEQ ID NO: 110147 - DNA, 20 bp, Artificial Sequence
  Description of Artificial Sequence: Synthetic oligonucleotide
  Target: LAMA2; (-) strand; PAM type: NRG; PAM sequence: AAG
tttgatatcttcctatagag

SEQ ID NO: 110148 - DNA, 20 bp, Artificial Sequence
  Description of Artificial Sequence: Synthetic oligonucleotide
  Target: LAMA2; (-) strand; PAM type: NRG; PAM sequence: GAG
taatttgatatcttcctata

SEQ ID NO: 110149 - DNA, 20 bp, Artificial Sequence
  Description of Artificial Sequence: Synthetic oligonucleotide
  Target: LAMA2; (-) strand; PAM type: NRG; PAM sequence: TAG
cttaatttgatatcttccta

SEQ ID NO: 110150 - DNA, 20 bp, Artificial Sequence
  Description of Artificial Sequence: Synthetic oligonucleotide
  Target: LAMA2; (-) strand; PAM type: NRG; PAM sequence: TGG
gaacaatgacattttcttct

SEQ ID NO: 110151 - DNA, 20 bp, Artificial Sequence
  Description of Artificial Sequence: Synthetic oligonucleotide
  Target: LAMA2; (-) strand; PAM type: NRG; PAM sequence: TGG
ttttattatcattgaattat

SEQ ID NO: 110152 - DNA, 20 bp, Artificial Sequence
  Description of Artificial Sequence: Synthetic oligonucleotide
  Target: LAMA2; (-) strand; PAM type: NRG; PAM sequence: TGG
agaaaatgtatttaatttat

SEQ ID NO: 110153 - DNA, 20 bp, Artificial Sequence
  Description of Artificial Sequence: Synthetic oligonucleotide
  Target: LAMA2; (-) strand; PAM type: NRG; PAM sequence: AAG
atataaaattaattaaaagc

SEQ ID NO: 110154 - DNA, 20 bp, Artificial Sequence
  Description of Artificial Sequence: Synthetic oligonucleotide
  Target: LAMA2; (-) strand; PAM type: NRG; PAM sequence: AAG
tttaatataaaattaattaa

SEQ ID NO: 110155 - DNA, 20 bp, Artificial Sequence
  Description of Artificial Sequence: Synthetic oligonucleotide
  Target: LAMA2; (-) strand; PAM type: NRG; PAM sequence: AGG
atacttggatgtgcaatttc

SEQ ID NO: 110156 - DNA, 20 bp, Artificial Sequence
  Description of Artificial Sequence: Synthetic oligonucleotide
  Target: LAMA2; (-) strand; PAM type: NRG; PAM sequence: CAG
tatacttggatgtgcaattt

SEQ ID NO: 110157 - DNA, 20 bp, Artificial Sequence
  Description of Artificial Sequence: Synthetic oligonucleotide
  Target: LAMA2; (-) strand; PAM type: NRG; PAM sequence: TGG
atcatccctgagcttatact

SEQ ID NO: 110158 - DNA, 20 bp, Artificial Sequence
  Description of Artificial Sequence: Synthetic oligonucleotide
  Target: LAMA2; (-) strand; PAM type: NRG; PAM sequence: GAG
aaataagttttatcatccct

SEQ ID NO: 110159 - DNA, 20 bp, Artificial Sequence
  Description of Artificial Sequence: Synthetic oligonucleotide
  Target: LAMA2; (-) strand; PAM type: NRG; PAM sequence: AAG
aacaaaaaaaaggattaaat

SEQ ID NO: 110160 - DNA, 20 bp, Artificial Sequence
  Description of Artificial Sequence: Synthetic oligonucleotide
  Target: LAMA2; (-) strand; PAM type: NRG; PAM sequence: AGG
gcgaataaaaaacaaaaaaa

SEQ ID NO: 110161 - DNA, 20 bp, Artificial Sequence
  Description of Artificial Sequence: Synthetic oligonucleotide
  Target: LAMA2; (-) strand; PAM type: NRG; PAM sequence: AAG
tgcgaataaaaaacaaaaaa

SEQ ID NO: 110162 - DNA, 20 bp, Artificial Sequence
  Description of Artificial Sequence: Synthetic oligonucleotide
  Target: LAMA2; (-) strand; PAM type: NRG; PAM sequence: TGG
tggtttttaagccatttaga

SEQ ID NO: 110163 - DNA, 20 bp, Artificial Sequence
  Description of Artificial Sequence: Synthetic oligonucleotide
  Target: LAMA2; (-) strand; PAM type: NRG; PAM sequence: TAG
atcctggtttttaagccatt

SEQ ID NO: 110164 - DNA, 20 bp, Artificial Sequence
  Description of Artificial Sequence: Synthetic oligonucleotide
  Target: LAMA2; (-) strand; PAM type: NRG; PAM sequence: AAG
cattttctatcctggttttt

SEQ ID NO: 110165 - DNA, 20 bp, Artificial Sequence
  Description of Artificial Sequence: Synthetic oligonucleotide
  Target: LAMA2; (-) strand; PAM type: NRG; PAM sequence: TGG
agcatcagcattttctatcc

SEQ ID NO: 110166 - DNA, 20 bp, Artificial Sequence
  Description of Artificial Sequence: Synthetic oligonucleotide
  Target: LAMA2; (-) strand; PAM type: NRG; PAM sequence: CAG
gagatccccatttctagcat

SEQ ID NO: 110167 - DNA, 20 bp, Artificial Sequence
  Description of Artificial Sequence: Synthetic oligonucleotide
  Target: LAMA2; (-) strand; PAM type: NRG; PAM sequence: TAG
tctcaagagatccccatttc

SEQ ID NO: 110168 - DNA, 20 bp, Artificial Sequence
  Description of Artificial Sequence: Synthetic oligonucleotide
  Target: LAMA2; (-) strand; PAM type: NRG; PAM sequence: GAG
gtgtcattcaaagttctcaa

SEQ ID NO: 110169 - DNA, 20 bp, Artificial Sequence
  Description of Artificial Sequence: Synthetic oligonucleotide
  Target: LAMA2; (-) strand; PAM type: NRG; PAM sequence: AAG
aagtgtcattcaaagttctc

SEQ ID NO: 110170 - DNA, 20 bp, Artificial Sequence
  Description of Artificial Sequence: Synthetic oligonucleotide
  Target: LAMA2; (-) strand; PAM type: NRG; PAM sequence: AAG
ctttcccaaagtgtcattca

SEQ ID NO: 110171 - DNA, 20 bp, Artificial Sequence
  Description of Artificial Sequence: Synthetic oligonucleotide
  Target: LAMA2; (-) strand; PAM type: NRG; PAM sequence: AAG
aatagctgataactttccca

SEQ ID NO: 110172 - DNA, 20 bp, Artificial Sequence
  Description of Artificial Sequence: Synthetic oligonucleotide
  Target: LAMA2; (-) strand; PAM type: NRG; PAM sequence: TAG
tgaatgcttaccatttggaa

SEQ ID NO: 110173 - DNA, 20 bp, Artificial Sequence
  Description of Artificial Sequence: Synthetic oligonucleotide
  Target: LAMA2; (-) strand; PAM type: NRG; PAM sequence: TGG
tgtcctgaatgcttaccatt

SEQ ID NO: 110174 - DNA, 20 bp, Artificial Sequence
  Description of Artificial Sequence: Synthetic oligonucleotide
  Target: LAMA2; (-) strand; PAM type: NRG; PAM sequence: TAG
aggtcaactgacacagttgg

SEQ ID NO: 110175 - DNA, 20 bp, Artificial Sequence
  Description of Artificial Sequence: Synthetic oligonucleotide
  Target: LAMA2; (-) strand; PAM type: NRG; PAM sequence: TGG
ttcaggtcaactgacacagt

SEQ ID NO: 110176 - DNA, 20 bp, Artificial Sequence
  Description of Artificial Sequence: Synthetic oligonucleotide
  Target: LAMA2; (-) strand; PAM type: NRG; PAM sequence: CAG
aaacttcaggtcaactgaca

SEQ ID NO: 110177 - DNA, 20 bp, Artificial Sequence
  Description of Artificial Sequence: Synthetic oligonucleotide
  Target: LAMA2; (-) strand; PAM type: NRG; PAM sequence: AGG
acaacagtcttcaaaacttc

SEQ ID NO: 110178 - DNA, 20 bp, Artificial Sequence
  Description of Artificial Sequence: Synthetic oligonucleotide
  Target: LAMA2; (-) strand; PAM type: NRG; PAM sequence: CAG
aacaacagtcttcaaaactt

SEQ ID NO: 110179 - DNA, 20 bp, Artificial Sequence
  Description of Artificial Sequence: Synthetic oligonucleotide
  Target: LAMA2; (-) strand; PAM type: NRG; PAM sequence: CAG
aaaatggtaaaagttaacaa

SEQ ID NO: 110180 - DNA, 20 bp, Artificial Sequence
  Description of Artificial Sequence: Synthetic oligonucleotide
  Target: LAMA2; (-) strand; PAM type: NRG; PAM sequence: AAG
atcttagaaaaaaatggtaa

SEQ ID NO: 110181 - DNA, 20 bp, Artificial Sequence
  Description of Artificial Sequence: Synthetic oligonucleotide
  Target: LAMA2; (-) strand; PAM type: NRG; PAM sequence: TGG
agaataatcttagaaaaaaa

SEQ ID NO: 110182 - DNA, 20 bp, Artificial Sequence
  Description of Artificial Sequence: Synthetic oligonucleotide
  Target: LAMA2; (-) strand; PAM type: NRG; PAM sequence: TAG
taatagtaccagaataatct

SEQ ID NO: 110183 - DNA, 20 bp, Artificial Sequence
  Description of Artificial Sequence: Synthetic oligonucleotide
  Target: LAMA2; (-) strand; PAM type: NRG; PAM sequence: CAG
taatttccagataatagtac

SEQ ID NO: 110184 - DNA, 20 bp, Artificial Sequence
  Description of Artificial Sequence: Synthetic oligonucleotide
  Target: LAMA2; (-) strand; PAM type: NRG; PAM sequence: TAG
agtatctaatttccagataa

SEQ ID NO: 110185 - DNA, 20 bp, Artificial Sequence
  Description of Artificial Sequence: Synthetic oligonucleotide
  Target: LAMA2; (-) strand; PAM type: NRG; PAM sequence: CAG
gaaaaacagtatctaatttc

SEQ ID NO: 110186 - DNA, 20 bp, Artificial Sequence
  Description of Artificial Sequence: Synthetic oligonucleotide
  Target: LAMA2; (-) strand; PAM type: NRG; PAM sequence: CAG
gaattcatgagtaagaaaaa

SEQ ID NO: 110187 - DNA, 20 bp, Artificial Sequence
  Description of Artificial Sequence: Synthetic oligonucleotide
  Target: LAMA2; (-) strand; PAM type: NRG; PAM sequence: AAG
acaaagaagaattcatgagt

SEQ ID NO: 110188 - DNA, 20 bp, Artificial Sequence
  Description of Artificial Sequence: Synthetic oligonucleotide
  Target: LAMA2; (-) strand; PAM type: NRG; PAM sequence: GAG
tctcacaaagaagaattcat

SEQ ID NO: 110189 - DNA, 20 bp, Artificial Sequence
  Description of Artificial Sequence: Synthetic oligonucleotide
  Target: LAMA2; (-) strand; PAM type: NRG; PAM sequence: AAG
agtttctcattctcacaaag

SEQ ID NO: 110190 - DNA, 20 bp, Artificial Sequence
  Description of Artificial Sequence: Synthetic oligonucleotide
  Target: LAMA2; (-) strand; PAM type: NRG; PAM sequence: AAG
tttagtttctcattctcaca

SEQ ID NO: 110191 - DNA, 20 bp, Artificial Sequence
  Description of Artificial Sequence: Synthetic oligonucleotide
  Target: LAMA2; (-) strand; PAM type: NRG; PAM sequence: TAG
ccataatgcaaagtatggtt

SEQ ID NO: 110192 - DNA, 20 bp, Artificial Sequence
  Description of Artificial Sequence: Synthetic oligonucleotide
  Target: LAMA2; (-) strand; PAM type: NRG; PAM sequence: TGG
aaataccataatgcaaagta

SEQ ID NO: 110193 - DNA, 20 bp, Artificial Sequence
  Description of Artificial Sequence: Synthetic oligonucleotide
  Target: LAMA2; (-) strand; PAM type: NRG; PAM sequence: AAG
ataaaaaataccataatgca

SEQ ID NO: 110194 - DNA, 20 bp, Artificial Sequence
  Description of Artificial Sequence: Synthetic oligonucleotide
  Target: LAMA2; (-) strand; PAM type: NRG; PAM sequence: AAG
atactggctaaaggcaataa

SEQ ID NO: 110195 - DNA, 20 bp, Artificial Sequence
  Description of Artificial Sequence: Synthetic oligonucleotide
  Target: LAMA2; (-) strand; PAM type: NRG; PAM sequence: AGG
ttcctaaggatactggctaa

SEQ ID NO: 110196 - DNA, 20 bp, Artificial Sequence
  Description of Artificial Sequence: Synthetic oligonucleotide
  Target: LAMA2; (-) strand; PAM type: NRG; PAM sequence: AAG
attcctaaggatactggcta

SEQ ID NO: 110197 - DNA, 20 bp, Artificial Sequence
  Description of Artificial Sequence: Synthetic oligonucleotide
  Target: LAMA2; (-) strand; PAM type: NRG; PAM sequence: TGG
taacacattcctaaggatac

SEQ ID NO: 110198 - DNA, 20 bp, Artificial Sequence
  Description of Artificial Sequence: Synthetic oligonucleotide
  Target: LAMA2; (-) strand; PAM type: NRG; PAM sequence: AGG
ctttctgtaacacattccta

SEQ ID NO: 110199 - DNA, 20 bp, Artificial Sequence
  Description of Artificial Sequence: Synthetic oligonucleotide
  Target: LAMA2; (-) strand; PAM type: NRG; PAM sequence: AAG
cctttctgtaacacattcct

SEQ ID NO: 110200 - DNA, 20 bp, Artificial Sequence
  Description of Artificial Sequence: Synthetic oligonucleotide
  Target: LAMA2; (-) strand; PAM type: NRG; PAM sequence: AAG
aggatgagttttataataat

SEQ ID NO: 110201 - DNA, 20 bp, Artificial Sequence
  Description of Artificial Sequence: Synthetic oligonucleotide
  Target: LAMA2; (-) strand; PAM type: NRG; PAM sequence: GAG
ccctgccaatactgaaggat

SEQ ID NO: 110202 - DNA, 20 bp, Artificial Sequence
  Description of Artificial Sequence: Synthetic oligonucleotide
  Target: LAMA2; (-) strand; PAM type: NRG; PAM sequence: AGG
caatcccctgccaatactga

SEQ ID NO: 110203 - DNA, 20 bp, Artificial Sequence
  Description of Artificial Sequence: Synthetic oligonucleotide
  Target: LAMA2; (-) strand; PAM type: NRG; PAM sequence: AAG
ccaatcccctgccaatactg

SEQ ID NO: 110204 - DNA, 20 bp, Artificial Sequence
  Description of Artificial Sequence: Synthetic oligonucleotide
  Target: LAMA2; (-) strand; PAM type: NRG; PAM sequence: TGG
atatctgtgggggggggtcc

SEQ ID NO: 110205 - DNA, 20 bp, Artificial Sequence
  Description of Artificial Sequence: Synthetic oligonucleotide
  Target: LAMA2; (-) strand; PAM type: NRG; PAM sequence: GGG
attttgatatctgtgggggg

SEQ ID NO: 110206 - DNA, 20 bp, Artificial Sequence
  Description of Artificial Sequence: Synthetic oligonucleotide
  Target: LAMA2; (-) strand; PAM type: NRG; PAM sequence: GGG
aattttgatatctgtggggg

SEQ ID NO: 110207 - DNA, 20 bp, Artificial Sequence
  Description of Artificial Sequence: Synthetic oligonucleotide
  Target: LAMA2; (-) strand; PAM type: NRG; PAM sequence: GGG
gaattttgatatctgtgggg

SEQ ID NO: 110208 - DNA, 20 bp, Artificial Sequence
  Description of Artificial Sequence: Synthetic oligonucleotide
  Target: LAMA2; (-) strand; PAM type: NRG; PAM sequence: GGG
agaattttgatatctgtggg

SEQ ID NO: 110209 - DNA, 20 bp, Artificial Sequence
  Description of Artificial Sequence: Synthetic oligonucleotide
  Target: LAMA2; (-) strand; PAM type: NRG; PAM sequence: GGG
aagaattttgatatctgtgg

SEQ ID NO: 110210 - DNA, 20 bp, Artificial Sequence
  Description of Artificial Sequence: Synthetic oligonucleotide
  Target: LAMA2; (-) strand; PAM type: NRG; PAM sequence: GGG
caagaattttgatatctgtg

SEQ ID NO: 110211 - DNA, 20 bp, Artificial Sequence
  Description of Artificial Sequence: Synthetic oligonucleotide
  Target: LAMA2; (-) strand; PAM type: NRG; PAM sequence: GGG
tcaagaattttgatatctgt

SEQ ID NO: 110212 - DNA, 20 bp, Artificial Sequence
  Description of Artificial Sequence: Synthetic oligonucleotide
  Target: LAMA2; (-) strand; PAM type: NRG; PAM sequence: TGG
ttcaagaattttgatatctg

SEQ ID NO: 110213 - DNA, 20 bp, Artificial Sequence
  Description of Artificial Sequence: Synthetic oligonucleotide
  Target: LAMA2; (-) strand; PAM type: NRG; PAM sequence: AAG
taaaagggacttgagtattc

SEQ ID NO: 110214 - DNA, 20 bp, Artificial Sequence
  Description of Artificial Sequence: Synthetic oligonucleotide
  Target: LAMA2; (-) strand; PAM type: NRG; PAM sequence: GAG
ccattttataaaagggactt

SEQ ID NO: 110215 - DNA, 20 bp, Artificial Sequence
  Description of Artificial Sequence: Synthetic oligonucleotide
  Target: LAMA2; (-) strand; PAM type: NRG; PAM sequence: GGG
tactatgccattttataaaa

SEQ ID NO: 110216 - DNA, 20 bp, Artificial Sequence
  Description of Artificial Sequence: Synthetic oligonucleotide
  Target: LAMA2; (-) strand; PAM type: NRG; PAM sequence: AGG
atactatgccattttataaa

SEQ ID NO: 110217 - DNA, 20 bp, Artificial Sequence
  Description of Artificial Sequence: Synthetic oligonucleotide
  Target: LAMA2; (-) strand; PAM type: NRG; PAM sequence: AAG
aatactatgccattttataa

SEQ ID NO: 110218 - DNA, 20 bp, Artificial Sequence
  Description of Artificial Sequence: Synthetic oligonucleotide
  Target: LAMA2; (-) strand; PAM type: NRG; PAM sequence: AGG
gtatatgggaggctatgcat

SEQ ID NO: 110219 - DNA, 20 bp, Artificial Sequence
  Description of Artificial Sequence: Synthetic oligonucleotide
  Target: LAMA2; (-) strand; PAM type: NRG; PAM sequence: TAG
agtatatgggaggctatgca

SEQ ID NO: 110220 - DNA, 20 bp, Artificial Sequence
  Description of Artificial Sequence: Synthetic oligonucleotide
  Target: LAMA2; (-) strand; PAM type: NRG; PAM sequence: AGG
tagggattaaagtatatggg

SEQ ID NO: 110221 - DNA, 20 bp, Artificial Sequence
  Description of Artificial Sequence: Synthetic oligonucleotide
  Target: LAMA2; (-) strand; PAM type: NRG; PAM sequence: GAG
ctagggattaaagtatatgg

SEQ ID NO: 110222 - DNA, 20 bp, Artificial Sequence
  Description of Artificial Sequence: Synthetic oligonucleotide
  Target: LAMA2; (-) strand; PAM type: NRG; PAM sequence: GGG
atctagggattaaagtatat

SEQ ID NO: 110223 - DNA, 20 bp, Artificial Sequence
  Description of Artificial Sequence: Synthetic oligonucleotide
  Target: LAMA2; (-) strand; PAM type: NRG; PAM sequence: TGG
gatctagggattaaagtata

SEQ ID NO: 110224 - DNA, 20 bp, Artificial Sequence
  Description of Artificial Sequence: Synthetic oligonucleotide
  Target: LAMA2; (-) strand; PAM type: NRG; PAM sequence: AAG
tataaatgatctagggatta

SEQ ID NO: 110225 - DNA, 20 bp, Artificial Sequence
  Description of Artificial Sequence: Synthetic oligonucleotide
  Target: LAMA2; (-) strand; PAM type: NRG; PAM sequence: GGG
taggtattataaatgatcta

SEQ ID NO: 110226 - DNA, 20 bp, Artificial Sequence
  Description of Artificial Sequence: Synthetic oligonucleotide
  Target: LAMA2; (-) strand; PAM type: NRG; PAM sequence: AGG
ttaggtattataaatgatct

SEQ ID NO: 110227 - DNA, 20 bp, Artificial Sequence
  Description of Artificial Sequence: Synthetic oligonucleotide
  Target: LAMA2; (-) strand; PAM type: NRG; PAM sequence: TAG
attaggtattataaatgatc

SEQ ID NO: 110228 - DNA, 20 bp, Artificial Sequence
  Description of Artificial Sequence: Synthetic oligonucleotide
  Target: LAMA2; (-) strand; PAM type: NRG; PAM sequence: AGG
catagcatttacattatatt

SEQ ID NO: 110229 - DNA, 20 bp, Artificial Sequence
  Description of Artificial Sequence: Synthetic oligonucleotide
  Target: LAMA2; (-) strand; PAM type: NRG; PAM sequence: TAG
acatagcatttacattatat

SEQ ID NO: 110230 - DNA, 20 bp, Artificial Sequence
  Description of Artificial Sequence: Synthetic oligonucleotide
  Target: LAMA2; (-) strand; PAM type: NRG; PAM sequence: TAG
atacactgtaagaatttaca

SEQ ID NO: 110231 - DNA, 20 bp, Artificial Sequence
  Description of Artificial Sequence: Synthetic oligonucleotide
  Target: LAMA2; (-) strand; PAM type: NRG; PAM sequence: AAG
tttcataaacaatacactgt

SEQ ID NO: 110232 - DNA, 20 bp, Artificial Sequence
  Description of Artificial Sequence: Synthetic oligonucleotide
  Target: LAMA2; (-) strand; PAM type: NRG; PAM sequence: TGG
ggttgtgtctgtactgaaca

SEQ ID NO: 110233 - DNA, 20 bp, Artificial Sequence
  Description of Artificial Sequence: Synthetic oligonucleotide
  Target: LAMA2; (-) strand; PAM type: NRG; PAM sequence: TGG
tggatatttaggggaaaaaa

SEQ ID NO: 110234 - DNA, 20 bp, Artificial Sequence
  Description of Artificial Sequence: Synthetic oligonucleotide
  Target: LAMA2; (-) strand; PAM type: NRG; PAM sequence: GGG
ttggatatttggatatttag

SEQ ID NO: 110235 - DNA, 20 bp, Artificial Sequence
  Description of Artificial Sequence: Synthetic oligonucleotide
  Target: LAMA2; (-) strand; PAM type: NRG; PAM sequence: GGG
gttggatatttggatattta

SEQ ID NO: 110236 - DNA, 20 bp, Artificial Sequence
  Description of Artificial Sequence: Synthetic oligonucleotide
  Target: LAMA2; (-) strand; PAM type: NRG; PAM sequence: AGG
agttggatatttggatattt

SEQ ID NO: 110237 - DNA, 20 bp, Artificial Sequence
  Description of Artificial Sequence: Synthetic oligonucleotide
  Target: LAMA2; (-) strand; PAM type: NRG; PAM sequence: TAG
gagttggatatttggatatt

SEQ ID NO: 110238 - DNA, 20 bp, Artificial Sequence
  Description of Artificial Sequence: Synthetic oligonucleotide
  Target: LAMA2; (-) strand; PAM type: NRG; PAM sequence: TGG
accttggagagttggatatt

SEQ ID NO: 110239 - DNA, 20 bp, Artificial Sequence
  Description of Artificial Sequence: Synthetic oligonucleotide
  Target: LAMA2; (-) strand; PAM type: NRG; PAM sequence: TGG
ttcaaccaaccttggagagt

SEQ ID NO: 110240 - DNA, 20 bp, Artificial Sequence
  Description of Artificial Sequence: Synthetic oligonucleotide
  Target: LAMA2; (-) strand; PAM type: NRG; PAM sequence: GAG
taaattcaaccaaccttgga

SEQ ID NO: 110241 - DNA, 20 bp, Artificial Sequence
  Description of Artificial Sequence: Synthetic oligonucleotide
  Target: LAMA2; (-) strand; PAM type: NRG; PAM sequence: GAG
tgtaaattcaaccaaccttg

SEQ ID NO: 110242 - DNA, 20 bp, Artificial Sequence
  Description of Artificial Sequence: Synthetic oligonucleotide
  Target: LAMA2; (-) strand; PAM type: NRG; PAM sequence: TGG
tctgtaaattcaaccaacct

SEQ ID NO: 110243 - DNA, 20 bp, Artificial Sequence
  Description of Artificial Sequence: Synthetic oligonucleotide
  Target: LAMA2; (-) strand; PAM type: NRG; PAM sequence: GGG
agttgtccctctgtgtcagt

SEQ ID NO: 110244 - DNA, 20 bp, Artificial Sequence
  Description of Artificial Sequence: Synthetic oligonucleotide
  Target: LAMA2; (-) strand; PAM type: NRG; PAM sequence: TGG
cagttgtccctctgtgtcag

SEQ ID NO: 110245 - DNA, 20 bp, Artificial Sequence
  Description of Artificial Sequence: Synthetic oligonucleotide
  Target: LAMA2; (-) strand; PAM type: NRG; PAM sequence: CAG
atacagttgtccctctgtgt

SEQ ID NO: 110246 - DNA, 20 bp, Artificial Sequence
  Description of Artificial Sequence: Synthetic oligonucleotide
  Target: LAMA2; (-) strand; PAM type: NRG; PAM sequence: CAG
ctgaaacacagaagacaata

SEQ ID NO: 110247 - DNA, 20 bp, Artificial Sequence
  Description of Artificial Sequence: Synthetic oligonucleotide
  Target: LAMA2; (-) strand; PAM type: NRG; PAM sequence: AAG
tttcttgggctgaaacacag

SEQ ID NO: 110248 - DNA, 20 bp, Artificial Sequence
  Description of Artificial Sequence: Synthetic oligonucleotide
  Target: LAMA2; (-) strand; PAM type: NRG; PAM sequence: CAG
cgatttcttgggctgaaaca

SEQ ID NO: 110249 - DNA, 20 bp, Artificial Sequence
  Description of Artificial Sequence: Synthetic oligonucleotide
  Target: LAMA2; (-) strand; PAM type: NRG; PAM sequence: GGG
tcactaatacacgatttctt

SEQ ID NO: 110250 - DNA, 20 bp, Artificial Sequence
  Description of Artificial Sequence: Synthetic oligonucleotide
  Target: LAMA2; (-) strand; PAM type: NRG; PAM sequence: TGG
ttcactaatacacgatttct

SEQ ID NO: 110251 - DNA, 20 bp, Artificial Sequence
  Description of Artificial Sequence: Synthetic oligonucleotide
  Target: LAMA2; (-) strand; PAM type: NRG; PAM sequence: TAG
tacatcagtattttagagat

SEQ ID NO: 110252 - DNA, 20 bp, Artificial Sequence
  Description of Artificial Sequence: Synthetic oligonucleotide
  Target: LAMA2; (-) strand; PAM type: NRG; PAM sequence: GAG
ggtggtacatcagtatttta

SEQ ID NO: 110253 - DNA, 20 bp, Artificial Sequence
  Description of Artificial Sequence: Synthetic oligonucleotide
  Target: LAMA2; (-) strand; PAM type: NRG; PAM sequence: TAG
gtggtggtacatcagtattt

SEQ ID NO: 110254 - DNA, 20 bp, Artificial Sequence
  Description of Artificial Sequence: Synthetic oligonucleotide
  Target: LAMA2; (-) strand; PAM type: NRG; PAM sequence: CAG
gtgtctttgtggtggtacat

SEQ ID NO: 110255 - DNA, 20 bp, Artificial Sequence
  Description of Artificial Sequence: Synthetic oligonucleotide
  Target: LAMA2; (-) strand; PAM type: NRG; PAM sequence: TGG
aataaactgtgtctttgtgg

SEQ ID NO: 110256 - DNA, 20 bp, Artificial Sequence
  Description of Artificial Sequence: Synthetic oligonucleotide
  Target: LAMA2; (-) strand; PAM type: NRG; PAM sequence: TGG
tttaataaactgtgtctttg

SEQ ID NO: 110257 - DNA, 20 bp, Artificial Sequence
  Description of Artificial Sequence: Synthetic oligonucleotide
  Target: LAMA2; (-) strand; PAM type: NRG; PAM sequence: AGG
gggctatcacctattactgc

SEQ ID NO: 110258 - DNA, 20 bp, Artificial Sequence
  Description of Artificial Sequence: Synthetic oligonucleotide
  Target: LAMA2; (-) strand; PAM type: NRG; PAM sequence: CAG
tgggctatcacctattactg

SEQ ID NO: 110259 - DNA, 20 bp, Artificial Sequence
  Description of Artificial Sequence: Synthetic oligonucleotide
  Target: LAMA2; (-) strand; PAM type: NRG; PAM sequence: GGG
ttatcaagagagaatgcagt

SEQ ID NO: 110260 - DNA, 20 bp, Artificial Sequence
  Description of Artificial Sequence: Synthetic oligonucleotide
  Target: LAMA2; (-) strand; PAM type: NRG; PAM sequence: TGG
tttatcaagagagaatgcag

SEQ ID NO: 110261 - DNA, 20 bp, Artificial Sequence
  Description of Artificial Sequence: Synthetic oligonucleotide
  Target: LAMA2; (-) strand; PAM type: NRG; PAM sequence: CAG
aattttatcaagagagaatg

SEQ ID NO: 110262 - DNA, 20 bp, Artificial Sequence
  Description of Artificial Sequence: Synthetic oligonucleotide
  Target: LAMA2; (-) strand; PAM type: NRG; PAM sequence: GAG
gaaattgaattttatcaaga

SEQ ID NO: 110263 - DNA, 20 bp, Artificial Sequence
  Description of Artificial Sequence: Synthetic oligonucleotide
  Target: LAMA2; (-) strand; PAM type: NRG; PAM sequence: GAG
aagaaattgaattttatcaa

SEQ ID NO: 110264 - DNA, 20 bp, Artificial Sequence
  Description of Artificial Sequence: Synthetic oligonucleotide
  Target: LAMA2; (-) strand; PAM type: NRG; PAM sequence: AAG
taaagaaattgaattttatc

SEQ ID NO: 110265 - DNA, 20 bp, Artificial Sequence
  Description of Artificial Sequence: Synthetic oligonucleotide
  Target: LAMA2; (-) strand; PAM type: NRG; PAM sequence: AAG
tttgaaagttggaatagtta

SEQ ID NO: 110266 - DNA, 20 bp, Artificial Sequence
  Description of Artificial Sequence: Synthetic oligonucleotide
  Target: LAMA2; (-) strand; PAM type: NRG; PAM sequence: TAG
aatgtttttgaaagttggaa

SEQ ID NO: 110267 - DNA, 20 bp, Artificial Sequence
  Description of Artificial Sequence: Synthetic oligonucleotide
  Target: LAMA2; (-) strand; PAM type: NRG; PAM sequence: TGG
ccactaatgtttttgaaagt

SEQ ID NO: 110268 - DNA, 20 bp, Artificial Sequence
  Description of Artificial Sequence: Synthetic oligonucleotide
  Target: LAMA2; (-) strand; PAM type: NRG; PAM sequence: AAG
ttgaccactaatgtttttga

SEQ ID NO: 110269 - DNA, 20 bp, Artificial Sequence
  Description of Artificial Sequence: Synthetic oligonucleotide
  Target: LAMA2; (-) strand; PAM type: NRG; PAM sequence: TGG
gtagaaagatattacagaca

SEQ ID NO: 110270 - DNA, 20 bp, Artificial Sequence
  Description of Artificial Sequence: Synthetic oligonucleotide
  Target: LAMA2; (-) strand; PAM type: NRG; PAM sequence: CAG
taataggtagaaagatatta

SEQ ID NO: 110271 - DNA, 20 bp, Artificial Sequence
  Description of Artificial Sequence: Synthetic oligonucleotide
  Target: LAMA2; (-) strand; PAM type: NRG; PAM sequence: AAG
cagcagttctaataggtaga

SEQ ID NO: 110272 - DNA, 20 bp, Artificial Sequence
  Description of Artificial Sequence: Synthetic oligonucleotide
  Target: LAMA2; (-) strand; PAM type: NRG; PAM sequence: TAG
tttccagcagttctaatagg

SEQ ID NO: 110273 - DNA, 20 bp, Artificial Sequence
  Description of Artificial Sequence: Synthetic oligonucleotide
  Target: LAMA2; (-) strand; PAM type: NRG; PAM sequence: AGG
aaatttccagcagttctaat

SEQ ID NO: 110274 - DNA, 20 bp, Artificial Sequence
  Description of Artificial Sequence: Synthetic oligonucleotide
  Target: LAMA2; (-) strand; PAM type: NRG; PAM sequence: TAG
aaaatttccagcagttctaa

SEQ ID NO: 110275 - DNA, 20 bp, Artificial Sequence
  Description of Artificial Sequence: Synthetic oligonucleotide
  Target: LAMA2; (-) strand; PAM type: NRG; PAM sequence: CAG
taccatgcaaaaatttccag

SEQ ID NO: 110276 - DNA, 20 bp, Artificial Sequence
  Description of Artificial Sequence: Synthetic oligonucleotide
  Target: LAMA2; (-) strand; PAM type: NRG; PAM sequence: CAG
taataccatgcaaaaatttc

SEQ ID NO: 110277 - DNA, 20 bp, Artificial Sequence
  Description of Artificial Sequence: Synthetic oligonucleotide
  Target: LAMA2; (-) strand; PAM type: NRG; PAM sequence: AGG
ttaaaataacgtgtgctttc

SEQ ID NO: 110278 - DNA, 20 bp, Artificial Sequence
  Description of Artificial Sequence: Synthetic oligonucleotide
  Target: LAMA2; (-) strand; PAM type: NRG; PAM sequence: CAG
tttaaaataacgtgtgcttt

SEQ ID NO: 110279 - DNA, 20 bp, Artificial Sequence
  Description of Artificial Sequence: Synthetic oligonucleotide
  Target: LAMA2; (-) strand; PAM type: NRG; PAM sequence: TAG
caatataaaaatagtaaaag

SEQ ID NO: 110280 - DNA, 20 bp, Artificial Sequence
  Description of Artificial Sequence: Synthetic oligonucleotide
  Target: LAMA2; (-) strand; PAM type: NRG; PAM sequence: AAG
taacaatataaaaatagtaa

SEQ ID NO: 110281 - DNA, 20 bp, Artificial Sequence
  Description of Artificial Sequence: Synthetic oligonucleotide
  Target: LAMA2; (-) strand; PAM type: NRG; PAM sequence: TAG
atgctttaacaatataaaaa

SEQ ID NO: 110282 - DNA, 20 bp, Artificial Sequence
  Description of Artificial Sequence: Synthetic oligonucleotide
  Target: LAMA2; (-) strand; PAM type: NRG; PAM sequence: AAG
aagtatattaagtactcaat

SEQ ID NO: 110283 - DNA, 20 bp, Artificial Sequence
  Description of Artificial Sequence: Synthetic oligonucleotide
  Target: LAMA2; (-) strand; PAM type: NRG; PAM sequence: AAG
acacttaacataagtatatt

SEQ ID NO: 110284 - DNA, 20 bp, Artificial Sequence
  Description of Artificial Sequence: Synthetic oligonucleotide
  Target: LAMA2; (-) strand; PAM type: NRG; PAM sequence: AAG
ggattacatacacttaacat

SEQ ID NO: 110285 - DNA, 20 bp, Artificial Sequence
  Description of Artificial Sequence: Synthetic oligonucleotide
  Target: LAMA2; (-) strand; PAM type: NRG; PAM sequence: AGG
tttttgctccaattggtatg

SEQ ID NO: 110286 - DNA, 20 bp, Artificial Sequence
  Description of Artificial Sequence: Synthetic oligonucleotide
  Target: LAMA2; (-) strand; PAM type: NRG; PAM sequence: GAG
gtttttgctccaattggtat

SEQ ID NO: 110287 - DNA, 20 bp, Artificial Sequence
  Description of Artificial Sequence: Synthetic oligonucleotide
  Target: LAMA2; (-) strand; PAM type: NRG; PAM sequence: TGG
gcaaatgtttttgctccaat

SEQ ID NO: 110288 - DNA, 20 bp, Artificial Sequence
  Description of Artificial Sequence: Synthetic oligonucleotide
  Target: LAMA2; (-) strand; PAM type: NRG; PAM sequence: AAG
ccaattgatgcaagcaaatg

SEQ ID NO: 110289 - DNA, 20 bp, Artificial Sequence
  Description of Artificial Sequence: Synthetic oligonucleotide
  Target: LAMA2; (-) strand; PAM type: NRG; PAM sequence: AAG
tatatatgaccaattgatgc

SEQ ID NO: 110290 - DNA, 20 bp, Artificial Sequence
  Description of Artificial Sequence: Synthetic oligonucleotide
  Target: LAMA2; (-) strand; PAM type: NRG; PAM sequence: TAG
atctatataaccaattgaga

SEQ ID NO: 110291 - DNA, 20 bp, Artificial Sequence
  Description of Artificial Sequence: Synthetic oligonucleotide
  Target: LAMA2; (-) strand; PAM type: NRG; PAM sequence: GAG
tgttatctatataaccaatt

SEQ ID NO: 110292 - DNA, 20 bp, Artificial Sequence
  Description of Artificial Sequence: Synthetic oligonucleotide
  Target: LAMA2; (-) strand; PAM type: NRG; PAM sequence: AAG
aattagctcttaaagtagtg

SEQ ID NO: 110293 - DNA, 20 bp, Artificial Sequence
  Description of Artificial Sequence: Synthetic oligonucleotide
  Target: LAMA2; (-) strand; PAM type: NRG; PAM sequence: TAG
tacctaattagctcttaaag

SEQ ID NO: 110294 - DNA, 20 bp, Artificial Sequence
  Description of Artificial Sequence: Synthetic oligonucleotide
  Target: LAMA2; (-) strand; PAM type: NRG; PAM sequence: AAG
gaatacctaattagctctta

SEQ ID NO: 110295 - DNA, 20 bp, Artificial Sequence
  Description of Artificial Sequence: Synthetic oligonucleotide
  Target: LAMA2; (-) strand; PAM type: NRG; PAM sequence: TAG
tatctgtatgaatacctaat

SEQ ID NO: 110296 - DNA, 20 bp, Artificial Sequence
  Description of Artificial Sequence: Synthetic oligonucleotide
  Target: LAMA2; (-) strand; PAM type: NRG; PAM sequence: AGG
agttgtccttctgtgtcagt

SEQ ID NO: 110297 - DNA, 20 bp, Artificial Sequence
  Description of Artificial Sequence: Synthetic oligonucleotide
  Target: LAMA2; (-) strand; PAM type: NRG; PAM sequence: TAG
aagttgtccttctgtgtcag

SEQ ID NO: 110298 - DNA, 20 bp, Artificial Sequence
  Description of Artificial Sequence: Synthetic oligonucleotide
  Target: LAMA2; (-) strand; PAM type: NRG; PAM sequence: CAG
gacaagttgtccttctgtgt

SEQ ID NO: 110299 - DNA, 20 bp, Artificial Sequence
  Description of Artificial Sequence: Synthetic oligonucleotide
  Target: LAMA2; (-) strand; PAM type: NRG; PAM sequence: AAG
ttatgttatacacagaagac

SEQ ID NO: 110300 - DNA, 20 bp, Artificial Sequence
  Description of Artificial Sequence: Synthetic oligonucleotide
  Target: LAMA2; (-) strand; PAM type: NRG; PAM sequence: AAG
ctaacttatgttatacacag

SEQ ID NO: 110301 - DNA, 20 bp, Artificial Sequence
  Description of Artificial Sequence: Synthetic oligonucleotide
  Target: LAMA2; (-) strand; PAM type: NRG; PAM sequence: CAG
gtgctaacttatgttataca

SEQ ID NO: 110302 - DNA, 20 bp, Artificial Sequence
  Description of Artificial Sequence: Synthetic oligonucleotide
  Target: LAMA2; (-) strand; PAM type: NRG; PAM sequence: TAG
tcttaactgatgttaagtgt

SEQ ID NO: 110303 - DNA, 20 bp, Artificial Sequence
  Description of Artificial Sequence: Synthetic oligonucleotide
  Target: LAMA2; (-) strand; PAM type: NRG; PAM sequence: AAG
acagtatcttaactgatgtt

SEQ ID NO: 110304 - DNA, 20 bp, Artificial Sequence
  Description of Artificial Sequence: Synthetic oligonucleotide
  Target: LAMA2; (-) strand; PAM type: NRG; PAM sequence: CAG
ctgtaaagtggggataataa

SEQ ID NO: 110305 - DNA, 20 bp, Artificial Sequence
  Description of Artificial Sequence: Synthetic oligonucleotide
  Target: LAMA2; (-) strand; PAM type: NRG; PAM sequence: GGG
tgtttctcacctgtaaagtg

SEQ ID NO: 110306 - DNA, 20 bp, Artificial Sequence
  Description of Artificial Sequence: Synthetic oligonucleotide
  Target: LAMA2; (-) strand; PAM type: NRG; PAM sequence: GGG
ctgtttctcacctgtaaagt

SEQ ID NO: 110307 - DNA, 20 bp, Artificial Sequence
  Description of Artificial Sequence: Synthetic oligonucleotide
  Target: LAMA2; (-) strand; PAM type: NRG; PAM sequence: TGG
tctgtttctcacctgtaaag

SEQ ID NO: 110308 - DNA, 20 bp, Artificial Sequence
  Description of Artificial Sequence: Synthetic oligonucleotide
  Target: LAMA2; (-) strand; PAM type: NRG; PAM sequence: AAG
ctgtctgtttctcacctgta

SEQ ID NO: 110309 - DNA, 20 bp, Artificial Sequence
  Description of Artificial Sequence: Synthetic oligonucleotide
  Target: LAMA2; (-) strand; PAM type: NRG; PAM sequence: CAG
ccacttttaacaatggcctt

SEQ ID NO: 110310 - DNA, 20 bp, Artificial Sequence
  Description of Artificial Sequence: Synthetic oligonucleotide
  Target: LAMA2; (-) strand; PAM type: NRG; PAM sequence: TGG
ctctgtgccacttttaacaa

SEQ ID NO: 110311 - DNA, 20 bp, Artificial Sequence
  Description of Artificial Sequence: Synthetic oligonucleotide
  Target: LAMA2; (-) strand; PAM type: NRG; PAM sequence: AAG
gaaatcaaactgtggggttt

SEQ ID NO: 110312 - DNA, 20 bp, Artificial Sequence
  Description of Artificial Sequence: Synthetic oligonucleotide
  Target: LAMA2; (-) strand; PAM type: NRG; PAM sequence: GGG
ggctctgaaatcaaactgtg

SEQ ID NO: 110313 - DNA, 20 bp, Artificial Sequence
  Description of Artificial Sequence: Synthetic oligonucleotide
  Target: LAMA2; (-) strand; PAM type: NRG; PAM sequence: GGG
aggctctgaaatcaaactgt

SEQ ID NO: 110314 - DNA, 20 bp, Artificial Sequence
  Description of Artificial Sequence: Synthetic oligonucleotide
  Target: LAMA2; (-) strand; PAM type: NRG; PAM sequence: TGG
taggctctgaaatcaaactg

SEQ ID NO: 110315 - DNA, 20 bp, Artificial Sequence
  Description of Artificial Sequence: Synthetic oligonucleotide
  Target: LAMA2; (-) strand; PAM type: NRG; PAM sequence: AGG
aggttagtggttaagatcat

SEQ ID NO: 110316 - DNA, 20 bp, Artificial Sequence
  Description of Artificial Sequence: Synthetic oligonucleotide
  Target: LAMA2; (-) strand; PAM type: NRG; PAM sequence: TAG
taggttagtggttaagatca

SEQ ID NO: 110317 - DNA, 20 bp, Artificial Sequence
  Description of Artificial Sequence: Synthetic oligonucleotide
  Target: LAMA2; (-) strand; PAM type: NRG; PAM sequence: AAG
gtgtgtataggttagtggtt

SEQ ID NO: 110318 - DNA, 20 bp, Artificial Sequence
  Description of Artificial Sequence: Synthetic oligonucleotide
  Target: LAMA2; (-) strand; PAM type: NRG; PAM sequence: TGG
tactagtgtgtataggttag

SEQ ID NO: 110319 - DNA, 20 bp, Artificial Sequence
  Description of Artificial Sequence: Synthetic oligonucleotide
  Target: LAMA2; (-) strand; PAM type: NRG; PAM sequence: TAG
gactactagtgtgtataggt

SEQ ID NO: 110320 - DNA, 20 bp, Artificial Sequence
  Description of Artificial Sequence: Synthetic oligonucleotide
  Target: LAMA2; (-) strand; PAM type: NRG; PAM sequence: AGG
agatgactactagtgtgtat

SEQ ID NO: 110321 - DNA, 20 bp, Artificial Sequence
  Description of Artificial Sequence: Synthetic oligonucleotide
  Target: LAMA2; (-) strand; PAM type: NRG; PAM sequence: TAG
tagatgactactagtgtgta

SEQ ID NO: 110322 - DNA, 20 bp, Artificial Sequence
  Description of Artificial Sequence: Synthetic oligonucleotide
  Target: LAMA2; (-) strand; PAM type: NRG; PAM sequence: TAG
ttgtacctatagatgactac

SEQ ID NO: 110323 - DNA, 20 bp, Artificial Sequence
  Description of Artificial Sequence: Synthetic oligonucleotide
  Target: LAMA2; (-) strand; PAM type: NRG; PAM sequence: TAG
taatttgtatattgtaccta

SEQ ID NO: 110324 - DNA, 20 bp, Artificial Sequence
  Description of Artificial Sequence: Synthetic oligonucleotide
  Target: LAMA2; (-) strand; PAM type: NRG; PAM sequence: GAG
ttaaaaaagtaaaaaccacc

SEQ ID NO: 110325 - DNA, 20 bp, Artificial Sequence
  Description of Artificial Sequence: Synthetic oligonucleotide
  Target: LAMA2; (-) strand; PAM type: NRG; PAM sequence: AAG
caggtttttaaacgttaaaa

SEQ ID NO: 110326 - DNA, 20 bp, Artificial Sequence
  Description of Artificial Sequence: Synthetic oligonucleotide
  Target: LAMA2; (-) strand; PAM type: NRG; PAM sequence: AGG
gaaaatctgaaaagttactc

SEQ ID NO: 110327 - DNA, 20 bp, Artificial Sequence
  Description of Artificial Sequence: Synthetic oligonucleotide
  Target: LAMA2; (-) strand; PAM type: NRG; PAM sequence: CAG
tgaaaatctgaaaagttact

SEQ ID NO: 110328 - DNA, 20 bp, Artificial Sequence
  Description of Artificial Sequence: Synthetic oligonucleotide
  Target: LAMA2; (-) strand; PAM type: NRG; PAM sequence: AAG
aagggacatgaaaatctgaa

SEQ ID NO: 110329 - DNA, 20 bp, Artificial Sequence
  Description of Artificial Sequence: Synthetic oligonucleotide
  Target: LAMA2; (-) strand; PAM type: NRG; PAM sequence: GGG
atatacttactactgaaaaa

SEQ ID NO: 110330 - DNA, 20 bp, Artificial Sequence
  Description of Artificial Sequence: Synthetic oligonucleotide
  Target: LAMA2; (-) strand; PAM type: NRG; PAM sequence: AGG
tatatacttactactgaaaa

SEQ ID NO: 110331 - DNA, 20 bp, Artificial Sequence
  Description of Artificial Sequence: Synthetic oligonucleotide
  Target: LAMA2; (-) strand; PAM type: NRG; PAM sequence: AAG
ctatatacttactactgaaa

SEQ ID NO: 110332 - DNA, 20 bp, Artificial Sequence
  Description of Artificial Sequence: Synthetic oligonucleotide
  Target: LAMA2; (-) strand; PAM type: NRG; PAM sequence: TGG
tttatacttgttttcagcat

SEQ ID NO: 110333 - DNA, 20 bp, Artificial Sequence
  Description of Artificial Sequence: Synthetic oligonucleotide
  Target: LAMA2; (-) strand; PAM type: NRG; PAM sequence: CAG
catgcatttatacttgtttt

SEQ ID NO: 110334 - DNA, 20 bp, Artificial Sequence
  Description of Artificial Sequence: Synthetic oligonucleotide
  Target: LAMA2; (-) strand; PAM type: NRG; PAM sequence: AGG
gaaacattttcaggtatgtt

SEQ ID NO: 110335 - DNA, 20 bp, Artificial Sequence
  Description of Artificial Sequence: Synthetic oligonucleotide
  Target: LAMA2; (-) strand; PAM type: NRG; PAM sequence: TAG
agaaacattttcaggtatgt

SEQ ID NO: 110336 - DNA, 20 bp, Artificial Sequence
  Description of Artificial Sequence: Synthetic oligonucleotide
  Target: LAMA2; (-) strand; PAM type: NRG; PAM sequence: AGG
taggatagagaaacattttc

SEQ ID NO: 110337 - DNA, 20 bp, Artificial Sequence
  Description of Artificial Sequence: Synthetic oligonucleotide
  Target: LAMA2; (-) strand; PAM type: NRG; PAM sequence: CAG
ttaggatagagaaacatttt

SEQ ID NO: 110338 - DNA, 20 bp, Artificial Sequence
  Description of Artificial Sequence: Synthetic oligonucleotide
  Target: LAMA2; (-) strand; PAM type: NRG; PAM sequence: GAG
cgtattttcattttaggata

SEQ ID NO: 110339 - DNA, 20 bp, Artificial Sequence
  Description of Artificial Sequence: Synthetic oligonucleotide
  Target: LAMA2; (-) strand; PAM type: NRG; PAM sequence: TAG
aacgtattttcattttagga

SEQ ID NO: 110340 - DNA, 20 bp, Artificial Sequence
  Description of Artificial Sequence: Synthetic oligonucleotide
  Target: LAMA2; (-) strand; PAM type: NRG; PAM sequence: AGG
aactaacgtattttcatttt

SEQ ID NO: 110341 - DNA, 20 bp, Artificial Sequence
  Description of Artificial Sequence: Synthetic oligonucleotide
  Target: LAMA2; (-) strand; PAM type: NRG; PAM sequence: TAG
aaactaacgtattttcattt

SEQ ID NO: 110342 - DNA, 20 bp, Artificial Sequence
  Description of Artificial Sequence: Synthetic oligonucleotide
  Target: LAMA2; (-) strand; PAM type: NRG; PAM sequence: GGG
gggttggggtgggggttgga

SEQ ID NO: 110343 - DNA, 20 bp, Artificial Sequence
  Description of Artificial Sequence: Synthetic oligonucleotide
  Target: LAMA2; (-) strand; PAM type: NRG; PAM sequence: AGG
ggggttggggtgggggttgg

SEQ ID NO: 110344 - DNA, 20 bp, Artificial Sequence
  Description of Artificial Sequence: Synthetic oligonucleotide
  Target: LAMA2; (-) strand; PAM type: NRG; PAM sequence: GAG
aggggttggggtgggggttg

SEQ ID NO: 110345 - DNA, 20 bp, Artificial Sequence
  Description of Artificial Sequence: Synthetic oligonucleotide
  Target: LAMA2; (-) strand; PAM type: NRG; PAM sequence: TGG
gcaggggttggggtgggggt

SEQ ID NO: 110346 - DNA, 20 bp, Artificial Sequence
  Description of Artificial Sequence: Synthetic oligonucleotide
  Target: LAMA2; (-) strand; PAM type: NRG; PAM sequence: GGG
cagggcaggggttggggtgg

SEQ ID NO: 110347 - DNA, 20 bp, Artificial Sequence
  Description of Artificial Sequence: Synthetic oligonucleotide
  Target: LAMA2; (-) strand; PAM type: NRG; PAM sequence: GGG
gcagggcaggggttggggtg

SEQ ID NO: 110348 - DNA, 20 bp, Artificial Sequence
  Description of Artificial Sequence: Synthetic oligonucleotide
  Target: LAMA2; (-) strand; PAM type: NRG; PAM sequence: GGG
agcagggcaggggttggggt

SEQ ID NO: 110349 - DNA, 20 bp, Artificial Sequence
  Description of Artificial Sequence: Synthetic oligonucleotide
  Target: LAMA2; (-) strand; PAM type: NRG; PAM sequence: TGG
aagcagggcaggggttgggg

SEQ ID NO: 110350 - DNA, 20 bp, Artificial Sequence
  Description of Artificial Sequence: Synthetic oligonucleotide
  Target: LAMA2; (-) strand; PAM type: NRG; PAM sequence: GGG
ccaaagcagggcaggggttg

SEQ ID NO: 110351 - DNA, 20 bp, Artificial Sequence
  Description of Artificial Sequence: Synthetic oligonucleotide
  Target: LAMA2; (-) strand; PAM type: NRG; PAM sequence: GGG
tccaaagcagggcaggggtt

SEQ ID NO: 110352 - DNA, 20 bp, Artificial Sequence
  Description of Artificial Sequence: Synthetic oligonucleotide
  Target: LAMA2; (-) strand; PAM type: NRG; PAM sequence: TGG
ttccaaagcagggcaggggt

SEQ ID NO: 110353 - DNA, 20 bp, Artificial Sequence
  Description of Artificial Sequence: Synthetic oligonucleotide
  Target: LAMA2; (-) strand; PAM type: NRG; PAM sequence: GGG
gcatttccaaagcagggcag

SEQ ID NO: 110354 - DNA, 20 bp, Artificial Sequence
  Description of Artificial Sequence: Synthetic oligonucleotide
  Target: LAMA2; (-) strand; PAM type: NRG; PAM sequence: GGG
tgcatttccaaagcagggca

SEQ ID NO: 110355 - DNA, 20 bp, Artificial Sequence
  Description of Artificial Sequence: Synthetic oligonucleotide
  Target: LAMA2; (-) strand; PAM type: NRG; PAM sequence: AGG
ctgcatttccaaagcagggc

SEQ ID NO: 110356 - DNA, 20 bp, Artificial Sequence
  Description of Artificial Sequence: Synthetic oligonucleotide
  Target: LAMA2; (-) strand; PAM type: NRG; PAM sequence: CAG
tctgcatttccaaagcaggg

SEQ ID NO: 110357 - DNA, 20 bp, Artificial Sequence
  Description of Artificial Sequence: Synthetic oligonucleotide
  Target: LAMA2; (-) strand; PAM type: NRG; PAM sequence: GGG
taatctgcatttccaaagca

SEQ ID NO: 110358 - DNA, 20 bp, Artificial Sequence
  Description of Artificial Sequence: Synthetic oligonucleotide
  Target: LAMA2; (-) strand; PAM type: NRG; PAM sequence: AGG
ttaatctgcatttccaaagc

SEQ ID NO: 110359 - DNA, 20 bp, Artificial Sequence
  Description of Artificial Sequence: Synthetic oligonucleotide
  Target: LAMA2; (-) strand; PAM type: NRG; PAM sequence: CAG
tttaatctgcatttccaaag

SEQ ID NO: 110360 - DNA, 20 bp, Artificial Sequence
  Description of Artificial Sequence: Synthetic oligonucleotide
  Target: LAMA2; (-) strand; PAM type: NRG; PAM sequence: AAG
agatttaatctgcatttcca

SEQ ID NO: 110361 - DNA, 20 bp, Artificial Sequence
  Description of Artificial Sequence: Synthetic oligonucleotide
  Target: LAMA2; (-) strand; PAM type: NRG; PAM sequence: AAG
gcttcatgaaaacgaggctt

SEQ ID NO: 110362 - DNA, 20 bp, Artificial Sequence
  Description of Artificial Sequence: Synthetic oligonucleotide
  Target: LAMA2; (-) strand; PAM type: NRG; PAM sequence: AGG
acatgagcttcatgaaaacg

SEQ ID NO: 110363 - DNA, 20 bp, Artificial Sequence
  Description of Artificial Sequence: Synthetic oligonucleotide
  Target: LAMA2; (-) strand; PAM type: NRG; PAM sequence: GAG
cacatgagcttcatgaaaac

SEQ ID NO: 110364 - DNA, 20 bp, Artificial Sequence
  Description of Artificial Sequence: Synthetic oligonucleotide
  Target: LAMA2; (-) strand; PAM type: NRG; PAM sequence: GAG
cgagataaatttatccacat

SEQ ID NO: 110365 - DNA, 20 bp, Artificial Sequence
  Description of Artificial Sequence: Synthetic oligonucleotide
  Target: LAMA2; (-) strand; PAM type: NRG; PAM sequence: GAG
ttgctgctgaacttattcac

SEQ ID NO: 110366 - DNA, 20 bp, Artificial Sequence
  Description of Artificial Sequence: Synthetic oligonucleotide
  Target: LAMA2; (-) strand; PAM type: NRG; PAM sequence: AAG
attctaaatgttcattgtat

SEQ ID NO: 110367 - DNA, 20 bp, Artificial Sequence
  Description of Artificial Sequence: Synthetic oligonucleotide
  Target: LAMA2; (-) strand; PAM type: NRG; PAM sequence: TAG
tacctgattagctcttaaag

SEQ ID NO: 110368 - DNA, 20 bp, Artificial Sequence
  Description of Artificial Sequence: Synthetic oligonucleotide
  Target: LAMA2; (-) strand; PAM type: NRG; PAM sequence: AAG
gaatacctgattagctctta

SEQ ID NO: 110369 - DNA, 20 bp, Artificial Sequence
  Description of Artificial Sequence: Synthetic oligonucleotide
  Target: LAMA2; (-) strand; PAM type: NRG; PAM sequence: TAG
ttttgctatgaatacctgat

SEQ ID NO: 110370 - DNA, 20 bp, Artificial Sequence
  Description of Artificial Sequence: Synthetic oligonucleotide
  Target: LAMA2; (-) strand; PAM type: NRG; PAM sequence: GGG
aggtaaattaaattttctca

SEQ ID NO: 110371 - DNA, 20 bp, Artificial Sequence
  Description of Artificial Sequence: Synthetic oligonucleotide
  Target: LAMA2; (-) strand; PAM type: NRG; PAM sequence: AGG
taggtaaattaaattttctc

SEQ ID NO: 110372 - DNA, 20 bp, Artificial Sequence
  Description of Artificial Sequence: Synthetic oligonucleotide
  Target: LAMA2; (-) strand; PAM type: NRG; PAM sequence: CAG
ttaggtaaattaaattttct

SEQ ID NO: 110373 - DNA, 20 bp, Artificial Sequence
  Description of Artificial Sequence: Synthetic oligonucleotide
  Target: LAMA2; (-) strand; PAM type: NRG; PAM sequence: AGG
caaatgaagcaaattttttt

SEQ ID NO: 110374 - DNA, 20 bp, Artificial Sequence
  Description of Artificial Sequence: Synthetic oligonucleotide
  Target: LAMA2; (-) strand; PAM type: NRG; PAM sequence: TAG
gcaaatgaagcaaatttttt

SEQ ID NO: 110375 - DNA, 20 bp, Artificial Sequence
  Description of Artificial Sequence: Synthetic oligonucleotide
  Target: LAMA2; (-) strand; PAM type: NRG; PAM sequence: AAG
tcattcaggtgtagcaaatg

SEQ ID NO: 110376 - DNA, 20 bp, Artificial Sequence
  Description of Artificial Sequence: Synthetic oligonucleotide
  Target: LAMA2; (-) strand; PAM type: NRG; PAM sequence: TAG
aactttgtctcattcaggtg

SEQ ID NO: 110377 - DNA, 20 bp, Artificial Sequence
  Description of Artificial Sequence: Synthetic oligonucleotide
  Target: LAMA2; (-) strand; PAM type: NRG; PAM sequence: AGG
ggctgaactttgtctcattc

SEQ ID NO: 110378 - DNA, 20 bp, Artificial Sequence
  Description of Artificial Sequence: Synthetic oligonucleotide
  Target: LAMA2; (-) strand; PAM type: NRG; PAM sequence: CAG
aggctgaactttgtctcatt

SEQ ID NO: 110379 - DNA, 20 bp, Artificial Sequence
  Description of Artificial Sequence: Synthetic oligonucleotide
  Target: LAMA2; (-) strand; PAM type: NRG; PAM sequence: AGG
gacacatttacaaagggaaa

SEQ ID NO: 110380 - DNA, 20 bp, Artificial Sequence
  Description of Artificial Sequence: Synthetic oligonucleotide
  Target: LAMA2; (-) strand; PAM type: NRG; PAM sequence: AAG
ggacacatttacaaagggaa

SEQ ID NO: 110381 - DNA, 20 bp, Artificial Sequence
  Description of Artificial Sequence: Synthetic oligonucleotide
  Target: LAMA2; (-) strand; PAM type: NRG; PAM sequence: GGG
acctcggacacatttacaaa

SEQ ID NO: 110382 - DNA, 20 bp, Artificial Sequence
  Description of Artificial Sequence: Synthetic oligonucleotide
  Target: LAMA2; (-) strand; PAM type: NRG; PAM sequence: AGG
gacctcggacacatttacaa

SEQ ID NO: 110383 - DNA, 20 bp, Artificial Sequence
  Description of Artificial Sequence: Synthetic oligonucleotide
  Target: LAMA2; (-) strand; PAM type: NRG; PAM sequence: AAG
tgacctcggacacatttaca

SEQ ID NO: 110384 - DNA, 20 bp, Artificial Sequence
  Description of Artificial Sequence: Synthetic oligonucleotide
  Target: LAMA2; (-) strand; PAM type: NRG; PAM sequence: CGG
aggctgtggctggctgacct

SEQ ID NO: 110385 - DNA, 20 bp, Artificial Sequence
  Description of Artificial Sequence: Synthetic oligonucleotide
  Target: LAMA2; (-) strand; PAM type: NRG; PAM sequence: TGG
tgacaaagcgaggctgtggc

SEQ ID NO: 110386 - DNA, 20 bp, Artificial Sequence
  Description of Artificial Sequence: Synthetic oligonucleotide
  Target: LAMA2; (-) strand; PAM type: NRG; PAM sequence: TGG
tgcttgacaaagcgaggctg

SEQ ID NO: 110387 - DNA, 20 bp, Artificial Sequence
  Description of Artificial Sequence: Synthetic oligonucleotide
  Target: LAMA2; (-) strand; PAM type: NRG; PAM sequence: AGG
aatccatgcttgacaaagcg

SEQ ID NO: 110388 - DNA, 20 bp, Artificial Sequence
  Description of Artificial Sequence: Synthetic oligonucleotide
  Target: LAMA2; (-) strand; PAM type: NRG; PAM sequence: GAG
taatccatgcttgacaaagc

SEQ ID NO: 110389 - DNA, 20 bp, Artificial Sequence
  Description of Artificial Sequence: Synthetic oligonucleotide
  Target: LAMA2; (-) strand; PAM type: NRG; PAM sequence: AAG
ggcttaatccatgcttgaca

SEQ ID NO: 110390 - DNA, 20 bp, Artificial Sequence
  Description of Artificial Sequence: Synthetic oligonucleotide
  Target: LAMA2; (-) strand; PAM type: NRG; PAM sequence: TGG
aacaaagggtgtggagttag

SEQ ID NO: 110391 - DNA, 20 bp, Artificial Sequence
  Description of Artificial Sequence: Synthetic oligonucleotide
  Target: LAMA2; (-) strand; PAM type: NRG; PAM sequence: TAG
caaaacaaagggtgtggagt

SEQ ID NO: 110392 - DNA, 20 bp, Artificial Sequence
  Description of Artificial Sequence: Synthetic oligonucleotide
  Target: LAMA2; (-) strand; PAM type: NRG; PAM sequence: GAG
aaaacaaaacaaagggtgtg

SEQ ID NO: 110393 - DNA, 20 bp, Artificial Sequence
  Description of Artificial Sequence: Synthetic oligonucleotide
  Target: LAMA2; (-) strand; PAM type: NRG; PAM sequence: TGG
gaaaaacaaaacaaagggtg

SEQ ID NO: 110394 - DNA, 20 bp, Artificial Sequence
  Description of Artificial Sequence: Synthetic oligonucleotide
  Target: LAMA2; (-) strand; PAM type: NRG; PAM sequence: GGG
ggtatgaaaaacaaaacaaa

SEQ ID NO: 110395 - DNA, 20 bp, Artificial Sequence
  Description of Artificial Sequence: Synthetic oligonucleotide
  Target: LAMA2; (-) strand; PAM type: NRG; PAM sequence: AGG
gggtatgaaaaacaaaacaa

SEQ ID NO: 110396 - DNA, 20 bp, Artificial Sequence
  Description of Artificial Sequence: Synthetic oligonucleotide
  Target: LAMA2; (-) strand; PAM type: NRG; PAM sequence: AAG
agggtatgaaaaacaaaaca

SEQ ID NO: 110397 - DNA, 20 bp, Artificial Sequence
  Description of Artificial Sequence: Synthetic oligonucleotide
  Target: LAMA2; (-) strand; PAM type: NRG; PAM sequence: GGG
ctgtatctgtcagcagatga

SEQ ID NO: 110398 - DNA, 20 bp, Artificial Sequence
  Description of Artificial Sequence: Synthetic oligonucleotide
  Target: LAMA2; (-) strand; PAM type: NRG; PAM sequence: AGG
gctgtatctgtcagcagatg

SEQ ID NO: 110399 - DNA, 20 bp, Artificial Sequence
  Description of Artificial Sequence: Synthetic oligonucleotide
  Target: LAMA2; (-) strand; PAM type: NRG; PAM sequence: GAG
agctgtatctgtcagcagat

SEQ ID NO: 110400 - DNA, 20 bp, Artificial Sequence
  Description of Artificial Sequence: Synthetic oligonucleotide
  Target: LAMA2; (-) strand; PAM type: NRG; PAM sequence: CAG
ttagcagctgtatctgtcag

SEQ ID NO: 110401 - DNA, 20 bp, Artificial Sequence
  Description of Artificial Sequence: Synthetic oligonucleotide
  Target: LAMA2; (-) strand; PAM type: NRG; PAM sequence: CAG
agtttagcagctgtatctgt

SEQ ID NO: 110402 - DNA, 20 bp, Artificial Sequence
  Description of Artificial Sequence: Synthetic oligonucleotide
  Target: LAMA2; (-) strand; PAM type: NRG; PAM sequence: CAG
cttaacagcttgcagtttag

SEQ ID NO: 110403 - DNA, 20 bp, Artificial Sequence
  Description of Artificial Sequence: Synthetic oligonucleotide
  Target: LAMA2; (-) strand; PAM type: NRG; PAM sequence: TAG
gtccttaacagcttgcagtt

SEQ ID NO: 110404 - DNA, 20 bp, Artificial Sequence
  Description of Artificial Sequence: Synthetic oligonucleotide
  Target: LAMA2; (-) strand; PAM type: NRG; PAM sequence: CAG
gctttgtccttaacagcttg

SEQ ID NO: 110405 - DNA, 20 bp, Artificial Sequence
  Description of Artificial Sequence: Synthetic oligonucleotide
  Target: LAMA2; (-) strand; PAM type: NRG; PAM sequence: CAG
ttgtctggctttgtccttaa

SEQ ID NO: 110406 - DNA, 20 bp, Artificial Sequence
  Description of Artificial Sequence: Synthetic oligonucleotide
  Target: LAMA2; (-) strand; PAM type: NRG; PAM sequence: TGG
agctgtgtcgttggcttgtc

SEQ ID NO: 110407 - DNA, 20 bp, Artificial Sequence
  Description of Artificial Sequence: Synthetic oligonucleotide
  Target: LAMA2; (-) strand; PAM type: NRG; PAM sequence: TGG
tacatctttagctgtgtcgt

SEQ ID NO: 110408 - DNA, 20 bp, Artificial Sequence
  Description of Artificial Sequence: Synthetic oligonucleotide
  Target: LAMA2; (-) strand; PAM type: NRG; PAM sequence: TAG
aatctgtgccagtacatctt

SEQ ID NO: 110409 - DNA, 20 bp, Artificial Sequence
  Description of Artificial Sequence: Synthetic oligonucleotide
  Target: LAMA2; (-) strand; PAM type: NRG; PAM sequence: CAG
tggagctctgtaatctgtgc

SEQ ID NO: 110410 - DNA, 20 bp, Artificial Sequence
  Description of Artificial Sequence: Synthetic oligonucleotide
  Target: LAMA2; (-) strand; PAM type: NRG; PAM sequence: GAG
aggccatcgaggttctggtg

SEQ ID NO: 110411 - DNA, 20 bp, Artificial Sequence
  Description of Artificial Sequence: Synthetic oligonucleotide
  Target: LAMA2; (-) strand; PAM type: NRG; PAM sequence: TGG
tcaggccatcgaggttctgg

SEQ ID NO: 110412 - DNA, 20 bp, Artificial Sequence
  Description of Artificial Sequence: Synthetic oligonucleotide
  Target: LAMA2; (-) strand; PAM type: NRG; PAM sequence: TGG
tcttcaggccatcgaggttc

SEQ ID NO: 110413 - DNA, 20 bp, Artificial Sequence
  Description of Artificial Sequence: Synthetic oligonucleotide
  Target: LAMA2; (-) strand; PAM type: NRG; PAM sequence: AGG
aattcttcttcaggccatcg

SEQ ID NO: 110414 - DNA, 20 bp, Artificial Sequence
  Description of Artificial Sequence: Synthetic oligonucleotide
  Target: LAMA2; (-) strand; PAM type: NRG; PAM sequence: GAG
taattcttcttcaggccatc

SEQ ID NO: 110415 - DNA, 20 bp, Artificial Sequence
  Description of Artificial Sequence: Synthetic oligonucleotide
  Target: LAMA2; (-) strand; PAM type: NRG; PAM sequence: AGG
gtttattgtaattcttcttc

SEQ ID NO: 110416 - DNA, 20 bp, Artificial Sequence
  Description of Artificial Sequence: Synthetic oligonucleotide
  Target: LAMA2; (-) strand; PAM type: NRG; PAM sequence: CAG
agtttattgtaattcttctt

SEQ ID NO: 110417 - DNA, 20 bp, Artificial Sequence
  Description of Artificial Sequence: Synthetic oligonucleotide
  Target: LAMA2; (-) strand; PAM type: NRG; PAM sequence: TAG
gttttggcgacgctgtctgc

SEQ ID NO: 110418 - DNA, 20 bp, Artificial Sequence
  Description of Artificial Sequence: Synthetic oligonucleotide
  Target: LAMA2; (-) strand; PAM type: NRG; PAM sequence: TGG
tttaaccacagcattcgttt

SEQ ID NO: 110419 - DNA, 20 bp, Artificial Sequence
  Description of Artificial Sequence: Synthetic oligonucleotide
  Target: LAMA2; (-) strand; PAM type: NRG; PAM sequence: CAG
cttggaaggatctttaacca

SEQ ID NO: 110420 - DNA, 20 bp, Artificial Sequence
  Description of Artificial Sequence: Synthetic oligonucleotide
  Target: LAMA2; (-) strand; PAM type: NRG; PAM sequence: AGG
gagatcttactgttcttgga

SEQ ID NO: 110421 - DNA, 20 bp, Artificial Sequence
  Description of Artificial Sequence: Synthetic oligonucleotide
  Target: LAMA2; (-) strand; PAM type: NRG; PAM sequence: AAG
ggagatcttactgttcttgg

SEQ ID NO: 110422 - DNA, 20 bp, Artificial Sequence
  Description of Artificial Sequence: Synthetic oligonucleotide
  Target: LAMA2; (-) strand; PAM type: NRG; PAM sequence: TGG
aaaggagatcttactgttct

SEQ ID NO: 110423 - DNA, 20 bp, Artificial Sequence
  Description of Artificial Sequence: Synthetic oligonucleotide
  Target: LAMA2; (-) strand; PAM type: NRG; PAM sequence: GAG
acatcatcacaatgaaaaag

SEQ ID NO: 110424 - DNA, 20 bp, Artificial Sequence
  Description of Artificial Sequence: Synthetic oligonucleotide
  Target: LAMA2; (-) strand; PAM type: NRG; PAM sequence: AGG
tgacatcatcacaatgaaaa

SEQ ID NO: 110425 - DNA, 20 bp, Artificial Sequence
  Description of Artificial Sequence: Synthetic oligonucleotide
  Target: LAMA2; (-) strand; PAM type: NRG; PAM sequence: AAG
atgacatcatcacaatgaaa

SEQ ID NO: 110426 - DNA, 20 bp, Artificial Sequence
  Description of Artificial Sequence: Synthetic oligonucleotide
  Target: LAMA2; (-) strand; PAM type: NRG; PAM sequence: AGG
tgggatacttttacagtgag

SEQ ID NO: 110427 - DNA, 20 bp, Artificial Sequence
  Description of Artificial Sequence: Synthetic oligonucleotide
  Target: LAMA2; (-) strand; PAM type: NRG; PAM sequence: GAG
ctgggatacttttacagtga

SEQ ID NO: 110428 - DNA, 20 bp, Artificial Sequence
  Description of Artificial Sequence: Synthetic oligonucleotide
  Target: LAMA2; (-) strand; PAM type: NRG; PAM sequence: GAG
gtctgggatacttttacagt

SEQ ID NO: 110429 - DNA, 20 bp, Artificial Sequence
  Description of Artificial Sequence: Synthetic oligonucleotide
  Target: LAMA2; (-) strand; PAM type: NRG; PAM sequence: CAG
acaggtctgggatactttta

SEQ ID NO: 110430 - DNA, 20 bp, Artificial Sequence
  Description of Artificial Sequence: Synthetic oligonucleotide
  Target: LAMA2; (-) strand; PAM type: NRG; PAM sequence: GGG
actcgagcatttacaggtct

SEQ ID NO: 110431 - DNA, 20 bp, Artificial Sequence
  Description of Artificial Sequence: Synthetic oligonucleotide
  Target: LAMA2; (-) strand; PAM type: NRG; PAM sequence: TGG
aactcgagcatttacaggtc

SEQ ID NO: 110432 - DNA, 20 bp, Artificial Sequence
  Description of Artificial Sequence: Synthetic oligonucleotide
  Target: LAMA2; (-) strand; PAM type: NRG; PAM sequence: AGG
tttccaactcgagcatttac

SEQ ID NO: 110433 - DNA, 20 bp, Artificial Sequence
  Description of Artificial Sequence: Synthetic oligonucleotide
  Target: LAMA2; (-) strand; PAM type: NRG; PAM sequence: CAG
ctttccaactcgagcattta

SEQ ID NO: 110434 - DNA, 20 bp, Artificial Sequence
  Description of Artificial Sequence: Synthetic oligonucleotide
  Target: LAMA2; (-) strand; PAM type: NRG; PAM sequence: GAG
catgagggtctttccaactc

SEQ ID NO: 110435 - DNA, 20 bp, Artificial Sequence
  Description of Artificial Sequence: Synthetic oligonucleotide
  Target: LAMA2; (-) strand; PAM type: NRG; PAM sequence: GGG
ggcagactacaccaccatga

SEQ ID NO: 110436 - DNA, 20 bp, Artificial Sequence
  Description of Artificial Sequence: Synthetic oligonucleotide
  Target: LAMA2; (-) strand; PAM type: NRG; PAM sequence: AGG
aggcagactacaccaccatg

SEQ ID NO: 110437 - DNA, 20 bp, Artificial Sequence
  Description of Artificial Sequence: Synthetic oligonucleotide
  Target: LAMA2; (-) strand; PAM type: NRG; PAM sequence: GAG
aaggcagactacaccaccat

SEQ ID NO: 110438 - DNA, 20 bp, Artificial Sequence
  Description of Artificial Sequence: Synthetic oligonucleotide
  Target: LAMA2; (-) strand; PAM type: NRG; PAM sequence: CAG
aatctatgaaagaaggaagg

SEQ ID NO: 110439 - DNA, 20 bp, Artificial Sequence
  Description of Artificial Sequence: Synthetic oligonucleotide
  Target: LAMA2; (-) strand; PAM type: NRG; PAM sequence: AGG
gccaatctatgaaagaagga

SEQ ID NO: 110440 - DNA, 20 bp, Artificial Sequence
  Description of Artificial Sequence: Synthetic oligonucleotide
  Target: LAMA2; (-) strand; PAM type: NRG; PAM sequence: AAG
ggccaatctatgaaagaagg

SEQ ID NO: 110441 - DNA, 20 bp, Artificial Sequence
  Description of Artificial Sequence: Synthetic oligonucleotide
  Target: LAMA2; (-) strand; PAM type: NRG; PAM sequence: AGG
tgaggccaatctatgaaaga

SEQ ID NO: 110442 - DNA, 20 bp, Artificial Sequence
  Description of Artificial Sequence: Synthetic oligonucleotide
  Target: LAMA2; (-) strand; PAM type: NRG; PAM sequence: AAG
ctgaggccaatctatgaaag

SEQ ID NO: 110443 - DNA, 20 bp, Artificial Sequence
  Description of Artificial Sequence: Synthetic oligonucleotide
  Target: LAMA2; (-) strand; PAM type: NRG; PAM sequence: AAG
tttctgaggccaatctatga

SEQ ID NO: 110444 - DNA, 20 bp, Artificial Sequence
  Description of Artificial Sequence: Synthetic oligonucleotide
  Target: LAMA2; (-) strand; PAM type: NRG; PAM sequence: AGG
tgcatgacactcaatttctg

SEQ ID NO: 110445 - DNA, 20 bp, Artificial Sequence
  Description of Artificial Sequence: Synthetic oligonucleotide
  Target: LAMA2; (-) strand; PAM type: NRG; PAM sequence: GAG
ctgcatgacactcaatttct

SEQ ID NO: 110446 - DNA, 20 bp, Artificial Sequence
  Description of Artificial Sequence: Synthetic oligonucleotide
  Target: LAMA2; (-) strand; PAM type: NRG; PAM sequence: TGG
gaagacttggattccagctt

SEQ ID NO: 110447 - DNA, 20 bp, Artificial Sequence
  Description of Artificial Sequence: Synthetic oligonucleotide
  Target: LAMA2; (-) strand; PAM type: NRG; PAM sequence: CAG
gagctagaagacttggattc

SEQ ID NO: 110448 - DNA, 20 bp, Artificial Sequence
  Description of Artificial Sequence: Synthetic oligonucleotide
  Target: LAMA2; (-) strand; PAM type: NRG; PAM sequence: TGG
cggggcagagctagaagact

SEQ ID NO: 110449 - DNA, 20 bp, Artificial Sequence
  Description of Artificial Sequence: Synthetic oligonucleotide
  Target: LAMA2; (-) strand; PAM type: NRG; PAM sequence: AAG
aagcaccggggcagagctag

SEQ ID NO: 110450 - DNA, 20 bp, Artificial Sequence
  Description of Artificial Sequence: Synthetic oligonucleotide
  Target: LAMA2; (-) strand; PAM type: NRG; PAM sequence: TAG
aaaaagcaccggggcagagc

SEQ ID NO: 110451 - DNA, 20 bp, Artificial Sequence
  Description of Artificial Sequence: Synthetic oligonucleotide
  Target: LAMA2; (-) strand; PAM type: NRG; PAM sequence: GAG
aggaaaaaagcaccggggca

SEQ ID NO: 110452 - DNA, 20 bp, Artificial Sequence
  Description of Artificial Sequence: Synthetic oligonucleotide
  Target: LAMA2; (-) strand; PAM type: NRG; PAM sequence: CAG
agaggaaaaaagcaccgggg

SEQ ID NO: 110453 - DNA, 20 bp, Artificial Sequence
  Description of Artificial Sequence: Synthetic oligonucleotide
  Target: LAMA2; (-) strand; PAM type: NRG; PAM sequence: GGG
ttcagaggaaaaaagcaccg

SEQ ID NO: 110454 - DNA, 20 bp, Artificial Sequence
  Description of Artificial Sequence: Synthetic oligonucleotide
  Target: LAMA2; (-) strand; PAM type: NRG; PAM sequence: GGG
tttcagaggaaaaaagcacc

SEQ ID NO: 110455 - DNA, 20 bp, Artificial Sequence
  Description of Artificial Sequence: Synthetic oligonucleotide
  Target: LAMA2; (-) strand; PAM type: NRG; PAM sequence: CGG
atttcagaggaaaaaagcac

SEQ ID NO: 110456 - DNA, 20 bp, Artificial Sequence
  Description of Artificial Sequence: Synthetic oligonucleotide
  Target: LAMA2; (-) strand; PAM type: NRG; PAM sequence: AAG
ggaaaaatttcagaggaaaa

SEQ ID NO: 110457 - DNA, 20 bp, Artificial Sequence
  Description of Artificial Sequence: Synthetic oligonucleotide
  Target: LAMA2; (-) strand; PAM type: NRG; PAM sequence: AGG
ctcaactggaaaaatttcag

SEQ ID NO: 110458 - DNA, 20 bp, Artificial Sequence
  Description of Artificial Sequence: Synthetic oligonucleotide
  Target: LAMA2; (-) strand; PAM type: NRG; PAM sequence: GAG
tctcaactggaaaaatttca

SEQ ID NO: 110459 - DNA, 20 bp, Artificial Sequence
  Description of Artificial Sequence: Synthetic oligonucleotide
  Target: LAMA2; (-) strand; PAM type: NRG; PAM sequence: CAG
cttctcaactggaaaaattt

SEQ ID NO: 110460 - DNA, 20 bp, Artificial Sequence
  Description of Artificial Sequence: Synthetic oligonucleotide
  Target: LAMA2; (-) strand; PAM type: NRG; PAM sequence: TGG
attcctaatctcttctcaac

SEQ ID NO: 110461 - DNA, 20 bp, Artificial Sequence
  Description of Artificial Sequence: Synthetic oligonucleotide
  Target: LAMA2; (-) strand; PAM type: NRG; PAM sequence: GAG
ctgaatgttaggcacacctt

SEQ ID NO: 110462 - DNA, 20 bp, Artificial Sequence
  Description of Artificial Sequence: Synthetic oligonucleotide
  Target: LAMA2; (-) strand; PAM type: NRG; PAM sequence: AGG
gcatctctctgctgaatgtt

SEQ ID NO: 110463 - DNA, 20 bp, Artificial Sequence
  Description of Artificial Sequence: Synthetic oligonucleotide
  Target: LAMA2; (-) strand; PAM type: NRG; PAM sequence: TAG
tgcatctctctgctgaatgt

SEQ ID NO: 110464 - DNA, 20 bp, Artificial Sequence
  Description of Artificial Sequence: Synthetic oligonucleotide
  Target: LAMA2; (-) strand; PAM type: NRG; PAM sequence: AAG
aattacacacacggattaaa

SEQ ID NO: 110465 - DNA, 20 bp, Artificial Sequence
  Description of Artificial Sequence: Synthetic oligonucleotide
  Target: LAMA2; (-) strand; PAM type: NRG; PAM sequence: CGG
tgtgtttttaattacacaca

SEQ ID NO: 110466 - DNA, 20 bp, Artificial Sequence
  Description of Artificial Sequence: Synthetic oligonucleotide
  Target: LAMA2; (-) strand; PAM type: NRG; PAM sequence: AAG
ttctgaggatataattaccc

SEQ ID NO: 110467 - DNA, 20 bp, Artificial Sequence
  Description of Artificial Sequence: Synthetic oligonucleotide
  Target: LAMA2; (-) strand; PAM type: NRG; PAM sequence: AGG
atgacacttcgccagttctg

SEQ ID NO: 110468 - DNA, 20 bp, Artificial Sequence
  Description of Artificial Sequence: Synthetic oligonucleotide
  Target: LAMA2; (-) strand; PAM type: NRG; PAM sequence: GAG
catgacacttcgccagttct

SEQ ID NO: 110469 - DNA, 20 bp, Artificial Sequence
  Description of Artificial Sequence: Synthetic oligonucleotide
  Target: LAMA2; (-) strand; PAM type: NRG; PAM sequence: CAG
tatgttccatgacacttcgc

SEQ ID NO: 110470 - DNA, 20 bp, Artificial Sequence
  Description of Artificial Sequence: Synthetic oligonucleotide
  Target: LAMA2; (-) strand; PAM type: NRG; PAM sequence: AAG
ttttcatatcctgttctaac

SEQ ID NO: 110471 - DNA, 20 bp, Artificial Sequence
  Description of Artificial Sequence: Synthetic oligonucleotide
  Target: LAMA2; (-) strand; PAM type: NRG; PAM sequence: AAG
ttcaaattttaatgcatttc

SEQ ID NO: 110472 - DNA, 20 bp, Artificial Sequence
  Description of Artificial Sequence: Synthetic oligonucleotide
  Target: LAMA2; (-) strand; PAM type: NRG; PAM sequence: AAG
aatctaaataataaaatatc

SEQ ID NO: 110473 - DNA, 20 bp, Artificial Sequence
  Description of Artificial Sequence: Synthetic oligonucleotide
  Target: LAMA2; (-) strand; PAM type: NRG; PAM sequence: TGG
tcccagaaatgtgatgtaac

SEQ ID NO: 110474 - DNA, 20 bp, Artificial Sequence
  Description of Artificial Sequence: Synthetic oligonucleotide
  Target: LAMA2; (-) strand; PAM type: NRG; PAM sequence: CAG
aatgctttatttttatttcc

SEQ ID NO: 110475 - DNA, 20 bp, Artificial Sequence
  Description of Artificial Sequence: Synthetic oligonucleotide
  Target: LAMA2; (-) strand; PAM type: NRG; PAM sequence: TAG
tgtgaatagtctttagaaac

SEQ ID NO: 110476 - DNA, 20 bp, Artificial Sequence
  Description of Artificial Sequence: Synthetic oligonucleotide
  Target: LAMA2; (-) strand; PAM type: NRG; PAM sequence: TAG
taagagatgtgaatagtctt

SEQ ID NO: 110477 - DNA, 20 bp, Artificial Sequence
  Description of Artificial Sequence: Synthetic oligonucleotide
  Target: LAMA2; (-) strand; PAM type: NRG; PAM sequence: TAG
taatatataagagatgtgaa

SEQ ID NO: 110478 - DNA, 20 bp, Artificial Sequence
  Description of Artificial Sequence: Synthetic oligonucleotide
  Target: LAMA2; (-) strand; PAM type: NRG; PAM sequence: GAG
taattttatataatatataa

SEQ ID NO: 110479 - DNA, 20 bp, Artificial Sequence
  Description of Artificial Sequence: Synthetic oligonucleotide
  Target: LAMA2; (-) strand; PAM type: NRG; PAM sequence: AAG
tataattttatataatatat

SEQ ID NO: 110480 - DNA, 20 bp, Artificial Sequence
  Description of Artificial Sequence: Synthetic oligonucleotide
  Target: LAMA2; (-) strand; PAM type: NRG; PAM sequence: AAG
ggttttctcagtaaatcctt

SEQ ID NO: 110481 - DNA, 20 bp, Artificial Sequence
  Description of Artificial Sequence: Synthetic oligonucleotide
  Target: LAMA2; (-) strand; PAM type: NRG; PAM sequence: CAG
tattttctctcaggttttct

SEQ ID NO: 110482 - DNA, 20 bp, Artificial Sequence
  Description of Artificial Sequence: Synthetic oligonucleotide
  Target: LAMA2; (-) strand; PAM type: NRG; PAM sequence: AGG
aagttatgatattttctctc

SEQ ID NO: 110483 - DNA, 20 bp, Artificial Sequence
  Description of Artificial Sequence: Synthetic oligonucleotide
  Target: LAMA2; (-) strand; PAM type: NRG; PAM sequence: CAG
taagttatgatattttctct

SEQ ID NO: 110484 - DNA, 20 bp, Artificial Sequence
  Description of Artificial Sequence: Synthetic oligonucleotide
  Target: LAMA2; (-) strand; PAM type: NRG; PAM sequence: AAG
ctatatttaactaataatat

SEQ ID NO: 110485 - DNA, 20 bp, Artificial Sequence
  Description of Artificial Sequence: Synthetic oligonucleotide
  Target: LAMA2; (-) strand; PAM type: NRG; PAM sequence: AGG
cttgtatcatttgacggaaa

SEQ ID NO: 110486 - DNA, 20 bp, Artificial Sequence
  Description of Artificial Sequence: Synthetic oligonucleotide
  Target: LAMA2; (-) strand; PAM type: NRG; PAM sequence: AAG
ccttgtatcatttgacggaa

SEQ ID NO: 110487 - DNA, 20 bp, Artificial Sequence
  Description of Artificial Sequence: Synthetic oligonucleotide
  Target: LAMA2; (-) strand; PAM type: NRG; PAM sequence: CGG
tatagccttgtatcatttga

SEQ ID NO: 110488 - DNA, 20 bp, Artificial Sequence
  Description of Artificial Sequence: Synthetic oligonucleotide
  Target: LAMA2; (-) strand; PAM type: NRG; PAM sequence: TAG
ccactgtacctggcccaata

SEQ ID NO: 110489 - DNA, 20 bp, Artificial Sequence
  Description of Artificial Sequence: Synthetic oligonucleotide
  Target: LAMA2; (-) strand; PAM type: NRG; PAM sequence: TGG
caggtgttaaccactgtacc

SEQ ID NO: 110490 - DNA, 20 bp, Artificial Sequence
  Description of Artificial Sequence: Synthetic oligonucleotide
  Target: LAMA2; (-) strand; PAM type: NRG; PAM sequence: AGG
tcccaaagtgcaaagattac

SEQ ID NO: 110491 - DNA, 20 bp, Artificial Sequence
  Description of Artificial Sequence: Synthetic oligonucleotide
  Target: LAMA2; (-) strand; PAM type: NRG; PAM sequence: CAG
ctcccaaagtgcaaagatta

SEQ ID NO: 110492 - DNA, 20 bp, Artificial Sequence
  Description of Artificial Sequence: Synthetic oligonucleotide
  Target: LAMA2; (-) strand; PAM type: NRG; PAM sequence: AAG
cctcaggctcccaaagtgca

SEQ ID NO: 110493 - DNA, 20 bp, Artificial Sequence
  Description of Artificial Sequence: Synthetic oligonucleotide
  Target: LAMA2; (-) strand; PAM type: NRG; PAM sequence: AAG
cctctcgcctcaggctccca

SEQ ID NO: 110494 - DNA, 20 bp, Artificial Sequence
  Description of Artificial Sequence: Synthetic oligonucleotide
  Target: LAMA2; (-) strand; PAM type: NRG; PAM sequence: AGG
tcaagtgatcctctcgcctc

SEQ ID NO: 110495 - DNA, 20 bp, Artificial Sequence
  Description of Artificial Sequence: Synthetic oligonucleotide
  Target: LAMA2; (-) strand; PAM type: NRG; PAM sequence: CAG
ctcaagtgatcctctcgcct

SEQ ID NO: 110496 - DNA, 20 bp, Artificial Sequence
  Description of Artificial Sequence: Synthetic oligonucleotide
  Target: LAMA2; (-) strand; PAM type: NRG; PAM sequence: AAG
ggtctcgaattcctaggctc

SEQ ID NO: 110497 - DNA, 20 bp, Artificial Sequence
  Description of Artificial Sequence: Synthetic oligonucleotide
  Target: LAMA2; (-) strand; PAM type: NRG; PAM sequence: AGG
caggctggtctcgaattcct

SEQ ID NO: 110498 - DNA, 20 bp, Artificial Sequence
  Description of Artificial Sequence: Synthetic oligonucleotide
  Target: LAMA2; (-) strand; PAM type: NRG; PAM sequence: TAG
ccaggctggtctcgaattcc

SEQ ID NO: 110499 - DNA, 20 bp, Artificial Sequence
  Description of Artificial Sequence: Synthetic oligonucleotide
  Target: LAMA2; (-) strand; PAM type: NRG; PAM sequence: TGG
tcttgctatggtgcccaggc

SEQ ID NO: 110500 - DNA, 20 bp, Artificial Sequence
  Description of Artificial Sequence: Synthetic oligonucleotide
  Target: LAMA2; (-) strand; PAM type: NRG; PAM sequence: AGG
ggggtcttgctatggtgccc

SEQ ID NO: 110501 - DNA, 20 bp, Artificial Sequence
  Description of Artificial Sequence: Synthetic oligonucleotide
  Target: LAMA2; (-) strand; PAM type: NRG; PAM sequence: CAG
tggggtcttgctatggtgcc

SEQ ID NO: 110502 - DNA, 20 bp, Artificial Sequence
  Description of Artificial Sequence: Synthetic oligonucleotide
  Target: LAMA2; (-) strand; PAM type: NRG; PAM sequence: TGG
gtaaagatggggtcttgcta

SEQ ID NO: 110503 - DNA, 20 bp, Artificial Sequence
  Description of Artificial Sequence: Synthetic oligonucleotide
  Target: LAMA2; (-) strand; PAM type: NRG; PAM sequence: GGG
ttaaattttttgtaaagatg

SEQ ID NO: 110504 - DNA, 20 bp, Artificial Sequence
  Description of Artificial Sequence: Synthetic oligonucleotide
  Target: LAMA2; (-) strand; PAM type: NRG; PAM sequence: GGG
tttaaattttttgtaaagat

SEQ ID NO: 110505 - DNA, 20 bp, Artificial Sequence
  Description of Artificial Sequence: Synthetic oligonucleotide
  Target: LAMA2; (-) strand; PAM type: NRG; PAM sequence: TGG
ttttaaattttttgtaaaga

SEQ ID NO: 110506 - DNA, 20 bp, Artificial Sequence
  Description of Artificial Sequence: Synthetic oligonucleotide
  Target: LAMA2; (-) strand; PAM type: NRG; PAM sequence: AAG
tattttttaaattttttgta

SEQ ID NO: 110507 - DNA, 20 bp, Artificial Sequence
  Description of Artificial Sequence: Synthetic oligonucleotide
  Target: LAMA2; (-) strand; PAM type: NRG; PAM sequence: TGG
tgcaatgtcactaccatgcc

SEQ ID NO: 110508 - DNA, 20 bp, Artificial Sequence
  Description of Artificial Sequence: Synthetic oligonucleotide
  Target: LAMA2; (-) strand; PAM type: NRG; PAM sequence: AGG
tcccaagtggctgggaacac

SEQ ID NO: 110509 - DNA, 20 bp, Artificial Sequence
  Description of Artificial Sequence: Synthetic oligonucleotide
  Target: LAMA2; (-) strand; PAM type: NRG; PAM sequence: CAG
ctcccaagtggctgggaaca

SEQ ID NO: 110510 - DNA, 20 bp, Artificial Sequence
  Description of Artificial Sequence: Synthetic oligonucleotide
  Target: LAMA2; (-) strand; PAM type: NRG; PAM sequence: GGG
cctcagactcccaagtggct

SEQ ID NO: 110511 - DNA, 20 bp, Artificial Sequence
  Description of Artificial Sequence: Synthetic oligonucleotide
  Target: LAMA2; (-) strand; PAM type: NRG; PAM sequence: TGG
gcctcagactcccaagtggc

SEQ ID NO: 110512 - DNA, 20 bp, Artificial Sequence
  Description of Artificial Sequence: Synthetic oligonucleotide
  Target: LAMA2; (-) strand; PAM type: NRG; PAM sequence: TGG
tccagcctcagactcccaag

SEQ ID NO: 110513 - DNA, 20 bp, Artificial Sequence
  Description of Artificial Sequence: Synthetic oligonucleotide
  Target: LAMA2; (-) strand; PAM type: NRG; PAM sequence: AAG
tcctccagcctcagactccc

SEQ ID NO: 110514 - DNA, 20 bp, Artificial Sequence
  Description of Artificial Sequence: Synthetic oligonucleotide
  Target: LAMA2; (-) strand; PAM type: NRG; PAM sequence: CAG
ttcaagggatcctccagcct

SEQ ID NO: 110515 - DNA, 20 bp, Artificial Sequence
  Description of Artificial Sequence: Synthetic oligonucleotide
  Target: LAMA2; (-) strand; PAM type: NRG; PAM sequence: CAG
tctgggttcaagggatcctc

SEQ ID NO: 110516 - DNA, 20 bp, Artificial Sequence
  Description of Artificial Sequence: Synthetic oligonucleotide
  Target: LAMA2; (-) strand; PAM type: NRG; PAM sequence: GGG
cctcacccttctgggttcaa

SEQ ID NO: 110517 - DNA, 20 bp, Artificial Sequence
  Description of Artificial Sequence: Synthetic oligonucleotide
  Target: LAMA2; (-) strand; PAM type: NRG; PAM sequence: AGG
gcctcacccttctgggttca

SEQ ID NO: 110518 - DNA, 20 bp, Artificial Sequence
  Description of Artificial Sequence: Synthetic oligonucleotide
  Target: LAMA2; (-) strand; PAM type: NRG; PAM sequence: AAG
agcctcacccttctgggttc

SEQ ID NO: 110519 - DNA, 20 bp, Artificial Sequence
  Description of Artificial Sequence: Synthetic oligonucleotide
  Target: LAMA2; (-) strand; PAM type: NRG; PAM sequence: GGG
cactgcagcctcacccttct

SEQ ID NO: 110520 - DNA, 20 bp, Artificial Sequence
  Description of Artificial Sequence: Synthetic oligonucleotide
  Target: LAMA2; (-) strand; PAM type: NRG; PAM sequence: TGG
tcactgcagcctcacccttc

SEQ ID NO: 110521 - DNA, 20 bp, Artificial Sequence
  Description of Artificial Sequence: Synthetic oligonucleotide
  Target: LAMA2; (-) strand; PAM type: NRG; PAM sequence: CAG
ggcgtgatcacagctcactg

SEQ ID NO: 110522 - DNA, 20 bp, Artificial Sequence
  Description of Artificial Sequence: Synthetic oligonucleotide
  Target: LAMA2; (-) strand; PAM type: NRG; PAM sequence: CAG
ggagtgcagtggcgtgatca

SEQ ID NO: 110523 - DNA, 20 bp, Artificial Sequence
  Description of Artificial Sequence: Synthetic oligonucleotide
  Target: LAMA2; (-) strand; PAM type: NRG; PAM sequence: TGG
ccacccaggctggagtgcag

SEQ ID NO: 110524 - DNA, 20 bp, Artificial Sequence
  Description of Artificial Sequence: Synthetic oligonucleotide
  Target: LAMA2; (-) strand; PAM type: NRG; PAM sequence: CAG
ctgccacccaggctggagtg

SEQ ID NO: 110525 - DNA, 20 bp, Artificial Sequence
  Description of Artificial Sequence: Synthetic oligonucleotide
  Target: LAMA2; (-) strand; PAM type: NRG; PAM sequence: GAG
tcaatctgccacccaggctg

SEQ ID NO: 110526 - DNA, 20 bp, Artificial Sequence
  Description of Artificial Sequence: Synthetic oligonucleotide
  Target: LAMA2; (-) strand; PAM type: NRG; PAM sequence: TGG
tctcaatctgccacccaggc

SEQ ID NO: 110527 - DNA, 20 bp, Artificial Sequence
  Description of Artificial Sequence: Synthetic oligonucleotide
  Target: LAMA2; (-) strand; PAM type: NRG; PAM sequence: AGG
agcatctcaatctgccaccc

SEQ ID NO: 110528 - DNA, 20 bp, Artificial Sequence
  Description of Artificial Sequence: Synthetic oligonucleotide
  Target: LAMA2; (-) strand; PAM type: NRG; PAM sequence: CAG
cagcatctcaatctgccacc

SEQ ID NO: 110529 - DNA, 20 bp, Artificial Sequence
  Description of Artificial Sequence: Synthetic oligonucleotide
  Target: LAMA2; (-) strand; PAM type: NRG; PAM sequence: CAG
ccccttttttttttttgaga

SEQ ID NO: 110530 - DNA, 20 bp, Artificial Sequence
  Description of Artificial Sequence: Synthetic oligonucleotide
  Target: LAMA2; (-) strand; PAM type: NRG; PAM sequence: GAG
taaccccctttttttttttt

SEQ ID NO: 110531 - DNA, 20 bp, Artificial Sequence
  Description of Artificial Sequence: Synthetic oligonucleotide
  Target: LAMA2; (-) strand; PAM type: NRG; PAM sequence: AAG
aaccatgtaacaaggatacc

SEQ ID NO: 110532 - DNA, 20 bp, Artificial Sequence
  Description of Artificial Sequence: Synthetic oligonucleotide
  Target: LAMA2; (-) strand; PAM type: NRG; PAM sequence: AGG
tttggtgaaaccatgtaaca

SEQ ID NO: 110533 - DNA, 20 bp, Artificial Sequence
  Description of Artificial Sequence: Synthetic oligonucleotide
  Target: LAMA2; (-) strand; PAM type: NRG; PAM sequence: AAG
ctttggtgaaaccatgtaac

SEQ ID NO: 110534 - DNA, 20 bp, Artificial Sequence
  Description of Artificial Sequence: Synthetic oligonucleotide
  Target: LAMA2; (-) strand; PAM type: NRG; PAM sequence: TGG
gattacccaagcatctcctt

SEQ ID NO: 110535 - DNA, 20 bp, Artificial Sequence
  Description of Artificial Sequence: Synthetic oligonucleotide
  Target: LAMA2; (-) strand; PAM type: NRG; PAM sequence: AAG
gtgaaaagcacagattaccc

SEQ ID NO: 110536 - DNA, 20 bp, Artificial Sequence
  Description of Artificial Sequence: Synthetic oligonucleotide
  Target: LAMA2; (-) strand; PAM type: NRG; PAM sequence: CAG
tctcttgaaagtgaaaagca

SEQ ID NO: 110537 - DNA, 20 bp, Artificial Sequence
  Description of Artificial Sequence: Synthetic oligonucleotide
  Target: LAMA2; (-) strand; PAM type: NRG; PAM sequence: AAG
gctagtctcttgaaagtgaa

SEQ ID NO: 110538 - DNA, 20 bp, Artificial Sequence
  Description of Artificial Sequence: Synthetic oligonucleotide
  Target: LAMA2; (-) strand; PAM type: NRG; PAM sequence: AAG
aaagagggctagtctcttga

SEQ ID NO: 110539 - DNA, 20 bp, Artificial Sequence
  Description of Artificial Sequence: Synthetic oligonucleotide
  Target: LAMA2; (-) strand; PAM type: NRG; PAM sequence: TAG
tgttggcatataaagagggc

SEQ ID NO: 110540 - DNA, 20 bp, Artificial Sequence
  Description of Artificial Sequence: Synthetic oligonucleotide
  Target: LAMA2; (-) strand; PAM type: NRG; PAM sequence: GGG
aaaatgttggcatataaaga

SEQ ID NO: 110541 - DNA, 20 bp, Artificial Sequence
  Description of Artificial Sequence: Synthetic oligonucleotide
  Target: LAMA2; (-) strand; PAM type: NRG; PAM sequence: AGG
aaaaatgttggcatataaag

SEQ ID NO: 110542 - DNA, 20 bp, Artificial Sequence
  Description of Artificial Sequence: Synthetic oligonucleotide
  Target: LAMA2; (-) strand; PAM type: NRG; PAM sequence: GAG
caaaaatgttggcatataaa

SEQ ID NO: 110543 - DNA, 20 bp, Artificial Sequence
  Description of Artificial Sequence: Synthetic oligonucleotide
  Target: LAMA2; (-) strand; PAM type: NRG; PAM sequence: AAG
cccaaaaatgttggcatata

SEQ ID NO: 110544 - DNA, 20 bp, Artificial Sequence
  Description of Artificial Sequence: Synthetic oligonucleotide
  Target: LAMA2; (-) strand; PAM type: NRG; PAM sequence: TGG
tgatacccccccaaaaatgt

SEQ ID NO: 110545 - DNA, 20 bp, Artificial Sequence
  Description of Artificial Sequence: Synthetic oligonucleotide
  Target: LAMA2; (-) strand; PAM type: NRG; PAM sequence: CAG
atggcatataataccaatta

SEQ ID NO: 110546 - DNA, 20 bp, Artificial Sequence
  Description of Artificial Sequence: Synthetic oligonucleotide
  Target: LAMA2; (-) strand; PAM type: NRG; PAM sequence: TGG
caaacagcatttgaatttta

SEQ ID NO: 110547 - DNA, 20 bp, Artificial Sequence
  Description of Artificial Sequence: Synthetic oligonucleotide
  Target: LAMA2; (-) strand; PAM type: NRG; PAM sequence: CAG
ggctccattccccactcaaa

SEQ ID NO: 110548 - DNA, 20 bp, Artificial Sequence
  Description of Artificial Sequence: Synthetic oligonucleotide
  Target: LAMA2; (-) strand; PAM type: NRG; PAM sequence: AGG
gaggctaggatgctgaaatc

SEQ ID NO: 110549 - DNA, 20 bp, Artificial Sequence
  Description of Artificial Sequence: Synthetic oligonucleotide
  Target: LAMA2; (-) strand; PAM type: NRG; PAM sequence: CAG
tgaggctaggatgctgaaat

SEQ ID NO: 110550 - DNA, 20 bp, Artificial Sequence
  Description of Artificial Sequence: Synthetic oligonucleotide
  Target: LAMA2; (-) strand; PAM type: NRG; PAM sequence: AGG
ataggatttgatttgaggct

SEQ ID NO: 110551 - DNA, 20 bp, Artificial Sequence
  Description of Artificial Sequence: Synthetic oligonucleotide
  Target: LAMA2; (-) strand; PAM type: NRG; PAM sequence: TAG
cataggatttgatttgaggc

SEQ ID NO: 110552 - DNA, 20 bp, Artificial Sequence
  Description of Artificial Sequence: Synthetic oligonucleotide
  Target: LAMA2; (-) strand; PAM type: NRG; PAM sequence: AGG
catccataggatttgatttg

SEQ ID NO: 110553 - DNA, 20 bp, Artificial Sequence
  Description of Artificial Sequence: Synthetic oligonucleotide
  Target: LAMA2; (-) strand; PAM type: NRG; PAM sequence: GAG
gcatccataggatttgattt

SEQ ID NO: 110554 - DNA, 20 bp, Artificial Sequence
  Description of Artificial Sequence: Synthetic oligonucleotide
  Target: LAMA2; (-) strand; PAM type: NRG; PAM sequence: AGG
tattatatcatagcatccat

SEQ ID NO: 110555 - DNA, 20 bp, Artificial Sequence
  Description of Artificial Sequence: Synthetic oligonucleotide
  Target: LAMA2; (-) strand; PAM type: NRG; PAM sequence: TAG
ctattatatcatagcatcca

SEQ ID NO: 110556 - DNA, 20 bp, Artificial Sequence
  Description of Artificial Sequence: Synthetic oligonucleotide
  Target: LAMA2; (-) strand; PAM type: NRG; PAM sequence: TAG
taataatgtctattatatca

SEQ ID NO: 110557 - DNA, 20 bp, Artificial Sequence
  Description of Artificial Sequence: Synthetic oligonucleotide
  Target: LAMA2; (-) strand; PAM type: NRG; PAM sequence: GAG
actcttccttgctcatgaag

SEQ ID NO: 110558 - DNA, 20 bp, Artificial Sequence
  Description of Artificial Sequence: Synthetic oligonucleotide
  Target: LAMA2; (-) strand; PAM type: NRG; PAM sequence: AGG
gtactcttccttgctcatga

SEQ ID NO: 110559 - DNA, 20 bp, Artificial Sequence
  Description of Artificial Sequence: Synthetic oligonucleotide
  Target: LAMA2; (-) strand; PAM type: NRG; PAM sequence: AAG
tgtactcttccttgctcatg

SEQ ID NO: 110560 - DNA, 20 bp, Artificial Sequence
  Description of Artificial Sequence: Synthetic oligonucleotide
  Target: LAMA2; (-) strand; PAM type: NRG; PAM sequence: AAG
cctttttcaccctggctctg

SEQ ID NO: 110561 - DNA, 20 bp, Artificial Sequence
  Description of Artificial Sequence: Synthetic oligonucleotide
  Target: LAMA2; (-) strand; PAM type: NRG; PAM sequence: TGG
ttatctcccctttttcaccc

SEQ ID NO: 110562 - DNA, 20 bp, Artificial Sequence
  Description of Artificial Sequence: Synthetic oligonucleotide
  Target: LAMA2; (-) strand; PAM type: NRG; PAM sequence: GGG
ctacaagagaagccatttct

SEQ ID NO: 110563 - DNA, 20 bp, Artificial Sequence
  Description of Artificial Sequence: Synthetic oligonucleotide
  Target: LAMA2; (-) strand; PAM type: NRG; PAM sequence: TGG
gctacaagagaagccatttc

SEQ ID NO: 110564 - DNA, 20 bp, Artificial Sequence
  Description of Artificial Sequence: Synthetic oligonucleotide
  Target: LAMA2; (-) strand; PAM type: NRG; PAM sequence: AAG
taaactttgagctacaagag

SEQ ID NO: 110565 - DNA, 20 bp, Artificial Sequence
  Description of Artificial Sequence: Synthetic oligonucleotide
  Target: LAMA2; (-) strand; PAM type: NRG; PAM sequence: GAG
atgtaaactttgagctacaa

SEQ ID NO: 110566 - DNA, 20 bp, Artificial Sequence
  Description of Artificial Sequence: Synthetic oligonucleotide
  Target: LAMA2; (-) strand; PAM type: NRG; PAM sequence: AAG
ttatgtaaactttgagctac

SEQ ID NO: 110567 - DNA, 20 bp, Artificial Sequence
  Description of Artificial Sequence: Synthetic oligonucleotide
  Target: LAMA2; (-) strand; PAM type: NRG; PAM sequence: GAG
gaagttattatgtaaacttt

SEQ ID NO: 110568 - DNA, 20 bp, Artificial Sequence
  Description of Artificial Sequence: Synthetic oligonucleotide
  Target: LAMA2; (-) strand; PAM type: NRG; PAM sequence: AAG
gatttggcataaatcataag

SEQ ID NO: 110569 - DNA, 20 bp, Artificial Sequence
  Description of Artificial Sequence: Synthetic oligonucleotide
  Target: LAMA2; (-) strand; PAM type: NRG; PAM sequence: AAG
tgtgatttggcataaatcat

SEQ ID NO: 110570 - DNA, 20 bp, Artificial Sequence
  Description of Artificial Sequence: Synthetic oligonucleotide
  Target: LAMA2; (-) strand; PAM type: NRG; PAM sequence: TGG
ttagtgggaatattgtgatt

SEQ ID NO: 110571 - DNA, 20 bp, Artificial Sequence
  Description of Artificial Sequence: Synthetic oligonucleotide
  Target: LAMA2; (-) strand; PAM type: NRG; PAM sequence: GGG
tgttttcattcatttttagt

SEQ ID NO: 110572 - DNA, 20 bp, Artificial Sequence
  Description of Artificial Sequence: Synthetic oligonucleotide
  Target: LAMA2; (-) strand; PAM type: NRG; PAM sequence: TGG
ttgttttcattcatttttag

SEQ ID NO: 110573 - DNA, 20 bp, Artificial Sequence
  Description of Artificial Sequence: Synthetic oligonucleotide
  Target: LAMA2; (-) strand; PAM type: NRG; PAM sequence: TAG
attttgttttcattcatttt

SEQ ID NO: 110574 - DNA, 20 bp, Artificial Sequence
  Description of Artificial Sequence: Synthetic oligonucleotide
  Target: LAMA2; (-) strand; PAM type: NRG; PAM sequence: TAG
tatgaagtaagcagcagaga

SEQ ID NO: 110575 - DNA, 20 bp, Artificial Sequence
  Description of Artificial Sequence: Synthetic oligonucleotide
  Target: LAMA2; (-) strand; PAM type: NRG; PAM sequence: GAG
aaattatgaagtaagcagca

SEQ ID NO: 110576 - DNA, 20 bp, Artificial Sequence
  Description of Artificial Sequence: Synthetic oligonucleotide
  Target: LAMA2; (-) strand; PAM type: NRG; PAM sequence: CAG
ttaaattatgaagtaagcag

SEQ ID NO: 110577 - DNA, 20 bp, Artificial Sequence
  Description of Artificial Sequence: Synthetic oligonucleotide
  Target: LAMA2; (-) strand; PAM type: NRG; PAM sequence: CAG
atcttaaattatgaagtaag

SEQ ID NO: 110578 - DNA, 20 bp, Artificial Sequence
  Description of Artificial Sequence: Synthetic oligonucleotide
  Target: LAMA2; (-) strand; PAM type: NRG; PAM sequence: AAG
tatatcttaaattatgaagt

SEQ ID NO: 110579 - DNA, 20 bp, Artificial Sequence
  Description of Artificial Sequence: Synthetic oligonucleotide
  Target: LAMA2; (-) strand; PAM type: NRG; PAM sequence: AAG
aaaatatatcttaaattatg

SEQ ID NO: 110580 - DNA, 20 bp, Artificial Sequence
  Description of Artificial Sequence: Synthetic oligonucleotide
  Target: LAMA2; (-) strand; PAM type: NRG; PAM sequence: AAG
tacgcctgaacttaaaataa

SEQ ID NO: 110581 - DNA, 20 bp, Artificial Sequence
  Description of Artificial Sequence: Synthetic oligonucleotide
  Target: LAMA2; (-) strand; PAM type: NRG; PAM sequence: AGG
aaaacaaacccccatgacac

SEQ ID NO: 110582 - DNA, 20 bp, Artificial Sequence
  Description of Artificial Sequence: Synthetic oligonucleotide
  Target: LAMA2; (-) strand; PAM type: NRG; PAM sequence: CAG
taaaacaaacccccatgaca

SEQ ID NO: 110583 - DNA, 20 bp, Artificial Sequence
  Description of Artificial Sequence: Synthetic oligonucleotide
  Target: LAMA2; (-) strand; PAM type: NRG; PAM sequence: AGG
aaaaataactaatgggtact

SEQ ID NO: 110584 - DNA, 20 bp, Artificial Sequence
  Description of Artificial Sequence: Synthetic oligonucleotide
  Target: LAMA2; (-) strand; PAM type: NRG; PAM sequence: TAG
gaaaaataactaatgggtac

SEQ ID NO: 110585 - DNA, 20 bp, Artificial Sequence
  Description of Artificial Sequence: Synthetic oligonucleotide
  Target: LAMA2; (-) strand; PAM type: NRG; PAM sequence: GGG
ggtcaggaaaaataactaat

SEQ ID NO: 110586 - DNA, 20 bp, Artificial Sequence
  Description of Artificial Sequence: Synthetic oligonucleotide
  Target: LAMA2; (-) strand; PAM type: NRG; PAM sequence: TGG
gggtcaggaaaaataactaa

SEQ ID NO: 110587 - DNA, 20 bp, Artificial Sequence
  Description of Artificial Sequence: Synthetic oligonucleotide
  Target: LAMA2; (-) strand; PAM type: NRG; PAM sequence: AGG
gcaggaggagggagagggtc

SEQ ID NO: 110588 - DNA, 20 bp, Artificial Sequence
  Description of Artificial Sequence: Synthetic oligonucleotide
  Target: LAMA2; (-) strand; PAM type: NRG; PAM sequence: CAG
agcaggaggagggagagggt

SEQ ID NO: 110589 - DNA, 20 bp, Artificial Sequence
  Description of Artificial Sequence: Synthetic oligonucleotide
  Target: LAMA2; (-) strand; PAM type: NRG; PAM sequence: GGG
ggagagcaggaggagggaga

SEQ ID NO: 110590 - DNA, 20 bp, Artificial Sequence
  Description of Artificial Sequence: Synthetic oligonucleotide
  Target: LAMA2; (-) strand; PAM type: NRG; PAM sequence: AGG
tggagagcaggaggagggag

SEQ ID NO: 110591 - DNA, 20 bp, Artificial Sequence
  Description of Artificial Sequence: Synthetic oligonucleotide
  Target: LAMA2; (-) strand; PAM type: NRG; PAM sequence: GAG
gtggagagcaggaggaggga

SEQ ID NO: 110592 - DNA, 20 bp, Artificial Sequence
  Description of Artificial Sequence: Synthetic oligonucleotide
  Target: LAMA2; (-) strand; PAM type: NRG; PAM sequence: GAG
gggtggagagcaggaggagg

SEQ ID NO: 110593 - DNA, 20 bp, Artificial Sequence
  Description of Artificial Sequence: Synthetic oligonucleotide
  Target: LAMA2; (-) strand; PAM type: NRG; PAM sequence: GGG
gagggtggagagcaggagga

SEQ ID NO: 110594 - DNA, 20 bp, Artificial Sequence
  Description of Artificial Sequence: Synthetic oligonucleotide
  Target: LAMA2; (-) strand; PAM type: NRG; PAM sequence: AGG
ggagggtggagagcaggagg

SEQ ID NO: 110595 - DNA, 20 bp, Artificial Sequence
  Description of Artificial Sequence: Synthetic oligonucleotide
  Target: LAMA2; (-) strand; PAM type: NRG; PAM sequence: GAG
tggagggtggagagcaggag

SEQ ID NO: 110596 - DNA, 20 bp, Artificial Sequence
  Description of Artificial Sequence: Synthetic oligonucleotide
  Target: LAMA2; (-) strand; PAM type: NRG; PAM sequence: AGG
tttggagggtggagagcagg

SEQ ID NO: 110597 - DNA, 20 bp, Artificial Sequence
  Description of Artificial Sequence: Synthetic oligonucleotide
  Target: LAMA2; (-) strand; PAM type: NRG; PAM sequence: GAG
ttttggagggtggagagcag

SEQ ID NO: 110598 - DNA, 20 bp, Artificial Sequence
  Description of Artificial Sequence: Synthetic oligonucleotide
  Target: LAMA2; (-) strand; PAM type: NRG; PAM sequence: AGG
tcttttggagggtggagagc

SEQ ID NO: 110599 - DNA, 20 bp, Artificial Sequence
  Description of Artificial Sequence: Synthetic oligonucleotide
  Target: LAMA2; (-) strand; PAM type: NRG; PAM sequence: CAG
ttcttttggagggtggagag

SEQ ID NO: 110600 - DNA, 20 bp, Artificial Sequence
  Description of Artificial Sequence: Synthetic oligonucleotide
  Target: LAMA2; (-) strand; PAM type: NRG; PAM sequence: GAG
gaattcttttggagggtgga

SEQ ID NO: 110601 - DNA, 20 bp, Artificial Sequence
  Description of Artificial Sequence: Synthetic oligonucleotide
  Target: LAMA2; (-) strand; PAM type: NRG; PAM sequence: GAG
tggaattcttttggagggtg

SEQ ID NO: 110602 - DNA, 20 bp, Artificial Sequence
  Description of Artificial Sequence: Synthetic oligonucleotide
  Target: LAMA2; (-) strand; PAM type: NRG; PAM sequence: TGG
aatggaattcttttggaggg

SEQ ID NO: 110603 - DNA, 20 bp, Artificial Sequence
  Description of Artificial Sequence: Synthetic oligonucleotide
  Target: LAMA2; (-) strand; PAM type: NRG; PAM sequence: GGG
tagaatggaattcttttgga

SEQ ID NO: 110604 - DNA, 20 bp, Artificial Sequence
  Description of Artificial Sequence: Synthetic oligonucleotide
  Target: LAMA2; (-) strand; PAM type: NRG; PAM sequence: AGG
atagaatggaattcttttgg

SEQ ID NO: 110605 - DNA, 20 bp, Artificial Sequence
  Description of Artificial Sequence: Synthetic oligonucleotide
  Target: LAMA2; (-) strand; PAM type: NRG; PAM sequence: GAG
aatagaatggaattcttttg

SEQ ID NO: 110606 - DNA, 20 bp, Artificial Sequence
  Description of Artificial Sequence: Synthetic oligonucleotide
  Target: LAMA2; (-) strand; PAM type: NRG; PAM sequence: TGG
aaaatagaatggaattcttt

SEQ ID NO: 110607 - DNA, 20 bp, Artificial Sequence
  Description of Artificial Sequence: Synthetic oligonucleotide
  Target: LAMA2; (-) strand; PAM type: NRG; PAM sequence: TGG
agaatcaatctaaaatagaa

SEQ ID NO: 110608 - DNA, 20 bp, Artificial Sequence
  Description of Artificial Sequence: Synthetic oligonucleotide
  Target: LAMA2; (-) strand; PAM type: NRG; PAM sequence: TAG
agttgagaatcaatctaaaa

SEQ ID NO: 110609 - DNA, 20 bp, Artificial Sequence
  Description of Artificial Sequence: Synthetic oligonucleotide
  Target: LAMA2; (-) strand; PAM type: NRG; PAM sequence: GAG
acaaaaggccactaccagtt

SEQ ID NO: 110610 - DNA, 20 bp, Artificial Sequence
  Description of Artificial Sequence: Synthetic oligonucleotide
  Target: LAMA2; (-) strand; PAM type: NRG; PAM sequence: CAG
atatgacaaaaggccactac

SEQ ID NO: 110611 - DNA, 20 bp, Artificial Sequence
  Description of Artificial Sequence: Synthetic oligonucleotide
  Target: LAMA2; (-) strand; PAM type: NRG; PAM sequence: AGG
taaaacagagatatgacaaa

SEQ ID NO: 110612 - DNA, 20 bp, Artificial Sequence
  Description of Artificial Sequence: Synthetic oligonucleotide
  Target: LAMA2; (-) strand; PAM type: NRG; PAM sequence: AAG
ttaaaacagagatatgacaa

SEQ ID NO: 110613 - DNA, 20 bp, Artificial Sequence
  Description of Artificial Sequence: Synthetic oligonucleotide
  Target: LAMA2; (-) strand; PAM type: NRG; PAM sequence: GAG
tagaggataggattaaaaca

SEQ ID NO: 110614 - DNA, 20 bp, Artificial Sequence
  Description of Artificial Sequence: Synthetic oligonucleotide
  Target: LAMA2; (-) strand; PAM type: NRG; PAM sequence: CAG
aatagaggataggattaaaa

SEQ ID NO: 110615 - DNA, 20 bp, Artificial Sequence
  Description of Artificial Sequence: Synthetic oligonucleotide
  Target: LAMA2; (-) strand; PAM type: NRG; PAM sequence: AGG
tatttctcataatagaggat

SEQ ID NO: 110616 - DNA, 20 bp, Artificial Sequence
  Description of Artificial Sequence: Synthetic oligonucleotide
  Target: LAMA2; (-) strand; PAM type: NRG; PAM sequence: TAG
ctatttctcataatagagga

SEQ ID NO: 110617 - DNA, 20 bp, Artificial Sequence
  Description of Artificial Sequence: Synthetic oligonucleotide
  Target: LAMA2; (-) strand; PAM type: NRG; PAM sequence: AGG
ttaactatttctcataatag

SEQ ID NO: 110618 - DNA, 20 bp, Artificial Sequence
  Description of Artificial Sequence: Synthetic oligonucleotide
  Target: LAMA2; (-) strand; PAM type: NRG; PAM sequence: GAG
attaactatttctcataata

SEQ ID NO: 110619 - DNA, 20 bp, Artificial Sequence
  Description of Artificial Sequence: Synthetic oligonucleotide
  Target: LAMA2; (-) strand; PAM type: NRG; PAM sequence: TAG
taattaactatttctcataa

SEQ ID NO: 110620 - DNA, 20 bp, Artificial Sequence
  Description of Artificial Sequence: Synthetic oligonucleotide
  Target: LAMA2; (-) strand; PAM type: NRG; PAM sequence: TAG
cccaatttaattaatattta

SEQ ID NO: 110621 - DNA, 20 bp, Artificial Sequence
  Description of Artificial Sequence: Synthetic oligonucleotide
  Target: LAMA2; (-) strand; PAM type: NRG; PAM sequence: CAG
tgttttagtaagatagaaaa

SEQ ID NO: 110622 - DNA, 20 bp, Artificial Sequence
  Description of Artificial Sequence: Synthetic oligonucleotide
  Target: LAMA2; (-) strand; PAM type: NRG; PAM sequence: TAG
atttctatgttttagtaaga

SEQ ID NO: 110623 - DNA, 20 bp, Artificial Sequence
  Description of Artificial Sequence: Synthetic oligonucleotide
  Target: LAMA2; (-) strand; PAM type: NRG; PAM sequence: AAG
aattatttctatgttttagt

SEQ ID NO: 110624 - DNA, 20 bp, Artificial Sequence
  Description of Artificial Sequence: Synthetic oligonucleotide
  Target: LAMA2; (-) strand; PAM type: NRG; PAM sequence: TAG
taaaaattatttctatgttt

SEQ ID NO: 110625 - DNA, 20 bp, Artificial Sequence
  Description of Artificial Sequence: Synthetic oligonucleotide
  Target: LAMA2; (-) strand; PAM type: NRG; PAM sequence: TGG
acacaaaatatataatttag

SEQ ID NO: 110626 - DNA, 20 bp, Artificial Sequence
  Description of Artificial Sequence: Synthetic oligonucleotide
  Target: LAMA2; (-) strand; PAM type: NRG; PAM sequence: TAG
agtacacaaaatatataatt

SEQ ID NO: 110627 - DNA, 20 bp, Artificial Sequence
  Description of Artificial Sequence: Synthetic oligonucleotide
  Target: LAMA2; (-) strand; PAM type: NRG; PAM sequence: AAG
aagcaattgttatcaaataa

SEQ ID NO: 110628 - DNA, 20 bp, Artificial Sequence
  Description of Artificial Sequence: Synthetic oligonucleotide
  Target: LAMA2; (-) strand; PAM type: NRG; PAM sequence: AAG
aatgcaccccattttaactg

SEQ ID NO: 110629 - DNA, 20 bp, Artificial Sequence
  Description of Artificial Sequence: Synthetic oligonucleotide
  Target: LAMA2; (-) strand; PAM type: NRG; PAM sequence: AGG
aaaatggtatttttcataac

SEQ ID NO: 110630 - DNA, 20 bp, Artificial Sequence
  Description of Artificial Sequence: Synthetic oligonucleotide
  Target: LAMA2; (-) strand; PAM type: NRG; PAM sequence: CAG
aaaaatggtatttttcataa

SEQ ID NO: 110631 - DNA, 20 bp, Artificial Sequence
  Description of Artificial Sequence: Synthetic oligonucleotide
  Target: LAMA2; (-) strand; PAM type: NRG; PAM sequence: TGG
tataaagtagtgactaaaaa

SEQ ID NO: 110632 - DNA, 20 bp, Artificial Sequence
  Description of Artificial Sequence: Synthetic oligonucleotide
  Target: LAMA2; (-) strand; PAM type: NRG; PAM sequence: TAG
tttctataaatattataaag

SEQ ID NO: 110633 - DNA, 20 bp, Artificial Sequence
  Description of Artificial Sequence: Synthetic oligonucleotide
  Target: LAMA2; (-) strand; PAM type: NRG; PAM sequence: AAG
tattttctataaatattata

SEQ ID NO: 110634 - DNA, 20 bp, Artificial Sequence
  Description of Artificial Sequence: Synthetic oligonucleotide
  Target: LAMA2; (-) strand; PAM type: NRG; PAM sequence: AAG
aaaattataaattcatgagg

SEQ ID NO: 110635 - DNA, 20 bp, Artificial Sequence
  Description of Artificial Sequence: Synthetic oligonucleotide
  Target: LAMA2; (-) strand; PAM type: NRG; PAM sequence: AGG
aaaaaaattataaattcatg

SEQ ID NO: 110636 - DNA, 20 bp, Artificial Sequence
  Description of Artificial Sequence: Synthetic oligonucleotide
  Target: LAMA2; (-) strand; PAM type: NRG; PAM sequence: GAG
aaaaaaaattataaattcat

SEQ ID NO: 110637 - DNA, 20 bp, Artificial Sequence
  Description of Artificial Sequence: Synthetic oligonucleotide
  Target: LAMA2; (-) strand; PAM type: NRG; PAM sequence: AAG
ctgcaggcaatttcacatgg

SEQ ID NO: 110638 - DNA, 20 bp, Artificial Sequence
  Description of Artificial Sequence: Synthetic oligonucleotide
  Target: LAMA2; (-) strand; PAM type: NRG; PAM sequence: TGG
tttctgcaggcaatttcaca

SEQ ID NO: 110639 - DNA, 20 bp, Artificial Sequence
  Description of Artificial Sequence: Synthetic oligonucleotide
  Target: LAMA2; (-) strand; PAM type: NRG; PAM sequence: AGG
atatacgtactgatttctgc

SEQ ID NO: 110640 - DNA, 20 bp, Artificial Sequence
  Description of Artificial Sequence: Synthetic oligonucleotide
  Target: LAMA2; (-) strand; PAM type: NRG; PAM sequence: CAG
catatacgtactgatttctg

SEQ ID NO: 110641 - DNA, 20 bp, Artificial Sequence
  Description of Artificial Sequence: Synthetic oligonucleotide
  Target: LAMA2; (-) strand; PAM type: NRG; PAM sequence: AAG
agcgttactaaaaggtatat

SEQ ID NO: 110642 - DNA, 20 bp, Artificial Sequence
  Description of Artificial Sequence: Synthetic oligonucleotide
  Target: LAMA2; (-) strand; PAM type: NRG; PAM sequence: AGG
gaagcatgagcgttactaaa

SEQ ID NO: 110643 - DNA, 20 bp, Artificial Sequence
  Description of Artificial Sequence: Synthetic oligonucleotide
  Target: LAMA2; (-) strand; PAM type: NRG; PAM sequence: AAG
tgaagcatgagcgttactaa

SEQ ID NO: 110644 - DNA, 20 bp, Artificial Sequence
  Description of Artificial Sequence: Synthetic oligonucleotide
  Target: LAMA2; (-) strand; PAM type: NRG; PAM sequence: GAG
tgcaataggcaatgaagcat

SEQ ID NO: 110645 - DNA, 20 bp, Artificial Sequence
  Description of Artificial Sequence: Synthetic oligonucleotide
  Target: LAMA2; (-) strand; PAM type: NRG; PAM sequence: AAG
actttttgcaataggcaatg

SEQ ID NO: 110646 - DNA, 20 bp, Artificial Sequence
  Description of Artificial Sequence: Synthetic oligonucleotide
  Target: LAMA2; (-) strand; PAM type: NRG; PAM sequence: AGG
aagctgaaactttttgcaat

SEQ ID NO: 110647 - DNA, 20 bp, Artificial Sequence
  Description of Artificial Sequence: Synthetic oligonucleotide
  Target: LAMA2; (-) strand; PAM type: NRG; PAM sequence: TAG
aaagctgaaactttttgcaa

SEQ ID NO: 110648 - DNA, 20 bp, Artificial Sequence
  Description of Artificial Sequence: Synthetic oligonucleotide
  Target: LAMA2; (-) strand; PAM type: NRG; PAM sequence: AAG
accaaaatatagtacatgca

SEQ ID NO: 110649 - DNA, 20 bp, Artificial Sequence
  Description of Artificial Sequence: Synthetic oligonucleotide
  Target: LAMA2; (-) strand; PAM type: NRG; PAM sequence: TAG
tttaaagcaaaaccaaaata

SEQ ID NO: 110650 - DNA, 20 bp, Artificial Sequence
  Description of Artificial Sequence: Synthetic oligonucleotide
  Target: LAMA2; (-) strand; PAM type: NRG; PAM sequence: AAG
gaatagctacgcaatgttta

SEQ ID NO: 110651 - DNA, 20 bp, Artificial Sequence
  Description of Artificial Sequence: Synthetic oligonucleotide
  Target: LAMA2; (-) strand; PAM type: NRG; PAM sequence: TAG
tactgtaacagtggaaagaa

SEQ ID NO: 110652 - DNA, 20 bp, Artificial Sequence
  Description of Artificial Sequence: Synthetic oligonucleotide
  Target: LAMA2; (-) strand; PAM type: NRG; PAM sequence: AAG
attaatactgtaacagtgga

SEQ ID NO: 110653 - DNA, 20 bp, Artificial Sequence
  Description of Artificial Sequence: Synthetic oligonucleotide
  Target: LAMA2; (-) strand; PAM type: NRG; PAM sequence: TGG
taccattaatactgtaacag

SEQ ID NO: 110654 - DNA, 20 bp, Artificial Sequence
  Description of Artificial Sequence: Synthetic oligonucleotide
  Target: LAMA2; (-) strand; PAM type: NRG; PAM sequence: CAG
atctaccattaatactgtaa

SEQ ID NO: 110655 - DNA, 20 bp, Artificial Sequence
  Description of Artificial Sequence: Synthetic oligonucleotide
  Target: LAMA2; (-) strand; PAM type: NRG; PAM sequence: AAG
atatgacctttttataaagg

SEQ ID NO: 110656 - DNA, 20 bp, Artificial Sequence
  Description of Artificial Sequence: Synthetic oligonucleotide
  Target: LAMA2; (-) strand; PAM type: NRG; PAM sequence: AGG
cacatatgacctttttataa

SEQ ID NO: 110657 - DNA, 20 bp, Artificial Sequence
  Description of Artificial Sequence: Synthetic oligonucleotide
  Target: LAMA2; (-) strand; PAM type: NRG; PAM sequence: AAG
ccacatatgacctttttata

SEQ ID NO: 110658 - DNA, 20 bp, Artificial Sequence
  Description of Artificial Sequence: Synthetic oligonucleotide
  Target: LAMA2; (-) strand; PAM type: NRG; PAM sequence: GAG
aatttctggggttagagtat

SEQ ID NO: 110659 - DNA, 20 bp, Artificial Sequence
  Description of Artificial Sequence: Synthetic oligonucleotide
  Target: LAMA2; (-) strand; PAM type: NRG; PAM sequence: GAG
ctcccaaatttctggggtta

SEQ ID NO: 110660 - DNA, 20 bp, Artificial Sequence
  Description of Artificial Sequence: Synthetic oligonucleotide
  Target: LAMA2; (-) strand; PAM type: NRG; PAM sequence: TAG
acctcccaaatttctggggt

SEQ ID NO: 110661 - DNA, 20 bp, Artificial Sequence
  Description of Artificial Sequence: Synthetic oligonucleotide
  Target: LAMA2; (-) strand; PAM type: NRG; PAM sequence: GGG
cttgacctcccaaatttctg

SEQ ID NO: 110662 - DNA, 20 bp, Artificial Sequence
  Description of Artificial Sequence: Synthetic oligonucleotide
  Target: LAMA2; (-) strand; PAM type: NRG; PAM sequence: GGG
ccttgacctcccaaatttct

SEQ ID NO: 110663 - DNA, 20 bp, Artificial Sequence
  Description of Artificial Sequence: Synthetic oligonucleotide
  Target: LAMA2; (-) strand; PAM type: NRG; PAM sequence: TGG
accttgacctcccaaatttc

SEQ ID NO: 110664 - DNA, 20 bp, Artificial Sequence
  Description of Artificial Sequence: Synthetic oligonucleotide
  Target: LAMA2; (-) strand; PAM type: NRG; PAM sequence: AAG
gatctcaaacttctggcctc

SEQ ID NO: 110665 - DNA, 20 bp, Artificial Sequence
  Description of Artificial Sequence: Synthetic oligonucleotide
  Target: LAMA2; (-) strand; PAM type: NRG; PAM sequence: TGG
ccaggctgatctcaaacttc

SEQ ID NO: 110666 - DNA, 20 bp, Artificial Sequence
  Description of Artificial Sequence: Synthetic oligonucleotide
  Target: LAMA2; (-) strand; PAM type: NRG; PAM sequence: AGG
agagtcttgctatgtttccc

SEQ ID NO: 110667 - DNA, 20 bp, Artificial Sequence
  Description of Artificial Sequence: Synthetic oligonucleotide
  Target: LAMA2; (-) strand; PAM type: NRG; PAM sequence: CAG
tagagtcttgctatgtttcc

SEQ ID NO: 110668 - DNA, 20 bp, Artificial Sequence
  Description of Artificial Sequence: Synthetic oligonucleotide
  Target: LAMA2; (-) strand; PAM type: NRG; PAM sequence: GAG
ttttcctttttgtagagata

SEQ ID NO: 110669 - DNA, 20 bp, Artificial Sequence
  Description of Artificial Sequence: Synthetic oligonucleotide
  Target: LAMA2; (-) strand; PAM type: NRG; PAM sequence: TAG
atttttcctttttgtagaga

SEQ ID NO: 110670 - DNA, 20 bp, Artificial Sequence
  Description of Artificial Sequence: Synthetic oligonucleotide
  Target: LAMA2; (-) strand; PAM type: NRG; PAM sequence: GAG
actcatttttcctttttgta

SEQ ID NO: 110671 - DNA, 20 bp, Artificial Sequence
  Description of Artificial Sequence: Synthetic oligonucleotide
  Target: LAMA2; (-) strand; PAM type: NRG; PAM sequence: TAG
tcactcatttttcctttttg

SEQ ID NO: 110672 - DNA, 20 bp, Artificial Sequence
  Description of Artificial Sequence: Synthetic oligonucleotide
  Target: LAMA2; (-) strand; PAM type: NRG; PAM sequence: CAG
acttttatgtggctatcata

SEQ ID NO: 110673 - DNA, 20 bp, Artificial Sequence
  Description of Artificial Sequence: Synthetic oligonucleotide
  Target: LAMA2; (-) strand; PAM type: NRG; PAM sequence: TGG
ttcagttttccacttttatg

SEQ ID NO: 110674 - DNA, 20 bp, Artificial Sequence
  Description of Artificial Sequence: Synthetic oligonucleotide
  Target: LAMA2; (-) strand; PAM type: NRG; PAM sequence: CAG
gttaattctatagagaaatt

SEQ ID NO: 110675 - DNA, 20 bp, Artificial Sequence
  Description of Artificial Sequence: Synthetic oligonucleotide
  Target: LAMA2; (-) strand; PAM type: NRG; PAM sequence: GAG
ataatctagttaattctata

SEQ ID NO: 110676 - DNA, 20 bp, Artificial Sequence
  Description of Artificial Sequence: Synthetic oligonucleotide
  Target: LAMA2; (-) strand; PAM type: NRG; PAM sequence: TAG
gcataatctagttaattcta

SEQ ID NO: 110677 - DNA, 20 bp, Artificial Sequence
  Description of Artificial Sequence: Synthetic oligonucleotide
  Target: LAMA2; (-) strand; PAM type: NRG; PAM sequence: TAG
ttatcagaaacagcataatc

SEQ ID NO: 110678 - DNA, 20 bp, Artificial Sequence
  Description of Artificial Sequence: Synthetic oligonucleotide
  Target: LAMA2; (-) strand; PAM type: NRG; PAM sequence: CAG
tgaatttgtgttatcagaaa

SEQ ID NO: 110679 - DNA, 20 bp, Artificial Sequence
  Description of Artificial Sequence: Synthetic oligonucleotide
  Target: LAMA2; (-) strand; PAM type: NRG; PAM sequence: CAG
ttggggtgaatttgtgttat

SEQ ID NO: 110680 - DNA, 20 bp, Artificial Sequence
  Description of Artificial Sequence: Synthetic oligonucleotide
  Target: LAMA2; (-) strand; PAM type: NRG; PAM sequence: GGG
attaagtcattcgtgtgttg

SEQ ID NO: 110681 - DNA, 20 bp, Artificial Sequence
  Description of Artificial Sequence: Synthetic oligonucleotide
  Target: LAMA2; (-) strand; PAM type: NRG; PAM sequence: GGG
aattaagtcattcgtgtgtt

SEQ ID NO: 110682 - DNA, 20 bp, Artificial Sequence
  Description of Artificial Sequence: Synthetic oligonucleotide
  Target: LAMA2; (-) strand; PAM type: NRG; PAM sequence: TGG
caattaagtcattcgtgtgt

SEQ ID NO: 110683 - DNA, 20 bp, Artificial Sequence
  Description of Artificial Sequence: Synthetic oligonucleotide
  Target: LAMA2; (-) strand; PAM type: NRG; PAM sequence: AAG
attttaatcctcttgcaatt

SEQ ID NO: 110684 - DNA, 20 bp, Artificial Sequence
  Description of Artificial Sequence: Synthetic oligonucleotide
  Target: LAMA2; (-) strand; PAM type: NRG; PAM sequence: TAG
gggtaaaaacaacaacagtg

SEQ ID NO: 110685 - DNA, 20 bp, Artificial Sequence
  Description of Artificial Sequence: Synthetic oligonucleotide
  Target: LAMA2; (-) strand; PAM type: NRG; PAM sequence: CAG
tcagtgggtaaaaacaacaa

SEQ ID NO: 110686 - DNA, 20 bp, Artificial Sequence
  Description of Artificial Sequence: Synthetic oligonucleotide
  Target: LAMA2; (-) strand; PAM type: NRG; PAM sequence: GGG
aggaaaaagtgagcttcagt

SEQ ID NO: 110687 - DNA, 20 bp, Artificial Sequence
  Description of Artificial Sequence: Synthetic oligonucleotide
  Target: LAMA2; (-) strand; PAM type: NRG; PAM sequence: TGG
gaggaaaaagtgagcttcag

SEQ ID NO: 110688 - DNA, 20 bp, Artificial Sequence
  Description of Artificial Sequence: Synthetic oligonucleotide
  Target: LAMA2; (-) strand; PAM type: NRG; PAM sequence: CAG
ggagaggaaaaagtgagctt

SEQ ID NO: 110689 - DNA, 20 bp, Artificial Sequence
  Description of Artificial Sequence: Synthetic oligonucleotide
  Target: LAMA2; (-) strand; PAM type: NRG; PAM sequence: GAG
ttacaaggagaggaaaaagt

SEQ ID NO: 110690 - DNA, 20 bp, Artificial Sequence
  Description of Artificial Sequence: Synthetic oligonucleotide
  Target: LAMA2; (-) strand; PAM type: NRG; PAM sequence: AAG
ataattacaaggagaggaaa

SEQ ID NO: 110691 - DNA, 20 bp, Artificial Sequence
  Description of Artificial Sequence: Synthetic oligonucleotide
  Target: LAMA2; (-) strand; PAM type: NRG; PAM sequence: AGG
ttgagaataattacaaggag

SEQ ID NO: 110692 - DNA, 20 bp, Artificial Sequence
  Description of Artificial Sequence: Synthetic oligonucleotide
  Target: LAMA2; (-) strand; PAM type: NRG; PAM sequence: GAG
gttgagaataattacaagga

SEQ ID NO: 110693 - DNA, 20 bp, Artificial Sequence
  Description of Artificial Sequence: Synthetic oligonucleotide
  Target: LAMA2; (-) strand; PAM type: NRG; PAM sequence: GAG
aagttgagaataattacaag

SEQ ID NO: 110694 - DNA, 20 bp, Artificial Sequence
  Description of Artificial Sequence: Synthetic oligonucleotide
  Target: LAMA2; (-) strand; PAM type: NRG; PAM sequence: AGG
agaagttgagaataattaca

SEQ ID NO: 110695 - DNA, 20 bp, Artificial Sequence
  Description of Artificial Sequence: Synthetic oligonucleotide
  Target: LAMA2; (-) strand; PAM type: NRG; PAM sequence: AAG
cagaagttgagaataattac

SEQ ID NO: 110696 - DNA, 20 bp, Artificial Sequence
  Description of Artificial Sequence: Synthetic oligonucleotide
  Target: LAMA2; (-) strand; PAM type: NRG; PAM sequence: GAG
aatataattctacagaagtt

SEQ ID NO: 110697 - DNA, 20 bp, Artificial Sequence
  Description of Artificial Sequence: Synthetic oligonucleotide
  Target: LAMA2; (-) strand; PAM type: NRG; PAM sequence: AAG
ctccaaatataattctacag

SEQ ID NO: 110698 - DNA, 20 bp, Artificial Sequence
  Description of Artificial Sequence: Synthetic oligonucleotide
  Target: LAMA2; (-) strand; PAM type: NRG; PAM sequence: CAG
tttctccaaatataattcta

SEQ ID NO: 110699 - DNA, 20 bp, Artificial Sequence
  Description of Artificial Sequence: Synthetic oligonucleotide
  Target: LAMA2; (-) strand; PAM type: NRG; PAM sequence: TAG
gttgttcatttgttaagacc

SEQ ID NO: 110700 - DNA, 20 bp, Artificial Sequence
  Description of Artificial Sequence: Synthetic oligonucleotide
  Target: LAMA2; (-) strand; PAM type: NRG; PAM sequence: AAG
ccagtagttgttcatttgtt

SEQ ID NO: 110701 - DNA, 20 bp, Artificial Sequence
  Description of Artificial Sequence: Synthetic oligonucleotide
  Target: LAMA2; (-) strand; PAM type: NRG; PAM sequence: TAG
agaacattttgatatcccag

SEQ ID NO: 110702 - DNA, 20 bp, Artificial Sequence
  Description of Artificial Sequence: Synthetic oligonucleotide
  Target: LAMA2; (-) strand; PAM type: NRG; PAM sequence: CAG
gagagaacattttgatatcc

SEQ ID NO: 110703 - DNA, 20 bp, Artificial Sequence
  Description of Artificial Sequence: Synthetic oligonucleotide
  Target: LAMA2; (-) strand; PAM type: NRG; PAM sequence: GAG
aaactgtgggatgtttaaga

SEQ ID NO: 110704 - DNA, 20 bp, Artificial Sequence
  Description of Artificial Sequence: Synthetic oligonucleotide
  Target: LAMA2; (-) strand; PAM type: NRG; PAM sequence: GAG
ttaaactgtgggatgtttaa

SEQ ID NO: 110705 - DNA, 20 bp, Artificial Sequence
  Description of Artificial Sequence: Synthetic oligonucleotide
  Target: LAMA2; (-) strand; PAM type: NRG; PAM sequence: AAG
atttaaactgtgggatgttt

SEQ ID NO: 110706 - DNA, 20 bp, Artificial Sequence
  Description of Artificial Sequence: Synthetic oligonucleotide
  Target: LAMA2; (-) strand; PAM type: NRG; PAM sequence: GGG
tgactttcaatttaaactgt

SEQ ID NO: 110707 - DNA, 20 bp, Artificial Sequence
  Description of Artificial Sequence: Synthetic oligonucleotide
  Target: LAMA2; (-) strand; PAM type: NRG; PAM sequence: TGG
ttgactttcaatttaaactg

SEQ ID NO: 110708 - DNA, 20 bp, Artificial Sequence
  Description of Artificial Sequence: Synthetic oligonucleotide
  Target: LAMA2; (-) strand; PAM type: NRG; PAM sequence: TAG
attttttgtagctatttttt

SEQ ID NO: 110709 - DNA, 20 bp, Artificial Sequence
  Description of Artificial Sequence: Synthetic oligonucleotide
  Target: LAMA2; (-) strand; PAM type: NRG; PAM sequence: TAG
attcttgttattattttttg

SEQ ID NO: 110710 - DNA, 20 bp, Artificial Sequence
  Description of Artificial Sequence: Synthetic oligonucleotide
  Target: LAMA2; (-) strand; PAM type: NRG; PAM sequence: TAG
tcttggtcatatttttcaaa

SEQ ID NO: 110711 - DNA, 20 bp, Artificial Sequence
  Description of Artificial Sequence: Synthetic oligonucleotide
  Target: LAMA2; (-) strand; PAM type: NRG; PAM sequence: TGG
ttttccgctgaggacactct

SEQ ID NO: 110712 - DNA, 20 bp, Artificial Sequence
  Description of Artificial Sequence: Synthetic oligonucleotide
  Target: LAMA2; (-) strand; PAM type: NRG; PAM sequence: AGG
gttgctctcattttccgctg

SEQ ID NO: 110713 - DNA, 20 bp, Artificial Sequence
  Description of Artificial Sequence: Synthetic oligonucleotide
  Target: LAMA2; (-) strand; PAM type: NRG; PAM sequence: GAG
agttgctctcattttccgct

SEQ ID NO: 110714 - DNA, 20 bp, Artificial Sequence
  Description of Artificial Sequence: Synthetic oligonucleotide
  Target: LAMA2; (-) strand; PAM type: NRG; PAM sequence: TAG
tcaatgatggtttagtaatg

SEQ ID NO: 110715 - DNA, 20 bp, Artificial Sequence
  Description of Artificial Sequence: Synthetic oligonucleotide
  Target: LAMA2; (-) strand; PAM type: NRG; PAM sequence: TAG
ttgttatttcaatgatggtt

SEQ ID NO: 110716 - DNA, 20 bp, Artificial Sequence
  Description of Artificial Sequence: Synthetic oligonucleotide
  Target: LAMA2; (-) strand; PAM type: NRG; PAM sequence: TGG
tagaattgttatttcaatga

SEQ ID NO: 110717 - DNA, 20 bp, Artificial Sequence
  Description of Artificial Sequence: Synthetic oligonucleotide
  Target: LAMA2; (-) strand; PAM type: NRG; PAM sequence: TAG
agtcagcaaagttgattgtt

SEQ ID NO: 110718 - DNA, 20 bp, Artificial Sequence
  Description of Artificial Sequence: Synthetic oligonucleotide
  Target: LAMA2; (-) strand; PAM type: NRG; PAM sequence: AAG
tgctttttctaaagtcagca

SEQ ID NO: 110719 - DNA, 20 bp, Artificial Sequence
  Description of Artificial Sequence: Synthetic oligonucleotide
  Target: LAMA2; (-) strand; PAM type: NRG; PAM sequence: CAG
aactctgctttttctaaagt

SEQ ID NO: 110720 - DNA, 20 bp, Artificial Sequence
  Description of Artificial Sequence: Synthetic oligonucleotide
  Target: LAMA2; (-) strand; PAM type: NRG; PAM sequence: AAG
agttaactctgctttttcta

SEQ ID NO: 110721 - DNA, 20 bp, Artificial Sequence
  Description of Artificial Sequence: Synthetic oligonucleotide
  Target: LAMA2; (-) strand; PAM type: NRG; PAM sequence: AAG
ttccatctttttcattcttt

SEQ ID NO: 110722 - DNA, 20 bp, Artificial Sequence
  Description of Artificial Sequence: Synthetic oligonucleotide
  Target: LAMA2; (-) strand; PAM type: NRG; PAM sequence: AGG
agtcacctttttgatttatc

SEQ ID NO: 110723 - DNA, 20 bp, Artificial Sequence
  Description of Artificial Sequence: Synthetic oligonucleotide
  Target: LAMA2; (-) strand; PAM type: NRG; PAM sequence: CAG
gagtcacctttttgatttat

SEQ ID NO: 110724 - DNA, 20 bp, Artificial Sequence
  Description of Artificial Sequence: Synthetic oligonucleotide
  Target: LAMA2; (-) strand; PAM type: NRG; PAM sequence: GAG
ttttaatctatattcctaag

SEQ ID NO: 110725 - DNA, 20 bp, Artificial Sequence
  Description of Artificial Sequence: Synthetic oligonucleotide
  Target: LAMA2; (-) strand; PAM type: NRG; PAM sequence: AGG
atttttaatctatattccta

SEQ ID NO: 110726 - DNA, 20 bp, Artificial Sequence
  Description of Artificial Sequence: Synthetic oligonucleotide
  Target: LAMA2; (-) strand; PAM type: NRG; PAM sequence: AAG
aatttttaatctatattcct

SEQ ID NO: 110727 - DNA, 20 bp, Artificial Sequence
  Description of Artificial Sequence: Synthetic oligonucleotide
  Target: LAMA2; (-) strand; PAM type: NRG; PAM sequence: GAG
gtctagtgatacctctttta

SEQ ID NO: 110728 - DNA, 20 bp, Artificial Sequence
  Description of Artificial Sequence: Synthetic oligonucleotide
  Target: LAMA2; (-) strand; PAM type: NRG; PAM sequence: TAG
ttgtctagtgatacctcttt

SEQ ID NO: 110729 - DNA, 20 bp, Artificial Sequence
  Description of Artificial Sequence: Synthetic oligonucleotide
  Target: LAMA2; (-) strand; PAM type: NRG; PAM sequence: TAG
gttaaatttcctcccttgtc

SEQ ID NO: 110730 - DNA, 20 bp, Artificial Sequence
  Description of Artificial Sequence: Synthetic oligonucleotide
  Target: LAMA2; (-) strand; PAM type: NRG; PAM sequence: AAG
ggagcagttgaagtttttcc

SEQ ID NO: 110731 - DNA, 20 bp, Artificial Sequence
  Description of Artificial Sequence: Synthetic oligonucleotide
  Target: LAMA2; (-) strand; PAM type: NRG; PAM sequence: AAG
tctattctccggagcagttg

SEQ ID NO: 110732 - DNA, 20 bp, Artificial Sequence
  Description of Artificial Sequence: Synthetic oligonucleotide
  Target: LAMA2; (-) strand; PAM type: NRG; PAM sequence: CAG
ttttcctctattctccggag

SEQ ID NO: 110733 - DNA, 20 bp, Artificial Sequence
  Description of Artificial Sequence: Synthetic oligonucleotide
  Target: LAMA2; (-) strand; PAM type: NRG; PAM sequence: GAG
tctttttcctctattctccg

SEQ ID NO: 110734 - DNA, 20 bp, Artificial Sequence
  Description of Artificial Sequence: Synthetic oligonucleotide
  Target: LAMA2; (-) strand; PAM type: NRG; PAM sequence: CGG
cctctttttcctctattctc

SEQ ID NO: 110735 - DNA, 20 bp, Artificial Sequence
  Description of Artificial Sequence: Synthetic oligonucleotide
  Target: LAMA2; (-) strand; PAM type: NRG; PAM sequence: AAG
tgtttcaaaatggaacttgg

SEQ ID NO: 110736 - DNA, 20 bp, Artificial Sequence
  Description of Artificial Sequence: Synthetic oligonucleotide
  Target: LAMA2; (-) strand; PAM type: NRG; PAM sequence: TGG
aaatgtttcaaaatggaact

SEQ ID NO: 110737 - DNA, 20 bp, Artificial Sequence
  Description of Artificial Sequence: Synthetic oligonucleotide
  Target: LAMA2; (-) strand; PAM type: NRG; PAM sequence: TGG
ttttgccaaatgtttcaaaa

SEQ ID NO: 110738 - DNA, 20 bp, Artificial Sequence
  Description of Artificial Sequence: Synthetic oligonucleotide
  Target: LAMA2; (-) strand; PAM type: NRG; PAM sequence: AAG
ttttattcacaagttctcag

SEQ ID NO: 110739 - DNA, 20 bp, Artificial Sequence
  Description of Artificial Sequence: Synthetic oligonucleotide
  Target: LAMA2; (-) strand; PAM type: NRG; PAM sequence: CAG
cccttttattcacaagttct

SEQ ID NO: 110740 - DNA, 20 bp, Artificial Sequence
  Description of Artificial Sequence: Synthetic oligonucleotide
  Target: LAMA2; (-) strand; PAM type: NRG; PAM sequence: AAG
ttacagacccttttattcac

SEQ ID NO: 110741 - DNA, 20 bp, Artificial Sequence
  Description of Artificial Sequence: Synthetic oligonucleotide
  Target: LAMA2; (-) strand; PAM type: NRG; PAM sequence: CAG
acttagacttaggcaaatta

SEQ ID NO: 110742 - DNA, 20 bp, Artificial Sequence
  Description of Artificial Sequence: Synthetic oligonucleotide
  Target: LAMA2; (-) strand; PAM type: NRG; PAM sequence: AGG
gttaaagactacttagactt

SEQ ID NO: 110743 - DNA, 20 bp, Artificial Sequence
  Description of Artificial Sequence: Synthetic oligonucleotide
  Target: LAMA2; (-) strand; PAM type: NRG; PAM sequence: TAG
agttaaagactacttagact

SEQ ID NO: 110744 - DNA, 20 bp, Artificial Sequence
  Description of Artificial Sequence: Synthetic oligonucleotide
  Target: LAMA2; (-) strand; PAM type: NRG; PAM sequence: TAG
aaaagtagttaaagactact

SEQ ID NO: 110745 - DNA, 20 bp, Artificial Sequence
  Description of Artificial Sequence: Synthetic oligonucleotide
  Target: LAMA2; (-) strand; PAM type: NRG; PAM sequence: AAG
agaaagagcaaaagtagtta

SEQ ID NO: 110746 - DNA, 20 bp, Artificial Sequence
  Description of Artificial Sequence: Synthetic oligonucleotide
  Target: LAMA2; (-) strand; PAM type: NRG; PAM sequence: TAG
ttaatgagaaagagcaaaag

SEQ ID NO: 110747 - DNA, 20 bp, Artificial Sequence
  Description of Artificial Sequence: Synthetic oligonucleotide
  Target: LAMA2; (-) strand; PAM type: NRG; PAM sequence: AAG
agattaatgagaaagagcaa

SEQ ID NO: 110748 - DNA, 20 bp, Artificial Sequence
  Description of Artificial Sequence: Synthetic oligonucleotide
  Target: LAMA2; (-) strand; PAM type: NRG; PAM sequence: GAG
agatttagattaatgagaaa

SEQ ID NO: 110749 - DNA, 20 bp, Artificial Sequence
  Description of Artificial Sequence: Synthetic oligonucleotide
  Target: LAMA2; (-) strand; PAM type: NRG; PAM sequence: AAG
ttagatttagattaatgaga

SEQ ID NO: 110750 - DNA, 20 bp, Artificial Sequence
  Description of Artificial Sequence: Synthetic oligonucleotide
  Target: LAMA2; (-) strand; PAM type: NRG; PAM sequence: GAG
tgatttagatttagattaat

SEQ ID NO: 110751 - DNA, 20 bp, Artificial Sequence
  Description of Artificial Sequence: Synthetic oligonucleotide
  Target: LAMA2; (-) strand; PAM type: NRG; PAM sequence: TAG
gaggcaaaatgatttagatt

SEQ ID NO: 110752 - DNA, 20 bp, Artificial Sequence
  Description of Artificial Sequence: Synthetic oligonucleotide
  Target: LAMA2; (-) strand; PAM type: NRG; PAM sequence: TAG
aaaactgaggcaaaatgatt

SEQ ID NO: 110753 - DNA, 20 bp, Artificial Sequence
  Description of Artificial Sequence: Synthetic oligonucleotide
  Target: LAMA2; (-) strand; PAM type: NRG; PAM sequence: AGG
tacaaattattctaaaactg

SEQ ID NO: 110754 - DNA, 20 bp, Artificial Sequence
  Description of Artificial Sequence: Synthetic oligonucleotide
  Target: LAMA2; (-) strand; PAM type: NRG; PAM sequence: GAG
ctacaaattattctaaaact

SEQ ID NO: 110755 - DNA, 20 bp, Artificial Sequence
  Description of Artificial Sequence: Synthetic oligonucleotide
  Target: LAMA2; (-) strand; PAM type: NRG; PAM sequence: CAG
tcatacagatagcataaaca

SEQ ID NO: 110756 - DNA, 20 bp, Artificial Sequence
  Description of Artificial Sequence: Synthetic oligonucleotide
  Target: LAMA2; (-) strand; PAM type: NRG; PAM sequence: TAG
ttgttatatcatcatacaga

SEQ ID NO: 110757 - DNA, 20 bp, Artificial Sequence
  Description of Artificial Sequence: Synthetic oligonucleotide
  Target: LAMA2; (-) strand; PAM type: NRG; PAM sequence: CAG
atgtttgttatatcatcata

SEQ ID NO: 110758 - DNA, 20 bp, Artificial Sequence
  Description of Artificial Sequence: Synthetic oligonucleotide
  Target: LAMA2; (-) strand; PAM type: NRG; PAM sequence: TAG
tgaaatgcatgttatctgga

SEQ ID NO: 110759 - DNA, 20 bp, Artificial Sequence
  Description of Artificial Sequence: Synthetic oligonucleotide
  Target: LAMA2; (-) strand; PAM type: NRG; PAM sequence: TGG
ttcctgaaatgcatgttatc

SEQ ID NO: 110760 - DNA, 20 bp, Artificial Sequence
  Description of Artificial Sequence: Synthetic oligonucleotide
  Target: LAMA2; (-) strand; PAM type: NRG; PAM sequence: CAG
gctatatcaagaactgagtg

SEQ ID NO: 110761 - DNA, 20 bp, Artificial Sequence
  Description of Artificial Sequence: Synthetic oligonucleotide
  Target: LAMA2; (-) strand; PAM type: NRG; PAM sequence: GAG
gatttgctatatcaagaact

SEQ ID NO: 110762 - DNA, 20 bp, Artificial Sequence
  Description of Artificial Sequence: Synthetic oligonucleotide
  Target: LAMA2; (-) strand; PAM type: NRG; PAM sequence: AAG
actaatagatttgctatatc

SEQ ID NO: 110763 - DNA, 20 bp, Artificial Sequence
  Description of Artificial Sequence: Synthetic oligonucleotide
  Target: LAMA2; (-) strand; PAM type: NRG; PAM sequence: TAG
ctattattaaatttaactaa

SEQ ID NO: 110764 - DNA, 20 bp, Artificial Sequence
  Description of Artificial Sequence: Synthetic oligonucleotide
  Target: LAMA2; (-) strand; PAM type: NRG; PAM sequence: AGG
gcggcatttaaaaagaacat

SEQ ID NO: 110765 - DNA, 20 bp, Artificial Sequence
  Description of Artificial Sequence: Synthetic oligonucleotide
  Target: LAMA2; (-) strand; PAM type: NRG; PAM sequence: TAG
agcggcatttaaaaagaaca

SEQ ID NO: 110766 - DNA, 20 bp, Artificial Sequence
  Description of Artificial Sequence: Synthetic oligonucleotide
  Target: LAMA2; (-) strand; PAM type: NRG; PAM sequence: AAG
tgctgttagcggcatttaaa

SEQ ID NO: 110767 - DNA, 20 bp, Artificial Sequence
  Description of Artificial Sequence: Synthetic oligonucleotide
  Target: LAMA2; (-) strand; PAM type: NRG; PAM sequence: CGG
agtatgacttatgctgttag

SEQ ID NO: 110768 - DNA, 20 bp, Artificial Sequence
  Description of Artificial Sequence: Synthetic oligonucleotide
  Target: LAMA2; (-) strand; PAM type: NRG; PAM sequence: TAG
ataagtatgacttatgctgt

SEQ ID NO: 110769 - DNA, 20 bp, Artificial Sequence
  Description of Artificial Sequence: Synthetic oligonucleotide
  Target: LAMA2; (-) strand; PAM type: NRG; PAM sequence: AAG
agtaggtattttgaactcat

SEQ ID NO: 110770 - DNA, 20 bp, Artificial Sequence
  Description of Artificial Sequence: Synthetic oligonucleotide
  Target: LAMA2; (-) strand; PAM type: NRG; PAM sequence: AGG
ttaaaattaggttttaaagt

SEQ ID NO: 110771 - DNA, 20 bp, Artificial Sequence
  Description of Artificial Sequence: Synthetic oligonucleotide
  Target: LAMA2; (-) strand; PAM type: NRG; PAM sequence: TAG
tttaaaattaggttttaaag

SEQ ID NO: 110772 - DNA, 20 bp, Artificial Sequence
  Description of Artificial Sequence: Synthetic oligonucleotide
  Target: LAMA2; (-) strand; PAM type: NRG; PAM sequence: AAG
ttttttaaaattaggtttta

SEQ ID NO: 110773 - DNA, 20 bp, Artificial Sequence
  Description of Artificial Sequence: Synthetic oligonucleotide
  Target: LAMA2; (-) strand; PAM type: NRG; PAM sequence: AGG
attatcatttttttaaaatt

SEQ ID NO: 110774 - DNA, 20 bp, Artificial Sequence
  Description of Artificial Sequence: Synthetic oligonucleotide
  Target: LAMA2; (-) strand; PAM type: NRG; PAM sequence: TAG
aattatcatttttttaaaat

SEQ ID NO: 110775 - DNA, 20 bp, Artificial Sequence
  Description of Artificial Sequence: Synthetic oligonucleotide
  Target: LAMA2; (-) strand; PAM type: NRG; PAM sequence: AAG
aatcacatgtgctcaaaggg

SEQ ID NO: 110776 - DNA, 20 bp, Artificial Sequence
  Description of Artificial Sequence: Synthetic oligonucleotide
  Target: LAMA2; (-) strand; PAM type: NRG; PAM sequence: GGG
acgaatcacatgtgctcaaa

SEQ ID NO: 110777 - DNA, 20 bp, Artificial Sequence
  Description of Artificial Sequence: Synthetic oligonucleotide
  Target: LAMA2; (-) strand; PAM type: NRG; PAM sequence: AGG
aacgaatcacatgtgctcaa

SEQ ID NO: 110778 - DNA, 20 bp, Artificial Sequence
  Description of Artificial Sequence: Synthetic oligonucleotide
  Target: LAMA2; (-) strand; PAM type: NRG; PAM sequence: AAG
gaacgaatcacatgtgctca

SEQ ID NO: 110779 - DNA, 20 bp, Artificial Sequence
  Description of Artificial Sequence: Synthetic oligonucleotide
  Target: LAMA2; (-) strand; PAM type: NRG; PAM sequence: AGG
accactgagaactaaccctc

SEQ ID NO: 110780 - DNA, 20 bp, Artificial Sequence
  Description of Artificial Sequence: Synthetic oligonucleotide
  Target: LAMA2; (-) strand; PAM type: NRG; PAM sequence: CAG
aaccactgagaactaaccct

SEQ ID NO: 110781 - DNA, 20 bp, Artificial Sequence
  Description of Artificial Sequence: Synthetic oligonucleotide
  Target: LAMA2; (-) strand; PAM type: NRG; PAM sequence: GAG
gcggctgacatacaaccact

SEQ ID NO: 110782 - DNA, 20 bp, Artificial Sequence
  Description of Artificial Sequence: Synthetic oligonucleotide
  Target: LAMA2; (-) strand; PAM type: NRG; PAM sequence: CGG
actctgaatgatctgctttg

SEQ ID NO: 110783 - DNA, 20 bp, Artificial Sequence
  Description of Artificial Sequence: Synthetic oligonucleotide
  Target: LAMA2; (-) strand; PAM type: NRG; PAM sequence: TAG
ttcaaggctacatgctgtgt

SEQ ID NO: 110784 - DNA, 20 bp, Artificial Sequence
  Description of Artificial Sequence: Synthetic oligonucleotide
  Target: LAMA2; (-) strand; PAM type: NRG; PAM sequence: AGG
gttaaactgcttaaggttca

SEQ ID NO: 110785 - DNA, 20 bp, Artificial Sequence
  Description of Artificial Sequence: Synthetic oligonucleotide
  Target: LAMA2; (-) strand; PAM type: NRG; PAM sequence: AAG
agttaaactgcttaaggttc

SEQ ID NO: 110786 - DNA, 20 bp, Artificial Sequence
  Description of Artificial Sequence: Synthetic oligonucleotide
  Target: LAMA2; (-) strand; PAM type: NRG; PAM sequence: AGG
tgaaaaagttaaactgctta

SEQ ID NO: 110787 - DNA, 20 bp, Artificial Sequence
  Description of Artificial Sequence: Synthetic oligonucleotide
  Target: LAMA2; (-) strand; PAM type: NRG; PAM sequence: AAG
atgaaaaagttaaactgctt

SEQ ID NO: 110788 - DNA, 20 bp, Artificial Sequence
  Description of Artificial Sequence: Synthetic oligonucleotide
  Target: LAMA2; (-) strand; PAM type: NRG; PAM sequence: AAG
tcactgtgactctgatgaaa

SEQ ID NO: 110789 - DNA, 20 bp, Artificial Sequence
  Description of Artificial Sequence: Synthetic oligonucleotide
  Target: LAMA2; (-) strand; PAM type: NRG; PAM sequence: AAG
atgtcatttattatctgatt

SEQ ID NO: 110790 - DNA, 20 bp, Artificial Sequence
  Description of Artificial Sequence: Synthetic oligonucleotide
  Target: LAMA2; (-) strand; PAM type: NRG; PAM sequence: CAG
ttctattgctgggatgctgg

SEQ ID NO: 110791 - DNA, 20 bp, Artificial Sequence
  Description of Artificial Sequence: Synthetic oligonucleotide
  Target: LAMA2; (-) strand; PAM type: NRG; PAM sequence: TGG
ttattctattgctgggatgc

SEQ ID NO: 110792 - DNA, 20 bp, Artificial Sequence
  Description of Artificial Sequence: Synthetic oligonucleotide
  Target: LAMA2; (-) strand; PAM type: NRG; PAM sequence: GGG
aaaccacttattctattgct

SEQ ID NO: 110793 - DNA, 20 bp, Artificial Sequence
  Description of Artificial Sequence: Synthetic oligonucleotide
  Target: LAMA2; (-) strand; PAM type: NRG; PAM sequence: TGG
taaaccacttattctattgc

SEQ ID NO: 110794 - DNA, 20 bp, Artificial Sequence
  Description of Artificial Sequence: Synthetic oligonucleotide
  Target: LAMA2; (-) strand; PAM type: NRG; PAM sequence: TGG
aagggagggcctatgccacg

SEQ ID NO: 110795 - DNA, 20 bp, Artificial Sequence
  Description of Artificial Sequence: Synthetic oligonucleotide
  Target: LAMA2; (-) strand; PAM type: NRG; PAM sequence: GGG
agtatgtgcttttcaaggga

SEQ ID NO: 110796 - DNA, 20 bp, Artificial Sequence
  Description of Artificial Sequence: Synthetic oligonucleotide
  Target: LAMA2; (-) strand; PAM type: NRG; PAM sequence: AGG
cagtatgtgcttttcaaggg

SEQ ID NO: 110797 - DNA, 20 bp, Artificial Sequence
  Description of Artificial Sequence: Synthetic oligonucleotide
  Target: LAMA2; (-) strand; PAM type: NRG; PAM sequence: GAG
tcagtatgtgcttttcaagg

SEQ ID NO: 110798 - DNA, 20 bp, Artificial Sequence
  Description of Artificial Sequence: Synthetic oligonucleotide
  Target: LAMA2; (-) strand; PAM type: NRG; PAM sequence: GGG
tttcagtatgtgcttttcaa

SEQ ID NO: 110799 - DNA, 20 bp, Artificial Sequence
  Description of Artificial Sequence: Synthetic oligonucleotide
  Target: LAMA2; (-) strand; PAM type: NRG; PAM sequence: AGG
ctttcagtatgtgcttttca

SEQ ID NO: 110800 - DNA, 20 bp, Artificial Sequence
  Description of Artificial Sequence: Synthetic oligonucleotide
  Target: LAMA2; (-) strand; PAM type: NRG; PAM sequence: AAG
actttcagtatgtgcttttc

SEQ ID NO: 110801 - DNA, 20 bp, Artificial Sequence
  Description of Artificial Sequence: Synthetic oligonucleotide
  Target: LAMA2; (-) strand; PAM type: NRG; PAM sequence: CAG
atcactgatccatagacttt

SEQ ID NO: 110802 - DNA, 20 bp, Artificial Sequence
  Description of Artificial Sequence: Synthetic oligonucleotide
  Target: LAMA2; (-) strand; PAM type: NRG; PAM sequence: TAG
tgaaggtcatcactgatcca

SEQ ID NO: 110803 - DNA, 20 bp, Artificial Sequence
  Description of Artificial Sequence: Synthetic oligonucleotide
  Target: LAMA2; (-) strand; PAM type: NRG; PAM sequence: AGG
ttcaaccctaaaatagttga

SEQ ID NO: 110804 - DNA, 20 bp, Artificial Sequence
  Description of Artificial Sequence: Synthetic oligonucleotide
  Target: LAMA2; (-) strand; PAM type: NRG; PAM sequence: AAG
tttcaaccctaaaatagttg

SEQ ID NO: 110805 - DNA, 20 bp, Artificial Sequence
  Description of Artificial Sequence: Synthetic oligonucleotide
  Target: LAMA2; (-) strand; PAM type: NRG; PAM sequence: TAG
tcaaagtttcaaccctaaaa

SEQ ID NO: 110806 - DNA, 20 bp, Artificial Sequence
  Description of Artificial Sequence: Synthetic oligonucleotide
  Target: LAMA2; (-) strand; PAM type: NRG; PAM sequence: AAG
gttacatattggcaatttca

SEQ ID NO: 110807 - DNA, 20 bp, Artificial Sequence
  Description of Artificial Sequence: Synthetic oligonucleotide
  Target: LAMA2; (-) strand; PAM type: NRG; PAM sequence: TGG
aaaaataaagggttacatat

SEQ ID NO: 110808 - DNA, 20 bp, Artificial Sequence
  Description of Artificial Sequence: Synthetic oligonucleotide
  Target: LAMA2; (-) strand; PAM type: NRG; PAM sequence: GGG
tgtaggttaaaaaaaataaa

SEQ ID NO: 110809 - DNA, 20 bp, Artificial Sequence
  Description of Artificial Sequence: Synthetic oligonucleotide
  Target: LAMA2; (-) strand; PAM type: NRG; PAM sequence: AGG
ttgtaggttaaaaaaaataa

SEQ ID NO: 110810 - DNA, 20 bp, Artificial Sequence
  Description of Artificial Sequence: Synthetic oligonucleotide
  Target: LAMA2; (-) strand; PAM type: NRG; PAM sequence: AAG
tttgtaggttaaaaaaaata

SEQ ID NO: 110811 - DNA, 20 bp, Artificial Sequence
  Description of Artificial Sequence: Synthetic oligonucleotide
  Target: LAMA2; (-) strand; PAM type: NRG; PAM sequence: AGG
tattaaacagctgtttttgt

SEQ ID NO: 110812 - DNA, 20 bp, Artificial Sequence
  Description of Artificial Sequence: Synthetic oligonucleotide
  Target: LAMA2; (-) strand; PAM type: NRG; PAM sequence: TAG
atattaaacagctgtttttg

SEQ ID NO: 110813 - DNA, 20 bp, Artificial Sequence
  Description of Artificial Sequence: Synthetic oligonucleotide
  Target: LAMA2; (-) strand; PAM type: NRG; PAM sequence: CAG
ttaggttgacctatattaaa

SEQ ID NO: 110814 - DNA, 20 bp, Artificial Sequence
  Description of Artificial Sequence: Synthetic oligonucleotide
  Target: LAMA2; (-) strand; PAM type: NRG; PAM sequence: AGG
attaccctgtgttacatatt

SEQ ID NO: 110815 - DNA, 20 bp, Artificial Sequence
  Description of Artificial Sequence: Synthetic oligonucleotide
  Target: LAMA2; (-) strand; PAM type: NRG; PAM sequence: TAG
gattaccctgtgttacatat

SEQ ID NO: 110816 - DNA, 20 bp, Artificial Sequence
  Description of Artificial Sequence: Synthetic oligonucleotide
  Target: LAMA2; (-) strand; PAM type: NRG; PAM sequence: TAG
ttcaatttcattttgaagaa

SEQ ID NO: 110817 - DNA, 20 bp, Artificial Sequence
  Description of Artificial Sequence: Synthetic oligonucleotide
  Target: LAMA2; (-) strand; PAM type: NRG; PAM sequence: AAG
tgcagttcaatttcattttg

SEQ ID NO: 110818 - DNA, 20 bp, Artificial Sequence
  Description of Artificial Sequence: Synthetic oligonucleotide
  Target: LAMA2; (-) strand; PAM type: NRG; PAM sequence: CAG
taattaaatctttcatggtg

SEQ ID NO: 110819 - DNA, 20 bp, Artificial Sequence
  Description of Artificial Sequence: Synthetic oligonucleotide
  Target: LAMA2; (-) strand; PAM type: NRG; PAM sequence: TGG
acatttaattaaatctttca

SEQ ID NO: 110820 - DNA, 20 bp, Artificial Sequence
  Description of Artificial Sequence: Synthetic oligonucleotide
  Target: LAMA2; (-) strand; PAM type: NRG; PAM sequence: AGG
ttgaaaaacccttagactaa

SEQ ID NO: 110821 - DNA, 20 bp, Artificial Sequence
  Description of Artificial Sequence: Synthetic oligonucleotide
  Target: LAMA2; (-) strand; PAM type: NRG; PAM sequence: AAG
gttgaaaaacccttagacta

SEQ ID NO: 110822 - DNA, 20 bp, Artificial Sequence
  Description of Artificial Sequence: Synthetic oligonucleotide
  Target: LAMA2; (-) strand; PAM type: NRG; PAM sequence: TAG
ttttgatgttgaaaaaccct

SEQ ID NO: 110823 - DNA, 20 bp, Artificial Sequence
  Description of Artificial Sequence: Synthetic oligonucleotide
  Target: LAMA2; (-) strand; PAM type: NRG; PAM sequence: AAG
agctatcaaaatgtcttttg

SEQ ID NO: 110824 - DNA, 20 bp, Artificial Sequence
  Description of Artificial Sequence: Synthetic oligonucleotide
  Target: LAMA2; (-) strand; PAM type: NRG; PAM sequence: AAG
tttgcacatcttaaagagag

SEQ ID NO: 110825 - DNA, 20 bp, Artificial Sequence
  Description of Artificial Sequence: Synthetic oligonucleotide
  Target: LAMA2; (-) strand; PAM type: NRG; PAM sequence: GAG
ttttttgcacatcttaaaga

SEQ ID NO: 110826 - DNA, 20 bp, Artificial Sequence
  Description of Artificial Sequence: Synthetic oligonucleotide
  Target: LAMA2; (-) strand; PAM type: NRG; PAM sequence: GAG
ctttttttgcacatcttaaa

SEQ ID NO: 110827 - DNA, 20 bp, Artificial Sequence
  Description of Artificial Sequence: Synthetic oligonucleotide
  Target: LAMA2; (-) strand; PAM type: NRG; PAM sequence: AAG
gtctttttttgcacatctta

SEQ ID NO: 110828 - DNA, 20 bp, Artificial Sequence
  Description of Artificial Sequence: Synthetic oligonucleotide
  Target: LAMA2; (-) strand; PAM type: NRG; PAM sequence: TGG
tcagggtttttacacaaaat

SEQ ID NO: 110829 - DNA, 20 bp, Artificial Sequence
  Description of Artificial Sequence: Synthetic oligonucleotide
  Target: LAMA2; (-) strand; PAM type: NRG; PAM sequence: GGG
ccagaactgtatttaaatca

SEQ ID NO: 110830 - DNA, 20 bp, Artificial Sequence
  Description of Artificial Sequence: Synthetic oligonucleotide
  Target: LAMA2; (-) strand; PAM type: NRG; PAM sequence: AGG
gccagaactgtatttaaatc

SEQ ID NO: 110831 - DNA, 20 bp, Artificial Sequence
  Description of Artificial Sequence: Synthetic oligonucleotide
  Target: LAMA2; (-) strand; PAM type: NRG; PAM sequence: CAG
agccagaactgtatttaaat

SEQ ID NO: 110832 - DNA, 20 bp, Artificial Sequence
  Description of Artificial Sequence: Synthetic oligonucleotide
  Target: LAMA2; (-) strand; PAM type: NRG; PAM sequence: CAG
gtcacctagtctgtccaagc

SEQ ID NO: 110833 - DNA, 20 bp, Artificial Sequence
  Description of Artificial Sequence: Synthetic oligonucleotide
  Target: LAMA2; (-) strand; PAM type: NRG; PAM sequence: AAG
aaatgtcacctagtctgtcc

SEQ ID NO: 110834 - DNA, 20 bp, Artificial Sequence
  Description of Artificial Sequence: Synthetic oligonucleotide
  Target: LAMA2; (-) strand; PAM type: NRG; PAM sequence: TAG
agcatctttaaaatgtcacc

SEQ ID NO: 110835 - DNA, 20 bp, Artificial Sequence
  Description of Artificial Sequence: Synthetic oligonucleotide
  Target: LAMA2; (-) strand; PAM type: NRG; PAM sequence: AAG
tcacagaagcaaggaaatga

SEQ ID NO: 110836 - DNA, 20 bp, Artificial Sequence
  Description of Artificial Sequence: Synthetic oligonucleotide
  Target: LAMA2; (-) strand; PAM type: NRG; PAM sequence: AGG
gaactttagtcacagaagca

SEQ ID NO: 110837 - DNA, 20 bp, Artificial Sequence
  Description of Artificial Sequence: Synthetic oligonucleotide
  Target: LAMA2; (-) strand; PAM type: NRG; PAM sequence: AAG
agaactttagtcacagaagc

SEQ ID NO: 110838 - DNA, 20 bp, Artificial Sequence
  Description of Artificial Sequence: Synthetic oligonucleotide
  Target: LAMA2; (-) strand; PAM type: NRG; PAM sequence: AAG
gaatagaactttagtcacag

SEQ ID NO: 110839 - DNA, 20 bp, Artificial Sequence
  Description of Artificial Sequence: Synthetic oligonucleotide
  Target: LAMA2; (-) strand; PAM type: NRG; PAM sequence: CAG
acagaatagaactttagtca

SEQ ID NO: 110840 - DNA, 20 bp, Artificial Sequence
  Description of Artificial Sequence: Synthetic oligonucleotide
  Target: LAMA2; (-) strand; PAM type: NRG; PAM sequence: TAG
acctttacagaatagaactt

SEQ ID NO: 110841 - DNA, 20 bp, Artificial Sequence
  Description of Artificial Sequence: Synthetic oligonucleotide
  Target: LAMA2; (-) strand; PAM type: NRG; PAM sequence: TAG
aaaagttaacctttacagaa

SEQ ID NO: 110842 - DNA, 20 bp, Artificial Sequence
  Description of Artificial Sequence: Synthetic oligonucleotide
  Target: LAMA2; (-) strand; PAM type: NRG; PAM sequence: CAG
agccaaaaagttaaccttta

SEQ ID NO: 110843 - DNA, 20 bp, Artificial Sequence
  Description of Artificial Sequence: Synthetic oligonucleotide
  Target: LAMA2; (-) strand; PAM type: NRG; PAM sequence: AAG
aatttctaacttcagccaaa

SEQ ID NO: 110844 - DNA, 20 bp, Artificial Sequence
  Description of Artificial Sequence: Synthetic oligonucleotide
  Target: LAMA2; (-) strand; PAM type: NRG; PAM sequence: CAG
caatgcttaatttctaactt

SEQ ID NO: 110845 - DNA, 20 bp, Artificial Sequence
  Description of Artificial Sequence: Synthetic oligonucleotide
  Target: LAMA2; (-) strand; PAM type: NRG; PAM sequence: AAG
cattgaaggtagagaatatg

SEQ ID NO: 110846 - DNA, 20 bp, Artificial Sequence
  Description of Artificial Sequence: Synthetic oligonucleotide
  Target: LAMA2; (-) strand; PAM type: NRG; PAM sequence: GAG
aaaaattagcattgaaggta

SEQ ID NO: 110847 - DNA, 20 bp, Artificial Sequence
  Description of Artificial Sequence: Synthetic oligonucleotide
  Target: LAMA2; (-) strand; PAM type: NRG; PAM sequence: TAG
gtaaaaattagcattgaagg

SEQ ID NO: 110848 - DNA, 20 bp, Artificial Sequence
  Description of Artificial Sequence: Synthetic oligonucleotide
  Target: LAMA2; (-) strand; PAM type: NRG; PAM sequence: AGG
aaggtaaaaattagcattga

SEQ ID NO: 110849 - DNA, 20 bp, Artificial Sequence
  Description of Artificial Sequence: Synthetic oligonucleotide
  Target: LAMA2; (-) strand; PAM type: NRG; PAM sequence: AAG
taaggtaaaaattagcattg

SEQ ID NO: 110850 - DNA, 20 bp, Artificial Sequence
  Description of Artificial Sequence: Synthetic oligonucleotide
  Target: LAMA2; (-) strand; PAM type: NRG; PAM sequence: TAG
tttttgattaaggtaaaaat

SEQ ID NO: 110851 - DNA, 20 bp, Artificial Sequence
  Description of Artificial Sequence: Synthetic oligonucleotide
  Target: LAMA2; (-) strand; PAM type: NRG; PAM sequence: AGG
ccactttttctttttgatta

SEQ ID NO: 110852 - DNA, 20 bp, Artificial Sequence
  Description of Artificial Sequence: Synthetic oligonucleotide
  Target: LAMA2; (-) strand; PAM type: NRG; PAM sequence: AAG
accactttttctttttgatt

SEQ ID NO: 110853 - DNA, 20 bp, Artificial Sequence
  Description of Artificial Sequence: Synthetic oligonucleotide
  Target: LAMA2; (-) strand; PAM type: NRG; PAM sequence: GGG
ggagtagatgttaggacaga

SEQ ID NO: 110854 - DNA, 20 bp, Artificial Sequence
  Description of Artificial Sequence: Synthetic oligonucleotide
  Target: LAMA2; (-) strand; PAM type: NRG; PAM sequence: AGG
gggagtagatgttaggacag

SEQ ID NO: 110855 - DNA, 20 bp, Artificial Sequence
  Description of Artificial Sequence: Synthetic oligonucleotide
  Target: LAMA2; (-) strand; PAM type: NRG; PAM sequence: GAG
ggggagtagatgttaggaca

SEQ ID NO: 110856 - DNA, 20 bp, Artificial Sequence
  Description of Artificial Sequence: Synthetic oligonucleotide
  Target: LAMA2; (-) strand; PAM type: NRG; PAM sequence: CAG
caggggagtagatgttagga

SEQ ID NO: 110857 - DNA, 20 bp, Artificial Sequence
  Description of Artificial Sequence: Synthetic oligonucleotide
  Target: LAMA2; (-) strand; PAM type: NRG; PAM sequence: AGG
aggccaggggagtagatgtt

SEQ ID NO: 110858 - DNA, 20 bp, Artificial Sequence
  Description of Artificial Sequence: Synthetic oligonucleotide
  Target: LAMA2; (-) strand; PAM type: NRG; PAM sequence: TAG
caggccaggggagtagatgt

SEQ ID NO: 110859 - DNA, 20 bp, Artificial Sequence
  Description of Artificial Sequence: Synthetic oligonucleotide
  Target: LAMA2; (-) strand; PAM type: NRG; PAM sequence: TAG
actcaagcaggccaggggag

SEQ ID NO: 110860 - DNA, 20 bp, Artificial Sequence
  Description of Artificial Sequence: Synthetic oligonucleotide
  Target: LAMA2; (-) strand; PAM type: NRG; PAM sequence: GAG
gagactcaagcaggccaggg

SEQ ID NO: 110861 - DNA, 20 bp, Artificial Sequence
  Description of Artificial Sequence: Synthetic oligonucleotide
  Target: LAMA2; (-) strand; PAM type: NRG; PAM sequence: GGG
ttgagactcaagcaggccag

SEQ ID NO: 110862 - DNA, 20 bp, Artificial Sequence
  Description of Artificial Sequence: Synthetic oligonucleotide
  Target: LAMA2; (-) strand; PAM type: NRG; PAM sequence: GGG
gttgagactcaagcaggcca

SEQ ID NO: 110863 - DNA, 20 bp, Artificial Sequence
  Description of Artificial Sequence: Synthetic oligonucleotide
  Target: LAMA2; (-) strand; PAM type: NRG; PAM sequence: AGG
agttgagactcaagcaggcc

SEQ ID NO: 110864 - DNA, 20 bp, Artificial Sequence
  Description of Artificial Sequence: Synthetic oligonucleotide
  Target: LAMA2; (-) strand; PAM type: NRG; PAM sequence: CAG
tagttgagactcaagcaggc

SEQ ID NO: 110865 - DNA, 20 bp, Artificial Sequence
  Description of Artificial Sequence: Synthetic oligonucleotide
  Target: LAMA2; (-) strand; PAM type: NRG; PAM sequence: AGG
attttagttgagactcaagc

SEQ ID NO: 110866 - DNA, 20 bp, Artificial Sequence
  Description of Artificial Sequence: Synthetic oligonucleotide
  Target: LAMA2; (-) strand; PAM type: NRG; PAM sequence: CAG
tattttagttgagactcaag

SEQ ID NO: 110867 - DNA, 20 bp, Artificial Sequence
  Description of Artificial Sequence: Synthetic oligonucleotide
  Target: LAMA2; (-) strand; PAM type: NRG; PAM sequence: AAG
caatattttagttgagactc

SEQ ID NO: 110868 - DNA, 20 bp, Artificial Sequence
  Description of Artificial Sequence: Synthetic oligonucleotide
  Target: LAMA2; (-) strand; PAM type: NRG; PAM sequence: GAG
caaatgtcaatattttagtt

SEQ ID NO: 110869 - DNA, 20 bp, Artificial Sequence
  Description of Artificial Sequence: Synthetic oligonucleotide
  Target: LAMA2; (-) strand; PAM type: NRG; PAM sequence: TAG
gatggcaaatgtcaatattt

SEQ ID NO: 110870 - DNA, 20 bp, Artificial Sequence
  Description of Artificial Sequence: Synthetic oligonucleotide
  Target: LAMA2; (-) strand; PAM type: NRG; PAM sequence: TGG
agctaaagcaaaatgtgtga

SEQ ID NO: 110871 - DNA, 20 bp, Artificial Sequence
  Description of Artificial Sequence: Synthetic oligonucleotide
  Target: LAMA2; (-) strand; PAM type: NRG; PAM sequence: AAG
aagcatggccataacagcta

SEQ ID NO: 110872 - DNA, 20 bp, Artificial Sequence
  Description of Artificial Sequence: Synthetic oligonucleotide
  Target: LAMA2; (-) strand; PAM type: NRG; PAM sequence: CAG
gtgacaaagcatggccataa

SEQ ID NO: 110873 - DNA, 20 bp, Artificial Sequence
  Description of Artificial Sequence: Synthetic oligonucleotide
  Target: LAMA2; (-) strand; PAM type: NRG; PAM sequence: TGG
cttattaatgtgacaaagca

SEQ ID NO: 110874 - DNA, 20 bp, Artificial Sequence
  Description of Artificial Sequence: Synthetic oligonucleotide
  Target: LAMA2; (-) strand; PAM type: NRG; PAM sequence: AAG
ttcatcttattaatgtgaca

SEQ ID NO: 110875 - DNA, 20 bp, Artificial Sequence
  Description of Artificial Sequence: Synthetic oligonucleotide
  Target: LAMA2; (-) strand; PAM type: NRG; PAM sequence: CAG
cacacacagaattagaatag

SEQ ID NO: 110876 - DNA, 20 bp, Artificial Sequence
  Description of Artificial Sequence: Synthetic oligonucleotide
  Target: LAMA2; (-) strand; PAM type: NRG; PAM sequence: TAG
gtgcacacacagaattagaa

SEQ ID NO: 110877 - DNA, 20 bp, Artificial Sequence
  Description of Artificial Sequence: Synthetic oligonucleotide
  Target: LAMA2; (-) strand; PAM type: NRG; PAM sequence: TAG
cacacgtgcacacacagaat

SEQ ID NO: 110878 - DNA, 20 bp, Artificial Sequence
  Description of Artificial Sequence: Synthetic oligonucleotide
  Target: LAMA2; (-) strand; PAM type: NRG; PAM sequence: CAG
catgcacacacgtgcacaca

SEQ ID NO: 110879 - DNA, 20 bp, Artificial Sequence
  Description of Artificial Sequence: Synthetic oligonucleotide
  Target: LAMA2; (-) strand; PAM type: NRG; PAM sequence: TAG
gcaactgcatagaacaaaat

SEQ ID NO: 110880 - DNA, 20 bp, Artificial Sequence
  Description of Artificial Sequence: Synthetic oligonucleotide
  Target: LAMA2; (-) strand; PAM type: NRG; PAM sequence: TAG
catctgcatcggcaactgca

SEQ ID NO: 110881 - DNA, 20 bp, Artificial Sequence
  Description of Artificial Sequence: Synthetic oligonucleotide
  Target: LAMA2; (-) strand; PAM type: NRG; PAM sequence: CGG
tttgacagtggcatctgcat

SEQ ID NO: 110882 - DNA, 20 bp, Artificial Sequence
  Description of Artificial Sequence: Synthetic oligonucleotide
  Target: LAMA2; (-) strand; PAM type: NRG; PAM sequence: TGG
ctgttctaaatttttgacag

SEQ ID NO: 110883 - DNA, 20 bp, Artificial Sequence
  Description of Artificial Sequence: Synthetic oligonucleotide
  Target: LAMA2; (-) strand; PAM type: NRG; PAM sequence: CAG
ttcctgttctaaatttttga

SEQ ID NO: 110884 - DNA, 20 bp, Artificial Sequence
  Description of Artificial Sequence: Synthetic oligonucleotide
  Target: LAMA2; (-) strand; PAM type: NRG; PAM sequence: CAG
gagtttatctattagccggt

SEQ ID NO: 110885 - DNA, 20 bp, Artificial Sequence
  Description of Artificial Sequence: Synthetic oligonucleotide
  Target: LAMA2; (-) strand; PAM type: NRG; PAM sequence: CGG
gtttgagtttatctattagc

SEQ ID NO: 110886 - DNA, 20 bp, Artificial Sequence
  Description of Artificial Sequence: Synthetic oligonucleotide
  Target: LAMA2; (-) strand; PAM type: NRG; PAM sequence: TAG
atgggtttgagtttatctat

SEQ ID NO: 110887 - DNA, 20 bp, Artificial Sequence
  Description of Artificial Sequence: Synthetic oligonucleotide
  Target: LAMA2; (-) strand; PAM type: NRG; PAM sequence: GAG
tcaagttccttgatgggttt

SEQ ID NO: 110888 - DNA, 20 bp, Artificial Sequence
  Description of Artificial Sequence: Synthetic oligonucleotide
  Target: LAMA2; (-) strand; PAM type: NRG; PAM sequence: GGG
ttatcctcaagttccttgat

SEQ ID NO: 110889 - DNA, 20 bp, Artificial Sequence
  Description of Artificial Sequence: Synthetic oligonucleotide
  Target: LAMA2; (-) strand; PAM type: NRG; PAM sequence: TGG
gttatcctcaagttccttga

SEQ ID NO: 110890 - DNA, 20 bp, Artificial Sequence
  Description of Artificial Sequence: Synthetic oligonucleotide
  Target: LAMA2; (-) strand; PAM type: NRG; PAM sequence: AAG
tttttctttaggttatcctc

SEQ ID NO: 110891 - DNA, 20 bp, Artificial Sequence
  Description of Artificial Sequence: Synthetic oligonucleotide
  Target: LAMA2; (-) strand; PAM type: NRG; PAM sequence: AGG
tctcagagatgtttttcttt

SEQ ID NO: 110892 - DNA, 20 bp, Artificial Sequence
  Description of Artificial Sequence: Synthetic oligonucleotide
  Target: LAMA2; (-) strand; PAM type: NRG; PAM sequence: TAG
atctcagagatgtttttctt

SEQ ID NO: 110893 - DNA, 20 bp, Artificial Sequence
  Description of Artificial Sequence: Synthetic oligonucleotide
  Target: LAMA2; (-) strand; PAM type: NRG; PAM sequence: GAG
ttatcaattcctttatctca

SEQ ID NO: 110894 - DNA, 20 bp, Artificial Sequence
  Description of Artificial Sequence: Synthetic oligonucleotide
  Target: LAMA2; (-) strand; PAM type: NRG; PAM sequence: CAG
gtttatcaattcctttatct

SEQ ID NO: 110895 - DNA, 20 bp, Artificial Sequence
  Description of Artificial Sequence: Synthetic oligonucleotide
  Target: LAMA2; (-) strand; PAM type: NRG; PAM sequence: TGG
aattggcttgtttccgagct

SEQ ID NO: 110896 - DNA, 20 bp, Artificial Sequence
  Description of Artificial Sequence: Synthetic oligonucleotide
  Target: LAMA2; (-) strand; PAM type: NRG; PAM sequence: GAG
tacagaattggcttgtttcc

SEQ ID NO: 110897 - DNA, 20 bp, Artificial Sequence
  Description of Artificial Sequence: Synthetic oligonucleotide
  Target: LAMA2; (-) strand; PAM type: NRG; PAM sequence: TGG
ataaaaagaacttacagaat

SEQ ID NO: 110898 - DNA, 20 bp, Artificial Sequence
  Description of Artificial Sequence: Synthetic oligonucleotide
  Target: LAMA2; (-) strand; PAM type: NRG; PAM sequence: CAG
ctgacgataaaaagaactta

SEQ ID NO: 110899 - DNA, 20 bp, Artificial Sequence
  Description of Artificial Sequence: Synthetic oligonucleotide
  Target: LAMA2; (-) strand; PAM type: NRG; PAM sequence: AAG
ttactgatactgacgataaa

SEQ ID NO: 110900 - DNA, 20 bp, Artificial Sequence
  Description of Artificial Sequence: Synthetic oligonucleotide
  Target: LAMA2; (-) strand; PAM type: NRG; PAM sequence: CAG
aataatccaacaattacaat

SEQ ID NO: 110901 - DNA, 20 bp, Artificial Sequence
  Description of Artificial Sequence: Synthetic oligonucleotide
  Target: LAMA2; (-) strand; PAM type: NRG; PAM sequence: AAG
tcaacggggaatcctgggga

SEQ ID NO: 110902 - DNA, 20 bp, Artificial Sequence
  Description of Artificial Sequence: Synthetic oligonucleotide
  Target: LAMA2; (-) strand; PAM type: NRG; PAM sequence: GGG
tcattcaacggggaatcctg

SEQ ID NO: 110903 - DNA, 20 bp, Artificial Sequence
  Description of Artificial Sequence: Synthetic oligonucleotide
  Target: LAMA2; (-) strand; PAM type: NRG; PAM sequence: GGG
atcattcaacggggaatcct

SEQ ID NO: 110904 - DNA, 20 bp, Artificial Sequence
  Description of Artificial Sequence: Synthetic oligonucleotide
  Target: LAMA2; (-) strand; PAM type: NRG; PAM sequence: TGG
gatcattcaacggggaatcc

SEQ ID NO: 110905 - DNA, 20 bp, Artificial Sequence
  Description of Artificial Sequence: Synthetic oligonucleotide
  Target: LAMA2; (-) strand; PAM type: NRG; PAM sequence: GGG
ggacccaagatcattcaacg

SEQ ID NO: 110906 - DNA, 20 bp, Artificial Sequence
  Description of Artificial Sequence: Synthetic oligonucleotide
  Target: LAMA2; (-) strand; PAM type: NRG; PAM sequence: GGG
aggacccaagatcattcaac

SEQ ID NO: 110907 - DNA, 20 bp, Artificial Sequence
  Description of Artificial Sequence: Synthetic oligonucleotide
  Target: LAMA2; (-) strand; PAM type: NRG; PAM sequence: CGG
aaggacccaagatcattcaa

SEQ ID NO: 110908 - DNA, 20 bp, Artificial Sequence
  Description of Artificial Sequence: Synthetic oligonucleotide
  Target: LAMA2; (-) strand; PAM type: NRG; PAM sequence: AAG
gagttaaaggaaaaggaccc

SEQ ID NO: 110909 - DNA, 20 bp, Artificial Sequence
  Description of Artificial Sequence: Synthetic oligonucleotide
  Target: LAMA2; (-) strand; PAM type: NRG; PAM sequence: AGG
tcgcttcgagttaaaggaaa

SEQ ID NO: 110910 - DNA, 20 bp, Artificial Sequence
  Description of Artificial Sequence: Synthetic oligonucleotide
  Target: LAMA2; (-) strand; PAM type: NRG; PAM sequence: AAG
atcgcttcgagttaaaggaa

SEQ ID NO: 110911 - DNA, 20 bp, Artificial Sequence
  Description of Artificial Sequence: Synthetic oligonucleotide
  Target: LAMA2; (-) strand; PAM type: NRG; PAM sequence: AGG
cccaaatcgcttcgagttaa

SEQ ID NO: 110912 - DNA, 20 bp, Artificial Sequence
  Description of Artificial Sequence: Synthetic oligonucleotide
  Target: LAMA2; (-) strand; PAM type: NRG; PAM sequence: AAG
ccccaaatcgcttcgagtta

SEQ ID NO: 110913 - DNA, 20 bp, Artificial Sequence
  Description of Artificial Sequence: Synthetic oligonucleotide
  Target: LAMA2; (-) strand; PAM type: NRG; PAM sequence: GAG
ctcctaccccaaatcgcttc

SEQ ID NO: 110914 - DNA, 20 bp, Artificial Sequence
  Description of Artificial Sequence: Synthetic oligonucleotide
  Target: LAMA2; (-) strand; PAM type: NRG; PAM sequence: TGG
cccagttttaaaacaataag

SEQ ID NO: 110915 - DNA, 20 bp, Artificial Sequence
  Description of Artificial Sequence: Synthetic oligonucleotide
  Target: LAMA2; (-) strand; PAM type: NRG; PAM sequence: AAG
attcccagttttaaaacaat

SEQ ID NO: 110916 - DNA, 20 bp, Artificial Sequence
  Description of Artificial Sequence: Synthetic oligonucleotide
  Target: LAMA2; (-) strand; PAM type: NRG; PAM sequence: CAG
atagaatataccagaattcc

SEQ ID NO: 110917 - DNA, 20 bp, Artificial Sequence
  Description of Artificial Sequence: Synthetic oligonucleotide
  Target: LAMA2; (-) strand; PAM type: NRG; PAM sequence: CAG
caaatagtaatagaatatac

SEQ ID NO: 110918 - DNA, 20 bp, Artificial Sequence
  Description of Artificial Sequence: Synthetic oligonucleotide
  Target: LAMA2; (-) strand; PAM type: NRG; PAM sequence: TAG
ttattctatgcaaatagtaa

SEQ ID NO: 110919 - DNA, 20 bp, Artificial Sequence
  Description of Artificial Sequence: Synthetic oligonucleotide
  Target: LAMA2; (-) strand; PAM type: NRG; PAM sequence: TAG
tttgtattattctatgcaaa

SEQ ID NO: 110920 - DNA, 20 bp, Artificial Sequence
  Description of Artificial Sequence: Synthetic oligonucleotide
  Target: LAMA2; (-) strand; PAM type: NRG; PAM sequence: AGG
ctttttagtatacaataata

SEQ ID NO: 110921 - DNA, 20 bp, Artificial Sequence
  Description of Artificial Sequence: Synthetic oligonucleotide
  Target: LAMA2; (-) strand; PAM type: NRG; PAM sequence: AAG
gctttttagtatacaataat

SEQ ID NO: 110922 - DNA, 20 bp, Artificial Sequence
  Description of Artificial Sequence: Synthetic oligonucleotide
  Target: LAMA2; (-) strand; PAM type: NRG; PAM sequence: TAG
tactctcatccatggctttt

SEQ ID NO: 110923 - DNA, 20 bp, Artificial Sequence
  Description of Artificial Sequence: Synthetic oligonucleotide
  Target: LAMA2; (-) strand; PAM type: NRG; PAM sequence: TGG
gaggaaggtactctcatcca

SEQ ID NO: 110924 - DNA, 20 bp, Artificial Sequence
  Description of Artificial Sequence: Synthetic oligonucleotide
  Target: LAMA2; (-) strand; PAM type: NRG; PAM sequence: AGG
gtttgtttttagcaagagga

SEQ ID NO: 110925 - DNA, 20 bp, Artificial Sequence
  Description of Artificial Sequence: Synthetic oligonucleotide
  Target: LAMA2; (-) strand; PAM type: NRG; PAM sequence: AAG
ggtttgtttttagcaagagg

SEQ ID NO: 110926 - DNA, 20 bp, Artificial Sequence
  Description of Artificial Sequence: Synthetic oligonucleotide
  Target: LAMA2; (-) strand; PAM type: NRG; PAM sequence: AGG
tttggtttgtttttagcaag

SEQ ID NO: 110927 - DNA, 20 bp, Artificial Sequence
  Description of Artificial Sequence: Synthetic oligonucleotide
  Target: LAMA2; (-) strand; PAM type: NRG; PAM sequence: GAG
ttttggtttgtttttagcaa

SEQ ID NO: 110928 - DNA, 20 bp, Artificial Sequence
  Description of Artificial Sequence: Synthetic oligonucleotide
  Target: LAMA2; (-) strand; PAM type: NRG; PAM sequence: AAG
ttttttggtttgtttttagc

SEQ ID NO: 110929 - DNA, 20 bp, Artificial Sequence
  Description of Artificial Sequence: Synthetic oligonucleotide
  Target: LAMA2; (-) strand; PAM type: NRG; PAM sequence: TAG
ctttttttttggtttgtttt

SEQ ID NO: 110930 - DNA, 20 bp, Artificial Sequence
  Description of Artificial Sequence: Synthetic oligonucleotide
  Target: LAMA2; (-) strand; PAM type: NRG; PAM sequence: TGG
cattagttggcctttttttt

SEQ ID NO: 110931 - DNA, 20 bp, Artificial Sequence
  Description of Artificial Sequence: Synthetic oligonucleotide
  Target: LAMA2; (-) strand; PAM type: NRG; PAM sequence: TGG
cctgccataaccccattagt

SEQ ID NO: 110932 - DNA, 20 bp, Artificial Sequence
  Description of Artificial Sequence: Synthetic oligonucleotide
  Target: LAMA2; (-) strand; PAM type: NRG; PAM sequence: TAG
cattcctgccataaccccat

SEQ ID NO: 110933 - DNA, 20 bp, Artificial Sequence
  Description of Artificial Sequence: Synthetic oligonucleotide
  Target: LAMA2; (-) strand; PAM type: NRG; PAM sequence: AAG
ttgttgtttataccagacaa

SEQ ID NO: 110934 - DNA, 20 bp, Artificial Sequence
  Description of Artificial Sequence: Synthetic oligonucleotide
  Target: LAMA2; (-) strand; PAM type: NRG; PAM sequence: CAG
atttttattgttgtttatac

SEQ ID NO: 110935 - DNA, 20 bp, Artificial Sequence
  Description of Artificial Sequence: Synthetic oligonucleotide
  Target: LAMA2; (-) strand; PAM type: NRG; PAM sequence: AAG
aaatgtaaaaagtataacca

SEQ ID NO: 110936 - DNA, 20 bp, Artificial Sequence
  Description of Artificial Sequence: Synthetic oligonucleotide
  Target: LAMA2; (-) strand; PAM type: NRG; PAM sequence: AAG
aaacaaaaaataaatgtaaa

SEQ ID NO: 110937 - DNA, 20 bp, Artificial Sequence
  Description of Artificial Sequence: Synthetic oligonucleotide
  Target: LAMA2; (-) strand; PAM type: NRG; PAM sequence: CAG
agcaaaattttgagacaaat

SEQ ID NO: 110938 - DNA, 20 bp, Artificial Sequence
  Description of Artificial Sequence: Synthetic oligonucleotide
  Target: LAMA2; (-) strand; PAM type: NRG; PAM sequence: GAG
taagtaaagagcaaaatttt

SEQ ID NO: 110939 - DNA, 20 bp, Artificial Sequence
  Description of Artificial Sequence: Synthetic oligonucleotide
  Target: LAMA2; (-) strand; PAM type: NRG; PAM sequence: GAG
cttctaattgggtaagtaaa

SEQ ID NO: 110940 - DNA, 20 bp, Artificial Sequence
  Description of Artificial Sequence: Synthetic oligonucleotide
  Target: LAMA2; (-) strand; PAM type: NRG; PAM sequence: AAG
aacttctaattgggtaagta

SEQ ID NO: 110941 - DNA, 20 bp, Artificial Sequence
  Description of Artificial Sequence: Synthetic oligonucleotide
  Target: LAMA2; (-) strand; PAM type: NRG; PAM sequence: AAG
tagtaaacttctaattgggt

SEQ ID NO: 110942 - DNA, 20 bp, Artificial Sequence
  Description of Artificial Sequence: Synthetic oligonucleotide
  Target: LAMA2; (-) strand; PAM type: NRG; PAM sequence: GGG
atcctagtaaacttctaatt

SEQ ID NO: 110943 - DNA, 20 bp, Artificial Sequence
  Description of Artificial Sequence: Synthetic oligonucleotide
  Target: LAMA2; (-) strand; PAM type: NRG; PAM sequence: TGG
tatcctagtaaacttctaat

SEQ ID NO: 110944 - DNA, 20 bp, Artificial Sequence
  Description of Artificial Sequence: Synthetic oligonucleotide
  Target: LAMA2; (-) strand; PAM type: NRG; PAM sequence: TAG
agaaagctctgtttctatcc

SEQ ID NO: 110945 - DNA, 20 bp, Artificial Sequence
  Description of Artificial Sequence: Synthetic oligonucleotide
  Target: LAMA2; (-) strand; PAM type: NRG; PAM sequence: AAG
ttagcatgctaccttctaga

SEQ ID NO: 110946 - DNA, 20 bp, Artificial Sequence
  Description of Artificial Sequence: Synthetic oligonucleotide
  Target: LAMA2; (-) strand; PAM type: NRG; PAM sequence: TAG
ctcattagcatgctaccttc

SEQ ID NO: 110947 - DNA, 20 bp, Artificial Sequence
  Description of Artificial Sequence: Synthetic oligonucleotide
  Target: LAMA2; (-) strand; PAM type: NRG; PAM sequence: TAG
gcaactctgccctggctcat

SEQ ID NO: 110948 - DNA, 20 bp, Artificial Sequence
  Description of Artificial Sequence: Synthetic oligonucleotide
  Target: LAMA2; (-) strand; PAM type: NRG; PAM sequence: TGG
gccacttagcaactctgccc

SEQ ID NO: 110949 - DNA, 20 bp, Artificial Sequence
  Description of Artificial Sequence: Synthetic oligonucleotide
  Target: LAMA2; (-) strand; PAM type: NRG; PAM sequence: TAG
taaagtttcacgttgccact

SEQ ID NO: 110950 - DNA, 20 bp, Artificial Sequence
  Description of Artificial Sequence: Synthetic oligonucleotide
  Target: LAMA2; (-) strand; PAM type: NRG; PAM sequence: AAG
ttacttccttcctttgacta

SEQ ID NO: 110951 - DNA, 20 bp, Artificial Sequence
  Description of Artificial Sequence: Synthetic oligonucleotide
  Target: LAMA2; (-) strand; PAM type: NRG; PAM sequence: AAG
caagcctttcttgttcaaac

SEQ ID NO: 110952 - DNA, 20 bp, Artificial Sequence
  Description of Artificial Sequence: Synthetic oligonucleotide
  Target: LAMA2; (-) strand; PAM type: NRG; PAM sequence: AAG
atctaaaaaggtttgagttc

SEQ ID NO: 110953 - DNA, 20 bp, Artificial Sequence
  Description of Artificial Sequence: Synthetic oligonucleotide
  Target: LAMA2; (-) strand; PAM type: NRG; PAM sequence: GAG
tgaggtatctaaaaaggttt

SEQ ID NO: 110954 - DNA, 20 bp, Artificial Sequence
  Description of Artificial Sequence: Synthetic oligonucleotide
  Target: LAMA2; (-) strand; PAM type: NRG; PAM sequence: AGG
gaaaactgaggtatctaaaa

SEQ ID NO: 110955 - DNA, 20 bp, Artificial Sequence
  Description of Artificial Sequence: Synthetic oligonucleotide
  Target: LAMA2; (-) strand; PAM type: NRG; PAM sequence: AAG
ggaaaactgaggtatctaaa

SEQ ID NO: 110956 - DNA, 20 bp, Artificial Sequence
  Description of Artificial Sequence: Synthetic oligonucleotide
  Target: LAMA2; (-) strand; PAM type: NRG; PAM sequence: AGG
atttttgacatggaaaactg

SEQ ID NO: 110957 - DNA, 20 bp, Artificial Sequence
  Description of Artificial Sequence: Synthetic oligonucleotide
  Target: LAMA2; (-) strand; PAM type: NRG; PAM sequence: GAG
aatttttgacatggaaaact

SEQ ID NO: 110958 - DNA, 20 bp, Artificial Sequence
  Description of Artificial Sequence: Synthetic oligonucleotide
  Target: LAMA2; (-) strand; PAM type: NRG; PAM sequence: TGG
aaaaaacagaatttttgaca

SEQ ID NO: 110959 - DNA, 20 bp, Artificial Sequence
  Description of Artificial Sequence: Synthetic oligonucleotide
  Target: LAMA2; (-) strand; PAM type: NRG; PAM sequence: CAG
ttccaaagttgttcaaaaaa

SEQ ID NO: 110960 - DNA, 20 bp, Artificial Sequence
  Description of Artificial Sequence: Synthetic oligonucleotide
  Target: LAMA2; (-) strand; PAM type: NRG; PAM sequence: AAG
ttctgatcatcctagttcca

SEQ ID NO: 110961 - DNA, 20 bp, Artificial Sequence
  Description of Artificial Sequence: Synthetic oligonucleotide
  Target: LAMA2; (-) strand; PAM type: NRG; PAM sequence: TAG
aagggcttttctgatcatcc

SEQ ID NO: 110962 - DNA, 20 bp, Artificial Sequence
  Description of Artificial Sequence: Synthetic oligonucleotide
  Target: LAMA2; (-) strand; PAM type: NRG; PAM sequence: GGG
taaactgatgaactaagaaa

SEQ ID NO: 110963 - DNA, 20 bp, Artificial Sequence
  Description of Artificial Sequence: Synthetic oligonucleotide
  Target: LAMA2; (-) strand; PAM type: NRG; PAM sequence: AGG
ataaactgatgaactaagaa

SEQ ID NO: 110964 - DNA, 20 bp, Artificial Sequence
  Description of Artificial Sequence: Synthetic oligonucleotide
  Target: LAMA2; (-) strand; PAM type: NRG; PAM sequence: AAG
tataaactgatgaactaaga

SEQ ID NO: 110965 - DNA, 20 bp, Artificial Sequence
  Description of Artificial Sequence: Synthetic oligonucleotide
  Target: LAMA2; (-) strand; PAM type: NRG; PAM sequence: AAG
aaaatataaactgatgaact

SEQ ID NO: 110966 - DNA, 20 bp, Artificial Sequence
  Description of Artificial Sequence: Synthetic oligonucleotide
  Target: LAMA2; (-) strand; PAM type: NRG; PAM sequence: GAG
aaaagaatatgctgttactg

SEQ ID NO: 110967 - DNA, 20 bp, Artificial Sequence
  Description of Artificial Sequence: Synthetic oligonucleotide
  Target: LAMA2; (-) strand; PAM type: NRG; PAM sequence: TGG
gaaaaagaatatgctgttac

SEQ ID NO: 110968 - DNA, 20 bp, Artificial Sequence
  Description of Artificial Sequence: Synthetic oligonucleotide
  Target: LAMA2; (-) strand; PAM type: NRG; PAM sequence: AAG
agatgtgaataaggaggaaa

SEQ ID NO: 110969 - DNA, 20 bp, Artificial Sequence
  Description of Artificial Sequence: Synthetic oligonucleotide
  Target: LAMA2; (-) strand; PAM type: NRG; PAM sequence: AGG
agtgttagatgtgaataagg

SEQ ID NO: 110970 - DNA, 20 bp, Artificial Sequence
  Description of Artificial Sequence: Synthetic oligonucleotide
  Target: LAMA2; (-) strand; PAM type: NRG; PAM sequence: GAG
aagtgttagatgtgaataag

SEQ ID NO: 110971 - DNA, 20 bp, Artificial Sequence
  Description of Artificial Sequence: Synthetic oligonucleotide
  Target: LAMA2; (-) strand; PAM type: NRG; PAM sequence: AGG
agaagtgttagatgtgaata

SEQ ID NO: 110972 - DNA, 20 bp, Artificial Sequence
  Description of Artificial Sequence: Synthetic oligonucleotide
  Target: LAMA2; (-) strand; PAM type: NRG; PAM sequence: AAG
tagaagtgttagatgtgaat

SEQ ID NO: 110973 - DNA, 20 bp, Artificial Sequence
  Description of Artificial Sequence: Synthetic oligonucleotide
  Target: LAMA2; (-) strand; PAM type: NRG; PAM sequence: TAG
ttggagttgtttagaagtgt

SEQ ID NO: 110974 - DNA, 20 bp, Artificial Sequence
  Description of Artificial Sequence: Synthetic oligonucleotide
  Target: LAMA2; (-) strand; PAM type: NRG; PAM sequence: AAG
actgtcttggagttgtttag

SEQ ID NO: 110975 - DNA, 20 bp, Artificial Sequence
  Description of Artificial Sequence: Synthetic oligonucleotide
  Target: LAMA2; (-) strand; PAM type: NRG; PAM sequence: TAG
cttactgtcttggagttgtt

SEQ ID NO: 110976 - DNA, 20 bp, Artificial Sequence
  Description of Artificial Sequence: Synthetic oligonucleotide
  Target: LAMA2; (-) strand; PAM type: NRG; PAM sequence: GAG
accttgaacttactgtcttg

SEQ ID NO: 110977 - DNA, 20 bp, Artificial Sequence
  Description of Artificial Sequence: Synthetic oligonucleotide
  Target: LAMA2; (-) strand; PAM type: NRG; PAM sequence: TGG
tcaccttgaacttactgtct

SEQ ID NO: 110978 - DNA, 20 bp, Artificial Sequence
  Description of Artificial Sequence: Synthetic oligonucleotide
  Target: LAMA2; (-) strand; PAM type: NRG; PAM sequence: CAG
tttctaggttttttttcagt

SEQ ID NO: 110979 - DNA, 20 bp, Artificial Sequence
  Description of Artificial Sequence: Synthetic oligonucleotide
  Target: LAMA2; (-) strand; PAM type: NRG; PAM sequence: CAG
ttgttttctaggtttttttt

SEQ ID NO: 110980 - DNA, 20 bp, Artificial Sequence
  Description of Artificial Sequence: Synthetic oligonucleotide
  Target: LAMA2; (-) strand; PAM type: NRG; PAM sequence: AGG
taatctttttgttgttttct

SEQ ID NO: 110981 - DNA, 20 bp, Artificial Sequence
  Description of Artificial Sequence: Synthetic oligonucleotide
  Target: LAMA2; (-) strand; PAM type: NRG; PAM sequence: TAG
ctaatctttttgttgttttc

SEQ ID NO: 110982 - DNA, 20 bp, Artificial Sequence
  Description of Artificial Sequence: Synthetic oligonucleotide
  Target: LAMA2; (-) strand; PAM type: NRG; PAM sequence: CAG
tagctgaatatatgttttct

SEQ ID NO: 110983 - DNA, 20 bp, Artificial Sequence
  Description of Artificial Sequence: Synthetic oligonucleotide
  Target: LAMA2; (-) strand; PAM type: NRG; PAM sequence: TAG
actgcctggctttcatattc

SEQ ID NO: 110984 - DNA, 20 bp, Artificial Sequence
  Description of Artificial Sequence: Synthetic oligonucleotide
  Target: LAMA2; (-) strand; PAM type: NRG; PAM sequence: TGG
cacatgtcaacgatactgcc

SEQ ID NO: 110985 - DNA, 20 bp, Artificial Sequence
  Description of Artificial Sequence: Synthetic oligonucleotide
  Target: LAMA2; (-) strand; PAM type: NRG; PAM sequence: TGG
tcaaaccttgaagtaacatc

SEQ ID NO: 110986 - DNA, 20 bp, Artificial Sequence
  Description of Artificial Sequence: Synthetic oligonucleotide
  Target: LAMA2; (-) strand; PAM type: NRG; PAM sequence: AAG
acataaaacttcaaaccttg

SEQ ID NO: 110987 - DNA, 20 bp, Artificial Sequence
  Description of Artificial Sequence: Synthetic oligonucleotide
  Target: LAMA2; (-) strand; PAM type: NRG; PAM sequence: TGG
agtagaggctttttccatgt

SEQ ID NO: 110988 - DNA, 20 bp, Artificial Sequence
  Description of Artificial Sequence: Synthetic oligonucleotide
  Target: LAMA2; (-) strand; PAM type: NRG; PAM sequence: AGG
agtaacactgaacatagtag

SEQ ID NO: 110989 - DNA, 20 bp, Artificial Sequence
  Description of Artificial Sequence: Synthetic oligonucleotide
  Target: LAMA2; (-) strand; PAM type: NRG; PAM sequence: GAG
aagtaacactgaacatagta

SEQ ID NO: 110990 - DNA, 20 bp, Artificial Sequence
  Description of Artificial Sequence: Synthetic oligonucleotide
  Target: LAMA2; (-) strand; PAM type: NRG; PAM sequence: TAG
gaaagtaacactgaacatag

SEQ ID NO: 110991 - DNA, 20 bp, Artificial Sequence
  Description of Artificial Sequence: Synthetic oligonucleotide
  Target: LAMA2; (-) strand; PAM type: NRG; PAM sequence: TAG
acggaaagtaacactgaaca

SEQ ID NO: 110992 - DNA, 20 bp, Artificial Sequence
  Description of Artificial Sequence: Synthetic oligonucleotide
  Target: LAMA2; (-) strand; PAM type: NRG; PAM sequence: AAG
gtctttgtgtaccttacgga

SEQ ID NO: 110993 - DNA, 20 bp, Artificial Sequence
  Description of Artificial Sequence: Synthetic oligonucleotide
  Target: LAMA2; (-) strand; PAM type: NRG; PAM sequence: CGG
attcgtctttgtgtacctta

SEQ ID NO: 110994 - DNA, 20 bp, Artificial Sequence
  Description of Artificial Sequence: Synthetic oligonucleotide
  Target: LAMA2; (-) strand; PAM type: NRG; PAM sequence: AAG
tttataaactttgtgagtga

SEQ ID NO: 110995 - DNA, 20 bp, Artificial Sequence
  Description of Artificial Sequence: Synthetic oligonucleotide
  Target: LAMA2; (-) strand; PAM type: NRG; PAM sequence: GAG
tactattttataaactttgt

SEQ ID NO: 110996 - DNA, 20 bp, Artificial Sequence
  Description of Artificial Sequence: Synthetic oligonucleotide
  Target: LAMA2; (-) strand; PAM type: NRG; PAM sequence: AGG
acattctgcattgtgtgaca

SEQ ID NO: 110997 - DNA, 20 bp, Artificial Sequence
  Description of Artificial Sequence: Synthetic oligonucleotide
  Target: LAMA2; (-) strand; PAM type: NRG; PAM sequence: AAG
aacattctgcattgtgtgac

SEQ ID NO: 110998 - DNA, 20 bp, Artificial Sequence
  Description of Artificial Sequence: Synthetic oligonucleotide
  Target: LAMA2; (-) strand; PAM type: NRG; PAM sequence: TGG
ttctcacggcttctataatg

SEQ ID NO: 110999 - DNA, 20 bp, Artificial Sequence
  Description of Artificial Sequence: Synthetic oligonucleotide
  Target: LAMA2; (-) strand; PAM type: NRG; PAM sequence: CGG
aacttttatgtcacttctca

SEQ ID NO: 111000 - DNA, 20 bp, Artificial Sequence
  Description of Artificial Sequence: Synthetic oligonucleotide
  Target: LAMA2; (-) strand; PAM type: NRG; PAM sequence: TAG
ctagaggtgattgttctttc

SEQ ID NO: 111001 - DNA, 20 bp, Artificial Sequence
  Description of Artificial Sequence: Synthetic oligonucleotide
  Target: LAMA2; (-) strand; PAM type: NRG; PAM sequence: AGG
aaatcttcaggccctactag

SEQ ID NO: 111002 - DNA, 20 bp, Artificial Sequence
  Description of Artificial Sequence: Synthetic oligonucleotide
  Target: LAMA2; (-) strand; PAM type: NRG; PAM sequence: GAG
gaaatcttcaggccctacta

SEQ ID NO: 111003 - DNA, 20 bp, Artificial Sequence
  Description of Artificial Sequence: Synthetic oligonucleotide
  Target: LAMA2; (-) strand; PAM type: NRG; PAM sequence: TAG
aggaaatcttcaggccctac

SEQ ID NO: 111004 - DNA, 20 bp, Artificial Sequence
  Description of Artificial Sequence: Synthetic oligonucleotide
  Target: LAMA2; (-) strand; PAM type: NRG; PAM sequence: AGG
cttcccttcaggaaatcttc

SEQ ID NO: 111005 - DNA, 20 bp, Artificial Sequence
  Description of Artificial Sequence: Synthetic oligonucleotide
  Target: LAMA2; (-) strand; PAM type: NRG; PAM sequence: CAG
ccttcccttcaggaaatctt

SEQ ID NO: 111006 - DNA, 20 bp, Artificial Sequence
  Description of Artificial Sequence: Synthetic oligonucleotide
  Target: LAMA2; (-) strand; PAM type: NRG; PAM sequence: AGG
tggctcaaatccttcccttc

SEQ ID NO: 111007 - DNA, 20 bp, Artificial Sequence
  Description of Artificial Sequence: Synthetic oligonucleotide
  Target: LAMA2; (-) strand; PAM type: NRG; PAM sequence: CAG
ctggctcaaatccttccctt

SEQ ID NO: 111008 - DNA, 20 bp, Artificial Sequence
  Description of Artificial Sequence: Synthetic oligonucleotide
  Target: LAMA2; (-) strand; PAM type: NRG; PAM sequence: TGG
cactatcccacctcaatgcc

SEQ ID NO: 111009 - DNA, 20 bp, Artificial Sequence
  Description of Artificial Sequence: Synthetic oligonucleotide
  Target: LAMA2; (-) strand; PAM type: NRG; PAM sequence: CAG
tgactccacccccaactccc

SEQ ID NO: 111010 - DNA, 20 bp, Artificial Sequence
  Description of Artificial Sequence: Synthetic oligonucleotide
  Target: LAMA2; (-) strand; PAM type: NRG; PAM sequence: CAG
tttaagtcattccctcttct

SEQ ID NO: 111011 - DNA, 20 bp, Artificial Sequence
  Description of Artificial Sequence: Synthetic oligonucleotide
  Target: LAMA2; (-) strand; PAM type: NRG; PAM sequence: AAG
ttctcccactgccttggttt

SEQ ID NO: 111012 - DNA, 20 bp, Artificial Sequence
  Description of Artificial Sequence: Synthetic oligonucleotide
  Target: LAMA2; (-) strand; PAM type: NRG; PAM sequence: TGG
acttccttctcccactgcct

SEQ ID NO: 111013 - DNA, 20 bp, Artificial Sequence
  Description of Artificial Sequence: Synthetic oligonucleotide
  Target: LAMA2; (-) strand; PAM type: NRG; PAM sequence: TGG
ctggacttctttttcctaaa

SEQ ID NO: 111014 - DNA, 20 bp, Artificial Sequence
  Description of Artificial Sequence: Synthetic oligonucleotide
  Target: LAMA2; (-) strand; PAM type: NRG; PAM sequence: TGG
atcaattactctgggcaaac

SEQ ID NO: 111015 - DNA, 20 bp, Artificial Sequence
  Description of Artificial Sequence: Synthetic oligonucleotide
  Target: LAMA2; (-) strand; PAM type: NRG; PAM sequence: GGG
tttcctttatcaattactct

SEQ ID NO: 111016 - DNA, 20 bp, Artificial Sequence
  Description of Artificial Sequence: Synthetic oligonucleotide
  Target: LAMA2; (-) strand; PAM type: NRG; PAM sequence: TGG
gtttcctttatcaattactc

SEQ ID NO: 111017 - DNA, 20 bp, Artificial Sequence
  Description of Artificial Sequence: Synthetic oligonucleotide
  Target: LAMA2; (-) strand; PAM type: NRG; PAM sequence: TGG
ctggcctctgttgatctttc

SEQ ID NO: 111018 - DNA, 20 bp, Artificial Sequence
  Description of Artificial Sequence: Synthetic oligonucleotide
  Target: LAMA2; (-) strand; PAM type: NRG; PAM sequence: TGG
attgaaggcctgacgagacc

SEQ ID NO: 111019 - DNA, 20 bp, Artificial Sequence
  Description of Artificial Sequence: Synthetic oligonucleotide
  Target: LAMA2; (-) strand; PAM type: NRG; PAM sequence: GAG
ctgattattgaaggcctgac

SEQ ID NO: 111020 - DNA, 20 bp, Artificial Sequence
  Description of Artificial Sequence: Synthetic oligonucleotide
  Target: LAMA2; (-) strand; PAM type: NRG; PAM sequence: AGG
attgcttaactgattattga

SEQ ID NO: 111021 - DNA, 20 bp, Artificial Sequence
  Description of Artificial Sequence: Synthetic oligonucleotide
  Target: LAMA2; (-) strand; PAM type: NRG; PAM sequence: AAG
aattgcttaactgattattg

SEQ ID NO: 111022 - DNA, 20 bp, Artificial Sequence
  Description of Artificial Sequence: Synthetic oligonucleotide
  Target: LAMA2; (-) strand; PAM type: NRG; PAM sequence: CAG
gtgaggcttatcccaagtac

SEQ ID NO: 111023 - DNA, 20 bp, Artificial Sequence
  Description of Artificial Sequence: Synthetic oligonucleotide
  Target: LAMA2; (-) strand; PAM type: NRG; PAM sequence: AAG
taaccagtgaggcttatccc

SEQ ID NO: 111024 - DNA, 20 bp, Artificial Sequence
  Description of Artificial Sequence: Synthetic oligonucleotide
  Target: LAMA2; (-) strand; PAM type: NRG; PAM sequence: AGG
tcagcttatcctaaccagtg

SEQ ID NO: 111025 - DNA, 20 bp, Artificial Sequence
  Description of Artificial Sequence: Synthetic oligonucleotide
  Target: LAMA2; (-) strand; PAM type: NRG; PAM sequence: GAG
ttcagcttatcctaaccagt

SEQ ID NO: 111026 - DNA, 20 bp, Artificial Sequence
  Description of Artificial Sequence: Synthetic oligonucleotide
  Target: LAMA2; (-) strand; PAM type: NRG; PAM sequence: CAG
agctttcagcttatcctaac

SEQ ID NO: 111027 - DNA, 20 bp, Artificial Sequence
  Description of Artificial Sequence: Synthetic oligonucleotide
  Target: LAMA2; (-) strand; PAM type: NRG; PAM sequence: CAG
tgttccatgctcaaagcttt

SEQ ID NO: 111028 - DNA, 20 bp, Artificial Sequence
  Description of Artificial Sequence: Synthetic oligonucleotide
  Target: LAMA2; (-) strand; PAM type: NRG; PAM sequence: AAG
tatactgtgttccatgctca

SEQ ID NO: 111029 - DNA, 20 bp, Artificial Sequence
  Description of Artificial Sequence: Synthetic oligonucleotide
  Target: LAMA2; (-) strand; PAM type: NRG; PAM sequence: CAG
ggatttatatttaaaaagca

SEQ ID NO: 111030 - DNA, 20 bp, Artificial Sequence
  Description of Artificial Sequence: Synthetic oligonucleotide
  Target: LAMA2; (-) strand; PAM type: NRG; PAM sequence: AAG
cttctggatttatatttaaa

SEQ ID NO: 111031 - DNA, 20 bp, Artificial Sequence
  Description of Artificial Sequence: Synthetic oligonucleotide
  Target: LAMA2; (-) strand; PAM type: NRG; PAM sequence: TGG
tctaccccatacactgcttc

SEQ ID NO: 111032 - DNA, 20 bp, Artificial Sequence
  Description of Artificial Sequence: Synthetic oligonucleotide
  Target: LAMA2; (-) strand; PAM type: NRG; PAM sequence: GGG
ctcttgccacagctatagtt

SEQ ID NO: 111033 - DNA, 20 bp, Artificial Sequence
  Description of Artificial Sequence: Synthetic oligonucleotide
  Target: LAMA2; (-) strand; PAM type: NRG; PAM sequence: TGG
tctcttgccacagctatagt

SEQ ID NO: 111034 - DNA, 20 bp, Artificial Sequence
  Description of Artificial Sequence: Synthetic oligonucleotide
  Target: LAMA2; (-) strand; PAM type: NRG; PAM sequence: TAG
cttttctcttgccacagcta

SEQ ID NO: 111035 - DNA, 20 bp, Artificial Sequence
  Description of Artificial Sequence: Synthetic oligonucleotide
  Target: LAMA2; (-) strand; PAM type: NRG; PAM sequence: CAG
gttcttcttttctcttgcca

SEQ ID NO: 111036 - DNA, 20 bp, Artificial Sequence
  Description of Artificial Sequence: Synthetic oligonucleotide
  Target: LAMA2; (-) strand; PAM type: NRG; PAM sequence: TGG
aacattgcaaaatataggag

SEQ ID NO: 111037 - DNA, 20 bp, Artificial Sequence
  Description of Artificial Sequence: Synthetic oligonucleotide
  Target: LAMA2; (-) strand; PAM type: NRG; PAM sequence: GAG
gttaacattgcaaaatatag

SEQ ID NO: 111038 - DNA, 20 bp, Artificial Sequence
  Description of Artificial Sequence: Synthetic oligonucleotide
  Target: LAMA2; (-) strand; PAM type: NRG; PAM sequence: AGG
aagttaacattgcaaaatat

SEQ ID NO: 111039 - DNA, 20 bp, Artificial Sequence
  Description of Artificial Sequence: Synthetic oligonucleotide
  Target: LAMA2; (-) strand; PAM type: NRG; PAM sequence: TAG
caagttaacattgcaaaata

SEQ ID NO: 111040 - DNA, 20 bp, Artificial Sequence
  Description of Artificial Sequence: Synthetic oligonucleotide
  Target: LAMA2; (-) strand; PAM type: NRG; PAM sequence: AAG
ttactcttattgcttcttcc

SEQ ID NO: 111041 - DNA, 20 bp, Artificial Sequence
  Description of Artificial Sequence: Synthetic oligonucleotide
  Target: LAMA2; (-) strand; PAM type: NRG; PAM sequence: GAG
cagaaaatgtggctaaatgt

SEQ ID NO: 111042 - DNA, 20 bp, Artificial Sequence
  Description of Artificial Sequence: Synthetic oligonucleotide
  Target: LAMA2; (-) strand; PAM type: NRG; PAM sequence: TGG
gatgactaagtcagaaaatg

SEQ ID NO: 111043 - DNA, 20 bp, Artificial Sequence
  Description of Artificial Sequence: Synthetic oligonucleotide
  Target: LAMA2; (-) strand; PAM type: NRG; PAM sequence: CAG
tctccacttgatgactaagt

SEQ ID NO: 111044 - DNA, 20 bp, Artificial Sequence
  Description of Artificial Sequence: Synthetic oligonucleotide
  Target: LAMA2; (-) strand; PAM type: NRG; PAM sequence: AAG
gatttctccacttgatgact

SEQ ID NO: 111045 - DNA, 20 bp, Artificial Sequence
  Description of Artificial Sequence: Synthetic oligonucleotide
  Target: LAMA2; (-) strand; PAM type: NRG; PAM sequence: TAG
gaagaaataataaaaatgtc

SEQ ID NO: 111046 - DNA, 20 bp, Artificial Sequence
  Description of Artificial Sequence: Synthetic oligonucleotide
  Target: LAMA2; (-) strand; PAM type: NRG; PAM sequence: AAG
actcagaaatctttacaatg

SEQ ID NO: 111047 - DNA, 20 bp, Artificial Sequence
  Description of Artificial Sequence: Synthetic oligonucleotide
  Target: LAMA2; (-) strand; PAM type: NRG; PAM sequence: CAG
gtgaggaggggaaaagcact

SEQ ID NO: 111048 - DNA, 20 bp, Artificial Sequence
  Description of Artificial Sequence: Synthetic oligonucleotide
  Target: LAMA2; (-) strand; PAM type: NRG; PAM sequence: AAG
ccgttttgtgaggaggggaa

SEQ ID NO: 111049 - DNA, 20 bp, Artificial Sequence
  Description of Artificial Sequence: Synthetic oligonucleotide
  Target: LAMA2; (-) strand; PAM type: NRG; PAM sequence: GGG
tttcaccgttttgtgaggag

SEQ ID NO: 111050 - DNA, 20 bp, Artificial Sequence
  Description of Artificial Sequence: Synthetic oligonucleotide
  Target: LAMA2; (-) strand; PAM type: NRG; PAM sequence: GGG
atttcaccgttttgtgagga

SEQ ID NO: 111051 - DNA, 20 bp, Artificial Sequence
  Description of Artificial Sequence: Synthetic oligonucleotide
  Target: LAMA2; (-) strand; PAM type: NRG; PAM sequence: AGG
aatttcaccgttttgtgagg

SEQ ID NO: 111052 - DNA, 20 bp, Artificial Sequence
  Description of Artificial Sequence: Synthetic oligonucleotide
  Target: LAMA2; (-) strand; PAM type: NRG; PAM sequence: GAG
gaatttcaccgttttgtgag

SEQ ID NO: 111053 - DNA, 20 bp, Artificial Sequence
  Description of Artificial Sequence: Synthetic oligonucleotide
  Target: LAMA2; (-) strand; PAM type: NRG; PAM sequence: AGG
ctgaatttcaccgttttgtg

SEQ ID NO: 111054 - DNA, 20 bp, Artificial Sequence
  Description of Artificial Sequence: Synthetic oligonucleotide
  Target: LAMA2; (-) strand; PAM type: NRG; PAM sequence: GAG
tctgaatttcaccgttttgt

SEQ ID NO: 111055 - DNA, 20 bp, Artificial Sequence
  Description of Artificial Sequence: Synthetic oligonucleotide
  Target: LAMA2; (-) strand; PAM type: NRG; PAM sequence: AGG
tttattttgtactttaagac

SEQ ID NO: 111056 - DNA, 20 bp, Artificial Sequence
  Description of Artificial Sequence: Synthetic oligonucleotide
  Target: LAMA2; (-) strand; PAM type: NRG; PAM sequence: CAG
ttttattttgtactttaaga

SEQ ID NO: 111057 - DNA, 20 bp, Artificial Sequence
  Description of Artificial Sequence: Synthetic oligonucleotide
  Target: LAMA2; (-) strand; PAM type: NRG; PAM sequence: AAG
tttcttttattttgtacttt

SEQ ID NO: 111058 - DNA, 20 bp, Artificial Sequence
  Description of Artificial Sequence: Synthetic oligonucleotide
  Target: LAMA2; (-) strand; PAM type: NRG; PAM sequence: CAG
caggcttgagccaccatgcc

SEQ ID NO: 111059 - DNA, 20 bp, Artificial Sequence
  Description of Artificial Sequence: Synthetic oligonucleotide
  Target: LAMA2; (-) strand; PAM type: NRG; PAM sequence: GAG
agtgttgggatgacaggctt

SEQ ID NO: 111060 - DNA, 20 bp, Artificial Sequence
  Description of Artificial Sequence: Synthetic oligonucleotide
  Target: LAMA2; (-) strand; PAM type: NRG; PAM sequence: AGG
tcccaaagtgttgggatgac

SEQ ID NO: 111061 - DNA, 20 bp, Artificial Sequence
  Description of Artificial Sequence: Synthetic oligonucleotide
  Target: LAMA2; (-) strand; PAM type: NRG; PAM sequence: CAG
ctcccaaagtgttgggatga

SEQ ID NO: 111062 - DNA, 20 bp, Artificial Sequence
  Description of Artificial Sequence: Synthetic oligonucleotide
  Target: LAMA2; (-) strand; PAM type: NRG; PAM sequence: GGG
cctcagcctcccaaagtgtt

SEQ ID NO: 111063 - DNA, 20 bp, Artificial Sequence
  Description of Artificial Sequence: Synthetic oligonucleotide
  Target: LAMA2; (-) strand; PAM type: NRG; PAM sequence: TGG
gcctcagcctcccaaagtgt

SEQ ID NO: 111064 - DNA, 20 bp, Artificial Sequence
  Description of Artificial Sequence: Synthetic oligonucleotide
  Target: LAMA2; (-) strand; PAM type: NRG; PAM sequence: AAG
ctgcctgcctcagcctccca

SEQ ID NO: 111065 - DNA, 20 bp, Artificial Sequence
  Description of Artificial Sequence: Synthetic oligonucleotide
  Target: LAMA2; (-) strand; PAM type: NRG; PAM sequence: CAG
ttcatgcaatctgcctgcct

SEQ ID NO: 111066 - DNA, 20 bp, Artificial Sequence
  Description of Artificial Sequence: Synthetic oligonucleotide
  Target: LAMA2; (-) strand; PAM type: NRG; PAM sequence: GAG
caggctggtctcaaactcct

SEQ ID NO: 111067 - DNA, 20 bp, Artificial Sequence
  Description of Artificial Sequence: Synthetic oligonucleotide
  Target: LAMA2; (-) strand; PAM type: NRG; PAM sequence: TGG
ttttgtgacatggcccaggc

SEQ ID NO: 111068 - DNA, 20 bp, Artificial Sequence
  Description of Artificial Sequence: Synthetic oligonucleotide
  Target: LAMA2; (-) strand; PAM type: NRG; PAM sequence: AGG
gtggttttgtgacatggccc

SEQ ID NO: 111069 - DNA, 20 bp, Artificial Sequence
  Description of Artificial Sequence: Synthetic oligonucleotide
  Target: LAMA2; (-) strand; PAM type: NRG; PAM sequence: CAG
tgtggttttgtgacatggcc

SEQ ID NO: 111070 - DNA, 20 bp, Artificial Sequence
  Description of Artificial Sequence: Synthetic oligonucleotide
  Target: LAMA2; (-) strand; PAM type: NRG; PAM sequence: TGG
agagatgtggttttgtgaca

SEQ ID NO: 111071 - DNA, 20 bp, Artificial Sequence
  Description of Artificial Sequence: Synthetic oligonucleotide
  Target: LAMA2; (-) strand; PAM type: NRG; PAM sequence: TGG
ttcaattttttgtagagatg

SEQ ID NO: 111072 - DNA, 20 bp, Artificial Sequence
  Description of Artificial Sequence: Synthetic oligonucleotide
  Target: LAMA2; (-) strand; PAM type: NRG; PAM sequence: GAG
taatttttcaattttttgta

SEQ ID NO: 111073 - DNA, 20 bp, Artificial Sequence
  Description of Artificial Sequence: Synthetic oligonucleotide
  Target: LAMA2; (-) strand; PAM type: NRG; PAM sequence: TAG
ggtaatttttcaattttttg

SEQ ID NO: 111074 - DNA, 20 bp, Artificial Sequence
  Description of Artificial Sequence: Synthetic oligonucleotide
  Target: LAMA2; (-) strand; PAM type: NRG; PAM sequence: AGG
tataggcatgtaccatgccc

SEQ ID NO: 111075 - DNA, 20 bp, Artificial Sequence
  Description of Artificial Sequence: Synthetic oligonucleotide
  Target: LAMA2; (-) strand; PAM type: NRG; PAM sequence: CAG
ctataggcatgtaccatgcc

SEQ ID NO: 111076 - DNA, 20 bp, Artificial Sequence
  Description of Artificial Sequence: Synthetic oligonucleotide
  Target: LAMA2; (-) strand; PAM type: NRG; PAM sequence: AGG
ccccaagtagctgggactat

SEQ ID NO: 111077 - DNA, 20 bp, Artificial Sequence
  Description of Artificial Sequence: Synthetic oligonucleotide
  Target: LAMA2; (-) strand; PAM type: NRG; PAM sequence: TAG
tccccaagtagctgggacta

SEQ ID NO: 111078 - DNA, 20 bp, Artificial Sequence
  Description of Artificial Sequence: Synthetic oligonucleotide
  Target: LAMA2; (-) strand; PAM type: NRG; PAM sequence: GGG
cctcatctccccaagtagct

SEQ ID NO: 111079 - DNA, 20 bp, Artificial Sequence
  Description of Artificial Sequence: Synthetic oligonucleotide
  Target: LAMA2; (-) strand; PAM type: NRG; PAM sequence: TGG
acctcatctccccaagtagc

SEQ ID NO: 111080 - DNA, 20 bp, Artificial Sequence
  Description of Artificial Sequence: Synthetic oligonucleotide
  Target: LAMA2; (-) strand; PAM type: NRG; PAM sequence: TAG
tcccacctcatctccccaag

SEQ ID NO: 111081 - DNA, 20 bp, Artificial Sequence
  Description of Artificial Sequence: Synthetic oligonucleotide
  Target: LAMA2; (-) strand; PAM type: NRG; PAM sequence: AAG
tcctcccacctcatctcccc

SEQ ID NO: 111082 - DNA, 20 bp, Artificial Sequence
  Description of Artificial Sequence: Synthetic oligonucleotide
  Target: LAMA2; (-) strand; PAM type: NRG; PAM sequence: AAG
gcagcctcatcctccagagc

SEQ ID NO: 111083 - DNA, 20 bp, Artificial Sequence
  Description of Artificial Sequence: Synthetic oligonucleotide
  Target: LAMA2; (-) strand; PAM type: NRG; PAM sequence: GAG
cactgcagcctcatcctcca

SEQ ID NO: 111084 - DNA, 20 bp, Artificial Sequence
  Description of Artificial Sequence: Synthetic oligonucleotide
  Target: LAMA2; (-) strand; PAM type: NRG; PAM sequence: CAG
ctcactgcagcctcatcctc

SEQ ID NO: 111085 - DNA, 20 bp, Artificial Sequence
  Description of Artificial Sequence: Synthetic oligonucleotide
  Target: LAMA2; (-) strand; PAM type: NRG; PAM sequence: CAG
ggtgcaaacatggctcactg

SEQ ID NO: 111086 - DNA, 20 bp, Artificial Sequence
  Description of Artificial Sequence: Synthetic oligonucleotide
  Target: LAMA2; (-) strand; PAM type: NRG; PAM sequence: TGG
ggagtgccatggtgcaaaca

SEQ ID NO: 111087 - DNA, 20 bp, Artificial Sequence
  Description of Artificial Sequence: Synthetic oligonucleotide
  Target: LAMA2; (-) strand; PAM type: NRG; PAM sequence: TGG
ccacccaggctggagtgcca

SEQ ID NO: 111088 - DNA, 20 bp, Artificial Sequence
  Description of Artificial Sequence: Synthetic oligonucleotide
  Target: LAMA2; (-) strand; PAM type: NRG; PAM sequence: GAG
tctatttgccacccaggctg

SEQ ID NO: 111089 - DNA, 20 bp, Artificial Sequence
  Description of Artificial Sequence: Synthetic oligonucleotide
  Target: LAMA2; (-) strand; PAM type: NRG; PAM sequence: TGG
tttctatttgccacccaggc

SEQ ID NO: 111090 - DNA, 20 bp, Artificial Sequence
  Description of Artificial Sequence: Synthetic oligonucleotide
  Target: LAMA2; (-) strand; PAM type: NRG; PAM sequence: AGG
agggtttctatttgccaccc

SEQ ID NO: 111091 - DNA, 20 bp, Artificial Sequence
  Description of Artificial Sequence: Synthetic oligonucleotide
  Target: LAMA2; (-) strand; PAM type: NRG; PAM sequence: CAG
cagggtttctatttgccacc

SEQ ID NO: 111092 - DNA, 20 bp, Artificial Sequence
  Description of Artificial Sequence: Synthetic oligonucleotide
  Target: LAMA2; (-) strand; PAM type: NRG; PAM sequence: GGG
tttttttttggggggggaca

SEQ ID NO: 111093 - DNA, 20 bp, Artificial Sequence
  Description of Artificial Sequence: Synthetic oligonucleotide
  Target: LAMA2; (-) strand; PAM type: NRG; PAM sequence: AGG
ctttttttttggggggggac

SEQ ID NO: 111094 - DNA, 20 bp, Artificial Sequence
  Description of Artificial Sequence: Synthetic oligonucleotide
  Target: LAMA2; (-) strand; PAM type: NRG; PAM sequence: CAG
tctttttttttgggggggga

SEQ ID NO: 111095 - DNA, 20 bp, Artificial Sequence
  Description of Artificial Sequence: Synthetic oligonucleotide
  Target: LAMA2; (-) strand; PAM type: NRG; PAM sequence: GGG
cttctctttttttttggggg

SEQ ID NO: 111096 - DNA, 20 bp, Artificial Sequence
  Description of Artificial Sequence: Synthetic oligonucleotide
  Target: LAMA2; (-) strand; PAM type: NRG; PAM sequence: GGG
tcttctctttttttttgggg

SEQ ID NO: 111097 - DNA, 20 bp, Artificial Sequence
  Description of Artificial Sequence: Synthetic oligonucleotide
  Target: LAMA2; (-) strand; PAM type: NRG; PAM sequence: GGG
ttcttctctttttttttggg

SEQ ID NO: 111098 - DNA, 20 bp, Artificial Sequence
  Description of Artificial Sequence: Synthetic oligonucleotide
  Target: LAMA2; (-) strand; PAM type: NRG; PAM sequence: GGG
tttcttctctttttttttgg

SEQ ID NO: 111099 - DNA, 20 bp, Artificial Sequence
  Description of Artificial Sequence: Synthetic oligonucleotide
  Target: LAMA2; (-) strand; PAM type: NRG; PAM sequence: GGG
ttttcttctctttttttttg

SEQ ID NO: 111100 - DNA, 20 bp, Artificial Sequence
  Description of Artificial Sequence: Synthetic oligonucleotide
  Target: LAMA2; (-) strand; PAM type: NRG; PAM sequence: GGG
tttttcttctcttttttttt

SEQ ID NO: 111101 - DNA, 20 bp, Artificial Sequence
  Description of Artificial Sequence: Synthetic oligonucleotide
  Target: LAMA2; (-) strand; PAM type: NRG; PAM sequence: TGG
ttttttcttctctttttttt

SEQ ID NO: 111102 - DNA, 20 bp, Artificial Sequence
  Description of Artificial Sequence: Synthetic oligonucleotide
  Target: LAMA2; (-) strand; PAM type: NRG; PAM sequence: TGG
gggaatttctttgaaatgca

SEQ ID NO: 111103 - DNA, 20 bp, Artificial Sequence
  Description of Artificial Sequence: Synthetic oligonucleotide
  Target: LAMA2; (-) strand; PAM type: NRG; PAM sequence: GGG
ttccatttccaaaactgatt

SEQ ID NO: 111104 - DNA, 20 bp, Artificial Sequence
  Description of Artificial Sequence: Synthetic oligonucleotide
  Target: LAMA2; (-) strand; PAM type: NRG; PAM sequence: TGG
attccatttccaaaactgat

SEQ ID NO: 111105 - DNA, 20 bp, Artificial Sequence
  Description of Artificial Sequence: Synthetic oligonucleotide
  Target: LAMA2; (-) strand; PAM type: NRG; PAM sequence: AGG
ctaacgtcttacaaaaaata

SEQ ID NO: 111106 - DNA, 20 bp, Artificial Sequence
  Description of Artificial Sequence: Synthetic oligonucleotide
  Target: LAMA2; (-) strand; PAM type: NRG; PAM sequence: AAG
tctaacgtcttacaaaaaat

SEQ ID NO: 111107 - DNA, 20 bp, Artificial Sequence
  Description of Artificial Sequence: Synthetic oligonucleotide
  Target: LAMA2; (-) strand; PAM type: NRG; PAM sequence: TGG
aaactcatttggaaaaaaat

SEQ ID NO: 111108 - DNA, 20 bp, Artificial Sequence
  Description of Artificial Sequence: Synthetic oligonucleotide
  Target: LAMA2; (-) strand; PAM type: NRG; PAM sequence: TGG
catttagtacaaaactcatt

SEQ ID NO: 111109 - DNA, 20 bp, Artificial Sequence
  Description of Artificial Sequence: Synthetic oligonucleotide
  Target: LAMA2; (-) strand; PAM type: NRG; PAM sequence: TAG
cagaaaatgtaatattcatt

SEQ ID NO: 111110 - DNA, 20 bp, Artificial Sequence
  Description of Artificial Sequence: Synthetic oligonucleotide
  Target: LAMA2; (-) strand; PAM type: NRG; PAM sequence: CAG
agatatccatatttacaaat

SEQ ID NO: 111111 - DNA, 20 bp, Artificial Sequence
  Description of Artificial Sequence: Synthetic oligonucleotide
  Target: LAMA2; (-) strand; PAM type: NRG; PAM sequence: CAG
gtatgtgttaaggtcatatc

SEQ ID NO: 111112 - DNA, 20 bp, Artificial Sequence
  Description of Artificial Sequence: Synthetic oligonucleotide
  Target: LAMA2; (-) strand; PAM type: NRG; PAM sequence: AGG
gtcatgtcaagtatgtgtta

SEQ ID NO: 111113 - DNA, 20 bp, Artificial Sequence
  Description of Artificial Sequence: Synthetic oligonucleotide
  Target: LAMA2; (-) strand; PAM type: NRG; PAM sequence: AAG
ggtcatgtcaagtatgtgtt

SEQ ID NO: 111114 - DNA, 20 bp, Artificial Sequence
  Description of Artificial Sequence: Synthetic oligonucleotide
  Target: LAMA2; (-) strand; PAM type: NRG; PAM sequence: AAG
tttaatgttttggtcatgtc

SEQ ID NO: 111115 - DNA, 20 bp, Artificial Sequence
  Description of Artificial Sequence: Synthetic oligonucleotide
  Target: LAMA2; (-) strand; PAM type: NRG; PAM sequence: TGG
aataaatgtctttaatgttt

SEQ ID NO: 111116 - DNA, 20 bp, Artificial Sequence
  Description of Artificial Sequence: Synthetic oligonucleotide
  Target: LAMA2; (-) strand; PAM type: NRG; PAM sequence: AAG
agaatcaacaaacccagaga

SEQ ID NO: 111117 - DNA, 20 bp, Artificial Sequence
  Description of Artificial Sequence: Synthetic oligonucleotide
  Target: LAMA2; (-) strand; PAM type: NRG; PAM sequence: GAG
tttcagaatcaacaaaccca

SEQ ID NO: 111118 - DNA, 20 bp, Artificial Sequence
  Description of Artificial Sequence: Synthetic oligonucleotide
  Target: LAMA2; (-) strand; PAM type: NRG; PAM sequence: CAG
aatttcagaatcaacaaacc

SEQ ID NO: 111119 - DNA, 20 bp, Artificial Sequence
  Description of Artificial Sequence: Synthetic oligonucleotide
  Target: LAMA2; (-) strand; PAM type: NRG; PAM sequence: CAG
gagtatcagccactcaattt

SEQ ID NO: 111120 - DNA, 20 bp, Artificial Sequence
  Description of Artificial Sequence: Synthetic oligonucleotide
  Target: LAMA2; (-) strand; PAM type: NRG; PAM sequence: CAG
tcattcatttaaaggagtat

SEQ ID NO: 111121 - DNA, 20 bp, Artificial Sequence
  Description of Artificial Sequence: Synthetic oligonucleotide
  Target: LAMA2; (-) strand; PAM type: NRG; PAM sequence: GAG
agtaggtcattcatttaaag

SEQ ID NO: 111122 - DNA, 20 bp, Artificial Sequence
  Description of Artificial Sequence: Synthetic oligonucleotide
  Target: LAMA2; (-) strand; PAM type: NRG; PAM sequence: AGG
taagtaggtcattcatttaa

SEQ ID NO: 111123 - DNA, 20 bp, Artificial Sequence
  Description of Artificial Sequence: Synthetic oligonucleotide
  Target: LAMA2; (-) strand; PAM type: NRG; PAM sequence: AAG
gtaagtaggtcattcattta

SEQ ID NO: 111124 - DNA, 20 bp, Artificial Sequence
  Description of Artificial Sequence: Synthetic oligonucleotide
  Target: LAMA2; (-) strand; PAM type: NRG; PAM sequence: AGG
gcatttttcatccagtaagt

SEQ ID NO: 111125 - DNA, 20 bp, Artificial Sequence
  Description of Artificial Sequence: Synthetic oligonucleotide
  Target: LAMA2; (-) strand; PAM type: NRG; PAM sequence: TAG
tgcatttttcatccagtaag

SEQ ID NO: 111126 - DNA, 20 bp, Artificial Sequence
  Description of Artificial Sequence: Synthetic oligonucleotide
  Target: LAMA2; (-) strand; PAM type: NRG; PAM sequence: AAG
cactgcatttttcatccagt

SEQ ID NO: 111127 - DNA, 20 bp, Artificial Sequence
  Description of Artificial Sequence: Synthetic oligonucleotide
  Target: LAMA2; (-) strand; PAM type: NRG; PAM sequence: CAG
ttttcactgcatttttcatc

SEQ ID NO: 111128 - DNA, 20 bp, Artificial Sequence
  Description of Artificial Sequence: Synthetic oligonucleotide
  Target: LAMA2; (-) strand; PAM type: NRG; PAM sequence: TGG
tatcccattattatatctat

SEQ ID NO: 111129 - DNA, 20 bp, Artificial Sequence
  Description of Artificial Sequence: Synthetic oligonucleotide
  Target: LAMA2; (-) strand; PAM type: NRG; PAM sequence: GAG
tgatgaactcaaacattatt

SEQ ID NO: 111130 - DNA, 20 bp, Artificial Sequence
  Description of Artificial Sequence: Synthetic oligonucleotide
  Target: LAMA2; (-) strand; PAM type: NRG; PAM sequence: CAG
aatactgcaacattatttac

SEQ ID NO: 111131 - DNA, 20 bp, Artificial Sequence
  Description of Artificial Sequence: Synthetic oligonucleotide
  Target: LAMA2; (-) strand; PAM type: NRG; PAM sequence: AGG
ctaagcattaagtatcttta

SEQ ID NO: 111132 - DNA, 20 bp, Artificial Sequence
  Description of Artificial Sequence: Synthetic oligonucleotide
  Target: LAMA2; (-) strand; PAM type: NRG; PAM sequence: AAG
actaagcattaagtatcttt

SEQ ID NO: 111133 - DNA, 20 bp, Artificial Sequence
  Description of Artificial Sequence: Synthetic oligonucleotide
  Target: LAMA2; (-) strand; PAM type: NRG; PAM sequence: AAG
aagaaaaatcactaagcatt

SEQ ID NO: 111134 - DNA, 20 bp, Artificial Sequence
  Description of Artificial Sequence: Synthetic oligonucleotide
  Target: LAMA2; (-) strand; PAM type: NRG; PAM sequence: AAG
acatctaaagaaaaatcact

SEQ ID NO: 111135 - DNA, 20 bp, Artificial Sequence
  Description of Artificial Sequence: Synthetic oligonucleotide
  Target: LAMA2; (-) strand; PAM type: NRG; PAM sequence: AAG
gatccttagtaagacatcta

SEQ ID NO: 111136 - DNA, 20 bp, Artificial Sequence
  Description of Artificial Sequence: Synthetic oligonucleotide
  Target: LAMA2; (-) strand; PAM type: NRG; PAM sequence: AAG
ttctaatgcagatccttagt

SEQ ID NO: 111137 - DNA, 20 bp, Artificial Sequence
  Description of Artificial Sequence: Synthetic oligonucleotide
  Target: LAMA2; (-) strand; PAM type: NRG; PAM sequence: TAG
ttatttctaatgcagatcct

SEQ ID NO: 111138 - DNA, 20 bp, Artificial Sequence
  Description of Artificial Sequence: Synthetic oligonucleotide
  Target: LAMA2; (-) strand; PAM type: NRG; PAM sequence: CAG
aattattgttatttctaatg

SEQ ID NO: 111139 - DNA, 20 bp, Artificial Sequence
  Description of Artificial Sequence: Synthetic oligonucleotide
  Target: LAMA2; (-) strand; PAM type: NRG; PAM sequence: TGG
aaacatccttttagaatgtt

SEQ ID NO: 111140 - DNA, 20 bp, Artificial Sequence
  Description of Artificial Sequence: Synthetic oligonucleotide
  Target: LAMA2; (-) strand; PAM type: NRG; PAM sequence: TAG
ctgaaattcaaacatccttt

SEQ ID NO: 111141 - DNA, 20 bp, Artificial Sequence
  Description of Artificial Sequence: Synthetic oligonucleotide
  Target: LAMA2; (-) strand; PAM type: NRG; PAM sequence: AAG
atgtcactcttgtaagagga

SEQ ID NO: 111142 - DNA, 20 bp, Artificial Sequence
  Description of Artificial Sequence: Synthetic oligonucleotide
  Target: LAMA2; (-) strand; PAM type: NRG; PAM sequence: AGG
ggatatgtcactcttgtaag

SEQ ID NO: 111143 - DNA, 20 bp, Artificial Sequence
  Description of Artificial Sequence: Synthetic oligonucleotide
  Target: LAMA2; (-) strand; PAM type: NRG; PAM sequence: GAG
aggatatgtcactcttgtaa

SEQ ID NO: 111144 - DNA, 20 bp, Artificial Sequence
  Description of Artificial Sequence: Synthetic oligonucleotide
  Target: LAMA2; (-) strand; PAM type: NRG; PAM sequence: AAG
ttaggatatgtcactcttgt

SEQ ID NO: 111145 - DNA, 20 bp, Artificial Sequence
  Description of Artificial Sequence: Synthetic oligonucleotide
  Target: LAMA2; (-) strand; PAM type: NRG; PAM sequence: AGG
tatctctagaagaaatcttt

SEQ ID NO: 111146 - DNA, 20 bp, Artificial Sequence
  Description of Artificial Sequence: Synthetic oligonucleotide
  Target: LAMA2; (-) strand; PAM type: NRG; PAM sequence: TAG
gtatctctagaagaaatctt

SEQ ID NO: 111147 - DNA, 20 bp, Artificial Sequence
  Description of Artificial Sequence: Synthetic oligonucleotide
  Target: LAMA2; (-) strand; PAM type: NRG; PAM sequence: AAG
tcaaaatactgtatctctag

SEQ ID NO: 111148 - DNA, 20 bp, Artificial Sequence
  Description of Artificial Sequence: Synthetic oligonucleotide
  Target: LAMA2; (-) strand; PAM type: NRG; PAM sequence: TAG
aaatcaaaatactgtatctc

SEQ ID NO: 111149 - DNA, 20 bp, Artificial Sequence
  Description of Artificial Sequence: Synthetic oligonucleotide
  Target: LAMA2; (-) strand; PAM type: NRG; PAM sequence: AGG
ctatatctctagaagaaatc

SEQ ID NO: 111150 - DNA, 20 bp, Artificial Sequence
  Description of Artificial Sequence: Synthetic oligonucleotide
  Target: LAMA2; (-) strand; PAM type: NRG; PAM sequence: CAG
actatatctctagaagaaat

SEQ ID NO: 111151 - DNA, 20 bp, Artificial Sequence
  Description of Artificial Sequence: Synthetic oligonucleotide
  Target: LAMA2; (-) strand; PAM type: NRG; PAM sequence: AAG
tcaaaatactatatctctag

SEQ ID NO: 111152 - DNA, 20 bp, Artificial Sequence
  Description of Artificial Sequence: Synthetic oligonucleotide
  Target: LAMA2; (-) strand; PAM type: NRG; PAM sequence: TAG
aaatcaaaatactatatctc

SEQ ID NO: 111153 - DNA, 20 bp, Artificial Sequence
  Description of Artificial Sequence: Synthetic oligonucleotide
  Target: LAMA2; (-) strand; PAM type: NRG; PAM sequence: AGG
ctgtatctctagaagaaatc

SEQ ID NO: 111154 - DNA, 20 bp, Artificial Sequence
  Description of Artificial Sequence: Synthetic oligonucleotide
  Target: LAMA2; (-) strand; PAM type: NRG; PAM sequence: CAG
actgtatctctagaagaaat

SEQ ID NO: 111155 - DNA, 20 bp, Artificial Sequence
  Description of Artificial Sequence: Synthetic oligonucleotide
  Target: LAMA2; (-) strand; PAM type: NRG; PAM sequence: AAG
tcaaaatactgtatctctag

SEQ ID NO: 111156 - DNA, 20 bp, Artificial Sequence
  Description of Artificial Sequence: Synthetic oligonucleotide
  Target: LAMA2; (-) strand; PAM type: NRG; PAM sequence: TAG
aaatcaaaatactgtatctc

SEQ ID NO: 111157 - DNA, 20 bp, Artificial Sequence
  Description of Artificial Sequence: Synthetic oligonucleotide
  Target: LAMA2; (-) strand; PAM type: NRG; PAM sequence: AGG
tcttttaaacaacttaaaac

SEQ ID NO: 111158 - DNA, 20 bp, Artificial Sequence
  Description of Artificial Sequence: Synthetic oligonucleotide
  Target: LAMA2; (-) strand; PAM type: NRG; PAM sequence: CAG
ttcttttaaacaacttaaaa

SEQ ID NO: 111159 - DNA, 20 bp, Artificial Sequence
  Description of Artificial Sequence: Synthetic oligonucleotide
  Target: LAMA2; (-) strand; PAM type: NRG; PAM sequence: AGG
ctgttttgattttcagttat

SEQ ID NO: 111160 - DNA, 20 bp, Artificial Sequence
  Description of Artificial Sequence: Synthetic oligonucleotide
  Target: LAMA2; (-) strand; PAM type: NRG; PAM sequence: TAG
tctgttttgattttcagtta

SEQ ID NO: 111161 - DNA, 20 bp, Artificial Sequence
  Description of Artificial Sequence: Synthetic oligonucleotide
  Target: LAMA2; (-) strand; PAM type: NRG; PAM sequence: CAG
atactttctgttttgatttt

SEQ ID NO: 111162 - DNA, 20 bp, Artificial Sequence
  Description of Artificial Sequence: Synthetic oligonucleotide
  Target: LAMA2; (-) strand; PAM type: NRG; PAM sequence: TAG
gacagccagtacataatcag

SEQ ID NO: 111163 - DNA, 20 bp, Artificial Sequence
  Description of Artificial Sequence: Synthetic oligonucleotide
  Target: LAMA2; (-) strand; PAM type: NRG; PAM sequence: CAG
gttgacagccagtacataat

SEQ ID NO: 111164 - DNA, 20 bp, Artificial Sequence
  Description of Artificial Sequence: Synthetic oligonucleotide
  Target: LAMA2; (-) strand; PAM type: NRG; PAM sequence: CAG
tagcccaaactgttgacagc

SEQ ID NO: 111165 - DNA, 20 bp, Artificial Sequence
  Description of Artificial Sequence: Synthetic oligonucleotide
  Target: LAMA2; (-) strand; PAM type: NRG; PAM sequence: CAG
cacttagcccaaactgttga

SEQ ID NO: 111166 - DNA, 20 bp, Artificial Sequence
  Description of Artificial Sequence: Synthetic oligonucleotide
  Target: LAMA2; (-) strand; PAM type: NRG; PAM sequence: TAG
cagaaactgaaacattcact

SEQ ID NO: 111167 - DNA, 20 bp, Artificial Sequence
  Description of Artificial Sequence: Synthetic oligonucleotide
  Target: LAMA2; (-) strand; PAM type: NRG; PAM sequence: CAG
tctggttttgaatatactct

SEQ ID NO: 111168 - DNA, 20 bp, Artificial Sequence
  Description of Artificial Sequence: Synthetic oligonucleotide
  Target: LAMA2; (-) strand; PAM type: NRG; PAM sequence: TGG
attacctgctttctgttttc

SEQ ID NO: 111169 - DNA, 20 bp, Artificial Sequence
  Description of Artificial Sequence: Synthetic oligonucleotide
  Target: LAMA2; (-) strand; PAM type: NRG; PAM sequence: TGG
attcatatagaaaatactct

SEQ ID NO: 111170 - DNA, 20 bp, Artificial Sequence
  Description of Artificial Sequence: Synthetic oligonucleotide
  Target: LAMA2; (-) strand; PAM type: NRG; PAM sequence: TAG
ccagctctcacacattcata

SEQ ID NO: 111171 - DNA, 20 bp, Artificial Sequence
  Description of Artificial Sequence: Synthetic oligonucleotide
  Target: LAMA2; (-) strand; PAM type: NRG; PAM sequence: CAG
ctagacagtaatctattgcc

SEQ ID NO: 111172 - DNA, 20 bp, Artificial Sequence
  Description of Artificial Sequence: Synthetic oligonucleotide
  Target: LAMA2; (-) strand; PAM type: NRG; PAM sequence: CAG
gcagcatgaagtggactaga

SEQ ID NO: 111173 - DNA, 20 bp, Artificial Sequence
  Description of Artificial Sequence: Synthetic oligonucleotide
  Target: LAMA2; (-) strand; PAM type: NRG; PAM sequence: TAG
cacagcagcatgaagtggac

SEQ ID NO: 111174 - DNA, 20 bp, Artificial Sequence
  Description of Artificial Sequence: Synthetic oligonucleotide
  Target: LAMA2; (-) strand; PAM type: NRG; PAM sequence: TGG
tctgtcacagcagcatgaag

SEQ ID NO: 111175 - DNA, 20 bp, Artificial Sequence
  Description of Artificial Sequence: Synthetic oligonucleotide
  Target: LAMA2; (-) strand; PAM type: NRG; PAM sequence: AAG
tactctgtcacagcagcatg

SEQ ID NO: 111176 - DNA, 20 bp, Artificial Sequence
  Description of Artificial Sequence: Synthetic oligonucleotide
  Target: LAMA2; (-) strand; PAM type: NRG; PAM sequence: CAG
tctgtaatactctgtcacag

SEQ ID NO: 111177 - DNA, 20 bp, Artificial Sequence
  Description of Artificial Sequence: Synthetic oligonucleotide
  Target: LAMA2; (-) strand; PAM type: NRG; PAM sequence: CAG
cagtctgtaatactctgtca

SEQ ID NO: 111178 - DNA, 20 bp, Artificial Sequence
  Description of Artificial Sequence: Synthetic oligonucleotide
  Target: LAMA2; (-) strand; PAM type: NRG; PAM sequence: CAG
tattttctttataaattacc

SEQ ID NO: 111179 - DNA, 20 bp, Artificial Sequence
  Description of Artificial Sequence: Synthetic oligonucleotide
  Target: LAMA2; (-) strand; PAM type: NRG; PAM sequence: GAG
ttcccagtctccagaactgt

SEQ ID NO: 111180 - DNA, 20 bp, Artificial Sequence
  Description of Artificial Sequence: Synthetic oligonucleotide
  Target: LAMA2; (-) strand; PAM type: NRG; PAM sequence: CAG
atcttggacttcccagtctc

SEQ ID NO: 111181 - DNA, 20 bp, Artificial Sequence
  Description of Artificial Sequence: Synthetic oligonucleotide
  Target: LAMA2; (-) strand; PAM type: NRG; PAM sequence: CAG
catcttgatcttggacttcc

SEQ ID NO: 111182 - DNA, 20 bp, Artificial Sequence
  Description of Artificial Sequence: Synthetic oligonucleotide
  Target: LAMA2; (-) strand; PAM type: NRG; PAM sequence: TGG
acctgccagcatcttgatct

SEQ ID NO: 111183 - DNA, 20 bp, Artificial Sequence
  Description of Artificial Sequence: Synthetic oligonucleotide
  Target: LAMA2; (-) strand; PAM type: NRG; PAM sequence: CAG
aaaacaggtccctaacctgc

SEQ ID NO: 111184 - DNA, 20 bp, Artificial Sequence
  Description of Artificial Sequence: Synthetic oligonucleotide
  Target: LAMA2; (-) strand; PAM type: NRG; PAM sequence: AGG
catcttggaagcataaaaac

SEQ ID NO: 111185 - DNA, 20 bp, Artificial Sequence
  Description of Artificial Sequence: Synthetic oligonucleotide
  Target: LAMA2; (-) strand; PAM type: NRG; PAM sequence: CAG
ccatcttggaagcataaaaa

SEQ ID NO: 111186 - DNA, 20 bp, Artificial Sequence
  Description of Artificial Sequence: Synthetic oligonucleotide
  Target: LAMA2; (-) strand; PAM type: NRG; PAM sequence: AAG
cattcaaagtgccatcttgg

SEQ ID NO: 111187 - DNA, 20 bp, Artificial Sequence
  Description of Artificial Sequence: Synthetic oligonucleotide
  Target: LAMA2; (-) strand; PAM type: NRG; PAM sequence: TGG
gagcattcaaagtgccatct

SEQ ID NO: 111188 - DNA, 20 bp, Artificial Sequence
  Description of Artificial Sequence: Synthetic oligonucleotide
  Target: LAMA2; (-) strand; PAM type: NRG; PAM sequence: AAG
cctcctctcctgagcattca

SEQ ID NO: 111189 - DNA, 20 bp, Artificial Sequence
  Description of Artificial Sequence: Synthetic oligonucleotide
  Target: LAMA2; (-) strand; PAM type: NRG; PAM sequence: GAG
cacaatgttcctcctctcct

SEQ ID NO: 111190 - DNA, 20 bp, Artificial Sequence
  Description of Artificial Sequence: Synthetic oligonucleotide
  Target: LAMA2; (-) strand; PAM type: NRG; PAM sequence: GGG
cttgctcttctgccatgtga

SEQ ID NO: 111191 - DNA, 20 bp, Artificial Sequence
  Description of Artificial Sequence: Synthetic oligonucleotide
  Target: LAMA2; (-) strand; PAM type: NRG; PAM sequence: AGG
tcttgctcttctgccatgtg

SEQ ID NO: 111192 - DNA, 20 bp, Artificial Sequence
  Description of Artificial Sequence: Synthetic oligonucleotide
  Target: LAMA2; (-) strand; PAM type: NRG; PAM sequence: GAG
ctcttgctcttctgccatgt

SEQ ID NO: 111193 - DNA, 20 bp, Artificial Sequence
  Description of Artificial Sequence: Synthetic oligonucleotide
  Target: LAMA2; (-) strand; PAM type: NRG; PAM sequence: GAG
aaaaaggcttacaggggtga

SEQ ID NO: 111194 - DNA, 20 bp, Artificial Sequence
  Description of Artificial Sequence: Synthetic oligonucleotide
  Target: LAMA2; (-) strand; PAM type: NRG; PAM sequence: GAG
ttaaaaaggcttacaggggt

SEQ ID NO: 111195 - DNA, 20 bp, Artificial Sequence
  Description of Artificial Sequence: Synthetic oligonucleotide
  Target: LAMA2; (-) strand; PAM type: NRG; PAM sequence: GGG
actattaaaaaggcttacag

SEQ ID NO: 111196 - DNA, 20 bp, Artificial Sequence
  Description of Artificial Sequence: Synthetic oligonucleotide
  Target: LAMA2; (-) strand; PAM type: NRG; PAM sequence: GGG
cactattaaaaaggcttaca

SEQ ID NO: 111197 - DNA, 20 bp, Artificial Sequence
  Description of Artificial Sequence: Synthetic oligonucleotide
  Target: LAMA2; (-) strand; PAM type: NRG; PAM sequence: AGG
ccactattaaaaaggcttac

SEQ ID NO: 111198 - DNA, 20 bp, Artificial Sequence
  Description of Artificial Sequence: Synthetic oligonucleotide
  Target: LAMA2; (-) strand; PAM type: NRG; PAM sequence: CAG
gccactattaaaaaggctta

SEQ ID NO: 111199 - DNA, 20 bp, Artificial Sequence
  Description of Artificial Sequence: Synthetic oligonucleotide
  Target: LAMA2; (-) strand; PAM type: NRG; PAM sequence: AGG
aattgatgccactattaaaa

SEQ ID NO: 111200 - DNA, 20 bp, Artificial Sequence
  Description of Artificial Sequence: Synthetic oligonucleotide
  Target: LAMA2; (-) strand; PAM type: NRG; PAM sequence: AAG
gaattgatgccactattaaa

SEQ ID NO: 111201 - DNA, 20 bp, Artificial Sequence
  Description of Artificial Sequence: Synthetic oligonucleotide
  Target: LAMA2; (-) strand; PAM type: NRG; PAM sequence: GGG
gggaagtgtttcggtcatga

SEQ ID NO: 111202 - DNA, 20 bp, Artificial Sequence
  Description of Artificial Sequence: Synthetic oligonucleotide
  Target: LAMA2; (-) strand; PAM type: NRG; PAM sequence: AGG
tgggaagtgtttcggtcatg

SEQ ID NO: 111203 - DNA, 20 bp, Artificial Sequence
  Description of Artificial Sequence: Synthetic oligonucleotide
  Target: LAMA2; (-) strand; PAM type: NRG; PAM sequence: GAG
ttgggaagtgtttcggtcat

SEQ ID NO: 111204 - DNA, 20 bp, Artificial Sequence
  Description of Artificial Sequence: Synthetic oligonucleotide
  Target: LAMA2; (-) strand; PAM type: NRG; PAM sequence: CGG
gggccttttgggaagtgttt

SEQ ID NO: 111205 - DNA, 20 bp, Artificial Sequence
  Description of Artificial Sequence: Synthetic oligonucleotide
  Target: LAMA2; (-) strand; PAM type: NRG; PAM sequence: AAG
tgggaggggggccttttggg

SEQ ID NO: 111206 - DNA, 20 bp, Artificial Sequence
  Description of Artificial Sequence: Synthetic oligonucleotide
  Target: LAMA2; (-) strand; PAM type: NRG; PAM sequence: GGG
tgttgggaggggggcctttt

SEQ ID NO: 111207 - DNA, 20 bp, Artificial Sequence
  Description of Artificial Sequence: Synthetic oligonucleotide
  Target: LAMA2; (-) strand; PAM type: NRG; PAM sequence: TGG
gtgttgggaggggggccttt

SEQ ID NO: 111208 - DNA, 20 bp, Artificial Sequence
  Description of Artificial Sequence: Synthetic oligonucleotide
  Target: LAMA2; (-) strand; PAM type: NRG; PAM sequence: GGG
gtgcaacagtgttgggaggg

SEQ ID NO: 111209 - DNA, 20 bp, Artificial Sequence
  Description of Artificial Sequence: Synthetic oligonucleotide
  Target: LAMA2; (-) strand; PAM type: NRG; PAM sequence: GGG
agtgcaacagtgttgggagg

SEQ ID NO: 111210 - DNA, 20 bp, Artificial Sequence
  Description of Artificial Sequence: Synthetic oligonucleotide
  Target: LAMA2; (-) strand; PAM type: NRG; PAM sequence: GGG
cagtgcaacagtgttgggag

SEQ ID NO: 111211 - DNA, 20 bp, Artificial Sequence
  Description of Artificial Sequence: Synthetic oligonucleotide
  Target: LAMA2; (-) strand; PAM type: NRG; PAM sequence: GGG
tcagtgcaacagtgttggga

SEQ ID NO: 111212 - DNA, 20 bp, Artificial Sequence
  Description of Artificial Sequence: Synthetic oligonucleotide
  Target: LAMA2; (-) strand; PAM type: NRG; PAM sequence: AGG
ctcagtgcaacagtgttggg

SEQ ID NO: 111213 - DNA, 20 bp, Artificial Sequence
  Description of Artificial Sequence: Synthetic oligonucleotide
  Target: LAMA2; (-) strand; PAM type: NRG; PAM sequence: GAG
cctcagtgcaacagtgttgg

SEQ ID NO: 111214 - DNA, 20 bp, Artificial Sequence
  Description of Artificial Sequence: Synthetic oligonucleotide
  Target: LAMA2; (-) strand; PAM type: NRG; PAM sequence: GGG
atcctcagtgcaacagtgtt

SEQ ID NO: 111215 - DNA, 20 bp, Artificial Sequence
  Description of Artificial Sequence: Synthetic oligonucleotide
  Target: LAMA2; (-) strand; PAM type: NRG; PAM sequence: TGG
aatcctcagtgcaacagtgt

SEQ ID NO: 111216 - DNA, 20 bp, Artificial Sequence
  Description of Artificial Sequence: Synthetic oligonucleotide
  Target: LAMA2; (-) strand; PAM type: NRG; PAM sequence: CAG
aaatttaatcctcagtgcaa

SEQ ID NO: 111217 - DNA, 20 bp, Artificial Sequence
  Description of Artificial Sequence: Synthetic oligonucleotide
  Target: LAMA2; (-) strand; PAM type: NRG; PAM sequence: CAG
tttgcttgaaatttaatcct

SEQ ID NO: 111218 - DNA, 20 bp, Artificial Sequence
  Description of Artificial Sequence: Synthetic oligonucleotide
  Target: LAMA2; (-) strand; PAM type: NRG; PAM sequence: TGG
atcctacagagtaactgcta

SEQ ID NO: 111219 - DNA, 20 bp, Artificial Sequence
  Description of Artificial Sequence: Synthetic oligonucleotide
  Target: LAMA2; (-) strand; PAM type: NRG; PAM sequence: GAG
tgccggcaattaatcctaca

SEQ ID NO: 111220 - DNA, 20 bp, Artificial Sequence
  Description of Artificial Sequence: Synthetic oligonucleotide
  Target: LAMA2; (-) strand; PAM type: NRG; PAM sequence: CAG
tatgccggcaattaatccta

SEQ ID NO: 111221 - DNA, 20 bp, Artificial Sequence
  Description of Artificial Sequence: Synthetic oligonucleotide
  Target: LAMA2; (-) strand; PAM type: NRG; PAM sequence: CGG
tgttgttatacccaatatgc

SEQ ID NO: 111222 - DNA, 20 bp, Artificial Sequence
  Description of Artificial Sequence: Synthetic oligonucleotide
  Target: LAMA2; (-) strand; PAM type: NRG; PAM sequence: AAG
tctaacaaatatgattcttg

SEQ ID NO: 111223 - DNA, 20 bp, Artificial Sequence
  Description of Artificial Sequence: Synthetic oligonucleotide
  Target: LAMA2; (-) strand; PAM type: NRG; PAM sequence: TAG
gttacaaccaatctattgta

SEQ ID NO: 111224 - DNA, 20 bp, Artificial Sequence
  Description of Artificial Sequence: Synthetic oligonucleotide
  Target: LAMA2; (-) strand; PAM type: NRG; PAM sequence: AGG
tgagtatctaatgtcactag

SEQ ID NO: 111225 - DNA, 20 bp, Artificial Sequence
  Description of Artificial Sequence: Synthetic oligonucleotide
  Target: LAMA2; (-) strand; PAM type: NRG; PAM sequence: GAG
ctgagtatctaatgtcacta

SEQ ID NO: 111226 - DNA, 20 bp, Artificial Sequence
  Description of Artificial Sequence: Synthetic oligonucleotide
  Target: LAMA2; (-) strand; PAM type: NRG; PAM sequence: TAG
aactgagtatctaatgtcac

SEQ ID NO: 111227 - DNA, 20 bp, Artificial Sequence
  Description of Artificial Sequence: Synthetic oligonucleotide
  Target: LAMA2; (-) strand; PAM type: NRG; PAM sequence: GAG
agagaagccattttaaaact

SEQ ID NO: 111228 - DNA, 20 bp, Artificial Sequence
  Description of Artificial Sequence: Synthetic oligonucleotide
  Target: LAMA2; (-) strand; PAM type: NRG; PAM sequence: AAG
gaactccaagtctaagagag

SEQ ID NO: 111229 - DNA, 20 bp, Artificial Sequence
  Description of Artificial Sequence: Synthetic oligonucleotide
  Target: LAMA2; (-) strand; PAM type: NRG; PAM sequence: GAG
tgagaactccaagtctaaga

SEQ ID NO: 111230 - DNA, 20 bp, Artificial Sequence
  Description of Artificial Sequence: Synthetic oligonucleotide
  Target: LAMA2; (-) strand; PAM type: NRG; PAM sequence: GAG
tctgagaactccaagtctaa

SEQ ID NO: 111231 - DNA, 20 bp, Artificial Sequence
  Description of Artificial Sequence: Synthetic oligonucleotide
  Target: LAMA2; (-) strand; PAM type: NRG; PAM sequence: AAG
gctctgagaactccaagtct

SEQ ID NO: 111232 - DNA, 20 bp, Artificial Sequence
  Description of Artificial Sequence: Synthetic oligonucleotide
  Target: LAMA2; (-) strand; PAM type: NRG; PAM sequence: AAG
ctaactgctctgagaactcc

SEQ ID NO: 111233 - DNA, 20 bp, Artificial Sequence
  Description of Artificial Sequence: Synthetic oligonucleotide
  Target: LAMA2; (-) strand; PAM type: NRG; PAM sequence: GAG
cactaaaatctaactgctct

SEQ ID NO: 111234 - DNA, 20 bp, Artificial Sequence
  Description of Artificial Sequence: Synthetic oligonucleotide
  Target: LAMA2; (-) strand; PAM type: NRG; PAM sequence: CAG
aagtgtagcagacagagcag

SEQ ID NO: 111235 - DNA, 20 bp, Artificial Sequence
  Description of Artificial Sequence: Synthetic oligonucleotide
  Target: LAMA2; (-) strand; PAM type: NRG; PAM sequence: CAG
aaaaagtgtagcagacagag

SEQ ID NO: 111236 - DNA, 20 bp, Artificial Sequence
  Description of Artificial Sequence: Synthetic oligonucleotide
  Target: LAMA2; (-) strand; PAM type: NRG; PAM sequence: GAG
aaaaaaaagtgtagcagaca

SEQ ID NO: 111237 - DNA, 20 bp, Artificial Sequence
  Description of Artificial Sequence: Synthetic oligonucleotide
  Target: LAMA2; (-) strand; PAM type: NRG; PAM sequence: CAG
aaaaaaaaaagtgtagcaga

SEQ ID NO: 111238 - DNA, 20 bp, Artificial Sequence
  Description of Artificial Sequence: Synthetic oligonucleotide
  Target: LAMA2; (-) strand; PAM type: NRG; PAM sequence: CAG
aaaaaaaaaaaaaagtgtag

SEQ ID NO: 111239 - DNA, 20 bp, Artificial Sequence
  Description of Artificial Sequence: Synthetic oligonucleotide
  Target: LAMA2; (-) strand; PAM type: NRG; PAM sequence: TAG
aaaaaaaaaaaaaaaaagtg

SEQ ID NO: 111240 - DNA, 20 bp, Artificial Sequence
  Description of Artificial Sequence: Synthetic oligonucleotide
  Target: LAMA2; (-) strand; PAM type: NRG; PAM sequence: AAG
aaaaaaaaaaaaaaaaaaaa

SEQ ID NO: 111241 - DNA, 20 bp, Artificial Sequence
  Description of Artificial Sequence: Synthetic oligonucleotide
  Target: LAMA2; (-) strand; PAM type: NRG; PAM sequence: GAG
ctccagcctggccacagagt

SEQ ID NO: 111242 - DNA, 20 bp, Artificial Sequence
  Description of Artificial Sequence: Synthetic oligonucleotide
  Target: LAMA2; (-) strand; PAM type: NRG; PAM sequence: GAG
tgcactccagcctggccaca

SEQ ID NO: 111243 - DNA, 20 bp, Artificial Sequence
  Description of Artificial Sequence: Synthetic oligonucleotide
  Target: LAMA2; (-) strand; PAM type: NRG; PAM sequence: CAG
actgcactccagcctggcca

SEQ ID NO: 111244 - DNA, 20 bp, Artificial Sequence
  Description of Artificial Sequence: Synthetic oligonucleotide
  Target: LAMA2; (-) strand; PAM type: NRG; PAM sequence: TGG
tgctccactgcactccagcc

SEQ ID NO: 111245 - DNA, 20 bp, Artificial Sequence
  Description of Artificial Sequence: Synthetic oligonucleotide
  Target: LAMA2; (-) strand; PAM type: NRG; PAM sequence: CAG
gagattgctccactgcactc

SEQ ID NO: 111246 - DNA, 20 bp, Artificial Sequence
  Description of Artificial Sequence: Synthetic oligonucleotide
  Target: LAMA2; (-) strand; PAM type: NRG; PAM sequence: GAG
ggcggaggctgcagtgagct

SEQ ID NO: 111247 - DNA, 20 bp, Artificial Sequence
  Description of Artificial Sequence: Synthetic oligonucleotide
  Target: LAMA2; (-) strand; PAM type: NRG; PAM sequence: GAG
tgggaggcggaggctgcagt

SEQ ID NO: 111248 - DNA, 20 bp, Artificial Sequence
  Description of Artificial Sequence: Synthetic oligonucleotide
  Target: LAMA2; (-) strand; PAM type: NRG; PAM sequence: CAG
aacctgggaggcggaggctg

SEQ ID NO: 111249 - DNA, 20 bp, Artificial Sequence
  Description of Artificial Sequence: Synthetic oligonucleotide
  Target: LAMA2; (-) strand; PAM type: NRG; PAM sequence: AGG
tgcttgaacctgggaggcgg

SEQ ID NO: 111250 - DNA, 20 bp, Artificial Sequence
  Description of Artificial Sequence: Synthetic oligonucleotide
  Target: LAMA2; (-) strand; PAM type: NRG; PAM sequence: GAG
ttgcttgaacctgggaggcg

SEQ ID NO: 111251 - DNA, 20 bp, Artificial Sequence
  Description of Artificial Sequence: Synthetic oligonucleotide
  Target: LAMA2; (-) strand; PAM type: NRG; PAM sequence: CGG
aattgcttgaacctgggagg

SEQ ID NO: 111252 - DNA, 20 bp, Artificial Sequence
  Description of Artificial Sequence: Synthetic oligonucleotide
  Target: LAMA2; (-) strand; PAM type: NRG; PAM sequence: AGG
gagaattgcttgaacctggg

SEQ ID NO: 111253 - DNA, 20 bp, Artificial Sequence
  Description of Artificial Sequence: Synthetic oligonucleotide
  Target: LAMA2; (-) strand; PAM type: NRG; PAM sequence: GAG
ggagaattgcttgaacctgg

SEQ ID NO: 111254 - DNA, 20 bp, Artificial Sequence
  Description of Artificial Sequence: Synthetic oligonucleotide
  Target: LAMA2; (-) strand; PAM type: NRG; PAM sequence: GGG
caggagaattgcttgaacct

SEQ ID NO: 111255 - DNA, 20 bp, Artificial Sequence
  Description of Artificial Sequence: Synthetic oligonucleotide
  Target: LAMA2; (-) strand; PAM type: NRG; PAM sequence: TGG
gcaggagaattgcttgaacc

SEQ ID NO: 111256 - DNA, 20 bp, Artificial Sequence
  Description of Artificial Sequence: Synthetic oligonucleotide
  Target: LAMA2; (-) strand; PAM type: NRG; PAM sequence: GAG
tactcaggaggctgaggcag

SEQ ID NO: 111257 - DNA, 20 bp, Artificial Sequence
  Description of Artificial Sequence: Synthetic oligonucleotide
  Target: LAMA2; (-) strand; PAM type: NRG; PAM sequence: AGG
gctactcaggaggctgaggc

SEQ ID NO: 111258 - DNA, 20 bp, Artificial Sequence
  Description of Artificial Sequence: Synthetic oligonucleotide
  Target: LAMA2; (-) strand; PAM type: NRG; PAM sequence: CAG
agctactcaggaggctgagg

SEQ ID NO: 111259 - DNA, 20 bp, Artificial Sequence
  Description of Artificial Sequence: Synthetic oligonucleotide
  Target: LAMA2; (-) strand; PAM type: NRG; PAM sequence: AGG
cccagctactcaggaggctg

SEQ ID NO: 111260 - DNA, 20 bp, Artificial Sequence
  Description of Artificial Sequence: Synthetic oligonucleotide
  Target: LAMA2; (-) strand; PAM type: NRG; PAM sequence: GAG
tcccagctactcaggaggct

SEQ ID NO: 111261 - DNA, 20 bp, Artificial Sequence
  Description of Artificial Sequence: Synthetic oligonucleotide
  Target: LAMA2; (-) strand; PAM type: NRG; PAM sequence: AGG
tgtagtcccagctactcagg

SEQ ID NO: 111262 - DNA, 20 bp, Artificial Sequence
  Description of Artificial Sequence: Synthetic oligonucleotide
  Target: LAMA2; (-) strand; PAM type: NRG; PAM sequence: GAG
ctgtagtcccagctactcag

SEQ ID NO: 111263 - DNA, 20 bp, Artificial Sequence
  Description of Artificial Sequence: Synthetic oligonucleotide
  Target: LAMA2; (-) strand; PAM type: NRG; PAM sequence: AGG
gcctgtagtcccagctactc

SEQ ID NO: 111264 - DNA, 20 bp, Artificial Sequence
  Description of Artificial Sequence: Synthetic oligonucleotide
  Target: LAMA2; (-) strand; PAM type: NRG; PAM sequence: CAG
tgcctgtagtcccagctact

SEQ ID NO: 111265 - DNA, 20 bp, Artificial Sequence
  Description of Artificial Sequence: Synthetic oligonucleotide
  Target: LAMA2; (-) strand; PAM type: NRG; PAM sequence: CAG
gtgacatgtgcctgtagtcc

SEQ ID NO: 111266 - DNA, 20 bp, Artificial Sequence
  Description of Artificial Sequence: Synthetic oligonucleotide
  Target: LAMA2; (-) strand; PAM type: NRG; PAM sequence: TAG
ggcgtggtgacatgtgcctg

SEQ ID NO: 111267 - DNA, 20 bp, Artificial Sequence
  Description of Artificial Sequence: Synthetic oligonucleotide
  Target: LAMA2; (-) strand; PAM type: NRG; PAM sequence: TGG
caaaaacaattagctgggcg

SEQ ID NO: 111268 - DNA, 20 bp, Artificial Sequence
  Description of Artificial Sequence: Synthetic oligonucleotide
  Target: LAMA2; (-) strand; PAM type: NRG; PAM sequence: GGG
aaatacaaaaacaattagct

SEQ ID NO: 111269 - DNA, 20 bp, Artificial Sequence
  Description of Artificial Sequence: Synthetic oligonucleotide
  Target: LAMA2; (-) strand; PAM type: NRG; PAM sequence: TGG
aaaatacaaaaacaattagc

SEQ ID NO: 111270 - DNA, 20 bp, Artificial Sequence
  Description of Artificial Sequence: Synthetic oligonucleotide
  Target: LAMA2; (-) strand; PAM type: NRG; PAM sequence: TAG
actaaaaatacaaaaacaat

SEQ ID NO: 111271 - DNA, 20 bp, Artificial Sequence
  Description of Artificial Sequence: Synthetic oligonucleotide
  Target: LAMA2; (-) strand; PAM type: NRG; PAM sequence: AAG
caatcctggccaacatggtg

SEQ ID NO: 111272 - DNA, 20 bp, Artificial Sequence
  Description of Artificial Sequence: Synthetic oligonucleotide
  Target: LAMA2; (-) strand; PAM type: NRG; PAM sequence: TGG
tgagacaatcctggccaaca

SEQ ID NO: 111273 - DNA, 20 bp, Artificial Sequence
  Description of Artificial Sequence: Synthetic oligonucleotide
  Target: LAMA2; (-) strand; PAM type: NRG; PAM sequence: TGG
tcaagagattgagacaatcc

SEQ ID NO: 111274 - DNA, 20 bp, Artificial Sequence
  Description of Artificial Sequence: Synthetic oligonucleotide
  Target: LAMA2; (-) strand; PAM type: NRG; PAM sequence: GAG
gatcacgaggtcaagagatt

SEQ ID NO: 111275 - DNA, 20 bp, Artificial Sequence
  Description of Artificial Sequence: Synthetic oligonucleotide
  Target: LAMA2; (-) strand; PAM type: NRG; PAM sequence: GAG
caggcggatcacgaggtcaa

SEQ ID NO: 111276 - DNA, 20 bp, Artificial Sequence
  Description of Artificial Sequence: Synthetic oligonucleotide
  Target: LAMA2; (-) strand; PAM type: NRG; PAM sequence: AAG
ggcaggcggatcacgaggtc

SEQ ID NO: 111277 - DNA, 20 bp, Artificial Sequence
  Description of Artificial Sequence: Synthetic oligonucleotide
  Target: LAMA2; (-) strand; PAM type: NRG; PAM sequence: AGG
gccaaggcaggcggatcacg

SEQ ID NO: 111278 - DNA, 20 bp, Artificial Sequence
  Description of Artificial Sequence: Synthetic oligonucleotide
  Target: LAMA2; (-) strand; PAM type: NRG; PAM sequence: GAG
ggccaaggcaggcggatcac

SEQ ID NO: 111279 - DNA, 20 bp, Artificial Sequence
  Description of Artificial Sequence: Synthetic oligonucleotide
  Target: LAMA2; (-) strand; PAM type: NRG; PAM sequence: CGG
ctttgggaggccaaggcagg

SEQ ID NO: 111280 - DNA, 20 bp, Artificial Sequence
  Description of Artificial Sequence: Synthetic oligonucleotide
  Target: LAMA2; (-) strand; PAM type: NRG; PAM sequence: AGG
gaactttgggaggccaaggc

SEQ ID NO: 111281 - DNA, 20 bp, Artificial Sequence
  Description of Artificial Sequence: Synthetic oligonucleotide
  Target: LAMA2; (-) strand; PAM type: NRG; PAM sequence: CAG
agaactttgggaggccaagg

SEQ ID NO: 111282 - DNA, 20 bp, Artificial Sequence
  Description of Artificial Sequence: Synthetic oligonucleotide
  Target: LAMA2; (-) strand; PAM type: NRG; PAM sequence: AGG
cccagaactttgggaggcca

SEQ ID NO: 111283 - DNA, 20 bp, Artificial Sequence
  Description of Artificial Sequence: Synthetic oligonucleotide
  Target: LAMA2; (-) strand; PAM type: NRG; PAM sequence: AAG
tcccagaactttgggaggcc

SEQ ID NO: 111284 - DNA, 20 bp, Artificial Sequence
  Description of Artificial Sequence: Synthetic oligonucleotide
  Target: LAMA2; (-) strand; PAM type: NRG; PAM sequence: AGG
tgtaatcccagaactttggg

SEQ ID NO: 111285 - DNA, 20 bp, Artificial Sequence
  Description of Artificial Sequence: Synthetic oligonucleotide
  Target: LAMA2; (-) strand; PAM type: NRG; PAM sequence: GAG
ctgtaatcccagaactttgg

SEQ ID NO: 111286 - DNA, 20 bp, Artificial Sequence
  Description of Artificial Sequence: Synthetic oligonucleotide
  Target: LAMA2; (-) strand; PAM type: NRG; PAM sequence: GGG
gcctgtaatcccagaacttt

SEQ ID NO: 111287 - DNA, 20 bp, Artificial Sequence
  Description of Artificial Sequence: Synthetic oligonucleotide
  Target: LAMA2; (-) strand; PAM type: NRG; PAM sequence: TGG
cgcctgtaatcccagaactt

SEQ ID NO: 111288 - DNA, 20 bp, Artificial Sequence
  Description of Artificial Sequence: Synthetic oligonucleotide
  Target: LAMA2; (-) strand; PAM type: NRG; PAM sequence: CAG
gtggctcacgcctgtaatcc

SEQ ID NO: 111289 - DNA, 20 bp, Artificial Sequence
  Description of Artificial Sequence: Synthetic oligonucleotide
  Target: LAMA2; (-) strand; PAM type: NRG; PAM sequence: TGG
acagacagagccgggtgcag

SEQ ID NO: 111290 - DNA, 20 bp, Artificial Sequence
  Description of Artificial Sequence: Synthetic oligonucleotide
  Target: LAMA2; (-) strand; PAM type: NRG; PAM sequence: CAG
gtaacagacagagccgggtg

SEQ ID NO: 111291 - DNA, 20 bp, Artificial Sequence
  Description of Artificial Sequence: Synthetic oligonucleotide
  Target: LAMA2; (-) strand; PAM type: NRG; PAM sequence: GGG
aaagtgtaacagacagagcc

SEQ ID NO: 111292 - DNA, 20 bp, Artificial Sequence
  Description of Artificial Sequence: Synthetic oligonucleotide
  Target: LAMA2; (-) strand; PAM type: NRG; PAM sequence: CGG
caaagtgtaacagacagagc

SEQ ID NO: 111293 - DNA, 20 bp, Artificial Sequence
  Description of Artificial Sequence: Synthetic oligonucleotide
  Target: LAMA2; (-) strand; PAM type: NRG; PAM sequence: GAG
ttgccaaagtgtaacagaca

SEQ ID NO: 111294 - DNA, 20 bp, Artificial Sequence
  Description of Artificial Sequence: Synthetic oligonucleotide
  Target: LAMA2; (-) strand; PAM type: NRG; PAM sequence: CAG
ggttgccaaagtgtaacaga

SEQ ID NO: 111295 - DNA, 20 bp, Artificial Sequence
  Description of Artificial Sequence: Synthetic oligonucleotide
  Target: LAMA2; (-) strand; PAM type: NRG; PAM sequence: CAG
agggggttgccaaagtgtaa

SEQ ID NO: 111296 - DNA, 20 bp, Artificial Sequence
  Description of Artificial Sequence: Synthetic oligonucleotide
  Target: LAMA2; (-) strand; PAM type: NRG; PAM sequence: AAG
tgttgaaaagggggttgcca

SEQ ID NO: 111297 - DNA, 20 bp, Artificial Sequence
  Description of Artificial Sequence: Synthetic oligonucleotide
  Target: LAMA2; (-) strand; PAM type: NRG; PAM sequence: GGG
tgattagtgtgttgaaaagg

SEQ ID NO: 111298 - DNA, 20 bp, Artificial Sequence
  Description of Artificial Sequence: Synthetic oligonucleotide
  Target: LAMA2; (-) strand; PAM type: NRG; PAM sequence: GGG
atgattagtgtgttgaaaag

SEQ ID NO: 111299 - DNA, 20 bp, Artificial Sequence
  Description of Artificial Sequence: Synthetic oligonucleotide
  Target: LAMA2; (-) strand; PAM type: NRG; PAM sequence: GGG
catgattagtgtgttgaaaa

SEQ ID NO: 111300 - DNA, 20 bp, Artificial Sequence
  Description of Artificial Sequence: Synthetic oligonucleotide
  Target: LAMA2; (-) strand; PAM type: NRG; PAM sequence: AGG
ccatgattagtgtgttgaaa

SEQ ID NO: 111301 - DNA, 20 bp, Artificial Sequence
  Description of Artificial Sequence: Synthetic oligonucleotide
  Target: LAMA2; (-) strand; PAM type: NRG; PAM sequence: AAG
tccatgattagtgtgttgaa

SEQ ID NO: 111302 - DNA, 20 bp, Artificial Sequence
  Description of Artificial Sequence: Synthetic oligonucleotide
  Target: LAMA2; (-) strand; PAM type: NRG; PAM sequence: TAG
aaaaaacgggattccatgat

SEQ ID NO: 111303 - DNA, 20 bp, Artificial Sequence
  Description of Artificial Sequence: Synthetic oligonucleotide
  Target: LAMA2; (-) strand; PAM type: NRG; PAM sequence: GGG
cctggtaaaaaaaaaaaaac

SEQ ID NO: 111304 - DNA, 20 bp, Artificial Sequence
  Description of Artificial Sequence: Synthetic oligonucleotide
  Target: LAMA2; (-) strand; PAM type: NRG; PAM sequence: CGG
gcctggtaaaaaaaaaaaaa

SEQ ID NO: 111305 - DNA, 20 bp, Artificial Sequence
  Description of Artificial Sequence: Synthetic oligonucleotide
  Target: LAMA2; (-) strand; PAM type: NRG; PAM sequence: TGG
agtcattgcttaggtaagcc

SEQ ID NO: 111306 - DNA, 20 bp, Artificial Sequence
  Description of Artificial Sequence: Synthetic oligonucleotide
  Target: LAMA2; (-) strand; PAM type: NRG; PAM sequence: AAG
atttcagtcattgcttaggt

SEQ ID NO: 111307 - DNA, 20 bp, Artificial Sequence
  Description of Artificial Sequence: Synthetic oligonucleotide
  Target: LAMA2; (-) strand; PAM type: NRG; PAM sequence: AGG
atgaatttcagtcattgctt

SEQ ID NO: 111308 - DNA, 20 bp, Artificial Sequence
  Description of Artificial Sequence: Synthetic oligonucleotide
  Target: LAMA2; (-) strand; PAM type: NRG; PAM sequence: TAG
aatgaatttcagtcattgct

SEQ ID NO: 111309 - DNA, 20 bp, Artificial Sequence
  Description of Artificial Sequence: Synthetic oligonucleotide
  Target: LAMA2; (-) strand; PAM type: NRG; PAM sequence: CAG
tttggtcacagaatgaattt

SEQ ID NO: 111310 - DNA, 20 bp, Artificial Sequence
  Description of Artificial Sequence: Synthetic oligonucleotide
  Target: LAMA2; (-) strand; PAM type: NRG; PAM sequence: CAG
aatatgtgatcatttggtca

SEQ ID NO: 111311 - DNA, 20 bp, Artificial Sequence
  Description of Artificial Sequence: Synthetic oligonucleotide
  Target: LAMA2; (-) strand; PAM type: NRG; PAM sequence: TGG
aaatgtaatatgtgatcatt

SEQ ID NO: 111312 - DNA, 20 bp, Artificial Sequence
  Description of Artificial Sequence: Synthetic oligonucleotide
  Target: LAMA2; (-) strand; PAM type: NRG; PAM sequence: GAG
ctcagttattatttagagaa

SEQ ID NO: 111313 - DNA, 20 bp, Artificial Sequence
  Description of Artificial Sequence: Synthetic oligonucleotide
  Target: LAMA2; (-) strand; PAM type: NRG; PAM sequence: AAG
ccctcagttattatttagag

SEQ ID NO: 111314 - DNA, 20 bp, Artificial Sequence
  Description of Artificial Sequence: Synthetic oligonucleotide
  Target: LAMA2; (-) strand; PAM type: NRG; PAM sequence: GAG
tatccctcagttattattta

SEQ ID NO: 111315 - DNA, 20 bp, Artificial Sequence
  Description of Artificial Sequence: Synthetic oligonucleotide
  Target: LAMA2; (-) strand; PAM type: NRG; PAM sequence: TAG
aatatccctcagttattatt

SEQ ID NO: 111316 - DNA, 20 bp, Artificial Sequence
  Description of Artificial Sequence: Synthetic oligonucleotide
  Target: LAMA2; (-) strand; PAM type: NRG; PAM sequence: CAG
cacaattgaataatatccct

SEQ ID NO: 111317 - DNA, 20 bp, Artificial Sequence
  Description of Artificial Sequence: Synthetic oligonucleotide
  Target: LAMA2; (-) strand; PAM type: NRG; PAM sequence: GAG
tccagcctgggtgacaaagt

SEQ ID NO: 111318 - DNA, 20 bp, Artificial Sequence
  Description of Artificial Sequence: Synthetic oligonucleotide
  Target: LAMA2; (-) strand; PAM type: NRG; PAM sequence: AAG
gtactccagcctgggtgaca

SEQ ID NO: 111319 - DNA, 20 bp, Artificial Sequence
  Description of Artificial Sequence: Synthetic oligonucleotide
  Target: LAMA2; (-) strand; PAM type: NRG; PAM sequence: GGG
gtgccactgtactccagcct

SEQ ID NO: 111320 - DNA, 20 bp, Artificial Sequence
  Description of Artificial Sequence: Synthetic oligonucleotide
  Target: LAMA2; (-) strand; PAM type: NRG; PAM sequence: TGG
cgtgccactgtactccagcc

SEQ ID NO: 111321 - DNA, 20 bp, Artificial Sequence
  Description of Artificial Sequence: Synthetic oligonucleotide
  Target: LAMA2; (-) strand; PAM type: NRG; PAM sequence: CAG
gagatcgtgccactgtactc

SEQ ID NO: 111322 - DNA, 20 bp, Artificial Sequence
  Description of Artificial Sequence: Synthetic oligonucleotide
  Target: LAMA2; (-) strand; PAM type: NRG; PAM sequence: GAG
ggcagaggttgcagtgagct

SEQ ID NO: 111323 - DNA, 20 bp, Artificial Sequence
  Description of Artificial Sequence: Synthetic oligonucleotide
  Target: LAMA2; (-) strand; PAM type: NRG; PAM sequence: GAG
caagaggcagaggttgcagt

SEQ ID NO: 111324 - DNA, 20 bp, Artificial Sequence
  Description of Artificial Sequence: Synthetic oligonucleotide
  Target: LAMA2; (-) strand; PAM type: NRG; PAM sequence: CAG
aacccaagaggcagaggttg

SEQ ID NO: 111325 - DNA, 20 bp, Artificial Sequence
  Description of Artificial Sequence: Synthetic oligonucleotide
  Target: LAMA2; (-) strand; PAM type: NRG; PAM sequence: AGG
tgcttgaacccaagaggcag

SEQ ID NO: 111326 - DNA, 20 bp, Artificial Sequence
  Description of Artificial Sequence: Synthetic oligonucleotide
  Target: LAMA2; (-) strand; PAM type: NRG; PAM sequence: GAG
ttgcttgaacccaagaggca

SEQ ID NO: 111327 - DNA, 20 bp, Artificial Sequence
  Description of Artificial Sequence: Synthetic oligonucleotide
  Target: LAMA2; (-) strand; PAM type: NRG; PAM sequence: CAG
aattgcttgaacccaagagg

SEQ ID NO: 111328 - DNA, 20 bp, Artificial Sequence
  Description of Artificial Sequence: Synthetic oligonucleotide
  Target: LAMA2; (-) strand; PAM type: NRG; PAM sequence: AGG
gagaattgcttgaacccaag

SEQ ID NO: 111329 - DNA, 20 bp, Artificial Sequence
  Description of Artificial Sequence: Synthetic oligonucleotide
  Target: LAMA2; (-) strand; PAM type: NRG; PAM sequence: GAG
ggagaattgcttgaacccaa

SEQ ID NO: 111330 - DNA, 20 bp, Artificial Sequence
  Description of Artificial Sequence: Synthetic oligonucleotide
  Target: LAMA2; (-) strand; PAM type: NRG; PAM sequence: AAG
caggagaattgcttgaaccc

SEQ ID NO: 111331 - DNA, 20 bp, Artificial Sequence
  Description of Artificial Sequence: Synthetic oligonucleotide
  Target: LAMA2; (-) strand; PAM type: NRG; PAM sequence: GAG
tactcaggaggctgagtcag

SEQ ID NO: 111332 - DNA, 20 bp, Artificial Sequence
  Description of Artificial Sequence: Synthetic oligonucleotide
  Target: LAMA2; (-) strand; PAM type: NRG; PAM sequence: AGG
gctactcaggaggctgagtc

SEQ ID NO: 111333 - DNA, 20 bp, Artificial Sequence
  Description of Artificial Sequence: Synthetic oligonucleotide
  Target: LAMA2; (-) strand; PAM type: NRG; PAM sequence: CAG
agctactcaggaggctgagt

SEQ ID NO: 111334 - DNA, 20 bp, Artificial Sequence
  Description of Artificial Sequence: Synthetic oligonucleotide
  Target: LAMA2; (-) strand; PAM type: NRG; PAM sequence: GAG
tcccagctactcaggaggct

SEQ ID NO: 111335 - DNA, 20 bp, Artificial Sequence
  Description of Artificial Sequence: Synthetic oligonucleotide
  Target: LAMA2; (-) strand; PAM type: NRG; PAM sequence: AGG
tgtagtcccagctactcagg

SEQ ID NO: 111336 - DNA, 20 bp, Artificial Sequence
  Description of Artificial Sequence: Synthetic oligonucleotide
  Target: LAMA2; (-) strand; PAM type: NRG; PAM sequence: GAG
ctgtagtcccagctactcag

SEQ ID NO: 111337 - DNA, 20 bp, Artificial Sequence
  Description of Artificial Sequence: Synthetic oligonucleotide
  Target: LAMA2; (-) strand; PAM type: NRG; PAM sequence: AGG
gcctgtagtcccagctactc

SEQ ID NO: 111338 - DNA, 20 bp, Artificial Sequence
  Description of Artificial Sequence: Synthetic oligonucleotide
  Target: LAMA2; (-) strand; PAM type: NRG; PAM sequence: CAG
tgcctgtagtcccagctact

SEQ ID NO: 111339 - DNA, 20 bp, Artificial Sequence
  Description of Artificial Sequence: Synthetic oligonucleotide
  Target: LAMA2; (-) strand; PAM type: NRG; PAM sequence: CAG
gtggcatgtgcctgtagtcc

SEQ ID NO: 111340 - DNA, 20 bp, Artificial Sequence
  Description of Artificial Sequence: Synthetic oligonucleotide
  Target: LAMA2; (-) strand; PAM type: NRG; PAM sequence: TAG
atggtggtggcatgtgcctg

SEQ ID NO: 111341 - DNA, 20 bp, Artificial Sequence
  Description of Artificial Sequence: Synthetic oligonucleotide
  Target: LAMA2; (-) strand; PAM type: NRG; PAM sequence: TGG
aaattagccggccatggtgg

SEQ ID NO: 111342 - DNA, 20 bp, Artificial Sequence
  Description of Artificial Sequence: Synthetic oligonucleotide
  Target: LAMA2; (-) strand; PAM type: NRG; PAM sequence: TGG
caaaaattagccggccatgg

SEQ ID NO: 111343 - DNA, 20 bp, Artificial Sequence
  Description of Artificial Sequence: Synthetic oligonucleotide
  Target: LAMA2; (-) strand; PAM type: NRG; PAM sequence: TGG
atacaaaaattagccggcca

SEQ ID NO: 111344 - DNA, 20 bp, Artificial Sequence
  Description of Artificial Sequence: Synthetic oligonucleotide
  Target: LAMA2; (-) strand; PAM type: NRG; PAM sequence: CGG
ctaaaaatacaaaaattagc

SEQ ID NO: 111345 - DNA, 20 bp, Artificial Sequence
  Description of Artificial Sequence: Synthetic oligonucleotide
  Target: LAMA2; (-) strand; PAM type: NRG; PAM sequence: TAG
tctactaaaaatacaaaaat

SEQ ID NO: 111346 - DNA, 20 bp, Artificial Sequence
  Description of Artificial Sequence: Synthetic oligonucleotide
  Target: LAMA2; (-) strand; PAM type: NRG; PAM sequence: TGG
ccagaccatcctggccaaca

SEQ ID NO: 111347 - DNA, 20 bp, Artificial Sequence
  Description of Artificial Sequence: Synthetic oligonucleotide
  Target: LAMA2; (-) strand; PAM type: NRG; PAM sequence: TGG
tcaggagatccagaccatcc

SEQ ID NO: 111348 - DNA, 20 bp, Artificial Sequence
  Description of Artificial Sequence: Synthetic oligonucleotide
  Target: LAMA2; (-) strand; PAM type: NRG; PAM sequence: CAG
gatcatgaggtcaggagatc

SEQ ID NO: 111349 - DNA, 20 bp, Artificial Sequence
  Description of Artificial Sequence: Synthetic oligonucleotide
  Target: LAMA2; (-) strand; PAM type: NRG; PAM sequence: GAG
tgggcggatcatgaggtcag

SEQ ID NO: 111350 - DNA, 20 bp, Artificial Sequence
  Description of Artificial Sequence: Synthetic oligonucleotide
  Target: LAMA2; (-) strand; PAM type: NRG; PAM sequence: AGG
gatgggcggatcatgaggtc

SEQ ID NO: 111351 - DNA, 20 bp, Artificial Sequence
  Description of Artificial Sequence: Synthetic oligonucleotide
  Target: LAMA2; (-) strand; PAM type: NRG; PAM sequence: CAG
agatgggcggatcatgaggt

SEQ ID NO: 111352 - DNA, 20 bp, Artificial Sequence
  Description of Artificial Sequence: Synthetic oligonucleotide
  Target: LAMA2; (-) strand; PAM type: NRG; PAM sequence: AGG
gctgagatgggcggatcatg

SEQ ID NO: 111353 - DNA, 20 bp, Artificial Sequence
  Description of Artificial Sequence: Synthetic oligonucleotide
  Target: LAMA2; (-) strand; PAM type: NRG; PAM sequence: GAG
ggctgagatgggcggatcat

SEQ ID NO: 111354 - DNA, 20 bp, Artificial Sequence
  Description of Artificial Sequence: Synthetic oligonucleotide
  Target: LAMA2; (-) strand; PAM type: NRG; PAM sequence: CGG
ctttgggaggctgagatggg

SEQ ID NO: 111355 - DNA, 20 bp, Artificial Sequence
  Description of Artificial Sequence: Synthetic oligonucleotide
  Target: LAMA2; (-) strand; PAM type: NRG; PAM sequence: GGG
gcactttgggaggctgagat

SEQ ID NO: 111356 - DNA, 20 bp, Artificial Sequence
  Description of Artificial Sequence: Synthetic oligonucleotide
  Target: LAMA2; (-) strand; PAM type: NRG; PAM sequence: TGG
agcactttgggaggctgaga

SEQ ID NO: 111357 - DNA, 20 bp, Artificial Sequence
  Description of Artificial Sequence: Synthetic oligonucleotide
  Target: LAMA2; (-) strand; PAM type: NRG; PAM sequence: GAG
tcccagcactttgggaggct

SEQ ID NO: 111358 - DNA, 20 bp, Artificial Sequence
  Description of Artificial Sequence: Synthetic oligonucleotide
  Target: LAMA2; (-) strand; PAM type: NRG; PAM sequence: AGG
tgtaatcccagcactttggg

SEQ ID NO: 111359 - DNA, 20 bp, Artificial Sequence
  Description of Artificial Sequence: Synthetic oligonucleotide
  Target: LAMA2; (-) strand; PAM type: NRG; PAM sequence: GAG
ctgtaatcccagcactttgg

SEQ ID NO: 111360 - DNA, 20 bp, Artificial Sequence
  Description of Artificial Sequence: Synthetic oligonucleotide
  Target: LAMA2; (-) strand; PAM type: NRG; PAM sequence: GGG
atctgtaatcccagcacttt

SEQ ID NO: 111361 - DNA, 20 bp, Artificial Sequence
  Description of Artificial Sequence: Synthetic oligonucleotide
  Target: LAMA2; (-) strand; PAM type: NRG; PAM sequence: TGG
catctgtaatcccagcactt

SEQ ID NO: 111362 - DNA, 20 bp, Artificial Sequence
  Description of Artificial Sequence: Synthetic oligonucleotide
  Target: LAMA2; (-) strand; PAM type: NRG; PAM sequence: CAG
atggctcacatctgtaatcc

SEQ ID NO: 111363 - DNA, 20 bp, Artificial Sequence
  Description of Artificial Sequence: Synthetic oligonucleotide
  Target: LAMA2; (-) strand; PAM type: NRG; PAM sequence: TGG
acagttgaggctgggtgtga

SEQ ID NO: 111364 - DNA, 20 bp, Artificial Sequence
  Description of Artificial Sequence: Synthetic oligonucleotide
  Target: LAMA2; (-) strand; PAM type: NRG; PAM sequence: GGG
taaaaaacacagttgaggct

SEQ ID NO: 111365 - DNA, 20 bp, Artificial Sequence
  Description of Artificial Sequence: Synthetic oligonucleotide
  Target: LAMA2; (-) strand; PAM type: NRG; PAM sequence: TGG
ttaaaaaacacagttgaggc

SEQ ID NO: 111366 - DNA, 20 bp, Artificial Sequence
  Description of Artificial Sequence: Synthetic oligonucleotide
  Target: LAMA2; (-) strand; PAM type: NRG; PAM sequence: AGG
ttgtttaaaaaacacagttg

SEQ ID NO: 111367 - DNA, 20 bp, Artificial Sequence
  Description of Artificial Sequence: Synthetic oligonucleotide
  Target: LAMA2; (-) strand; PAM type: NRG; PAM sequence: GAG
tttgtttaaaaaacacagtt

SEQ ID NO: 111368 - DNA, 20 bp, Artificial Sequence
  Description of Artificial Sequence: Synthetic oligonucleotide
  Target: LAMA2; (-) strand; PAM type: NRG; PAM sequence: CAG
tcagttttgtttaaaaaaca

SEQ ID NO: 111369 - DNA, 20 bp, Artificial Sequence
  Description of Artificial Sequence: Synthetic oligonucleotide
  Target: LAMA2; (-) strand; PAM type: NRG; PAM sequence: CAG
tagtttaattcctaataaat

SEQ ID NO: 111370 - DNA, 20 bp, Artificial Sequence
  Description of Artificial Sequence: Synthetic oligonucleotide
  Target: LAMA2; (-) strand; PAM type: NRG; PAM sequence: TAG
ccctatggctgtattatggc

SEQ ID NO: 111371 - DNA, 20 bp, Artificial Sequence
  Description of Artificial Sequence: Synthetic oligonucleotide
  Target: LAMA2; (-) strand; PAM type: NRG; PAM sequence: TGG
ttggccctatggctgtatta

SEQ ID NO: 111372 - DNA, 20 bp, Artificial Sequence
  Description of Artificial Sequence: Synthetic oligonucleotide
  Target: LAMA2; (-) strand; PAM type: NRG; PAM sequence: TGG
tgctttatagcttggcccta

SEQ ID NO: 111373 - DNA, 20 bp, Artificial Sequence
  Description of Artificial Sequence: Synthetic oligonucleotide
  Target: LAMA2; (-) strand; PAM type: NRG; PAM sequence: TGG
ttaataaatgctttatagct

SEQ ID NO: 111374 - DNA, 20 bp, Artificial Sequence
  Description of Artificial Sequence: Synthetic oligonucleotide
  Target: LAMA2; (-) strand; PAM type: NRG; PAM sequence: TAG
tttatttaataaatgcttta

SEQ ID NO: 111375 - DNA, 20 bp, Artificial Sequence
  Description of Artificial Sequence: Synthetic oligonucleotide
  Target: LAMA2; (-) strand; PAM type: NRG; PAM sequence: TAG
gtagtcaaagcgactgtatg

SEQ ID NO: 111376 - DNA, 20 bp, Artificial Sequence
  Description of Artificial Sequence: Synthetic oligonucleotide
  Target: LAMA2; (-) strand; PAM type: NRG; PAM sequence: AAG
tggggctgaattagtagtca

SEQ ID NO: 111377 - DNA, 20 bp, Artificial Sequence
  Description of Artificial Sequence: Synthetic oligonucleotide
  Target: LAMA2; (-) strand; PAM type: NRG; PAM sequence: TAG
tctgaatggggctgaattag

SEQ ID NO: 111378 - DNA, 20 bp, Artificial Sequence
  Description of Artificial Sequence: Synthetic oligonucleotide
  Target: LAMA2; (-) strand; PAM type: NRG; PAM sequence: TAG
aattctgaatggggctgaat

SEQ ID NO: 111379 - DNA, 20 bp, Artificial Sequence
  Description of Artificial Sequence: Synthetic oligonucleotide
  Target: LAMA2; (-) strand; PAM type: NRG; PAM sequence: GGG
atcatatccaattctgaatg

SEQ ID NO: 111380 - DNA, 20 bp, Artificial Sequence
  Description of Artificial Sequence: Synthetic oligonucleotide
  Target: LAMA2; (-) strand; PAM type: NRG; PAM sequence: GGG
aatcatatccaattctgaat

SEQ ID NO: 111381 - DNA, 20 bp, Artificial Sequence
  Description of Artificial Sequence: Synthetic oligonucleotide
  Target: LAMA2; (-) strand; PAM type: NRG; PAM sequence: TGG
caatcatatccaattctgaa

SEQ ID NO: 111382 - DNA, 20 bp, Artificial Sequence
  Description of Artificial Sequence: Synthetic oligonucleotide
  Target: LAMA2; (-) strand; PAM type: NRG; PAM sequence: CAG
gcatagtgcgttatccctgg

SEQ ID NO: 111383 - DNA, 20 bp, Artificial Sequence
  Description of Artificial Sequence: Synthetic oligonucleotide
  Target: LAMA2; (-) strand; PAM type: NRG; PAM sequence: TGG
atagcatagtgcgttatccc

SEQ ID NO: 111384 - DNA, 20 bp, Artificial Sequence
  Description of Artificial Sequence: Synthetic oligonucleotide
  Target: LAMA2; (-) strand; PAM type: NRG; PAM sequence: TAG
atgagtagaactgaatagca

SEQ ID NO: 111385 - DNA, 20 bp, Artificial Sequence
  Description of Artificial Sequence: Synthetic oligonucleotide
  Target: LAMA2; (-) strand; PAM type: NRG; PAM sequence: TAG
aattcatgagtagaactgaa

SEQ ID NO: 111386 - DNA, 20 bp, Artificial Sequence
  Description of Artificial Sequence: Synthetic oligonucleotide
  Target: LAMA2; (-) strand; PAM type: NRG; PAM sequence: TAG
atctgactggaattcatgag

SEQ ID NO: 111387 - DNA, 20 bp, Artificial Sequence
  Description of Artificial Sequence: Synthetic oligonucleotide
  Target: LAMA2; (-) strand; PAM type: NRG; PAM sequence: GAG
aagatctgactggaattcat

SEQ ID NO: 111388 - DNA, 20 bp, Artificial Sequence
  Description of Artificial Sequence: Synthetic oligonucleotide
  Target: LAMA2; (-) strand; PAM type: NRG; PAM sequence: TGG
acaagaaatcaagatctgac

SEQ ID NO: 111389 - DNA, 20 bp, Artificial Sequence
  Description of Artificial Sequence: Synthetic oligonucleotide
  Target: LAMA2; (-) strand; PAM type: NRG; PAM sequence: AAG
atcaaagtgaacaagaaatc

SEQ ID NO: 111390 - DNA, 20 bp, Artificial Sequence
  Description of Artificial Sequence: Synthetic oligonucleotide
  Target: LAMA2; (-) strand; PAM type: NRG; PAM sequence: AAG
ataagaggatcaaagtgaac

SEQ ID NO: 111391 - DNA, 20 bp, Artificial Sequence
  Description of Artificial Sequence: Synthetic oligonucleotide
  Target: LAMA2; (-) strand; PAM type: NRG; PAM sequence: AAG
ttgacatcataagaggatca

SEQ ID NO: 111392 - DNA, 20 bp, Artificial Sequence
  Description of Artificial Sequence: Synthetic oligonucleotide
  Target: LAMA2; (-) strand; PAM type: NRG; PAM sequence: AGG
cgtaccattgacatcataag

SEQ ID NO: 111393 - DNA, 20 bp, Artificial Sequence
  Description of Artificial Sequence: Synthetic oligonucleotide
  Target: LAMA2; (-) strand; PAM type: NRG; PAM sequence: GAG
acgtaccattgacatcataa

SEQ ID NO: 111394 - DNA, 20 bp, Artificial Sequence
  Description of Artificial Sequence: Synthetic oligonucleotide
  Target: LAMA2; (-) strand; PAM type: NRG; PAM sequence: AAG
atacgtaccattgacatcat

SEQ ID NO: 111395 - DNA, 20 bp, Artificial Sequence
  Description of Artificial Sequence: Synthetic oligonucleotide
  Target: LAMA2; (-) strand; PAM type: NRG; PAM sequence: AGG
gaaaatttaatatctgaggc

SEQ ID NO: 111396 - DNA, 20 bp, Artificial Sequence
  Description of Artificial Sequence: Synthetic oligonucleotide
  Target: LAMA2; (-) strand; PAM type: NRG; PAM sequence: CAG
agaaaatttaatatctgagg

SEQ ID NO: 111397 - DNA, 20 bp, Artificial Sequence
  Description of Artificial Sequence: Synthetic oligonucleotide
  Target: LAMA2; (-) strand; PAM type: NRG; PAM sequence: AGG
ttgagaaaatttaatatctg

SEQ ID NO: 111398 - DNA, 20 bp, Artificial Sequence
  Description of Artificial Sequence: Synthetic oligonucleotide
  Target: LAMA2; (-) strand; PAM type: NRG; PAM sequence: GAG
attgagaaaatttaatatct

SEQ ID NO: 111399 - DNA, 20 bp, Artificial Sequence
  Description of Artificial Sequence: Synthetic oligonucleotide
  Target: LAMA2; (-) strand; PAM type: NRG; PAM sequence: GAG
tcagagaagaccttggcatt

SEQ ID NO: 111400 - DNA, 20 bp, Artificial Sequence
  Description of Artificial Sequence: Synthetic oligonucleotide
  Target: LAMA2; (-) strand; PAM type: NRG; PAM sequence: TGG
atcattatcagagaagacct

SEQ ID NO: 111401 - DNA, 20 bp, Artificial Sequence
  Description of Artificial Sequence: Synthetic oligonucleotide
  Target: LAMA2; (-) strand; PAM type: NRG; PAM sequence: AAG
aaccaaaatcattatcagag

SEQ ID NO: 111402 - DNA, 20 bp, Artificial Sequence
  Description of Artificial Sequence: Synthetic oligonucleotide
  Target: LAMA2; (-) strand; PAM type: NRG; PAM sequence: GAG
gtgaaccaaaatcattatca

SEQ ID NO: 111403 - DNA, 20 bp, Artificial Sequence
  Description of Artificial Sequence: Synthetic oligonucleotide
  Target: LAMA2; (-) strand; PAM type: NRG; PAM sequence: CAG
aagtgaaccaaaatcattat

SEQ ID NO: 111404 - DNA, 20 bp, Artificial Sequence
  Description of Artificial Sequence: Synthetic oligonucleotide
  Target: LAMA2; (-) strand; PAM type: NRG; PAM sequence: AAG
attttttagcaagctgctga

SEQ ID NO: 111405 - DNA, 20 bp, Artificial Sequence
  Description of Artificial Sequence: Synthetic oligonucleotide
  Target: LAMA2; (-) strand; PAM type: NRG; PAM sequence: AAG
agatatagtgattttttagc

SEQ ID NO: 111406 - DNA, 20 bp, Artificial Sequence
  Description of Artificial Sequence: Synthetic oligonucleotide
  Target: LAMA2; (-) strand; PAM type: NRG; PAM sequence: TAG
tgtcagatatagtgattttt

SEQ ID NO: 111407 - DNA, 20 bp, Artificial Sequence
  Description of Artificial Sequence: Synthetic oligonucleotide
  Target: LAMA2; (-) strand; PAM type: NRG; PAM sequence: TAG
tcaggaaagggtgtcagata

SEQ ID NO: 111408 - DNA, 20 bp, Artificial Sequence
  Description of Artificial Sequence: Synthetic oligonucleotide
  Target: LAMA2; (-) strand; PAM type: NRG; PAM sequence: CAG
taatgttcaggaaagggtgt

SEQ ID NO: 111409 - DNA, 20 bp, Artificial Sequence
  Description of Artificial Sequence: Synthetic oligonucleotide
  Target: LAMA2; (-) strand; PAM type: NRG; PAM sequence: GGG
tatttttaatgttcaggaaa

SEQ ID NO: 111410 - DNA, 20 bp, Artificial Sequence
  Description of Artificial Sequence: Synthetic oligonucleotide
  Target: LAMA2; (-) strand; PAM type: NRG; PAM sequence: AGG
atatttttaatgttcaggaa

SEQ ID NO: 111411 - DNA, 20 bp, Artificial Sequence
  Description of Artificial Sequence: Synthetic oligonucleotide
  Target: LAMA2; (-) strand; PAM type: NRG; PAM sequence: AAG
gatatttttaatgttcagga

SEQ ID NO: 111412 - DNA, 20 bp, Artificial Sequence
  Description of Artificial Sequence: Synthetic oligonucleotide
  Target: LAMA2; (-) strand; PAM type: NRG; PAM sequence: AGG
ttcagatatttttaatgttc

SEQ ID NO: 111413 - DNA, 20 bp, Artificial Sequence
  Description of Artificial Sequence: Synthetic oligonucleotide
  Target: LAMA2; (-) strand; PAM type: NRG; PAM sequence: CAG
cttcagatatttttaatgtt

SEQ ID NO: 111414 - DNA, 20 bp, Artificial Sequence
  Description of Artificial Sequence: Synthetic oligonucleotide
  Target: LAMA2; (-) strand; PAM type: NRG; PAM sequence: CAG
ggtgggaaaaatatggtctt

SEQ ID NO: 111415 - DNA, 20 bp, Artificial Sequence
  Description of Artificial Sequence: Synthetic oligonucleotide
  Target: LAMA2; (-) strand; PAM type: NRG; PAM sequence: TGG
gagggcaggtgggaaaaata

SEQ ID NO: 111416 - DNA, 20 bp, Artificial Sequence
  Description of Artificial Sequence: Synthetic oligonucleotide
  Target: LAMA2; (-) strand; PAM type: NRG; PAM sequence: GGG
cagcacagtagagggcaggt

SEQ ID NO: 111417 - DNA, 20 bp, Artificial Sequence
  Description of Artificial Sequence: Synthetic oligonucleotide
  Target: LAMA2; (-) strand; PAM type: NRG; PAM sequence: TGG
acagcacagtagagggcagg

SEQ ID NO: 111418 - DNA, 20 bp, Artificial Sequence
  Description of Artificial Sequence: Synthetic oligonucleotide
  Target: LAMA2; (-) strand; PAM type: NRG; PAM sequence: AGG
aagacagcacagtagagggc

SEQ ID NO: 111419 - DNA, 20 bp, Artificial Sequence
  Description of Artificial Sequence: Synthetic oligonucleotide
  Target: LAMA2; (-) strand; PAM type: NRG; PAM sequence: CAG
aaagacagcacagtagaggg

SEQ ID NO: 111420 - DNA, 20 bp, Artificial Sequence
  Description of Artificial Sequence: Synthetic oligonucleotide
  Target: LAMA2; (-) strand; PAM type: NRG; PAM sequence: GGG
gagaaagacagcacagtaga

SEQ ID NO: 111421 - DNA, 20 bp, Artificial Sequence
  Description of Artificial Sequence: Synthetic oligonucleotide
  Target: LAMA2; (-) strand; PAM type: NRG; PAM sequence: AGG
agagaaagacagcacagtag

SEQ ID NO: 111422 - DNA, 20 bp, Artificial Sequence
  Description of Artificial Sequence: Synthetic oligonucleotide
  Target: LAMA2; (-) strand; PAM type: NRG; PAM sequence: GAG
aagagaaagacagcacagta

SEQ ID NO: 111423 - DNA, 20 bp, Artificial Sequence
  Description of Artificial Sequence: Synthetic oligonucleotide
  Target: LAMA2; (-) strand; PAM type: NRG; PAM sequence: TAG
gcaagagaaagacagcacag

SEQ ID NO: 111424 - DNA, 20 bp, Artificial Sequence
  Description of Artificial Sequence: Synthetic oligonucleotide
  Target: LAMA2; (-) strand; PAM type: NRG; PAM sequence: CAG
gaagcaagagaaagacagca

SEQ ID NO: 111425 - DNA, 20 bp, Artificial Sequence
  Description of Artificial Sequence: Synthetic oligonucleotide
  Target: LAMA2; (-) strand; PAM type: NRG; PAM sequence: CAG
agagagaagcaagagaaaga

SEQ ID NO: 111426 - DNA, 20 bp, Artificial Sequence
  Description of Artificial Sequence: Synthetic oligonucleotide
  Target: LAMA2; (-) strand; PAM type: NRG; PAM sequence: AAG
aaaaagagagaagcaagaga

SEQ ID NO: 111427 - DNA, 20 bp, Artificial Sequence
  Description of Artificial Sequence: Synthetic oligonucleotide
  Target: LAMA2; (-) strand; PAM type: NRG; PAM sequence: GAG
agataaaaagagagaagcaa

SEQ ID NO: 111428 - DNA, 20 bp, Artificial Sequence
  Description of Artificial Sequence: Synthetic oligonucleotide
  Target: LAMA2; (-) strand; PAM type: NRG; PAM sequence: AAG
agagataaaaagagagaagc

SEQ ID NO: 111429 - DNA, 20 bp, Artificial Sequence
  Description of Artificial Sequence: Synthetic oligonucleotide
  Target: LAMA2; (-) strand; PAM type: NRG; PAM sequence: AAG
gattagagataaaaagagag

SEQ ID NO: 111430 - DNA, 20 bp, Artificial Sequence
  Description of Artificial Sequence: Synthetic oligonucleotide
  Target: LAMA2; (-) strand; PAM type: NRG; PAM sequence: GAG
agggattagagataaaaaga

SEQ ID NO: 111431 - DNA, 20 bp, Artificial Sequence
  Description of Artificial Sequence: Synthetic oligonucleotide
  Target: LAMA2; (-) strand; PAM type: NRG; PAM sequence: GAG
caagggattagagataaaaa

SEQ ID NO: 111432 - DNA, 20 bp, Artificial Sequence
  Description of Artificial Sequence: Synthetic oligonucleotide
  Target: LAMA2; (-) strand; PAM type: NRG; PAM sequence: AAG
tccaagggattagagataaa

SEQ ID NO: 111433 - DNA, 20 bp, Artificial Sequence
  Description of Artificial Sequence: Synthetic oligonucleotide
  Target: LAMA2; (-) strand; PAM type: NRG; PAM sequence: GAG
aagggtcatccaagggatta

SEQ ID NO: 111434 - DNA, 20 bp, Artificial Sequence
  Description of Artificial Sequence: Synthetic oligonucleotide
  Target: LAMA2; (-) strand; PAM type: NRG; PAM sequence: TAG
ccaagggtcatccaagggat

SEQ ID NO: 111435 - DNA, 20 bp, Artificial Sequence
  Description of Artificial Sequence: Synthetic oligonucleotide
  Target: LAMA2; (-) strand; PAM type: NRG; PAM sequence: GGG
ctataccaagggtcatccaa

SEQ ID NO: 111436 - DNA, 20 bp, Artificial Sequence
  Description of Artificial Sequence: Synthetic oligonucleotide
  Target: LAMA2; (-) strand; PAM type: NRG; PAM sequence: AGG
gctataccaagggtcatcca

SEQ ID NO: 111437 - DNA, 20 bp, Artificial Sequence
  Description of Artificial Sequence: Synthetic oligonucleotide
  Target: LAMA2; (-) strand; PAM type: NRG; PAM sequence: AAG
agctataccaagggtcatcc

SEQ ID NO: 111438 - DNA, 20 bp, Artificial Sequence
  Description of Artificial Sequence: Synthetic oligonucleotide
  Target: LAMA2; (-) strand; PAM type: NRG; PAM sequence: GGG
tacaatggcagctataccaa

SEQ ID NO: 111439 - DNA, 20 bp, Artificial Sequence
  Description of Artificial Sequence: Synthetic oligonucleotide
  Target: LAMA2; (-) strand; PAM type: NRG; PAM sequence: AGG
atacaatggcagctatacca

SEQ ID NO: 111440 - DNA, 20 bp, Artificial Sequence
  Description of Artificial Sequence: Synthetic oligonucleotide
  Target: LAMA2; (-) strand; PAM type: NRG; PAM sequence: AAG
gatacaatggcagctatacc

SEQ ID NO: 111441 - DNA, 20 bp, Artificial Sequence
  Description of Artificial Sequence: Synthetic oligonucleotide
  Target: LAMA2; (-) strand; PAM type: NRG; PAM sequence: CAG
ggtgttctgtgatacaatgg

SEQ ID NO: 111442 - DNA, 20 bp, Artificial Sequence
  Description of Artificial Sequence: Synthetic oligonucleotide
  Target: LAMA2; (-) strand; PAM type: NRG; PAM sequence: TGG
aagggtgttctgtgatacaa

SEQ ID NO: 111443 - DNA, 20 bp, Artificial Sequence
  Description of Artificial Sequence: Synthetic oligonucleotide
  Target: LAMA2; (-) strand; PAM type: NRG; PAM sequence: GGG
gagcaatgggacttggcaaa

SEQ ID NO: 111444 - DNA, 20 bp, Artificial Sequence
  Description of Artificial Sequence: Synthetic oligonucleotide
  Target: LAMA2; (-) strand; PAM type: NRG; PAM sequence: AGG
tgagcaatgggacttggcaa

SEQ ID NO: 111445 - DNA, 20 bp, Artificial Sequence
  Description of Artificial Sequence: Synthetic oligonucleotide
  Target: LAMA2; (-) strand; PAM type: NRG; PAM sequence: AAG
atgagcaatgggacttggca

SEQ ID NO: 111446 - DNA, 20 bp, Artificial Sequence
  Description of Artificial Sequence: Synthetic oligonucleotide
  Target: LAMA2; (-) strand; PAM type: NRG; PAM sequence: TGG
agcagatgagcaatgggact

SEQ ID NO: 111447 - DNA, 20 bp, Artificial Sequence
  Description of Artificial Sequence: Synthetic oligonucleotide
  Target: LAMA2; (-) strand; PAM type: NRG; PAM sequence: GGG
tggcaaagcagatgagcaat

SEQ ID NO: 111448 - DNA, 20 bp, Artificial Sequence
  Description of Artificial Sequence: Synthetic oligonucleotide
  Target: LAMA2; (-) strand; PAM type: NRG; PAM sequence: TGG
atggcaaagcagatgagcaa

SEQ ID NO: 111449 - DNA, 20 bp, Artificial Sequence
  Description of Artificial Sequence: Synthetic oligonucleotide
  Target: LAMA2; (-) strand; PAM type: NRG; PAM sequence: GAG
gttaatatggcaaagcagat

SEQ ID NO: 111450 - DNA, 20 bp, Artificial Sequence
  Description of Artificial Sequence: Synthetic oligonucleotide
  Target: LAMA2; (-) strand; PAM type: NRG; PAM sequence: CAG
tggatgttaatatggcaaag

SEQ ID NO: 111451 - DNA, 20 bp, Artificial Sequence
  Description of Artificial Sequence: Synthetic oligonucleotide
  Target: LAMA2; (-) strand; PAM type: NRG; PAM sequence: AAG
acttggatgttaatatggca

SEQ ID NO: 111452 - DNA, 20 bp, Artificial Sequence
  Description of Artificial Sequence: Synthetic oligonucleotide
  Target: LAMA2; (-) strand; PAM type: NRG; PAM sequence: TGG
tttttacttggatgttaata

SEQ ID NO: 111453 - DNA, 20 bp, Artificial Sequence
  Description of Artificial Sequence: Synthetic oligonucleotide
  Target: LAMA2; (-) strand; PAM type: NRG; PAM sequence: TGG
ggaaatgtacaatttttact

SEQ ID NO: 111454 - DNA, 20 bp, Artificial Sequence
  Description of Artificial Sequence: Synthetic oligonucleotide
  Target: LAMA2; (-) strand; PAM type: NRG; PAM sequence: AGG
aattgcaaaacaatggaggt

SEQ ID NO: 111455 - DNA, 20 bp, Artificial Sequence
  Description of Artificial Sequence: Synthetic oligonucleotide
  Target: LAMA2; (-) strand; PAM type: NRG; PAM sequence: TAG
gaattgcaaaacaatggagg

SEQ ID NO: 111456 - DNA, 20 bp, Artificial Sequence
  Description of Artificial Sequence: Synthetic oligonucleotide
  Target: LAMA2; (-) strand; PAM type: NRG; PAM sequence: AGG
aatgaattgcaaaacaatgg

SEQ ID NO: 111457 - DNA, 20 bp, Artificial Sequence
  Description of Artificial Sequence: Synthetic oligonucleotide
  Target: LAMA2; (-) strand; PAM type: NRG; PAM sequence: GAG
aaatgaattgcaaaacaatg

SEQ ID NO: 111458 - DNA, 20 bp, Artificial Sequence
  Description of Artificial Sequence: Synthetic oligonucleotide
  Target: LAMA2; (-) strand; PAM type: NRG; PAM sequence: TGG
gaaaatgaattgcaaaacaa

SEQ ID NO: 111459 - DNA, 20 bp, Artificial Sequence
  Description of Artificial Sequence: Synthetic oligonucleotide
  Target: LAMA2; (-) strand; PAM type: NRG; PAM sequence: GAG
atacagtgttgagagtaggt

SEQ ID NO: 111460 - DNA, 20 bp, Artificial Sequence
  Description of Artificial Sequence: Synthetic oligonucleotide
  Target: LAMA2; (-) strand; PAM type: NRG; PAM sequence: AGG
ctacatacagtgttgagagt

SEQ ID NO: 111461 - DNA, 20 bp, Artificial Sequence
  Description of Artificial Sequence: Synthetic oligonucleotide
  Target: LAMA2; (-) strand; PAM type: NRG; PAM sequence: TAG
tctacatacagtgttgagag

SEQ ID NO: 111462 - DNA, 20 bp, Artificial Sequence
  Description of Artificial Sequence: Synthetic oligonucleotide
  Target: LAMA2; (-) strand; PAM type: NRG; PAM sequence: GAG
ccttctacatacagtgttga

SEQ ID NO: 111463 - DNA, 20 bp, Artificial Sequence
  Description of Artificial Sequence: Synthetic oligonucleotide
  Target: LAMA2; (-) strand; PAM type: NRG; PAM sequence: GAG
tcccttctacatacagtgtt

SEQ ID NO: 111464 - DNA, 20 bp, Artificial Sequence
  Description of Artificial Sequence: Synthetic oligonucleotide
  Target: LAMA2; (-) strand; PAM type: NRG; PAM sequence: CAG
tggaatttcccttctacata

SEQ ID NO: 111465 - DNA, 20 bp, Artificial Sequence
  Description of Artificial Sequence: Synthetic oligonucleotide
  Target: LAMA2; (-) strand; PAM type: NRG; PAM sequence: TGG
agttcctgcttcacaaatca

SEQ ID NO: 111466 - DNA, 20 bp, Artificial Sequence
  Description of Artificial Sequence: Synthetic oligonucleotide
  Target: LAMA2; (-) strand; PAM type: NRG; PAM sequence: TAG
gtggttttcagttgggaagt

SEQ ID NO: 111467 - DNA, 20 bp, Artificial Sequence
  Description of Artificial Sequence: Synthetic oligonucleotide
  Target: LAMA2; (-) strand; PAM type: NRG; PAM sequence: AAG
tagggtggttttcagttggg

SEQ ID NO: 111468 - DNA, 20 bp, Artificial Sequence
  Description of Artificial Sequence: Synthetic oligonucleotide
  Target: LAMA2; (-) strand; PAM type: NRG; PAM sequence: GGG
ggatagggtggttttcagtt

SEQ ID NO: 111469 - DNA, 20 bp, Artificial Sequence
  Description of Artificial Sequence: Synthetic oligonucleotide
  Target: LAMA2; (-) strand; PAM type: NRG; PAM sequence: TGG
tggatagggtggttttcagt

SEQ ID NO: 111470 - DNA, 20 bp, Artificial Sequence
  Description of Artificial Sequence: Synthetic oligonucleotide
  Target: LAMA2; (-) strand; PAM type: NRG; PAM sequence: CAG
cttctggatagggtggtttt

SEQ ID NO: 111471 - DNA, 20 bp, Artificial Sequence
  Description of Artificial Sequence: Synthetic oligonucleotide
  Target: LAMA2; (-) strand; PAM type: NRG; PAM sequence: TGG
agacagtcttctggataggg

SEQ ID NO: 111472 - DNA, 20 bp, Artificial Sequence
  Description of Artificial Sequence: Synthetic oligonucleotide
  Target: LAMA2; (-) strand; PAM type: NRG; PAM sequence: GGG
gggagacagtcttctggata

SEQ ID NO: 111473 - DNA, 20 bp, Artificial Sequence
  Description of Artificial Sequence: Synthetic oligonucleotide
  Target: LAMA2; (-) strand; PAM type: NRG; PAM sequence: AGG
agggagacagtcttctggat

SEQ ID NO: 111474 - DNA, 20 bp, Artificial Sequence
  Description of Artificial Sequence: Synthetic oligonucleotide
  Target: LAMA2; (-) strand; PAM type: NRG; PAM sequence: TAG
tagggagacagtcttctgga

SEQ ID NO: 111475 - DNA, 20 bp, Artificial Sequence
  Description of Artificial Sequence: Synthetic oligonucleotide
  Target: LAMA2; (-) strand; PAM type: NRG; PAM sequence: TGG
gtcctagggagacagtcttc

SEQ ID NO: 111476 - DNA, 20 bp, Artificial Sequence
  Description of Artificial Sequence: Synthetic oligonucleotide
  Target: LAMA2; (-) strand; PAM type: NRG; PAM sequence: CAG
tgttctgtgtcctagggaga

SEQ ID NO: 111477 - DNA, 20 bp, Artificial Sequence
  Description of Artificial Sequence: Synthetic oligonucleotide
  Target: LAMA2; (-) strand; PAM type: NRG; PAM sequence: GAG
tgtttgttctgtgtcctagg

SEQ ID NO: 111478 - DNA, 20 bp, Artificial Sequence
  Description of Artificial Sequence: Synthetic oligonucleotide
  Target: LAMA2; (-) strand; PAM type: NRG; PAM sequence: GGG
agtgtttgttctgtgtccta

SEQ ID NO: 111479 - DNA, 20 bp, Artificial Sequence
  Description of Artificial Sequence: Synthetic oligonucleotide
  Target: LAMA2; (-) strand; PAM type: NRG; PAM sequence: AGG
gagtgtttgttctgtgtcct

SEQ ID NO: 111480 - DNA, 20 bp, Artificial Sequence
  Description of Artificial Sequence: Synthetic oligonucleotide
  Target: LAMA2; (-) strand; PAM type: NRG; PAM sequence: TAG
agagtgtttgttctgtgtcc

SEQ ID NO: 111481 - DNA, 20 bp, Artificial Sequence
  Description of Artificial Sequence: Synthetic oligonucleotide
  Target: LAMA2; (-) strand; PAM type: NRG; PAM sequence: GAG
agggccaactatggtcctca

SEQ ID NO: 111482 - DNA, 20 bp, Artificial Sequence
  Description of Artificial Sequence: Synthetic oligonucleotide
  Target: LAMA2; (-) strand; PAM type: NRG; PAM sequence: CAG
tcagggccaactatggtcct

SEQ ID NO: 111483 - DNA, 20 bp, Artificial Sequence
  Description of Artificial Sequence: Synthetic oligonucleotide
  Target: LAMA2; (-) strand; PAM type: NRG; PAM sequence: TGG
gcaggactcagggccaacta

SEQ ID NO: 111484 - DNA, 20 bp, Artificial Sequence
  Description of Artificial Sequence: Synthetic oligonucleotide
  Target: LAMA2; (-) strand; PAM type: NRG; PAM sequence: GGG
actgctgggtgcaggactca

SEQ ID NO: 111485 - DNA, 20 bp, Artificial Sequence
  Description of Artificial Sequence: Synthetic oligonucleotide
  Target: LAMA2; (-) strand; PAM type: NRG; PAM sequence: AGG
aactgctgggtgcaggactc

SEQ ID NO: 111486 - DNA, 20 bp, Artificial Sequence
  Description of Artificial Sequence: Synthetic oligonucleotide
  Target: LAMA2; (-) strand; PAM type: NRG; PAM sequence: CAG
caactgctgggtgcaggact

SEQ ID NO: 111487 - DNA, 20 bp, Artificial Sequence
  Description of Artificial Sequence: Synthetic oligonucleotide
  Target: LAMA2; (-) strand; PAM type: NRG; PAM sequence: AGG
gcctgccaactgctgggtgc

SEQ ID NO: 111488 - DNA, 20 bp, Artificial Sequence
  Description of Artificial Sequence: Synthetic oligonucleotide
  Target: LAMA2; (-) strand; PAM type: NRG; PAM sequence: CAG
agcctgccaactgctgggtg

SEQ ID NO: 111489 - DNA, 20 bp, Artificial Sequence
  Description of Artificial Sequence: Synthetic oligonucleotide
  Target: LAMA2; (-) strand; PAM type: NRG; PAM sequence: GGG
gggccagcctgccaactgct

SEQ ID NO: 111490 - DNA, 20 bp, Artificial Sequence
  Description of Artificial Sequence: Synthetic oligonucleotide
  Target: LAMA2; (-) strand; PAM type: NRG; PAM sequence: TGG
ggggccagcctgccaactgc

SEQ ID NO: 111491 - DNA, 20 bp, Artificial Sequence
  Description of Artificial Sequence: Synthetic oligonucleotide
  Target: LAMA2; (-) strand; PAM type: NRG; PAM sequence: CAG
cttccccaaaaaggtggggc

SEQ ID NO: 111492 - DNA, 20 bp, Artificial Sequence
  Description of Artificial Sequence: Synthetic oligonucleotide
  Target: LAMA2; (-) strand; PAM type: NRG; PAM sequence: GGG
ttgccttccccaaaaaggtg

SEQ ID NO: 111493 - DNA, 20 bp, Artificial Sequence
  Description of Artificial Sequence: Synthetic oligonucleotide
  Target: LAMA2; (-) strand; PAM type: NRG; PAM sequence: GGG
cttgccttccccaaaaaggt

SEQ ID NO: 111494 - DNA, 20 bp, Artificial Sequence
  Description of Artificial Sequence: Synthetic oligonucleotide
  Target: LAMA2; (-) strand; PAM type: NRG; PAM sequence: TGG
tcttgccttccccaaaaagg

SEQ ID NO: 111495 - DNA, 20 bp, Artificial Sequence
  Description of Artificial Sequence: Synthetic oligonucleotide
  Target: LAMA2; (-) strand; PAM type: NRG; PAM sequence: AGG
tattcttgccttccccaaaa

SEQ ID NO: 111496 - DNA, 20 bp, Artificial Sequence
  Description of Artificial Sequence: Synthetic oligonucleotide
  Target: LAMA2; (-) strand; PAM type: NRG; PAM sequence: AAG
ttattcttgccttccccaaa

SEQ ID NO: 111497 - DNA, 20 bp, Artificial Sequence
  Description of Artificial Sequence: Synthetic oligonucleotide
  Target: LAMA2; (-) strand; PAM type: NRG; PAM sequence: AAG
ctggggctggacattccagg

SEQ ID NO: 111498 - DNA, 20 bp, Artificial Sequence
  Description of Artificial Sequence: Synthetic oligonucleotide
  Target: LAMA2; (-) strand; PAM type: NRG; PAM sequence: AGG
ggcctggggctggacattcc

SEQ ID NO: 111499 - DNA, 20 bp, Artificial Sequence
  Description of Artificial Sequence: Synthetic oligonucleotide
  Target: LAMA2; (-) strand; PAM type: NRG; PAM sequence: CAG
tggcctggggctggacattc

SEQ ID NO: 111500 - DNA, 20 bp, Artificial Sequence
  Description of Artificial Sequence: Synthetic oligonucleotide
  Target: LAMA2; (-) strand; PAM type: NRG; PAM sequence: TGG
tgagtgtggtggcctggggc

SEQ ID NO: 111501 - DNA, 20 bp, Artificial Sequence
  Description of Artificial Sequence: Synthetic oligonucleotide
  Target: LAMA2; (-) strand; PAM type: NRG; PAM sequence: GGG
ggcctgagtgtggtggcctg

SEQ ID NO: 111502 - DNA, 20 bp, Artificial Sequence
  Description of Artificial Sequence: Synthetic oligonucleotide
  Target: LAMA2; (-) strand; PAM type: NRG; PAM sequence: GGG
aggcctgagtgtggtggcct

SEQ ID NO: 111503 - DNA, 20 bp, Artificial Sequence
  Description of Artificial Sequence: Synthetic oligonucleotide
  Target: LAMA2; (-) strand; PAM type: NRG; PAM sequence: TGG
gaggcctgagtgtggtggcc

SEQ ID NO: 111504 - DNA, 20 bp, Artificial Sequence
  Description of Artificial Sequence: Synthetic oligonucleotide
  Target: LAMA2; (-) strand; PAM type: NRG; PAM sequence: TGG
tgctggaggcctgagtgtgg

SEQ ID NO: 111505 - DNA, 20 bp, Artificial Sequence
  Description of Artificial Sequence: Synthetic oligonucleotide
  Target: LAMA2; (-) strand; PAM type: NRG; PAM sequence: TGG
gactgctggaggcctgagtg

SEQ ID NO: 111506 - DNA, 20 bp, Artificial Sequence
  Description of Artificial Sequence: Synthetic oligonucleotide
  Target: LAMA2; (-) strand; PAM type: NRG; PAM sequence: GAG
agggtgactgctggaggcct

SEQ ID NO: 111507 - DNA, 20 bp, Artificial Sequence
  Description of Artificial Sequence: Synthetic oligonucleotide
  Target: LAMA2; (-) strand; PAM type: NRG; PAM sequence: AGG
cagaggagggtgactgctgg

SEQ ID NO: 111508 - DNA, 20 bp, Artificial Sequence
  Description of Artificial Sequence: Synthetic oligonucleotide
  Target: LAMA2; (-) strand; PAM type: NRG; PAM sequence: GAG
ccagaggagggtgactgctg

SEQ ID NO: 111509 - DNA, 20 bp, Artificial Sequence
  Description of Artificial Sequence: Synthetic oligonucleotide
  Target: LAMA2; (-) strand; PAM type: NRG; PAM sequence: TGG
acccagaggagggtgactgc

SEQ ID NO: 111510 - DNA, 20 bp, Artificial Sequence
  Description of Artificial Sequence: Synthetic oligonucleotide
  Target: LAMA2; (-) strand; PAM type: NRG; PAM sequence: GGG
ttcctccaccacccagagga

SEQ ID NO: 111511 - DNA, 20 bp, Artificial Sequence
  Description of Artificial Sequence: Synthetic oligonucleotide
  Target: LAMA2; (-) strand; PAM type: NRG; PAM sequence: AGG
tttcctccaccacccagagg

SEQ ID NO: 111512 - DNA, 20 bp, Artificial Sequence
  Description of Artificial Sequence: Synthetic oligonucleotide
  Target: LAMA2; (-) strand; PAM type: NRG; PAM sequence: GAG
gtttcctccaccacccagag

SEQ ID NO: 111513 - DNA, 20 bp, Artificial Sequence
  Description of Artificial Sequence: Synthetic oligonucleotide
  Target: LAMA2; (-) strand; PAM type: NRG; PAM sequence: AGG
ctgtttcctccaccacccag

SEQ ID NO: 111514 - DNA, 20 bp, Artificial Sequence
  Description of Artificial Sequence: Synthetic oligonucleotide
  Target: LAMA2; (-) strand; PAM type: NRG; PAM sequence: GAG
gctgtttcctccaccaccca

SEQ ID NO: 111515 - DNA, 20 bp, Artificial Sequence
  Description of Artificial Sequence: Synthetic oligonucleotide
  Target: LAMA2; (-) strand; PAM type: NRG; PAM sequence: CAG
gggctgtttcctccaccacc

SEQ ID NO: 111516 - DNA, 20 bp, Artificial Sequence
  Description of Artificial Sequence: Synthetic oligonucleotide
  Target: LAMA2; (-) strand; PAM type: NRG; PAM sequence: GGG
tgtgttctggagagaaacag

SEQ ID NO: 111517 - DNA, 20 bp, Artificial Sequence
  Description of Artificial Sequence: Synthetic oligonucleotide
  Target: LAMA2; (-) strand; PAM type: NRG; PAM sequence: GGG
ctgtgttctggagagaaaca

SEQ ID NO: 111518 - DNA, 20 bp, Artificial Sequence
  Description of Artificial Sequence: Synthetic oligonucleotide
  Target: LAMA2; (-) strand; PAM type: NRG; PAM sequence: AGG
actgtgttctggagagaaac

SEQ ID NO: 111519 - DNA, 20 bp, Artificial Sequence
  Description of Artificial Sequence: Synthetic oligonucleotide
  Target: LAMA2; (-) strand; PAM type: NRG; PAM sequence: CAG
cactgtgttctggagagaaa

SEQ ID NO: 111520 - DNA, 20 bp, Artificial Sequence
  Description of Artificial Sequence: Synthetic oligonucleotide
  Target: LAMA2; (-) strand; PAM type: NRG; PAM sequence: GAG
agaggacactgtgttctgga

SEQ ID NO: 111521 - DNA, 20 bp, Artificial Sequence
  Description of Artificial Sequence: Synthetic oligonucleotide
  Target: LAMA2; (-) strand; PAM type: NRG; PAM sequence: GAG
gaagaggacactgtgttctg

SEQ ID NO: 111522 - DNA, 20 bp, Artificial Sequence
  Description of Artificial Sequence: Synthetic oligonucleotide
  Target: LAMA2; (-) strand; PAM type: NRG; PAM sequence: TGG
atgaagaggacactgtgttc

SEQ ID NO: 111523 - DNA, 20 bp, Artificial Sequence
  Description of Artificial Sequence: Synthetic oligonucleotide
  Target: LAMA2; (-) strand; PAM type: NRG; PAM sequence: AGG
caaattgtatctccatgaag

SEQ ID NO: 111524 - DNA, 20 bp, Artificial Sequence
  Description of Artificial Sequence: Synthetic oligonucleotide
  Target: LAMA2; (-) strand; PAM type: NRG; PAM sequence: GAG
tcaaattgtatctccatgaa

SEQ ID NO: 111525 - DNA, 20 bp, Artificial Sequence
  Description of Artificial Sequence: Synthetic oligonucleotide
  Target: LAMA2; (-) strand; PAM type: NRG; PAM sequence: AAG
aatcaaattgtatctccatg

SEQ ID NO: 111526 - DNA, 20 bp, Artificial Sequence
  Description of Artificial Sequence: Synthetic oligonucleotide
  Target: LAMA2; (-) strand; PAM type: NRG; PAM sequence: AAG
acgtctcccacagaccgcat

SEQ ID NO: 111527 - DNA, 20 bp, Artificial Sequence
  Description of Artificial Sequence: Synthetic oligonucleotide
  Target: LAMA2; (-) strand; PAM type: NRG; PAM sequence: CAG
aagatctgttacgtctccca

SEQ ID NO: 111528 - DNA, 20 bp, Artificial Sequence
  Description of Artificial Sequence: Synthetic oligonucleotide
  Target: LAMA2; (-) strand; PAM type: NRG; PAM sequence: AAG
gagaccttctggggatacag

SEQ ID NO: 111529 - DNA, 20 bp, Artificial Sequence
  Description of Artificial Sequence: Synthetic oligonucleotide
  Target: LAMA2; (-) strand; PAM type: NRG; PAM sequence: CAG
tttgagaccttctggggata

SEQ ID NO: 111530 - DNA, 20 bp, Artificial Sequence
  Description of Artificial Sequence: Synthetic oligonucleotide
  Target: LAMA2; (-) strand; PAM type: NRG; PAM sequence: GGG
tatagatttgagaccttctg

SEQ ID NO: 111531 - DNA, 20 bp, Artificial Sequence
  Description of Artificial Sequence: Synthetic oligonucleotide
  Target: LAMA2; (-) strand; PAM type: NRG; PAM sequence: GGG
atatagatttgagaccttct

SEQ ID NO: 111532 - DNA, 20 bp, Artificial Sequence
  Description of Artificial Sequence: Synthetic oligonucleotide
  Target: LAMA2; (-) strand; PAM type: NRG; PAM sequence: TGG
catatagatttgagaccttc

SEQ ID NO: 111533 - DNA, 20 bp, Artificial Sequence
  Description of Artificial Sequence: Synthetic oligonucleotide
  Target: LAMA2; (-) strand; PAM type: NRG; PAM sequence: GAG
aggtaaattcatatagattt

SEQ ID NO: 111534 - DNA, 20 bp, Artificial Sequence
  Description of Artificial Sequence: Synthetic oligonucleotide
  Target: LAMA2; (-) strand; PAM type: NRG; PAM sequence: TAG
ttgcaataggtaaattcata

SEQ ID NO: 111535 - DNA, 20 bp, Artificial Sequence
  Description of Artificial Sequence: Synthetic oligonucleotide
  Target: LAMA2; (-) strand; PAM type: NRG; PAM sequence: AGG
taaagagggatttttgcaat

SEQ ID NO: 111536 - DNA, 20 bp, Artificial Sequence
  Description of Artificial Sequence: Synthetic oligonucleotide
  Target: LAMA2; (-) strand; PAM type: NRG; PAM sequence: TAG
ctaaagagggatttttgcaa

SEQ ID NO: 111537 - DNA, 20 bp, Artificial Sequence
  Description of Artificial Sequence: Synthetic oligonucleotide
  Target: LAMA2; (-) strand; PAM type: NRG; PAM sequence: GGG
tcaaaagagaaggctaaaga

SEQ ID NO: 111538 - DNA, 20 bp, Artificial Sequence
  Description of Artificial Sequence: Synthetic oligonucleotide
  Target: LAMA2; (-) strand; PAM type: NRG; PAM sequence: AGG
ttcaaaagagaaggctaaag

SEQ ID NO: 111539 - DNA, 20 bp, Artificial Sequence
  Description of Artificial Sequence: Synthetic oligonucleotide
  Target: LAMA2; (-) strand; PAM type: NRG; PAM sequence: GAG
attcaaaagagaaggctaaa

SEQ ID NO: 111540 - DNA, 20 bp, Artificial Sequence
  Description of Artificial Sequence: Synthetic oligonucleotide
  Target: LAMA2; (-) strand; PAM type: NRG; PAM sequence: AAG
ggattcaaaagagaaggcta

SEQ ID NO: 111541 - DNA, 20 bp, Artificial Sequence
  Description of Artificial Sequence: Synthetic oligonucleotide
  Target: LAMA2; (-) strand; PAM type: NRG; PAM sequence: AGG
ttggttggattcaaaagaga

SEQ ID NO: 111542 - DNA, 20 bp, Artificial Sequence
  Description of Artificial Sequence: Synthetic oligonucleotide
  Target: LAMA2; (-) strand; PAM type: NRG; PAM sequence: AAG
attggttggattcaaaagag

SEQ ID NO: 111543 - DNA, 20 bp, Artificial Sequence
  Description of Artificial Sequence: Synthetic oligonucleotide
  Target: LAMA2; (-) strand; PAM type: NRG; PAM sequence: GAG
caaattggttggattcaaaa

SEQ ID NO: 111544 - DNA, 20 bp, Artificial Sequence
  Description of Artificial Sequence: Synthetic oligonucleotide
  Target: LAMA2; (-) strand; PAM type: NRG; PAM sequence: AAG
gccaaattggttggattcaa

SEQ ID NO: 111545 - DNA, 20 bp, Artificial Sequence
  Description of Artificial Sequence: Synthetic oligonucleotide
  Target: LAMA2; (-) strand; PAM type: NRG; PAM sequence: TGG
aggttgggtgccaaattggt

SEQ ID NO: 111546 - DNA, 20 bp, Artificial Sequence
  Description of Artificial Sequence: Synthetic oligonucleotide
  Target: LAMA2; (-) strand; PAM type: NRG; PAM sequence: TGG
gcaaaggttgggtgccaaat

SEQ ID NO: 111547 - DNA, 20 bp, Artificial Sequence
  Description of Artificial Sequence: Synthetic oligonucleotide
  Target: LAMA2; (-) strand; PAM type: NRG; PAM sequence: GGG
gcaagtatactgcaaaggtt

SEQ ID NO: 111548 - DNA, 20 bp, Artificial Sequence
  Description of Artificial Sequence: Synthetic oligonucleotide
  Target: LAMA2; (-) strand; PAM type: NRG; PAM sequence: TGG
tgcaagtatactgcaaaggt

SEQ ID NO: 111549 - DNA, 20 bp, Artificial Sequence
  Description of Artificial Sequence: Synthetic oligonucleotide
  Target: LAMA2; (-) strand; PAM type: NRG; PAM sequence: AGG
gtcatgcaagtatactgcaa

SEQ ID NO: 111550 - DNA, 20 bp, Artificial Sequence
  Description of Artificial Sequence: Synthetic oligonucleotide
  Target: LAMA2; (-) strand; PAM type: NRG; PAM sequence: AAG
ggtcatgcaagtatactgca

SEQ ID NO: 111551 - DNA, 20 bp, Artificial Sequence
  Description of Artificial Sequence: Synthetic oligonucleotide
  Target: LAMA2; (-) strand; PAM type: NRG; PAM sequence: AAG
cccttctccaagggtcatgc

SEQ ID NO: 111552 - DNA, 20 bp, Artificial Sequence
  Description of Artificial Sequence: Synthetic oligonucleotide
  Target: LAMA2; (-) strand; PAM type: NRG; PAM sequence: GGG
gaactgtggcccttctccaa

SEQ ID NO: 111553 - DNA, 20 bp, Artificial Sequence
  Description of Artificial Sequence: Synthetic oligonucleotide
  Target: LAMA2; (-) strand; PAM type: NRG; PAM sequence: AGG
agaactgtggcccttctcca

SEQ ID NO: 111554 - DNA, 20 bp, Artificial Sequence
  Description of Artificial Sequence: Synthetic oligonucleotide
  Target: LAMA2; (-) strand; PAM type: NRG; PAM sequence: AAG
cagaactgtggcccttctcc

SEQ ID NO: 111555 - DNA, 20 bp, Artificial Sequence
  Description of Artificial Sequence: Synthetic oligonucleotide
  Target: LAMA2; (-) strand; PAM type: NRG; PAM sequence: TGG
tttgagtatgggcagaactg

SEQ ID NO: 111556 - DNA, 20 bp, Artificial Sequence
  Description of Artificial Sequence: Synthetic oligonucleotide
  Target: LAMA2; (-) strand; PAM type: NRG; PAM sequence: CAG
catttgtgtttgagtatggg

SEQ ID NO: 111557 - DNA, 20 bp, Artificial Sequence
  Description of Artificial Sequence: Synthetic oligonucleotide
  Target: LAMA2; (-) strand; PAM type: NRG; PAM sequence: GGG
cctcatttgtgtttgagtat

SEQ ID NO: 111558 - DNA, 20 bp, Artificial Sequence
  Description of Artificial Sequence: Synthetic oligonucleotide
  Target: LAMA2; (-) strand; PAM type: NRG; PAM sequence: TGG
gcctcatttgtgtttgagta

SEQ ID NO: 111559 - DNA, 20 bp, Artificial Sequence
  Description of Artificial Sequence: Synthetic oligonucleotide
  Target: LAMA2; (-) strand; PAM type: NRG; PAM sequence: GAG
caagagcctcatttgtgttt

SEQ ID NO: 111560 - DNA, 20 bp, Artificial Sequence
  Description of Artificial Sequence: Synthetic oligonucleotide
  Target: LAMA2; (-) strand; PAM type: NRG; PAM sequence: GAG
acaccaggaggtgtctccaa

SEQ ID NO: 111561 - DNA, 20 bp, Artificial Sequence
  Description of Artificial Sequence: Synthetic oligonucleotide
  Target: LAMA2; (-) strand; PAM type: NRG; PAM sequence: AAG
tgacaccaggaggtgtctcc

SEQ ID NO: 111562 - DNA, 20 bp, Artificial Sequence
  Description of Artificial Sequence: Synthetic oligonucleotide
  Target: LAMA2; (-) strand; PAM type: NRG; PAM sequence: AGG
catatgatcatgacaccagg

SEQ ID NO: 111563 - DNA, 20 bp, Artificial Sequence
  Description of Artificial Sequence: Synthetic oligonucleotide
  Target: LAMA2; (-) strand; PAM type: NRG; PAM sequence: GAG
ccatatgatcatgacaccag

SEQ ID NO: 111564 - DNA, 20 bp, Artificial Sequence
  Description of Artificial Sequence: Synthetic oligonucleotide
  Target: LAMA2; (-) strand; PAM type: NRG; PAM sequence: AGG
ctccatatgatcatgacacc

SEQ ID NO: 111565 - DNA, 20 bp, Artificial Sequence
  Description of Artificial Sequence: Synthetic oligonucleotide
  Target: LAMA2; (-) strand; PAM type: NRG; PAM sequence: CAG
cctccatatgatcatgacac

SEQ ID NO: 111566 - DNA, 20 bp, Artificial Sequence
  Description of Artificial Sequence: Synthetic oligonucleotide
  Target: LAMA2; (-) strand; PAM type: NRG; PAM sequence: CAG
agatagcctagaaaccaaaa

SEQ ID NO: 111567 - DNA, 20 bp, Artificial Sequence
  Description of Artificial Sequence: Synthetic oligonucleotide
  Target: LAMA2; (-) strand; PAM type: NRG; PAM sequence: TAG
agactcccaacaagatagcc

SEQ ID NO: 111568 - DNA, 20 bp, Artificial Sequence
  Description of Artificial Sequence: Synthetic oligonucleotide
  Target: LAMA2; (-) strand; PAM type: NRG; PAM sequence: TAG
tgtgcagactcccaacaaga

SEQ ID NO: 111569 - DNA, 20 bp, Artificial Sequence
  Description of Artificial Sequence: Synthetic oligonucleotide
  Target: LAMA2; (-) strand; PAM type: NRG; PAM sequence: AAG
gggctgtgcagactcccaac

SEQ ID NO: 111570 - DNA, 20 bp, Artificial Sequence
  Description of Artificial Sequence: Synthetic oligonucleotide
  Target: LAMA2; (-) strand; PAM type: NRG; PAM sequence: CAG
acctccatgaaagggctgtg

SEQ ID NO: 111571 - DNA, 20 bp, Artificial Sequence
  Description of Artificial Sequence: Synthetic oligonucleotide
  Target: LAMA2; (-) strand; PAM type: NRG; PAM sequence: GGG
tcatcattacctccatgaaa

SEQ ID NO: 111572 - DNA, 20 bp, Artificial Sequence
  Description of Artificial Sequence: Synthetic oligonucleotide
  Target: LAMA2; (-) strand; PAM type: NRG; PAM sequence: AGG
atcatcattacctccatgaa

SEQ ID NO: 111573 - DNA, 20 bp, Artificial Sequence
  Description of Artificial Sequence: Synthetic oligonucleotide
  Target: LAMA2; (-) strand; PAM type: NRG; PAM sequence: AAG
catcatcattacctccatga

SEQ ID NO: 111574 - DNA, 20 bp, Artificial Sequence
  Description of Artificial Sequence: Synthetic oligonucleotide
  Target: LAMA2; (-) strand; PAM type: NRG; PAM sequence: TAG
acatttggaagaaaaccaac

SEQ ID NO: 111575 - DNA, 20 bp, Artificial Sequence
  Description of Artificial Sequence: Synthetic oligonucleotide
  Target: LAMA2; (-) strand; PAM type: NRG; PAM sequence: AAG
catgtaatttgcacatttgg

SEQ ID NO: 111576 - DNA, 20 bp, Artificial Sequence
  Description of Artificial Sequence: Synthetic oligonucleotide
  Target: LAMA2; (-) strand; PAM type: NRG; PAM sequence: TGG
actcatgtaatttgcacatt

SEQ ID NO: 111577 - DNA, 20 bp, Artificial Sequence
  Description of Artificial Sequence: Synthetic oligonucleotide
  Target: LAMA2; (-) strand; PAM type: NRG; PAM sequence: TAG
ttccattttttcatttcttc

SEQ ID NO: 111578 - DNA, 20 bp, Artificial Sequence
  Description of Artificial Sequence: Synthetic oligonucleotide
  Target: LAMA2; (-) strand; PAM type: NRG; PAM sequence: CAG
gccctcttggccttcactag

SEQ ID NO: 111579 - DNA, 20 bp, Artificial Sequence
  Description of Artificial Sequence: Synthetic oligonucleotide
  Target: LAMA2; (-) strand; PAM type: NRG; PAM sequence: TAG
aatgccctcttggccttcac

SEQ ID NO: 111580 - DNA, 20 bp, Artificial Sequence
  Description of Artificial Sequence: Synthetic oligonucleotide
  Target: LAMA2; (-) strand; PAM type: NRG; PAM sequence: TGG
catttgttcaaatgccctct

SEQ ID NO: 111581 - DNA, 20 bp, Artificial Sequence
  Description of Artificial Sequence: Synthetic oligonucleotide
  Target: LAMA2; (-) strand; PAM type: NRG; PAM sequence: AAG
gaaggaggcagagagagggg

SEQ ID NO: 111582 - DNA, 20 bp, Artificial Sequence
  Description of Artificial Sequence: Synthetic oligonucleotide
  Target: LAMA2; (-) strand; PAM type: NRG; PAM sequence: GGG
ccagaaggaggcagagagag

SEQ ID NO: 111583 - DNA, 20 bp, Artificial Sequence
  Description of Artificial Sequence: Synthetic oligonucleotide
  Target: LAMA2; (-) strand; PAM type: NRG; PAM sequence: GGG
tccagaaggaggcagagaga

SEQ ID NO: 111584 - DNA, 20 bp, Artificial Sequence
  Description of Artificial Sequence: Synthetic oligonucleotide
  Target: LAMA2; (-) strand; PAM type: NRG; PAM sequence: AGG
ctccagaaggaggcagagag

SEQ ID NO: 111585 - DNA, 20 bp, Artificial Sequence
  Description of Artificial Sequence: Synthetic oligonucleotide
  Target: LAMA2; (-) strand; PAM type: NRG; PAM sequence: GAG
gctccagaaggaggcagaga

SEQ ID NO: 111586 - DNA, 20 bp, Artificial Sequence
  Description of Artificial Sequence: Synthetic oligonucleotide
  Target: LAMA2; (-) strand; PAM type: NRG; PAM sequence: GAG
gcgctccagaaggaggcaga

SEQ ID NO: 111587 - DNA, 20 bp, Artificial Sequence
  Description of Artificial Sequence: Synthetic oligonucleotide
  Target: LAMA2; (-) strand; PAM type: NRG; PAM sequence: GAG
tagcgctccagaaggaggca

SEQ ID NO: 111588 - DNA, 20 bp, Artificial Sequence
  Description of Artificial Sequence: Synthetic oligonucleotide
  Target: LAMA2; (-) strand; PAM type: NRG; PAM sequence: CAG
gatagcgctccagaaggagg

SEQ ID NO: 111589 - DNA, 20 bp, Artificial Sequence
  Description of Artificial Sequence: Synthetic oligonucleotide
  Target: LAMA2; (-) strand; PAM type: NRG; PAM sequence: AGG
attgatagcgctccagaagg

SEQ ID NO: 111590 - DNA, 20 bp, Artificial Sequence
  Description of Artificial Sequence: Synthetic oligonucleotide
  Target: LAMA2; (-) strand; PAM type: NRG; PAM sequence: GAG
cattgatagcgctccagaag

SEQ ID NO: 111591 - DNA, 20 bp, Artificial Sequence
  Description of Artificial Sequence: Synthetic oligonucleotide
  Target: LAMA2; (-) strand; PAM type: NRG; PAM sequence: AGG
ttcattgatagcgctccaga

SEQ ID NO: 111592 - DNA, 20 bp, Artificial Sequence
  Description of Artificial Sequence: Synthetic oligonucleotide
  Target: LAMA2; (-) strand; PAM type: NRG; PAM sequence: AAG
gttcattgatagcgctccag

SEQ ID NO: 111593 - DNA, 20 bp, Artificial Sequence
  Description of Artificial Sequence: Synthetic oligonucleotide
  Target: LAMA2; (-) strand; PAM type: NRG; PAM sequence: CAG
tttgttcattgatagcgctc

SEQ ID NO: 111594 - DNA, 20 bp, Artificial Sequence
  Description of Artificial Sequence: Synthetic oligonucleotide
  Target: LAMA2; (-) strand; PAM type: NRG; PAM sequence: TAG
tctgtaactttgttcattga

SEQ ID NO: 111595 - DNA, 20 bp, Artificial Sequence
  Description of Artificial Sequence: Synthetic oligonucleotide
  Target: LAMA2; (-) strand; PAM type: NRG; PAM sequence: GAG
aatagttgcttggactcaga

SEQ ID NO: 111596 - DNA, 20 bp, Artificial Sequence
  Description of Artificial Sequence: Synthetic oligonucleotide
  Target: LAMA2; (-) strand; PAM type: NRG; PAM sequence: GAG
aaaatagttgcttggactca

SEQ ID NO: 111597 - DNA, 20 bp, Artificial Sequence
  Description of Artificial Sequence: Synthetic oligonucleotide
  Target: LAMA2; (-) strand; PAM type: NRG; PAM sequence: CAG
gcaaaatagttgcttggact

SEQ ID NO: 111598 - DNA, 20 bp, Artificial Sequence
  Description of Artificial Sequence: Synthetic oligonucleotide
  Target: LAMA2; (-) strand; PAM type: NRG; PAM sequence: TGG
aggatagcaaaatagttgct

SEQ ID NO: 111599 - DNA, 20 bp, Artificial Sequence
  Description of Artificial Sequence: Synthetic oligonucleotide
  Target: LAMA2; (-) strand; PAM type: NRG; PAM sequence: TAG
ttactttcaggatagcaaaa

SEQ ID NO: 111600 - DNA, 20 bp, Artificial Sequence
  Description of Artificial Sequence: Synthetic oligonucleotide
  Target: LAMA2; (-) strand; PAM type: NRG; PAM sequence: TAG
tcaaagggttactttcagga

SEQ ID NO: 111601 - DNA, 20 bp, Artificial Sequence
  Description of Artificial Sequence: Synthetic oligonucleotide
  Target: LAMA2; (-) strand; PAM type: NRG; PAM sequence: AGG
accatcaaagggttactttc

SEQ ID NO: 111602 - DNA, 20 bp, Artificial Sequence
  Description of Artificial Sequence: Synthetic oligonucleotide
  Target: LAMA2; (-) strand; PAM type: NRG; PAM sequence: CAG
caccatcaaagggttacttt

SEQ ID NO: 111603 - DNA, 20 bp, Artificial Sequence
  Description of Artificial Sequence: Synthetic oligonucleotide
  Target: LAMA2; (-) strand; PAM type: NRG; PAM sequence: GGG
gatggaaaatcaccatcaaa

SEQ ID NO: 111604 - DNA, 20 bp, Artificial Sequence
  Description of Artificial Sequence: Synthetic oligonucleotide
  Target: LAMA2; (-) strand; PAM type: NRG; PAM sequence: AGG
agatggaaaatcaccatcaa

SEQ ID NO: 111605 - DNA, 20 bp, Artificial Sequence
  Description of Artificial Sequence: Synthetic oligonucleotide
  Target: LAMA2; (-) strand; PAM type: NRG; PAM sequence: AAG
cagatggaaaatcaccatca

SEQ ID NO: 111606 - DNA, 20 bp, Artificial Sequence
  Description of Artificial Sequence: Synthetic oligonucleotide
  Target: LAMA2; (-) strand; PAM type: NRG; PAM sequence: TGG
ttaatttctgtagggtcaga

SEQ ID NO: 111607 - DNA, 20 bp, Artificial Sequence
  Description of Artificial Sequence: Synthetic oligonucleotide
  Target: LAMA2; (-) strand; PAM type: NRG; PAM sequence: CAG
tgatttaatttctgtagggt

SEQ ID NO: 111608 - DNA, 20 bp, Artificial Sequence
  Description of Artificial Sequence: Synthetic oligonucleotide
  Target: LAMA2; (-) strand; PAM type: NRG; PAM sequence: GGG
tatttgatttaatttctgta

SEQ ID NO: 111609 - DNA, 20 bp, Artificial Sequence
  Description of Artificial Sequence: Synthetic oligonucleotide
  Target: LAMA2; (-) strand; PAM type: NRG; PAM sequence: AGG
ttatttgatttaatttctgt

SEQ ID NO: 111610 - DNA, 20 bp, Artificial Sequence
  Description of Artificial Sequence: Synthetic oligonucleotide
  Target: LAMA2; (-) strand; PAM type: NRG; PAM sequence: TAG
attatttgatttaatttctg

SEQ ID NO: 111611 - DNA, 20 bp, Artificial Sequence
  Description of Artificial Sequence: Synthetic oligonucleotide
  Target: LAMA2; (-) strand; PAM type: NRG; PAM sequence: TAG
ccttcaatcataaataacac

SEQ ID NO: 111612 - DNA, 20 bp, Artificial Sequence
  Description of Artificial Sequence: Synthetic oligonucleotide
  Target: LAMA2; (-) strand; PAM type: NRG; PAM sequence: GAG
aatttttacttatatttaga

SEQ ID NO: 111613 - DNA, 20 bp, Artificial Sequence
  Description of Artificial Sequence: Synthetic oligonucleotide
  Target: LAMA2; (-) strand; PAM type: NRG; PAM sequence: GAG
ccaatttttacttatattta

SEQ ID NO: 111614 - DNA, 20 bp, Artificial Sequence
  Description of Artificial Sequence: Synthetic oligonucleotide
  Target: LAMA2; (-) strand; PAM type: NRG; PAM sequence: TAG
taccaatttttacttatatt

SEQ ID NO: 111615 - DNA, 20 bp, Artificial Sequence
  Description of Artificial Sequence: Synthetic oligonucleotide
  Target: LAMA2; (-) strand; PAM type: NRG; PAM sequence: GAG
aaggaatgcctatatgaata

SEQ ID NO: 111616 - DNA, 20 bp, Artificial Sequence
  Description of Artificial Sequence: Synthetic oligonucleotide
  Target: LAMA2; (-) strand; PAM type: NRG; PAM sequence: TAG
aaaaggaatgcctatatgaa

SEQ ID NO: 111617 - DNA, 20 bp, Artificial Sequence
  Description of Artificial Sequence: Synthetic oligonucleotide
  Target: LAMA2; (-) strand; PAM type: NRG; PAM sequence: AGG
ttactataaattgctaaaaa

SEQ ID NO: 111618 - DNA, 20 bp, Artificial Sequence
  Description of Artificial Sequence: Synthetic oligonucleotide
  Target: LAMA2; (-) strand; PAM type: NRG; PAM sequence: AAG
attactataaattgctaaaa

SEQ ID NO: 111619 - DNA, 20 bp, Artificial Sequence
  Description of Artificial Sequence: Synthetic oligonucleotide
  Target: LAMA2; (-) strand; PAM type: NRG; PAM sequence: CAG
atcactattaatgtatttaa

SEQ ID NO: 111620 - DNA, 20 bp, Artificial Sequence
  Description of Artificial Sequence: Synthetic oligonucleotide
  Target: LAMA2; (-) strand; PAM type: NRG; PAM sequence: TGG
gaaatggaaataatttccaa

SEQ ID NO: 111621 - DNA, 20 bp, Artificial Sequence
  Description of Artificial Sequence: Synthetic oligonucleotide
  Target: LAMA2; (-) strand; PAM type: NRG; PAM sequence: TGG
gaagttgtcaggaaatgaaa

SEQ ID NO: 111622 - DNA, 20 bp, Artificial Sequence
  Description of Artificial Sequence: Synthetic oligonucleotide
  Target: LAMA2; (-) strand; PAM type: NRG; PAM sequence: AGG
taccttttcatgaagttgtc

SEQ ID NO: 111623 - DNA, 20 bp, Artificial Sequence
  Description of Artificial Sequence: Synthetic oligonucleotide
  Target: LAMA2; (-) strand; PAM type: NRG; PAM sequence: CAG
gtaccttttcatgaagttgt

SEQ ID NO: 111624 - DNA, 20 bp, Artificial Sequence
  Description of Artificial Sequence: Synthetic oligonucleotide
  Target: LAMA2; (-) strand; PAM type: NRG; PAM sequence: AAG
ataaattgtaccttttcatg

SEQ ID NO: 111625 - DNA, 20 bp, Artificial Sequence
  Description of Artificial Sequence: Synthetic oligonucleotide
  Target: LAMA2; (-) strand; PAM type: NRG; PAM sequence: CAG
tctactcagaacatacattt

SEQ ID NO: 111626 - DNA, 20 bp, Artificial Sequence
  Description of Artificial Sequence: Synthetic oligonucleotide
  Target: LAMA2; (-) strand; PAM type: NRG; PAM sequence: CAG
agaatattaatcattctact

SEQ ID NO: 111627 - DNA, 20 bp, Artificial Sequence
  Description of Artificial Sequence: Synthetic oligonucleotide
  Target: LAMA2; (-) strand; PAM type: NRG; PAM sequence: AAG
ctagatgttctaacaataag

SEQ ID NO: 111628 - DNA, 20 bp, Artificial Sequence
  Description of Artificial Sequence: Synthetic oligonucleotide
  Target: LAMA2; (-) strand; PAM type: NRG; PAM sequence: AAG
gttctagatgttctaacaat

SEQ ID NO: 111629 - DNA, 20 bp, Artificial Sequence
  Description of Artificial Sequence: Synthetic oligonucleotide
  Target: LAMA2; (-) strand; PAM type: NRG; PAM sequence: TAG
aggacaaatagattttgttc

SEQ ID NO: 111630 - DNA, 20 bp, Artificial Sequence
  Description of Artificial Sequence: Synthetic oligonucleotide
  Target: LAMA2; (-) strand; PAM type: NRG; PAM sequence: TAG
tacagttgaaagaggacaaa

SEQ ID NO: 111631 - DNA, 20 bp, Artificial Sequence
  Description of Artificial Sequence: Synthetic oligonucleotide
  Target: LAMA2; (-) strand; PAM type: NRG; PAM sequence: AGG
tatactcttacagttgaaag

SEQ ID NO: 111632 - DNA, 20 bp, Artificial Sequence
  Description of Artificial Sequence: Synthetic oligonucleotide
  Target: LAMA2; (-) strand; PAM type: NRG; PAM sequence: GAG
ctatactcttacagttgaaa

SEQ ID NO: 111633 - DNA, 20 bp, Artificial Sequence
  Description of Artificial Sequence: Synthetic oligonucleotide
  Target: LAMA2; (-) strand; PAM type: NRG; PAM sequence: AAG
tcctatactcttacagttga

SEQ ID NO: 111634 - DNA, 20 bp, Artificial Sequence
  Description of Artificial Sequence: Synthetic oligonucleotide
  Target: LAMA2; (-) strand; PAM type: NRG; PAM sequence: CAG
ccaaccctcctatactctta

SEQ ID NO: 111635 - DNA, 20 bp, Artificial Sequence
  Description of Artificial Sequence: Synthetic oligonucleotide
  Target: LAMA2; (-) strand; PAM type: NRG; PAM sequence: AGG
tttttcttttagttttcaag

SEQ ID NO: 111636 - DNA, 20 bp, Artificial Sequence
  Description of Artificial Sequence: Synthetic oligonucleotide
  Target: LAMA2; (-) strand; PAM type: NRG; PAM sequence: GAG
atttttcttttagttttcaa

SEQ ID NO: 111637 - DNA, 20 bp, Artificial Sequence
  Description of Artificial Sequence: Synthetic oligonucleotide
  Target: LAMA2; (-) strand; PAM type: NRG; PAM sequence: AAG
ctatttttcttttagttttc

SEQ ID NO: 111638 - DNA, 20 bp, Artificial Sequence
  Description of Artificial Sequence: Synthetic oligonucleotide
  Target: LAMA2; (-) strand; PAM type: NRG; PAM sequence: TAG
ctaagaaactatttttcttt

SEQ ID NO: 111639 - DNA, 20 bp, Artificial Sequence
  Description of Artificial Sequence: Synthetic oligonucleotide
  Target: LAMA2; (-) strand; PAM type: NRG; PAM sequence: AAG
gttttggtatcacttaaact

SEQ ID NO: 111640 - DNA, 20 bp, Artificial Sequence
  Description of Artificial Sequence: Synthetic oligonucleotide
  Target: LAMA2; (-) strand; PAM type: NRG; PAM sequence: TGG
aattgaaatttcagcggttt

SEQ ID NO: 111641 - DNA, 20 bp, Artificial Sequence
  Description of Artificial Sequence: Synthetic oligonucleotide
  Target: LAMA2; (-) strand; PAM type: NRG; PAM sequence: CGG
ttttacaattgaaatttcag

SEQ ID NO: 111642 - DNA, 20 bp, Artificial Sequence
  Description of Artificial Sequence: Synthetic oligonucleotide
  Target: LAMA2; (-) strand; PAM type: NRG; PAM sequence: CAG
aaattttacaattgaaattt

SEQ ID NO: 111643 - DNA, 20 bp, Artificial Sequence
  Description of Artificial Sequence: Synthetic oligonucleotide
  Target: LAMA2; (-) strand; PAM type: NRG; PAM sequence: AGG
aatgagaatgaccttcatta

SEQ ID NO: 111644 - DNA, 20 bp, Artificial Sequence
  Description of Artificial Sequence: Synthetic oligonucleotide
  Target: LAMA2; (-) strand; PAM type: NRG; PAM sequence: AAG
taatgagaatgaccttcatt

SEQ ID NO: 111645 - DNA, 20 bp, Artificial Sequence
  Description of Artificial Sequence: Synthetic oligonucleotide
  Target: LAMA2; (-) strand; PAM type: NRG; PAM sequence: GAG
tgattttacatggagctaat

SEQ ID NO: 111646 - DNA, 20 bp, Artificial Sequence
  Description of Artificial Sequence: Synthetic oligonucleotide
  Target: LAMA2; (-) strand; PAM type: NRG; PAM sequence: GAG
taggcaggtgattttacatg

SEQ ID NO: 111647 - DNA, 20 bp, Artificial Sequence
  Description of Artificial Sequence: Synthetic oligonucleotide
  Target: LAMA2; (-) strand; PAM type: NRG; PAM sequence: TGG
tttaggcaggtgattttaca

SEQ ID NO: 111648 - DNA, 20 bp, Artificial Sequence
  Description of Artificial Sequence: Synthetic oligonucleotide
  Target: LAMA2; (-) strand; PAM type: NRG; PAM sequence: AGG
aatatgggaacgttttaggc

SEQ ID NO: 111649 - DNA, 20 bp, Artificial Sequence
  Description of Artificial Sequence: Synthetic oligonucleotide
  Target: LAMA2; (-) strand; PAM type: NRG; PAM sequence: CAG
caatatgggaacgttttagg

SEQ ID NO: 111650 - DNA, 20 bp, Artificial Sequence
  Description of Artificial Sequence: Synthetic oligonucleotide
  Target: LAMA2; (-) strand; PAM type: NRG; PAM sequence: AGG
tatcaatatgggaacgtttt

SEQ ID NO: 111651 - DNA, 20 bp, Artificial Sequence
  Description of Artificial Sequence: Synthetic oligonucleotide
  Target: LAMA2; (-) strand; PAM type: NRG; PAM sequence: TAG
ttatcaatatgggaacgttt

SEQ ID NO: 111652 - DNA, 20 bp, Artificial Sequence
  Description of Artificial Sequence: Synthetic oligonucleotide
  Target: LAMA2; (-) strand; PAM type: NRG; PAM sequence: GGG
catttctccattatcaatat

SEQ ID NO: 111653 - DNA, 20 bp, Artificial Sequence
  Description of Artificial Sequence: Synthetic oligonucleotide
  Target: LAMA2; (-) strand; PAM type: NRG; PAM sequence: TGG
acatttctccattatcaata

SEQ ID NO: 111654 - DNA, 20 bp, Artificial Sequence
  Description of Artificial Sequence: Synthetic oligonucleotide
  Target: LAMA2; (-) strand; PAM type: NRG; PAM sequence: AAG
tgttagcatactattttttg

SEQ ID NO: 111655 - DNA, 20 bp, Artificial Sequence
  Description of Artificial Sequence: Synthetic oligonucleotide
  Target: LAMA2; (-) strand; PAM type: NRG; PAM sequence: TAG
ttcacagttccatgtcttgt

SEQ ID NO: 111656 - DNA, 20 bp, Artificial Sequence
  Description of Artificial Sequence: Synthetic oligonucleotide
  Target: LAMA2; (-) strand; PAM type: NRG; PAM sequence: CAG
ttttgactatgagctgttca

SEQ ID NO: 111657 - DNA, 20 bp, Artificial Sequence
  Description of Artificial Sequence: Synthetic oligonucleotide
  Target: LAMA2; (-) strand; PAM type: NRG; PAM sequence: GAG
tccactagaattttgactat

SEQ ID NO: 111658 - DNA, 20 bp, Artificial Sequence
  Description of Artificial Sequence: Synthetic oligonucleotide
  Target: LAMA2; (-) strand; PAM type: NRG; PAM sequence: TAG
acagaagagcagttttccac

SEQ ID NO: 111659 - DNA, 20 bp, Artificial Sequence
  Description of Artificial Sequence: Synthetic oligonucleotide
  Target: LAMA2; (-) strand; PAM type: NRG; PAM sequence: CAG
ttaatgagggcacagaagag

SEQ ID NO: 111660 - DNA, 20 bp, Artificial Sequence
  Description of Artificial Sequence: Synthetic oligonucleotide
  Target: LAMA2; (-) strand; PAM type: NRG; PAM sequence: GAG
tcattaatgagggcacagaa

SEQ ID NO: 111661 - DNA, 20 bp, Artificial Sequence
  Description of Artificial Sequence: Synthetic oligonucleotide
  Target: LAMA2; (-) strand; PAM type: NRG; PAM sequence: AAG
actcattaatgagggcacag

SEQ ID NO: 111662 - DNA, 20 bp, Artificial Sequence
  Description of Artificial Sequence: Synthetic oligonucleotide
  Target: LAMA2; (-) strand; PAM type: NRG; PAM sequence: CAG
tatactcattaatgagggca

SEQ ID NO: 111663 - DNA, 20 bp, Artificial Sequence
  Description of Artificial Sequence: Synthetic oligonucleotide
  Target: LAMA2; (-) strand; PAM type: NRG; PAM sequence: GGG
accattatactcattaatga

SEQ ID NO: 111664 - DNA, 20 bp, Artificial Sequence
  Description of Artificial Sequence: Synthetic oligonucleotide
  Target: LAMA2; (-) strand; PAM type: NRG; PAM sequence: AGG
caccattatactcattaatg

SEQ ID NO: 111665 - DNA, 20 bp, Artificial Sequence
  Description of Artificial Sequence: Synthetic oligonucleotide
  Target: LAMA2; (-) strand; PAM type: NRG; PAM sequence: GAG
acaccattatactcattaat

SEQ ID NO: 111666 - DNA, 20 bp, Artificial Sequence
  Description of Artificial Sequence: Synthetic oligonucleotide
  Target: LAMA2; (-) strand; PAM type: NRG; PAM sequence: CAG
tatcattaaacacccatatg

SEQ ID NO: 111667 - DNA, 20 bp, Artificial Sequence
  Description of Artificial Sequence: Synthetic oligonucleotide
  Target: LAMA2; (-) strand; PAM type: NRG; PAM sequence: AAG
ccatcatcgtttcttctttg

SEQ ID NO: 111668 - DNA, 20 bp, Artificial Sequence
  Description of Artificial Sequence: Synthetic oligonucleotide
  Target: LAMA2; (-) strand; PAM type: NRG; PAM sequence: AAG
gtagcttccatacaaccaca

SEQ ID NO: 111669 - DNA, 20 bp, Artificial Sequence
  Description of Artificial Sequence: Synthetic oligonucleotide
  Target: LAMA2; (-) strand; PAM type: NRG; PAM sequence: TAG
atctctcagaaagtttgaag

SEQ ID NO: 111670 - DNA, 20 bp, Artificial Sequence
  Description of Artificial Sequence: Synthetic oligonucleotide
  Target: LAMA2; (-) strand; PAM type: NRG; PAM sequence: AAG
taaatctctcagaaagtttg

SEQ ID NO: 111671 - DNA, 20 bp, Artificial Sequence
  Description of Artificial Sequence: Synthetic oligonucleotide
  Target: LAMA2; (-) strand; PAM type: NRG; PAM sequence: AAG
ccaagagtaaatctctcaga

SEQ ID NO: 111672 - DNA, 20 bp, Artificial Sequence
  Description of Artificial Sequence: Synthetic oligonucleotide
  Target: LAMA2; (-) strand; PAM type: NRG; PAM sequence: CAG
agaaccaagagtaaatctct

SEQ ID NO: 111673 - DNA, 20 bp, Artificial Sequence
  Description of Artificial Sequence: Synthetic oligonucleotide
  Target: LAMA2; (-) strand; PAM type: NRG; PAM sequence: GAG
aacaagatacaaagaaccaa

SEQ ID NO: 111674 - DNA, 20 bp, Artificial Sequence
  Description of Artificial Sequence: Synthetic oligonucleotide
  Target: LAMA2; (-) strand; PAM type: NRG; PAM sequence: AAG
aaaacaagatacaaagaacc

SEQ ID NO: 111675 - DNA, 20 bp, Artificial Sequence
  Description of Artificial Sequence: Synthetic oligonucleotide
  Target: LAMA2; (-) strand; PAM type: NRG; PAM sequence: AAG
tttaaaaaaaacaagataca

SEQ ID NO: 111676 - DNA, 20 bp, Artificial Sequence
  Description of Artificial Sequence: Synthetic oligonucleotide
  Target: LAMA2; (-) strand; PAM type: NRG; PAM sequence: AAG
ctttgatctttaaaaaaaac

SEQ ID NO: 111677 - DNA, 20 bp, Artificial Sequence
  Description of Artificial Sequence: Synthetic oligonucleotide
  Target: LAMA2; (-) strand; PAM type: NRG; PAM sequence: CAG
gcagtcacctcctgaagaca

SEQ ID NO: 111678 - DNA, 20 bp, Artificial Sequence
  Description of Artificial Sequence: Synthetic oligonucleotide
  Target: LAMA2; (-) strand; PAM type: NRG; PAM sequence: AAG
tcgaatgcagtcacctcctg

SEQ ID NO: 111679 - DNA, 20 bp, Artificial Sequence
  Description of Artificial Sequence: Synthetic oligonucleotide
  Target: LAMA2; (-) strand; PAM type: NRG; PAM sequence: CAG
ctggtttgtatgttcgaatg

SEQ ID NO: 111680 - DNA, 20 bp, Artificial Sequence
  Description of Artificial Sequence: Synthetic oligonucleotide
  Target: LAMA2; (-) strand; PAM type: NRG; PAM sequence: TGG
taacttcctttcttgatttc

SEQ ID NO: 111681 - DNA, 20 bp, Artificial Sequence
  Description of Artificial Sequence: Synthetic oligonucleotide
  Target: LAMA2; (-) strand; PAM type: NRG; PAM sequence: CAG
aaagaggaggttatcagcaa

SEQ ID NO: 111682 - DNA, 20 bp, Artificial Sequence
  Description of Artificial Sequence: Synthetic oligonucleotide
  Target: LAMA2; (-) strand; PAM type: NRG; PAM sequence: CAG
aagataaaagaggaggttat

SEQ ID NO: 111683 - DNA, 20 bp, Artificial Sequence
  Description of Artificial Sequence: Synthetic oligonucleotide
  Target: LAMA2; (-) strand; PAM type: NRG; PAM sequence: AGG
cacttccaagataaaagagg

SEQ ID NO: 111684 - DNA, 20 bp, Artificial Sequence
  Description of Artificial Sequence: Synthetic oligonucleotide
  Target: LAMA2; (-) strand; PAM type: NRG; PAM sequence: GAG
gcacttccaagataaaagag

SEQ ID NO: 111685 - DNA, 20 bp, Artificial Sequence
  Description of Artificial Sequence: Synthetic oligonucleotide
  Target: LAMA2; (-) strand; PAM type: NRG; PAM sequence: AGG
tggcacttccaagataaaag

SEQ ID NO: 111686 - DNA, 20 bp, Artificial Sequence
  Description of Artificial Sequence: Synthetic oligonucleotide
  Target: LAMA2; (-) strand; PAM type: NRG; PAM sequence: GAG
ttggcacttccaagataaaa

SEQ ID NO: 111687 - DNA, 20 bp, Artificial Sequence
  Description of Artificial Sequence: Synthetic oligonucleotide
  Target: LAMA2; (-) strand; PAM type: NRG; PAM sequence: AAG
atttggcacttccaagataa

SEQ ID NO: 111688 - DNA, 20 bp, Artificial Sequence
  Description of Artificial Sequence: Synthetic oligonucleotide
  Target: LAMA2; (-) strand; PAM type: NRG; PAM sequence: AAG
cttacaaatttggcacttcc

SEQ ID NO: 111689 - DNA, 20 bp, Artificial Sequence
  Description of Artificial Sequence: Synthetic oligonucleotide
  Target: LAMA2; (-) strand; PAM type: NRG; PAM sequence: TGG
gaatattagacttacaaatt

SEQ ID NO: 111690 - DNA, 20 bp, Artificial Sequence
  Description of Artificial Sequence: Synthetic oligonucleotide
  Target: LAMA2; (-) strand; PAM type: NRG; PAM sequence: TAG
cctaatgaaaagttgaatat

SEQ ID NO: 111691 - DNA, 20 bp, Artificial Sequence
  Description of Artificial Sequence: Synthetic oligonucleotide
  Target: LAMA2; (-) strand; PAM type: NRG; PAM sequence: AAG
acatacagcagcctaatgaa

SEQ ID NO: 111692 - DNA, 20 bp, Artificial Sequence
  Description of Artificial Sequence: Synthetic oligonucleotide
  Target: LAMA2; (-) strand; PAM type: NRG; PAM sequence: CAG
ctctagctatacacatacag

SEQ ID NO: 111693 - DNA, 20 bp, Artificial Sequence
  Description of Artificial Sequence: Synthetic oligonucleotide
  Target: LAMA2; (-) strand; PAM type: NRG; PAM sequence: CAG
aacctctagctatacacata

SEQ ID NO: 111694 - DNA, 20 bp, Artificial Sequence
  Description of Artificial Sequence: Synthetic oligonucleotide
  Target: LAMA2; (-) strand; PAM type: NRG; PAM sequence: TAG
tacattttcagattaacctc

SEQ ID NO: 111695 - DNA, 20 bp, Artificial Sequence
  Description of Artificial Sequence: Synthetic oligonucleotide
  Target: LAMA2; (-) strand; PAM type: NRG; PAM sequence: CAG
ttggggattctatacatttt

SEQ ID NO: 111696 - DNA, 20 bp, Artificial Sequence
  Description of Artificial Sequence: Synthetic oligonucleotide
  Target: LAMA2; (-) strand; PAM type: NRG; PAM sequence: GGG
ttggggaccatatacatttg

SEQ ID NO: 111697 - DNA, 20 bp, Artificial Sequence
  Description of Artificial Sequence: Synthetic oligonucleotide
  Target: LAMA2; (-) strand; PAM type: NRG; PAM sequence: GGG
tttggggaccatatacattt

SEQ ID NO: 111698 - DNA, 20 bp, Artificial Sequence
  Description of Artificial Sequence: Synthetic oligonucleotide
  Target: LAMA2; (-) strand; PAM type: NRG; PAM sequence: TGG
atttggggaccatatacatt

SEQ ID NO: 111699 - DNA, 20 bp, Artificial Sequence
  Description of Artificial Sequence: Synthetic oligonucleotide
  Target: LAMA2; (-) strand; PAM type: NRG; PAM sequence: GGG
agcctacgttagaccatttg

SEQ ID NO: 111700 - DNA, 20 bp, Artificial Sequence
  Description of Artificial Sequence: Synthetic oligonucleotide
  Target: LAMA2; (-) strand; PAM type: NRG; PAM sequence: GGG
aagcctacgttagaccattt

SEQ ID NO: 111701 - DNA, 20 bp, Artificial Sequence
  Description of Artificial Sequence: Synthetic oligonucleotide
  Target: LAMA2; (-) strand; PAM type: NRG; PAM sequence: TGG
aaagcctacgttagaccatt

SEQ ID NO: 111702 - DNA, 20 bp, Artificial Sequence
  Description of Artificial Sequence: Synthetic oligonucleotide
  Target: LAMA2; (-) strand; PAM type: NRG; PAM sequence: TAG
tcaaatctgaaagcctacgt

SEQ ID NO: 111703 - DNA, 20 bp, Artificial Sequence
  Description of Artificial Sequence: Synthetic oligonucleotide
  Target: LAMA2; (-) strand; PAM type: NRG; PAM sequence: AAG
gttgaggttttcaaatctga

SEQ ID NO: 111704 - DNA, 20 bp, Artificial Sequence
  Description of Artificial Sequence: Synthetic oligonucleotide
  Target: LAMA2; (-) strand; PAM type: NRG; PAM sequence: AGG
ttttgtaaggtaagacgttg

SEQ ID NO: 111705 - DNA, 20 bp, Artificial Sequence
  Description of Artificial Sequence: Synthetic oligonucleotide
  Target: LAMA2; (-) strand; PAM type: NRG; PAM sequence: GAG
attttgtaaggtaagacgtt

SEQ ID NO: 111706 - DNA, 20 bp, Artificial Sequence
  Description of Artificial Sequence: Synthetic oligonucleotide
  Target: LAMA2; (-) strand; PAM type: NRG; PAM sequence: AAG
tcttcagaattttgtaaggt

SEQ ID NO: 111707 - DNA, 20 bp, Artificial Sequence
  Description of Artificial Sequence: Synthetic oligonucleotide
  Target: LAMA2; (-) strand; PAM type: NRG; PAM sequence: AGG
tgactcttcagaattttgta

SEQ ID NO: 111708 - DNA, 20 bp, Artificial Sequence
  Description of Artificial Sequence: Synthetic oligonucleotide
  Target: LAMA2; (-) strand; PAM type: NRG; PAM sequence: AAG
ttgactcttcagaattttgt

SEQ ID NO: 111709 - DNA, 20 bp, Artificial Sequence
  Description of Artificial Sequence: Synthetic oligonucleotide
  Target: LAMA2; (-) strand; PAM type: NRG; PAM sequence: CAG
tctaacttaatttgactctt

SEQ ID NO: 111710 - DNA, 20 bp, Artificial Sequence
  Description of Artificial Sequence: Synthetic oligonucleotide
  Target: LAMA2; (-) strand; PAM type: NRG; PAM sequence: TAG
gtaaatgtgactaaacactg

SEQ ID NO: 111711 - DNA, 20 bp, Artificial Sequence
  Description of Artificial Sequence: Synthetic oligonucleotide
  Target: LAMA2; (-) strand; PAM type: NRG; PAM sequence: AAG
gatggtatactgacaaatga

SEQ ID NO: 111712 - DNA, 20 bp, Artificial Sequence
  Description of Artificial Sequence: Synthetic oligonucleotide
  Target: LAMA2; (-) strand; PAM type: NRG; PAM sequence: TGG
gtataatttaacagaaatga

SEQ ID NO: 111713 - DNA, 20 bp, Artificial Sequence
  Description of Artificial Sequence: Synthetic oligonucleotide
  Target: LAMA2; (-) strand; PAM type: NRG; PAM sequence: CAG
gatctgaaagtataatttaa

SEQ ID NO: 111714 - DNA, 20 bp, Artificial Sequence
  Description of Artificial Sequence: Synthetic oligonucleotide
  Target: LAMA2; (-) strand; PAM type: NRG; PAM sequence: AAG
tcttaaatcactggatctga

SEQ ID NO: 111715 - DNA, 20 bp, Artificial Sequence
  Description of Artificial Sequence: Synthetic oligonucleotide
  Target: LAMA2; (-) strand; PAM type: NRG; PAM sequence: TGG
cattagcattcttaaatcac

SEQ ID NO: 111716 - DNA, 20 bp, Artificial Sequence
  Description of Artificial Sequence: Synthetic oligonucleotide
  Target: LAMA2; (-) strand; PAM type: NRG; PAM sequence: TAG
taaaatagctttattctcat

SEQ ID NO: 111717 - DNA, 20 bp, Artificial Sequence
  Description of Artificial Sequence: Synthetic oligonucleotide
  Target: LAMA2; (-) strand; PAM type: NRG; PAM sequence: TAG
taaataagaagtaaataaaa

SEQ ID NO: 111718 - DNA, 20 bp, Artificial Sequence
  Description of Artificial Sequence: Synthetic oligonucleotide
  Target: LAMA2; (-) strand; PAM type: NRG; PAM sequence: AAG
aaataagataaataaataag

SEQ ID NO: 111719 - DNA, 20 bp, Artificial Sequence
  Description of Artificial Sequence: Synthetic oligonucleotide
  Target: LAMA2; (-) strand; PAM type: NRG; PAM sequence: AAG
agtaaataagataaataaat

SEQ ID NO: 111720 - DNA, 20 bp, Artificial Sequence
  Description of Artificial Sequence: Synthetic oligonucleotide
  Target: LAMA2; (-) strand; PAM type: NRG; PAM sequence: AAG
atttagtttgaacagtaaat

SEQ ID NO: 111721 - DNA, 20 bp, Artificial Sequence
  Description of Artificial Sequence: Synthetic oligonucleotide
  Target: LAMA2; (-) strand; PAM type: NRG; PAM sequence: CAG
ttattgtaatttagtttgaa

SEQ ID NO: 111722 - DNA, 20 bp, Artificial Sequence
  Description of Artificial Sequence: Synthetic oligonucleotide
  Target: LAMA2; (-) strand; PAM type: NRG; PAM sequence: TAG
cggaagagtttattgtaatt

SEQ ID NO: 111723 - DNA, 20 bp, Artificial Sequence
  Description of Artificial Sequence: Synthetic oligonucleotide
  Target: LAMA2; (-) strand; PAM type: NRG; PAM sequence: GAG
ttttcatttcattaacggaa

SEQ ID NO: 111724 - DNA, 20 bp, Artificial Sequence
  Description of Artificial Sequence: Synthetic oligonucleotide
  Target: LAMA2; (-) strand; PAM type: NRG; PAM sequence: AAG
tattttcatttcattaacgg

SEQ ID NO: 111725 - DNA, 20 bp, Artificial Sequence
  Description of Artificial Sequence: Synthetic oligonucleotide
  Target: LAMA2; (-) strand; PAM type: NRG; PAM sequence: CGG
tgctattttcatttcattaa

SEQ ID NO: 111726 - DNA, 20 bp, Artificial Sequence
  Description of Artificial Sequence: Synthetic oligonucleotide
  Target: LAMA2; (-) strand; PAM type: NRG; PAM sequence: TAG
gtttccattggtaaaaaaaa

SEQ ID NO: 111727 - DNA, 20 bp, Artificial Sequence
  Description of Artificial Sequence: Synthetic oligonucleotide
  Target: LAMA2; (-) strand; PAM type: NRG; PAM sequence: TGG
caagttagaagagtttccat

SEQ ID NO: 111728 - DNA, 20 bp, Artificial Sequence
  Description of Artificial Sequence: Synthetic oligonucleotide
  Target: LAMA2; (-) strand; PAM type: NRG; PAM sequence: GAG
aaattcaacacaagttagaa

SEQ ID NO: 111729 - DNA, 20 bp, Artificial Sequence
  Description of Artificial Sequence: Synthetic oligonucleotide
  Target: LAMA2; (-) strand; PAM type: NRG; PAM sequence: AAG
ataaattcaacacaagttag

SEQ ID NO: 111730 - DNA, 20 bp, Artificial Sequence
  Description of Artificial Sequence: Synthetic oligonucleotide
  Target: LAMA2; (-) strand; PAM type: NRG; PAM sequence: TAG
gtcataaattcaacacaagt

SEQ ID NO: 111731 - DNA, 20 bp, Artificial Sequence
  Description of Artificial Sequence: Synthetic oligonucleotide
  Target: LAMA2; (-) strand; PAM type: NRG; PAM sequence: AAG
tcaggtcataaattcaacac

SEQ ID NO: 111732 - DNA, 20 bp, Artificial Sequence
  Description of Artificial Sequence: Synthetic oligonucleotide
  Target: LAMA2; (-) strand; PAM type: NRG; PAM sequence: AGG
aatctgtgttatttcagttc

SEQ ID NO: 111733 - DNA, 20 bp, Artificial Sequence
  Description of Artificial Sequence: Synthetic oligonucleotide
  Target: LAMA2; (-) strand; PAM type: NRG; PAM sequence: CAG
taatctgtgttatttcagtt

SEQ ID NO: 111734 - DNA, 20 bp, Artificial Sequence
  Description of Artificial Sequence: Synthetic oligonucleotide
  Target: LAMA2; (-) strand; PAM type: NRG; PAM sequence: CAG
agatataatctgtgttattt

SEQ ID NO: 111735 - DNA, 20 bp, Artificial Sequence
  Description of Artificial Sequence: Synthetic oligonucleotide
  Target: LAMA2; (-) strand; PAM type: NRG; PAM sequence: TAG
actttatgggtgggcttttg

SEQ ID NO: 111736 - DNA, 20 bp, Artificial Sequence
  Description of Artificial Sequence: Synthetic oligonucleotide
  Target: LAMA2; (-) strand; PAM type: NRG; PAM sequence: GGG
gaaattagaactttatgggt

SEQ ID NO: 111737 - DNA, 20 bp, Artificial Sequence
  Description of Artificial Sequence: Synthetic oligonucleotide
  Target: LAMA2; (-) strand; PAM type: NRG; PAM sequence: TGG
agaaattagaactttatggg

SEQ ID NO: 111738 - DNA, 20 bp, Artificial Sequence
  Description of Artificial Sequence: Synthetic oligonucleotide
  Target: LAMA2; (-) strand; PAM type: NRG; PAM sequence: GGG
ggaagaaattagaactttat

SEQ ID NO: 111739 - DNA, 20 bp, Artificial Sequence
  Description of Artificial Sequence: Synthetic oligonucleotide
  Target: LAMA2; (-) strand; PAM type: NRG; PAM sequence: TGG
tggaagaaattagaacttta

SEQ ID NO: 111740 - DNA, 20 bp, Artificial Sequence
  Description of Artificial Sequence: Synthetic oligonucleotide
  Target: LAMA2; (-) strand; PAM type: NRG; PAM sequence: TAG
atagttcaaatggaagaaat

SEQ ID NO: 111741 - DNA, 20 bp, Artificial Sequence
  Description of Artificial Sequence: Synthetic oligonucleotide
  Target: LAMA2; (-) strand; PAM type: NRG; PAM sequence: AAG
aagtcaaatagttcaaatgg

SEQ ID NO: 111742 - DNA, 20 bp, Artificial Sequence
  Description of Artificial Sequence: Synthetic oligonucleotide
  Target: LAMA2; (-) strand; PAM type: NRG; PAM sequence: TGG
gcaaagtcaaatagttcaaa

SEQ ID NO: 111743 - DNA, 20 bp, Artificial Sequence
  Description of Artificial Sequence: Synthetic oligonucleotide
  Target: LAMA2; (-) strand; PAM type: NRG; PAM sequence: TAG
cccatgcatgcaaagtcaaa

SEQ ID NO: 111744 - DNA, 20 bp, Artificial Sequence
  Description of Artificial Sequence: Synthetic oligonucleotide
  Target: LAMA2; (-) strand; PAM type: NRG; PAM sequence: AAG
ggaaaatccccatgcatgca

SEQ ID NO: 111745 - DNA, 20 bp, Artificial Sequence
  Description of Artificial Sequence: Synthetic oligonucleotide
  Target: LAMA2; (-) strand; PAM type: NRG; PAM sequence: TGG
ttaagaagtcatattcattt

SEQ ID NO: 111746 - DNA, 20 bp, Artificial Sequence
  Description of Artificial Sequence: Synthetic oligonucleotide
  Target: LAMA2; (-) strand; PAM type: NRG; PAM sequence: AAG
gccatgaatgatttgttaag

SEQ ID NO: 111747 - DNA, 20 bp, Artificial Sequence
  Description of Artificial Sequence: Synthetic oligonucleotide
  Target: LAMA2; (-) strand; PAM type: NRG; PAM sequence: AAG
tatgccatgaatgatttgtt

SEQ ID NO: 111748 - DNA, 20 bp, Artificial Sequence
  Description of Artificial Sequence: Synthetic oligonucleotide
  Target: LAMA2; (-) strand; PAM type: NRG; PAM sequence: TGG
cccagaattccttacccaaa

SEQ ID NO: 111749 - DNA, 20 bp, Artificial Sequence
  Description of Artificial Sequence: Synthetic oligonucleotide
  Target: LAMA2; (-) strand; PAM type: NRG; PAM sequence: CAG
ttttatttcccaaattgacc

SEQ ID NO: 111750 - DNA, 20 bp, Artificial Sequence
  Description of Artificial Sequence: Synthetic oligonucleotide
  Target: LAMA2; (-) strand; PAM type: NRG; PAM sequence: CAG
cactgacatttttgaggggg

SEQ ID NO: 111751 - DNA, 20 bp, Artificial Sequence
  Description of Artificial Sequence: Synthetic oligonucleotide
  Target: LAMA2; (-) strand; PAM type: NRG; PAM sequence: GGG
ggacactgacatttttgagg

SEQ ID NO: 111752 - DNA, 20 bp, Artificial Sequence
  Description of Artificial Sequence: Synthetic oligonucleotide
  Target: LAMA2; (-) strand; PAM type: NRG; PAM sequence: GGG
aggacactgacatttttgag

SEQ ID NO: 111753 - DNA, 20 bp, Artificial Sequence
  Description of Artificial Sequence: Synthetic oligonucleotide
  Target: LAMA2; (-) strand; PAM type: NRG; PAM sequence: GGG
aaggacactgacatttttga

SEQ ID NO: 111754 - DNA, 20 bp, Artificial Sequence
  Description of Artificial Sequence: Synthetic oligonucleotide
  Target: LAMA2; (-) strand; PAM type: NRG; PAM sequence: AGG
caaggacactgacatttttg

SEQ ID NO: 111755 - DNA, 20 bp, Artificial Sequence
  Description of Artificial Sequence: Synthetic oligonucleotide
  Target: LAMA2; (-) strand; PAM type: NRG; PAM sequence: GAG
ccaaggacactgacattttt

SEQ ID NO: 111756 - DNA, 20 bp, Artificial Sequence
  Description of Artificial Sequence: Synthetic oligonucleotide
  Target: LAMA2; (-) strand; PAM type: NRG; PAM sequence: AGG
atccattattattttcacca

SEQ ID NO: 111757 - DNA, 20 bp, Artificial Sequence
  Description of Artificial Sequence: Synthetic oligonucleotide
  Target: LAMA2; (-) strand; PAM type: NRG; PAM sequence: AAG
aatccattattattttcacc

SEQ ID NO: 111758 - DNA, 20 bp, Artificial Sequence
  Description of Artificial Sequence: Synthetic oligonucleotide
  Target: LAMA2; (-) strand; PAM type: NRG; PAM sequence: CAG
taaaaacaaatatttaaatt

SEQ ID NO: 111759 - DNA, 20 bp, Artificial Sequence
  Description of Artificial Sequence: Synthetic oligonucleotide
  Target: LAMA2; (-) strand; PAM type: NRG; PAM sequence: AAG
tcactctgatacttgtggta

SEQ ID NO: 111760 - DNA, 20 bp, Artificial Sequence
  Description of Artificial Sequence: Synthetic oligonucleotide
  Target: LAMA2; (-) strand; PAM type: NRG; PAM sequence: TGG
ctttctcactctgatacttg

SEQ ID NO: 111761 - DNA, 20 bp, Artificial Sequence
  Description of Artificial Sequence: Synthetic oligonucleotide
  Target: LAMA2; (-) strand; PAM type: NRG; PAM sequence: AAG
taagtctaattttgagacca

SEQ ID NO: 111762 - DNA, 20 bp, Artificial Sequence
  Description of Artificial Sequence: Synthetic oligonucleotide
  Target: LAMA2; (-) strand; PAM type: NRG; PAM sequence: GAG
ttcaaattaagtctaatttt

SEQ ID NO: 111763 - DNA, 20 bp, Artificial Sequence
  Description of Artificial Sequence: Synthetic oligonucleotide
  Target: LAMA2; (-) strand; PAM type: NRG; PAM sequence: AAG
taattttaccaattcaaatt

SEQ ID NO: 111764 - DNA, 20 bp, Artificial Sequence
  Description of Artificial Sequence: Synthetic oligonucleotide
  Target: LAMA2; (-) strand; PAM type: NRG; PAM sequence: AGG
aaaaaaagtccataatgctc

SEQ ID NO: 111765 - DNA, 20 bp, Artificial Sequence
  Description of Artificial Sequence: Synthetic oligonucleotide
  Target: LAMA2; (-) strand; PAM type: NRG; PAM sequence: CAG
aaaaaaaagtccataatgct

SEQ ID NO: 111766 - DNA, 20 bp, Artificial Sequence
  Description of Artificial Sequence: Synthetic oligonucleotide
  Target: LAMA2; (-) strand; PAM type: NRG; PAM sequence: AAG
ccttaaagcaaaaaaaaaaa

SEQ ID NO: 111767 - DNA, 20 bp, Artificial Sequence
  Description of Artificial Sequence: Synthetic oligonucleotide
  Target: LAMA2; (-) strand; PAM type: NRG; PAM sequence: AAG
attttatttttatatcctta

SEQ ID NO: 111768 - DNA, 20 bp, Artificial Sequence
  Description of Artificial Sequence: Synthetic oligonucleotide
  Target: LAMA2; (-) strand; PAM type: NRG; PAM sequence: GAG
cagacatgtgaaatgattag

SEQ ID NO: 111769 - DNA, 20 bp, Artificial Sequence
  Description of Artificial Sequence: Synthetic oligonucleotide
  Target: LAMA2; (-) strand; PAM type: NRG; PAM sequence: AGG
tgcagacatgtgaaatgatt

SEQ ID NO: 111770 - DNA, 20 bp, Artificial Sequence
  Description of Artificial Sequence: Synthetic oligonucleotide
  Target: LAMA2; (-) strand; PAM type: NRG; PAM sequence: TAG
ttgcagacatgtgaaatgat

SEQ ID NO: 111771 - DNA, 20 bp, Artificial Sequence
  Description of Artificial Sequence: Synthetic oligonucleotide
  Target: LAMA2; (-) strand; PAM type: NRG; PAM sequence: CAG
ttttcaataagcgccatttg

SEQ ID NO: 111772 - DNA, 20 bp, Artificial Sequence
  Description of Artificial Sequence: Synthetic oligonucleotide
  Target: LAMA2; (-) strand; PAM type: NRG; PAM sequence: AAG
ccagcagagtgtttttcaat

SEQ ID NO: 111773 - DNA, 20 bp, Artificial Sequence
  Description of Artificial Sequence: Synthetic oligonucleotide
  Target: LAMA2; (-) strand; PAM type: NRG; PAM sequence: GAG
ctttaaagaggagaccagca

SEQ ID NO: 111774 - DNA, 20 bp, Artificial Sequence
  Description of Artificial Sequence: Synthetic oligonucleotide
  Target: LAMA2; (-) strand; PAM type: NRG; PAM sequence: CAG
acctttaaagaggagaccag

SEQ ID NO: 111775 - DNA, 20 bp, Artificial Sequence
  Description of Artificial Sequence: Synthetic oligonucleotide
  Target: LAMA2; (-) strand; PAM type: NRG; PAM sequence: CAG
agcacctttaaagaggagac

SEQ ID NO: 111776 - DNA, 20 bp, Artificial Sequence
  Description of Artificial Sequence: Synthetic oligonucleotide
  Target: LAMA2; (-) strand; PAM type: NRG; PAM sequence: GAG
tataaagcacctttaaagag

SEQ ID NO: 111777 - DNA, 20 bp, Artificial Sequence
  Description of Artificial Sequence: Synthetic oligonucleotide
  Target: LAMA2; (-) strand; PAM type: NRG; PAM sequence: AGG
gatataaagcacctttaaag

SEQ ID NO: 111778 - DNA, 20 bp, Artificial Sequence
  Description of Artificial Sequence: Synthetic oligonucleotide
  Target: LAMA2; (-) strand; PAM type: NRG; PAM sequence: GAG
agatataaagcacctttaaa

SEQ ID NO: 111779 - DNA, 20 bp, Artificial Sequence
  Description of Artificial Sequence: Synthetic oligonucleotide
  Target: LAMA2; (-) strand; PAM type: NRG; PAM sequence: AAG
tcagatataaagcaccttta

SEQ ID NO: 111780 - DNA, 20 bp, Artificial Sequence
  Description of Artificial Sequence: Synthetic oligonucleotide
  Target: LAMA2; (-) strand; PAM type: NRG; PAM sequence: AAG
aacaagagatatcagatata

SEQ ID NO: 111781 - DNA, 20 bp, Artificial Sequence
  Description of Artificial Sequence: Synthetic oligonucleotide
  Target: LAMA2; (-) strand; PAM type: NRG; PAM sequence: CAG
aatacaaaaacaagagatat

SEQ ID NO: 111782 - DNA, 20 bp, Artificial Sequence
  Description of Artificial Sequence: Synthetic oligonucleotide
  Target: LAMA2; (-) strand; PAM type: NRG; PAM sequence: GAG
tcagagaaatacaaaaacaa

SEQ ID NO: 111783 - DNA, 20 bp, Artificial Sequence
  Description of Artificial Sequence: Synthetic oligonucleotide
  Target: LAMA2; (-) strand; PAM type: NRG; PAM sequence: AAG
gttcagagaaatacaaaaac

SEQ ID NO: 111784 - DNA, 20 bp, Artificial Sequence
  Description of Artificial Sequence: Synthetic oligonucleotide
  Target: LAMA2; (-) strand; PAM type: NRG; PAM sequence: GAG
cagaaagtcaatctagttca

SEQ ID NO: 111785 - DNA, 20 bp, Artificial Sequence
  Description of Artificial Sequence: Synthetic oligonucleotide
  Target: LAMA2; (-) strand; PAM type: NRG; PAM sequence: CAG
gccagaaagtcaatctagtt

SEQ ID NO: 111786 - DNA, 20 bp, Artificial Sequence
  Description of Artificial Sequence: Synthetic oligonucleotide
  Target: LAMA2; (-) strand; PAM type: NRG; PAM sequence: TAG
ctatagccagaaagtcaatc

SEQ ID NO: 111787 - DNA, 20 bp, Artificial Sequence
  Description of Artificial Sequence: Synthetic oligonucleotide
  Target: LAMA2; (-) strand; PAM type: NRG; PAM sequence: AAG
tacgcatttctatagccaga

SEQ ID NO: 111788 - DNA, 20 bp, Artificial Sequence
  Description of Artificial Sequence: Synthetic oligonucleotide
  Target: LAMA2; (-) strand; PAM type: NRG; PAM sequence: CAG
cctttacgcatttctatagc

SEQ ID NO: 111789 - DNA, 20 bp, Artificial Sequence
  Description of Artificial Sequence: Synthetic oligonucleotide
  Target: LAMA2; (-) strand; PAM type: NRG; PAM sequence: TAG
tttgcctttacgcatttcta

SEQ ID NO: 111790 - DNA, 20 bp, Artificial Sequence
  Description of Artificial Sequence: Synthetic oligonucleotide
  Target: LAMA2; (-) strand; PAM type: NRG; PAM sequence: AAG
cagatccaacatcccagagg

SEQ ID NO: 111791 - DNA, 20 bp, Artificial Sequence
  Description of Artificial Sequence: Synthetic oligonucleotide
  Target: LAMA2; (-) strand; PAM type: NRG; PAM sequence: AGG
ctccagatccaacatcccag

SEQ ID NO: 111792 - DNA, 20 bp, Artificial Sequence
  Description of Artificial Sequence: Synthetic oligonucleotide
  Target: LAMA2; (-) strand; PAM type: NRG; PAM sequence: GAG
actccagatccaacatccca

SEQ ID NO: 111793 - DNA, 20 bp, Artificial Sequence
  Description of Artificial Sequence: Synthetic oligonucleotide
  Target: LAMA2; (-) strand; PAM type: NRG; PAM sequence: CAG
caactccagatccaacatcc

SEQ ID NO: 111794 - DNA, 20 bp, Artificial Sequence
  Description of Artificial Sequence: Synthetic oligonucleotide
  Target: LAMA2; (-) strand; PAM type: NRG; PAM sequence: CAG
gtactctacacgtccaactc

SEQ ID NO: 111795 - DNA, 20 bp, Artificial Sequence
  Description of Artificial Sequence: Synthetic oligonucleotide
  Target: LAMA2; (-) strand; PAM type: NRG; PAM sequence: GGG
agtcatcaatagtcaaatct

SEQ ID NO: 111796 - DNA, 20 bp, Artificial Sequence
  Description of Artificial Sequence: Synthetic oligonucleotide
  Target: LAMA2; (-) strand; PAM type: NRG; PAM sequence: TGG
gagtcatcaatagtcaaatc

SEQ ID NO: 111797 - DNA, 20 bp, Artificial Sequence
  Description of Artificial Sequence: Synthetic oligonucleotide
  Target: LAMA2; (-) strand; PAM type: NRG; PAM sequence: TAG
gtaccaatatgagtcatcaa

SEQ ID NO: 111798 - DNA, 20 bp, Artificial Sequence
  Description of Artificial Sequence: Synthetic oligonucleotide
  Target: LAMA2; (-) strand; PAM type: NRG; PAM sequence: GAG
ctacgatacggtaccaatat

SEQ ID NO: 111799 - DNA, 20 bp, Artificial Sequence
  Description of Artificial Sequence: Synthetic oligonucleotide
  Target: LAMA2; (-) strand; PAM type: NRG; PAM sequence: CGG
gttaccttgatgctacgata

SEQ ID NO: 111800 - DNA, 20 bp, Artificial Sequence
  Description of Artificial Sequence: Synthetic oligonucleotide
  Target: LAMA2; (-) strand; PAM type: NRG; PAM sequence: TGG
tatcttaatctttattaagt

SEQ ID NO: 111801 - DNA, 20 bp, Artificial Sequence
  Description of Artificial Sequence: Synthetic oligonucleotide
  Target: LAMA2; (-) strand; PAM type: NRG; PAM sequence: AAG
taattatcttaatctttatt

SEQ ID NO: 111802 - DNA, 20 bp, Artificial Sequence
  Description of Artificial Sequence: Synthetic oligonucleotide
  Target: LAMA2; (-) strand; PAM type: NRG; PAM sequence: GGG
taggagttttcttataaact

SEQ ID NO: 111803 - DNA, 20 bp, Artificial Sequence
  Description of Artificial Sequence: Synthetic oligonucleotide
  Target: LAMA2; (-) strand; PAM type: NRG; PAM sequence: TGG
ataggagttttcttataaac

SEQ ID NO: 111804 - DNA, 20 bp, Artificial Sequence
  Description of Artificial Sequence: Synthetic oligonucleotide
  Target: LAMA2; (-) strand; PAM type: NRG; PAM sequence: GAG
ccttattgaaatggaaatag

SEQ ID NO: 111805 - DNA, 20 bp, Artificial Sequence
  Description of Artificial Sequence: Synthetic oligonucleotide
  Target: LAMA2; (-) strand; PAM type: NRG; PAM sequence: AGG
taccttattgaaatggaaat

SEQ ID NO: 111806 - DNA, 20 bp, Artificial Sequence
  Description of Artificial Sequence: Synthetic oligonucleotide
  Target: LAMA2; (-) strand; PAM type: NRG; PAM sequence: TAG
ttaccttattgaaatggaaa

SEQ ID NO: 111807 - DNA, 20 bp, Artificial Sequence
  Description of Artificial Sequence: Synthetic oligonucleotide
  Target: LAMA2; (-) strand; PAM type: NRG; PAM sequence: TGG
acacagttaccttattgaaa

SEQ ID NO: 111808 - DNA, 20 bp, Artificial Sequence
  Description of Artificial Sequence: Synthetic oligonucleotide
  Target: LAMA2; (-) strand; PAM type: NRG; PAM sequence: CAG
catgtgtttacatgcataca

SEQ ID NO: 111809 - DNA, 20 bp, Artificial Sequence
  Description of Artificial Sequence: Synthetic oligonucleotide
  Target: LAMA2; (-) strand; PAM type: NRG; PAM sequence: CAG
atgacaaacatacccactcc

SEQ ID NO: 111810 - DNA, 20 bp, Artificial Sequence
  Description of Artificial Sequence: Synthetic oligonucleotide
  Target: LAMA2; (-) strand; PAM type: NRG; PAM sequence: AAG
aaggtttgtcagttcctaag

SEQ ID NO: 111811 - DNA, 20 bp, Artificial Sequence
  Description of Artificial Sequence: Synthetic oligonucleotide
  Target: LAMA2; (-) strand; PAM type: NRG; PAM sequence: AAG
tggaaggtttgtcagttcct

SEQ ID NO: 111812 - DNA, 20 bp, Artificial Sequence
  Description of Artificial Sequence: Synthetic oligonucleotide
  Target: LAMA2; (-) strand; PAM type: NRG; PAM sequence: CAG
tcaatacctggaaggtttgt

SEQ ID NO: 111813 - DNA, 20 bp, Artificial Sequence
  Description of Artificial Sequence: Synthetic oligonucleotide
  Target: LAMA2; (-) strand; PAM type: NRG; PAM sequence: AGG
tcctctggtcaatacctgga

SEQ ID NO: 111814 - DNA, 20 bp, Artificial Sequence
  Description of Artificial Sequence: Synthetic oligonucleotide
  Target: LAMA2; (-) strand; PAM type: NRG; PAM sequence: AAG
ttcctctggtcaatacctgg

SEQ ID NO: 111815 - DNA, 20 bp, Artificial Sequence
  Description of Artificial Sequence: Synthetic oligonucleotide
  Target: LAMA2; (-) strand; PAM type: NRG; PAM sequence: TGG
ttgttcctctggtcaatacc

SEQ ID NO: 111816 - DNA, 20 bp, Artificial Sequence
  Description of Artificial Sequence: Synthetic oligonucleotide
  Target: LAMA2; (-) strand; PAM type: NRG; PAM sequence: TGG
cagaaatggagttgttcctc

SEQ ID NO: 111817 - DNA, 20 bp, Artificial Sequence
  Description of Artificial Sequence: Synthetic oligonucleotide
  Target: LAMA2; (-) strand; PAM type: NRG; PAM sequence: GAG
agatgaaggggtcagaaatg

SEQ ID NO: 111818 - DNA, 20 bp, Artificial Sequence
  Description of Artificial Sequence: Synthetic oligonucleotide
  Target: LAMA2; (-) strand; PAM type: NRG; PAM sequence: TGG
caagatgaaggggtcagaaa

SEQ ID NO: 111819 - DNA, 20 bp, Artificial Sequence
  Description of Artificial Sequence: Synthetic oligonucleotide
  Target: LAMA2; (-) strand; PAM type: NRG; PAM sequence: CAG
cagacacaagatgaaggggt

SEQ ID NO: 111820 - DNA, 20 bp, Artificial Sequence
  Description of Artificial Sequence: Synthetic oligonucleotide
  Target: LAMA2; (-) strand; PAM type: NRG; PAM sequence: GGG
ctaccagacacaagatgaag

SEQ ID NO: 111821 - DNA, 20 bp, Artificial Sequence
  Description of Artificial Sequence: Synthetic oligonucleotide
  Target: LAMA2; (-) strand; PAM type: NRG; PAM sequence: GGG
cctaccagacacaagatgaa

SEQ ID NO: 111822 - DNA, 20 bp, Artificial Sequence
  Description of Artificial Sequence: Synthetic oligonucleotide
  Target: LAMA2; (-) strand; PAM type: NRG; PAM sequence: AGG
tcctaccagacacaagatga

SEQ ID NO: 111823 - DNA, 20 bp, Artificial Sequence
  Description of Artificial Sequence: Synthetic oligonucleotide
  Target: LAMA2; (-) strand; PAM type: NRG; PAM sequence: AAG
ttcctaccagacacaagatg

SEQ ID NO: 111824 - DNA, 20 bp, Artificial Sequence
  Description of Artificial Sequence: Synthetic oligonucleotide
  Target: LAMA2; (-) strand; PAM type: NRG; PAM sequence: AAG
cccaaattcctaccagacac

SEQ ID NO: 111825 - DNA, 20 bp, Artificial Sequence
  Description of Artificial Sequence: Synthetic oligonucleotide
  Target: LAMA2; (-) strand; PAM type: NRG; PAM sequence: CAG
cgacacccccaaattcctac

SEQ ID NO: 111826 - DNA, 20 bp, Artificial Sequence
  Description of Artificial Sequence: Synthetic oligonucleotide
  Target: LAMA2; (-) strand; PAM type: NRG; PAM sequence: CAG
gcaaaataggaagcctgaaa

SEQ ID NO: 111827 - DNA, 20 bp, Artificial Sequence
  Description of Artificial Sequence: Synthetic oligonucleotide
  Target: LAMA2; (-) strand; PAM type: NRG; PAM sequence: AAG
ctttcttcaggcaaaatagg

SEQ ID NO: 111828 - DNA, 20 bp, Artificial Sequence
  Description of Artificial Sequence: Synthetic oligonucleotide
  Target: LAMA2; (-) strand; PAM type: NRG; PAM sequence: AGG
gtactttcttcaggcaaaat

SEQ ID NO: 111829 - DNA, 20 bp, Artificial Sequence
  Description of Artificial Sequence: Synthetic oligonucleotide
  Target: LAMA2; (-) strand; PAM type: NRG; PAM sequence: TAG
agtactttcttcaggcaaaa

SEQ ID NO: 111830 - DNA, 20 bp, Artificial Sequence
  Description of Artificial Sequence: Synthetic oligonucleotide
  Target: LAMA2; (-) strand; PAM type: NRG; PAM sequence: AGG
taagtggcagtactttcttc

SEQ ID NO: 111831 - DNA, 20 bp, Artificial Sequence
  Description of Artificial Sequence: Synthetic oligonucleotide
  Target: LAMA2; (-) strand; PAM type: NRG; PAM sequence: CAG
ataagtggcagtactttctt

SEQ ID NO: 111832 - DNA, 20 bp, Artificial Sequence
  Description of Artificial Sequence: Synthetic oligonucleotide
  Target: LAMA2; (-) strand; PAM type: NRG; PAM sequence: CAG
tattgcataagaataagtgg

SEQ ID NO: 111833 - DNA, 20 bp, Artificial Sequence
  Description of Artificial Sequence: Synthetic oligonucleotide
  Target: LAMA2; (-) strand; PAM type: NRG; PAM sequence: TGG
ttgtattgcataagaataag

SEQ ID NO: 111834 - DNA, 20 bp, Artificial Sequence
  Description of Artificial Sequence: Synthetic oligonucleotide
  Target: LAMA2; (-) strand; PAM type: NRG; PAM sequence: AAG
ggcttgtattgcataagaat

SEQ ID NO: 111835 - DNA, 20 bp, Artificial Sequence
  Description of Artificial Sequence: Synthetic oligonucleotide
  Target: LAMA2; (-) strand; PAM type: NRG; PAM sequence: AAG
tgctttggcttgtattgcat

SEQ ID NO: 111836 - DNA, 20 bp, Artificial Sequence
  Description of Artificial Sequence: Synthetic oligonucleotide
  Target: LAMA2; (-) strand; PAM type: NRG; PAM sequence: TGG
ataatggtgctcttatgctt

SEQ ID NO: 111837 - DNA, 20 bp, Artificial Sequence
  Description of Artificial Sequence: Synthetic oligonucleotide
  Target: LAMA2; (-) strand; PAM type: NRG; PAM sequence: TGG
acaacaaagacaagcaataa

SEQ ID NO: 111838 - DNA, 20 bp, Artificial Sequence
  Description of Artificial Sequence: Synthetic oligonucleotide
  Target: LAMA2; (-) strand; PAM type: NRG; PAM sequence: AAG
gagctgtgtacaacaaagac

SEQ ID NO: 111839 - DNA, 20 bp, Artificial Sequence
  Description of Artificial Sequence: Synthetic oligonucleotide
  Target: LAMA2; (-) strand; PAM type: NRG; PAM sequence: AAG
aggaggagctgtgtacaaca

SEQ ID NO: 111840 - DNA, 20 bp, Artificial Sequence
  Description of Artificial Sequence: Synthetic oligonucleotide
  Target: LAMA2; (-) strand; PAM type: NRG; PAM sequence: GAG
ggctatgtagactaaaggag

SEQ ID NO: 111841 - DNA, 20 bp, Artificial Sequence
  Description of Artificial Sequence: Synthetic oligonucleotide
  Target: LAMA2; (-) strand; PAM type: NRG; PAM sequence: AGG
gtggctatgtagactaaagg

SEQ ID NO: 111842 - DNA, 20 bp, Artificial Sequence
  Description of Artificial Sequence: Synthetic oligonucleotide
  Target: LAMA2; (-) strand; PAM type: NRG; PAM sequence: GAG
ggtggctatgtagactaaag

SEQ ID NO: 111843 - DNA, 20 bp, Artificial Sequence
  Description of Artificial Sequence: Synthetic oligonucleotide
  Target: LAMA2; (-) strand; PAM type: NRG; PAM sequence: AGG
atggtggctatgtagactaa

SEQ ID NO: 111844 - DNA, 20 bp, Artificial Sequence
  Description of Artificial Sequence: Synthetic oligonucleotide
  Target: LAMA2; (-) strand; PAM type: NRG; PAM sequence: AAG
tatggtggctatgtagacta

SEQ ID NO: 111845 - DNA, 20 bp, Artificial Sequence
  Description of Artificial Sequence: Synthetic oligonucleotide
  Target: LAMA2; (-) strand; PAM type: NRG; PAM sequence: TAG
atttttctatggtggctatg

SEQ ID NO: 111846 - DNA, 20 bp, Artificial Sequence
  Description of Artificial Sequence: Synthetic oligonucleotide
  Target: LAMA2; (-) strand; PAM type: NRG; PAM sequence: TGG
gaaactgcatttttctatgg

SEQ ID NO: 111847 - DNA, 20 bp, Artificial Sequence
  Description of Artificial Sequence: Synthetic oligonucleotide
  Target: LAMA2; (-) strand; PAM type: NRG; PAM sequence: TGG
tttgaaactgcatttttcta

SEQ ID NO: 111848 - DNA, 20 bp, Artificial Sequence
  Description of Artificial Sequence: Synthetic oligonucleotide
  Target: LAMA2; (-) strand; PAM type: NRG; PAM sequence: CAG
ggtatgttacataagaattt

SEQ ID NO: 111849 - DNA, 20 bp, Artificial Sequence
  Description of Artificial Sequence: Synthetic oligonucleotide
  Target: LAMA2; (-) strand; PAM type: NRG; PAM sequence: AAG
gtggacctggtatgttacat

SEQ ID NO: 111850 - DNA, 20 bp, Artificial Sequence
  Description of Artificial Sequence: Synthetic oligonucleotide
  Target: LAMA2; (-) strand; PAM type: NRG; PAM sequence: TGG
cattttaagtagggtggacc

SEQ ID NO: 111851 - DNA, 20 bp, Artificial Sequence
  Description of Artificial Sequence: Synthetic oligonucleotide
  Target: LAMA2; (-) strand; PAM type: NRG; PAM sequence: TGG
acttcccattttaagtaggg

SEQ ID NO: 111852 - DNA, 20 bp, Artificial Sequence
  Description of Artificial Sequence: Synthetic oligonucleotide
  Target: LAMA2; (-) strand; PAM type: NRG; PAM sequence: GGG
gttacttcccattttaagta

SEQ ID NO: 111853 - DNA, 20 bp, Artificial Sequence
  Description of Artificial Sequence: Synthetic oligonucleotide
  Target: LAMA2; (-) strand; PAM type: NRG; PAM sequence: AGG
agttacttcccattttaagt

SEQ ID NO: 111854 - DNA, 20 bp, Artificial Sequence
  Description of Artificial Sequence: Synthetic oligonucleotide
  Target: LAMA2; (-) strand; PAM type: NRG; PAM sequence: TAG
cagttacttcccattttaag

SEQ ID NO: 111855 - DNA, 20 bp, Artificial Sequence
  Description of Artificial Sequence: Synthetic oligonucleotide
  Target: LAMA2; (-) strand; PAM type: NRG; PAM sequence: AAG
tctcagttacttcccatttt

SEQ ID NO: 111856 - DNA, 20 bp, Artificial Sequence
  Description of Artificial Sequence: Synthetic oligonucleotide
  Target: LAMA2; (-) strand; PAM type: NRG; PAM sequence: CAG
agaataactgaatcagttct

SEQ ID NO: 111857 - DNA, 20 bp, Artificial Sequence
  Description of Artificial Sequence: Synthetic oligonucleotide
  Target: LAMA2; (-) strand; PAM type: NRG; PAM sequence: CAG
caaagatagaataactgaat

SEQ ID NO: 111858 - DNA, 20 bp, Artificial Sequence
  Description of Artificial Sequence: Synthetic oligonucleotide
  Target: LAMA2; (-) strand; PAM type: NRG; PAM sequence: TAG
ttgcattaaagctccaaaga

SEQ ID NO: 111859 - DNA, 20 bp, Artificial Sequence
  Description of Artificial Sequence: Synthetic oligonucleotide
  Target: LAMA2; (-) strand; PAM type: NRG; PAM sequence: AAG
ataattgcattaaagctcca

SEQ ID NO: 111860 - DNA, 20 bp, Artificial Sequence
  Description of Artificial Sequence: Synthetic oligonucleotide
  Target: LAMA2; (-) strand; PAM type: NRG; PAM sequence: AAG
agatgttgataattgcatta

SEQ ID NO: 111861 - DNA, 20 bp, Artificial Sequence
  Description of Artificial Sequence: Synthetic oligonucleotide
  Target: LAMA2; (-) strand; PAM type: NRG; PAM sequence: TAG
ataagtaatctatatggtac

SEQ ID NO: 111862 - DNA, 20 bp, Artificial Sequence
  Description of Artificial Sequence: Synthetic oligonucleotide
  Target: LAMA2; (-) strand; PAM type: NRG; PAM sequence: TGG
agttctataagtaatctata

SEQ ID NO: 111863 - DNA, 20 bp, Artificial Sequence
  Description of Artificial Sequence: Synthetic oligonucleotide
  Target: LAMA2; (-) strand; PAM type: NRG; PAM sequence: AAG
gaagacagggatagttctat

SEQ ID NO: 111864 - DNA, 20 bp, Artificial Sequence
  Description of Artificial Sequence: Synthetic oligonucleotide
  Target: LAMA2; (-) strand; PAM type: NRG; PAM sequence: TAG
ggaagtgctgaagacaggga

SEQ ID NO: 111865 - DNA, 20 bp, Artificial Sequence
  Description of Artificial Sequence: Synthetic oligonucleotide
  Target: LAMA2; (-) strand; PAM type: NRG; PAM sequence: GGG
ggagggaagtgctgaagaca

SEQ ID NO: 111866 - DNA, 20 bp, Artificial Sequence
  Description of Artificial Sequence: Synthetic oligonucleotide
  Target: LAMA2; (-) strand; PAM type: NRG; PAM sequence: AGG
gggagggaagtgctgaagac

SEQ ID NO: 111867 - DNA, 20 bp, Artificial Sequence
  Description of Artificial Sequence: Synthetic oligonucleotide
  Target: LAMA2; (-) strand; PAM type: NRG; PAM sequence: CAG
tgggagggaagtgctgaaga

SEQ ID NO: 111868 - DNA, 20 bp, Artificial Sequence
  Description of Artificial Sequence: Synthetic oligonucleotide
  Target: LAMA2; (-) strand; PAM type: NRG; PAM sequence: AAG
aaaatgggagggaagtgctg

SEQ ID NO: 111869 - DNA, 20 bp, Artificial Sequence
  Description of Artificial Sequence: Synthetic oligonucleotide
  Target: LAMA2; (-) strand; PAM type: NRG; PAM sequence: AAG
aagaagagaaaatgggaggg

SEQ ID NO: 111870 - DNA, 20 bp, Artificial Sequence
  Description of Artificial Sequence: Synthetic oligonucleotide
  Target: LAMA2; (-) strand; PAM type: NRG; PAM sequence: GGG
aacaagaagagaaaatggga

SEQ ID NO: 111871 - DNA, 20 bp, Artificial Sequence
  Description of Artificial Sequence: Synthetic oligonucleotide
  Target: LAMA2; (-) strand; PAM type: NRG; PAM sequence: AGG
aaacaagaagagaaaatggg

SEQ ID NO: 111872 - DNA, 20 bp, Artificial Sequence
  Description of Artificial Sequence: Synthetic oligonucleotide
  Target: LAMA2; (-) strand; PAM type: NRG; PAM sequence: GAG
aaaacaagaagagaaaatgg

SEQ ID NO: 111873 - DNA, 20 bp, Artificial Sequence
  Description of Artificial Sequence: Synthetic oligonucleotide
  Target: LAMA2; (-) strand; PAM type: NRG; PAM sequence: GGG
ggaaaacaagaagagaaaat

SEQ ID NO: 111874 - DNA, 20 bp, Artificial Sequence
  Description of Artificial Sequence: Synthetic oligonucleotide
  Target: LAMA2; (-) strand; PAM type: NRG; PAM sequence: TGG
gggaaaacaagaagagaaaa

SEQ ID NO: 111875 - DNA, 20 bp, Artificial Sequence
  Description of Artificial Sequence: Synthetic oligonucleotide
  Target: LAMA2; (-) strand; PAM type: NRG; PAM sequence: GAG
gagaattgggaaaacaagaa

SEQ ID NO: 111876 - DNA, 20 bp, Artificial Sequence
  Description of Artificial Sequence: Synthetic oligonucleotide
  Target: LAMA2; (-) strand; PAM type: NRG; PAM sequence: AAG
ttgagaattgggaaaacaag

SEQ ID NO: 111877 - DNA, 20 bp, Artificial Sequence
  Description of Artificial Sequence: Synthetic oligonucleotide
  Target: LAMA2; (-) strand; PAM type: NRG; PAM sequence: AAG
gagttgagaattgggaaaac

SEQ ID NO: 111878 - DNA, 20 bp, Artificial Sequence
  Description of Artificial Sequence: Synthetic oligonucleotide
  Target: LAMA2; (-) strand; PAM type: NRG; PAM sequence: GGG
ttaacagggagttgagaatt

SEQ ID NO: 111879 - DNA, 20 bp, Artificial Sequence
  Description of Artificial Sequence: Synthetic oligonucleotide
  Target: LAMA2; (-) strand; PAM type: NRG; PAM sequence: TGG
tttaacagggagttgagaat

SEQ ID NO: 111880 - DNA, 20 bp, Artificial Sequence
  Description of Artificial Sequence: Synthetic oligonucleotide
  Target: LAMA2; (-) strand; PAM type: NRG; PAM sequence: GAG
tttgggtttaacagggagtt

SEQ ID NO: 111881 - DNA, 20 bp, Artificial Sequence
  Description of Artificial Sequence: Synthetic oligonucleotide
  Target: LAMA2; (-) strand; PAM type: NRG; PAM sequence: GAG
gctgctttgggtttaacagg

SEQ ID NO: 111882 - DNA, 20 bp, Artificial Sequence
  Description of Artificial Sequence: Synthetic oligonucleotide
  Target: LAMA2; (-) strand; PAM type: NRG; PAM sequence: GGG
tagctgctttgggtttaaca

SEQ ID NO: 111883 - DNA, 20 bp, Artificial Sequence
  Description of Artificial Sequence: Synthetic oligonucleotide
  Target: LAMA2; (-) strand; PAM type: NRG; PAM sequence: AGG
ttagctgctttgggtttaac

SEQ ID NO: 111884 - DNA, 20 bp, Artificial Sequence
  Description of Artificial Sequence: Synthetic oligonucleotide
  Target: LAMA2; (-) strand; PAM type: NRG; PAM sequence: CAG
gttagctgctttgggtttaa

SEQ ID NO: 111885 - DNA, 20 bp, Artificial Sequence
  Description of Artificial Sequence: Synthetic oligonucleotide
  Target: LAMA2; (-) strand; PAM type: NRG; PAM sequence: GGG
tttcaactgttagctgcttt

SEQ ID NO: 111886 - DNA, 20 bp, Artificial Sequence
  Description of Artificial Sequence: Synthetic oligonucleotide
  Target: LAMA2; (-) strand; PAM type: NRG; PAM sequence: TGG
ctttcaactgttagctgctt

SEQ ID NO: 111887 - DNA, 20 bp, Artificial Sequence
  Description of Artificial Sequence: Synthetic oligonucleotide
  Target: LAMA2; (-) strand; PAM type: NRG; PAM sequence: TAG
taaccatacctttcaactgt

SEQ ID NO: 111888 - DNA, 20 bp, Artificial Sequence
  Description of Artificial Sequence: Synthetic oligonucleotide
  Target: LAMA2; (-) strand; PAM type: NRG; PAM sequence: AGG
tcagcttcatgtctagccct

SEQ ID NO: 111889 - DNA, 20 bp, Artificial Sequence
  Description of Artificial Sequence: Synthetic oligonucleotide
  Target: LAMA2; (-) strand; PAM type: NRG; PAM sequence: TAG
atcagcttcatgtctagccc

SEQ ID NO: 111890 - DNA, 20 bp, Artificial Sequence
  Description of Artificial Sequence: Synthetic oligonucleotide
  Target: LAMA2; (-) strand; PAM type: NRG; PAM sequence: TAG
tctctgatcagcttcatgtc

SEQ ID NO: 111891 - DNA, 20 bp, Artificial Sequence
  Description of Artificial Sequence: Synthetic oligonucleotide
  Target: LAMA2; (-) strand; PAM type: NRG; PAM sequence: CAG
aagtcttctctgtctctgat

SEQ ID NO: 111892 - DNA, 20 bp, Artificial Sequence
  Description of Artificial Sequence: Synthetic oligonucleotide
  Target: LAMA2; (-) strand; PAM type: NRG; PAM sequence: AAG
caacaattaaccagttcttt

SEQ ID NO: 111893 - DNA, 20 bp, Artificial Sequence
  Description of Artificial Sequence: Synthetic oligonucleotide
  Target: LAMA2; (-) strand; PAM type: NRG; PAM sequence: CAG
acccagagtcaacaattaac

SEQ ID NO: 111894 - DNA, 20 bp, Artificial Sequence
  Description of Artificial Sequence: Synthetic oligonucleotide
  Target: LAMA2; (-) strand; PAM type: NRG; PAM sequence: GAG
gaaactctatgtatcaccca

SEQ ID NO: 111895 - DNA, 20 bp, Artificial Sequence
  Description of Artificial Sequence: Synthetic oligonucleotide
  Target: LAMA2; (-) strand; PAM type: NRG; PAM sequence: CAG
atgaaactctatgtatcacc

SEQ ID NO: 111896 - DNA, 20 bp, Artificial Sequence
  Description of Artificial Sequence: Synthetic oligonucleotide
  Target: LAMA2; (-) strand; PAM type: NRG; PAM sequence: CAG
aaaaattaagtatctacaaa

SEQ ID NO: 111897 - DNA, 20 bp, Artificial Sequence
  Description of Artificial Sequence: Synthetic oligonucleotide
  Target: LAMA2; (-) strand; PAM type: NRG; PAM sequence: AAG
tttttattatggaaaaaatt

SEQ ID NO: 111898 - DNA, 20 bp, Artificial Sequence
  Description of Artificial Sequence: Synthetic oligonucleotide
  Target: LAMA2; (-) strand; PAM type: NRG; PAM sequence: TGG
ttcttttaaactttttatta

SEQ ID NO: 111899 - DNA, 20 bp, Artificial Sequence
  Description of Artificial Sequence: Synthetic oligonucleotide
  Target: LAMA2; (-) strand; PAM type: NRG; PAM sequence: TGG
acagcacatgccattgcaca

SEQ ID NO: 111900 - DNA, 20 bp, Artificial Sequence
  Description of Artificial Sequence: Synthetic oligonucleotide
  Target: LAMA2; (-) strand; PAM type: NRG; PAM sequence: CAG
ctcccaagtagctgggacta

SEQ ID NO: 111901 - DNA, 20 bp, Artificial Sequence
  Description of Artificial Sequence: Synthetic oligonucleotide
  Target: LAMA2; (-) strand; PAM type: NRG; PAM sequence: GGG
cctcagcctcccaagtagct

SEQ ID NO: 111902 - DNA, 20 bp, Artificial Sequence
  Description of Artificial Sequence: Synthetic oligonucleotide
  Target: LAMA2; (-) strand; PAM type: NRG; PAM sequence: TGG
gcctcagcctcccaagtagc

SEQ ID NO: 111903 - DNA, 20 bp, Artificial Sequence
  Description of Artificial Sequence: Synthetic oligonucleotide
  Target: LAMA2; (-) strand; PAM type: NRG; PAM sequence: TAG
tcctgcctcagcctcccaag

SEQ ID NO: 111904 - DNA, 20 bp, Artificial Sequence
  Description of Artificial Sequence: Synthetic oligonucleotide
  Target: LAMA2; (-) strand; PAM type: NRG; PAM sequence: AAG
tcctcctgcctcagcctccc

SEQ ID NO: 111905 - DNA, 20 bp, Artificial Sequence
  Description of Artificial Sequence: Synthetic oligonucleotide
  Target: LAMA2; (-) strand; PAM type: NRG; PAM sequence: CAG
ctgaagtgatcctcctgcct

SEQ ID NO: 111906 - DNA, 20 bp, Artificial Sequence
  Description of Artificial Sequence: Synthetic oligonucleotide
  Target: LAMA2; (-) strand; PAM type: NRG; PAM sequence: AAG
agccttgaattcctgggctg

SEQ ID NO: 111907 - DNA, 20 bp, Artificial Sequence
  Description of Artificial Sequence: Synthetic oligonucleotide
  Target: LAMA2; (-) strand; PAM type: NRG; PAM sequence: GGG
gaccacagccttgaattcct

SEQ ID NO: 111908 - DNA, 20 bp, Artificial Sequence
  Description of Artificial Sequence: Synthetic oligonucleotide
  Target: LAMA2; (-) strand; PAM type: NRG; PAM sequence: TGG
ggaccacagccttgaattcc

SEQ ID NO: 111909 - DNA, 20 bp, Artificial Sequence
  Description of Artificial Sequence: Synthetic oligonucleotide
  Target: LAMA2; (-) strand; PAM type: NRG; PAM sequence: CAG
ggcatgatcatcatggacca

SEQ ID NO: 111910 - DNA, 20 bp, Artificial Sequence
  Description of Artificial Sequence: Synthetic oligonucleotide
  Target: LAMA2; (-) strand; PAM type: NRG; PAM sequence: TGG
attcacaggcatgatcatca

SEQ ID NO: 111911 - DNA, 20 bp, Artificial Sequence
  Description of Artificial Sequence: Synthetic oligonucleotide
  Target: LAMA2; (-) strand; PAM type: NRG; PAM sequence: AGG
ggactgcagtggttattcac

SEQ ID NO: 111912 - DNA, 20 bp, Artificial Sequence
  Description of Artificial Sequence: Synthetic oligonucleotide
  Target: LAMA2; (-) strand; PAM type: NRG; PAM sequence: CAG
tggactgcagtggttattca

SEQ ID NO: 111913 - DNA, 20 bp, Artificial Sequence
  Description of Artificial Sequence: Synthetic oligonucleotide
  Target: LAMA2; (-) strand; PAM type: NRG; PAM sequence: TGG
ttgcccaggctggactgcag

SEQ ID NO: 111914 - DNA, 20 bp, Artificial Sequence
  Description of Artificial Sequence: Synthetic oligonucleotide
  Target: LAMA2; (-) strand; PAM type: NRG; PAM sequence: CAG
atgttgcccaggctggactg

SEQ ID NO: 111915 - DNA, 20 bp, Artificial Sequence
  Description of Artificial Sequence: Synthetic oligonucleotide
  Target: LAMA2; (-) strand; PAM type: NRG; PAM sequence: TGG
tcttgctatgttgcccaggc

SEQ ID NO: 111916 - DNA, 20 bp, Artificial Sequence
  Description of Artificial Sequence: Synthetic oligonucleotide
  Target: LAMA2; (-) strand; PAM type: NRG; PAM sequence: AGG
gaagtcttgctatgttgccc

SEQ ID NO: 111917 - DNA, 20 bp, Artificial Sequence
  Description of Artificial Sequence: Synthetic oligonucleotide
  Target: LAMA2; (-) strand; PAM type: NRG; PAM sequence: CAG
tgaagtcttgctatgttgcc

SEQ ID NO: 111918 - DNA, 20 bp, Artificial Sequence
  Description of Artificial Sequence: Synthetic oligonucleotide
  Target: LAMA2; (-) strand; PAM type: NRG; PAM sequence: AAG
acttttttttttaagagatg

SEQ ID NO: 111919 - DNA, 20 bp, Artificial Sequence
  Description of Artificial Sequence: Synthetic oligonucleotide
  Target: LAMA2; (-) strand; PAM type: NRG; PAM sequence: GAG
tttataacttttttttttaa

SEQ ID NO: 111920 - DNA, 20 bp, Artificial Sequence
  Description of Artificial Sequence: Synthetic oligonucleotide
  Target: LAMA2; (-) strand; PAM type: NRG; PAM sequence: AAG
tttttataactttttttttt

SEQ ID NO: 111921 - DNA, 20 bp, Artificial Sequence
  Description of Artificial Sequence: Synthetic oligonucleotide
  Target: LAMA2; (-) strand; PAM type: NRG; PAM sequence: AAG
tgctgaaaaacttccttaaa

SEQ ID NO: 111922 - DNA, 20 bp, Artificial Sequence
  Description of Artificial Sequence: Synthetic oligonucleotide
  Target: LAMA2; (-) strand; PAM type: NRG; PAM sequence: AAG
ctcaacaccaccaaacacgc

SEQ ID NO: 111923 - DNA, 20 bp, Artificial Sequence
  Description of Artificial Sequence: Synthetic oligonucleotide
  Target: LAMA2; (-) strand; PAM type: NRG; PAM sequence: AAG
aaatgtccttaaacccggtt

SEQ ID NO: 111924 - DNA, 20 bp, Artificial Sequence
  Description of Artificial Sequence: Synthetic oligonucleotide
  Target: LAMA2; (-) strand; PAM type: NRG; PAM sequence: CGG
agtataaatgtccttaaacc

SEQ ID NO: 111925 - DNA, 20 bp, Artificial Sequence
  Description of Artificial Sequence: Synthetic oligonucleotide
  Target: LAMA2; (-) strand; PAM type: NRG; PAM sequence: GAG
aaagaagaactgcactttat

SEQ ID NO: 111926 - DNA, 20 bp, Artificial Sequence
  Description of Artificial Sequence: Synthetic oligonucleotide
  Target: LAMA2; (-) strand; PAM type: NRG; PAM sequence: AAG
gaatgtatcttttctgaaag

SEQ ID NO: 111927 - DNA, 20 bp, Artificial Sequence
  Description of Artificial Sequence: Synthetic oligonucleotide
  Target: LAMA2; (-) strand; PAM type: NRG; PAM sequence: AAG
acagaatgtatcttttctga

SEQ ID NO: 111928 - DNA, 20 bp, Artificial Sequence
  Description of Artificial Sequence: Synthetic oligonucleotide
  Target: LAMA2; (-) strand; PAM type: NRG; PAM sequence: CAG
ataaggttcaccttctttaa

SEQ ID NO: 111929 - DNA, 20 bp, Artificial Sequence
  Description of Artificial Sequence: Synthetic oligonucleotide
  Target: LAMA2; (-) strand; PAM type: NRG; PAM sequence: AGG
aagaatgaatttatcaaata

SEQ ID NO: 111930 - DNA, 20 bp, Artificial Sequence
  Description of Artificial Sequence: Synthetic oligonucleotide
  Target: LAMA2; (-) strand; PAM type: NRG; PAM sequence: AAG
aaagaatgaatttatcaaat

SEQ ID NO: 111931 - DNA, 20 bp, Artificial Sequence
  Description of Artificial Sequence: Synthetic oligonucleotide
  Target: LAMA2; (-) strand; PAM type: NRG; PAM sequence: AAG
agtgaaatacatggtaacaa

SEQ ID NO: 111932 - DNA, 20 bp, Artificial Sequence
  Description of Artificial Sequence: Synthetic oligonucleotide
  Target: LAMA2; (-) strand; PAM type: NRG; PAM sequence: TGG
gcaatgttaagtgaaataca

SEQ ID NO: 111933 - DNA, 20 bp, Artificial Sequence
  Description of Artificial Sequence: Synthetic oligonucleotide
  Target: LAMA2; (-) strand; PAM type: NRG; PAM sequence: AAG
ttctttgaggatgcaatgtt

SEQ ID NO: 111934 - DNA, 20 bp, Artificial Sequence
  Description of Artificial Sequence: Synthetic oligonucleotide
  Target: LAMA2; (-) strand; PAM type: NRG; PAM sequence: AGG
ttggtaatcttttttctttg

SEQ ID NO: 111935 - DNA, 20 bp, Artificial Sequence
  Description of Artificial Sequence: Synthetic oligonucleotide
  Target: LAMA2; (-) strand; PAM type: NRG; PAM sequence: GAG
tttggtaatcttttttcttt

SEQ ID NO: 111936 - DNA, 20 bp, Artificial Sequence
  Description of Artificial Sequence: Synthetic oligonucleotide
  Target: LAMA2; (-) strand; PAM type: NRG; PAM sequence: TGG
ccctgactgctgtctcactt

SEQ ID NO: 111937 - DNA, 20 bp, Artificial Sequence
  Description of Artificial Sequence: Synthetic oligonucleotide
  Target: LAMA2; (-) strand; PAM type: NRG; PAM sequence: CAG
ggtctctcttttgagacaag

SEQ ID NO: 111938 - DNA, 20 bp, Artificial Sequence
  Description of Artificial Sequence: Synthetic oligonucleotide
  Target: LAMA2; (-) strand; PAM type: NRG; PAM sequence: AAG
tctggtctctcttttgagac

SEQ ID NO: 111939 - DNA, 20 bp, Artificial Sequence
  Description of Artificial Sequence: Synthetic oligonucleotide
  Target: LAMA2; (-) strand; PAM type: NRG; PAM sequence: GAG
gaaaatctggtctctctttt

SEQ ID NO: 111940 - DNA, 20 bp, Artificial Sequence
  Description of Artificial Sequence: Synthetic oligonucleotide
  Target: LAMA2; (-) strand; PAM type: NRG; PAM sequence: TGG
agctgttaaatatgaaaatc

SEQ ID NO: 111941 - DNA, 20 bp, Artificial Sequence
  Description of Artificial Sequence: Synthetic oligonucleotide
  Target: LAMA2; (-) strand; PAM type: NRG; PAM sequence: GAG
tttaagtgattgatttccat

SEQ ID NO: 111942 - DNA, 20 bp, Artificial Sequence
  Description of Artificial Sequence: Synthetic oligonucleotide
  Target: LAMA2; (-) strand; PAM type: NRG; PAM sequence: AAG
tttatttcattttctttttt

SEQ ID NO: 111943 - DNA, 20 bp, Artificial Sequence
  Description of Artificial Sequence: Synthetic oligonucleotide
  Target: LAMA2; (-) strand; PAM type: NRG; PAM sequence: AAG
ttcaattaacagaattttga

SEQ ID NO: 111944 - DNA, 20 bp, Artificial Sequence
  Description of Artificial Sequence: Synthetic oligonucleotide
  Target: LAMA2; (-) strand; PAM type: NRG; PAM sequence: CAG
tcatttttaaattcaattaa

SEQ ID NO: 111945 - DNA, 20 bp, Artificial Sequence
  Description of Artificial Sequence: Synthetic oligonucleotide
  Target: LAMA2; (-) strand; PAM type: NRG; PAM sequence: AAG
tcagtgtacaaattgcatag

SEQ ID NO: 111946 - DNA, 20 bp, Artificial Sequence
  Description of Artificial Sequence: Synthetic oligonucleotide
  Target: LAMA2; (-) strand; PAM type: NRG; PAM sequence: TAG
atttcagtgtacaaattgca

SEQ ID NO: 111947 - DNA, 20 bp, Artificial Sequence
  Description of Artificial Sequence: Synthetic oligonucleotide
  Target: LAMA2; (-) strand; PAM type: NRG; PAM sequence: CAG
aatatccacccttcagattt

SEQ ID NO: 111948 - DNA, 20 bp, Artificial Sequence
  Description of Artificial Sequence: Synthetic oligonucleotide
  Target: LAMA2; (-) strand; PAM type: NRG; PAM sequence: CAG
acagtacaatatccaccctt

SEQ ID NO: 111949 - DNA, 20 bp, Artificial Sequence
  Description of Artificial Sequence: Synthetic oligonucleotide
  Target: LAMA2; (-) strand; PAM type: NRG; PAM sequence: CAG
gcacagcatactaatgtata

SEQ ID NO: 111950 - DNA, 20 bp, Artificial Sequence
  Description of Artificial Sequence: Synthetic oligonucleotide
  Target: LAMA2; (-) strand; PAM type: NRG; PAM sequence: CAG
atatcttttattgtttggca

SEQ ID NO: 111951 - DNA, 20 bp, Artificial Sequence
  Description of Artificial Sequence: Synthetic oligonucleotide
  Target: LAMA2; (-) strand; PAM type: NRG; PAM sequence: TGG
atggtatatcttttattgtt

SEQ ID NO: 111952 - DNA, 20 bp, Artificial Sequence
  Description of Artificial Sequence: Synthetic oligonucleotide
  Target: LAMA2; (-) strand; PAM type: NRG; PAM sequence: TGG
ttgaagtagtcttcctagaa

SEQ ID NO: 111953 - DNA, 20 bp, Artificial Sequence
  Description of Artificial Sequence: Synthetic oligonucleotide
  Target: LAMA2; (-) strand; PAM type: NRG; PAM sequence: TAG
gtttgttgaagtagtcttcc

SEQ ID NO: 111954 - DNA, 20 bp, Artificial Sequence
  Description of Artificial Sequence: Synthetic oligonucleotide
  Target: LAMA2; (-) strand; PAM type: NRG; PAM sequence: TAG
tggatcccagtttgttgaag

SEQ ID NO: 111955 - DNA, 20 bp, Artificial Sequence
  Description of Artificial Sequence: Synthetic oligonucleotide
  Target: LAMA2; (-) strand; PAM type: NRG; PAM sequence: AAG
tcttggatcccagtttgttg

SEQ ID NO: 111956 - DNA, 20 bp, Artificial Sequence
  Description of Artificial Sequence: Synthetic oligonucleotide
  Target: LAMA2; (-) strand; PAM type: NRG; PAM sequence: CAG
ctttataatatcttggatcc

SEQ ID NO: 111957 - DNA, 20 bp, Artificial Sequence
  Description of Artificial Sequence: Synthetic oligonucleotide
  Target: LAMA2; (-) strand; PAM type: NRG; PAM sequence: TGG
taaaattctttataatatct

SEQ ID NO: 111958 - DNA, 20 bp, Artificial Sequence
  Description of Artificial Sequence: Synthetic oligonucleotide
  Target: LAMA2; (-) strand; PAM type: NRG; PAM sequence: AAG
gagccaccctttcatatcat

SEQ ID NO: 111959 - DNA, 20 bp, Artificial Sequence
  Description of Artificial Sequence: Synthetic oligonucleotide
  Target: LAMA2; (-) strand; PAM type: NRG; PAM sequence: GAG
tcagctagtggaccccaaat

SEQ ID NO: 111960 - DNA, 20 bp, Artificial Sequence
  Description of Artificial Sequence: Synthetic oligonucleotide
  Target: LAMA2; (-) strand; PAM type: NRG; PAM sequence: TGG
gtctaatttaattcagctag

SEQ ID NO: 111961 - DNA, 20 bp, Artificial Sequence
  Description of Artificial Sequence: Synthetic oligonucleotide
  Target: LAMA2; (-) strand; PAM type: NRG; PAM sequence: TAG
tttgtctaatttaattcagc

SEQ ID NO: 111962 - DNA, 20 bp, Artificial Sequence
  Description of Artificial Sequence: Synthetic oligonucleotide
  Target: LAMA2; (-) strand; PAM type: NRG; PAM sequence: CAG
gcattttgtctaatttaatt

SEQ ID NO: 111963 - DNA, 20 bp, Artificial Sequence
  Description of Artificial Sequence: Synthetic oligonucleotide
  Target: LAMA2; (-) strand; PAM type: NRG; PAM sequence: CAG
caagtttatattactttatt

SEQ ID NO: 111964 - DNA, 20 bp, Artificial Sequence
  Description of Artificial Sequence: Synthetic oligonucleotide
  Target: LAMA2; (-) strand; PAM type: NRG; PAM sequence: AAG
ccaacacatacaatttatgc

SEQ ID NO: 111965 - DNA, 20 bp, Artificial Sequence
  Description of Artificial Sequence: Synthetic oligonucleotide
  Target: LAMA2; (-) strand; PAM type: NRG; PAM sequence: TGG
agtggaaagcctttttccta

SEQ ID NO: 111966 - DNA, 20 bp, Artificial Sequence
  Description of Artificial Sequence: Synthetic oligonucleotide
  Target: LAMA2; (-) strand; PAM type: NRG; PAM sequence: AAG
attgctattggttaagtgga

SEQ ID NO: 111967 - DNA, 20 bp, Artificial Sequence
  Description of Artificial Sequence: Synthetic oligonucleotide
  Target: LAMA2; (-) strand; PAM type: NRG; PAM sequence: TGG
tggaattgctattggttaag

SEQ ID NO: 111968 - DNA, 20 bp, Artificial Sequence
  Description of Artificial Sequence: Synthetic oligonucleotide
  Target: LAMA2; (-) strand; PAM type: NRG; PAM sequence: AAG
tgatggaattgctattggtt

SEQ ID NO: 111969 - DNA, 20 bp, Artificial Sequence
  Description of Artificial Sequence: Synthetic oligonucleotide
  Target: LAMA2; (-) strand; PAM type: NRG; PAM sequence: TGG
ttaactgatggaattgctat

SEQ ID NO: 111970 - DNA, 20 bp, Artificial Sequence
  Description of Artificial Sequence: Synthetic oligonucleotide
  Target: LAMA2; (-) strand; PAM type: NRG; PAM sequence: TGG
acacagcagcagttaactga

SEQ ID NO: 111971 - DNA, 20 bp, Artificial Sequence
  Description of Artificial Sequence: Synthetic oligonucleotide
  Target: LAMA2; (-) strand; PAM type: NRG; PAM sequence: CAG
gacatgaaatgacacagcag

SEQ ID NO: 111972 - DNA, 20 bp, Artificial Sequence
  Description of Artificial Sequence: Synthetic oligonucleotide
  Target: LAMA2; (-) strand; PAM type: NRG; PAM sequence: CAG
attgacatgaaatgacacag

SEQ ID NO: 111973 - DNA, 20 bp, Artificial Sequence
  Description of Artificial Sequence: Synthetic oligonucleotide
  Target: LAMA2; (-) strand; PAM type: NRG; PAM sequence: CAG
ttcattgacatgaaatgaca

SEQ ID NO: 111974 - DNA, 20 bp, Artificial Sequence
  Description of Artificial Sequence: Synthetic oligonucleotide
  Target: LAMA2; (-) strand; PAM type: NRG; PAM sequence: AGG
aaccagaaccagtgagcacc

SEQ ID NO: 111975 - DNA, 20 bp, Artificial Sequence
  Description of Artificial Sequence: Synthetic oligonucleotide
  Target: LAMA2; (-) strand; PAM type: NRG; PAM sequence: CAG
caaccagaaccagtgagcac

SEQ ID NO: 111976 - DNA, 20 bp, Artificial Sequence
  Description of Artificial Sequence: Synthetic oligonucleotide
  Target: LAMA2; (-) strand; PAM type: NRG; PAM sequence: GAG
cagtttcaaccagaaccagt

SEQ ID NO: 111977 - DNA, 20 bp, Artificial Sequence
  Description of Artificial Sequence: Synthetic oligonucleotide
  Target: LAMA2; (-) strand; PAM type: NRG; PAM sequence: CAG
acatcagtttcaaccagaac

SEQ ID NO: 111978 - DNA, 20 bp, Artificial Sequence
  Description of Artificial Sequence: Synthetic oligonucleotide
  Target: LAMA2; (-) strand; PAM type: NRG; PAM sequence: CAG
acacttacatcagtttcaac

SEQ ID NO: 111979 - DNA, 20 bp, Artificial Sequence
  Description of Artificial Sequence: Synthetic oligonucleotide
  Target: LAMA2; (-) strand; PAM type: NRG; PAM sequence: CAG
tcttggctcaacacttacat

SEQ ID NO: 111980 - DNA, 20 bp, Artificial Sequence
  Description of Artificial Sequence: Synthetic oligonucleotide
  Target: LAMA2; (-) strand; PAM type: NRG; PAM sequence: TGG
caatactcagagtctgatct

SEQ ID NO: 111981 - DNA, 20 bp, Artificial Sequence
  Description of Artificial Sequence: Synthetic oligonucleotide
  Target: LAMA2; (-) strand; PAM type: NRG; PAM sequence: GAG
agatctcgaatcaatactca

SEQ ID NO: 111982 - DNA, 20 bp, Artificial Sequence
  Description of Artificial Sequence: Synthetic oligonucleotide
  Target: LAMA2; (-) strand; PAM type: NRG; PAM sequence: CAG
ttagatctcgaatcaatact

SEQ ID NO: 111983 - DNA, 20 bp, Artificial Sequence
  Description of Artificial Sequence: Synthetic oligonucleotide
  Target: LAMA2; (-) strand; PAM type: NRG; PAM sequence: TAG
ttctaacattccaaattcat

SEQ ID NO: 111984 - DNA, 20 bp, Artificial Sequence
  Description of Artificial Sequence: Synthetic oligonucleotide
  Target: LAMA2; (-) strand; PAM type: NRG; PAM sequence: TAG
ttaagagaaaactggctgtt

SEQ ID NO: 111985 - DNA, 20 bp, Artificial Sequence
  Description of Artificial Sequence: Synthetic oligonucleotide
  Target: LAMA2; (-) strand; PAM type: NRG; PAM sequence: TGG
ttaagaatttaagagaaaac

SEQ ID NO: 111986 - DNA, 20 bp, Artificial Sequence
  Description of Artificial Sequence: Synthetic oligonucleotide
  Target: LAMA2; (-) strand; PAM type: NRG; PAM sequence: GAG
acttgtttttaagaatttaa

SEQ ID NO: 111987 - DNA, 20 bp, Artificial Sequence
  Description of Artificial Sequence: Synthetic oligonucleotide
  Target: LAMA2; (-) strand; PAM type: NRG; PAM sequence: AAG
agacttgtttttaagaattt

SEQ ID NO: 111988 - DNA, 20 bp, Artificial Sequence
  Description of Artificial Sequence: Synthetic oligonucleotide
  Target: LAMA2; (-) strand; PAM type: NRG; PAM sequence: AAG
aaatgcggagacttgttttt

SEQ ID NO: 111989 - DNA, 20 bp, Artificial Sequence
  Description of Artificial Sequence: Synthetic oligonucleotide
  Target: LAMA2; (-) strand; PAM type: NRG; PAM sequence: GAG
tttaaaagatataaaatgcg

SEQ ID NO: 111990 - DNA, 20 bp, Artificial Sequence
  Description of Artificial Sequence: Synthetic oligonucleotide
  Target: LAMA2; (-) strand; PAM type: NRG; PAM sequence: CGG
gatttaaaagatataaaatg

SEQ ID NO: 111991 - DNA, 20 bp, Artificial Sequence
  Description of Artificial Sequence: Synthetic oligonucleotide
  Target: LAMA2; (-) strand; PAM type: NRG; PAM sequence: AAG
tctggtaattccagatttaa

SEQ ID NO: 111992 - DNA, 20 bp, Artificial Sequence
  Description of Artificial Sequence: Synthetic oligonucleotide
  Target: LAMA2; (-) strand; PAM type: NRG; PAM sequence: CAG
catcacatttctggtaattc

SEQ ID NO: 111993 - DNA, 20 bp, Artificial Sequence
  Description of Artificial Sequence: Synthetic oligonucleotide
  Target: LAMA2; (-) strand; PAM type: NRG; PAM sequence: TGG
tgaaatatgcatcacatttc

SEQ ID NO: 111994 - DNA, 20 bp, Artificial Sequence
  Description of Artificial Sequence: Synthetic oligonucleotide
  Target: LAMA2; (-) strand; PAM type: NRG; PAM sequence: CAG
aagtgaaggggaggaacata

SEQ ID NO: 111995 - DNA, 20 bp, Artificial Sequence
  Description of Artificial Sequence: Synthetic oligonucleotide
  Target: LAMA2; (-) strand; PAM type: NRG; PAM sequence: AGG
tacgtgttgaagtgaagggg

SEQ ID NO: 111996 - DNA, 20 bp, Artificial Sequence
  Description of Artificial Sequence: Synthetic oligonucleotide
  Target: LAMA2; (-) strand; PAM type: NRG; PAM sequence: GAG
gtacgtgttgaagtgaaggg

SEQ ID NO: 111997 - DNA, 20 bp, Artificial Sequence
  Description of Artificial Sequence: Synthetic oligonucleotide
  Target: LAMA2; (-) strand; PAM type: NRG; PAM sequence: GGG
gggtacgtgttgaagtgaag

SEQ ID NO: 111998 - DNA, 20 bp, Artificial Sequence
  Description of Artificial Sequence: Synthetic oligonucleotide
  Target: LAMA2; (-) strand; PAM type: NRG; PAM sequence: GGG
agggtacgtgttgaagtgaa

SEQ ID NO: 111999 - DNA, 20 bp, Artificial Sequence
  Description of Artificial Sequence: Synthetic oligonucleotide
  Target: LAMA2; (-) strand; PAM type: NRG; PAM sequence: AGG
aagggtacgtgttgaagtga

SEQ ID NO: 112000 - DNA, 20 bp, Artificial Sequence
  Description of Artificial Sequence: Synthetic oligonucleotide
  Target: LAMA2; (-) strand; PAM type: NRG; PAM sequence: AAG
caagggtacgtgttgaagtg

SEQ ID NO: 112001 - DNA, 20 bp, Artificial Sequence
  Description of Artificial Sequence: Synthetic oligonucleotide
  Target: LAMA2; (-) strand; PAM type: NRG; PAM sequence: AAG
ttcttcaagggtacgtgttg

SEQ ID NO: 112002 - DNA, 20 bp, Artificial Sequence
  Description of Artificial Sequence: Synthetic oligonucleotide
  Target: LAMA2; (-) strand; PAM type: NRG; PAM sequence: GGG
catttctcccagttcttcaa

SEQ ID NO: 112003 - DNA, 20 bp, Artificial Sequence
  Description of Artificial Sequence: Synthetic oligonucleotide
  Target: LAMA2; (-) strand; PAM type: NRG; PAM sequence: AGG
ccatttctcccagttcttca

SEQ ID NO: 112004 - DNA, 20 bp, Artificial Sequence
  Description of Artificial Sequence: Synthetic oligonucleotide
  Target: LAMA2; (-) strand; PAM type: NRG; PAM sequence: AAG
tccatttctcccagttcttc

SEQ ID NO: 112005 - DNA, 20 bp, Artificial Sequence
  Description of Artificial Sequence: Synthetic oligonucleotide
  Target: LAMA2; (-) strand; PAM type: NRG; PAM sequence: CAG
agaaatagttccatttctcc

SEQ ID NO: 112006 - DNA, 20 bp, Artificial Sequence
  Description of Artificial Sequence: Synthetic oligonucleotide
  Target: LAMA2; (-) strand; PAM type: NRG; PAM sequence: TAG
atccagggctctcacagaaa

SEQ ID NO: 112007 - DNA, 20 bp, Artificial Sequence
  Description of Artificial Sequence: Synthetic oligonucleotide
  Target: LAMA2; (-) strand; PAM type: NRG; PAM sequence: CAG
gggtccatccagggctctca

SEQ ID NO: 112008 - DNA, 20 bp, Artificial Sequence
  Description of Artificial Sequence: Synthetic oligonucleotide
  Target: LAMA2; (-) strand; PAM type: NRG; PAM sequence: GGG
gctggctttgggtccatcca

SEQ ID NO: 112009 - DNA, 20 bp, Artificial Sequence
  Description of Artificial Sequence: Synthetic oligonucleotide
  Target: LAMA2; (-) strand; PAM type: NRG; PAM sequence: AGG
tgctggctttgggtccatcc

SEQ ID NO: 112010 - DNA, 20 bp, Artificial Sequence
  Description of Artificial Sequence: Synthetic oligonucleotide
  Target: LAMA2; (-) strand; PAM type: NRG; PAM sequence: CAG
atgctggctttgggtccatc

SEQ ID NO: 112011 - DNA, 20 bp, Artificial Sequence
  Description of Artificial Sequence: Synthetic oligonucleotide
  Target: LAMA2; (-) strand; PAM type: NRG; PAM sequence: GGG
ctgggcacaatgctggcttt

SEQ ID NO: 112012 - DNA, 20 bp, Artificial Sequence
  Description of Artificial Sequence: Synthetic oligonucleotide
  Target: LAMA2; (-) strand; PAM type: NRG; PAM sequence: TGG
gctgggcacaatgctggctt

SEQ ID NO: 112013 - DNA, 20 bp, Artificial Sequence
  Description of Artificial Sequence: Synthetic oligonucleotide
  Target: LAMA2; (-) strand; PAM type: NRG; PAM sequence: TGG
gtgtgtgctgggcacaatgc

SEQ ID NO: 112014 - DNA, 20 bp, Artificial Sequence
  Description of Artificial Sequence: Synthetic oligonucleotide
  Target: LAMA2; (-) strand; PAM type: NRG; PAM sequence: GGG
gacgtcgaatggtgtgtgct

SEQ ID NO: 112015 - DNA, 20 bp, Artificial Sequence
  Description of Artificial Sequence: Synthetic oligonucleotide
  Target: LAMA2; (-) strand; PAM type: NRG; PAM sequence: TGG
agacgtcgaatggtgtgtgc

SEQ ID NO: 112016 - DNA, 20 bp, Artificial Sequence
  Description of Artificial Sequence: Synthetic oligonucleotide
  Target: LAMA2; (-) strand; PAM type: NRG; PAM sequence: TGG
accctggaggagacgtcgaa

SEQ ID NO: 112017 - DNA, 20 bp, Artificial Sequence
  Description of Artificial Sequence: Synthetic oligonucleotide
  Target: LAMA2; (-) strand; PAM type: NRG; PAM sequence: GAG
tagaatcgtgtaccctggag

SEQ ID NO: 112018 - DNA, 20 bp, Artificial Sequence
  Description of Artificial Sequence: Synthetic oligonucleotide
  Target: LAMA2; (-) strand; PAM type: NRG; PAM sequence: AGG
tctagaatcgtgtaccctgg

SEQ ID NO: 112019 - DNA, 20 bp, Artificial Sequence
  Description of Artificial Sequence: Synthetic oligonucleotide
  Target: LAMA2; (-) strand; PAM type: NRG; PAM sequence: GAG
atctagaatcgtgtaccctg

SEQ ID NO: 112020 - DNA, 20 bp, Artificial Sequence
  Description of Artificial Sequence: Synthetic oligonucleotide
  Target: LAMA2; (-) strand; PAM type: NRG; PAM sequence: TGG
acatctagaatcgtgtaccc

SEQ ID NO: 112021 - DNA, 20 bp, Artificial Sequence
  Description of Artificial Sequence: Synthetic oligonucleotide
  Target: LAMA2; (-) strand; PAM type: NRG; PAM sequence: TAG
attgcatttgcatccacatc

SEQ ID NO: 112022 - DNA, 20 bp, Artificial Sequence
  Description of Artificial Sequence: Synthetic oligonucleotide
  Target: LAMA2; (-) strand; PAM type: NRG; PAM sequence: CAG
ccagtcaggccaccaacaaa

SEQ ID NO: 112023 - DNA, 20 bp, Artificial Sequence
  Description of Artificial Sequence: Synthetic oligonucleotide
  Target: LAMA2; (-) strand; PAM type: NRG; PAM sequence: AGG
ttacctttaatttcccagtc

SEQ ID NO: 112024 - DNA, 20 bp, Artificial Sequence
  Description of Artificial Sequence: Synthetic oligonucleotide
  Target: LAMA2; (-) strand; PAM type: NRG; PAM sequence: CAG
attacctttaatttcccagt

SEQ ID NO: 112025 - DNA, 20 bp, Artificial Sequence
  Description of Artificial Sequence: Synthetic oligonucleotide
  Target: LAMA2; (-) strand; PAM type: NRG; PAM sequence: CAG
acacattacctttaatttcc

SEQ ID NO: 112026 - DNA, 20 bp, Artificial Sequence
  Description of Artificial Sequence: Synthetic oligonucleotide
  Target: LAMA2; (-) strand; PAM type: NRG; PAM sequence: AGG
aagatgaaataaacaggagg

SEQ ID NO: 112027 - DNA, 20 bp, Artificial Sequence
  Description of Artificial Sequence: Synthetic oligonucleotide
  Target: LAMA2; (-) strand; PAM type: NRG; PAM sequence: GAG
aaagatgaaataaacaggag

SEQ ID NO: 112028 - DNA, 20 bp, Artificial Sequence
  Description of Artificial Sequence: Synthetic oligonucleotide
  Target: LAMA2; (-) strand; PAM type: NRG; PAM sequence: AGG
acaaagatgaaataaacagg

SEQ ID NO: 112029 - DNA, 20 bp, Artificial Sequence
  Description of Artificial Sequence: Synthetic oligonucleotide
  Target: LAMA2; (-) strand; PAM type: NRG; PAM sequence: GAG
aacaaagatgaaataaacag

SEQ ID NO: 112030 - DNA, 20 bp, Artificial Sequence
  Description of Artificial Sequence: Synthetic oligonucleotide
  Target: LAMA2; (-) strand; PAM type: NRG; PAM sequence: AGG
tcaacaaagatgaaataaac

SEQ ID NO: 112031 - DNA, 20 bp, Artificial Sequence
  Description of Artificial Sequence: Synthetic oligonucleotide
  Target: LAMA2; (-) strand; PAM type: NRG; PAM sequence: CAG
gtcaacaaagatgaaataaa

SEQ ID NO: 112032 - DNA, 20 bp, Artificial Sequence
  Description of Artificial Sequence: Synthetic oligonucleotide
  Target: LAMA2; (-) strand; PAM type: NRG; PAM sequence: AAG
tatgtcaggagatgtcaaca

SEQ ID NO: 112033 - DNA, 20 bp, Artificial Sequence
  Description of Artificial Sequence: Synthetic oligonucleotide
  Target: LAMA2; (-) strand; PAM type: NRG; PAM sequence: GAG
tcctgaagtaattatgtcag

SEQ ID NO: 112034 - DNA, 20 bp, Artificial Sequence
  Description of Artificial Sequence: Synthetic oligonucleotide
  Target: LAMA2; (-) strand; PAM type: NRG; PAM sequence: AGG
tctcctgaagtaattatgtc

SEQ ID NO: 112035 - DNA, 20 bp, Artificial Sequence
  Description of Artificial Sequence: Synthetic oligonucleotide
  Target: LAMA2; (-) strand; PAM type: NRG; PAM sequence: CAG
ttctcctgaagtaattatgt

SEQ ID NO: 112036 - DNA, 20 bp, Artificial Sequence
  Description of Artificial Sequence: Synthetic oligonucleotide
  Target: LAMA2; (-) strand; PAM type: NRG; PAM sequence: AAG
ctttatcataccttctcctg

SEQ ID NO: 112037 - DNA, 20 bp, Artificial Sequence
  Description of Artificial Sequence: Synthetic oligonucleotide
  Target: LAMA2; (-) strand; PAM type: NRG; PAM sequence: GAG
aaacgtgatcaagttttaca

SEQ ID NO: 112038 - DNA, 20 bp, Artificial Sequence
  Description of Artificial Sequence: Synthetic oligonucleotide
  Target: LAMA2; (-) strand; PAM type: NRG; PAM sequence: CAG
taaaacgtgatcaagtttta

SEQ ID NO: 112039 - DNA, 20 bp, Artificial Sequence
  Description of Artificial Sequence: Synthetic oligonucleotide
  Target: LAMA2; (-) strand; PAM type: NRG; PAM sequence: AAG
aagttaagtaaaacgtgatc

SEQ ID NO: 112040 - DNA, 20 bp, Artificial Sequence
  Description of Artificial Sequence: Synthetic oligonucleotide
  Target: LAMA2; (-) strand; PAM type: NRG; PAM sequence: AAG
tgttttcataaatgcaagtt

SEQ ID NO: 112041 - DNA, 20 bp, Artificial Sequence
  Description of Artificial Sequence: Synthetic oligonucleotide
  Target: LAMA2; (-) strand; PAM type: NRG; PAM sequence: AAG
attcatgttttcataaatgc

SEQ ID NO: 112042 - DNA, 20 bp, Artificial Sequence
  Description of Artificial Sequence: Synthetic oligonucleotide
  Target: LAMA2; (-) strand; PAM type: NRG; PAM sequence: AAG
aagaagaaaattcttactca

SEQ ID NO: 112043 - DNA, 20 bp, Artificial Sequence
  Description of Artificial Sequence: Synthetic oligonucleotide
  Target: LAMA2; (-) strand; PAM type: NRG; PAM sequence: AAG
tccaggttgaatcgtcaaag

SEQ ID NO: 112044 - DNA, 20 bp, Artificial Sequence
  Description of Artificial Sequence: Synthetic oligonucleotide
  Target: LAMA2; (-) strand; PAM type: NRG; PAM sequence: AAG
gtttccaggttgaatcgtca

SEQ ID NO: 112045 - DNA, 20 bp, Artificial Sequence
  Description of Artificial Sequence: Synthetic oligonucleotide
  Target: LAMA2; (-) strand; PAM type: NRG; PAM sequence: AGG
cttaaaaatattgtgtttcc

SEQ ID NO: 112046 - DNA, 20 bp, Artificial Sequence
  Description of Artificial Sequence: Synthetic oligonucleotide
  Target: LAMA2; (-) strand; PAM type: NRG; PAM sequence: CAG
gcttaaaaatattgtgtttc

SEQ ID NO: 112047 - DNA, 20 bp, Artificial Sequence
  Description of Artificial Sequence: Synthetic oligonucleotide
  Target: LAMA2; (-) strand; PAM type: NRG; PAM sequence: AGG
ctgtttaaataaatacacat

SEQ ID NO: 112048 - DNA, 20 bp, Artificial Sequence
  Description of Artificial Sequence: Synthetic oligonucleotide
  Target: LAMA2; (-) strand; PAM type: NRG; PAM sequence: TAG
gctgtttaaataaatacaca

SEQ ID NO: 112049 - DNA, 20 bp, Artificial Sequence
  Description of Artificial Sequence: Synthetic oligonucleotide
  Target: LAMA2; (-) strand; PAM type: NRG; PAM sequence: CAG
cacagataaagacaaaacaa

SEQ ID NO: 112050 - DNA, 20 bp, Artificial Sequence
  Description of Artificial Sequence: Synthetic oligonucleotide
  Target: LAMA2; (-) strand; PAM type: NRG; PAM sequence: AAG
aaaaactgatgccacagata

SEQ ID NO: 112051 - DNA, 20 bp, Artificial Sequence
  Description of Artificial Sequence: Synthetic oligonucleotide
  Target: LAMA2; (-) strand; PAM type: NRG; PAM sequence: CAG
tatacaaaaaactgatgcca

SEQ ID NO: 112052 - DNA, 20 bp, Artificial Sequence
  Description of Artificial Sequence: Synthetic oligonucleotide
  Target: LAMA2; (-) strand; PAM type: NRG; PAM sequence: AAG
gctcttgaggcaactaaaac

SEQ ID NO: 112053 - DNA, 20 bp, Artificial Sequence
  Description of Artificial Sequence: Synthetic oligonucleotide
  Target: LAMA2; (-) strand; PAM type: NRG; PAM sequence: AGG
taaaaaacactttgctcttg

SEQ ID NO: 112054 - DNA, 20 bp, Artificial Sequence
  Description of Artificial Sequence: Synthetic oligonucleotide
  Target: LAMA2; (-) strand; PAM type: NRG; PAM sequence: GAG
ttaaaaaacactttgctctt

SEQ ID NO: 112055 - DNA, 20 bp, Artificial Sequence
  Description of Artificial Sequence: Synthetic oligonucleotide
  Target: LAMA2; (-) strand; PAM type: NRG; PAM sequence: AGG
ataaatcgattcagaagatg

SEQ ID NO: 112056 - DNA, 20 bp, Artificial Sequence
  Description of Artificial Sequence: Synthetic oligonucleotide
  Target: LAMA2; (-) strand; PAM type: NRG; PAM sequence: GAG
cataaatcgattcagaagat

SEQ ID NO: 112057 - DNA, 20 bp, Artificial Sequence
  Description of Artificial Sequence: Synthetic oligonucleotide
  Target: LAMA2; (-) strand; PAM type: NRG; PAM sequence: AAG
taaatcataaatcgattcag

SEQ ID NO: 112058 - DNA, 20 bp, Artificial Sequence
  Description of Artificial Sequence: Synthetic oligonucleotide
  Target: LAMA2; (-) strand; PAM type: NRG; PAM sequence: CAG
ctataaatcataaatcgatt

SEQ ID NO: 112059 - DNA, 20 bp, Artificial Sequence
  Description of Artificial Sequence: Synthetic oligonucleotide
  Target: LAMA2; (-) strand; PAM type: NRG; PAM sequence: TAG
agatgtgagtatgaacttta

SEQ ID NO: 112060 - DNA, 20 bp, Artificial Sequence
  Description of Artificial Sequence: Synthetic oligonucleotide
  Target: LAMA2; (-) strand; PAM type: NRG; PAM sequence: GAG
taaatcttttaattagatgt

SEQ ID NO: 112061 - DNA, 20 bp, Artificial Sequence
  Description of Artificial Sequence: Synthetic oligonucleotide
  Target: LAMA2; (-) strand; PAM type: NRG; PAM sequence: TAG
gtattcataaatcttttaat

SEQ ID NO: 112062 - DNA, 20 bp, Artificial Sequence
  Description of Artificial Sequence: Synthetic oligonucleotide
  Target: LAMA2; (-) strand; PAM type: NRG; PAM sequence: AAG
agctcctgtgatatttccca

SEQ ID NO: 112063 - DNA, 20 bp, Artificial Sequence
  Description of Artificial Sequence: Synthetic oligonucleotide
  Target: LAMA2; (-) strand; PAM type: NRG; PAM sequence: TAG
gatcatgttttgaaagctta

SEQ ID NO: 112064 - DNA, 20 bp, Artificial Sequence
  Description of Artificial Sequence: Synthetic oligonucleotide
  Target: LAMA2; (-) strand; PAM type: NRG; PAM sequence: AAG
aaaaccagatcatgttttga

SEQ ID NO: 112065 - DNA, 20 bp, Artificial Sequence
  Description of Artificial Sequence: Synthetic oligonucleotide
  Target: LAMA2; (-) strand; PAM type: NRG; PAM sequence: CAG
aacttgagaactttaaaaac

SEQ ID NO: 112066 - DNA, 20 bp, Artificial Sequence
  Description of Artificial Sequence: Synthetic oligonucleotide
  Target: LAMA2; (-) strand; PAM type: NRG; PAM sequence: GAG
tataagaataagagcaactt

SEQ ID NO: 112067 - DNA, 20 bp, Artificial Sequence
  Description of Artificial Sequence: Synthetic oligonucleotide
  Target: LAMA2; (-) strand; PAM type: NRG; PAM sequence: GAG
gcatcatcctataagaataa

SEQ ID NO: 112068 - DNA, 20 bp, Artificial Sequence
  Description of Artificial Sequence: Synthetic oligonucleotide
  Target: LAMA2; (-) strand; PAM type: NRG; PAM sequence: AAG
gtgcatcatcctataagaat

SEQ ID NO: 112069 - DNA, 20 bp, Artificial Sequence
  Description of Artificial Sequence: Synthetic oligonucleotide
  Target: LAMA2; (-) strand; PAM type: NRG; PAM sequence: AAG
tattaagtgcatcatcctat

SEQ ID NO: 112070 - DNA, 20 bp, Artificial Sequence
  Description of Artificial Sequence: Synthetic oligonucleotide
  Target: LAMA2; (-) strand; PAM type: NRG; PAM sequence: AAG
atgaagcaattatgaatatt

SEQ ID NO: 112071 - DNA, 20 bp, Artificial Sequence
  Description of Artificial Sequence: Synthetic oligonucleotide
  Target: LAMA2; (-) strand; PAM type: NRG; PAM sequence: AAG
aatgcgcaaggactgtcatg

SEQ ID NO: 112072 - DNA, 20 bp, Artificial Sequence
  Description of Artificial Sequence: Synthetic oligonucleotide
  Target: LAMA2; (-) strand; PAM type: NRG; PAM sequence: AGG
tctgcaatttgaaatgcgca

SEQ ID NO: 112073 - DNA, 20 bp, Artificial Sequence
  Description of Artificial Sequence: Synthetic oligonucleotide
  Target: LAMA2; (-) strand; PAM type: NRG; PAM sequence: AAG
ttctgcaatttgaaatgcgc

SEQ ID NO: 112074 - DNA, 20 bp, Artificial Sequence
  Description of Artificial Sequence: Synthetic oligonucleotide
  Target: LAMA2; (-) strand; PAM type: NRG; PAM sequence: AGG
cacaagcttctttaaaaggc

SEQ ID NO: 112075 - DNA, 20 bp, Artificial Sequence
  Description of Artificial Sequence: Synthetic oligonucleotide
  Target: LAMA2; (-) strand; PAM type: NRG; PAM sequence: CAG
acacaagcttctttaaaagg

SEQ ID NO: 112076 - DNA, 20 bp, Artificial Sequence
  Description of Artificial Sequence: Synthetic oligonucleotide
  Target: LAMA2; (-) strand; PAM type: NRG; PAM sequence: AGG
tcaacacaagcttctttaaa

SEQ ID NO: 112077 - DNA, 20 bp, Artificial Sequence
  Description of Artificial Sequence: Synthetic oligonucleotide
  Target: LAMA2; (-) strand; PAM type: NRG; PAM sequence: AAG
atcaacacaagcttctttaa

SEQ ID NO: 112078 - DNA, 20 bp, Artificial Sequence
  Description of Artificial Sequence: Synthetic oligonucleotide
  Target: LAMA2; (-) strand; PAM type: NRG; PAM sequence: AAG
taattccatttaatcaacac

SEQ ID NO: 112079 - DNA, 20 bp, Artificial Sequence
  Description of Artificial Sequence: Synthetic oligonucleotide
  Target: LAMA2; (-) strand; PAM type: NRG; PAM sequence: TGG
ctcctgcatctcacccatag

SEQ ID NO: 112080 - DNA, 20 bp, Artificial Sequence
  Description of Artificial Sequence: Synthetic oligonucleotide
  Target: LAMA2; (-) strand; PAM type: NRG; PAM sequence: TAG
gtgctcctgcatctcaccca

SEQ ID NO: 112081 - DNA, 20 bp, Artificial Sequence
  Description of Artificial Sequence: Synthetic oligonucleotide
  Target: LAMA2; (-) strand; PAM type: NRG; PAM sequence: TGG
ccaggattatccattatatt

SEQ ID NO: 112082 - DNA, 20 bp, Artificial Sequence
  Description of Artificial Sequence: Synthetic oligonucleotide
  Target: LAMA2; (-) strand; PAM type: NRG; PAM sequence: AGG
aggatgattctgacaagccc

SEQ ID NO: 112083 - DNA, 20 bp, Artificial Sequence
  Description of Artificial Sequence: Synthetic oligonucleotide
  Target: LAMA2; (-) strand; PAM type: NRG; PAM sequence: CAG
caggatgattctgacaagcc

SEQ ID NO: 112084 - DNA, 20 bp, Artificial Sequence
  Description of Artificial Sequence: Synthetic oligonucleotide
  Target: LAMA2; (-) strand; PAM type: NRG; PAM sequence: AAG
caactcaggatgattctgac

SEQ ID NO: 112085 - DNA, 20 bp, Artificial Sequence
  Description of Artificial Sequence: Synthetic oligonucleotide
  Target: LAMA2; (-) strand; PAM type: NRG; PAM sequence: AGG
tttctgactaatctcaactc

SEQ ID NO: 112086 - DNA, 20 bp, Artificial Sequence
  Description of Artificial Sequence: Synthetic oligonucleotide
  Target: LAMA2; (-) strand; PAM type: NRG; PAM sequence: CAG
ttttctgactaatctcaact

SEQ ID NO: 112087 - DNA, 20 bp, Artificial Sequence
  Description of Artificial Sequence: Synthetic oligonucleotide
  Target: LAMA2; (-) strand; PAM type: NRG; PAM sequence: TGG
tcataaatttggggtcaccc

SEQ ID NO: 112088 - DNA, 20 bp, Artificial Sequence
  Description of Artificial Sequence: Synthetic oligonucleotide
  Target: LAMA2; (-) strand; PAM type: NRG; PAM sequence: GGG
gttgagtcctcataaatttg

SEQ ID NO: 112089 - DNA, 20 bp, Artificial Sequence
  Description of Artificial Sequence: Synthetic oligonucleotide
  Target: LAMA2; (-) strand; PAM type: NRG; PAM sequence: GGG
ggttgagtcctcataaattt

SEQ ID NO: 112090 - DNA, 20 bp, Artificial Sequence
  Description of Artificial Sequence: Synthetic oligonucleotide
  Target: LAMA2; (-) strand; PAM type: NRG; PAM sequence: TGG
aggttgagtcctcataaatt

SEQ ID NO: 112091 - DNA, 20 bp, Artificial Sequence
  Description of Artificial Sequence: Synthetic oligonucleotide
  Target: LAMA2; (-) strand; PAM type: NRG; PAM sequence: GAG
cctcattctatatgaaggtt

SEQ ID NO: 112092 - DNA, 20 bp, Artificial Sequence
  Description of Artificial Sequence: Synthetic oligonucleotide
  Target: LAMA2; (-) strand; PAM type: NRG; PAM sequence: AGG
aataacctcattctatatga

SEQ ID NO: 112093 - DNA, 20 bp, Artificial Sequence
  Description of Artificial Sequence: Synthetic oligonucleotide
  Target: LAMA2; (-) strand; PAM type: NRG; PAM sequence: AAG
aaataacctcattctatatg

SEQ ID NO: 112094 - DNA, 20 bp, Artificial Sequence
  Description of Artificial Sequence: Synthetic oligonucleotide
  Target: LAMA2; (-) strand; PAM type: NRG; PAM sequence: AAG
agagtcacatctcgtactca

SEQ ID NO: 112095 - DNA, 20 bp, Artificial Sequence
  Description of Artificial Sequence: Synthetic oligonucleotide
  Target: LAMA2; (-) strand; PAM type: NRG; PAM sequence: GAG
gaataaattctcatacttta

SEQ ID NO: 112096 - DNA, 20 bp, Artificial Sequence
  Description of Artificial Sequence: Synthetic oligonucleotide
  Target: LAMA2; (-) strand; PAM type: NRG; PAM sequence: TAG
tggaataaattctcatactt

SEQ ID NO: 112097 - DNA, 20 bp, Artificial Sequence
  Description of Artificial Sequence: Synthetic oligonucleotide
  Target: LAMA2; (-) strand; PAM type: NRG; PAM sequence: TGG
ataacttcagcgtgtggttt

SEQ ID NO: 112098 - DNA, 20 bp, Artificial Sequence
  Description of Artificial Sequence: Synthetic oligonucleotide
  Target: LAMA2; (-) strand; PAM type: NRG; PAM sequence: TGG
acgaggataacttcagcgtg

SEQ ID NO: 112099 - DNA, 20 bp, Artificial Sequence
  Description of Artificial Sequence: Synthetic oligonucleotide
  Target: LAMA2; (-) strand; PAM type: NRG; PAM sequence: CAG
ctaagaaacgaggataactt

SEQ ID NO: 112100 - DNA, 20 bp, Artificial Sequence
  Description of Artificial Sequence: Synthetic oligonucleotide
  Target: LAMA2; (-) strand; PAM type: NRG; PAM sequence: AGG
atatgaagttctaagaaacg

SEQ ID NO: 112101 - DNA, 20 bp, Artificial Sequence
  Description of Artificial Sequence: Synthetic oligonucleotide
  Target: LAMA2; (-) strand; PAM type: NRG; PAM sequence: GAG
tatatgaagttctaagaaac

SEQ ID NO: 112102 - DNA, 20 bp, Artificial Sequence
  Description of Artificial Sequence: Synthetic oligonucleotide
  Target: LAMA2; (-) strand; PAM type: NRG; PAM sequence: AAG
atacatttatatgaagttct

SEQ ID NO: 112103 - DNA, 20 bp, Artificial Sequence
  Description of Artificial Sequence: Synthetic oligonucleotide
  Target: LAMA2; (-) strand; PAM type: NRG; PAM sequence: AAG
gtaccatatacatttatatg

SEQ ID NO: 112104 - DNA, 20 bp, Artificial Sequence
  Description of Artificial Sequence: Synthetic oligonucleotide
  Target: LAMA2; (-) strand; PAM type: NRG; PAM sequence: AAG
atctatctgtgaaggagaga

SEQ ID NO: 112105 - DNA, 20 bp, Artificial Sequence
  Description of Artificial Sequence: Synthetic oligonucleotide
  Target: LAMA2; (-) strand; PAM type: NRG; PAM sequence: GAG
atttatctatctgtgaagga

SEQ ID NO: 112106 - DNA, 20 bp, Artificial Sequence
  Description of Artificial Sequence: Synthetic oligonucleotide
  Target: LAMA2; (-) strand; PAM type: NRG; PAM sequence: GAG
atatttatctatctgtgaag

SEQ ID NO: 112107 - DNA, 20 bp, Artificial Sequence
  Description of Artificial Sequence: Synthetic oligonucleotide
  Target: LAMA2; (-) strand; PAM type: NRG; PAM sequence: AGG
ctatatttatctatctgtga

SEQ ID NO: 112108 - DNA, 20 bp, Artificial Sequence
  Description of Artificial Sequence: Synthetic oligonucleotide
  Target: LAMA2; (-) strand; PAM type: NRG; PAM sequence: AAG
cctatatttatctatctgtg

SEQ ID NO: 112109 - DNA, 20 bp, Artificial Sequence
  Description of Artificial Sequence: Synthetic oligonucleotide
  Target: LAMA2; (-) strand; PAM type: NRG; PAM sequence: TGG
ggatttgatttcaaaattca

SEQ ID NO: 112110 - DNA, 20 bp, Artificial Sequence
  Description of Artificial Sequence: Synthetic oligonucleotide
  Target: LAMA2; (-) strand; PAM type: NRG; PAM sequence: TGG
gaagaggaggaaatccaacc

SEQ ID NO: 112111 - DNA, 20 bp, Artificial Sequence
  Description of Artificial Sequence: Synthetic oligonucleotide
  Target: LAMA2; (-) strand; PAM type: NRG; PAM sequence: AGG
attttagcaagtggaagagg

SEQ ID NO: 112112 - DNA, 20 bp, Artificial Sequence
  Description of Artificial Sequence: Synthetic oligonucleotide
  Target: LAMA2; (-) strand; PAM type: NRG; PAM sequence: GAG
tattttagcaagtggaagag

SEQ ID NO: 112113 - DNA, 20 bp, Artificial Sequence
  Description of Artificial Sequence: Synthetic oligonucleotide
  Target: LAMA2; (-) strand; PAM type: NRG; PAM sequence: AGG
tatattttagcaagtggaag

SEQ ID NO: 112114 - DNA, 20 bp, Artificial Sequence
  Description of Artificial Sequence: Synthetic oligonucleotide
  Target: LAMA2; (-) strand; PAM type: NRG; PAM sequence: GAG
ttatattttagcaagtggaa

SEQ ID NO: 112115 - DNA, 20 bp, Artificial Sequence
  Description of Artificial Sequence: Synthetic oligonucleotide
  Target: LAMA2; (-) strand; PAM type: NRG; PAM sequence: AAG
ggttatattttagcaagtgg

SEQ ID NO: 112116 - DNA, 20 bp, Artificial Sequence
  Description of Artificial Sequence: Synthetic oligonucleotide
  Target: LAMA2; (-) strand; PAM type: NRG; PAM sequence: TGG
taaggttatattttagcaag

SEQ ID NO: 112117 - DNA, 20 bp, Artificial Sequence
  Description of Artificial Sequence: Synthetic oligonucleotide
  Target: LAMA2; (-) strand; PAM type: NRG; PAM sequence: AAG
gtctaaggttatattttagc

SEQ ID NO: 112118 - DNA, 20 bp, Artificial Sequence
  Description of Artificial Sequence: Synthetic oligonucleotide
  Target: LAMA2; (-) strand; PAM type: NRG; PAM sequence: TAG
acttgtctaaggttatattt

SEQ ID NO: 112119 - DNA, 20 bp, Artificial Sequence
  Description of Artificial Sequence: Synthetic oligonucleotide
  Target: LAMA2; (-) strand; PAM type: NRG; PAM sequence: AGG
ggggttaagtgacttgtcta

SEQ ID NO: 112120 - DNA, 20 bp, Artificial Sequence
  Description of Artificial Sequence: Synthetic oligonucleotide
  Target: LAMA2; (-) strand; PAM type: NRG; PAM sequence: AAG
aggggttaagtgacttgtct

SEQ ID NO: 112121 - DNA, 20 bp, Artificial Sequence
  Description of Artificial Sequence: Synthetic oligonucleotide
  Target: LAMA2; (-) strand; PAM type: NRG; PAM sequence: AAG
taaccaaagcccaaggggtt

SEQ ID NO: 112122 - DNA, 20 bp, Artificial Sequence
  Description of Artificial Sequence: Synthetic oligonucleotide
  Target: LAMA2; (-) strand; PAM type: NRG; PAM sequence: GGG
tgagataaccaaagcccaag

SEQ ID NO: 112123 - DNA, 20 bp, Artificial Sequence
  Description of Artificial Sequence: Synthetic oligonucleotide
  Target: LAMA2; (-) strand; PAM type: NRG; PAM sequence: GGG
ttgagataaccaaagcccaa

SEQ ID NO: 112124 - DNA, 20 bp, Artificial Sequence
  Description of Artificial Sequence: Synthetic oligonucleotide
  Target: LAMA2; (-) strand; PAM type: NRG; PAM sequence: AGG
gttgagataaccaaagccca

SEQ ID NO: 112125 - DNA, 20 bp, Artificial Sequence
  Description of Artificial Sequence: Synthetic oligonucleotide
  Target: LAMA2; (-) strand; PAM type: NRG; PAM sequence: AAG
agttgagataaccaaagccc

SEQ ID NO: 112126 - DNA, 20 bp, Artificial Sequence
  Description of Artificial Sequence: Synthetic oligonucleotide
  Target: LAMA2; (-) strand; PAM type: NRG; PAM sequence: AAG
ttttctagttgagataacca

SEQ ID NO: 112127 - DNA, 20 bp, Artificial Sequence
  Description of Artificial Sequence: Synthetic oligonucleotide
  Target: LAMA2; (-) strand; PAM type: NRG; PAM sequence: GAG
tttatcattcttttctagtt

SEQ ID NO: 112128 - DNA, 20 bp, Artificial Sequence
  Description of Artificial Sequence: Synthetic oligonucleotide
  Target: LAMA2; (-) strand; PAM type: NRG; PAM sequence: TAG
atatttttatcattcttttc

SEQ ID NO: 112129 - DNA, 20 bp, Artificial Sequence
  Description of Artificial Sequence: Synthetic oligonucleotide
  Target: LAMA2; (-) strand; PAM type: NRG; PAM sequence: TAG
cctacaatatgcaagcaagg

SEQ ID NO: 112130 - DNA, 20 bp, Artificial Sequence
  Description of Artificial Sequence: Synthetic oligonucleotide
  Target: LAMA2; (-) strand; PAM type: NRG; PAM sequence: AGG
tatcctacaatatgcaagca

SEQ ID NO: 112131 - DNA, 20 bp, Artificial Sequence
  Description of Artificial Sequence: Synthetic oligonucleotide
  Target: LAMA2; (-) strand; PAM type: NRG; PAM sequence: AAG
gtatcctacaatatgcaagc

SEQ ID NO: 112132 - DNA, 20 bp, Artificial Sequence
  Description of Artificial Sequence: Synthetic oligonucleotide
  Target: LAMA2; (-) strand; PAM type: NRG; PAM sequence: AAG
tattgtatcctacaatatgc

SEQ ID NO: 112133 - DNA, 20 bp, Artificial Sequence
  Description of Artificial Sequence: Synthetic oligonucleotide
  Target: LAMA2; (-) strand; PAM type: NRG; PAM sequence: AAG
tagcatataggaagagttat

SEQ ID NO: 112134 - DNA, 20 bp, Artificial Sequence
  Description of Artificial Sequence: Synthetic oligonucleotide
  Target: LAMA2; (-) strand; PAM type: NRG; PAM sequence: GAG
cattacttagcatataggaa

SEQ ID NO: 112135 - DNA, 20 bp, Artificial Sequence
  Description of Artificial Sequence: Synthetic oligonucleotide
  Target: LAMA2; (-) strand; PAM type: NRG; PAM sequence: AAG
aacattacttagcatatagg

SEQ ID NO: 112136 - DNA, 20 bp, Artificial Sequence
  Description of Artificial Sequence: Synthetic oligonucleotide
  Target: LAMA2; (-) strand; PAM type: NRG; PAM sequence: AGG
gagaacattacttagcatat

SEQ ID NO: 112137 - DNA, 20 bp, Artificial Sequence
  Description of Artificial Sequence: Synthetic oligonucleotide
  Target: LAMA2; (-) strand; PAM type: NRG; PAM sequence: TAG
tgagaacattacttagcata

SEQ ID NO: 112138 - DNA, 20 bp, Artificial Sequence
  Description of Artificial Sequence: Synthetic oligonucleotide
  Target: LAMA2; (-) strand; PAM type: NRG; PAM sequence: TAG
aaattactgagaacattact

SEQ ID NO: 112139 - DNA, 20 bp, Artificial Sequence
  Description of Artificial Sequence: Synthetic oligonucleotide
  Target: LAMA2; (-) strand; PAM type: NRG; PAM sequence: GAG
gttaattcatgtaaattact

SEQ ID NO: 112140 - DNA, 20 bp, Artificial Sequence
  Description of Artificial Sequence: Synthetic oligonucleotide
  Target: LAMA2; (-) strand; PAM type: NRG; PAM sequence: AAG
ggttgttgtaaaaattaaac

SEQ ID NO: 112141 - DNA, 20 bp, Artificial Sequence
  Description of Artificial Sequence: Synthetic oligonucleotide
  Target: LAMA2; (-) strand; PAM type: NRG; PAM sequence: GGG
ggactaagacatactttttg

SEQ ID NO: 112142 - DNA, 20 bp, Artificial Sequence
  Description of Artificial Sequence: Synthetic oligonucleotide
  Target: LAMA2; (-) strand; PAM type: NRG; PAM sequence: GGG
tggactaagacatacttttt

SEQ ID NO: 112143 - DNA, 20 bp, Artificial Sequence
  Description of Artificial Sequence: Synthetic oligonucleotide
  Target: LAMA2; (-) strand; PAM type: NRG; PAM sequence: TGG
atggactaagacatactttt

SEQ ID NO: 112144 - DNA, 20 bp, Artificial Sequence
  Description of Artificial Sequence: Synthetic oligonucleotide
  Target: LAMA2; (-) strand; PAM type: NRG; PAM sequence: AAG
tatagcagccctaatggact

SEQ ID NO: 112145 - DNA, 20 bp, Artificial Sequence
  Description of Artificial Sequence: Synthetic oligonucleotide
  Target: LAMA2; (-) strand; PAM type: NRG; PAM sequence: TGG
ttttcttatagcagccctaa

SEQ ID NO: 112146 - DNA, 20 bp, Artificial Sequence
  Description of Artificial Sequence: Synthetic oligonucleotide
  Target: LAMA2; (-) strand; PAM type: NRG; PAM sequence: CAG
tcatggtatttttcttatag

SEQ ID NO: 112147 - DNA, 20 bp, Artificial Sequence
  Description of Artificial Sequence: Synthetic oligonucleotide
  Target: LAMA2; (-) strand; PAM type: NRG; PAM sequence: TAG
gtttcatggtatttttctta

SEQ ID NO: 112148 - DNA, 20 bp, Artificial Sequence
  Description of Artificial Sequence: Synthetic oligonucleotide
  Target: LAMA2; (-) strand; PAM type: NRG; PAM sequence: TGG
ttataaactacccagtttca

SEQ ID NO: 112149 - DNA, 20 bp, Artificial Sequence
  Description of Artificial Sequence: Synthetic oligonucleotide
  Target: LAMA2; (-) strand; PAM type: NRG; PAM sequence: CAG
ttgtttatttataaactacc

SEQ ID NO: 112150 - DNA, 20 bp, Artificial Sequence
  Description of Artificial Sequence: Synthetic oligonucleotide
  Target: LAMA2; (-) strand; PAM type: NRG; PAM sequence: GAG
ttcttagcttcaagaattgt

SEQ ID NO: 112151 - DNA, 20 bp, Artificial Sequence
  Description of Artificial Sequence: Synthetic oligonucleotide
  Target: LAMA2; (-) strand; PAM type: NRG; PAM sequence: AAG
atctcagacttcttagcttc

SEQ ID NO: 112152 - DNA, 20 bp, Artificial Sequence
  Description of Artificial Sequence: Synthetic oligonucleotide
  Target: LAMA2; (-) strand; PAM type: NRG; PAM sequence: TAG
taccttgatctcagacttct

SEQ ID NO: 112153 - DNA, 20 bp, Artificial Sequence
  Description of Artificial Sequence: Synthetic oligonucleotide
  Target: LAMA2; (-) strand; PAM type: NRG; PAM sequence: CAG
atctgccagtaccttgatct

SEQ ID NO: 112154 - DNA, 20 bp, Artificial Sequence
  Description of Artificial Sequence: Synthetic oligonucleotide
  Target: LAMA2; (-) strand; PAM type: NRG; PAM sequence: CAG
tcactaaacaccaaatctgc

SEQ ID NO: 112155 - DNA, 20 bp, Artificial Sequence
  Description of Artificial Sequence: Synthetic oligonucleotide
  Target: LAMA2; (-) strand; PAM type: NRG; PAM sequence: TGG
agcctccttctatgaaaaac

SEQ ID NO: 112156 - DNA, 20 bp, Artificial Sequence
  Description of Artificial Sequence: Synthetic oligonucleotide
  Target: LAMA2; (-) strand; PAM type: NRG; PAM sequence: AAG
tactatgtgagaacagcaag

SEQ ID NO: 112157 - DNA, 20 bp, Artificial Sequence
  Description of Artificial Sequence: Synthetic oligonucleotide
  Target: LAMA2; (-) strand; PAM type: NRG; PAM sequence: AAG
ttctactatgtgagaacagc

SEQ ID NO: 112158 - DNA, 20 bp, Artificial Sequence
  Description of Artificial Sequence: Synthetic oligonucleotide
  Target: LAMA2; (-) strand; PAM type: NRG; PAM sequence: CAG
ctctttctactatgtgagaa

SEQ ID NO: 112159 - DNA, 20 bp, Artificial Sequence
  Description of Artificial Sequence: Synthetic oligonucleotide
  Target: LAMA2; (-) strand; PAM type: NRG; PAM sequence: GAG
gttcactctttctactatgt

SEQ ID NO: 112160 - DNA, 20 bp, Artificial Sequence
  Description of Artificial Sequence: Synthetic oligonucleotide
  Target: LAMA2; (-) strand; PAM type: NRG; PAM sequence: GAG
cttataaaataggtccaaag

SEQ ID NO: 112161 - DNA, 20 bp, Artificial Sequence
  Description of Artificial Sequence: Synthetic oligonucleotide
  Target: LAMA2; (-) strand; PAM type: NRG; PAM sequence: AGG
cccttataaaataggtccaa

SEQ ID NO: 112162 - DNA, 20 bp, Artificial Sequence
  Description of Artificial Sequence: Synthetic oligonucleotide
  Target: LAMA2; (-) strand; PAM type: NRG; PAM sequence: AAG
gcccttataaaataggtcca

SEQ ID NO: 112163 - DNA, 20 bp, Artificial Sequence
  Description of Artificial Sequence: Synthetic oligonucleotide
  Target: LAMA2; (-) strand; PAM type: NRG; PAM sequence: AGG
aattagtgcccttataaaat

SEQ ID NO: 112164 - DNA, 20 bp, Artificial Sequence
  Description of Artificial Sequence: Synthetic oligonucleotide
  Target: LAMA2; (-) strand; PAM type: NRG; PAM sequence: TAG
aaattagtgcccttataaaa

SEQ ID NO: 112165 - DNA, 20 bp, Artificial Sequence
  Description of Artificial Sequence: Synthetic oligonucleotide
  Target: LAMA2; (-) strand; PAM type: NRG; PAM sequence: TAG
agggccttcatgaatgaaat

SEQ ID NO: 112166 - DNA, 20 bp, Artificial Sequence
  Description of Artificial Sequence: Synthetic oligonucleotide
  Target: LAMA2; (-) strand; PAM type: NRG; PAM sequence: GGG
gttttagatggtgaggggca

SEQ ID NO: 112167 - DNA, 20 bp, Artificial Sequence
  Description of Artificial Sequence: Synthetic oligonucleotide
  Target: LAMA2; (-) strand; PAM type: NRG; PAM sequence: AGG
agttttagatggtgaggggc

SEQ ID NO: 112168 - DNA, 20 bp, Artificial Sequence
  Description of Artificial Sequence: Synthetic oligonucleotide
  Target: LAMA2; (-) strand; PAM type: NRG; PAM sequence: CAG
gagttttagatggtgagggg

SEQ ID NO: 112169 - DNA, 20 bp, Artificial Sequence
  Description of Artificial Sequence: Synthetic oligonucleotide
  Target: LAMA2; (-) strand; PAM type: NRG; PAM sequence: GGG
ggtgagttttagatggtgag

SEQ ID NO: 112170 - DNA, 20 bp, Artificial Sequence
  Description of Artificial Sequence: Synthetic oligonucleotide
  Target: LAMA2; (-) strand; PAM type: NRG; PAM sequence: GGG
aggtgagttttagatggtga

SEQ ID NO: 112171 - DNA, 20 bp, Artificial Sequence
  Description of Artificial Sequence: Synthetic oligonucleotide
  Target: LAMA2; (-) strand; PAM type: NRG; PAM sequence: AGG
gaggtgagttttagatggtg

SEQ ID NO: 112172 - DNA, 20 bp, Artificial Sequence
  Description of Artificial Sequence: Synthetic oligonucleotide
  Target: LAMA2; (-) strand; PAM type: NRG; PAM sequence: GAG
agaggtgagttttagatggt

SEQ ID NO: 112173 - DNA, 20 bp, Artificial Sequence
  Description of Artificial Sequence: Synthetic oligonucleotide
  Target: LAMA2; (-) strand; PAM type: NRG; PAM sequence: TGG
tttgagaggtgagttttaga

SEQ ID NO: 112174 - DNA, 20 bp, Artificial Sequence
  Description of Artificial Sequence: Synthetic oligonucleotide
  Target: LAMA2; (-) strand; PAM type: NRG; PAM sequence: TAG
ggcatttgagaggtgagttt

SEQ ID NO: 112175 - DNA, 20 bp, Artificial Sequence
  Description of Artificial Sequence: Synthetic oligonucleotide
  Target: LAMA2; (-) strand; PAM type: NRG; PAM sequence: GAG
aggcagggcatttgagaggt

SEQ ID NO: 112176 - DNA, 20 bp, Artificial Sequence
  Description of Artificial Sequence: Synthetic oligonucleotide
  Target: LAMA2; (-) strand; PAM type: NRG; PAM sequence: AGG
tagcaggcagggcatttgag

SEQ ID NO: 112177 - DNA, 20 bp, Artificial Sequence
  Description of Artificial Sequence: Synthetic oligonucleotide
  Target: LAMA2; (-) strand; PAM type: NRG; PAM sequence: GAG
ttagcaggcagggcatttga

SEQ ID NO: 112178 - DNA, 20 bp, Artificial Sequence
  Description of Artificial Sequence: Synthetic oligonucleotide
  Target: LAMA2; (-) strand; PAM type: NRG; PAM sequence: GAG
tattagcaggcagggcattt

SEQ ID NO: 112179 - DNA, 20 bp, Artificial Sequence
  Description of Artificial Sequence: Synthetic oligonucleotide
  Target: LAMA2; (-) strand; PAM type: NRG; PAM sequence: GGG
agtgatggtattagcaggca

SEQ ID NO: 112180 - DNA, 20 bp, Artificial Sequence
  Description of Artificial Sequence: Synthetic oligonucleotide
  Target: LAMA2; (-) strand; PAM type: NRG; PAM sequence: AGG
aagtgatggtattagcaggc

SEQ ID NO: 112181 - DNA, 20 bp, Artificial Sequence
  Description of Artificial Sequence: Synthetic oligonucleotide
  Target: LAMA2; (-) strand; PAM type: NRG; PAM sequence: CAG
aaagtgatggtattagcagg

SEQ ID NO: 112182 - DNA, 20 bp, Artificial Sequence
  Description of Artificial Sequence: Synthetic oligonucleotide
  Target: LAMA2; (-) strand; PAM type: NRG; PAM sequence: AGG
gccaaagtgatggtattagc

SEQ ID NO: 112183 - DNA, 20 bp, Artificial Sequence
  Description of Artificial Sequence: Synthetic oligonucleotide
  Target: LAMA2; (-) strand; PAM type: NRG; PAM sequence: CAG
cgccaaagtgatggtattag

SEQ ID NO: 112184 - DNA, 20 bp, Artificial Sequence
  Description of Artificial Sequence: Synthetic oligonucleotide
  Target: LAMA2; (-) strand; PAM type: NRG; PAM sequence: TAG
acccgccaaagtgatggtat

SEQ ID NO: 112185 - DNA, 20 bp, Artificial Sequence
  Description of Artificial Sequence: Synthetic oligonucleotide
  Target: LAMA2; (-) strand; PAM type: NRG; PAM sequence: TGG
aatcctacccgccaaagtga

SEQ ID NO: 112186 - DNA, 20 bp, Artificial Sequence
  Description of Artificial Sequence: Synthetic oligonucleotide
  Target: LAMA2; (-) strand; PAM type: NRG; PAM sequence: AAG
tgttaaaatcctacccgcca

SEQ ID NO: 112187 - DNA, 20 bp, Artificial Sequence
  Description of Artificial Sequence: Synthetic oligonucleotide
  Target: LAMA2; (-) strand; PAM type: NRG; PAM sequence: TAG
tattagtatctgccttgcta

SEQ ID NO: 112188 - DNA, 20 bp, Artificial Sequence
  Description of Artificial Sequence: Synthetic oligonucleotide
  Target: LAMA2; (-) strand; PAM type: NRG; PAM sequence: TAG
taactacagaatgagaatat

SEQ ID NO: 112189 - DNA, 20 bp, Artificial Sequence
  Description of Artificial Sequence: Synthetic oligonucleotide
  Target: LAMA2; (-) strand; PAM type: NRG; PAM sequence: GAG
agattccttaactacagaat

SEQ ID NO: 112190 - DNA, 20 bp, Artificial Sequence
  Description of Artificial Sequence: Synthetic oligonucleotide
  Target: LAMA2; (-) strand; PAM type: NRG; PAM sequence: CAG
ttcttcagattccttaacta

SEQ ID NO: 112191 - DNA, 20 bp, Artificial Sequence
  Description of Artificial Sequence: Synthetic oligonucleotide
  Target: LAMA2; (-) strand; PAM type: NRG; PAM sequence: CAG
catttaacatctctcttctt

SEQ ID NO: 112192 - DNA, 20 bp, Artificial Sequence
  Description of Artificial Sequence: Synthetic oligonucleotide
  Target: LAMA2; (-) strand; PAM type: NRG; PAM sequence: AAG
attactgtgtgaccatggtc

SEQ ID NO: 112193 - DNA, 20 bp, Artificial Sequence
  Description of Artificial Sequence: Synthetic oligonucleotide
  Target: LAMA2; (-) strand; PAM type: NRG; PAM sequence: TGG
tgctaattactgtgtgacca

SEQ ID NO: 112194 - DNA, 20 bp, Artificial Sequence
  Description of Artificial Sequence: Synthetic oligonucleotide
  Target: LAMA2; (-) strand; PAM type: NRG; PAM sequence: CAG
attaacctatgttcaaatcc

SEQ ID NO: 112195 - DNA, 20 bp, Artificial Sequence
  Description of Artificial Sequence: Synthetic oligonucleotide
  Target: LAMA2; (-) strand; PAM type: NRG; PAM sequence: AAG
gaagcaagatgttgagagtg

SEQ ID NO: 112196 - DNA, 20 bp, Artificial Sequence
  Description of Artificial Sequence: Synthetic oligonucleotide
  Target: LAMA2; (-) strand; PAM type: NRG; PAM sequence: GAG
gcagtgaagcaagatgttga

SEQ ID NO: 112197 - DNA, 20 bp, Artificial Sequence
  Description of Artificial Sequence: Synthetic oligonucleotide
  Target: LAMA2; (-) strand; PAM type: NRG; PAM sequence: GAG
tggcagtgaagcaagatgtt

SEQ ID NO: 112198 - DNA, 20 bp, Artificial Sequence
  Description of Artificial Sequence: Synthetic oligonucleotide
  Target: LAMA2; (-) strand; PAM type: NRG; PAM sequence: AAG
attcattgtggcagtgaagc

SEQ ID NO: 112199 - DNA, 20 bp, Artificial Sequence
  Description of Artificial Sequence: Synthetic oligonucleotide
  Target: LAMA2; (-) strand; PAM type: NRG; PAM sequence: AAG
cactattcattgtggcagtg

SEQ ID NO: 112200 - DNA, 20 bp, Artificial Sequence
  Description of Artificial Sequence: Synthetic oligonucleotide
  Target: LAMA2; (-) strand; PAM type: NRG; PAM sequence: CAG
tgtctcactattcattgtgg

SEQ ID NO: 112201 - DNA, 20 bp, Artificial Sequence
  Description of Artificial Sequence: Synthetic oligonucleotide
  Target: LAMA2; (-) strand; PAM type: NRG; PAM sequence: TGG
gtgtgtctcactattcattg

SEQ ID NO: 112202 - DNA, 20 bp, Artificial Sequence
  Description of Artificial Sequence: Synthetic oligonucleotide
  Target: LAMA2; (-) strand; PAM type: NRG; PAM sequence: TAG
tttatacacacactctatgg

SEQ ID NO: 112203 - DNA, 20 bp, Artificial Sequence
  Description of Artificial Sequence: Synthetic oligonucleotide
  Target: LAMA2; (-) strand; PAM type: NRG; PAM sequence: TGG
tattttatacacacactcta

SEQ ID NO: 112204 - DNA, 20 bp, Artificial Sequence
  Description of Artificial Sequence: Synthetic oligonucleotide
  Target: LAMA2; (-) strand; PAM type: NRG; PAM sequence: CAG
aaggtgtgactaccacatct

SEQ ID NO: 112205 - DNA, 20 bp, Artificial Sequence
  Description of Artificial Sequence: Synthetic oligonucleotide
  Target: LAMA2; (-) strand; PAM type: NRG; PAM sequence: AGG
aattattaaggtacaattta

SEQ ID NO: 112206 - DNA, 20 bp, Artificial Sequence
  Description of Artificial Sequence: Synthetic oligonucleotide
  Target: LAMA2; (-) strand; PAM type: NRG; PAM sequence: AAG
taattattaaggtacaattt

SEQ ID NO: 112207 - DNA, 20 bp, Artificial Sequence
  Description of Artificial Sequence: Synthetic oligonucleotide
  Target: LAMA2; (-) strand; PAM type: NRG; PAM sequence: AGG
catttgcataataattatta

SEQ ID NO: 112208 - DNA, 20 bp, Artificial Sequence
  Description of Artificial Sequence: Synthetic oligonucleotide
  Target: LAMA2; (-) strand; PAM type: NRG; PAM sequence: AAG
acatttgcataataattatt

SEQ ID NO: 112209 - DNA, 20 bp, Artificial Sequence
  Description of Artificial Sequence: Synthetic oligonucleotide
  Target: LAMA2; (-) strand; PAM type: NRG; PAM sequence: TAG
ctttctttttctgagactga

SEQ ID NO: 112210 - DNA, 20 bp, Artificial Sequence
  Description of Artificial Sequence: Synthetic oligonucleotide
  Target: LAMA2; (-) strand; PAM type: NRG; PAM sequence: GAG
catgttttctttctttttct

SEQ ID NO: 112211 - DNA, 20 bp, Artificial Sequence
  Description of Artificial Sequence: Synthetic oligonucleotide
  Target: LAMA2; (-) strand; PAM type: NRG; PAM sequence: TAG
tgatttcctaaggtttgcta

SEQ ID NO: 112212 - DNA, 20 bp, Artificial Sequence
  Description of Artificial Sequence: Synthetic oligonucleotide
  Target: LAMA2; (-) strand; PAM type: NRG; PAM sequence: AGG
ttggccaaaatgatttccta

SEQ ID NO: 112213 - DNA, 20 bp, Artificial Sequence
  Description of Artificial Sequence: Synthetic oligonucleotide
  Target: LAMA2; (-) strand; PAM type: NRG; PAM sequence: AAG
cttggccaaaatgatttcct

SEQ ID NO: 112214 - DNA, 20 bp, Artificial Sequence
  Description of Artificial Sequence: Synthetic oligonucleotide
  Target: LAMA2; (-) strand; PAM type: NRG; PAM sequence: TGG
ggcagtagtcttgaaattct

SEQ ID NO: 112215 - DNA, 20 bp, Artificial Sequence
  Description of Artificial Sequence: Synthetic oligonucleotide
  Target: LAMA2; (-) strand; PAM type: NRG; PAM sequence: TAG
ttcatattctggtgtggcag

SEQ ID NO: 112216 - DNA, 20 bp, Artificial Sequence
  Description of Artificial Sequence: Synthetic oligonucleotide
  Target: LAMA2; (-) strand; PAM type: NRG; PAM sequence: CAG
tggttcatattctggtgtgg

SEQ ID NO: 112217 - DNA, 20 bp, Artificial Sequence
  Description of Artificial Sequence: Synthetic oligonucleotide
  Target: LAMA2; (-) strand; PAM type: NRG; PAM sequence: TGG
ttttggttcatattctggtg

SEQ ID NO: 112218 - DNA, 20 bp, Artificial Sequence
  Description of Artificial Sequence: Synthetic oligonucleotide
  Target: LAMA2; (-) strand; PAM type: NRG; PAM sequence: TGG
tcagcttttggttcatattc

SEQ ID NO: 112219 - DNA, 20 bp, Artificial Sequence
  Description of Artificial Sequence: Synthetic oligonucleotide
  Target: LAMA2; (-) strand; PAM type: NRG; PAM sequence: TGG
atttagttgttttcagcttt

SEQ ID NO: 112220 - DNA, 20 bp, Artificial Sequence
  Description of Artificial Sequence: Synthetic oligonucleotide
  Target: LAMA2; (-) strand; PAM type: NRG; PAM sequence: CAG
caagttcatttagttgtttt

SEQ ID NO: 112221 - DNA, 20 bp, Artificial Sequence
  Description of Artificial Sequence: Synthetic oligonucleotide
  Target: LAMA2; (-) strand; PAM type: NRG; PAM sequence: TAG
ttctcatgagcaagttcatt

SEQ ID NO: 112222 - DNA, 20 bp, Artificial Sequence
  Description of Artificial Sequence: Synthetic oligonucleotide
  Target: LAMA2; (-) strand; PAM type: NRG; PAM sequence: AAG
tcatttgaattctcatgagc

SEQ ID NO: 112223 - DNA, 20 bp, Artificial Sequence
  Description of Artificial Sequence: Synthetic oligonucleotide
  Target: LAMA2; (-) strand; PAM type: NRG; PAM sequence: GAG
ctgctcatttgaattctcat

SEQ ID NO: 112224 - DNA, 20 bp, Artificial Sequence
  Description of Artificial Sequence: Synthetic oligonucleotide
  Target: LAMA2; (-) strand; PAM type: NRG; PAM sequence: GAG
tcctgaaaagctatatttga

SEQ ID NO: 112225 - DNA, 20 bp, Artificial Sequence
  Description of Artificial Sequence: Synthetic oligonucleotide
  Target: LAMA2; (-) strand; PAM type: NRG; PAM sequence: GAG
catcctgaaaagctatattt

SEQ ID NO: 112226 - DNA, 20 bp, Artificial Sequence
  Description of Artificial Sequence: Synthetic oligonucleotide
  Target: LAMA2; (-) strand; PAM type: NRG; PAM sequence: AAG
gcttcttcttgcatcctgaa

SEQ ID NO: 112227 - DNA, 20 bp, Artificial Sequence
  Description of Artificial Sequence: Synthetic oligonucleotide
  Target: LAMA2; (-) strand; PAM type: NRG; PAM sequence: GAG
ctgaacctcttaattttcta

SEQ ID NO: 112228 - DNA, 20 bp, Artificial Sequence
  Description of Artificial Sequence: Synthetic oligonucleotide
  Target: LAMA2; (-) strand; PAM type: NRG; PAM sequence: TAG
ctctgaacctcttaattttc

SEQ ID NO: 112229 - DNA, 20 bp, Artificial Sequence
  Description of Artificial Sequence: Synthetic oligonucleotide
  Target: LAMA2; (-) strand; PAM type: NRG; PAM sequence: GAG
agcccctgacttgcacattg

SEQ ID NO: 112230 - DNA, 20 bp, Artificial Sequence
  Description of Artificial Sequence: Synthetic oligonucleotide
  Target: LAMA2; (-) strand; PAM type: NRG; PAM sequence: TGG
ggagcccctgacttgcacat

SEQ ID NO: 112231 - DNA, 20 bp, Artificial Sequence
  Description of Artificial Sequence: Synthetic oligonucleotide
  Target: LAMA2; (-) strand; PAM type: NRG; PAM sequence: GAG
catagaaagattgttgatcg

SEQ ID NO: 112232 - DNA, 20 bp, Artificial Sequence
  Description of Artificial Sequence: Synthetic oligonucleotide
  Target: LAMA2; (-) strand; PAM type: NRG; PAM sequence: CGG
cgcatagaaagattgttgat

SEQ ID NO: 112233 - DNA, 20 bp, Artificial Sequence
  Description of Artificial Sequence: Synthetic oligonucleotide
  Target: LAMA2; (-) strand; PAM type: NRG; PAM sequence: AAG
gtattgcacagccgcataga

SEQ ID NO: 112234 - DNA, 20 bp, Artificial Sequence
  Description of Artificial Sequence: Synthetic oligonucleotide
  Target: LAMA2; (-) strand; PAM type: NRG; PAM sequence: TAG
ccatgtattgcacagccgca

SEQ ID NO: 112235 - DNA, 20 bp, Artificial Sequence
  Description of Artificial Sequence: Synthetic oligonucleotide
  Target: LAMA2; (-) strand; PAM type: NRG; PAM sequence: CAG
tgctgtgaccatgtattgca

SEQ ID NO: 112236 - DNA, 20 bp, Artificial Sequence
  Description of Artificial Sequence: Synthetic oligonucleotide
  Target: LAMA2; (-) strand; PAM type: NRG; PAM sequence: AGG
tagcctactgctatggtttt

SEQ ID NO: 112237 - DNA, 20 bp, Artificial Sequence
  Description of Artificial Sequence: Synthetic oligonucleotide
  Target: LAMA2; (-) strand; PAM type: NRG; PAM sequence: TAG
atagcctactgctatggttt

SEQ ID NO: 112238 - DNA, 20 bp, Artificial Sequence
  Description of Artificial Sequence: Synthetic oligonucleotide
  Target: LAMA2; (-) strand; PAM type: NRG; PAM sequence: TGG
tatggtatagcctactgcta

SEQ ID NO: 112239 - DNA, 20 bp, Artificial Sequence
  Description of Artificial Sequence: Synthetic oligonucleotide
  Target: LAMA2; (-) strand; PAM type: NRG; PAM sequence: TAG
cacacctaggctctatggta

SEQ ID NO: 112240 - DNA, 20 bp, Artificial Sequence
  Description of Artificial Sequence: Synthetic oligonucleotide
  Target: LAMA2; (-) strand; PAM type: NRG; PAM sequence: TGG
tactacacacctaggctcta

SEQ ID NO: 112241 - DNA, 20 bp, Artificial Sequence
  Description of Artificial Sequence: Synthetic oligonucleotide
  Target: LAMA2; (-) strand; PAM type: NRG; PAM sequence: AGG
gtatagcctactacacacct

SEQ ID NO: 112242 - DNA, 20 bp, Artificial Sequence
  Description of Artificial Sequence: Synthetic oligonucleotide
  Target: LAMA2; (-) strand; PAM type: NRG; PAM sequence: TAG
ggtatagcctactacacacc

SEQ ID NO: 112243 - DNA, 20 bp, Artificial Sequence
  Description of Artificial Sequence: Synthetic oligonucleotide
  Target: LAMA2; (-) strand; PAM type: NRG; PAM sequence: TAG
ttgcacaaatctagatggta

SEQ ID NO: 112244 - DNA, 20 bp, Artificial Sequence
  Description of Artificial Sequence: Synthetic oligonucleotide
  Target: LAMA2; (-) strand; PAM type: NRG; PAM sequence: TGG
agtacttgcacaaatctaga

SEQ ID NO: 112245 - DNA, 20 bp, Artificial Sequence
  Description of Artificial Sequence: Synthetic oligonucleotide
  Target: LAMA2; (-) strand; PAM type: NRG; PAM sequence: TAG
gtacagtacttgcacaaatc

SEQ ID NO: 112246 - DNA, 20 bp, Artificial Sequence
  Description of Artificial Sequence: Synthetic oligonucleotide
  Target: LAMA2; (-) strand; PAM type: NRG; PAM sequence: CAG
agttaaaagcatagactgta

SEQ ID NO: 112247 - DNA, 20 bp, Artificial Sequence
  Description of Artificial Sequence: Synthetic oligonucleotide
  Target: LAMA2; (-) strand; PAM type: NRG; PAM sequence: TAG
ttactgaatagttaaaagca

SEQ ID NO: 112248 - DNA, 20 bp, Artificial Sequence
  Description of Artificial Sequence: Synthetic oligonucleotide
  Target: LAMA2; (-) strand; PAM type: NRG; PAM sequence: AAG
atcagttactgaatagttaa

SEQ ID NO: 112249 - DNA, 20 bp, Artificial Sequence
  Description of Artificial Sequence: Synthetic oligonucleotide
  Target: LAMA2; (-) strand; PAM type: NRG; PAM sequence: TAG
tagtaaaatcagttactgaa

SEQ ID NO: 112250 - DNA, 20 bp, Artificial Sequence
  Description of Artificial Sequence: Synthetic oligonucleotide
  Target: LAMA2; (-) strand; PAM type: NRG; PAM sequence: CAG
aaaattttaaatagtaaaat

SEQ ID NO: 112251 - DNA, 20 bp, Artificial Sequence
  Description of Artificial Sequence: Synthetic oligonucleotide
  Target: LAMA2; (-) strand; PAM type: NRG; PAM sequence: TAG
tgaatagttaaaattttaaa

SEQ ID NO: 112252 - DNA, 20 bp, Artificial Sequence
  Description of Artificial Sequence: Synthetic oligonucleotide
  Target: LAMA2; (-) strand; PAM type: NRG; PAM sequence: TAG
ataagaaaacagttactgaa

SEQ ID NO: 112253 - DNA, 20 bp, Artificial Sequence
  Description of Artificial Sequence: Synthetic oligonucleotide
  Target: LAMA2; (-) strand; PAM type: NRG; PAM sequence: CAG
ttagaacacacataagaaaa

SEQ ID NO: 112254 - DNA, 20 bp, Artificial Sequence
  Description of Artificial Sequence: Synthetic oligonucleotide
  Target: LAMA2; (-) strand; PAM type: NRG; PAM sequence: AAG
ttggtttttagaacacacat

SEQ ID NO: 112255 - DNA, 20 bp, Artificial Sequence
  Description of Artificial Sequence: Synthetic oligonucleotide
  Target: LAMA2; (-) strand; PAM type: NRG; PAM sequence: TAG
gcattgactcatttggtttt

SEQ ID NO: 112256 - DNA, 20 bp, Artificial Sequence
  Description of Artificial Sequence: Synthetic oligonucleotide
  Target: LAMA2; (-) strand; PAM type: NRG; PAM sequence: TGG
aaaacatgcattgactcatt

SEQ ID NO: 112257 - DNA, 20 bp, Artificial Sequence
  Description of Artificial Sequence: Synthetic oligonucleotide
  Target: LAMA2; (-) strand; PAM type: NRG; PAM sequence: GGG
catatttactcagattatct

SEQ ID NO: 112258 - DNA, 20 bp, Artificial Sequence
  Description of Artificial Sequence: Synthetic oligonucleotide
  Target: LAMA2; (-) strand; PAM type: NRG; PAM sequence: TGG
ccatatttactcagattatc

SEQ ID NO: 112259 - DNA, 20 bp, Artificial Sequence
  Description of Artificial Sequence: Synthetic oligonucleotide
  Target: LAMA2; (-) strand; PAM type: NRG; PAM sequence: CAG
aaagtgaacccatatttact

SEQ ID NO: 112260 - DNA, 20 bp, Artificial Sequence
  Description of Artificial Sequence: Synthetic oligonucleotide
  Target: LAMA2; (-) strand; PAM type: NRG; PAM sequence: AAG
actttaaaaactctgtgcca

SEQ ID NO: 112261 - DNA, 20 bp, Artificial Sequence
  Description of Artificial Sequence: Synthetic oligonucleotide
  Target: LAMA2; (-) strand; PAM type: NRG; PAM sequence: TGG
cacatgactgtattatattc

SEQ ID NO: 112262 - DNA, 20 bp, Artificial Sequence
  Description of Artificial Sequence: Synthetic oligonucleotide
  Target: LAMA2; (-) strand; PAM type: NRG; PAM sequence: GAG
cagaatgtattcttgtcatt

SEQ ID NO: 112263 - DNA, 20 bp, Artificial Sequence
  Description of Artificial Sequence: Synthetic oligonucleotide
  Target: LAMA2; (-) strand; PAM type: NRG; PAM sequence: CAG
ttgcctaattccaactttct

SEQ ID NO: 112264 - DNA, 20 bp, Artificial Sequence
  Description of Artificial Sequence: Synthetic oligonucleotide
  Target: LAMA2; (-) strand; PAM type: NRG; PAM sequence: AGG
tttatgatgtttgcacattg

SEQ ID NO: 112265 - DNA, 20 bp, Artificial Sequence
  Description of Artificial Sequence: Synthetic oligonucleotide
  Target: LAMA2; (-) strand; PAM type: NRG; PAM sequence: GAG
ctttatgatgtttgcacatt

SEQ ID NO: 112266 - DNA, 20 bp, Artificial Sequence
  Description of Artificial Sequence: Synthetic oligonucleotide
  Target: LAMA2; (-) strand; PAM type: NRG; PAM sequence: AAG
tgtaccatctagatttgtgc

SEQ ID NO: 112267 - DNA, 20 bp, Artificial Sequence
  Description of Artificial Sequence: Synthetic oligonucleotide
  Target: LAMA2; (-) strand; PAM type: NRG; PAM sequence: TAG
gtgtagtaggctgtaccatc

SEQ ID NO: 112268 - DNA, 20 bp, Artificial Sequence
  Description of Artificial Sequence: Synthetic oligonucleotide
  Target: LAMA2; (-) strand; PAM type: NRG; PAM sequence: AGG
ataaagcctaggtgtgtagt

SEQ ID NO: 112269 - DNA, 20 bp, Artificial Sequence
  Description of Artificial Sequence: Synthetic oligonucleotide
  Target: LAMA2; (-) strand; PAM type: NRG; PAM sequence: TAG
cataaagcctaggtgtgtag

SEQ ID NO: 112270 - DNA, 20 bp, Artificial Sequence
  Description of Artificial Sequence: Synthetic oligonucleotide
  Target: LAMA2; (-) strand; PAM type: NRG; PAM sequence: TAG
taccataaagcctaggtgtg

SEQ ID NO: 112271 - DNA, 20 bp, Artificial Sequence
  Description of Artificial Sequence: Synthetic oligonucleotide
  Target: LAMA2; (-) strand; PAM type: NRG; PAM sequence: AGG
taggctataccataaagcct

SEQ ID NO: 112272 - DNA, 20 bp, Artificial Sequence
  Description of Artificial Sequence: Synthetic oligonucleotide
  Target: LAMA2; (-) strand; PAM type: NRG; PAM sequence: TAG
gtaggctataccataaagcc

SEQ ID NO: 112273 - DNA, 20 bp, Artificial Sequence
  Description of Artificial Sequence: Synthetic oligonucleotide
  Target: LAMA2; (-) strand; PAM type: NRG; PAM sequence: AAG
gagcagtaggctataccata

SEQ ID NO: 112274 - DNA, 20 bp, Artificial Sequence
  Description of Artificial Sequence: Synthetic oligonucleotide
  Target: LAMA2; (-) strand; PAM type: NRG; PAM sequence: AGG
ggctctagccttggagcagt

SEQ ID NO: 112275 - DNA, 20 bp, Artificial Sequence
  Description of Artificial Sequence: Synthetic oligonucleotide
  Target: LAMA2; (-) strand; PAM type: NRG; PAM sequence: TAG
aggctctagccttggagcag

SEQ ID NO: 112276 - DNA, 20 bp, Artificial Sequence
  Description of Artificial Sequence: Synthetic oligonucleotide
  Target: LAMA2; (-) strand; PAM type: NRG; PAM sequence: CAG
tacaggctctagccttggag

SEQ ID NO: 112277 - DNA, 20 bp, Artificial Sequence
  Description of Artificial Sequence: Synthetic oligonucleotide
  Target: LAMA2; (-) strand; PAM type: NRG; PAM sequence: GAG
ctgtacaggctctagccttg

SEQ ID NO: 112278 - DNA, 20 bp, Artificial Sequence
  Description of Artificial Sequence: Synthetic oligonucleotide
  Target: LAMA2; (-) strand; PAM type: NRG; PAM sequence: TGG
tgctgtacaggctctagcct

SEQ ID NO: 112279 - DNA, 20 bp, Artificial Sequence
  Description of Artificial Sequence: Synthetic oligonucleotide
  Target: LAMA2; (-) strand; PAM type: NRG; PAM sequence: TAG
ggaacatgctgtacaggctc

SEQ ID NO: 112280 - DNA, 20 bp, Artificial Sequence
  Description of Artificial Sequence: Synthetic oligonucleotide
  Target: LAMA2; (-) strand; PAM type: NRG; PAM sequence: AGG
agtggaggaacatgctgtac

SEQ ID NO: 112281 - DNA, 20 bp, Artificial Sequence
  Description of Artificial Sequence: Synthetic oligonucleotide
  Target: LAMA2; (-) strand; PAM type: NRG; PAM sequence: CAG
cagtggaggaacatgctgta

SEQ ID NO: 112282 - DNA, 20 bp, Artificial Sequence
  Description of Artificial Sequence: Synthetic oligonucleotide
  Target: LAMA2; (-) strand; PAM type: NRG; PAM sequence: AGG
ctgcctacagcattcagtgg

SEQ ID NO: 112283 - DNA, 20 bp, Artificial Sequence
  Description of Artificial Sequence: Synthetic oligonucleotide
  Target: LAMA2; (-) strand; PAM type: NRG; PAM sequence: GAG
actgcctacagcattcagtg

SEQ ID NO: 112284 - DNA, 20 bp, Artificial Sequence
  Description of Artificial Sequence: Synthetic oligonucleotide
  Target: LAMA2; (-) strand; PAM type: NRG; PAM sequence: TGG
caactgcctacagcattcag

SEQ ID NO: 112285 - DNA, 20 bp, Artificial Sequence
  Description of Artificial Sequence: Synthetic oligonucleotide
  Target: LAMA2; (-) strand; PAM type: NRG; PAM sequence: CAG
ttacaactgcctacagcatt

SEQ ID NO: 112286 - DNA, 20 bp, Artificial Sequence
  Description of Artificial Sequence: Synthetic oligonucleotide
  Target: LAMA2; (-) strand; PAM type: NRG; PAM sequence: CAG
cattgagttacaactgccta

SEQ ID NO: 112287 - DNA, 20 bp, Artificial Sequence
  Description of Artificial Sequence: Synthetic oligonucleotide
  Target: LAMA2; (-) strand; PAM type: NRG; PAM sequence: GAG
gtacacaaatacttaccatt

SEQ ID NO: 112288 - DNA, 20 bp, Artificial Sequence
  Description of Artificial Sequence: Synthetic oligonucleotide
  Target: LAMA2; (-) strand; PAM type: NRG; PAM sequence: AGG
actgtaccttgtttatgttt

SEQ ID NO: 112289 - DNA, 20 bp, Artificial Sequence
  Description of Artificial Sequence: Synthetic oligonucleotide
  Target: LAMA2; (-) strand; PAM type: NRG; PAM sequence: TAG
tactgtaccttgtttatgtt

SEQ ID NO: 112290 - DNA, 20 bp, Artificial Sequence
  Description of Artificial Sequence: Synthetic oligonucleotide
  Target: LAMA2; (-) strand; PAM type: NRG; PAM sequence: TGG
atgacagatcacatatatga

SEQ ID NO: 112291 - DNA, 20 bp, Artificial Sequence
  Description of Artificial Sequence: Synthetic oligonucleotide
  Target: LAMA2; (-) strand; PAM type: NRG; PAM sequence: CAG
acaaatgttttggtaaatga

SEQ ID NO: 112292 - DNA, 20 bp, Artificial Sequence
  Description of Artificial Sequence: Synthetic oligonucleotide
  Target: LAMA2; (-) strand; PAM type: NRG; PAM sequence: TGG
ttgacacattacaaatgttt

SEQ ID NO: 112293 - DNA, 20 bp, Artificial Sequence
  Description of Artificial Sequence: Synthetic oligonucleotide
  Target: LAMA2; (-) strand; PAM type: NRG; PAM sequence: TGG
gtaaattgaaacaactgttt

SEQ ID NO: 112294 - DNA, 20 bp, Artificial Sequence
  Description of Artificial Sequence: Synthetic oligonucleotide
  Target: LAMA2; (-) strand; PAM type: NRG; PAM sequence: AAG
tgacctggtccctcctagag

SEQ ID NO: 112295 - DNA, 20 bp, Artificial Sequence
  Description of Artificial Sequence: Synthetic oligonucleotide
  Target: LAMA2; (-) strand; PAM type: NRG; PAM sequence: GAG
gaatgacctggtccctccta

SEQ ID NO: 112296 - DNA, 20 bp, Artificial Sequence
  Description of Artificial Sequence: Synthetic oligonucleotide
  Target: LAMA2; (-) strand; PAM type: NRG; PAM sequence: TAG
gagaatgacctggtccctcc

SEQ ID NO: 112297 - DNA, 20 bp, Artificial Sequence
  Description of Artificial Sequence: Synthetic oligonucleotide
  Target: LAMA2; (-) strand; PAM type: NRG; PAM sequence: TGG
catgaagaaagagaatgacc

SEQ ID NO: 112298 - DNA, 20 bp, Artificial Sequence
  Description of Artificial Sequence: Synthetic oligonucleotide
  Target: LAMA2; (-) strand; PAM type: NRG; PAM sequence: GAG
gatacacaatcatgaagaaa

SEQ ID NO: 112299 - DNA, 20 bp, Artificial Sequence
  Description of Artificial Sequence: Synthetic oligonucleotide
  Target: LAMA2; (-) strand; PAM type: NRG; PAM sequence: AAG
ttgatacacaatcatgaaga

SEQ ID NO: 112300 - DNA, 20 bp, Artificial Sequence
  Description of Artificial Sequence: Synthetic oligonucleotide
  Target: LAMA2; (-) strand; PAM type: NRG; PAM sequence: AAG
aggcttgatacacaatcatg

SEQ ID NO: 112301 - DNA, 20 bp, Artificial Sequence
  Description of Artificial Sequence: Synthetic oligonucleotide
  Target: LAMA2; (-) strand; PAM type: NRG; PAM sequence: AGG
attttcacaggaaaagtctt

SEQ ID NO: 112302 - DNA, 20 bp, Artificial Sequence
  Description of Artificial Sequence: Synthetic oligonucleotide
  Target: LAMA2; (-) strand; PAM type: NRG; PAM sequence: TAG
cattttcacaggaaaagtct

SEQ ID NO: 112303 - DNA, 20 bp, Artificial Sequence
  Description of Artificial Sequence: Synthetic oligonucleotide
  Target: LAMA2; (-) strand; PAM type: NRG; PAM sequence: AAG
tggtgtcattttcacaggaa

SEQ ID NO: 112304 - DNA, 20 bp, Artificial Sequence
  Description of Artificial Sequence: Synthetic oligonucleotide
  Target: LAMA2; (-) strand; PAM type: NRG; PAM sequence: AGG
aatcctggtgtcattttcac

SEQ ID NO: 112305 - DNA, 20 bp, Artificial Sequence
  Description of Artificial Sequence: Synthetic oligonucleotide
  Target: LAMA2; (-) strand; PAM type: NRG; PAM sequence: CAG
caatcctggtgtcattttca

SEQ ID NO: 112306 - DNA, 20 bp, Artificial Sequence
  Description of Artificial Sequence: Synthetic oligonucleotide
  Target: LAMA2; (-) strand; PAM type: NRG; PAM sequence: TGG
aatctgatcaaattcaatcc

SEQ ID NO: 112307 - DNA, 20 bp, Artificial Sequence
  Description of Artificial Sequence: Synthetic oligonucleotide
  Target: LAMA2; (-) strand; PAM type: NRG; PAM sequence: GAG
acagggcctggagtcaaata

SEQ ID NO: 112308 - DNA, 20 bp, Artificial Sequence
  Description of Artificial Sequence: Synthetic oligonucleotide
  Target: LAMA2; (-) strand; PAM type: NRG; PAM sequence: TAG
gcacagggcctggagtcaaa

SEQ ID NO: 112309 - DNA, 20 bp, Artificial Sequence
  Description of Artificial Sequence: Synthetic oligonucleotide
  Target: LAMA2; (-) strand; PAM type: NRG; PAM sequence: GAG
tatacacagcacagggcctg

SEQ ID NO: 112310 - DNA, 20 bp, Artificial Sequence
  Description of Artificial Sequence: Synthetic oligonucleotide
  Target: LAMA2; (-) strand; PAM type: NRG; PAM sequence: TGG
tgtatacacagcacagggcc

SEQ ID NO: 112311 - DNA, 20 bp, Artificial Sequence
  Description of Artificial Sequence: Synthetic oligonucleotide
  Target: LAMA2; (-) strand; PAM type: NRG; PAM sequence: GGG
ttgcttgtatacacagcaca

SEQ ID NO: 112312 - DNA, 20 bp, Artificial Sequence
  Description of Artificial Sequence: Synthetic oligonucleotide
  Target: LAMA2; (-) strand; PAM type: NRG; PAM sequence: AGG
tttgcttgtatacacagcac

SEQ ID NO: 112313 - DNA, 20 bp, Artificial Sequence
  Description of Artificial Sequence: Synthetic oligonucleotide
  Target: LAMA2; (-) strand; PAM type: NRG; PAM sequence: CAG
gtttgcttgtatacacagca

SEQ ID NO: 112314 - DNA, 20 bp, Artificial Sequence
  Description of Artificial Sequence: Synthetic oligonucleotide
  Target: LAMA2; (-) strand; PAM type: NRG; PAM sequence: CAG
gtgtcgtttgcttgtataca

SEQ ID NO: 112315 - DNA, 20 bp, Artificial Sequence
  Description of Artificial Sequence: Synthetic oligonucleotide
  Target: LAMA2; (-) strand; PAM type: NRG; PAM sequence: TGG
tgtaggaaatgagaccacat

SEQ ID NO: 112316 - DNA, 20 bp, Artificial Sequence
  Description of Artificial Sequence: Synthetic oligonucleotide
  Target: LAMA2; (-) strand; PAM type: NRG; PAM sequence: GAG
taagcaactttgtaggaaat

SEQ ID NO: 112317 - DNA, 20 bp, Artificial Sequence
  Description of Artificial Sequence: Synthetic oligonucleotide
  Target: LAMA2; (-) strand; PAM type: NRG; PAM sequence: AGG
gaaaaagtaagcaactttgt

SEQ ID NO: 112318 - DNA, 20 bp, Artificial Sequence
  Description of Artificial Sequence: Synthetic oligonucleotide
  Target: LAMA2; (-) strand; PAM type: NRG; PAM sequence: TAG
agaaaaagtaagcaactttg

SEQ ID NO: 112319 - DNA, 20 bp, Artificial Sequence
  Description of Artificial Sequence: Synthetic oligonucleotide
  Target: LAMA2; (-) strand; PAM type: NRG; PAM sequence: AAG
caagggaataaagaaaaagt

SEQ ID NO: 112320 - DNA, 20 bp, Artificial Sequence
  Description of Artificial Sequence: Synthetic oligonucleotide
  Target: LAMA2; (-) strand; PAM type: NRG; PAM sequence: AAG
agttcaagggaataaagaaa

SEQ ID NO: 112321 - DNA, 20 bp, Artificial Sequence
  Description of Artificial Sequence: Synthetic oligonucleotide
  Target: LAMA2; (-) strand; PAM type: NRG; PAM sequence: AAG
atttcgagttcaagggaata

SEQ ID NO: 112322 - DNA, 20 bp, Artificial Sequence
  Description of Artificial Sequence: Synthetic oligonucleotide
  Target: LAMA2; (-) strand; PAM type: NRG; PAM sequence: GGG
caagaagatttcgagttcaa

SEQ ID NO: 112323 - DNA, 20 bp, Artificial Sequence
  Description of Artificial Sequence: Synthetic oligonucleotide
  Target: LAMA2; (-) strand; PAM type: NRG; PAM sequence: AGG
ccaagaagatttcgagttca

SEQ ID NO: 112324 - DNA, 20 bp, Artificial Sequence
  Description of Artificial Sequence: Synthetic oligonucleotide
  Target: LAMA2; (-) strand; PAM type: NRG; PAM sequence: AAG
gccaagaagatttcgagttc

SEQ ID NO: 112325 - DNA, 20 bp, Artificial Sequence
  Description of Artificial Sequence: Synthetic oligonucleotide
  Target: LAMA2; (-) strand; PAM type: NRG; PAM sequence: GAG
ttcacagccaagaagatttc

SEQ ID NO: 112326 - DNA, 20 bp, Artificial Sequence
  Description of Artificial Sequence: Synthetic oligonucleotide
  Target: LAMA2; (-) strand; PAM type: NRG; PAM sequence: AAG
aatttctgttcacagccaag

SEQ ID NO: 112327 - DNA, 20 bp, Artificial Sequence
  Description of Artificial Sequence: Synthetic oligonucleotide
  Target: LAMA2; (-) strand; PAM type: NRG; PAM sequence: AAG
ttaaatttctgttcacagcc

SEQ ID NO: 112328 - DNA, 20 bp, Artificial Sequence
  Description of Artificial Sequence: Synthetic oligonucleotide
  Target: LAMA2; (-) strand; PAM type: NRG; PAM sequence: CAG
aatttttaaatttctgttca

SEQ ID NO: 112329 - DNA, 20 bp, Artificial Sequence
  Description of Artificial Sequence: Synthetic oligonucleotide
  Target: LAMA2; (-) strand; PAM type: NRG; PAM sequence: TAG
ttgtataaatcactctatgg

SEQ ID NO: 112330 - DNA, 20 bp, Artificial Sequence
  Description of Artificial Sequence: Synthetic oligonucleotide
  Target: LAMA2; (-) strand; PAM type: NRG; PAM sequence: TGG
cacttgtataaatcactcta

SEQ ID NO: 112331 - DNA, 20 bp, Artificial Sequence
  Description of Artificial Sequence: Synthetic oligonucleotide
  Target: LAMA2; (-) strand; PAM type: NRG; PAM sequence: AAG
acatagaagagattttttaa

SEQ ID NO: 112332 - DNA, 20 bp, Artificial Sequence
  Description of Artificial Sequence: Synthetic oligonucleotide
  Target: LAMA2; (-) strand; PAM type: NRG; PAM sequence: GAG
gacatgctgatgacatagaa

SEQ ID NO: 112333 - DNA, 20 bp, Artificial Sequence
  Description of Artificial Sequence: Synthetic oligonucleotide
  Target: LAMA2; (-) strand; PAM type: NRG; PAM sequence: AAG
gggacatgctgatgacatag

SEQ ID NO: 112334 - DNA, 20 bp, Artificial Sequence
  Description of Artificial Sequence: Synthetic oligonucleotide
  Target: LAMA2; (-) strand; PAM type: NRG; PAM sequence: TAG
aaggggacatgctgatgaca

SEQ ID NO: 112335 - DNA, 20 bp, Artificial Sequence
  Description of Artificial Sequence: Synthetic oligonucleotide
  Target: LAMA2; (-) strand; PAM type: NRG; PAM sequence: GGG
cccctgagatcagaagaaag

SEQ ID NO: 112336 - DNA, 20 bp, Artificial Sequence
  Description of Artificial Sequence: Synthetic oligonucleotide
  Target: LAMA2; (-) strand; PAM type: NRG; PAM sequence: GGG
tcccctgagatcagaagaaa

SEQ ID NO: 112337 - DNA, 20 bp, Artificial Sequence
  Description of Artificial Sequence: Synthetic oligonucleotide
  Target: LAMA2; (-) strand; PAM type: NRG; PAM sequence: AGG
ttcccctgagatcagaagaa

SEQ ID NO: 112338 - DNA, 20 bp, Artificial Sequence
  Description of Artificial Sequence: Synthetic oligonucleotide
  Target: LAMA2; (-) strand; PAM type: NRG; PAM sequence: AAG
tttcccctgagatcagaaga

SEQ ID NO: 112339 - DNA, 20 bp, Artificial Sequence
  Description of Artificial Sequence: Synthetic oligonucleotide
  Target: LAMA2; (-) strand; PAM type: NRG; PAM sequence: AAG
gctttttcccctgagatcag

SEQ ID NO: 112340 - DNA, 20 bp, Artificial Sequence
  Description of Artificial Sequence: Synthetic oligonucleotide
  Target: LAMA2; (-) strand; PAM type: NRG; PAM sequence: CAG
aaagctttttcccctgagat

SEQ ID NO: 112341 - DNA, 20 bp, Artificial Sequence
  Description of Artificial Sequence: Synthetic oligonucleotide
  Target: LAMA2; (-) strand; PAM type: NRG; PAM sequence: GAG
tacacaaagctttttcccct

SEQ ID NO: 112342 - DNA, 20 bp, Artificial Sequence
  Description of Artificial Sequence: Synthetic oligonucleotide
  Target: LAMA2; (-) strand; PAM type: NRG; PAM sequence: AAG
atttgggccatgcatacaca

SEQ ID NO: 112343 - DNA, 20 bp, Artificial Sequence
  Description of Artificial Sequence: Synthetic oligonucleotide
  Target: LAMA2; (-) strand; PAM type: NRG; PAM sequence: GGG
aattttctttgggcaaattt

SEQ ID NO: 112344 - DNA, 20 bp, Artificial Sequence
  Description of Artificial Sequence: Synthetic oligonucleotide
  Target: LAMA2; (-) strand; PAM type: NRG; PAM sequence: TGG
taattttctttgggcaaatt

SEQ ID NO: 112345 - DNA, 20 bp, Artificial Sequence
  Description of Artificial Sequence: Synthetic oligonucleotide
  Target: LAMA2; (-) strand; PAM type: NRG; PAM sequence: GGG
gctcctacataattttcttt

SEQ ID NO: 112346 - DNA, 20 bp, Artificial Sequence
  Description of Artificial Sequence: Synthetic oligonucleotide
  Target: LAMA2; (-) strand; PAM type: NRG; PAM sequence: TGG
tgctcctacataattttctt

SEQ ID NO: 112347 - DNA, 20 bp, Artificial Sequence
  Description of Artificial Sequence: Synthetic oligonucleotide
  Target: LAMA2; (-) strand; PAM type: NRG; PAM sequence: TAG
agaaggtgttcaataaatgc

SEQ ID NO: 112348 - DNA, 20 bp, Artificial Sequence
  Description of Artificial Sequence: Synthetic oligonucleotide
  Target: LAMA2; (-) strand; PAM type: NRG; PAM sequence: AGG
ctcagtgcctgatatacaga

SEQ ID NO: 112349 - DNA, 20 bp, Artificial Sequence
  Description of Artificial Sequence: Synthetic oligonucleotide
  Target: LAMA2; (-) strand; PAM type: NRG; PAM sequence: AAG
tctcagtgcctgatatacag

SEQ ID NO: 112350 - DNA, 20 bp, Artificial Sequence
  Description of Artificial Sequence: Synthetic oligonucleotide
  Target: LAMA2; (-) strand; PAM type: NRG; PAM sequence: CAG
caatctcagtgcctgatata

SEQ ID NO: 112351 - DNA, 20 bp, Artificial Sequence
  Description of Artificial Sequence: Synthetic oligonucleotide
  Target: LAMA2; (-) strand; PAM type: NRG; PAM sequence: CAG
tttatttatgacaccaatct

SEQ ID NO: 112352 - DNA, 20 bp, Artificial Sequence
  Description of Artificial Sequence: Synthetic oligonucleotide
  Target: LAMA2; (-) strand; PAM type: NRG; PAM sequence: TAG
aatttttgtgagaataaagt

SEQ ID NO: 112353 - DNA, 20 bp, Artificial Sequence
  Description of Artificial Sequence: Synthetic oligonucleotide
  Target: LAMA2; (-) strand; PAM type: NRG; PAM sequence: AAG
gtggaatttttgtgagaata

SEQ ID NO: 112354 - DNA, 20 bp, Artificial Sequence
  Description of Artificial Sequence: Synthetic oligonucleotide
  Target: LAMA2; (-) strand; PAM type: NRG; PAM sequence: GAG
ctgtaatgtggaatttttgt

SEQ ID NO: 112355 - DNA, 20 bp, Artificial Sequence
  Description of Artificial Sequence: Synthetic oligonucleotide
  Target: LAMA2; (-) strand; PAM type: NRG; PAM sequence: TGG
ctattcttttgtctgtaatg

SEQ ID NO: 112356 - DNA, 20 bp, Artificial Sequence
  Description of Artificial Sequence: Synthetic oligonucleotide
  Target: LAMA2; (-) strand; PAM type: NRG; PAM sequence: GAG
cctagcttctaactttaggt

SEQ ID NO: 112357 - DNA, 20 bp, Artificial Sequence
  Description of Artificial Sequence: Synthetic oligonucleotide
  Target: LAMA2; (-) strand; PAM type: NRG; PAM sequence: AGG
acttcctagcttctaacttt

SEQ ID NO: 112358 - DNA, 20 bp, Artificial Sequence
  Description of Artificial Sequence: Synthetic oligonucleotide
  Target: LAMA2; (-) strand; PAM type: NRG; PAM sequence: TAG
cacttcctagcttctaactt

SEQ ID NO: 112359 - DNA, 20 bp, Artificial Sequence
  Description of Artificial Sequence: Synthetic oligonucleotide
  Target: LAMA2; (-) strand; PAM type: NRG; PAM sequence: TAG
atcagtaaataaacacttcc

SEQ ID NO: 112360 - DNA, 20 bp, Artificial Sequence
  Description of Artificial Sequence: Synthetic oligonucleotide
  Target: LAMA2; (-) strand; PAM type: NRG; PAM sequence: CAG
gctataccagttttcatcat

SEQ ID NO: 112361 - DNA, 20 bp, Artificial Sequence
  Description of Artificial Sequence: Synthetic oligonucleotide
  Target: LAMA2; (-) strand; PAM type: NRG; PAM sequence: CAG
ctgattactttttgctatac

SEQ ID NO: 112362 - DNA, 20 bp, Artificial Sequence
  Description of Artificial Sequence: Synthetic oligonucleotide
  Target: LAMA2; (-) strand; PAM type: NRG; PAM sequence: AAG
atgagtcaacaacaggggaa

SEQ ID NO: 112363 - DNA, 20 bp, Artificial Sequence
  Description of Artificial Sequence: Synthetic oligonucleotide
  Target: LAMA2; (-) strand; PAM type: NRG; PAM sequence: GGG
acaggatgagtcaacaacag

SEQ ID NO: 112364 - DNA, 20 bp, Artificial Sequence
  Description of Artificial Sequence: Synthetic oligonucleotide
  Target: LAMA2; (-) strand; PAM type: NRG; PAM sequence: GGG
tacaggatgagtcaacaaca

SEQ ID NO: 112365 - DNA, 20 bp, Artificial Sequence
  Description of Artificial Sequence: Synthetic oligonucleotide
  Target: LAMA2; (-) strand; PAM type: NRG; PAM sequence: AGG
ctacaggatgagtcaacaac

SEQ ID NO: 112366 - DNA, 20 bp, Artificial Sequence
  Description of Artificial Sequence: Synthetic oligonucleotide
  Target: LAMA2; (-) strand; PAM type: NRG; PAM sequence: CAG
actacaggatgagtcaacaa

SEQ ID NO: 112367 - DNA, 20 bp, Artificial Sequence
  Description of Artificial Sequence: Synthetic oligonucleotide
  Target: LAMA2; (-) strand; PAM type: NRG; PAM sequence: GAG
ccttagagctactacaggat

SEQ ID NO: 112368 - DNA, 20 bp, Artificial Sequence
  Description of Artificial Sequence: Synthetic oligonucleotide
  Target: LAMA2; (-) strand; PAM type: NRG; PAM sequence: AGG
cgtatccttagagctactac

SEQ ID NO: 112369 - DNA, 20 bp, Artificial Sequence
  Description of Artificial Sequence: Synthetic oligonucleotide
  Target: LAMA2; (-) strand; PAM type: NRG; PAM sequence: CAG
ccgtatccttagagctacta

SEQ ID NO: 112370 - DNA, 20 bp, Artificial Sequence
  Description of Artificial Sequence: Synthetic oligonucleotide
  Target: LAMA2; (-) strand; PAM type: NRG; PAM sequence: GAG
atagtctgtccgtatcctta

SEQ ID NO: 112371 - DNA, 20 bp, Artificial Sequence
  Description of Artificial Sequence: Synthetic oligonucleotide
  Target: LAMA2; (-) strand; PAM type: NRG; PAM sequence: TAG
tcatagtctgtccgtatcct

SEQ ID NO: 112372 - DNA, 20 bp, Artificial Sequence
  Description of Artificial Sequence: Synthetic oligonucleotide
  Target: LAMA2; (-) strand; PAM type: NRG; PAM sequence: TAG
acatattcatcttttcatca

SEQ ID NO: 112373 - DNA, 20 bp, Artificial Sequence
  Description of Artificial Sequence: Synthetic oligonucleotide
  Target: LAMA2; (-) strand; PAM type: NRG; PAM sequence: TGG
atccattctttctgatattt

SEQ ID NO: 112374 - DNA, 20 bp, Artificial Sequence
  Description of Artificial Sequence: Synthetic oligonucleotide
  Target: LAMA2; (-) strand; PAM type: NRG; PAM sequence: AAG
gttattatcagcagaaacta

SEQ ID NO: 112375 - DNA, 20 bp, Artificial Sequence
  Description of Artificial Sequence: Synthetic oligonucleotide
  Target: LAMA2; (-) strand; PAM type: NRG; PAM sequence: CAG
tccatgagagttattatcag

SEQ ID NO: 112376 - DNA, 20 bp, Artificial Sequence
  Description of Artificial Sequence: Synthetic oligonucleotide
  Target: LAMA2; (-) strand; PAM type: NRG; PAM sequence: CAG
ttatccatgagagttattat

SEQ ID NO: 112377 - DNA, 20 bp, Artificial Sequence
  Description of Artificial Sequence: Synthetic oligonucleotide
  Target: LAMA2; (-) strand; PAM type: NRG; PAM sequence: GAG
taatcttggtttatccatga

SEQ ID NO: 112378 - DNA, 20 bp, Artificial Sequence
  Description of Artificial Sequence: Synthetic oligonucleotide
  Target: LAMA2; (-) strand; PAM type: NRG; PAM sequence: GAG
aataatcttggtttatccat

SEQ ID NO: 112379 - DNA, 20 bp, Artificial Sequence
  Description of Artificial Sequence: Synthetic oligonucleotide
  Target: LAMA2; (-) strand; PAM type: NRG; PAM sequence: TGG
tggaatttcacaaataatct

SEQ ID NO: 112380 - DNA, 20 bp, Artificial Sequence
  Description of Artificial Sequence: Synthetic oligonucleotide
  Target: LAMA2; (-) strand; PAM type: NRG; PAM sequence: TGG
taccgttatttgctagaatt

SEQ ID NO: 112381 - DNA, 20 bp, Artificial Sequence
  Description of Artificial Sequence: Synthetic oligonucleotide
  Target: LAMA2; (-) strand; PAM type: NRG; PAM sequence: TAG
aaagaaataccgttatttgc

SEQ ID NO: 112382 - DNA, 20 bp, Artificial Sequence
  Description of Artificial Sequence: Synthetic oligonucleotide
  Target: LAMA2; (-) strand; PAM type: NRG; PAM sequence: AAG
cagcatcagccttctgcaga

SEQ ID NO: 112383 - DNA, 20 bp, Artificial Sequence
  Description of Artificial Sequence: Synthetic oligonucleotide
  Target: LAMA2; (-) strand; PAM type: NRG; PAM sequence: CAG
cgtacagcatcagccttctg

SEQ ID NO: 112384 - DNA, 20 bp, Artificial Sequence
  Description of Artificial Sequence: Synthetic oligonucleotide
  Target: LAMA2; (-) strand; PAM type: NRG; PAM sequence: CAG
tgtaatcacacgtacagcat

SEQ ID NO: 112385 - DNA, 20 bp, Artificial Sequence
  Description of Artificial Sequence: Synthetic oligonucleotide
  Target: LAMA2; (-) strand; PAM type: NRG; PAM sequence: CAG
agtgaatgtaatcacacgta

SEQ ID NO: 112386 - DNA, 20 bp, Artificial Sequence
  Description of Artificial Sequence: Synthetic oligonucleotide
  Target: LAMA2; (-) strand; PAM type: NRG; PAM sequence: CAG
gtatgtttctcccatgcagc

SEQ ID NO: 112387 - DNA, 20 bp, Artificial Sequence
  Description of Artificial Sequence: Synthetic oligonucleotide
  Target: LAMA2; (-) strand; PAM type: NRG; PAM sequence: CAG
caaagtatgtttctcccatg

SEQ ID NO: 112388 - DNA, 20 bp, Artificial Sequence
  Description of Artificial Sequence: Synthetic oligonucleotide
  Target: LAMA2; (-) strand; PAM type: NRG; PAM sequence: AAG
aacctataggtttgttgtca

SEQ ID NO: 112389 - DNA, 20 bp, Artificial Sequence
  Description of Artificial Sequence: Synthetic oligonucleotide
  Target: LAMA2; (-) strand; PAM type: NRG; PAM sequence: AGG
cggaaattccacaaacctat

SEQ ID NO: 112390 - DNA, 20 bp, Artificial Sequence
  Description of Artificial Sequence: Synthetic oligonucleotide
  Target: LAMA2; (-) strand; PAM type: NRG; PAM sequence: TAG
tcggaaattccacaaaccta

SEQ ID NO: 112391 - DNA, 20 bp, Artificial Sequence
  Description of Artificial Sequence: Synthetic oligonucleotide
  Target: LAMA2; (-) strand; PAM type: NRG; PAM sequence: CGG
tgcagtcaccttctttttct

SEQ ID NO: 112392 - DNA, 20 bp, Artificial Sequence
  Description of Artificial Sequence: Synthetic oligonucleotide
  Target: LAMA2; (-) strand; PAM type: NRG; PAM sequence: CAG
acctgacagtgcatcctttg

SEQ ID NO: 112393 - DNA, 20 bp, Artificial Sequence
  Description of Artificial Sequence: Synthetic oligonucleotide
  Target: LAMA2; (-) strand; PAM type: NRG; PAM sequence: CAG
tctcatctcaactaacctga

SEQ ID NO: 112394 - DNA, 20 bp, Artificial Sequence
  Description of Artificial Sequence: Synthetic oligonucleotide
  Target: LAMA2; (-) strand; PAM type: NRG; PAM sequence: GAG
gcacaggacagaccctggga

SEQ ID NO: 112395 - DNA, 20 bp, Artificial Sequence
  Description of Artificial Sequence: Synthetic oligonucleotide
  Target: LAMA2; (-) strand; PAM type: NRG; PAM sequence: GAG
atgcacaggacagaccctgg

SEQ ID NO: 112396 - DNA, 20 bp, Artificial Sequence
  Description of Artificial Sequence: Synthetic oligonucleotide
  Target: LAMA2; (-) strand; PAM type: NRG; PAM sequence: GGG
ttatgcacaggacagaccct

SEQ ID NO: 112397 - DNA, 20 bp, Artificial Sequence
  Description of Artificial Sequence: Synthetic oligonucleotide
  Target: LAMA2; (-) strand; PAM type: NRG; PAM sequence: TGG
attatgcacaggacagaccc

SEQ ID NO: 112398 - DNA, 20 bp, Artificial Sequence
  Description of Artificial Sequence: Synthetic oligonucleotide
  Target: LAMA2; (-) strand; PAM type: NRG; PAM sequence: CAG
agcttttattatgcacagga

SEQ ID NO: 112399 - DNA, 20 bp, Artificial Sequence
  Description of Artificial Sequence: Synthetic oligonucleotide
  Target: LAMA2; (-) strand; PAM type: NRG; PAM sequence: AGG
tcgaagcttttattatgcac

SEQ ID NO: 112400 - DNA, 20 bp, Artificial Sequence
  Description of Artificial Sequence: Synthetic oligonucleotide
  Target: LAMA2; (-) strand; PAM type: NRG; PAM sequence: CAG
atcgaagcttttattatgca

SEQ ID NO: 112401 - DNA, 20 bp, Artificial Sequence
  Description of Artificial Sequence: Synthetic oligonucleotide
  Target: LAMA2; (-) strand; PAM type: NRG; PAM sequence: AAG
aatattatgcaataaaatcg

SEQ ID NO: 112402 - DNA, 20 bp, Artificial Sequence
  Description of Artificial Sequence: Synthetic oligonucleotide
  Target: LAMA2; (-) strand; PAM type: NRG; PAM sequence: TAG
ccacatcatccacatgataa

SEQ ID NO: 112403 - DNA, 20 bp, Artificial Sequence
  Description of Artificial Sequence: Synthetic oligonucleotide
  Target: LAMA2; (-) strand; PAM type: NRG; PAM sequence: GAG
tttgtggtaattccacctct

SEQ ID NO: 112404 - DNA, 20 bp, Artificial Sequence
  Description of Artificial Sequence: Synthetic oligonucleotide
  Target: LAMA2; (-) strand; PAM type: NRG; PAM sequence: TGG
ttgaagattcattagttttg

SEQ ID NO: 112405 - DNA, 20 bp, Artificial Sequence
  Description of Artificial Sequence: Synthetic oligonucleotide
  Target: LAMA2; (-) strand; PAM type: NRG; PAM sequence: TAG
gcagggacttgaagattcat

SEQ ID NO: 112406 - DNA, 20 bp, Artificial Sequence
  Description of Artificial Sequence: Synthetic oligonucleotide
  Target: LAMA2; (-) strand; PAM type: NRG; PAM sequence: AAG
caaatgcaggcagggacttg

SEQ ID NO: 112407 - DNA, 20 bp, Artificial Sequence
  Description of Artificial Sequence: Synthetic oligonucleotide
  Target: LAMA2; (-) strand; PAM type: NRG; PAM sequence: GGG
tgcctgtgcaaatgcaggca

SEQ ID NO: 112408 - DNA, 20 bp, Artificial Sequence
  Description of Artificial Sequence: Synthetic oligonucleotide
  Target: LAMA2; (-) strand; PAM type: NRG; PAM sequence: AGG
atgcctgtgcaaatgcaggc

SEQ ID NO: 112409 - DNA, 20 bp, Artificial Sequence
  Description of Artificial Sequence: Synthetic oligonucleotide
  Target: LAMA2; (-) strand; PAM type: NRG; PAM sequence: CAG
aatgcctgtgcaaatgcagg

SEQ ID NO: 112410 - DNA, 20 bp, Artificial Sequence
  Description of Artificial Sequence: Synthetic oligonucleotide
  Target: LAMA2; (-) strand; PAM type: NRG; PAM sequence: AGG
aaaaatgcctgtgcaaatgc

SEQ ID NO: 112411 - DNA, 20 bp, Artificial Sequence
  Description of Artificial Sequence: Synthetic oligonucleotide
  Target: LAMA2; (-) strand; PAM type: NRG; PAM sequence: CAG
gaaaaatgcctgtgcaaatg

SEQ ID NO: 112412 - DNA, 20 bp, Artificial Sequence
  Description of Artificial Sequence: Synthetic oligonucleotide
  Target: LAMA2; (-) strand; PAM type: NRG; PAM sequence: GGG
tactgctagtatacctccca

SEQ ID NO: 112413 - DNA, 20 bp, Artificial Sequence
  Description of Artificial Sequence: Synthetic oligonucleotide
  Target: LAMA2; (-) strand; PAM type: NRG; PAM sequence: AGG
gtactgctagtatacctccc

SEQ ID NO: 112414 - DNA, 20 bp, Artificial Sequence
  Description of Artificial Sequence: Synthetic oligonucleotide
  Target: LAMA2; (-) strand; PAM type: NRG; PAM sequence: CAG
tgtactgctagtatacctcc

SEQ ID NO: 112415 - DNA, 20 bp, Artificial Sequence
  Description of Artificial Sequence: Synthetic oligonucleotide
  Target: LAMA2; (-) strand; PAM type: NRG; PAM sequence: TAG
tgactatgcaaatgtactgc

SEQ ID NO: 112416 - DNA, 20 bp, Artificial Sequence
  Description of Artificial Sequence: Synthetic oligonucleotide
  Target: LAMA2; (-) strand; PAM type: NRG; PAM sequence: TAG
agtggaaacttaactgattg

SEQ ID NO: 112417 - DNA, 20 bp, Artificial Sequence
  Description of Artificial Sequence: Synthetic oligonucleotide
  Target: LAMA2; (-) strand; PAM type: NRG; PAM sequence: TGG
gacatgaaagaacattggag

SEQ ID NO: 112418 - DNA, 20 bp, Artificial Sequence
  Description of Artificial Sequence: Synthetic oligonucleotide
  Target: LAMA2; (-) strand; PAM type: NRG; PAM sequence: GAG
ctcgacatgaaagaacattg

SEQ ID NO: 112419 - DNA, 20 bp, Artificial Sequence
  Description of Artificial Sequence: Synthetic oligonucleotide
  Target: LAMA2; (-) strand; PAM type: NRG; PAM sequence: TGG
ccctcgacatgaaagaacat

SEQ ID NO: 112420 - DNA, 20 bp, Artificial Sequence
  Description of Artificial Sequence: Synthetic oligonucleotide
  Target: LAMA2; (-) strand; PAM type: NRG; PAM sequence: AAG
aaaaaaacccctcgacatga

SEQ ID NO: 112421 - DNA, 20 bp, Artificial Sequence
  Description of Artificial Sequence: Synthetic oligonucleotide
  Target: LAMA2; (-) strand; PAM type: NRG; PAM sequence: CAG
ttataacaatgaggtactca

SEQ ID NO: 112422 - DNA, 20 bp, Artificial Sequence
  Description of Artificial Sequence: Synthetic oligonucleotide
  Target: LAMA2; (-) strand; PAM type: NRG; PAM sequence: AGG
aaaaaaaaattataacaatg

SEQ ID NO: 112423 - DNA, 20 bp, Artificial Sequence
  Description of Artificial Sequence: Synthetic oligonucleotide
  Target: LAMA2; (-) strand; PAM type: NRG; PAM sequence: GAG
gaaaaaaaaattataacaat

SEQ ID NO: 112424 - DNA, 20 bp, Artificial Sequence
  Description of Artificial Sequence: Synthetic oligonucleotide
  Target: LAMA2; (-) strand; PAM type: NRG; PAM sequence: AGG
gtttggggaaagctctcttt

SEQ ID NO: 112425 - DNA, 20 bp, Artificial Sequence
  Description of Artificial Sequence: Synthetic oligonucleotide
  Target: LAMA2; (-) strand; PAM type: NRG; PAM sequence: TAG
agtttggggaaagctctctt

SEQ ID NO: 112426 - DNA, 20 bp, Artificial Sequence
  Description of Artificial Sequence: Synthetic oligonucleotide
  Target: LAMA2; (-) strand; PAM type: NRG; PAM sequence: AAG
aaacttaatcagtttgggga

SEQ ID NO: 112427 - DNA, 20 bp, Artificial Sequence
  Description of Artificial Sequence: Synthetic oligonucleotide
  Target: LAMA2; (-) strand; PAM type: NRG; PAM sequence: GGG
cctgaaacttaatcagtttg

SEQ ID NO: 112428 - DNA, 20 bp, Artificial Sequence
  Description of Artificial Sequence: Synthetic oligonucleotide
  Target: LAMA2; (-) strand; PAM type: NRG; PAM sequence: GGG
acctgaaacttaatcagttt

SEQ ID NO: 112429 - DNA, 20 bp, Artificial Sequence
  Description of Artificial Sequence: Synthetic oligonucleotide
  Target: LAMA2; (-) strand; PAM type: NRG; PAM sequence: TGG
gacctgaaacttaatcagtt

SEQ ID NO: 112430 - DNA, 20 bp, Artificial Sequence
  Description of Artificial Sequence: Synthetic oligonucleotide
  Target: LAMA2; (-) strand; PAM type: NRG; PAM sequence: CAG
agcaagacctgaaacttaat

SEQ ID NO: 112431 - DNA, 20 bp, Artificial Sequence
  Description of Artificial Sequence: Synthetic oligonucleotide
  Target: LAMA2; (-) strand; PAM type: NRG; PAM sequence: AAG
atagtgaattcatgctcagc

SEQ ID NO: 112432 - DNA, 20 bp, Artificial Sequence
  Description of Artificial Sequence: Synthetic oligonucleotide
  Target: LAMA2; (-) strand; PAM type: NRG; PAM sequence: CAG
aaatatagtgaattcatgct

SEQ ID NO: 112433 - DNA, 20 bp, Artificial Sequence
  Description of Artificial Sequence: Synthetic oligonucleotide
  Target: LAMA2; (-) strand; PAM type: NRG; PAM sequence: TAG
ttttgttataaacataaata

SEQ ID NO: 112434 - DNA, 20 bp, Artificial Sequence
  Description of Artificial Sequence: Synthetic oligonucleotide
  Target: LAMA2; (-) strand; PAM type: NRG; PAM sequence: GGG
aagagataaaacctaggctg

SEQ ID NO: 112435 - DNA, 20 bp, Artificial Sequence
  Description of Artificial Sequence: Synthetic oligonucleotide
  Target: LAMA2; (-) strand; PAM type: NRG; PAM sequence: GGG
taagagataaaacctaggct

SEQ ID NO: 112436 - DNA, 20 bp, Artificial Sequence
  Description of Artificial Sequence: Synthetic oligonucleotide
  Target: LAMA2; (-) strand; PAM type: NRG; PAM sequence: TGG
gtaagagataaaacctaggc

SEQ ID NO: 112437 - DNA, 20 bp, Artificial Sequence
  Description of Artificial Sequence: Synthetic oligonucleotide
  Target: LAMA2; (-) strand; PAM type: NRG; PAM sequence: AGG
tcctgtaagagataaaacct

SEQ ID NO: 112438 - DNA, 20 bp, Artificial Sequence
  Description of Artificial Sequence: Synthetic oligonucleotide
  Target: LAMA2; (-) strand; PAM type: NRG; PAM sequence: TAG
atcctgtaagagataaaacc

SEQ ID NO: 112439 - DNA, 20 bp, Artificial Sequence
  Description of Artificial Sequence: Synthetic oligonucleotide
  Target: LAMA2; (-) strand; PAM type: NRG; PAM sequence: GAG
attaaaaaaaaatcctgtaa

SEQ ID NO: 112440 - DNA, 20 bp, Artificial Sequence
  Description of Artificial Sequence: Synthetic oligonucleotide
  Target: LAMA2; (-) strand; PAM type: NRG; PAM sequence: AAG
caattaaaaaaaaatcctgt

SEQ ID NO: 112441 - DNA, 20 bp, Artificial Sequence
  Description of Artificial Sequence: Synthetic oligonucleotide
  Target: LAMA2; (-) strand; PAM type: NRG; PAM sequence: AGG
tttccagttgaagcacttgt

SEQ ID NO: 112442 - DNA, 20 bp, Artificial Sequence
  Description of Artificial Sequence: Synthetic oligonucleotide
  Target: LAMA2; (-) strand; PAM type: NRG; PAM sequence: TAG
gtttccagttgaagcacttg

SEQ ID NO: 112443 - DNA, 20 bp, Artificial Sequence
  Description of Artificial Sequence: Synthetic oligonucleotide
  Target: LAMA2; (-) strand; PAM type: NRG; PAM sequence: AAG
atcccataggtttccagttg

SEQ ID NO: 112444 - DNA, 20 bp, Artificial Sequence
  Description of Artificial Sequence: Synthetic oligonucleotide
  Target: LAMA2; (-) strand; PAM type: NRG; PAM sequence: CAG
cattaaatcccataggtttc

SEQ ID NO: 112445 - DNA, 20 bp, Artificial Sequence
  Description of Artificial Sequence: Synthetic oligonucleotide
  Target: LAMA2; (-) strand; PAM type: NRG; PAM sequence: AGG
gcagaatcattaaatcccat

SEQ ID NO: 112446 - DNA, 20 bp, Artificial Sequence
  Description of Artificial Sequence: Synthetic oligonucleotide
  Target: LAMA2; (-) strand; PAM type: NRG; PAM sequence: TAG
agcagaatcattaaatccca

SEQ ID NO: 112447 - DNA, 20 bp, Artificial Sequence
  Description of Artificial Sequence: Synthetic oligonucleotide
  Target: LAMA2; (-) strand; PAM type: NRG; PAM sequence: CAG
gttctccttctctcttgaag

SEQ ID NO: 112448 - DNA, 20 bp, Artificial Sequence
  Description of Artificial Sequence: Synthetic oligonucleotide
  Target: LAMA2; (-) strand; PAM type: NRG; PAM sequence: AAG
cttgttctccttctctcttg

SEQ ID NO: 112449 - DNA, 20 bp, Artificial Sequence
  Description of Artificial Sequence: Synthetic oligonucleotide
  Target: LAMA2; (-) strand; PAM type: NRG; PAM sequence: CGG
actttcctcctggactatct

SEQ ID NO: 112450 - DNA, 20 bp, Artificial Sequence
  Description of Artificial Sequence: Synthetic oligonucleotide
  Target: LAMA2; (-) strand; PAM type: NRG; PAM sequence: TGG
tgtattaggaactttcctcc

SEQ ID NO: 112451 - DNA, 20 bp, Artificial Sequence
  Description of Artificial Sequence: Synthetic oligonucleotide
  Target: LAMA2; (-) strand; PAM type: NRG; PAM sequence: AGG
tataattgaggtcatgtatt

SEQ ID NO: 112452 - DNA, 20 bp, Artificial Sequence
  Description of Artificial Sequence: Synthetic oligonucleotide
  Target: LAMA2; (-) strand; PAM type: NRG; PAM sequence: TAG
ttataattgaggtcatgtat

SEQ ID NO: 112453 - DNA, 20 bp, Artificial Sequence
  Description of Artificial Sequence: Synthetic oligonucleotide
  Target: LAMA2; (-) strand; PAM type: NRG; PAM sequence: AGG
taccctctatcttataattg

SEQ ID NO: 112454 - DNA, 20 bp, Artificial Sequence
  Description of Artificial Sequence: Synthetic oligonucleotide
  Target: LAMA2; (-) strand; PAM type: NRG; PAM sequence: GAG
ctaccctctatcttataatt

SEQ ID NO: 112455 - DNA, 20 bp, Artificial Sequence
  Description of Artificial Sequence: Synthetic oligonucleotide
  Target: LAMA2; (-) strand; PAM type: NRG; PAM sequence: AGG
ctacacatgcttagtatgat

SEQ ID NO: 112456 - DNA, 20 bp, Artificial Sequence
  Description of Artificial Sequence: Synthetic oligonucleotide
  Target: LAMA2; (-) strand; PAM type: NRG; PAM sequence: TAG
tctacacatgcttagtatga

SEQ ID NO: 112457 - DNA, 20 bp, Artificial Sequence
  Description of Artificial Sequence: Synthetic oligonucleotide
  Target: LAMA2; (-) strand; PAM type: NRG; PAM sequence: TAG
gtttattctctacacatgct

SEQ ID NO: 112458 - DNA, 20 bp, Artificial Sequence
  Description of Artificial Sequence: Synthetic oligonucleotide
  Target: LAMA2; (-) strand; PAM type: NRG; PAM sequence: AAG
ctgtattcatttttatataa

SEQ ID NO: 112459 - DNA, 20 bp, Artificial Sequence
  Description of Artificial Sequence: Synthetic oligonucleotide
  Target: LAMA2; (-) strand; PAM type: NRG; PAM sequence: TAG
gctgagaaatcctctactta

SEQ ID NO: 112460 - DNA, 20 bp, Artificial Sequence
  Description of Artificial Sequence: Synthetic oligonucleotide
  Target: LAMA2; (-) strand; PAM type: NRG; PAM sequence: GAG
ggctctaagatttttatgct

SEQ ID NO: 112461 - DNA, 20 bp, Artificial Sequence
  Description of Artificial Sequence: Synthetic oligonucleotide
  Target: LAMA2; (-) strand; PAM type: NRG; PAM sequence: AAG
ttgggtgataagtgggctct

SEQ ID NO: 112462 - DNA, 20 bp, Artificial Sequence
  Description of Artificial Sequence: Synthetic oligonucleotide
  Target: LAMA2; (-) strand; PAM type: NRG; PAM sequence: GGG
tttaggcttgggtgataagt

SEQ ID NO: 112463 - DNA, 20 bp, Artificial Sequence
  Description of Artificial Sequence: Synthetic oligonucleotide
  Target: LAMA2; (-) strand; PAM type: NRG; PAM sequence: TGG
ctttaggcttgggtgataag

SEQ ID NO: 112464 - DNA, 20 bp, Artificial Sequence
  Description of Artificial Sequence: Synthetic oligonucleotide
  Target: LAMA2; (-) strand; PAM type: NRG; PAM sequence: AAG
ttgctttaggcttgggtgat

SEQ ID NO: 112465 - DNA, 20 bp, Artificial Sequence
  Description of Artificial Sequence: Synthetic oligonucleotide
  Target: LAMA2; (-) strand; PAM type: NRG; PAM sequence: GGG
aacaaaattgctttaggctt

SEQ ID NO: 112466 - DNA, 20 bp, Artificial Sequence
  Description of Artificial Sequence: Synthetic oligonucleotide
  Target: LAMA2; (-) strand; PAM type: NRG; PAM sequence: TGG
taacaaaattgctttaggct

SEQ ID NO: 112467 - DNA, 20 bp, Artificial Sequence
  Description of Artificial Sequence: Synthetic oligonucleotide
  Target: LAMA2; (-) strand; PAM type: NRG; PAM sequence: AGG
taatttaacaaaattgcttt

SEQ ID NO: 112468 - DNA, 20 bp, Artificial Sequence
  Description of Artificial Sequence: Synthetic oligonucleotide
  Target: LAMA2; (-) strand; PAM type: NRG; PAM sequence: TAG
ttaatttaacaaaattgctt

SEQ ID NO: 112469 - DNA, 20 bp, Artificial Sequence
  Description of Artificial Sequence: Synthetic oligonucleotide
  Target: LAMA2; (-) strand; PAM type: NRG; PAM sequence: TAG
ggtatttaaagtatgtttta

SEQ ID NO: 112470 - DNA, 20 bp, Artificial Sequence
  Description of Artificial Sequence: Synthetic oligonucleotide
  Target: LAMA2; (-) strand; PAM type: NRG; PAM sequence: AAG
gttaactttgcaggtattta

SEQ ID NO: 112471 - DNA, 20 bp, Artificial Sequence
  Description of Artificial Sequence: Synthetic oligonucleotide
  Target: LAMA2; (-) strand; PAM type: NRG; PAM sequence: AGG
ttatgacatgttaactttgc

SEQ ID NO: 112472 - DNA, 20 bp, Artificial Sequence
  Description of Artificial Sequence: Synthetic oligonucleotide
  Target: LAMA2; (-) strand; PAM type: NRG; PAM sequence: CAG
gttatgacatgttaactttg

SEQ ID NO: 112473 - DNA, 20 bp, Artificial Sequence
  Description of Artificial Sequence: Synthetic oligonucleotide
  Target: LAMA2; (-) strand; PAM type: NRG; PAM sequence: GAG
cttagcacttaatggttttt

SEQ ID NO: 112474 - DNA, 20 bp, Artificial Sequence
  Description of Artificial Sequence: Synthetic oligonucleotide
  Target: LAMA2; (-) strand; PAM type: NRG; PAM sequence: TGG
acaaactccttagcacttaa

SEQ ID NO: 112475 - DNA, 20 bp, Artificial Sequence
  Description of Artificial Sequence: Synthetic oligonucleotide
  Target: LAMA2; (-) strand; PAM type: NRG; PAM sequence: TAG
ggaaaataacacaaactcct

SEQ ID NO: 112476 - DNA, 20 bp, Artificial Sequence
  Description of Artificial Sequence: Synthetic oligonucleotide
  Target: LAMA2; (-) strand; PAM type: NRG; PAM sequence: TGG
acgtatgtatatcctttaaa

SEQ ID NO: 112477 - DNA, 20 bp, Artificial Sequence
  Description of Artificial Sequence: Synthetic oligonucleotide
  Target: LAMA2; (-) strand; PAM type: NRG; PAM sequence: TAG
ctttgctaggatttgggtcc

SEQ ID NO: 112478 - DNA, 20 bp, Artificial Sequence
  Description of Artificial Sequence: Synthetic oligonucleotide
  Target: LAMA2; (-) strand; PAM type: NRG; PAM sequence: GGG
agtgtactttgctaggattt

SEQ ID NO: 112479 - DNA, 20 bp, Artificial Sequence
  Description of Artificial Sequence: Synthetic oligonucleotide
  Target: LAMA2; (-) strand; PAM type: NRG; PAM sequence: TGG
aagtgtactttgctaggatt

SEQ ID NO: 112480 - DNA, 20 bp, Artificial Sequence
  Description of Artificial Sequence: Synthetic oligonucleotide
  Target: LAMA2; (-) strand; PAM type: NRG; PAM sequence: AGG
aatgtgaagtgtactttgct

SEQ ID NO: 112481 - DNA, 20 bp, Artificial Sequence
  Description of Artificial Sequence: Synthetic oligonucleotide
  Target: LAMA2; (-) strand; PAM type: NRG; PAM sequence: TAG
aaatgtgaagtgtactttgc

SEQ ID NO: 112482 - DNA, 20 bp, Artificial Sequence
  Description of Artificial Sequence: Synthetic oligonucleotide
  Target: LAMA2; (-) strand; PAM type: NRG; PAM sequence: AAG
gatgtagagaaagaaatgtg

SEQ ID NO: 112483 - DNA, 20 bp, Artificial Sequence
  Description of Artificial Sequence: Synthetic oligonucleotide
  Target: LAMA2; (-) strand; PAM type: NRG; PAM sequence: AAG
aaactctagagatgtagaga

SEQ ID NO: 112484 - DNA, 20 bp, Artificial Sequence
  Description of Artificial Sequence: Synthetic oligonucleotide
  Target: LAMA2; (-) strand; PAM type: NRG; PAM sequence: GAG
tatgaaactctagagatgta

SEQ ID NO: 112485 - DNA, 20 bp, Artificial Sequence
  Description of Artificial Sequence: Synthetic oligonucleotide
  Target: LAMA2; (-) strand; PAM type: NRG; PAM sequence: TAG
tctatgaaactctagagatg

SEQ ID NO: 112486 - DNA, 20 bp, Artificial Sequence
  Description of Artificial Sequence: Synthetic oligonucleotide
  Target: LAMA2; (-) strand; PAM type: NRG; PAM sequence: GAG
ctttcttctatgaaactcta

SEQ ID NO: 112487 - DNA, 20 bp, Artificial Sequence
  Description of Artificial Sequence: Synthetic oligonucleotide
  Target: LAMA2; (-) strand; PAM type: NRG; PAM sequence: TAG
tactttcttctatgaaactc

SEQ ID NO: 112488 - DNA, 20 bp, Artificial Sequence
  Description of Artificial Sequence: Synthetic oligonucleotide
  Target: LAMA2; (-) strand; PAM type: NRG; PAM sequence: GGG
tttagagggataacattttg

SEQ ID NO: 112489 - DNA, 20 bp, Artificial Sequence
  Description of Artificial Sequence: Synthetic oligonucleotide
  Target: LAMA2; (-) strand; PAM type: NRG; PAM sequence: GGG
ttttagagggataacatttt

SEQ ID NO: 112490 - DNA, 20 bp, Artificial Sequence
  Description of Artificial Sequence: Synthetic oligonucleotide
  Target: LAMA2; (-) strand; PAM type: NRG; PAM sequence: TGG
cttttagagggataacattt

SEQ ID NO: 112491 - DNA, 20 bp, Artificial Sequence
  Description of Artificial Sequence: Synthetic oligonucleotide
  Target: LAMA2; (-) strand; PAM type: NRG; PAM sequence: GGG
tggaagttaagacttttaga

SEQ ID NO: 112492 - DNA, 20 bp, Artificial Sequence
  Description of Artificial Sequence: Synthetic oligonucleotide
  Target: LAMA2; (-) strand; PAM type: NRG; PAM sequence: AGG
ttggaagttaagacttttag

SEQ ID NO: 112493 - DNA, 20 bp, Artificial Sequence
  Description of Artificial Sequence: Synthetic oligonucleotide
  Target: LAMA2; (-) strand; PAM type: NRG; PAM sequence: GAG
gttggaagttaagactttta

SEQ ID NO: 112494 - DNA, 20 bp, Artificial Sequence
  Description of Artificial Sequence: Synthetic oligonucleotide
  Target: LAMA2; (-) strand; PAM type: NRG; PAM sequence: TAG
gagttggaagttaagacttt

SEQ ID NO: 112495 - DNA, 20 bp, Artificial Sequence
  Description of Artificial Sequence: Synthetic oligonucleotide
  Target: LAMA2; (-) strand; PAM type: NRG; PAM sequence: AAG
gaaacaaagagttggaagtt

SEQ ID NO: 112496 - DNA, 20 bp, Artificial Sequence
  Description of Artificial Sequence: Synthetic oligonucleotide
  Target: LAMA2; (-) strand; PAM type: NRG; PAM sequence: AAG
aaaaagaaacaaagagttgg

SEQ ID NO: 112497 - DNA, 20 bp, Artificial Sequence
  Description of Artificial Sequence: Synthetic oligonucleotide
  Target: LAMA2; (-) strand; PAM type: NRG; PAM sequence: TGG
gtcaaaaagaaacaaagagt

SEQ ID NO: 112498 - DNA, 20 bp, Artificial Sequence
  Description of Artificial Sequence: Synthetic oligonucleotide
  Target: LAMA2; (-) strand; PAM type: NRG; PAM sequence: GAG
tgatgtcaaaaagaaacaaa

SEQ ID NO: 112499 - DNA, 20 bp, Artificial Sequence
  Description of Artificial Sequence: Synthetic oligonucleotide
  Target: LAMA2; (-) strand; PAM type: NRG; PAM sequence: AAG
catgatgtcaaaaagaaaca

SEQ ID NO: 112500 - DNA, 20 bp, Artificial Sequence
  Description of Artificial Sequence: Synthetic oligonucleotide
  Target: LAMA2; (-) strand; PAM type: NRG; PAM sequence: AAG
gacaagtccatgatgtcaaa

SEQ ID NO: 112501 - DNA, 20 bp, Artificial Sequence
  Description of Artificial Sequence: Synthetic oligonucleotide
  Target: LAMA2; (-) strand; PAM type: NRG; PAM sequence: AAG
atcctcaatttcatgttgac

SEQ ID NO: 112502 - DNA, 20 bp, Artificial Sequence
  Description of Artificial Sequence: Synthetic oligonucleotide
  Target: LAMA2; (-) strand; PAM type: NRG; PAM sequence: GGG
aaccattttaaacaatgaat

SEQ ID NO: 112503 - DNA, 20 bp, Artificial Sequence
  Description of Artificial Sequence: Synthetic oligonucleotide
  Target: LAMA2; (-) strand; PAM type: NRG; PAM sequence: TGG
aaaccattttaaacaatgaa

SEQ ID NO: 112504 - DNA, 20 bp, Artificial Sequence
  Description of Artificial Sequence: Synthetic oligonucleotide
  Target: LAMA2; (-) strand; PAM type: NRG; PAM sequence: AAG
ttccatgttaaattttgttt

SEQ ID NO: 112505 - DNA, 20 bp, Artificial Sequence
  Description of Artificial Sequence: Synthetic oligonucleotide
  Target: LAMA2; (-) strand; PAM type: NRG; PAM sequence: CAG
catgtattgaaagaatttta

SEQ ID NO: 112506 - DNA, 20 bp, Artificial Sequence
  Description of Artificial Sequence: Synthetic oligonucleotide
  Target: LAMA2; (-) strand; PAM type: NRG; PAM sequence: AAG
cactgtctttcatgtattga

SEQ ID NO: 112507 - DNA, 20 bp, Artificial Sequence
  Description of Artificial Sequence: Synthetic oligonucleotide
  Target: LAMA2; (-) strand; PAM type: NRG; PAM sequence: GGG
gagtagcagaatattaatgt

SEQ ID NO: 112508 - DNA, 20 bp, Artificial Sequence
  Description of Artificial Sequence: Synthetic oligonucleotide
  Target: LAMA2; (-) strand; PAM type: NRG; PAM sequence: TGG
tgagtagcagaatattaatg

SEQ ID NO: 112509 - DNA, 20 bp, Artificial Sequence
  Description of Artificial Sequence: Synthetic oligonucleotide
  Target: LAMA2; (-) strand; PAM type: NRG; PAM sequence: CAG
tggtgttggtttgtgagtag

SEQ ID NO: 112510 - DNA, 20 bp, Artificial Sequence
  Description of Artificial Sequence: Synthetic oligonucleotide
  Target: LAMA2; (-) strand; PAM type: NRG; PAM sequence: TAG
agttggtgttggtttgtgag

SEQ ID NO: 112511 - DNA, 20 bp, Artificial Sequence
  Description of Artificial Sequence: Synthetic oligonucleotide
  Target: LAMA2; (-) strand; PAM type: NRG; PAM sequence: GAG
aaaagttggtgttggtttgt

SEQ ID NO: 112512 - DNA, 20 bp, Artificial Sequence
  Description of Artificial Sequence: Synthetic oligonucleotide
  Target: LAMA2; (-) strand; PAM type: NRG; PAM sequence: TGG
gcttagggaaaagttggtgt

SEQ ID NO: 112513 - DNA, 20 bp, Artificial Sequence
  Description of Artificial Sequence: Synthetic oligonucleotide
  Target: LAMA2; (-) strand; PAM type: NRG; PAM sequence: TGG
agaaacgcttagggaaaagt

SEQ ID NO: 112514 - DNA, 20 bp, Artificial Sequence
  Description of Artificial Sequence: Synthetic oligonucleotide
  Target: LAMA2; (-) strand; PAM type: NRG; PAM sequence: AAG
ccaaagaaacgcttagggaa

SEQ ID NO: 112515 - DNA, 20 bp, Artificial Sequence
  Description of Artificial Sequence: Synthetic oligonucleotide
  Target: LAMA2; (-) strand; PAM type: NRG; PAM sequence: GGG
gtttaccaaagaaacgctta

SEQ ID NO: 112516 - DNA, 20 bp, Artificial Sequence
  Description of Artificial Sequence: Synthetic oligonucleotide
  Target: LAMA2; (-) strand; PAM type: NRG; PAM sequence: AGG
agtttaccaaagaaacgctt

SEQ ID NO: 112517 - DNA, 20 bp, Artificial Sequence
  Description of Artificial Sequence: Synthetic oligonucleotide
  Target: LAMA2; (-) strand; PAM type: NRG; PAM sequence: TAG
aagtttaccaaagaaacgct

SEQ ID NO: 112518 - DNA, 20 bp, Artificial Sequence
  Description of Artificial Sequence: Synthetic oligonucleotide
  Target: LAMA2; (-) strand; PAM type: NRG; PAM sequence: AAG
tcctacttagaagtttacca

SEQ ID NO: 112519 - DNA, 20 bp, Artificial Sequence
  Description of Artificial Sequence: Synthetic oligonucleotide
  Target: LAMA2; (-) strand; PAM type: NRG; PAM sequence: AAG
cttttgaaaatcctacttag

SEQ ID NO: 112520 - DNA, 20 bp, Artificial Sequence
  Description of Artificial Sequence: Synthetic oligonucleotide
  Target: LAMA2; (-) strand; PAM type: NRG; PAM sequence: TAG
aggcttttgaaaatcctact

SEQ ID NO: 112521 - DNA, 20 bp, Artificial Sequence
  Description of Artificial Sequence: Synthetic oligonucleotide
  Target: LAMA2; (-) strand; PAM type: NRG; PAM sequence: AGG
gatgttttgttgttgataat

SEQ ID NO: 112522 - DNA, 20 bp, Artificial Sequence
  Description of Artificial Sequence: Synthetic oligonucleotide
  Target: LAMA2; (-) strand; PAM type: NRG; PAM sequence: TAG
agatgttttgttgttgataa

SEQ ID NO: 112523 - DNA, 20 bp, Artificial Sequence
  Description of Artificial Sequence: Synthetic oligonucleotide
  Target: LAMA2; (-) strand; PAM type: NRG; PAM sequence: TAG
gaatggatatttaaatgcct

SEQ ID NO: 112524 - DNA, 20 bp, Artificial Sequence
  Description of Artificial Sequence: Synthetic oligonucleotide
  Target: LAMA2; (-) strand; PAM type: NRG; PAM sequence: TGG
acatgacatgcactgctgaa

SEQ ID NO: 112525 - DNA, 20 bp, Artificial Sequence
  Description of Artificial Sequence: Synthetic oligonucleotide
  Target: LAMA2; (-) strand; PAM type: NRG; PAM sequence: CAG
attgataattagtgatgtta

SEQ ID NO: 112526 - DNA, 20 bp, Artificial Sequence
  Description of Artificial Sequence: Synthetic oligonucleotide
  Target: LAMA2; (-) strand; PAM type: NRG; PAM sequence: TAG
atctttgcagaattgataat

SEQ ID NO: 112527 - DNA, 20 bp, Artificial Sequence
  Description of Artificial Sequence: Synthetic oligonucleotide
  Target: LAMA2; (-) strand; PAM type: NRG; PAM sequence: CAG
gttgaagtgcaaaatctttg

SEQ ID NO: 112528 - DNA, 20 bp, Artificial Sequence
  Description of Artificial Sequence: Synthetic oligonucleotide
  Target: LAMA2; (-) strand; PAM type: NRG; PAM sequence: AAG
gcataatactttatgtgttg

SEQ ID NO: 112529 - DNA, 20 bp, Artificial Sequence
  Description of Artificial Sequence: Synthetic oligonucleotide
  Target: LAMA2; (-) strand; PAM type: NRG; PAM sequence: TAG
atactcttataatcataaat

SEQ ID NO: 112530 - DNA, 20 bp, Artificial Sequence
  Description of Artificial Sequence: Synthetic oligonucleotide
  Target: LAMA2; (-) strand; PAM type: NRG; PAM sequence: AGG
aaaacaccctacgtatacat

SEQ ID NO: 112531 - DNA, 20 bp, Artificial Sequence
  Description of Artificial Sequence: Synthetic oligonucleotide
  Target: LAMA2; (-) strand; PAM type: NRG; PAM sequence: TAG
caaaacaccctacgtataca

SEQ ID NO: 112532 - DNA, 20 bp, Artificial Sequence
  Description of Artificial Sequence: Synthetic oligonucleotide
  Target: LAMA2; (-) strand; PAM type: NRG; PAM sequence: AAG
attcattctagcatcaggag

SEQ ID NO: 112533 - DNA, 20 bp, Artificial Sequence
  Description of Artificial Sequence: Synthetic oligonucleotide
  Target: LAMA2; (-) strand; PAM type: NRG; PAM sequence: GAG
tgtattcattctagcatcag

SEQ ID NO: 112534 - DNA, 20 bp, Artificial Sequence
  Description of Artificial Sequence: Synthetic oligonucleotide
  Target: LAMA2; (-) strand; PAM type: NRG; PAM sequence: AGG
gctgtattcattctagcatc

SEQ ID NO: 112535 - DNA, 20 bp, Artificial Sequence
  Description of Artificial Sequence: Synthetic oligonucleotide
  Target: LAMA2; (-) strand; PAM type: NRG; PAM sequence: CAG
ggctgtattcattctagcat

SEQ ID NO: 112536 - DNA, 20 bp, Artificial Sequence
  Description of Artificial Sequence: Synthetic oligonucleotide
  Target: LAMA2; (-) strand; PAM type: NRG; PAM sequence: TAG
ggactaggctgtattcattc

SEQ ID NO: 112537 - DNA, 20 bp, Artificial Sequence
  Description of Artificial Sequence: Synthetic oligonucleotide
  Target: LAMA2; (-) strand; PAM type: NRG; PAM sequence: AGG
gtcttttcatggctaggact

SEQ ID NO: 112538 - DNA, 20 bp, Artificial Sequence
  Description of Artificial Sequence: Synthetic oligonucleotide
  Target: LAMA2; (-) strand; PAM type: NRG; PAM sequence: TAG
tgtcttttcatggctaggac

SEQ ID NO: 112539 - DNA, 20 bp, Artificial Sequence
  Description of Artificial Sequence: Synthetic oligonucleotide
  Target: LAMA2; (-) strand; PAM type: NRG; PAM sequence: AGG
ggtgatgtcttttcatggct

SEQ ID NO: 112540 - DNA, 20 bp, Artificial Sequence
  Description of Artificial Sequence: Synthetic oligonucleotide
  Target: LAMA2; (-) strand; PAM type: NRG; PAM sequence: TAG
tggtgatgtcttttcatggc

SEQ ID NO: 112541 - DNA, 20 bp, Artificial Sequence
  Description of Artificial Sequence: Synthetic oligonucleotide
  Target: LAMA2; (-) strand; PAM type: NRG; PAM sequence: TGG
ttcctggtgatgtcttttca

SEQ ID NO: 112542 - DNA, 20 bp, Artificial Sequence
  Description of Artificial Sequence: Synthetic oligonucleotide
  Target: LAMA2; (-) strand; PAM type: NRG; PAM sequence: TGG
tttgttttttcctcccttcc

SEQ ID NO: 112543 - DNA, 20 bp, Artificial Sequence
  Description of Artificial Sequence: Synthetic oligonucleotide
  Target: LAMA2; (-) strand; PAM type: NRG; PAM sequence: TAG
gcctgatatttgaactattt

SEQ ID NO: 112544 - DNA, 20 bp, Artificial Sequence
  Description of Artificial Sequence: Synthetic oligonucleotide
  Target: LAMA2; (-) strand; PAM type: NRG; PAM sequence: GGG
tccaaatgtgcctttttaaa

SEQ ID NO: 112545 - DNA, 20 bp, Artificial Sequence
  Description of Artificial Sequence: Synthetic oligonucleotide
  Target: LAMA2; (-) strand; PAM type: NRG; PAM sequence: AGG
ctccaaatgtgcctttttaa

SEQ ID NO: 112546 - DNA, 20 bp, Artificial Sequence
  Description of Artificial Sequence: Synthetic oligonucleotide
  Target: LAMA2; (-) strand; PAM type: NRG; PAM sequence: AAG
actccaaatgtgccttttta

SEQ ID NO: 112547 - DNA, 20 bp, Artificial Sequence
  Description of Artificial Sequence: Synthetic oligonucleotide
  Target: LAMA2; (-) strand; PAM type: NRG; PAM sequence: TAG
taatctgatgtgggtaattg

SEQ ID NO: 112548 - DNA, 20 bp, Artificial Sequence
  Description of Artificial Sequence: Synthetic oligonucleotide
  Target: LAMA2; (-) strand; PAM type: NRG; PAM sequence: GGG
tgatgcccttaatctgatgt

SEQ ID NO: 112549 - DNA, 20 bp, Artificial Sequence
  Description of Artificial Sequence: Synthetic oligonucleotide
  Target: LAMA2; (-) strand; PAM type: NRG; PAM sequence: TGG
atgatgcccttaatctgatg

SEQ ID NO: 112550 - DNA, 20 bp, Artificial Sequence
  Description of Artificial Sequence: Synthetic oligonucleotide
  Target: LAMA2; (-) strand; PAM type: NRG; PAM sequence: CAG
atgtcacctcctctgtgaag

SEQ ID NO: 112551 - DNA, 20 bp, Artificial Sequence
  Description of Artificial Sequence: Synthetic oligonucleotide
  Target: LAMA2; (-) strand; PAM type: NRG; PAM sequence: AAG
caaatgtcacctcctctgtg

SEQ ID NO: 112552 - DNA, 20 bp, Artificial Sequence
  Description of Artificial Sequence: Synthetic oligonucleotide
  Target: LAMA2; (-) strand; PAM type: NRG; PAM sequence: AAG
ttggactcttacctcaggtc

SEQ ID NO: 112553 - DNA, 20 bp, Artificial Sequence
  Description of Artificial Sequence: Synthetic oligonucleotide
  Target: LAMA2; (-) strand; PAM type: NRG; PAM sequence: AGG
tctttttggactcttacctc

SEQ ID NO: 112554 - DNA, 20 bp, Artificial Sequence
  Description of Artificial Sequence: Synthetic oligonucleotide
  Target: LAMA2; (-) strand; PAM type: NRG; PAM sequence: CAG
ctctttttggactcttacct

SEQ ID NO: 112555 - DNA, 20 bp, Artificial Sequence
  Description of Artificial Sequence: Synthetic oligonucleotide
  Target: LAMA2; (-) strand; PAM type: NRG; PAM sequence: TGG
cttctgctatctcctctttt

SEQ ID NO: 112556 - DNA, 20 bp, Artificial Sequence
  Description of Artificial Sequence: Synthetic oligonucleotide
  Target: LAMA2; (-) strand; PAM type: NRG; PAM sequence: TAG
ctcttactggtttcaggaat

SEQ ID NO: 112557 - DNA, 20 bp, Artificial Sequence
  Description of Artificial Sequence: Synthetic oligonucleotide
  Target: LAMA2; (-) strand; PAM type: NRG; PAM sequence: AGG
cctttgctcttactggtttc

SEQ ID NO: 112558 - DNA, 20 bp, Artificial Sequence
  Description of Artificial Sequence: Synthetic oligonucleotide
  Target: LAMA2; (-) strand; PAM type: NRG; PAM sequence: CAG
ccctttgctcttactggttt

SEQ ID NO: 112559 - DNA, 20 bp, Artificial Sequence
  Description of Artificial Sequence: Synthetic oligonucleotide
  Target: LAMA2; (-) strand; PAM type: NRG; PAM sequence: TGG
cttcctccctttgctcttac

SEQ ID NO: 112560 - DNA, 20 bp, Artificial Sequence
  Description of Artificial Sequence: Synthetic oligonucleotide
  Target: LAMA2; (-) strand; PAM type: NRG; PAM sequence: CGG
gttcttttctaaaaacactc

SEQ ID NO: 112561 - DNA, 20 bp, Artificial Sequence
  Description of Artificial Sequence: Synthetic oligonucleotide
  Target: LAMA2; (-) strand; PAM type: NRG; PAM sequence: GAG
cccatttgccaatcttgtat

SEQ ID NO: 112562 - DNA, 20 bp, Artificial Sequence
  Description of Artificial Sequence: Synthetic oligonucleotide
  Target: LAMA2; (-) strand; PAM type: NRG; PAM sequence: TGG
gaagtgtgtatgaacctatg

SEQ ID NO: 112563 - DNA, 20 bp, Artificial Sequence
  Description of Artificial Sequence: Synthetic oligonucleotide
  Target: LAMA2; (-) strand; PAM type: NRG; PAM sequence: AAG
aacatgattatgctgggaag

SEQ ID NO: 112564 - DNA, 20 bp, Artificial Sequence
  Description of Artificial Sequence: Synthetic oligonucleotide
  Target: LAMA2; (-) strand; PAM type: NRG; PAM sequence: AAG
aaaaacatgattatgctggg

SEQ ID NO: 112565 - DNA, 20 bp, Artificial Sequence
  Description of Artificial Sequence: Synthetic oligonucleotide
  Target: LAMA2; (-) strand; PAM type: NRG; PAM sequence: GGG
aaaaaaaacatgattatgct

SEQ ID NO: 112566 - DNA, 20 bp, Artificial Sequence
  Description of Artificial Sequence: Synthetic oligonucleotide
  Target: LAMA2; (-) strand; PAM type: NRG; PAM sequence: TGG
aaaaaaaaacatgattatgc

SEQ ID NO: 112567 - DNA, 20 bp, Artificial Sequence
  Description of Artificial Sequence: Synthetic oligonucleotide
  Target: LAMA2; (-) strand; PAM type: NRG; PAM sequence: TAG
attcagctaccgttataggg

SEQ ID NO: 112568 - DNA, 20 bp, Artificial Sequence
  Description of Artificial Sequence: Synthetic oligonucleotide
  Target: LAMA2; (-) strand; PAM type: NRG; PAM sequence: GGG
tggattcagctaccgttata

SEQ ID NO: 112569 - DNA, 20 bp, Artificial Sequence
  Description of Artificial Sequence: Synthetic oligonucleotide
  Target: LAMA2; (-) strand; PAM type: NRG; PAM sequence: AGG
ttggattcagctaccgttat

SEQ ID NO: 112570 - DNA, 20 bp, Artificial Sequence
  Description of Artificial Sequence: Synthetic oligonucleotide
  Target: LAMA2; (-) strand; PAM type: NRG; PAM sequence: TAG
tttggattcagctaccgtta

SEQ ID NO: 112571 - DNA, 20 bp, Artificial Sequence
  Description of Artificial Sequence: Synthetic oligonucleotide
  Target: LAMA2; (-) strand; PAM type: NRG; PAM sequence: CAG
atgttggtttactttggatt

SEQ ID NO: 112572 - DNA, 20 bp, Artificial Sequence
  Description of Artificial Sequence: Synthetic oligonucleotide
  Target: LAMA2; (-) strand; PAM type: NRG; PAM sequence: TGG
tcagctatgttggtttactt

SEQ ID NO: 112573 - DNA, 20 bp, Artificial Sequence
  Description of Artificial Sequence: Synthetic oligonucleotide
  Target: LAMA2; (-) strand; PAM type: NRG; PAM sequence: TGG
gttggtgtcttcagctatgt

SEQ ID NO: 112574 - DNA, 20 bp, Artificial Sequence
  Description of Artificial Sequence: Synthetic oligonucleotide
  Target: LAMA2; (-) strand; PAM type: NRG; PAM sequence: CAG
tactttgaggttggtgtctt

SEQ ID NO: 112575 - DNA, 20 bp, Artificial Sequence
  Description of Artificial Sequence: Synthetic oligonucleotide
  Target: LAMA2; (-) strand; PAM type: NRG; PAM sequence: TGG
gtggcacagtactttgaggt

SEQ ID NO: 112576 - DNA, 20 bp, Artificial Sequence
  Description of Artificial Sequence: Synthetic oligonucleotide
  Target: LAMA2; (-) strand; PAM type: NRG; PAM sequence: AGG
tgttgtggcacagtactttg

SEQ ID NO: 112577 - DNA, 20 bp, Artificial Sequence
  Description of Artificial Sequence: Synthetic oligonucleotide
  Target: LAMA2; (-) strand; PAM type: NRG; PAM sequence: GAG
gtgttgtggcacagtacttt

SEQ ID NO: 112578 - DNA, 20 bp, Artificial Sequence
  Description of Artificial Sequence: Synthetic oligonucleotide
  Target: LAMA2; (-) strand; PAM type: NRG; PAM sequence: CAG
gtacaggctgtgttgtggca

SEQ ID NO: 112579 - DNA, 20 bp, Artificial Sequence
  Description of Artificial Sequence: Synthetic oligonucleotide
  Target: LAMA2; (-) strand; PAM type: NRG; PAM sequence: TGG
actgtgtacaggctgtgttg

SEQ ID NO: 112580 - DNA, 20 bp, Artificial Sequence
  Description of Artificial Sequence: Synthetic oligonucleotide
  Target: LAMA2; (-) strand; PAM type: NRG; PAM sequence: AGG
ggtgaatgcacactgtgtac

SEQ ID NO: 112581 - DNA, 20 bp, Artificial Sequence
  Description of Artificial Sequence: Synthetic oligonucleotide
  Target: LAMA2; (-) strand; PAM type: NRG; PAM sequence: CAG
gggtgaatgcacactgtgta

SEQ ID NO: 112582 - DNA, 20 bp, Artificial Sequence
  Description of Artificial Sequence: Synthetic oligonucleotide
  Target: LAMA2; (-) strand; PAM type: NRG; PAM sequence: GGG
caagctgaaggcaggcatat

SEQ ID NO: 112583 - DNA, 20 bp, Artificial Sequence
  Description of Artificial Sequence: Synthetic oligonucleotide
  Target: LAMA2; (-) strand; PAM type: NRG; PAM sequence: TGG
tcaagctgaaggcaggcata

SEQ ID NO: 112584 - DNA, 20 bp, Artificial Sequence
  Description of Artificial Sequence: Synthetic oligonucleotide
  Target: LAMA2; (-) strand; PAM type: NRG; PAM sequence: AGG
ggctaaatcaagctgaaggc

SEQ ID NO: 112585 - DNA, 20 bp, Artificial Sequence
  Description of Artificial Sequence: Synthetic oligonucleotide
  Target: LAMA2; (-) strand; PAM type: NRG; PAM sequence: CAG
tggctaaatcaagctgaagg

SEQ ID NO: 112586 - DNA, 20 bp, Artificial Sequence
  Description of Artificial Sequence: Synthetic oligonucleotide
  Target: LAMA2; (-) strand; PAM type: NRG; PAM sequence: AGG
gcttggctaaatcaagctga

SEQ ID NO: 112587 - DNA, 20 bp, Artificial Sequence
  Description of Artificial Sequence: Synthetic oligonucleotide
  Target: LAMA2; (-) strand; PAM type: NRG; PAM sequence: AAG
tgcttggctaaatcaagctg

SEQ ID NO: 112588 - DNA, 20 bp, Artificial Sequence
  Description of Artificial Sequence: Synthetic oligonucleotide
  Target: LAMA2; (-) strand; PAM type: NRG; PAM sequence: AAG
atagagtgcttggctaaatc

SEQ ID NO: 112589 - DNA, 20 bp, Artificial Sequence
  Description of Artificial Sequence: Synthetic oligonucleotide
  Target: LAMA2; (-) strand; PAM type: NRG; PAM sequence: TGG
catttccgagatagagtgct

SEQ ID NO: 112590 - DNA, 20 bp, Artificial Sequence
  Description of Artificial Sequence: Synthetic oligonucleotide
  Target: LAMA2; (-) strand; PAM type: NRG; PAM sequence: GAG
ccacgaacatttccgagata

SEQ ID NO: 112591 - DNA, 20 bp, Artificial Sequence
  Description of Artificial Sequence: Synthetic oligonucleotide
  Target: LAMA2; (-) strand; PAM type: NRG; PAM sequence: TAG
ggccacgaacatttccgaga

SEQ ID NO: 112592 - DNA, 20 bp, Artificial Sequence
  Description of Artificial Sequence: Synthetic oligonucleotide
  Target: LAMA2; (-) strand; PAM type: NRG; PAM sequence: GAG
cgtgggccacgaacatttcc

SEQ ID NO: 112593 - DNA, 20 bp, Artificial Sequence
  Description of Artificial Sequence: Synthetic oligonucleotide
  Target: LAMA2; (-) strand; PAM type: NRG; PAM sequence: GGG
cacaatgacggaaaagacgt

SEQ ID NO: 112594 - DNA, 20 bp, Artificial Sequence
  Description of Artificial Sequence: Synthetic oligonucleotide
  Target: LAMA2; (-) strand; PAM type: NRG; PAM sequence: TGG
gcacaatgacggaaaagacg

SEQ ID NO: 112595 - DNA, 20 bp, Artificial Sequence
  Description of Artificial Sequence: Synthetic oligonucleotide
  Target: LAMA2; (-) strand; PAM type: NRG; PAM sequence: AAG
aaaaatgcacaatgacggaa

SEQ ID NO: 112596 - DNA, 20 bp, Artificial Sequence
  Description of Artificial Sequence: Synthetic oligonucleotide
  Target: LAMA2; (-) strand; PAM type: NRG; PAM sequence: CGG
ggggcaaaaatgcacaatga

SEQ ID NO: 112597 - DNA, 20 bp, Artificial Sequence
  Description of Artificial Sequence: Synthetic oligonucleotide
  Target: LAMA2; (-) strand; PAM type: NRG; PAM sequence: GGG
actgccaagtgttagcgatg

SEQ ID NO: 112598 - DNA, 20 bp, Artificial Sequence
  Description of Artificial Sequence: Synthetic oligonucleotide
  Target: LAMA2; (-) strand; PAM type: NRG; PAM sequence: GGG
cactgccaagtgttagcgat

SEQ ID NO: 112599 - DNA, 20 bp, Artificial Sequence
  Description of Artificial Sequence: Synthetic oligonucleotide
  Target: LAMA2; (-) strand; PAM type: NRG; PAM sequence: TGG
acactgccaagtgttagcga

SEQ ID NO: 112600 - DNA, 20 bp, Artificial Sequence
  Description of Artificial Sequence: Synthetic oligonucleotide
  Target: LAMA2; (-) strand; PAM type: NRG; PAM sequence: TAG
gggctgacactgccaagtgt

SEQ ID NO: 112601 - DNA, 20 bp, Artificial Sequence
  Description of Artificial Sequence: Synthetic oligonucleotide
  Target: LAMA2; (-) strand; PAM type: NRG; PAM sequence: AAG
aagaaagggctgacactgcc

SEQ ID NO: 112602 - DNA, 20 bp, Artificial Sequence
  Description of Artificial Sequence: Synthetic oligonucleotide
  Target: LAMA2; (-) strand; PAM type: NRG; PAM sequence: GGG
atgacaaggggtataagaaa

SEQ ID NO: 112603 - DNA, 20 bp, Artificial Sequence
  Description of Artificial Sequence: Synthetic oligonucleotide
  Target: LAMA2; (-) strand; PAM type: NRG; PAM sequence: AGG
gatgacaaggggtataagaa

SEQ ID NO: 112604 - DNA, 20 bp, Artificial Sequence
  Description of Artificial Sequence: Synthetic oligonucleotide
  Target: LAMA2; (-) strand; PAM type: NRG; PAM sequence: AAG
tgatgacaaggggtataaga

SEQ ID NO: 112605 - DNA, 20 bp, Artificial Sequence
  Description of Artificial Sequence: Synthetic oligonucleotide
  Target: LAMA2; (-) strand; PAM type: NRG; PAM sequence: AAG
agtttgatgacaaggggtat

SEQ ID NO: 112606 - DNA, 20 bp, Artificial Sequence
  Description of Artificial Sequence: Synthetic oligonucleotide
  Target: LAMA2; (-) strand; PAM type: NRG; PAM sequence: GGG
gaatatagtttgatgacaag

SEQ ID NO: 112607 - DNA, 20 bp, Artificial Sequence
  Description of Artificial Sequence: Synthetic oligonucleotide
  Target: LAMA2; (-) strand; PAM type: NRG; PAM sequence: GGG
tgaatatagtttgatgacaa

SEQ ID NO: 112608 - DNA, 20 bp, Artificial Sequence
  Description of Artificial Sequence: Synthetic oligonucleotide
  Target: LAMA2; (-) strand; PAM type: NRG; PAM sequence: AGG
gtgaatatagtttgatgaca

SEQ ID NO: 112609 - DNA, 20 bp, Artificial Sequence
  Description of Artificial Sequence: Synthetic oligonucleotide
  Target: LAMA2; (-) strand; PAM type: NRG; PAM sequence: AAG
tgtgaatatagtttgatgac

SEQ ID NO: 112610 - DNA, 20 bp, Artificial Sequence
  Description of Artificial Sequence: Synthetic oligonucleotide
  Target: LAMA2; (-) strand; PAM type: NRG; PAM sequence: TAG
ttaaaaggaaaatgtgaata

SEQ ID NO: 112611 - DNA, 20 bp, Artificial Sequence
  Description of Artificial Sequence: Synthetic oligonucleotide
  Target: LAMA2; (-) strand; PAM type: NRG; PAM sequence: AGG
acatatcacttcaccttaaa

SEQ ID NO: 112612 - DNA, 20 bp, Artificial Sequence
  Description of Artificial Sequence: Synthetic oligonucleotide
  Target: LAMA2; (-) strand; PAM type: NRG; PAM sequence: AAG
tacatatcacttcaccttaa

SEQ ID NO: 112613 - DNA, 20 bp, Artificial Sequence
  Description of Artificial Sequence: Synthetic oligonucleotide
  Target: LAMA2; (-) strand; PAM type: NRG; PAM sequence: CAG
taaaaaatataggattattt

SEQ ID NO: 112614 - DNA, 20 bp, Artificial Sequence
  Description of Artificial Sequence: Synthetic oligonucleotide
  Target: LAMA2; (-) strand; PAM type: NRG; PAM sequence: AGG
actaaaacattaaaaaatat

SEQ ID NO: 112615 - DNA, 20 bp, Artificial Sequence
  Description of Artificial Sequence: Synthetic oligonucleotide
  Target: LAMA2; (-) strand; PAM type: NRG; PAM sequence: TAG
cactaaaacattaaaaaata

SEQ ID NO: 112616 - DNA, 20 bp, Artificial Sequence
  Description of Artificial Sequence: Synthetic oligonucleotide
  Target: LAMA2; (-) strand; PAM type: NRG; PAM sequence: AAG
aagtattagcacagctcaaa

SEQ ID NO: 112617 - DNA, 20 bp, Artificial Sequence
  Description of Artificial Sequence: Synthetic oligonucleotide
  Target: LAMA2; (-) strand; PAM type: NRG; PAM sequence: CAG
tcctgatcaaagtattagca

SEQ ID NO: 112618 - DNA, 20 bp, Artificial Sequence
  Description of Artificial Sequence: Synthetic oligonucleotide
  Target: LAMA2; (-) strand; PAM type: NRG; PAM sequence: TAG
aacaatcctgatcaaagtat

SEQ ID NO: 112619 - DNA, 20 bp, Artificial Sequence
  Description of Artificial Sequence: Synthetic oligonucleotide
  Target: LAMA2; (-) strand; PAM type: NRG; PAM sequence: AAG
aacaataacaatcctgatca

SEQ ID NO: 112620 - DNA, 20 bp, Artificial Sequence
  Description of Artificial Sequence: Synthetic oligonucleotide
  Target: LAMA2; (-) strand; PAM type: NRG; PAM sequence: GAG
cttacacaagtgtgtaatta

SEQ ID NO: 112621 - DNA, 20 bp, Artificial Sequence
  Description of Artificial Sequence: Synthetic oligonucleotide
  Target: LAMA2; (-) strand; PAM type: NRG; PAM sequence: TAG
aacttacacaagtgtgtaat

SEQ ID NO: 112622 - DNA, 20 bp, Artificial Sequence
  Description of Artificial Sequence: Synthetic oligonucleotide
  Target: LAMA2; (-) strand; PAM type: NRG; PAM sequence: AAG
gacctgctaaaaacttacac

SEQ ID NO: 112623 - DNA, 20 bp, Artificial Sequence
  Description of Artificial Sequence: Synthetic oligonucleotide
  Target: LAMA2; (-) strand; PAM type: NRG; PAM sequence: GGG
cttatgggaaaatagggttg

SEQ ID NO: 112624 - DNA, 20 bp, Artificial Sequence
  Description of Artificial Sequence: Synthetic oligonucleotide
  Target: LAMA2; (-) strand; PAM type: NRG; PAM sequence: GGG
gcttatgggaaaatagggtt

SEQ ID NO: 112625 - DNA, 20 bp, Artificial Sequence
  Description of Artificial Sequence: Synthetic oligonucleotide
  Target: LAMA2; (-) strand; PAM type: NRG; PAM sequence: TGG
ggcttatgggaaaatagggt

SEQ ID NO: 112626 - DNA, 20 bp, Artificial Sequence
  Description of Artificial Sequence: Synthetic oligonucleotide
  Target: LAMA2; (-) strand; PAM type: NRG; PAM sequence: GGG
acagggcttatgggaaaata

SEQ ID NO: 112627 - DNA, 20 bp, Artificial Sequence
  Description of Artificial Sequence: Synthetic oligonucleotide
  Target: LAMA2; (-) strand; PAM type: NRG; PAM sequence: AGG
aacagggcttatgggaaaat

SEQ ID NO: 112628 - DNA, 20 bp, Artificial Sequence
  Description of Artificial Sequence: Synthetic oligonucleotide
  Target: LAMA2; (-) strand; PAM type: NRG; PAM sequence: TAG
taacagggcttatgggaaaa

SEQ ID NO: 112629 - DNA, 20 bp, Artificial Sequence
  Description of Artificial Sequence: Synthetic oligonucleotide
  Target: LAMA2; (-) strand; PAM type: NRG; PAM sequence: GGG
ttacaaataacagggcttat

SEQ ID NO: 112630 - DNA, 20 bp, Artificial Sequence
  Description of Artificial Sequence: Synthetic oligonucleotide
  Target: LAMA2; (-) strand; PAM type: NRG; PAM sequence: TGG
cttacaaataacagggctta

SEQ ID NO: 112631 - DNA, 20 bp, Artificial Sequence
  Description of Artificial Sequence: Synthetic oligonucleotide
  Target: LAMA2; (-) strand; PAM type: NRG; PAM sequence: GGG
aattattcttacaaataaca

SEQ ID NO: 112632 - DNA, 20 bp, Artificial Sequence
  Description of Artificial Sequence: Synthetic oligonucleotide
  Target: LAMA2; (-) strand; PAM type: NRG; PAM sequence: AGG
aaattattcttacaaataac

SEQ ID NO: 112633 - DNA, 20 bp, Artificial Sequence
  Description of Artificial Sequence: Synthetic oligonucleotide
  Target: LAMA2; (-) strand; PAM type: NRG; PAM sequence: CAG
aaaattattcttacaaataa

SEQ ID NO: 112634 - DNA, 20 bp, Artificial Sequence
  Description of Artificial Sequence: Synthetic oligonucleotide
  Target: LAMA2; (-) strand; PAM type: NRG; PAM sequence: GAG
aacaaacaaacaaacaccag

SEQ ID NO: 112635 - DNA, 20 bp, Artificial Sequence
  Description of Artificial Sequence: Synthetic oligonucleotide
  Target: LAMA2; (-) strand; PAM type: NRG; PAM sequence: AGG
caaacaaacaaacaaacacc

SEQ ID NO: 112636 - DNA, 20 bp, Artificial Sequence
  Description of Artificial Sequence: Synthetic oligonucleotide
  Target: LAMA2; (-) strand; PAM type: NRG; PAM sequence: CAG
acaaacaaacaaacaaacac

SEQ ID NO: 112637 - DNA, 20 bp, Artificial Sequence
  Description of Artificial Sequence: Synthetic oligonucleotide
  Target: LAMA2; (-) strand; PAM type: NRG; PAM sequence: AAG
tgtgataagtgttttcctga

SEQ ID NO: 112638 - DNA, 20 bp, Artificial Sequence
  Description of Artificial Sequence: Synthetic oligonucleotide
  Target: LAMA2; (-) strand; PAM type: NRG; PAM sequence: AAG
tctttatgttcaaatgtgat

SEQ ID NO: 112639 - DNA, 20 bp, Artificial Sequence
  Description of Artificial Sequence: Synthetic oligonucleotide
  Target: LAMA2; (-) strand; PAM type: NRG; PAM sequence: AGG
aatcactcctgctctttagt

SEQ ID NO: 112640 - DNA, 20 bp, Artificial Sequence
  Description of Artificial Sequence: Synthetic oligonucleotide
  Target: LAMA2; (-) strand; PAM type: NRG; PAM sequence: TAG
aaatcactcctgctctttag

SEQ ID NO: 112641 - DNA, 20 bp, Artificial Sequence
  Description of Artificial Sequence: Synthetic oligonucleotide
  Target: LAMA2; (-) strand; PAM type: NRG; PAM sequence: TAG
atgaaatcactcctgctctt

SEQ ID NO: 112642 - DNA, 20 bp, Artificial Sequence
  Description of Artificial Sequence: Synthetic oligonucleotide
  Target: LAMA2; (-) strand; PAM type: NRG; PAM sequence: TAG
ttttcttagtctacctcttt

SEQ ID NO: 112643 - DNA, 20 bp, Artificial Sequence
  Description of Artificial Sequence: Synthetic oligonucleotide
  Target: LAMA2; (-) strand; PAM type: NRG; PAM sequence: TAG
aggtctttatgacattttct

SEQ ID NO: 112644 - DNA, 20 bp, Artificial Sequence
  Description of Artificial Sequence: Synthetic oligonucleotide
  Target: LAMA2; (-) strand; PAM type: NRG; PAM sequence: AGG
tttctaaaactgacattcta

SEQ ID NO: 112645 - DNA, 20 bp, Artificial Sequence
  Description of Artificial Sequence: Synthetic oligonucleotide
  Target: LAMA2; (-) strand; PAM type: NRG; PAM sequence: AAG
atttctaaaactgacattct

SEQ ID NO: 112646 - DNA, 20 bp, Artificial Sequence
  Description of Artificial Sequence: Synthetic oligonucleotide
  Target: LAMA2; (-) strand; PAM type: NRG; PAM sequence: AAG
ttgacagattactctttcta

SEQ ID NO: 112647 - DNA, 20 bp, Artificial Sequence
  Description of Artificial Sequence: Synthetic oligonucleotide
  Target: LAMA2; (-) strand; PAM type: NRG; PAM sequence: CAG
acttttaaaaatatctttga

SEQ ID NO: 112648 - DNA, 20 bp, Artificial Sequence
  Description of Artificial Sequence: Synthetic oligonucleotide
  Target: LAMA2; (-) strand; PAM type: NRG; PAM sequence: AAG
tttagaagcatgagaaaaat

SEQ ID NO: 112649 - DNA, 20 bp, Artificial Sequence
  Description of Artificial Sequence: Synthetic oligonucleotide
  Target: LAMA2; (-) strand; PAM type: NRG; PAM sequence: GAG
aatgtgaattttagaagcat

SEQ ID NO: 112650 - DNA, 20 bp, Artificial Sequence
  Description of Artificial Sequence: Synthetic oligonucleotide
  Target: LAMA2; (-) strand; PAM type: NRG; PAM sequence: AAG
aatcttaatgtgaattttag

SEQ ID NO: 112651 - DNA, 20 bp, Artificial Sequence
  Description of Artificial Sequence: Synthetic oligonucleotide
  Target: LAMA2; (-) strand; PAM type: NRG; PAM sequence: TAG
tttaatcttaatgtgaattt

SEQ ID NO: 112652 - DNA, 20 bp, Artificial Sequence
  Description of Artificial Sequence: Synthetic oligonucleotide
  Target: LAMA2; (-) strand; PAM type: NRG; PAM sequence: CAG
taactaaattttacttgcag

SEQ ID NO: 112653 - DNA, 20 bp, Artificial Sequence
  Description of Artificial Sequence: Synthetic oligonucleotide
  Target: LAMA2; (-) strand; PAM type: NRG; PAM sequence: CAG
agctaactaaattttacttg

SEQ ID NO: 112654 - DNA, 20 bp, Artificial Sequence
  Description of Artificial Sequence: Synthetic oligonucleotide
  Target: LAMA2; (-) strand; PAM type: NRG; PAM sequence: CAG
aatatcaccatttcaatgct

SEQ ID NO: 112655 - DNA, 20 bp, Artificial Sequence
  Description of Artificial Sequence: Synthetic oligonucleotide
  Target: LAMA2; (-) strand; PAM type: NRG; PAM sequence: AAG
tctaggtgaatattggggct

SEQ ID NO: 112656 - DNA, 20 bp, Artificial Sequence
  Description of Artificial Sequence: Synthetic oligonucleotide
  Target: LAMA2; (-) strand; PAM type: NRG; PAM sequence: GGG
tacgttctaggtgaatattg

SEQ ID NO: 112657 - DNA, 20 bp, Artificial Sequence
  Description of Artificial Sequence: Synthetic oligonucleotide
  Target: LAMA2; (-) strand; PAM type: NRG; PAM sequence: GGG
ctacgttctaggtgaatatt

SEQ ID NO: 112658 - DNA, 20 bp, Artificial Sequence
  Description of Artificial Sequence: Synthetic oligonucleotide
  Target: LAMA2; (-) strand; PAM type: NRG; PAM sequence: TGG
gctacgttctaggtgaatat

SEQ ID NO: 112659 - DNA, 20 bp, Artificial Sequence
  Description of Artificial Sequence: Synthetic oligonucleotide
  Target: LAMA2; (-) strand; PAM type: NRG; PAM sequence: AGG
ttttggagcagctacgttct

SEQ ID NO: 112660 - DNA, 20 bp, Artificial Sequence
  Description of Artificial Sequence: Synthetic oligonucleotide
  Target: LAMA2; (-) strand; PAM type: NRG; PAM sequence: TAG
attttggagcagctacgttc

SEQ ID NO: 112661 - DNA, 20 bp, Artificial Sequence
  Description of Artificial Sequence: Synthetic oligonucleotide
  Target: LAMA2; (-) strand; PAM type: NRG; PAM sequence: CAG
ttaattatgctattttggag

SEQ ID NO: 112662 - DNA, 20 bp, Artificial Sequence
  Description of Artificial Sequence: Synthetic oligonucleotide
  Target: LAMA2; (-) strand; PAM type: NRG; PAM sequence: GAG
agattaattatgctattttg

SEQ ID NO: 112663 - DNA, 20 bp, Artificial Sequence
  Description of Artificial Sequence: Synthetic oligonucleotide
  Target: LAMA2; (-) strand; PAM type: NRG; PAM sequence: TGG
atagattaattatgctattt

SEQ ID NO: 112664 - DNA, 20 bp, Artificial Sequence
  Description of Artificial Sequence: Synthetic oligonucleotide
  Target: LAMA2; (-) strand; PAM type: NRG; PAM sequence: TAG
gatgtctggtaaagttagta

SEQ ID NO: 112665 - DNA, 20 bp, Artificial Sequence
  Description of Artificial Sequence: Synthetic oligonucleotide
  Target: LAMA2; (-) strand; PAM type: NRG; PAM sequence: TAG
accttgatgtctggtaaagt

SEQ ID NO: 112666 - DNA, 20 bp, Artificial Sequence
  Description of Artificial Sequence: Synthetic oligonucleotide
  Target: LAMA2; (-) strand; PAM type: NRG; PAM sequence: AAG
ttgaaccttgatgtctggta

SEQ ID NO: 112667 - DNA, 20 bp, Artificial Sequence
  Description of Artificial Sequence: Synthetic oligonucleotide
  Target: LAMA2; (-) strand; PAM type: NRG; PAM sequence: TGG
ctcttttgaaccttgatgtc

SEQ ID NO: 112668 - DNA, 20 bp, Artificial Sequence
  Description of Artificial Sequence: Synthetic oligonucleotide
  Target: LAMA2; (-) strand; PAM type: NRG; PAM sequence: AGG
tttcataattaataaatgct

SEQ ID NO: 112669 - DNA, 20 bp, Artificial Sequence
  Description of Artificial Sequence: Synthetic oligonucleotide
  Target: LAMA2; (-) strand; PAM type: NRG; PAM sequence: TAG
ctttcataattaataaatgc

SEQ ID NO: 112670 - DNA, 20 bp, Artificial Sequence
  Description of Artificial Sequence: Synthetic oligonucleotide
  Target: LAMA2; (-) strand; PAM type: NRG; PAM sequence: AAG
tctgaatgcatttactaaaa

SEQ ID NO: 112671 - DNA, 20 bp, Artificial Sequence
  Description of Artificial Sequence: Synthetic oligonucleotide
  Target: LAMA2; (-) strand; PAM type: NRG; PAM sequence: GAG
tttcgacatagaatagaata

SEQ ID NO: 112672 - DNA, 20 bp, Artificial Sequence
  Description of Artificial Sequence: Synthetic oligonucleotide
  Target: LAMA2; (-) strand; PAM type: NRG; PAM sequence: TAG
tatttcgacatagaatagaa

SEQ ID NO: 112673 - DNA, 20 bp, Artificial Sequence
  Description of Artificial Sequence: Synthetic oligonucleotide
  Target: LAMA2; (-) strand; PAM type: NRG; PAM sequence: TAG
tataatatttcgacatagaa

SEQ ID NO: 112674 - DNA, 20 bp, Artificial Sequence
  Description of Artificial Sequence: Synthetic oligonucleotide
  Target: LAMA2; (-) strand; PAM type: NRG; PAM sequence: TAG
cactctataatatttcgaca

SEQ ID NO: 112675 - DNA, 20 bp, Artificial Sequence
  Description of Artificial Sequence: Synthetic oligonucleotide
  Target: LAMA2; (-) strand; PAM type: NRG; PAM sequence: AGG
gaaataatatgagtccttcc

SEQ ID NO: 112676 - DNA, 20 bp, Artificial Sequence
  Description of Artificial Sequence: Synthetic oligonucleotide
  Target: LAMA2; (-) strand; PAM type: NRG; PAM sequence: CAG
agaaataatatgagtccttc

SEQ ID NO: 112677 - DNA, 20 bp, Artificial Sequence
  Description of Artificial Sequence: Synthetic oligonucleotide
  Target: LAMA2; (-) strand; PAM type: NRG; PAM sequence: GAG
tatgggatgagaaataatat

SEQ ID NO: 112678 - DNA, 20 bp, Artificial Sequence
  Description of Artificial Sequence: Synthetic oligonucleotide
  Target: LAMA2; (-) strand; PAM type: NRG; PAM sequence: GAG
tgaattggtgactatgggat

SEQ ID NO: 112679 - DNA, 20 bp, Artificial Sequence
  Description of Artificial Sequence: Synthetic oligonucleotide
  Target: LAMA2; (-) strand; PAM type: NRG; PAM sequence: GGG
ggctttgaattggtgactat

SEQ ID NO: 112680 - DNA, 20 bp, Artificial Sequence
  Description of Artificial Sequence: Synthetic oligonucleotide
  Target: LAMA2; (-) strand; PAM type: NRG; PAM sequence: TGG
tggctttgaattggtgacta

SEQ ID NO: 112681 - DNA, 20 bp, Artificial Sequence
  Description of Artificial Sequence: Synthetic oligonucleotide
  Target: LAMA2; (-) strand; PAM type: NRG; PAM sequence: TGG
aggtaagtctggctttgaat

SEQ ID NO: 112682 - DNA, 20 bp, Artificial Sequence
  Description of Artificial Sequence: Synthetic oligonucleotide
  Target: LAMA2; (-) strand; PAM type: NRG; PAM sequence: TGG
taggagaaacaaggtaagtc

SEQ ID NO: 112683 - DNA, 20 bp, Artificial Sequence
  Description of Artificial Sequence: Synthetic oligonucleotide
  Target: LAMA2; (-) strand; PAM type: NRG; PAM sequence: AAG
aacactaggagaaacaaggt

SEQ ID NO: 112684 - DNA, 20 bp, Artificial Sequence
  Description of Artificial Sequence: Synthetic oligonucleotide
  Target: LAMA2; (-) strand; PAM type: NRG; PAM sequence: AGG
agaaaacactaggagaaaca

SEQ ID NO: 112685 - DNA, 20 bp, Artificial Sequence
  Description of Artificial Sequence: Synthetic oligonucleotide
  Target: LAMA2; (-) strand; PAM type: NRG; PAM sequence: AAG
tagaaaacactaggagaaac

SEQ ID NO: 112686 - DNA, 20 bp, Artificial Sequence
  Description of Artificial Sequence: Synthetic oligonucleotide
  Target: LAMA2; (-) strand; PAM type: NRG; PAM sequence: GAG
aattcattagaaaacactag

SEQ ID NO: 112687 - DNA, 20 bp, Artificial Sequence
  Description of Artificial Sequence: Synthetic oligonucleotide
  Target: LAMA2; (-) strand; PAM type: NRG; PAM sequence: AGG
ttaattcattagaaaacact

SEQ ID NO: 112688 - DNA, 20 bp, Artificial Sequence
  Description of Artificial Sequence: Synthetic oligonucleotide
  Target: LAMA2; (-) strand; PAM type: NRG; PAM sequence: TAG
tttaattcattagaaaacac

SEQ ID NO: 112689 - DNA, 20 bp, Artificial Sequence
  Description of Artificial Sequence: Synthetic oligonucleotide
  Target: LAMA2; (-) strand; PAM type: NRG; PAM sequence: TAG
ccccagttcatttaattcat

SEQ ID NO: 112690 - DNA, 20 bp, Artificial Sequence
  Description of Artificial Sequence: Synthetic oligonucleotide
  Target: LAMA2; (-) strand; PAM type: NRG; PAM sequence: CAG
cacagagctgtagatccccc

SEQ ID NO: 112691 - DNA, 20 bp, Artificial Sequence
  Description of Artificial Sequence: Synthetic oligonucleotide
  Target: LAMA2; (-) strand; PAM type: NRG; PAM sequence: TAG
agtggctaaacacagagctg

SEQ ID NO: 112692 - DNA, 20 bp, Artificial Sequence
  Description of Artificial Sequence: Synthetic oligonucleotide
  Target: LAMA2; (-) strand; PAM type: NRG; PAM sequence: GAG
actgggagtggctaaacaca

SEQ ID NO: 112693 - DNA, 20 bp, Artificial Sequence
  Description of Artificial Sequence: Synthetic oligonucleotide
  Target: LAMA2; (-) strand; PAM type: NRG; PAM sequence: CAG
ggactgggagtggctaaaca

SEQ ID NO: 112694 - DNA, 20 bp, Artificial Sequence
  Description of Artificial Sequence: Synthetic oligonucleotide
  Target: LAMA2; (-) strand; PAM type: NRG; PAM sequence: TGG
aaagagttgtggactgggag

SEQ ID NO: 112695 - DNA, 20 bp, Artificial Sequence
  Description of Artificial Sequence: Synthetic oligonucleotide
  Target: LAMA2; (-) strand; PAM type: NRG; PAM sequence: GAG
gggaaagagttgtggactgg

SEQ ID NO: 112696 - DNA, 20 bp, Artificial Sequence
  Description of Artificial Sequence: Synthetic oligonucleotide
  Target: LAMA2; (-) strand; PAM type: NRG; PAM sequence: GGG
gcgggaaagagttgtggact

SEQ ID NO: 112697 - DNA, 20 bp, Artificial Sequence
  Description of Artificial Sequence: Synthetic oligonucleotide
  Target: LAMA2; (-) strand; PAM type: NRG; PAM sequence: TGG
tgcgggaaagagttgtggac

SEQ ID NO: 112698 - DNA, 20 bp, Artificial Sequence
  Description of Artificial Sequence: Synthetic oligonucleotide
  Target: LAMA2; (-) strand; PAM type: NRG; PAM sequence: TGG
atacctgcgggaaagagttg

SEQ ID NO: 112699 - DNA, 20 bp, Artificial Sequence
  Description of Artificial Sequence: Synthetic oligonucleotide
  Target: LAMA2; (-) strand; PAM type: NRG; PAM sequence: GAG
gtggagatacctgcgggaaa

SEQ ID NO: 112700 - DNA, 20 bp, Artificial Sequence
  Description of Artificial Sequence: Synthetic oligonucleotide
  Target: LAMA2; (-) strand; PAM type: NRG; PAM sequence: AAG
ttgtggagatacctgcggga

SEQ ID NO: 112701 - DNA, 20 bp, Artificial Sequence
  Description of Artificial Sequence: Synthetic oligonucleotide
  Target: LAMA2; (-) strand; PAM type: NRG; PAM sequence: GGG
gcgattgtggagatacctgc

SEQ ID NO: 112702 - DNA, 20 bp, Artificial Sequence
  Description of Artificial Sequence: Synthetic oligonucleotide
  Target: LAMA2; (-) strand; PAM type: NRG; PAM sequence: CGG
tgcgattgtggagatacctg

SEQ ID NO: 112703 - DNA, 20 bp, Artificial Sequence
  Description of Artificial Sequence: Synthetic oligonucleotide
  Target: LAMA2; (-) strand; PAM type: NRG; PAM sequence: GAG
ctgatgttactgcgattgtg

SEQ ID NO: 112704 - DNA, 20 bp, Artificial Sequence
  Description of Artificial Sequence: Synthetic oligonucleotide
  Target: LAMA2; (-) strand; PAM type: NRG; PAM sequence: TGG
gtctgatgttactgcgattg

SEQ ID NO: 112705 - DNA, 20 bp, Artificial Sequence
  Description of Artificial Sequence: Synthetic oligonucleotide
  Target: LAMA2; (-) strand; PAM type: NRG; PAM sequence: AGG
aaatattttttccaaacatg

SEQ ID NO: 112706 - DNA, 20 bp, Artificial Sequence
  Description of Artificial Sequence: Synthetic oligonucleotide
  Target: LAMA2; (-) strand; PAM type: NRG; PAM sequence: GAG
aaaatattttttccaaacat

SEQ ID NO: 112707 - DNA, 20 bp, Artificial Sequence
  Description of Artificial Sequence: Synthetic oligonucleotide
  Target: LAMA2; (-) strand; PAM type: NRG; PAM sequence: AAG
aattaatgaatatctaagat

SEQ ID NO: 112708 - DNA, 20 bp, Artificial Sequence
  Description of Artificial Sequence: Synthetic oligonucleotide
  Target: LAMA2; (-) strand; PAM type: NRG; PAM sequence: AAG
tgcataattaatgaatatct

SEQ ID NO: 112709 - DNA, 20 bp, Artificial Sequence
  Description of Artificial Sequence: Synthetic oligonucleotide
  Target: LAMA2; (-) strand; PAM type: NRG; PAM sequence: TGG
aatatatgtttaatcaatat

SEQ ID NO: 112710 - DNA, 20 bp, Artificial Sequence
  Description of Artificial Sequence: Synthetic oligonucleotide
  Target: LAMA2; (-) strand; PAM type: NRG; PAM sequence: GAG
gtatagcaaattgcctcaca

SEQ ID NO: 112711 - DNA, 20 bp, Artificial Sequence
  Description of Artificial Sequence: Synthetic oligonucleotide
  Target: LAMA2; (-) strand; PAM type: NRG; PAM sequence: CAG
tagtatagcaaattgcctca

SEQ ID NO: 112712 - DNA, 20 bp, Artificial Sequence
  Description of Artificial Sequence: Synthetic oligonucleotide
  Target: LAMA2; (-) strand; PAM type: NRG; PAM sequence: TAG
ggatgacaaagattttagta

SEQ ID NO: 112713 - DNA, 20 bp, Artificial Sequence
  Description of Artificial Sequence: Synthetic oligonucleotide
  Target: LAMA2; (-) strand; PAM type: NRG; PAM sequence: TAG
ttgtaggatgacaaagattt

SEQ ID NO: 112714 - DNA, 20 bp, Artificial Sequence
  Description of Artificial Sequence: Synthetic oligonucleotide
  Target: LAMA2; (-) strand; PAM type: NRG; PAM sequence: AAG
ttgatgtttgtaggatgaca

SEQ ID NO: 112715 - DNA, 20 bp, Artificial Sequence
  Description of Artificial Sequence: Synthetic oligonucleotide
  Target: LAMA2; (-) strand; PAM type: NRG; PAM sequence: AGG
agaatccagttgatgtttgt

SEQ ID NO: 112716 - DNA, 20 bp, Artificial Sequence
  Description of Artificial Sequence: Synthetic oligonucleotide
  Target: LAMA2; (-) strand; PAM type: NRG; PAM sequence: TAG
tagaatccagttgatgtttg

SEQ ID NO: 112717 - DNA, 20 bp, Artificial Sequence
  Description of Artificial Sequence: Synthetic oligonucleotide
  Target: LAMA2; (-) strand; PAM type: NRG; PAM sequence: CAG
agtacttggatcctagaatc

SEQ ID NO: 112718 - DNA, 20 bp, Artificial Sequence
  Description of Artificial Sequence: Synthetic oligonucleotide
  Target: LAMA2; (-) strand; PAM type: NRG; PAM sequence: TAG
acaatacagtacttggatcc

SEQ ID NO: 112719 - DNA, 20 bp, Artificial Sequence
  Description of Artificial Sequence: Synthetic oligonucleotide
  Target: LAMA2; (-) strand; PAM type: NRG; PAM sequence: TGG
agtacatacaatacagtact

SEQ ID NO: 112720 - DNA, 20 bp, Artificial Sequence
  Description of Artificial Sequence: Synthetic oligonucleotide
  Target: LAMA2; (-) strand; PAM type: NRG; PAM sequence: CAG
aacatctagtacatacaata

SEQ ID NO: 112721 - DNA, 20 bp, Artificial Sequence
  Description of Artificial Sequence: Synthetic oligonucleotide
  Target: LAMA2; (-) strand; PAM type: NRG; PAM sequence: TAG
aggcacaaactcaaaacatc

SEQ ID NO: 112722 - DNA, 20 bp, Artificial Sequence
  Description of Artificial Sequence: Synthetic oligonucleotide
  Target: LAMA2; (-) strand; PAM type: NRG; PAM sequence: AGG
tatgggctaggtcctatgtc

SEQ ID NO: 112723 - DNA, 20 bp, Artificial Sequence
  Description of Artificial Sequence: Synthetic oligonucleotide
  Target: LAMA2; (-) strand; PAM type: NRG; PAM sequence: CAG
ttatgggctaggtcctatgt

SEQ ID NO: 112724 - DNA, 20 bp, Artificial Sequence
  Description of Artificial Sequence: Synthetic oligonucleotide
  Target: LAMA2; (-) strand; PAM type: NRG; PAM sequence: AGG
catctaagagattatgggct

SEQ ID NO: 112725 - DNA, 20 bp, Artificial Sequence
  Description of Artificial Sequence: Synthetic oligonucleotide
  Target: LAMA2; (-) strand; PAM type: NRG; PAM sequence: TAG
ccatctaagagattatgggc

SEQ ID NO: 112726 - DNA, 20 bp, Artificial Sequence
  Description of Artificial Sequence: Synthetic oligonucleotide
  Target: LAMA2; (-) strand; PAM type: NRG; PAM sequence: GGG
gagaccatctaagagattat

SEQ ID NO: 112727 - DNA, 20 bp, Artificial Sequence
  Description of Artificial Sequence: Synthetic oligonucleotide
  Target: LAMA2; (-) strand; PAM type: NRG; PAM sequence: TGG
tgagaccatctaagagatta

SEQ ID NO: 112728 - DNA, 20 bp, Artificial Sequence
  Description of Artificial Sequence: Synthetic oligonucleotide
  Target: LAMA2; (-) strand; PAM type: NRG; PAM sequence: GAG
aatttcatgagaccatctaa

SEQ ID NO: 112729 - DNA, 20 bp, Artificial Sequence
  Description of Artificial Sequence: Synthetic oligonucleotide
  Target: LAMA2; (-) strand; PAM type: NRG; PAM sequence: AAG
taaatttcatgagaccatct

SEQ ID NO: 112730 - DNA, 20 bp, Artificial Sequence
  Description of Artificial Sequence: Synthetic oligonucleotide
  Target: LAMA2; (-) strand; PAM type: NRG; PAM sequence: GAG
cactagaatgtaaatttcat

SEQ ID NO: 112731 - DNA, 20 bp, Artificial Sequence
  Description of Artificial Sequence: Synthetic oligonucleotide
  Target: LAMA2; (-) strand; PAM type: NRG; PAM sequence: TAG
gtttcttctgtctccttcac

SEQ ID NO: 112732 - DNA, 20 bp, Artificial Sequence
  Description of Artificial Sequence: Synthetic oligonucleotide
  Target: LAMA2; (-) strand; PAM type: NRG; PAM sequence: TGG
gaggcctgtatttattttta

SEQ ID NO: 112733 - DNA, 20 bp, Artificial Sequence
  Description of Artificial Sequence: Synthetic oligonucleotide
  Target: LAMA2; (-) strand; PAM type: NRG; PAM sequence: AGG
ttagattcagacgattaagg

SEQ ID NO: 112734 - DNA, 20 bp, Artificial Sequence
  Description of Artificial Sequence: Synthetic oligonucleotide
  Target: LAMA2; (-) strand; PAM type: NRG; PAM sequence: GAG
attagattcagacgattaag

SEQ ID NO: 112735 - DNA, 20 bp, Artificial Sequence
  Description of Artificial Sequence: Synthetic oligonucleotide
  Target: LAMA2; (-) strand; PAM type: NRG; PAM sequence: AGG
aaattagattcagacgatta

SEQ ID NO: 112736 - DNA, 20 bp, Artificial Sequence
  Description of Artificial Sequence: Synthetic oligonucleotide
  Target: LAMA2; (-) strand; PAM type: NRG; PAM sequence: AAG
caaattagattcagacgatt

SEQ ID NO: 112737 - DNA, 20 bp, Artificial Sequence
  Description of Artificial Sequence: Synthetic oligonucleotide
  Target: LAMA2; (-) strand; PAM type: NRG; PAM sequence: CAG
tttctggaacaaattagatt

SEQ ID NO: 112738 - DNA, 20 bp, Artificial Sequence
  Description of Artificial Sequence: Synthetic oligonucleotide
  Target: LAMA2; (-) strand; PAM type: NRG; PAM sequence: TAG
caaatttttctggaacaaat

SEQ ID NO: 112739 - DNA, 20 bp, Artificial Sequence
  Description of Artificial Sequence: Synthetic oligonucleotide
  Target: LAMA2; (-) strand; PAM type: NRG; PAM sequence: TGG
tgccttccaacaaatttttc

SEQ ID NO: 112740 - DNA, 20 bp, Artificial Sequence
  Description of Artificial Sequence: Synthetic oligonucleotide
  Target: LAMA2; (-) strand; PAM type: NRG; PAM sequence: AGG
ttattacatttcttatatat

SEQ ID NO: 112741 - DNA, 20 bp, Artificial Sequence
  Description of Artificial Sequence: Synthetic oligonucleotide
  Target: LAMA2; (-) strand; PAM type: NRG; PAM sequence: TAG
attattacatttcttatata

SEQ ID NO: 112742 - DNA, 20 bp, Artificial Sequence
  Description of Artificial Sequence: Synthetic oligonucleotide
  Target: LAMA2; (-) strand; PAM type: NRG; PAM sequence: GAG
gcggggtttctggatgggct

SEQ ID NO: 112743 - DNA, 20 bp, Artificial Sequence
  Description of Artificial Sequence: Synthetic oligonucleotide
  Target: LAMA2; (-) strand; PAM type: NRG; PAM sequence: GGG
aaggggcggggtttctggat

SEQ ID NO: 112744 - DNA, 20 bp, Artificial Sequence
  Description of Artificial Sequence: Synthetic oligonucleotide
  Target: LAMA2; (-) strand; PAM type: NRG; PAM sequence: TGG
aaaggggcggggtttctgga

SEQ ID NO: 112745 - DNA, 20 bp, Artificial Sequence
  Description of Artificial Sequence: Synthetic oligonucleotide
  Target: LAMA2; (-) strand; PAM type: NRG; PAM sequence: TGG
gggcaaaggggcggggtttc

SEQ ID NO: 112746 - DNA, 20 bp, Artificial Sequence
  Description of Artificial Sequence: Synthetic oligonucleotide
  Target: LAMA2; (-) strand; PAM type: NRG; PAM sequence: GGG
ggtatttgggcaaaggggcg

SEQ ID NO: 112747 - DNA, 20 bp, Artificial Sequence
  Description of Artificial Sequence: Synthetic oligonucleotide
  Target: LAMA2; (-) strand; PAM type: NRG; PAM sequence: GGG
tggtatttgggcaaaggggc

SEQ ID NO: 112748 - DNA, 20 bp, Artificial Sequence
  Description of Artificial Sequence: Synthetic oligonucleotide
  Target: LAMA2; (-) strand; PAM type: NRG; PAM sequence: CGG
gtggtatttgggcaaagggg

SEQ ID NO: 112749 - DNA, 20 bp, Artificial Sequence
  Description of Artificial Sequence: Synthetic oligonucleotide
  Target: LAMA2; (-) strand; PAM type: NRG; PAM sequence: GGG
ttagtggtatttgggcaaag

SEQ ID NO: 112750 - DNA, 20 bp, Artificial Sequence
  Description of Artificial Sequence: Synthetic oligonucleotide
  Target: LAMA2; (-) strand; PAM type: NRG; PAM sequence: GGG
cttagtggtatttgggcaaa

SEQ ID NO: 112751 - DNA, 20 bp, Artificial Sequence
  Description of Artificial Sequence: Synthetic oligonucleotide
  Target: LAMA2; (-) strand; PAM type: NRG; PAM sequence: AGG
tcttagtggtatttgggcaa

SEQ ID NO: 112752 - DNA, 20 bp, Artificial Sequence
  Description of Artificial Sequence: Synthetic oligonucleotide
  Target: LAMA2; (-) strand; PAM type: NRG; PAM sequence: AAG
gtcttagtggtatttgggca

SEQ ID NO: 112753 - DNA, 20 bp, Artificial Sequence
  Description of Artificial Sequence: Synthetic oligonucleotide
  Target: LAMA2; (-) strand; PAM type: NRG; PAM sequence: GGG
agggtgtcttagtggtattt

SEQ ID NO: 112754 - DNA, 20 bp, Artificial Sequence
  Description of Artificial Sequence: Synthetic oligonucleotide
  Target: LAMA2; (-) strand; PAM type: NRG; PAM sequence: TGG
aagggtgtcttagtggtatt

SEQ ID NO: 112755 - DNA, 20 bp, Artificial Sequence
  Description of Artificial Sequence: Synthetic oligonucleotide
  Target: LAMA2; (-) strand; PAM type: NRG; PAM sequence: TGG
gatgcttaagggtgtcttag

SEQ ID NO: 112756 - DNA, 20 bp, Artificial Sequence
  Description of Artificial Sequence: Synthetic oligonucleotide
  Target: LAMA2; (-) strand; PAM type: NRG; PAM sequence: TAG
attgatgcttaagggtgtct

SEQ ID NO: 112757 - DNA, 20 bp, Artificial Sequence
  Description of Artificial Sequence: Synthetic oligonucleotide
  Target: LAMA2; (-) strand; PAM type: NRG; PAM sequence: GGG
atagttatattgatgcttaa

SEQ ID NO: 112758 - DNA, 20 bp, Artificial Sequence
  Description of Artificial Sequence: Synthetic oligonucleotide
  Target: LAMA2; (-) strand; PAM type: NRG; PAM sequence: AGG
gatagttatattgatgctta

SEQ ID NO: 112759 - DNA, 20 bp, Artificial Sequence
  Description of Artificial Sequence: Synthetic oligonucleotide
  Target: LAMA2; (-) strand; PAM type: NRG; PAM sequence: AAG
agatagttatattgatgctt

SEQ ID NO: 112760 - DNA, 20 bp, Artificial Sequence
  Description of Artificial Sequence: Synthetic oligonucleotide
  Target: LAMA2; (-) strand; PAM type: NRG; PAM sequence: TAG
taaaagcacttggtagtaga

SEQ ID NO: 112761 - DNA, 20 bp, Artificial Sequence
  Description of Artificial Sequence: Synthetic oligonucleotide
  Target: LAMA2; (-) strand; PAM type: NRG; PAM sequence: TAG
tttgtaaaagcacttggtag

SEQ ID NO: 112762 - DNA, 20 bp, Artificial Sequence
  Description of Artificial Sequence: Synthetic oligonucleotide
  Target: LAMA2; (-) strand; PAM type: NRG; PAM sequence: TAG
tgttttgtaaaagcacttgg

SEQ ID NO: 112763 - DNA, 20 bp, Artificial Sequence
  Description of Artificial Sequence: Synthetic oligonucleotide
  Target: LAMA2; (-) strand; PAM type: NRG; PAM sequence: TGG
ttatgttttgtaaaagcact

SEQ ID NO: 112764 - DNA, 20 bp, Artificial Sequence
  Description of Artificial Sequence: Synthetic oligonucleotide
  Target: LAMA2; (-) strand; PAM type: NRG; PAM sequence: AAG
aagtgctttatgttttgtaa

SEQ ID NO: 112765 - DNA, 20 bp, Artificial Sequence
  Description of Artificial Sequence: Synthetic oligonucleotide
  Target: LAMA2; (-) strand; PAM type: NRG; PAM sequence: AAG
actaagtcattagttttttt

SEQ ID NO: 112766 - DNA, 20 bp, Artificial Sequence
  Description of Artificial Sequence: Synthetic oligonucleotide
  Target: LAMA2; (-) strand; PAM type: NRG; PAM sequence: TAG
gtgtgcaataactaagtcat

SEQ ID NO: 112767 - DNA, 20 bp, Artificial Sequence
  Description of Artificial Sequence: Synthetic oligonucleotide
  Target: LAMA2; (-) strand; PAM type: NRG; PAM sequence: AAG
tcatgaggtgtgcaataact

SEQ ID NO: 112768 - DNA, 20 bp, Artificial Sequence
  Description of Artificial Sequence: Synthetic oligonucleotide
  Target: LAMA2; (-) strand; PAM type: NRG; PAM sequence: AGG
accacctctcacctttcatg

SEQ ID NO: 112769 - DNA, 20 bp, Artificial Sequence
  Description of Artificial Sequence: Synthetic oligonucleotide
  Target: LAMA2; (-) strand; PAM type: NRG; PAM sequence: GAG
aaccacctctcacctttcat

SEQ ID NO: 112770 - DNA, 20 bp, Artificial Sequence
  Description of Artificial Sequence: Synthetic oligonucleotide
  Target: LAMA2; (-) strand; PAM type: NRG; PAM sequence: AAG
tactgccaccgtgctagaat

SEQ ID NO: 112771 - DNA, 20 bp, Artificial Sequence
  Description of Artificial Sequence: Synthetic oligonucleotide
  Target: LAMA2; (-) strand; PAM type: NRG; PAM sequence: TAG
catctctactgccaccgtgc

SEQ ID NO: 112772 - DNA, 20 bp, Artificial Sequence
  Description of Artificial Sequence: Synthetic oligonucleotide
  Target: LAMA2; (-) strand; PAM type: NRG; PAM sequence: AGG
actataggctgttgtagggc

SEQ ID NO: 112773 - DNA, 20 bp, Artificial Sequence
  Description of Artificial Sequence: Synthetic oligonucleotide
  Target: LAMA2; (-) strand; PAM type: NRG; PAM sequence: CAG
gactataggctgttgtaggg

SEQ ID NO: 112774 - DNA, 20 bp, Artificial Sequence
  Description of Artificial Sequence: Synthetic oligonucleotide
  Target: LAMA2; (-) strand; PAM type: NRG; PAM sequence: GGG
tgagactataggctgttgta

SEQ ID NO: 112775 - DNA, 20 bp, Artificial Sequence
  Description of Artificial Sequence: Synthetic oligonucleotide
  Target: LAMA2; (-) strand; PAM type: NRG; PAM sequence: AGG
atgagactataggctgttgt

SEQ ID NO: 112776 - DNA, 20 bp, Artificial Sequence
  Description of Artificial Sequence: Synthetic oligonucleotide
  Target: LAMA2; (-) strand; PAM type: NRG; PAM sequence: TAG
aatgagactataggctgttg

SEQ ID NO: 112777 - DNA, 20 bp, Artificial Sequence
  Description of Artificial Sequence: Synthetic oligonucleotide
  Target: LAMA2; (-) strand; PAM type: NRG; PAM sequence: AGG
ctgaatagcaatgagactat

SEQ ID NO: 112778 - DNA, 20 bp, Artificial Sequence
  Description of Artificial Sequence: Synthetic oligonucleotide
  Target: LAMA2; (-) strand; PAM type: NRG; PAM sequence: TAG
actgaatagcaatgagacta

SEQ ID NO: 112779 - DNA, 20 bp, Artificial Sequence
  Description of Artificial Sequence: Synthetic oligonucleotide
  Target: LAMA2; (-) strand; PAM type: NRG; PAM sequence: GAG
atgcatcactgaatagcaat

SEQ ID NO: 112780 - DNA, 20 bp, Artificial Sequence
  Description of Artificial Sequence: Synthetic oligonucleotide
  Target: LAMA2; (-) strand; PAM type: NRG; PAM sequence: TAG
ttattcaatgcatcactgaa

SEQ ID NO: 112781 - DNA, 20 bp, Artificial Sequence
  Description of Artificial Sequence: Synthetic oligonucleotide
  Target: LAMA2; (-) strand; PAM type: NRG; PAM sequence: CAG
tgaatcagatcatatctatt

SEQ ID NO: 112782 - DNA, 20 bp, Artificial Sequence
  Description of Artificial Sequence: Synthetic oligonucleotide
  Target: LAMA2; (-) strand; PAM type: NRG; PAM sequence: CAG
gagagacatttcacatgaat

SEQ ID NO: 112783 - DNA, 20 bp, Artificial Sequence
  Description of Artificial Sequence: Synthetic oligonucleotide
  Target: LAMA2; (-) strand; PAM type: NRG; PAM sequence: GAG
ccacctgaggactgagaaga

SEQ ID NO: 112784 - DNA, 20 bp, Artificial Sequence
  Description of Artificial Sequence: Synthetic oligonucleotide
  Target: LAMA2; (-) strand; PAM type: NRG; PAM sequence: GAG
ttccacctgaggactgagaa

SEQ ID NO: 112785 - DNA, 20 bp, Artificial Sequence
  Description of Artificial Sequence: Synthetic oligonucleotide
  Target: LAMA2; (-) strand; PAM type: NRG; PAM sequence: AAG
tcttccacctgaggactgag

SEQ ID NO: 112786 - DNA, 20 bp, Artificial Sequence
  Description of Artificial Sequence: Synthetic oligonucleotide
  Target: LAMA2; (-) strand; PAM type: NRG; PAM sequence: GAG
ctatcttccacctgaggact

SEQ ID NO: 112787 - DNA, 20 bp, Artificial Sequence
  Description of Artificial Sequence: Synthetic oligonucleotide
  Target: LAMA2; (-) strand; PAM type: NRG; PAM sequence: AGG
ccctcactatcttccacctg

SEQ ID NO: 112788 - DNA, 20 bp, Artificial Sequence
  Description of Artificial Sequence: Synthetic oligonucleotide
  Target: LAMA2; (-) strand; PAM type: NRG; PAM sequence: GAG
cccctcactatcttccacct

SEQ ID NO: 112789 - DNA, 20 bp, Artificial Sequence
  Description of Artificial Sequence: Synthetic oligonucleotide
  Target: LAMA2; (-) strand; PAM type: NRG; PAM sequence: TAG
accttctccatcaaattgaa

SEQ ID NO: 112790 - DNA, 20 bp, Artificial Sequence
  Description of Artificial Sequence: Synthetic oligonucleotide
  Target: LAMA2; (-) strand; PAM type: NRG; PAM sequence: CGG
tggggtaccagcgaatggga

SEQ ID NO: 112791 - DNA, 20 bp, Artificial Sequence
  Description of Artificial Sequence: Synthetic oligonucleotide
  Target: LAMA2; (-) strand; PAM type: NRG; PAM sequence: GGG
atgttggggtaccagcgaat

SEQ ID NO: 112792 - DNA, 20 bp, Artificial Sequence
  Description of Artificial Sequence: Synthetic oligonucleotide
  Target: LAMA2; (-) strand; PAM type: NRG; PAM sequence: TGG
gatgttggggtaccagcgaa

SEQ ID NO: 112793 - DNA, 20 bp, Artificial Sequence
  Description of Artificial Sequence: Synthetic oligonucleotide
  Target: LAMA2; (-) strand; PAM type: NRG; PAM sequence: CAG
cagtggagatgttggggtac

SEQ ID NO: 112794 - DNA, 20 bp, Artificial Sequence
  Description of Artificial Sequence: Synthetic oligonucleotide
  Target: LAMA2; (-) strand; PAM type: NRG; PAM sequence: GGG
acatgacagtggagatgttg

SEQ ID NO: 112795 - DNA, 20 bp, Artificial Sequence
  Description of Artificial Sequence: Synthetic oligonucleotide
  Target: LAMA2; (-) strand; PAM type: NRG; PAM sequence: GGG
aacatgacagtggagatgtt

SEQ ID NO: 112796 - DNA, 20 bp, Artificial Sequence
  Description of Artificial Sequence: Synthetic oligonucleotide
  Target: LAMA2; (-) strand; PAM type: NRG; PAM sequence: TGG
gaacatgacagtggagatgt

SEQ ID NO: 112797 - DNA, 20 bp, Artificial Sequence
  Description of Artificial Sequence: Synthetic oligonucleotide
  Target: LAMA2; (-) strand; PAM type: NRG; PAM sequence: GAG
tgaacttgaacatgacagtg

SEQ ID NO: 112798 - DNA, 20 bp, Artificial Sequence
  Description of Artificial Sequence: Synthetic oligonucleotide
  Target: LAMA2; (-) strand; PAM type: NRG; PAM sequence: TGG
tctgaacttgaacatgacag

SEQ ID NO: 112799 - DNA, 20 bp, Artificial Sequence
  Description of Artificial Sequence: Synthetic oligonucleotide
  Target: LAMA2; (-) strand; PAM type: NRG; PAM sequence: CAG
tgttctgaacttgaacatga

SEQ ID NO: 112800 - DNA, 20 bp, Artificial Sequence
  Description of Artificial Sequence: Synthetic oligonucleotide
  Target: LAMA2; (-) strand; PAM type: NRG; PAM sequence: AAG
atacatcagaagagcactcg

SEQ ID NO: 112801 - DNA, 20 bp, Artificial Sequence
  Description of Artificial Sequence: Synthetic oligonucleotide
  Target: LAMA2; (-) strand; PAM type: NRG; PAM sequence: GAG
tgtggcaagatacatcagaa

SEQ ID NO: 112802 - DNA, 20 bp, Artificial Sequence
  Description of Artificial Sequence: Synthetic oligonucleotide
  Target: LAMA2; (-) strand; PAM type: NRG; PAM sequence: AAG
cgtgtggcaagatacatcag

SEQ ID NO: 112803 - DNA, 20 bp, Artificial Sequence
  Description of Artificial Sequence: Synthetic oligonucleotide
  Target: LAMA2; (-) strand; PAM type: NRG; PAM sequence: CAG
tctcgtgtggcaagatacat

SEQ ID NO: 112804 - DNA, 20 bp, Artificial Sequence
  Description of Artificial Sequence: Synthetic oligonucleotide
  Target: LAMA2; (-) strand; PAM type: NRG; PAM sequence: AAG
tttaccaggtctcgtgtggc

SEQ ID NO: 112805 - DNA, 20 bp, Artificial Sequence
  Description of Artificial Sequence: Synthetic oligonucleotide
  Target: LAMA2; (-) strand; PAM type: NRG; PAM sequence: TGG
gatctttaccaggtctcgtg

SEQ ID NO: 112806 - DNA, 20 bp, Artificial Sequence
  Description of Artificial Sequence: Synthetic oligonucleotide
  Target: LAMA2; (-) strand; PAM type: NRG; PAM sequence: AGG
ctatgcatatgatctttacc

SEQ ID NO: 112807 - DNA, 20 bp, Artificial Sequence
  Description of Artificial Sequence: Synthetic oligonucleotide
  Target: LAMA2; (-) strand; PAM type: NRG; PAM sequence: CAG
gctatgcatatgatctttac

SEQ ID NO: 112808 - DNA, 20 bp, Artificial Sequence
  Description of Artificial Sequence: Synthetic oligonucleotide
  Target: LAMA2; (-) strand; PAM type: NRG; PAM sequence: CGG
aagcaaacgcattttagtca

SEQ ID NO: 112809 - DNA, 20 bp, Artificial Sequence
  Description of Artificial Sequence: Synthetic oligonucleotide
  Target: LAMA2; (-) strand; PAM type: NRG; PAM sequence: TAG
taaaagaagcaaacgcattt

SEQ ID NO: 112810 - DNA, 20 bp, Artificial Sequence
  Description of Artificial Sequence: Synthetic oligonucleotide
  Target: LAMA2; (-) strand; PAM type: NRG; PAM sequence: AAG
ttaccaataactgataaaag

SEQ ID NO: 112811 - DNA, 20 bp, Artificial Sequence
  Description of Artificial Sequence: Synthetic oligonucleotide
  Target: LAMA2; (-) strand; PAM type: NRG; PAM sequence: AAG
attttaccaataactgataa

SEQ ID NO: 112812 - DNA, 20 bp, Artificial Sequence
  Description of Artificial Sequence: Synthetic oligonucleotide
  Target: LAMA2; (-) strand; PAM type: NRG; PAM sequence: TAG
gacaatcatcccaggctttt

SEQ ID NO: 112813 - DNA, 20 bp, Artificial Sequence
  Description of Artificial Sequence: Synthetic oligonucleotide
  Target: LAMA2; (-) strand; PAM type: NRG; PAM sequence: AGG
ggctgccagacaatcatccc

SEQ ID NO: 112814 - DNA, 20 bp, Artificial Sequence
  Description of Artificial Sequence: Synthetic oligonucleotide
  Target: LAMA2; (-) strand; PAM type: NRG; PAM sequence: CAG
tggctgccagacaatcatcc

SEQ ID NO: 112815 - DNA, 20 bp, Artificial Sequence
  Description of Artificial Sequence: Synthetic oligonucleotide
  Target: LAMA2; (-) strand; PAM type: NRG; PAM sequence: CAG
tatcacccattcttggctgc

SEQ ID NO: 112816 - DNA, 20 bp, Artificial Sequence
  Description of Artificial Sequence: Synthetic oligonucleotide
  Target: LAMA2; (-) strand; PAM type: NRG; PAM sequence: TGG
ctatctgtatcacccattct

SEQ ID NO: 112817 - DNA, 20 bp, Artificial Sequence
  Description of Artificial Sequence: Synthetic oligonucleotide
  Target: LAMA2; (-) strand; PAM type: NRG; PAM sequence: AAG
agttattattgaaaatatat

SEQ ID NO: 112818 - DNA, 20 bp, Artificial Sequence
  Description of Artificial Sequence: Synthetic oligonucleotide
  Target: LAMA2; (-) strand; PAM type: NRG; PAM sequence: AAG
ttaaattgtatctgtgatta

SEQ ID NO: 112819 - DNA, 20 bp, Artificial Sequence
  Description of Artificial Sequence: Synthetic oligonucleotide
  Target: LAMA2; (-) strand; PAM type: NRG; PAM sequence: TAG
ggagttgtattgaaaataaa

SEQ ID NO: 112820 - DNA, 20 bp, Artificial Sequence
  Description of Artificial Sequence: Synthetic oligonucleotide
  Target: LAMA2; (-) strand; PAM type: NRG; PAM sequence: GAG
tgcttaaaggattatgtggg

SEQ ID NO: 112821 - DNA, 20 bp, Artificial Sequence
  Description of Artificial Sequence: Synthetic oligonucleotide
  Target: LAMA2; (-) strand; PAM type: NRG; PAM sequence: GGG
attgcttaaaggattatgtg

SEQ ID NO: 112822 - DNA, 20 bp, Artificial Sequence
  Description of Artificial Sequence: Synthetic oligonucleotide
  Target: LAMA2; (-) strand; PAM type: NRG; PAM sequence: GGG
tattgcttaaaggattatgt

SEQ ID NO: 112823 - DNA, 20 bp, Artificial Sequence
  Description of Artificial Sequence: Synthetic oligonucleotide
  Target: LAMA2; (-) strand; PAM type: NRG; PAM sequence: TGG
gtattgcttaaaggattatg

SEQ ID NO: 112824 - DNA, 20 bp, Artificial Sequence
  Description of Artificial Sequence: Synthetic oligonucleotide
  Target: LAMA2; (-) strand; PAM type: NRG; PAM sequence: AGG
ttaccggatgtattgcttaa

SEQ ID NO: 112825 - DNA, 20 bp, Artificial Sequence
  Description of Artificial Sequence: Synthetic oligonucleotide
  Target: LAMA2; (-) strand; PAM type: NRG; PAM sequence: AAG
attaccggatgtattgctta

SEQ ID NO: 112826 - DNA, 20 bp, Artificial Sequence
  Description of Artificial Sequence: Synthetic oligonucleotide
  Target: LAMA2; (-) strand; PAM type: NRG; PAM sequence: CGG
atgctgggaaaaattattac

SEQ ID NO: 112827 - DNA, 20 bp, Artificial Sequence
  Description of Artificial Sequence: Synthetic oligonucleotide
  Target: LAMA2; (-) strand; PAM type: NRG; PAM sequence: GGG
ctgctgtatggctccatgct

SEQ ID NO: 112828 - DNA, 20 bp, Artificial Sequence
  Description of Artificial Sequence: Synthetic oligonucleotide
  Target: LAMA2; (-) strand; PAM type: NRG; PAM sequence: TGG
gctgctgtatggctccatgc

SEQ ID NO: 112829 - DNA, 20 bp, Artificial Sequence
  Description of Artificial Sequence: Synthetic oligonucleotide
  Target: LAMA2; (-) strand; PAM type: NRG; PAM sequence: TGG
ggaagcattttgctgctgta

SEQ ID NO: 112830 - DNA, 20 bp, Artificial Sequence
  Description of Artificial Sequence: Synthetic oligonucleotide
  Target: LAMA2; (-) strand; PAM type: NRG; PAM sequence: AAG
tctctgaaagaagattaagg

SEQ ID NO: 112831 - DNA, 20 bp, Artificial Sequence
  Description of Artificial Sequence: Synthetic oligonucleotide
  Target: LAMA2; (-) strand; PAM type: NRG; PAM sequence: AGG
aggtctctgaaagaagatta

SEQ ID NO: 112832 - DNA, 20 bp, Artificial Sequence
  Description of Artificial Sequence: Synthetic oligonucleotide
  Target: LAMA2; (-) strand; PAM type: NRG; PAM sequence: AAG
caggtctctgaaagaagatt

SEQ ID NO: 112833 - DNA, 20 bp, Artificial Sequence
  Description of Artificial Sequence: Synthetic oligonucleotide
  Target: LAMA2; (-) strand; PAM type: NRG; PAM sequence: AAG
tcaactcaggtctctgaaag

SEQ ID NO: 112834 - DNA, 20 bp, Artificial Sequence
  Description of Artificial Sequence: Synthetic oligonucleotide
  Target: LAMA2; (-) strand; PAM type: NRG; PAM sequence: AAG
ttttcaactcaggtctctga

SEQ ID NO: 112835 - DNA, 20 bp, Artificial Sequence
  Description of Artificial Sequence: Synthetic oligonucleotide
  Target: LAMA2; (-) strand; PAM type: NRG; PAM sequence: AGG
tataatcaccttttcaactc

SEQ ID NO: 112836 - DNA, 20 bp, Artificial Sequence
  Description of Artificial Sequence: Synthetic oligonucleotide
  Target: LAMA2; (-) strand; PAM type: NRG; PAM sequence: CAG
ttataatcaccttttcaact

SEQ ID NO: 112837 - DNA, 20 bp, Artificial Sequence
  Description of Artificial Sequence: Synthetic oligonucleotide
  Target: LAMA2; (-) strand; PAM type: NRG; PAM sequence: AAG
accagaaaaaaatgaggcca

SEQ ID NO: 112838 - DNA, 20 bp, Artificial Sequence
  Description of Artificial Sequence: Synthetic oligonucleotide
  Target: LAMA2; (-) strand; PAM type: NRG; PAM sequence: AGG
atactgaccagaaaaaaatg

SEQ ID NO: 112839 - DNA, 20 bp, Artificial Sequence
  Description of Artificial Sequence: Synthetic oligonucleotide
  Target: LAMA2; (-) strand; PAM type: NRG; PAM sequence: GAG
aatactgaccagaaaaaaat

SEQ ID NO: 112840 - DNA, 20 bp, Artificial Sequence
  Description of Artificial Sequence: Synthetic oligonucleotide
  Target: LAMA2; (-) strand; PAM type: NRG; PAM sequence: CAG
attcagtaagaaatactgac

SEQ ID NO: 112841 - DNA, 20 bp, Artificial Sequence
  Description of Artificial Sequence: Synthetic oligonucleotide
  Target: LAMA2; (-) strand; PAM type: NRG; PAM sequence: AAG
gttcccagaaagaattcagt

SEQ ID NO: 112842 - DNA, 20 bp, Artificial Sequence
  Description of Artificial Sequence: Synthetic oligonucleotide
  Target: LAMA2; (-) strand; PAM type: NRG; PAM sequence: CAG
gtatgttcccagaaagaatt

SEQ ID NO: 112843 - DNA, 20 bp, Artificial Sequence
  Description of Artificial Sequence: Synthetic oligonucleotide
  Target: LAMA2; (-) strand; PAM type: NRG; PAM sequence: AAG
ccaaaaggtatgttcccaga

SEQ ID NO: 112844 - DNA, 20 bp, Artificial Sequence
  Description of Artificial Sequence: Synthetic oligonucleotide
  Target: LAMA2; (-) strand; PAM type: NRG; PAM sequence: CAG
tgaaccaaaaggtatgttcc

SEQ ID NO: 112845 - DNA, 20 bp, Artificial Sequence
  Description of Artificial Sequence: Synthetic oligonucleotide
  Target: LAMA2; (-) strand; PAM type: NRG; PAM sequence: AGG
aacatattaagtgaaccaaa

SEQ ID NO: 112846 - DNA, 20 bp, Artificial Sequence
  Description of Artificial Sequence: Synthetic oligonucleotide
  Target: LAMA2; (-) strand; PAM type: NRG; PAM sequence: AAG
aaacatattaagtgaaccaa

SEQ ID NO: 112847 - DNA, 20 bp, Artificial Sequence
  Description of Artificial Sequence: Synthetic oligonucleotide
  Target: LAMA2; (-) strand; PAM type: NRG; PAM sequence: AAG
agttcatttgaaaacatatt

SEQ ID NO: 112848 - DNA, 20 bp, Artificial Sequence
  Description of Artificial Sequence: Synthetic oligonucleotide
  Target: LAMA2; (-) strand; PAM type: NRG; PAM sequence: GAG
ttattacagtcgtaaaatgt

SEQ ID NO: 112849 - DNA, 20 bp, Artificial Sequence
  Description of Artificial Sequence: Synthetic oligonucleotide
  Target: LAMA2; (-) strand; PAM type: NRG; PAM sequence: CAG
taagacatatccttttatta

SEQ ID NO: 112850 - DNA, 20 bp, Artificial Sequence
  Description of Artificial Sequence: Synthetic oligonucleotide
  Target: LAMA2; (-) strand; PAM type: NRG; PAM sequence: AAG
atggtcacaacaaaatttct

SEQ ID NO: 112851 - DNA, 20 bp, Artificial Sequence
  Description of Artificial Sequence: Synthetic oligonucleotide
  Target: LAMA2; (-) strand; PAM type: NRG; PAM sequence: TGG
ctgtgatattatgatgcaca

SEQ ID NO: 112852 - DNA, 20 bp, Artificial Sequence
  Description of Artificial Sequence: Synthetic oligonucleotide
  Target: LAMA2; (-) strand; PAM type: NRG; PAM sequence: TGG
tactattttctgaatttttg

SEQ ID NO: 112853 - DNA, 20 bp, Artificial Sequence
  Description of Artificial Sequence: Synthetic oligonucleotide
  Target: LAMA2; (-) strand; PAM type: NRG; PAM sequence: TGG
atccattttgaaaatagaat

SEQ ID NO: 112854 - DNA, 20 bp, Artificial Sequence
  Description of Artificial Sequence: Synthetic oligonucleotide
  Target: LAMA2; (-) strand; PAM type: NRG; PAM sequence: TAG
gcagaaatccattttgaaaa

SEQ ID NO: 112855 - DNA, 20 bp, Artificial Sequence
  Description of Artificial Sequence: Synthetic oligonucleotide
  Target: LAMA2; (-) strand; PAM type: NRG; PAM sequence: CAG
ctgaatatgtcactctgttg

SEQ ID NO: 112856 - DNA, 20 bp, Artificial Sequence
  Description of Artificial Sequence: Synthetic oligonucleotide
  Target: LAMA2; (-) strand; PAM type: NRG; PAM sequence: TGG
tggtttatgttagggtcttg

SEQ ID NO: 112857 - DNA, 20 bp, Artificial Sequence
  Description of Artificial Sequence: Synthetic oligonucleotide
  Target: LAMA2; (-) strand; PAM type: NRG; PAM sequence: GGG
ttcttgtgtggtttatgtta

SEQ ID NO: 112858 - DNA, 20 bp, Artificial Sequence
  Description of Artificial Sequence: Synthetic oligonucleotide
  Target: LAMA2; (-) strand; PAM type: NRG; PAM sequence: AGG
tttcttgtgtggtttatgtt

SEQ ID NO: 112859 - DNA, 20 bp, Artificial Sequence
  Description of Artificial Sequence: Synthetic oligonucleotide
  Target: LAMA2; (-) strand; PAM type: NRG; PAM sequence: TAG
ttttcttgtgtggtttatgt

SEQ ID NO: 112860 - DNA, 20 bp, Artificial Sequence
  Description of Artificial Sequence: Synthetic oligonucleotide
  Target: LAMA2; (-) strand; PAM type: NRG; PAM sequence: TGG
gagtgttcacttttcttgtg

SEQ ID NO: 112861 - DNA, 20 bp, Artificial Sequence
  Description of Artificial Sequence: Synthetic oligonucleotide
  Target: LAMA2; (-) strand; PAM type: NRG; PAM sequence: GAG
agatacacagagaagtatat

SEQ ID NO: 112862 - DNA, 20 bp, Artificial Sequence
  Description of Artificial Sequence: Synthetic oligonucleotide
  Target: LAMA2; (-) strand; PAM type: NRG; PAM sequence: AAG
cagtggttagatacacagag

SEQ ID NO: 112863 - DNA, 20 bp, Artificial Sequence
  Description of Artificial Sequence: Synthetic oligonucleotide
  Target: LAMA2; (-) strand; PAM type: NRG; PAM sequence: GAG
ccccagtggttagatacaca

SEQ ID NO: 112864 - DNA, 20 bp, Artificial Sequence
  Description of Artificial Sequence: Synthetic oligonucleotide
  Target: LAMA2; (-) strand; PAM type: NRG; PAM sequence: CAG
taccccagtggttagataca

SEQ ID NO: 112865 - DNA, 20 bp, Artificial Sequence
  Description of Artificial Sequence: Synthetic oligonucleotide
  Target: LAMA2; (-) strand; PAM type: NRG; PAM sequence: TAG
agtaaacataccccagtggt

SEQ ID NO: 112866 - DNA, 20 bp, Artificial Sequence
  Description of Artificial Sequence: Synthetic oligonucleotide
  Target: LAMA2; (-) strand; PAM type: NRG; PAM sequence: TGG
atagagtaaacataccccag

SEQ ID NO: 112867 - DNA, 20 bp, Artificial Sequence
  Description of Artificial Sequence: Synthetic oligonucleotide
  Target: LAMA2; (-) strand; PAM type: NRG; PAM sequence: CAG
ttaatagagtaaacataccc

SEQ ID NO: 112868 - DNA, 20 bp, Artificial Sequence
  Description of Artificial Sequence: Synthetic oligonucleotide
  Target: LAMA2; (-) strand; PAM type: NRG; PAM sequence: GAG
atgaaatctctctattaata

SEQ ID NO: 112869 - DNA, 20 bp, Artificial Sequence
  Description of Artificial Sequence: Synthetic oligonucleotide
  Target: LAMA2; (-) strand; PAM type: NRG; PAM sequence: TAG
tcatgaaatctctctattaa

SEQ ID NO: 112870 - DNA, 20 bp, Artificial Sequence
  Description of Artificial Sequence: Synthetic oligonucleotide
  Target: LAMA2; (-) strand; PAM type: NRG; PAM sequence: GAG
acttttatgtgcccatcagt

SEQ ID NO: 112871 - DNA, 20 bp, Artificial Sequence
  Description of Artificial Sequence: Synthetic oligonucleotide
  Target: LAMA2; (-) strand; PAM type: NRG; PAM sequence: CAG
actgacttttatgtgcccat

SEQ ID NO: 112872 - DNA, 20 bp, Artificial Sequence
  Description of Artificial Sequence: Synthetic oligonucleotide
  Target: LAMA2; (-) strand; PAM type: NRG; PAM sequence: CAG
acggaagccattcctgagcc

SEQ ID NO: 112873 - DNA, 20 bp, Artificial Sequence
  Description of Artificial Sequence: Synthetic oligonucleotide
  Target: LAMA2; (-) strand; PAM type: NRG; PAM sequence: GAG
tgacaacggaagccattcct

SEQ ID NO: 112874 - DNA, 20 bp, Artificial Sequence
  Description of Artificial Sequence: Synthetic oligonucleotide
  Target: LAMA2; (-) strand; PAM type: NRG; PAM sequence: AAG
gttttgattgctgacaacgg

SEQ ID NO: 112875 - DNA, 20 bp, Artificial Sequence
  Description of Artificial Sequence: Synthetic oligonucleotide
  Target: LAMA2; (-) strand; PAM type: NRG; PAM sequence: CGG
atggttttgattgctgacaa

SEQ ID NO: 112876 - DNA, 20 bp, Artificial Sequence
  Description of Artificial Sequence: Synthetic oligonucleotide
  Target: LAMA2; (-) strand; PAM type: NRG; PAM sequence: TGG
atttccatttcccatcatta

SEQ ID NO: 112877 - DNA, 20 bp, Artificial Sequence
  Description of Artificial Sequence: Synthetic oligonucleotide
  Target: LAMA2; (-) strand; PAM type: NRG; PAM sequence: GAG
ttgtttttgaattcttgaca

SEQ ID NO: 112878 - DNA, 20 bp, Artificial Sequence
  Description of Artificial Sequence: Synthetic oligonucleotide
  Target: LAMA2; (-) strand; PAM type: NRG; PAM sequence: CAG
ccttgtttttgaattcttga

SEQ ID NO: 112879 - DNA, 20 bp, Artificial Sequence
  Description of Artificial Sequence: Synthetic oligonucleotide
  Target: LAMA2; (-) strand; PAM type: NRG; PAM sequence: AGG
cactttggatttcatgatta

SEQ ID NO: 112880 - DNA, 20 bp, Artificial Sequence
  Description of Artificial Sequence: Synthetic oligonucleotide
  Target: LAMA2; (-) strand; PAM type: NRG; PAM sequence: AAG
gcactttggatttcatgatt

SEQ ID NO: 112881 - DNA, 20 bp, Artificial Sequence
  Description of Artificial Sequence: Synthetic oligonucleotide
  Target: LAMA2; (-) strand; PAM type: NRG; PAM sequence: TGG
gatcaggtacatgtgcactt

SEQ ID NO: 112882 - DNA, 20 bp, Artificial Sequence
  Description of Artificial Sequence: Synthetic oligonucleotide
  Target: LAMA2; (-) strand; PAM type: NRG; PAM sequence: AGG
acggagccttcctcttgatc

SEQ ID NO: 112883 - DNA, 20 bp, Artificial Sequence
  Description of Artificial Sequence: Synthetic oligonucleotide
  Target: LAMA2; (-) strand; PAM type: NRG; PAM sequence: CAG
gacggagccttcctcttgat

SEQ ID NO: 112884 - DNA, 20 bp, Artificial Sequence
  Description of Artificial Sequence: Synthetic oligonucleotide
  Target: LAMA2; (-) strand; PAM type: NRG; PAM sequence: GAG
agtagctaaaattatagacg

SEQ ID NO: 112885 - DNA, 20 bp, Artificial Sequence
  Description of Artificial Sequence: Synthetic oligonucleotide
  Target: LAMA2; (-) strand; PAM type: NRG; PAM sequence: CGG
tgagtagctaaaattataga

SEQ ID NO: 112886 - DNA, 20 bp, Artificial Sequence
  Description of Artificial Sequence: Synthetic oligonucleotide
  Target: LAMA2; (-) strand; PAM type: NRG; PAM sequence: TAG
ctcgtgagtagctaaaatta

SEQ ID NO: 112887 - DNA, 20 bp, Artificial Sequence
  Description of Artificial Sequence: Synthetic oligonucleotide
  Target: LAMA2; (-) strand; PAM type: NRG; PAM sequence: TAG
tttttcactgaactcgtgag

SEQ ID NO: 112888 - DNA, 20 bp, Artificial Sequence
  Description of Artificial Sequence: Synthetic oligonucleotide
  Target: LAMA2; (-) strand; PAM type: NRG; PAM sequence: GAG
aaatttttcactgaactcgt

SEQ ID NO: 112889 - DNA, 20 bp, Artificial Sequence
  Description of Artificial Sequence: Synthetic oligonucleotide
  Target: LAMA2; (-) strand; PAM type: NRG; PAM sequence: AAG
acccaaatcacctataatct

SEQ ID NO: 112890 - DNA, 20 bp, Artificial Sequence
  Description of Artificial Sequence: Synthetic oligonucleotide
  Target: LAMA2; (-) strand; PAM type: NRG; PAM sequence: CAG
gaagcatttggctcttcaat

SEQ ID NO: 112891 - DNA, 20 bp, Artificial Sequence
  Description of Artificial Sequence: Synthetic oligonucleotide
  Target: LAMA2; (-) strand; PAM type: NRG; PAM sequence: TGG
gaaaatgatagagaagcatt

SEQ ID NO: 112892 - DNA, 20 bp, Artificial Sequence
  Description of Artificial Sequence: Synthetic oligonucleotide
  Target: LAMA2; (-) strand; PAM type: NRG; PAM sequence: AAG
ttcaaaagaaaatgatagag

SEQ ID NO: 112893 - DNA, 20 bp, Artificial Sequence
  Description of Artificial Sequence: Synthetic oligonucleotide
  Target: LAMA2; (-) strand; PAM type: NRG; PAM sequence: GAG
agtttcaaaagaaaatgata

SEQ ID NO: 112894 - DNA, 20 bp, Artificial Sequence
  Description of Artificial Sequence: Synthetic oligonucleotide
  Target: LAMA2; (-) strand; PAM type: NRG; PAM sequence: TAG
tcagtttcaaaagaaaatga

SEQ ID NO: 112895 - DNA, 20 bp, Artificial Sequence
  Description of Artificial Sequence: Synthetic oligonucleotide
  Target: LAMA2; (-) strand; PAM type: NRG; PAM sequence: AAG
aattaagctctcagtttcaa

SEQ ID NO: 112896 - DNA, 20 bp, Artificial Sequence
  Description of Artificial Sequence: Synthetic oligonucleotide
  Target: LAMA2; (-) strand; PAM type: NRG; PAM sequence: CAG
atgctttcaaattaagctct

SEQ ID NO: 112897 - DNA, 20 bp, Artificial Sequence
  Description of Artificial Sequence: Synthetic oligonucleotide
  Target: LAMA2; (-) strand; PAM type: NRG; PAM sequence: AAG
cagttttatgctttcaaatt

SEQ ID NO: 112898 - DNA, 20 bp, Artificial Sequence
  Description of Artificial Sequence: Synthetic oligonucleotide
  Target: LAMA2; (-) strand; PAM type: NRG; PAM sequence: CAG
taattttgcaagttgtaaga

SEQ ID NO: 112899 - DNA, 20 bp, Artificial Sequence
  Description of Artificial Sequence: Synthetic oligonucleotide
  Target: LAMA2; (-) strand; PAM type: NRG; PAM sequence: AAG
gatataattttgcaagttgt

SEQ ID NO: 112900 - DNA, 20 bp, Artificial Sequence
  Description of Artificial Sequence: Synthetic oligonucleotide
  Target: LAMA2; (-) strand; PAM type: NRG; PAM sequence: AAG
attacaggatataattttgc

SEQ ID NO: 112901 - DNA, 20 bp, Artificial Sequence
  Description of Artificial Sequence: Synthetic oligonucleotide
  Target: LAMA2; (-) strand; PAM type: NRG; PAM sequence: AGG
acatttttcaaacatattac

SEQ ID NO: 112902 - DNA, 20 bp, Artificial Sequence
  Description of Artificial Sequence: Synthetic oligonucleotide
  Target: LAMA2; (-) strand; PAM type: NRG; PAM sequence: CAG
aacatttttcaaacatatta

SEQ ID NO: 112903 - DNA, 20 bp, Artificial Sequence
  Description of Artificial Sequence: Synthetic oligonucleotide
  Target: LAMA2; (-) strand; PAM type: NRG; PAM sequence: AAG
acaaaatagggagaaaagaa

SEQ ID NO: 112904 - DNA, 20 bp, Artificial Sequence
  Description of Artificial Sequence: Synthetic oligonucleotide
  Target: LAMA2; (-) strand; PAM type: NRG; PAM sequence: AAG
tcttgacaaaatagggagaa

SEQ ID NO: 112905 - DNA, 20 bp, Artificial Sequence
  Description of Artificial Sequence: Synthetic oligonucleotide
  Target: LAMA2; (-) strand; PAM type: NRG; PAM sequence: GAG
aaacatcttgacaaaatagg

SEQ ID NO: 112906 - DNA, 20 bp, Artificial Sequence
  Description of Artificial Sequence: Synthetic oligonucleotide
  Target: LAMA2; (-) strand; PAM type: NRG; PAM sequence: GGG
ggaaacatcttgacaaaata

SEQ ID NO: 112907 - DNA, 20 bp, Artificial Sequence
  Description of Artificial Sequence: Synthetic oligonucleotide
  Target: LAMA2; (-) strand; PAM type: NRG; PAM sequence: AGG
aggaaacatcttgacaaaat

SEQ ID NO: 112908 - DNA, 20 bp, Artificial Sequence
  Description of Artificial Sequence: Synthetic oligonucleotide
  Target: LAMA2; (-) strand; PAM type: NRG; PAM sequence: TAG
aaggaaacatcttgacaaaa

SEQ ID NO: 112909 - DNA, 20 bp, Artificial Sequence
  Description of Artificial Sequence: Synthetic oligonucleotide
  Target: LAMA2; (-) strand; PAM type: NRG; PAM sequence: AGG
tccactgtgggccactttaa

SEQ ID NO: 112910 - DNA, 20 bp, Artificial Sequence
  Description of Artificial Sequence: Synthetic oligonucleotide
  Target: LAMA2; (-) strand; PAM type: NRG; PAM sequence: AAG
ttccactgtgggccacttta

SEQ ID NO: 112911 - DNA, 20 bp, Artificial Sequence
  Description of Artificial Sequence: Synthetic oligonucleotide
  Target: LAMA2; (-) strand; PAM type: NRG; PAM sequence: GGG
actcctatagattccactgt

SEQ ID NO: 112912 - DNA, 20 bp, Artificial Sequence
  Description of Artificial Sequence: Synthetic oligonucleotide
  Target: LAMA2; (-) strand; PAM type: NRG; PAM sequence: TGG
cactcctatagattccactg

SEQ ID NO: 112913 - DNA, 20 bp, Artificial Sequence
  Description of Artificial Sequence: Synthetic oligonucleotide
  Target: LAMA2; (-) strand; PAM type: NRG; PAM sequence: TAG
actatgccctaccactccta

SEQ ID NO: 112914 - DNA, 20 bp, Artificial Sequence
  Description of Artificial Sequence: Synthetic oligonucleotide
  Target: LAMA2; (-) strand; PAM type: NRG; PAM sequence: AAG
tttggcaatttaaatgagca

SEQ ID NO: 112915 - DNA, 20 bp, Artificial Sequence
  Description of Artificial Sequence: Synthetic oligonucleotide
  Target: LAMA2; (-) strand; PAM type: NRG; PAM sequence: GAG
aaatgtttggcaatttaaat

SEQ ID NO: 112916 - DNA, 20 bp, Artificial Sequence
  Description of Artificial Sequence: Synthetic oligonucleotide
  Target: LAMA2; (-) strand; PAM type: NRG; PAM sequence: TGG
cttgcaggcatacaaatgtt

SEQ ID NO: 112917 - DNA, 20 bp, Artificial Sequence
  Description of Artificial Sequence: Synthetic oligonucleotide
  Target: LAMA2; (-) strand; PAM type: NRG; PAM sequence: AGG
ttgatcaattatttacttgc

SEQ ID NO: 112918 - DNA, 20 bp, Artificial Sequence
  Description of Artificial Sequence: Synthetic oligonucleotide
  Target: LAMA2; (-) strand; PAM type: NRG; PAM sequence: CAG
attgatcaattatttacttg

SEQ ID NO: 112919 - DNA, 20 bp, Artificial Sequence
  Description of Artificial Sequence: Synthetic oligonucleotide
  Target: LAMA2; (-) strand; PAM type: NRG; PAM sequence: AAG
agataaaacaatgtttgtga

SEQ ID NO: 112920 - DNA, 20 bp, Artificial Sequence
  Description of Artificial Sequence: Synthetic oligonucleotide
  Target: LAMA2; (-) strand; PAM type: NRG; PAM sequence: CAG
aaaatacctgcttatgtgat

SEQ ID NO: 112921 - DNA, 20 bp, Artificial Sequence
  Description of Artificial Sequence: Synthetic oligonucleotide
  Target: LAMA2; (-) strand; PAM type: NRG; PAM sequence: TGG
tattttactttctctaacac

SEQ ID NO: 112922 - DNA, 20 bp, Artificial Sequence
  Description of Artificial Sequence: Synthetic oligonucleotide
  Target: LAMA2; (-) strand; PAM type: NRG; PAM sequence: GAG
ctgtgaccacataaaagttt

SEQ ID NO: 112923 - DNA, 20 bp, Artificial Sequence
  Description of Artificial Sequence: Synthetic oligonucleotide
  Target: LAMA2; (-) strand; PAM type: NRG; PAM sequence: AAG
atatgtctgtgaccacataa

SEQ ID NO: 112924 - DNA, 20 bp, Artificial Sequence
  Description of Artificial Sequence: Synthetic oligonucleotide
  Target: LAMA2; (-) strand; PAM type: NRG; PAM sequence: GAG
tggatttctgtcttggttgt

SEQ ID NO: 112925 - DNA, 20 bp, Artificial Sequence
  Description of Artificial Sequence: Synthetic oligonucleotide
  Target: LAMA2; (-) strand; PAM type: NRG; PAM sequence: TGG
atagacttggatttctgtct

SEQ ID NO: 112926 - DNA, 20 bp, Artificial Sequence
  Description of Artificial Sequence: Synthetic oligonucleotide
  Target: LAMA2; (-) strand; PAM type: NRG; PAM sequence: TGG
acactcagaattaatagact

SEQ ID NO: 112927 - DNA, 20 bp, Artificial Sequence
  Description of Artificial Sequence: Synthetic oligonucleotide
  Target: LAMA2; (-) strand; PAM type: NRG; PAM sequence: TAG
agcactacactcagaattaa

SEQ ID NO: 112928 - DNA, 20 bp, Artificial Sequence
  Description of Artificial Sequence: Synthetic oligonucleotide
  Target: LAMA2; (-) strand; PAM type: NRG; PAM sequence: CAG
aaaagcaatagcactacact

SEQ ID NO: 112929 - DNA, 20 bp, Artificial Sequence
  Description of Artificial Sequence: Synthetic oligonucleotide
  Target: LAMA2; (-) strand; PAM type: NRG; PAM sequence: TAG
attatatacttaaaaagcaa

SEQ ID NO: 112930 - DNA, 20 bp, Artificial Sequence
  Description of Artificial Sequence: Synthetic oligonucleotide
  Target: LAMA2; (-) strand; PAM type: NRG; PAM sequence: AAG
agagcaattatatacttaaa

SEQ ID NO: 112931 - DNA, 20 bp, Artificial Sequence
  Description of Artificial Sequence: Synthetic oligonucleotide
  Target: LAMA2; (-) strand; PAM type: NRG; PAM sequence: GAG
tgccatactacacagaatta

SEQ ID NO: 112932 - DNA, 20 bp, Artificial Sequence
  Description of Artificial Sequence: Synthetic oligonucleotide
  Target: LAMA2; (-) strand; PAM type: NRG; PAM sequence: TAG
aatgccatactacacagaat

SEQ ID NO: 112933 - DNA, 20 bp, Artificial Sequence
  Description of Artificial Sequence: Synthetic oligonucleotide
  Target: LAMA2; (-) strand; PAM type: NRG; PAM sequence: CAG
attggtaatgccatactaca

SEQ ID NO: 112934 - DNA, 20 bp, Artificial Sequence
  Description of Artificial Sequence: Synthetic oligonucleotide
  Target: LAMA2; (-) strand; PAM type: NRG; PAM sequence: TGG
aaagtctcatttgcagatat

SEQ ID NO: 112935 - DNA, 20 bp, Artificial Sequence
  Description of Artificial Sequence: Synthetic oligonucleotide
  Target: LAMA2; (-) strand; PAM type: NRG; PAM sequence: CAG
aagtaacaaagtctcatttg

SEQ ID NO: 112936 - DNA, 20 bp, Artificial Sequence
  Description of Artificial Sequence: Synthetic oligonucleotide
  Target: LAMA2; (-) strand; PAM type: NRG; PAM sequence: AAG
ttatattagcagaagtaaca

SEQ ID NO: 112937 - DNA, 20 bp, Artificial Sequence
  Description of Artificial Sequence: Synthetic oligonucleotide
  Target: LAMA2; (-) strand; PAM type: NRG; PAM sequence: AAG
gagtctatttatattagcag

SEQ ID NO: 112938 - DNA, 20 bp, Artificial Sequence
  Description of Artificial Sequence: Synthetic oligonucleotide
  Target: LAMA2; (-) strand; PAM type: NRG; PAM sequence: CAG
attgagtctatttatattag

SEQ ID NO: 112939 - DNA, 20 bp, Artificial Sequence
  Description of Artificial Sequence: Synthetic oligonucleotide
  Target: LAMA2; (-) strand; PAM type: NRG; PAM sequence: TAG
ttaattgagtctatttatat

SEQ ID NO: 112940 - DNA, 20 bp, Artificial Sequence
  Description of Artificial Sequence: Synthetic oligonucleotide
  Target: LAMA2; (-) strand; PAM type: NRG; PAM sequence: GAG
tggcattggcaacattaatt

SEQ ID NO: 112941 - DNA, 20 bp, Artificial Sequence
  Description of Artificial Sequence: Synthetic oligonucleotide
  Target: LAMA2; (-) strand; PAM type: NRG; PAM sequence: TGG
atgaaatgtcacactggcat

SEQ ID NO: 112942 - DNA, 20 bp, Artificial Sequence
  Description of Artificial Sequence: Synthetic oligonucleotide
  Target: LAMA2; (-) strand; PAM type: NRG; PAM sequence: TGG
attttcatgaaatgtcacac

SEQ ID NO: 112943 - DNA, 20 bp, Artificial Sequence
  Description of Artificial Sequence: Synthetic oligonucleotide
  Target: LAMA2; (-) strand; PAM type: NRG; PAM sequence: CGG
ttaaatgcagaaatgaaaga

SEQ ID NO: 112944 - DNA, 20 bp, Artificial Sequence
  Description of Artificial Sequence: Synthetic oligonucleotide
  Target: LAMA2; (-) strand; PAM type: NRG; PAM sequence: AAG
tgtattaaatgcagaaatga

SEQ ID NO: 112945 - DNA, 20 bp, Artificial Sequence
  Description of Artificial Sequence: Synthetic oligonucleotide
  Target: LAMA2; (-) strand; PAM type: NRG; PAM sequence: CAG
tggcagatatgtattaaatg

SEQ ID NO: 112946 - DNA, 20 bp, Artificial Sequence
  Description of Artificial Sequence: Synthetic oligonucleotide
  Target: LAMA2; (-) strand; PAM type: NRG; PAM sequence: CAG
ggtacttagaaggtgcctgg

SEQ ID NO: 112947 - DNA, 20 bp, Artificial Sequence
  Description of Artificial Sequence: Synthetic oligonucleotide
  Target: LAMA2; (-) strand; PAM type: NRG; PAM sequence: TGG
catggtacttagaaggtgcc

SEQ ID NO: 112948 - DNA, 20 bp, Artificial Sequence
  Description of Artificial Sequence: Synthetic oligonucleotide
  Target: LAMA2; (-) strand; PAM type: NRG; PAM sequence: AGG
gttcttacatggtacttaga

SEQ ID NO: 112949 - DNA, 20 bp, Artificial Sequence
  Description of Artificial Sequence: Synthetic oligonucleotide
  Target: LAMA2; (-) strand; PAM type: NRG; PAM sequence: AAG
agttcttacatggtacttag

SEQ ID NO: 112950 - DNA, 20 bp, Artificial Sequence
  Description of Artificial Sequence: Synthetic oligonucleotide
  Target: LAMA2; (-) strand; PAM type: NRG; PAM sequence: TAG
tttagttcttacatggtact

SEQ ID NO: 112951 - DNA, 20 bp, Artificial Sequence
  Description of Artificial Sequence: Synthetic oligonucleotide
  Target: LAMA2; (-) strand; PAM type: NRG; PAM sequence: TGG
aacttcatttagttcttaca

SEQ ID NO: 112952 - DNA, 20 bp, Artificial Sequence
  Description of Artificial Sequence: Synthetic oligonucleotide
  Target: LAMA2; (-) strand; PAM type: NRG; PAM sequence: TAG
caagaacttagaacttcatt

SEQ ID NO: 112953 - DNA, 20 bp, Artificial Sequence
  Description of Artificial Sequence: Synthetic oligonucleotide
  Target: LAMA2; (-) strand; PAM type: NRG; PAM sequence: TAG
gttccttgaaggcaagaact

SEQ ID NO: 112954 - DNA, 20 bp, Artificial Sequence
  Description of Artificial Sequence: Synthetic oligonucleotide
  Target: LAMA2; (-) strand; PAM type: NRG; PAM sequence: AAG
gatgcaagttccttgaaggc

SEQ ID NO: 112955 - DNA, 20 bp, Artificial Sequence
  Description of Artificial Sequence: Synthetic oligonucleotide
  Target: LAMA2; (-) strand; PAM type: NRG; PAM sequence: AGG
gttcgatgcaagttccttga

SEQ ID NO: 112956 - DNA, 20 bp, Artificial Sequence
  Description of Artificial Sequence: Synthetic oligonucleotide
  Target: LAMA2; (-) strand; PAM type: NRG; PAM sequence: AAG
agttcgatgcaagttccttg

SEQ ID NO: 112957 - DNA, 20 bp, Artificial Sequence
  Description of Artificial Sequence: Synthetic oligonucleotide
  Target: LAMA2; (-) strand; PAM type: NRG; PAM sequence: AAG
ctatctccccagttcgatgc

SEQ ID NO: 112958 - DNA, 20 bp, Artificial Sequence
  Description of Artificial Sequence: Synthetic oligonucleotide
  Target: LAMA2; (-) strand; PAM type: NRG; PAM sequence: CAG
ttgatacttgtctatctccc

SEQ ID NO: 112959 - DNA, 20 bp, Artificial Sequence
  Description of Artificial Sequence: Synthetic oligonucleotide
  Target: LAMA2; (-) strand; PAM type: NRG; PAM sequence: TAG
tacatctctatcacagcaat

SEQ ID NO: 112960 - DNA, 20 bp, Artificial Sequence
  Description of Artificial Sequence: Synthetic oligonucleotide
  Target: LAMA2; (-) strand; PAM type: NRG; PAM sequence: CAG
ggctacatacatctctatca

SEQ ID NO: 112961 - DNA, 20 bp, Artificial Sequence
  Description of Artificial Sequence: Synthetic oligonucleotide
  Target: LAMA2; (-) strand; PAM type: NRG; PAM sequence: TGG
tctcttctgagattgctcgc

SEQ ID NO: 112962 - DNA, 20 bp, Artificial Sequence
  Description of Artificial Sequence: Synthetic oligonucleotide
  Target: LAMA2; (-) strand; PAM type: NRG; PAM sequence: GAG
gactcaagtgtctctcttct

SEQ ID NO: 112963 - DNA, 20 bp, Artificial Sequence
  Description of Artificial Sequence: Synthetic oligonucleotide
  Target: LAMA2; (-) strand; PAM type: NRG; PAM sequence: AAG
ctgacctctctgtttgactc

SEQ ID NO: 112964 - DNA, 20 bp, Artificial Sequence
  Description of Artificial Sequence: Synthetic oligonucleotide
  Target: LAMA2; (-) strand; PAM type: NRG; PAM sequence: TGG
gtgcctcagggtcactccag

SEQ ID NO: 112965 - DNA, 20 bp, Artificial Sequence
  Description of Artificial Sequence: Synthetic oligonucleotide
  Target: LAMA2; (-) strand; PAM type: NRG; PAM sequence: CAG
cttgtgcctcagggtcactc

SEQ ID NO: 112966 - DNA, 20 bp, Artificial Sequence
  Description of Artificial Sequence: Synthetic oligonucleotide
  Target: LAMA2; (-) strand; PAM type: NRG; PAM sequence: GGG
ctcatccagcttgtgcctca

SEQ ID NO: 112967 - DNA, 20 bp, Artificial Sequence
  Description of Artificial Sequence: Synthetic oligonucleotide
  Target: LAMA2; (-) strand; PAM type: NRG; PAM sequence: AGG
cctcatccagcttgtgcctc

SEQ ID NO: 112968 - DNA, 20 bp, Artificial Sequence
  Description of Artificial Sequence: Synthetic oligonucleotide
  Target: LAMA2; (-) strand; PAM type: NRG; PAM sequence: CAG
tcctcatccagcttgtgcct

SEQ ID NO: 112969 - DNA, 20 bp, Artificial Sequence
  Description of Artificial Sequence: Synthetic oligonucleotide
  Target: LAMA2; (-) strand; PAM type: NRG; PAM sequence: CAG
catccagctaactcctcatc

SEQ ID NO: 112970 - DNA, 20 bp, Artificial Sequence
  Description of Artificial Sequence: Synthetic oligonucleotide
  Target: LAMA2; (-) strand; PAM type: NRG; PAM sequence: CAG
gtccatacatgcttttcatc

SEQ ID NO: 112971 - DNA, 20 bp, Artificial Sequence
  Description of Artificial Sequence: Synthetic oligonucleotide
  Target: LAMA2; (-) strand; PAM type: NRG; PAM sequence: AGG
ttattctctctgatgactcc

SEQ ID NO: 112972 - DNA, 20 bp, Artificial Sequence
  Description of Artificial Sequence: Synthetic oligonucleotide
  Target: LAMA2; (-) strand; PAM type: NRG; PAM sequence: CAG
gttattctctctgatgactc

SEQ ID NO: 112973 - DNA, 20 bp, Artificial Sequence
  Description of Artificial Sequence: Synthetic oligonucleotide
  Target: LAMA2; (-) strand; PAM type: NRG; PAM sequence: AGG
gttggaaatgcagctggaaa

SEQ ID NO: 112974 - DNA, 20 bp, Artificial Sequence
  Description of Artificial Sequence: Synthetic oligonucleotide
  Target: LAMA2; (-) strand; PAM type: NRG; PAM sequence: AAG
tgttggaaatgcagctggaa

SEQ ID NO: 112975 - DNA, 20 bp, Artificial Sequence
  Description of Artificial Sequence: Synthetic oligonucleotide
  Target: LAMA2; (-) strand; PAM type: NRG; PAM sequence: TGG
tttcctgttggaaatgcagc

SEQ ID NO: 112976 - DNA, 20 bp, Artificial Sequence
  Description of Artificial Sequence: Synthetic oligonucleotide
  Target: LAMA2; (-) strand; PAM type: NRG; PAM sequence: CAG
agagtttcctgttggaaatg

SEQ ID NO: 112977 - DNA, 20 bp, Artificial Sequence
  Description of Artificial Sequence: Synthetic oligonucleotide
  Target: LAMA2; (-) strand; PAM type: NRG; PAM sequence: TGG
gtttctctagagtttcctgt

SEQ ID NO: 112978 - DNA, 20 bp, Artificial Sequence
  Description of Artificial Sequence: Synthetic oligonucleotide
  Target: LAMA2; (-) strand; PAM type: NRG; PAM sequence: GAG
ccatatgagaggtttctcta

SEQ ID NO: 112979 - DNA, 20 bp, Artificial Sequence
  Description of Artificial Sequence: Synthetic oligonucleotide
  Target: LAMA2; (-) strand; PAM type: NRG; PAM sequence: TAG
tcccatatgagaggtttctc

SEQ ID NO: 112980 - DNA, 20 bp, Artificial Sequence
  Description of Artificial Sequence: Synthetic oligonucleotide
  Target: LAMA2; (-) strand; PAM type: NRG; PAM sequence: AGG
cagtttttgtcccatatgag

SEQ ID NO: 112981 - DNA, 20 bp, Artificial Sequence
  Description of Artificial Sequence: Synthetic oligonucleotide
  Target: LAMA2; (-) strand; PAM type: NRG; PAM sequence: GAG
ccagtttttgtcccatatga

SEQ ID NO: 112982 - DNA, 20 bp, Artificial Sequence
  Description of Artificial Sequence: Synthetic oligonucleotide
  Target: LAMA2; (-) strand; PAM type: NRG; PAM sequence: GAG
agccagtttttgtcccatat

SEQ ID NO: 112983 - DNA, 20 bp, Artificial Sequence
  Description of Artificial Sequence: Synthetic oligonucleotide
  Target: LAMA2; (-) strand; PAM type: NRG; PAM sequence: CAG
aaaataaagaattgcaaagc

SEQ ID NO: 112984 - DNA, 20 bp, Artificial Sequence
  Description of Artificial Sequence: Synthetic oligonucleotide
  Target: LAMA2; (-) strand; PAM type: NRG; PAM sequence: AAG
ctccaaaataaagaattgca

SEQ ID NO: 112985 - DNA, 20 bp, Artificial Sequence
  Description of Artificial Sequence: Synthetic oligonucleotide
  Target: LAMA2; (-) strand; PAM type: NRG; PAM sequence: AAG
tgcagcagcactccaaaata

SEQ ID NO: 112986 - DNA, 20 bp, Artificial Sequence
  Description of Artificial Sequence: Synthetic oligonucleotide
  Target: LAMA2; (-) strand; PAM type: NRG; PAM sequence: CAG
cacaggaacaatgtatgcag

SEQ ID NO: 112987 - DNA, 20 bp, Artificial Sequence
  Description of Artificial Sequence: Synthetic oligonucleotide
  Target: LAMA2; (-) strand; PAM type: NRG; PAM sequence: CAG
ttacacaggaacaatgtatg

SEQ ID NO: 112988 - DNA, 20 bp, Artificial Sequence
  Description of Artificial Sequence: Synthetic oligonucleotide
  Target: LAMA2; (-) strand; PAM type: NRG; PAM sequence: AGG
gcattgtgcctctcttacac

SEQ ID NO: 112989 - DNA, 20 bp, Artificial Sequence
  Description of Artificial Sequence: Synthetic oligonucleotide
  Target: LAMA2; (-) strand; PAM type: NRG; PAM sequence: CAG
tgcattgtgcctctcttaca

SEQ ID NO: 112990 - DNA, 20 bp, Artificial Sequence
  Description of Artificial Sequence: Synthetic oligonucleotide
  Target: LAMA2; (-) strand; PAM type: NRG; PAM sequence: GAG
actgaacaactaactacaca

SEQ ID NO: 112991 - DNA, 20 bp, Artificial Sequence
  Description of Artificial Sequence: Synthetic oligonucleotide
  Target: LAMA2; (-) strand; PAM type: NRG; PAM sequence: CAG
ttactgaacaactaactaca

SEQ ID NO: 112992 - DNA, 20 bp, Artificial Sequence
  Description of Artificial Sequence: Synthetic oligonucleotide
  Target: LAMA2; (-) strand; PAM type: NRG; PAM sequence: CAG
ttgggaaatgctgggttaaa

SEQ ID NO: 112993 - DNA, 20 bp, Artificial Sequence
  Description of Artificial Sequence: Synthetic oligonucleotide
  Target: LAMA2; (-) strand; PAM type: NRG; PAM sequence: GGG
aaagaaatttgggaaatgct

SEQ ID NO: 112994 - DNA, 20 bp, Artificial Sequence
  Description of Artificial Sequence: Synthetic oligonucleotide
  Target: LAMA2; (-) strand; PAM type: NRG; PAM sequence: TGG
taaagaaatttgggaaatgc

SEQ ID NO: 112995 - DNA, 20 bp, Artificial Sequence
  Description of Artificial Sequence: Synthetic oligonucleotide
  Target: LAMA2; (-) strand; PAM type: NRG; PAM sequence: GGG
ttctctgattaaagaaattt

SEQ ID NO: 112996 - DNA, 20 bp, Artificial Sequence
  Description of Artificial Sequence: Synthetic oligonucleotide
  Target: LAMA2; (-) strand; PAM type: NRG; PAM sequence: TGG
tttctctgattaaagaaatt

SEQ ID NO: 112997 - DNA, 20 bp, Artificial Sequence
  Description of Artificial Sequence: Synthetic oligonucleotide
  Target: LAMA2; (-) strand; PAM type: NRG; PAM sequence: AAG
tggaaggatttctctgatta

SEQ ID NO: 112998 - DNA, 20 bp, Artificial Sequence
  Description of Artificial Sequence: Synthetic oligonucleotide
  Target: LAMA2; (-) strand; PAM type: NRG; PAM sequence: AGG
gctagtattacaggaatgga

SEQ ID NO: 112999 - DNA, 20 bp, Artificial Sequence
  Description of Artificial Sequence: Synthetic oligonucleotide
  Target: LAMA2; (-) strand; PAM type: NRG; PAM sequence: AAG
tgctagtattacaggaatgg

SEQ ID NO: 113000 - DNA, 20 bp, Artificial Sequence
  Description of Artificial Sequence: Synthetic oligonucleotide
  Target: LAMA2; (-) strand; PAM type: NRG; PAM sequence: TGG
gaatgctagtattacaggaa

SEQ ID NO: 113001 - DNA, 20 bp, Artificial Sequence
  Description of Artificial Sequence: Synthetic oligonucleotide
  Target: LAMA2; (-) strand; PAM type: NRG; PAM sequence: AGG
cagcagaatgctagtattac

SEQ ID NO: 113002 - DNA, 20 bp, Artificial Sequence
  Description of Artificial Sequence: Synthetic oligonucleotide
  Target: LAMA2; (-) strand; PAM type: NRG; PAM sequence: CAG
tcagcagaatgctagtatta

SEQ ID NO: 113003 - DNA, 20 bp, Artificial Sequence
  Description of Artificial Sequence: Synthetic oligonucleotide
  Target: LAMA2; (-) strand; PAM type: NRG; PAM sequence: TAG
aagtgtgttcagcagaatgc

SEQ ID NO: 113004 - DNA, 20 bp, Artificial Sequence
  Description of Artificial Sequence: Synthetic oligonucleotide
  Target: LAMA2; (-) strand; PAM type: NRG; PAM sequence: CAG
attccccaaagtgtgttcag

SEQ ID NO: 113005 - DNA, 20 bp, Artificial Sequence
  Description of Artificial Sequence: Synthetic oligonucleotide
  Target: LAMA2; (-) strand; PAM type: NRG; PAM sequence: CAG
agcattccccaaagtgtgtt

SEQ ID NO: 113006 - DNA, 20 bp, Artificial Sequence
  Description of Artificial Sequence: Synthetic oligonucleotide
  Target: LAMA2; (-) strand; PAM type: NRG; PAM sequence: AAG
agttactaaagcattcccca

SEQ ID NO: 113007 - DNA, 20 bp, Artificial Sequence
  Description of Artificial Sequence: Synthetic oligonucleotide
  Target: LAMA2; (-) strand; PAM type: NRG; PAM sequence: AAG
ggattcacttgtagttacta

SEQ ID NO: 113008 - DNA, 20 bp, Artificial Sequence
  Description of Artificial Sequence: Synthetic oligonucleotide
  Target: LAMA2; (-) strand; PAM type: NRG; PAM sequence: TAG
gtaggctatggattcacttg

SEQ ID NO: 113009 - DNA, 20 bp, Artificial Sequence
  Description of Artificial Sequence: Synthetic oligonucleotide
  Target: LAMA2; (-) strand; PAM type: NRG; PAM sequence: TGG
acattcattcgtgtaggcta

SEQ ID NO: 113010 - DNA, 20 bp, Artificial Sequence
  Description of Artificial Sequence: Synthetic oligonucleotide
  Target: LAMA2; (-) strand; PAM type: NRG; PAM sequence: AGG
ctgccaacattcattcgtgt

SEQ ID NO: 113011 - DNA, 20 bp, Artificial Sequence
  Description of Artificial Sequence: Synthetic oligonucleotide
  Target: LAMA2; (-) strand; PAM type: NRG; PAM sequence: TAG
cctgccaacattcattcgtg

SEQ ID NO: 113012 - DNA, 20 bp, Artificial Sequence
  Description of Artificial Sequence: Synthetic oligonucleotide
  Target: LAMA2; (-) strand; PAM type: NRG; PAM sequence: TGG
gcactggttctgttatctct

SEQ ID NO: 113013 - DNA, 20 bp, Artificial Sequence
  Description of Artificial Sequence: Synthetic oligonucleotide
  Target: LAMA2; (-) strand; PAM type: NRG; PAM sequence: TGG
tcatatgtccccttatgcac

SEQ ID NO: 113014 - DNA, 20 bp, Artificial Sequence
  Description of Artificial Sequence: Synthetic oligonucleotide
  Target: LAMA2; (-) strand; PAM type: NRG; PAM sequence: TAG
aaagctgaaactcactcact

SEQ ID NO: 113015 - DNA, 20 bp, Artificial Sequence
  Description of Artificial Sequence: Synthetic oligonucleotide
  Target: LAMA2; (-) strand; PAM type: NRG; PAM sequence: AAG
tccctatggctttcaggata

SEQ ID NO: 113016 - DNA, 20 bp, Artificial Sequence
  Description of Artificial Sequence: Synthetic oligonucleotide
  Target: LAMA2; (-) strand; PAM type: NRG; PAM sequence: AGG
tcggtatccctatggctttc

SEQ ID NO: 113017 - DNA, 20 bp, Artificial Sequence
  Description of Artificial Sequence: Synthetic oligonucleotide
  Target: LAMA2; (-) strand; PAM type: NRG; PAM sequence: CAG
ctcggtatccctatggcttt

SEQ ID NO: 113018 - DNA, 20 bp, Artificial Sequence
  Description of Artificial Sequence: Synthetic oligonucleotide
  Target: LAMA2; (-) strand; PAM type: NRG; PAM sequence: TGG
tagagttctcggtatcccta

SEQ ID NO: 113019 - DNA, 20 bp, Artificial Sequence
  Description of Artificial Sequence: Synthetic oligonucleotide
  Target: LAMA2; (-) strand; PAM type: NRG; PAM sequence: CGG
cttaaaactcttagagttct

SEQ ID NO: 113020 - DNA, 20 bp, Artificial Sequence
  Description of Artificial Sequence: Synthetic oligonucleotide
  Target: LAMA2; (-) strand; PAM type: NRG; PAM sequence: GAG
accctttcttaaaactctta

SEQ ID NO: 113021 - DNA, 20 bp, Artificial Sequence
  Description of Artificial Sequence: Synthetic oligonucleotide
  Target: LAMA2; (-) strand; PAM type: NRG; PAM sequence: TAG
acaccctttcttaaaactct

SEQ ID NO: 113022 - DNA, 20 bp, Artificial Sequence
  Description of Artificial Sequence: Synthetic oligonucleotide
  Target: LAMA2; (-) strand; PAM type: NRG; PAM sequence: AAG
aagaaactttactaaagcac

SEQ ID NO: 113023 - DNA, 20 bp, Artificial Sequence
  Description of Artificial Sequence: Synthetic oligonucleotide
  Target: LAMA2; (-) strand; PAM type: NRG; PAM sequence: AAG
ctgctaaagaaactttacta

SEQ ID NO: 113024 - DNA, 20 bp, Artificial Sequence
  Description of Artificial Sequence: Synthetic oligonucleotide
  Target: LAMA2; (-) strand; PAM type: NRG; PAM sequence: AAG
atatctccaaactgctgcta

SEQ ID NO: 113025 - DNA, 20 bp, Artificial Sequence
  Description of Artificial Sequence: Synthetic oligonucleotide
  Target: LAMA2; (-) strand; PAM type: NRG; PAM sequence: TAG
actaggctcaccagactccg

SEQ ID NO: 113026 - DNA, 20 bp, Artificial Sequence
  Description of Artificial Sequence: Synthetic oligonucleotide
  Target: LAMA2; (-) strand; PAM type: NRG; PAM sequence: CAG
tggggagacactaggctcac

SEQ ID NO: 113027 - DNA, 20 bp, Artificial Sequence
  Description of Artificial Sequence: Synthetic oligonucleotide
  Target: LAMA2; (-) strand; PAM type: NRG; PAM sequence: AGG
gaagttggtggggagacact

SEQ ID NO: 113028 - DNA, 20 bp, Artificial Sequence
  Description of Artificial Sequence: Synthetic oligonucleotide
  Target: LAMA2; (-) strand; PAM type: NRG; PAM sequence: TAG
agaagttggtggggagacac

SEQ ID NO: 113029 - DNA, 20 bp, Artificial Sequence
  Description of Artificial Sequence: Synthetic oligonucleotide
  Target: LAMA2; (-) strand; PAM type: NRG; PAM sequence: GAG
atagaagagaagttggtggg

SEQ ID NO: 113030 - DNA, 20 bp, Artificial Sequence
  Description of Artificial Sequence: Synthetic oligonucleotide
  Target: LAMA2; (-) strand; PAM type: NRG; PAM sequence: GGG
ctatagaagagaagttggtg

SEQ ID NO: 113031 - DNA, 20 bp, Artificial Sequence
  Description of Artificial Sequence: Synthetic oligonucleotide
  Target: LAMA2; (-) strand; PAM type: NRG; PAM sequence: GGG
actatagaagagaagttggt

SEQ ID NO: 113032 - DNA, 20 bp, Artificial Sequence
  Description of Artificial Sequence: Synthetic oligonucleotide
  Target: LAMA2; (-) strand; PAM type: NRG; PAM sequence: TGG
tactatagaagagaagttgg

SEQ ID NO: 113033 - DNA, 20 bp, Artificial Sequence
  Description of Artificial Sequence: Synthetic oligonucleotide
  Target: LAMA2; (-) strand; PAM type: NRG; PAM sequence: TGG
tactactatagaagagaagt

SEQ ID NO: 113034 - DNA, 20 bp, Artificial Sequence
  Description of Artificial Sequence: Synthetic oligonucleotide
  Target: LAMA2; (-) strand; PAM type: NRG; PAM sequence: AAG
attctactactatagaagag

SEQ ID NO: 113035 - DNA, 20 bp, Artificial Sequence
  Description of Artificial Sequence: Synthetic oligonucleotide
  Target: LAMA2; (-) strand; PAM type: NRG; PAM sequence: GAG
gttattctactactatagaa

SEQ ID NO: 113036 - DNA, 20 bp, Artificial Sequence
  Description of Artificial Sequence: Synthetic oligonucleotide
  Target: LAMA2; (-) strand; PAM type: NRG; PAM sequence: AAG
ctgttattctactactatag

SEQ ID NO: 113037 - DNA, 20 bp, Artificial Sequence
  Description of Artificial Sequence: Synthetic oligonucleotide
  Target: LAMA2; (-) strand; PAM type: NRG; PAM sequence: TAG
aatctgttattctactacta

SEQ ID NO: 113038 - DNA, 20 bp, Artificial Sequence
  Description of Artificial Sequence: Synthetic oligonucleotide
  Target: LAMA2; (-) strand; PAM type: NRG; PAM sequence: AGG
tcatctgttgatggacattt

SEQ ID NO: 113039 - DNA, 20 bp, Artificial Sequence
  Description of Artificial Sequence: Synthetic oligonucleotide
  Target: LAMA2; (-) strand; PAM type: NRG; PAM sequence: TAG
gtcatctgttgatggacatt

SEQ ID NO: 113040 - DNA, 20 bp, Artificial Sequence
  Description of Artificial Sequence: Synthetic oligonucleotide
  Target: LAMA2; (-) strand; PAM type: NRG; PAM sequence: TGG
ttttctcagtcatctgttga

SEQ ID NO: 113041 - DNA, 20 bp, Artificial Sequence
  Description of Artificial Sequence: Synthetic oligonucleotide
  Target: LAMA2; (-) strand; PAM type: NRG; PAM sequence: CAG
tataccacattttcttttct

SEQ ID NO: 113042 - DNA, 20 bp, Artificial Sequence
  Description of Artificial Sequence: Synthetic oligonucleotide
  Target: LAMA2; (-) strand; PAM type: NRG; PAM sequence: TGG
tatggctgcatagtattctg

SEQ ID NO: 113043 - DNA, 20 bp, Artificial Sequence
  Description of Artificial Sequence: Synthetic oligonucleotide
  Target: LAMA2; (-) strand; PAM type: NRG; PAM sequence: TAG
cttctttttttatggctgca

SEQ ID NO: 113044 - DNA, 20 bp, Artificial Sequence
  Description of Artificial Sequence: Synthetic oligonucleotide
  Target: LAMA2; (-) strand; PAM type: NRG; PAM sequence: TGG
atgatttccttcttttttta

SEQ ID NO: 113045 - DNA, 20 bp, Artificial Sequence
  Description of Artificial Sequence: Synthetic oligonucleotide
  Target: LAMA2; (-) strand; PAM type: NRG; PAM sequence: AAG
gtccattcctgttgctgcaa

SEQ ID NO: 113046 - DNA, 20 bp, Artificial Sequence
  Description of Artificial Sequence: Synthetic oligonucleotide
  Target: LAMA2; (-) strand; PAM type: NRG; PAM sequence: AGG
cacttaggataatgacctcc

SEQ ID NO: 113047 - DNA, 20 bp, Artificial Sequence
  Description of Artificial Sequence: Synthetic oligonucleotide
  Target: LAMA2; (-) strand; PAM type: NRG; PAM sequence: CAG
tcacttaggataatgacctc

SEQ ID NO: 113048 - DNA, 20 bp, Artificial Sequence
  Description of Artificial Sequence: Synthetic oligonucleotide
  Target: LAMA2; (-) strand; PAM type: NRG; PAM sequence: AGG
gtttctgggttatgtcactt

SEQ ID NO: 113049 - DNA, 20 bp, Artificial Sequence
  Description of Artificial Sequence: Synthetic oligonucleotide
  Target: LAMA2; (-) strand; PAM type: NRG; PAM sequence: TAG
tgtttctgggttatgtcact

SEQ ID NO: 113050 - DNA, 20 bp, Artificial Sequence
  Description of Artificial Sequence: Synthetic oligonucleotide
  Target: LAMA2; (-) strand; PAM type: NRG; PAM sequence: GGG
gtattggattttctgtttct

SEQ ID NO: 113051 - DNA, 20 bp, Artificial Sequence
  Description of Artificial Sequence: Synthetic oligonucleotide
  Target: LAMA2; (-) strand; PAM type: NRG; PAM sequence: TGG
ggtattggattttctgtttc

SEQ ID NO: 113052 - DNA, 20 bp, Artificial Sequence
  Description of Artificial Sequence: Synthetic oligonucleotide
  Target: LAMA2; (-) strand; PAM type: NRG; PAM sequence: TGG
taagtgagaacatatggtat

SEQ ID NO: 113053 - DNA, 20 bp, Artificial Sequence
  Description of Artificial Sequence: Synthetic oligonucleotide
  Target: LAMA2; (-) strand; PAM type: NRG; PAM sequence: TGG
gccttgtaagtgagaacata

SEQ ID NO: 113054 - DNA, 20 bp, Artificial Sequence
  Description of Artificial Sequence: Synthetic oligonucleotide
  Target: LAMA2; (-) strand; PAM type: NRG; PAM sequence: GAG
tagcttctcgccttgtaagt

SEQ ID NO: 113055 - DNA, 20 bp, Artificial Sequence
  Description of Artificial Sequence: Synthetic oligonucleotide
  Target: LAMA2; (-) strand; PAM type: NRG; PAM sequence: AAG
tgtttagcttctcgccttgt

SEQ ID NO: 113056 - DNA, 20 bp, Artificial Sequence
  Description of Artificial Sequence: Synthetic oligonucleotide
  Target: LAMA2; (-) strand; PAM type: NRG; PAM sequence: TAG
gtcttcgtgtatccattgtt

SEQ ID NO: 113057 - DNA, 20 bp, Artificial Sequence
  Description of Artificial Sequence: Synthetic oligonucleotide
  Target: LAMA2; (-) strand; PAM type: NRG; PAM sequence: CAG
ctccccccttttggagtccc

SEQ ID NO: 113058 - DNA, 20 bp, Artificial Sequence
  Description of Artificial Sequence: Synthetic oligonucleotide
  Target: LAMA2; (-) strand; PAM type: NRG; PAM sequence: GAG
ctcctccctccccccttttg

SEQ ID NO: 113059 - DNA, 20 bp, Artificial Sequence
  Description of Artificial Sequence: Synthetic oligonucleotide
  Target: LAMA2; (-) strand; PAM type: NRG; PAM sequence: TGG
ttctcctccctccccccttt

SEQ ID NO: 113060 - DNA, 20 bp, Artificial Sequence
  Description of Artificial Sequence: Synthetic oligonucleotide
  Target: LAMA2; (-) strand; PAM type: NRG; PAM sequence: AGG
cagtgaacactgtacccaac

SEQ ID NO: 113061 - DNA, 20 bp, Artificial Sequence
  Description of Artificial Sequence: Synthetic oligonucleotide
  Target: LAMA2; (-) strand; PAM type: NRG; PAM sequence: CAG
acagtgaacactgtacccaa

SEQ ID NO: 113062 - DNA, 20 bp, Artificial Sequence
  Description of Artificial Sequence: Synthetic oligonucleotide
  Target: LAMA2; (-) strand; PAM type: NRG; PAM sequence: CAG
tagtggacccatcacccaca

SEQ ID NO: 113063 - DNA, 20 bp, Artificial Sequence
  Description of Artificial Sequence: Synthetic oligonucleotide
  Target: LAMA2; (-) strand; PAM type: NRG; PAM sequence: TGG
agtgaagtttgggcttctag

SEQ ID NO: 113064 - DNA, 20 bp, Artificial Sequence
  Description of Artificial Sequence: Synthetic oligonucleotide
  Target: LAMA2; (-) strand; PAM type: NRG; PAM sequence: TAG
aagagtgaagtttgggcttc

SEQ ID NO: 113065 - DNA, 20 bp, Artificial Sequence
  Description of Artificial Sequence: Synthetic oligonucleotide
  Target: LAMA2; (-) strand; PAM type: NRG; PAM sequence: GGG
attgcataagagtgaagttt

SEQ ID NO: 113066 - DNA, 20 bp, Artificial Sequence
  Description of Artificial Sequence: Synthetic oligonucleotide
  Target: LAMA2; (-) strand; PAM type: NRG; PAM sequence: TGG
tattgcataagagtgaagtt

SEQ ID NO: 113067 - DNA, 20 bp, Artificial Sequence
  Description of Artificial Sequence: Synthetic oligonucleotide
  Target: LAMA2; (-) strand; PAM type: NRG; PAM sequence: AAG
ggatatattgcataagagtg

SEQ ID NO: 113068 - DNA, 20 bp, Artificial Sequence
  Description of Artificial Sequence: Synthetic oligonucleotide
  Target: LAMA2; (-) strand; PAM type: NRG; PAM sequence: GAG
ttcatggatatattgcataa

SEQ ID NO: 113069 - DNA, 20 bp, Artificial Sequence
  Description of Artificial Sequence: Synthetic oligonucleotide
  Target: LAMA2; (-) strand; PAM type: NRG; PAM sequence: AAG
gtttcatggatatattgcat

SEQ ID NO: 113070 - DNA, 20 bp, Artificial Sequence
  Description of Artificial Sequence: Synthetic oligonucleotide
  Target: LAMA2; (-) strand; PAM type: NRG; PAM sequence: TGG
gcatatgaaggtttgtttca

SEQ ID NO: 113071 - DNA, 20 bp, Artificial Sequence
  Description of Artificial Sequence: Synthetic oligonucleotide
  Target: LAMA2; (-) strand; PAM type: NRG; PAM sequence: AGG
gatccaggtggtgcatatga

SEQ ID NO: 113072 - DNA, 20 bp, Artificial Sequence
  Description of Artificial Sequence: Synthetic oligonucleotide
  Target: LAMA2; (-) strand; PAM type: NRG; PAM sequence: AAG
agatccaggtggtgcatatg

SEQ ID NO: 113073 - DNA, 20 bp, Artificial Sequence
  Description of Artificial Sequence: Synthetic oligonucleotide
  Target: LAMA2; (-) strand; PAM type: NRG; PAM sequence: TGG
ttcacaattttagatccagg

SEQ ID NO: 113074 - DNA, 20 bp, Artificial Sequence
  Description of Artificial Sequence: Synthetic oligonucleotide
  Target: LAMA2; (-) strand; PAM type: NRG; PAM sequence: AGG
tatttcacaattttagatcc

SEQ ID NO: 113075 - DNA, 20 bp, Artificial Sequence
  Description of Artificial Sequence: Synthetic oligonucleotide
  Target: LAMA2; (-) strand; PAM type: NRG; PAM sequence: CAG
ttatttcacaattttagatc

SEQ ID NO: 113076 - DNA, 20 bp, Artificial Sequence
  Description of Artificial Sequence: Synthetic oligonucleotide
  Target: LAMA2; (-) strand; PAM type: NRG; PAM sequence: TAG
tttttattatttcacaattt

SEQ ID NO: 113077 - DNA, 20 bp, Artificial Sequence
  Description of Artificial Sequence: Synthetic oligonucleotide
  Target: LAMA2; (-) strand; PAM type: NRG; PAM sequence: TAG
tagcattagccaattcagct

SEQ ID NO: 113078 - DNA, 20 bp, Artificial Sequence
  Description of Artificial Sequence: Synthetic oligonucleotide
  Target: LAMA2; (-) strand; PAM type: NRG; PAM sequence: CAG
gtttatagcattagccaatt

SEQ ID NO: 113079 - DNA, 20 bp, Artificial Sequence
  Description of Artificial Sequence: Synthetic oligonucleotide
  Target: LAMA2; (-) strand; PAM type: NRG; PAM sequence: TAG
atctttagagtttatagcat

SEQ ID NO: 113080 - DNA, 20 bp, Artificial Sequence
  Description of Artificial Sequence: Synthetic oligonucleotide
  Target: LAMA2; (-) strand; PAM type: NRG; PAM sequence: TAG
attactatctttagagttta

SEQ ID NO: 113081 - DNA, 20 bp, Artificial Sequence
  Description of Artificial Sequence: Synthetic oligonucleotide
  Target: LAMA2; (-) strand; PAM type: NRG; PAM sequence: GAG
caagcatattactatcttta

SEQ ID NO: 113082 - DNA, 20 bp, Artificial Sequence
  Description of Artificial Sequence: Synthetic oligonucleotide
  Target: LAMA2; (-) strand; PAM type: NRG; PAM sequence: TAG
accaagcatattactatctt

SEQ ID NO: 113083 - DNA, 20 bp, Artificial Sequence
  Description of Artificial Sequence: Synthetic oligonucleotide
  Target: LAMA2; (-) strand; PAM type: NRG; PAM sequence: AAG
tgttataccgtacatctacc

SEQ ID NO: 113084 - DNA, 20 bp, Artificial Sequence
  Description of Artificial Sequence: Synthetic oligonucleotide
  Target: LAMA2; (-) strand; PAM type: NRG; PAM sequence: AAG
tttataaaaattgttctcct

SEQ ID NO: 113085 - DNA, 20 bp, Artificial Sequence
  Description of Artificial Sequence: Synthetic oligonucleotide
  Target: LAMA2; (-) strand; PAM type: NRG; PAM sequence: AAG
ttatggaaattagcgtttcc

SEQ ID NO: 113086 - DNA, 20 bp, Artificial Sequence
  Description of Artificial Sequence: Synthetic oligonucleotide
  Target: LAMA2; (-) strand; PAM type: NRG; PAM sequence: TAG
agcagactgattatggaaat

SEQ ID NO: 113087 - DNA, 20 bp, Artificial Sequence
  Description of Artificial Sequence: Synthetic oligonucleotide
  Target: LAMA2; (-) strand; PAM type: NRG; PAM sequence: TGG
ttgagatagcagactgatta

SEQ ID NO: 113088 - DNA, 20 bp, Artificial Sequence
  Description of Artificial Sequence: Synthetic oligonucleotide
  Target: LAMA2; (-) strand; PAM type: NRG; PAM sequence: CAG
tagaataaaagttgagatag

SEQ ID NO: 113089 - DNA, 20 bp, Artificial Sequence
  Description of Artificial Sequence: Synthetic oligonucleotide
  Target: LAMA2; (-) strand; PAM type: NRG; PAM sequence: TAG
ggatagaataaaagttgaga

SEQ ID NO: 113090 - DNA, 20 bp, Artificial Sequence
  Description of Artificial Sequence: Synthetic oligonucleotide
  Target: LAMA2; (-) strand; PAM type: NRG; PAM sequence: GAG
taatggatagaataaaagtt

SEQ ID NO: 113091 - DNA, 20 bp, Artificial Sequence
  Description of Artificial Sequence: Synthetic oligonucleotide
  Target: LAMA2; (-) strand; PAM type: NRG; PAM sequence: AAG
tgttttaatggatagaataa

SEQ ID NO: 113092 - DNA, 20 bp, Artificial Sequence
  Description of Artificial Sequence: Synthetic oligonucleotide
  Target: LAMA2; (-) strand; PAM type: NRG; PAM sequence: TAG
tgtttatttgttttaatgga

SEQ ID NO: 113093 - DNA, 20 bp, Artificial Sequence
  Description of Artificial Sequence: Synthetic oligonucleotide
  Target: LAMA2; (-) strand; PAM type: NRG; PAM sequence: TGG
cttttgtttatttgttttaa

SEQ ID NO: 113094 - DNA, 20 bp, Artificial Sequence
  Description of Artificial Sequence: Synthetic oligonucleotide
  Target: LAMA2; (-) strand; PAM type: NRG; PAM sequence: CAG
actaatattgattcagagca

SEQ ID NO: 113095 - DNA, 20 bp, Artificial Sequence
  Description of Artificial Sequence: Synthetic oligonucleotide
  Target: LAMA2; (-) strand; PAM type: NRG; PAM sequence: GAG
ctttgactaatattgattca

SEQ ID NO: 113096 - DNA, 20 bp, Artificial Sequence
  Description of Artificial Sequence: Synthetic oligonucleotide
  Target: LAMA2; (-) strand; PAM type: NRG; PAM sequence: CAG
acctttgactaatattgatt

SEQ ID NO: 113097 - DNA, 20 bp, Artificial Sequence
  Description of Artificial Sequence: Synthetic oligonucleotide
  Target: LAMA2; (-) strand; PAM type: NRG; PAM sequence: CAG
ttgatggaatgctgtagtta

SEQ ID NO: 113098 - DNA, 20 bp, Artificial Sequence
  Description of Artificial Sequence: Synthetic oligonucleotide
  Target: LAMA2; (-) strand; PAM type: NRG; PAM sequence: TAG
tctgaattgatggaatgctg

SEQ ID NO: 113099 - DNA, 20 bp, Artificial Sequence
  Description of Artificial Sequence: Synthetic oligonucleotide
  Target: LAMA2; (-) strand; PAM type: NRG; PAM sequence: TGG
ggaagaactttctgaattga

SEQ ID NO: 113100 - DNA, 20 bp, Artificial Sequence
  Description of Artificial Sequence: Synthetic oligonucleotide
  Target: LAMA2; (-) strand; PAM type: NRG; PAM sequence: AAG
aaaattagacctattggggg

SEQ ID NO: 113101 - DNA, 20 bp, Artificial Sequence
  Description of Artificial Sequence: Synthetic oligonucleotide
  Target: LAMA2; (-) strand; PAM type: NRG; PAM sequence: GGG
ggaaaaattagacctattgg

SEQ ID NO: 113102 - DNA, 20 bp, Artificial Sequence
  Description of Artificial Sequence: Synthetic oligonucleotide
  Target: LAMA2; (-) strand; PAM type: NRG; PAM sequence: GGG
tggaaaaattagacctattg

SEQ ID NO: 113103 - DNA, 20 bp, Artificial Sequence
  Description of Artificial Sequence: Synthetic oligonucleotide
  Target: LAMA2; (-) strand; PAM type: NRG; PAM sequence: GGG
ctggaaaaattagacctatt

SEQ ID NO: 113104 - DNA, 20 bp, Artificial Sequence
  Description of Artificial Sequence: Synthetic oligonucleotide
  Target: LAMA2; (-) strand; PAM type: NRG; PAM sequence: TGG
tctggaaaaattagacctat

SEQ ID NO: 113105 - DNA, 20 bp, Artificial Sequence
  Description of Artificial Sequence: Synthetic oligonucleotide
  Target: LAMA2; (-) strand; PAM type: NRG; PAM sequence: TAG
ctagtaaaatctggaaaaat

SEQ ID NO: 113106 - DNA, 20 bp, Artificial Sequence
  Description of Artificial Sequence: Synthetic oligonucleotide
  Target: LAMA2; (-) strand; PAM type: NRG; PAM sequence: TGG
ttagtagctctagtaaaatc

SEQ ID NO: 113107 - DNA, 20 bp, Artificial Sequence
  Description of Artificial Sequence: Synthetic oligonucleotide
  Target: LAMA2; (-) strand; PAM type: NRG; PAM sequence: TAG
acagtaacagttagtagctc

SEQ ID NO: 113108 - DNA, 20 bp, Artificial Sequence
  Description of Artificial Sequence: Synthetic oligonucleotide
  Target: LAMA2; (-) strand; PAM type: NRG; PAM sequence: TAG
gtagtaacagtaacagttag

SEQ ID NO: 113109 - DNA, 20 bp, Artificial Sequence
  Description of Artificial Sequence: Synthetic oligonucleotide
  Target: LAMA2; (-) strand; PAM type: NRG; PAM sequence: TAG
agagtagtaacagtaacagt

SEQ ID NO: 113110 - DNA, 20 bp, Artificial Sequence
  Description of Artificial Sequence: Synthetic oligonucleotide
  Target: LAMA2; (-) strand; PAM type: NRG; PAM sequence: CAG
ccacagagtagtaacagtaa

SEQ ID NO: 113111 - DNA, 20 bp, Artificial Sequence
  Description of Artificial Sequence: Synthetic oligonucleotide
  Target: LAMA2; (-) strand; PAM type: NRG; PAM sequence: CAG
tctggaccacagagtagtaa

SEQ ID NO: 113112 - DNA, 20 bp, Artificial Sequence
  Description of Artificial Sequence: Synthetic oligonucleotide
  Target: LAMA2; (-) strand; PAM type: NRG; PAM sequence: TAG
ctgatttctggaccacagag

SEQ ID NO: 113113 - DNA, 20 bp, Artificial Sequence
  Description of Artificial Sequence: Synthetic oligonucleotide
  Target: LAMA2; (-) strand; PAM type: NRG; PAM sequence: GAG
tttctgatttctggaccaca

SEQ ID NO: 113114 - DNA, 20 bp, Artificial Sequence
  Description of Artificial Sequence: Synthetic oligonucleotide
  Target: LAMA2; (-) strand; PAM type: NRG; PAM sequence: CAG
tctttctgatttctggacca

SEQ ID NO: 113115 - DNA, 20 bp, Artificial Sequence
  Description of Artificial Sequence: Synthetic oligonucleotide
  Target: LAMA2; (-) strand; PAM type: NRG; PAM sequence: TGG
ggaaaattctttctgatttc

SEQ ID NO: 113116 - DNA, 20 bp, Artificial Sequence
  Description of Artificial Sequence: Synthetic oligonucleotide
  Target: LAMA2; (-) strand; PAM type: NRG; PAM sequence: AGG
tactgagtaggctgggataa

SEQ ID NO: 113117 - DNA, 20 bp, Artificial Sequence
  Description of Artificial Sequence: Synthetic oligonucleotide
  Target: LAMA2; (-) strand; PAM type: NRG; PAM sequence: AAG
atactgagtaggctgggata

SEQ ID NO: 113118 - DNA, 20 bp, Artificial Sequence
  Description of Artificial Sequence: Synthetic oligonucleotide
  Target: LAMA2; (-) strand; PAM type: NRG; PAM sequence: GGG
cagaagatactgagtaggct

SEQ ID NO: 113119 - DNA, 20 bp, Artificial Sequence
  Description of Artificial Sequence: Synthetic oligonucleotide
  Target: LAMA2; (-) strand; PAM type: NRG; PAM sequence: TGG
acagaagatactgagtaggc

SEQ ID NO: 113120 - DNA, 20 bp, Artificial Sequence
  Description of Artificial Sequence: Synthetic oligonucleotide
  Target: LAMA2; (-) strand; PAM type: NRG; PAM sequence: AGG
tgtcacagaagatactgagt

SEQ ID NO: 113121 - DNA, 20 bp, Artificial Sequence
  Description of Artificial Sequence: Synthetic oligonucleotide
  Target: LAMA2; (-) strand; PAM type: NRG; PAM sequence: TAG
atgtcacagaagatactgag

SEQ ID NO: 113122 - DNA, 20 bp, Artificial Sequence
  Description of Artificial Sequence: Synthetic oligonucleotide
  Target: LAMA2; (-) strand; PAM type: NRG; PAM sequence: GAG
gaaatgtcacagaagatact

SEQ ID NO: 113123 - DNA, 20 bp, Artificial Sequence
  Description of Artificial Sequence: Synthetic oligonucleotide
  Target: LAMA2; (-) strand; PAM type: NRG; PAM sequence: AAG
agaaaccagaaatgtcacag

SEQ ID NO: 113124 - DNA, 20 bp, Artificial Sequence
  Description of Artificial Sequence: Synthetic oligonucleotide
  Target: LAMA2; (-) strand; PAM type: NRG; PAM sequence: CAG
actagaaaccagaaatgtca

SEQ ID NO: 113125 - DNA, 20 bp, Artificial Sequence
  Description of Artificial Sequence: Synthetic oligonucleotide
  Target: LAMA2; (-) strand; PAM type: NRG; PAM sequence: CAG
aaagggattgaactagaaac

SEQ ID NO: 113126 - DNA, 20 bp, Artificial Sequence
  Description of Artificial Sequence: Synthetic oligonucleotide
  Target: LAMA2; (-) strand; PAM type: NRG; PAM sequence: TAG
ctgtgtcaaagggattgaac

SEQ ID NO: 113127 - DNA, 20 bp, Artificial Sequence
  Description of Artificial Sequence: Synthetic oligonucleotide
  Target: LAMA2; (-) strand; PAM type: NRG; PAM sequence: GGG
tatcagccaactgtgtcaaa

SEQ ID NO: 113128 - DNA, 20 bp, Artificial Sequence
  Description of Artificial Sequence: Synthetic oligonucleotide
  Target: LAMA2; (-) strand; PAM type: NRG; PAM sequence: AGG
gtatcagccaactgtgtcaa

SEQ ID NO: 113129 - DNA, 20 bp, Artificial Sequence
  Description of Artificial Sequence: Synthetic oligonucleotide
  Target: LAMA2; (-) strand; PAM type: NRG; PAM sequence: AAG
ggtatcagccaactgtgtca

SEQ ID NO: 113130 - DNA, 20 bp, Artificial Sequence
  Description of Artificial Sequence: Synthetic oligonucleotide
  Target: LAMA2; (-) strand; PAM type: NRG; PAM sequence: CAG
acttataaatgagaaggtat

SEQ ID NO: 113131 - DNA, 20 bp, Artificial Sequence
  Description of Artificial Sequence: Synthetic oligonucleotide
  Target: LAMA2; (-) strand; PAM type: NRG; PAM sequence: AGG
gagaagacttataaatgaga

SEQ ID NO: 113132 - DNA, 20 bp, Artificial Sequence
  Description of Artificial Sequence: Synthetic oligonucleotide
  Target: LAMA2; (-) strand; PAM type: NRG; PAM sequence: AAG
ggagaagacttataaatgag

SEQ ID NO: 113133 - DNA, 20 bp, Artificial Sequence
  Description of Artificial Sequence: Synthetic oligonucleotide
  Target: LAMA2; (-) strand; PAM type: NRG; PAM sequence: GAG
caaggagaagacttataaat

SEQ ID NO: 113134 - DNA, 20 bp, Artificial Sequence
  Description of Artificial Sequence: Synthetic oligonucleotide
  Target: LAMA2; (-) strand; PAM type: NRG; PAM sequence: AAG
tcaatttgaaagccaaggag

SEQ ID NO: 113135 - DNA, 20 bp, Artificial Sequence
  Description of Artificial Sequence: Synthetic oligonucleotide
  Target: LAMA2; (-) strand; PAM type: NRG; PAM sequence: GAG
gagtcaatttgaaagccaag

SEQ ID NO: 113136 - DNA, 20 bp, Artificial Sequence
  Description of Artificial Sequence: Synthetic oligonucleotide
  Target: LAMA2; (-) strand; PAM type: NRG; PAM sequence: AGG
tagagtcaatttgaaagcca

SEQ ID NO: 113137 - DNA, 20 bp, Artificial Sequence
  Description of Artificial Sequence: Synthetic oligonucleotide
  Target: LAMA2; (-) strand; PAM type: NRG; PAM sequence: AAG
ctagagtcaatttgaaagcc

SEQ ID NO: 113138 - DNA, 20 bp, Artificial Sequence
  Description of Artificial Sequence: Synthetic oligonucleotide
  Target: LAMA2; (-) strand; PAM type: NRG; PAM sequence: AAG
tgagtctagagtcaatttga

SEQ ID NO: 113139 - DNA, 20 bp, Artificial Sequence
  Description of Artificial Sequence: Synthetic oligonucleotide
  Target: LAMA2; (-) strand; PAM type: NRG; PAM sequence: GAG
caaaaagcaatgtgagtcta

SEQ ID NO: 113140 - DNA, 20 bp, Artificial Sequence
  Description of Artificial Sequence: Synthetic oligonucleotide
  Target: LAMA2; (-) strand; PAM type: NRG; PAM sequence: TAG
ggcaaaaagcaatgtgagtc

SEQ ID NO: 113141 - DNA, 20 bp, Artificial Sequence
  Description of Artificial Sequence: Synthetic oligonucleotide
  Target: LAMA2; (-) strand; PAM type: NRG; PAM sequence: GAG
agaaaggcaaaaagcaatgt

SEQ ID NO: 113142 - DNA, 20 bp, Artificial Sequence
  Description of Artificial Sequence: Synthetic oligonucleotide
  Target: LAMA2; (-) strand; PAM type: NRG; PAM sequence: AAG
ggagtattcagaaaggcaaa

SEQ ID NO: 113143 - DNA, 20 bp, Artificial Sequence
  Description of Artificial Sequence: Synthetic oligonucleotide
  Target: LAMA2; (-) strand; PAM type: NRG; PAM sequence: AGG
tttgacaggagtattcagaa

SEQ ID NO: 113144 - DNA, 20 bp, Artificial Sequence
  Description of Artificial Sequence: Synthetic oligonucleotide
  Target: LAMA2; (-) strand; PAM type: NRG; PAM sequence: AAG
atttgacaggagtattcaga

SEQ ID NO: 113145 - DNA, 20 bp, Artificial Sequence
  Description of Artificial Sequence: Synthetic oligonucleotide
  Target: LAMA2; (-) strand; PAM type: NRG; PAM sequence: CAG
gtgcatttgacaggagtatt

SEQ ID NO: 113146 - DNA, 20 bp, Artificial Sequence
  Description of Artificial Sequence: Synthetic oligonucleotide
  Target: LAMA2; (-) strand; PAM type: NRG; PAM sequence: GAG
ctgcttggtgcatttgacag

SEQ ID NO: 113147 - DNA, 20 bp, Artificial Sequence
  Description of Artificial Sequence: Synthetic oligonucleotide
  Target: LAMA2; (-) strand; PAM type: NRG; PAM sequence: AGG
gactgcttggtgcatttgac

SEQ ID NO: 113148 - DNA, 20 bp, Artificial Sequence
  Description of Artificial Sequence: Synthetic oligonucleotide
  Target: LAMA2; (-) strand; PAM type: NRG; PAM sequence: CAG
tgactgcttggtgcatttga

SEQ ID NO: 113149 - DNA, 20 bp, Artificial Sequence
  Description of Artificial Sequence: Synthetic oligonucleotide
  Target: LAMA2; (-) strand; PAM type: NRG; PAM sequence: TGG
taaaagtgagaatgactgct

SEQ ID NO: 113150 - DNA, 20 bp, Artificial Sequence
  Description of Artificial Sequence: Synthetic oligonucleotide
  Target: LAMA2; (-) strand; PAM type: NRG; PAM sequence: GAG
ttaatacccaaaataaaagt

SEQ ID NO: 113151 - DNA, 20 bp, Artificial Sequence
  Description of Artificial Sequence: Synthetic oligonucleotide
  Target: LAMA2; (-) strand; PAM type: NRG; PAM sequence: AAG
gtcattaatacccaaaataa

SEQ ID NO: 113152 - DNA, 20 bp, Artificial Sequence
  Description of Artificial Sequence: Synthetic oligonucleotide
  Target: LAMA2; (-) strand; PAM type: NRG; PAM sequence: GAG
agatacaatagagaagtaag

SEQ ID NO: 113153 - DNA, 20 bp, Artificial Sequence
  Description of Artificial Sequence: Synthetic oligonucleotide
  Target: LAMA2; (-) strand; PAM type: NRG; PAM sequence: AGG
agagatacaatagagaagta

SEQ ID NO: 113154 - DNA, 20 bp, Artificial Sequence
  Description of Artificial Sequence: Synthetic oligonucleotide
  Target: LAMA2; (-) strand; PAM type: NRG; PAM sequence: AAG
tagagatacaatagagaagt

SEQ ID NO: 113155 - DNA, 20 bp, Artificial Sequence
  Description of Artificial Sequence: Synthetic oligonucleotide
  Target: LAMA2; (-) strand; PAM type: NRG; PAM sequence: AAG
accatagagatacaatagag

SEQ ID NO: 113156 - DNA, 20 bp, Artificial Sequence
  Description of Artificial Sequence: Synthetic oligonucleotide
  Target: LAMA2; (-) strand; PAM type: NRG; PAM sequence: GAG
gataccatagagatacaata

SEQ ID NO: 113157 - DNA, 20 bp, Artificial Sequence
  Description of Artificial Sequence: Synthetic oligonucleotide
  Target: LAMA2; (-) strand; PAM type: NRG; PAM sequence: TAG
gtgataccatagagatacaa

SEQ ID NO: 113158 - DNA, 20 bp, Artificial Sequence
  Description of Artificial Sequence: Synthetic oligonucleotide
  Target: LAMA2; (-) strand; PAM type: NRG; PAM sequence: GAG
tttttaacggtgataccata

SEQ ID NO: 113159 - DNA, 20 bp, Artificial Sequence
  Description of Artificial Sequence: Synthetic oligonucleotide
  Target: LAMA2; (-) strand; PAM type: NRG; PAM sequence: TAG
tctttttaacggtgatacca

SEQ ID NO: 113160 - DNA, 20 bp, Artificial Sequence
  Description of Artificial Sequence: Synthetic oligonucleotide
  Target: LAMA2; (-) strand; PAM type: NRG; PAM sequence: CGG
agggcttaatttctttttaa

SEQ ID NO: 113161 - DNA, 20 bp, Artificial Sequence
  Description of Artificial Sequence: Synthetic oligonucleotide
  Target: LAMA2; (-) strand; PAM type: NRG; PAM sequence: GGG
ctgaacaactaaacctcata

SEQ ID NO: 113162 - DNA, 20 bp, Artificial Sequence
  Description of Artificial Sequence: Synthetic oligonucleotide
  Target: LAMA2; (-) strand; PAM type: NRG; PAM sequence: AGG
tctgaacaactaaacctcat

SEQ ID NO: 113163 - DNA, 20 bp, Artificial Sequence
  Description of Artificial Sequence: Synthetic oligonucleotide
  Target: LAMA2; (-) strand; PAM type: NRG; PAM sequence: TAG
ttctgaacaactaaacctca

SEQ ID NO: 113164 - DNA, 20 bp, Artificial Sequence
  Description of Artificial Sequence: Synthetic oligonucleotide
  Target: LAMA2; (-) strand; PAM type: NRG; PAM sequence: AAG
agaagttcccagtctaattt

SEQ ID NO: 113165 - DNA, 20 bp, Artificial Sequence
  Description of Artificial Sequence: Synthetic oligonucleotide
  Target: LAMA2; (-) strand; PAM type: NRG; PAM sequence: CAG
gggcagaaggtagaagttcc

SEQ ID NO: 113166 - DNA, 20 bp, Artificial Sequence
  Description of Artificial Sequence: Synthetic oligonucleotide
  Target: LAMA2; (-) strand; PAM type: NRG; PAM sequence: AAG
caaccatgggcagaaggtag

SEQ ID NO: 113167 - DNA, 20 bp, Artificial Sequence
  Description of Artificial Sequence: Synthetic oligonucleotide
  Target: LAMA2; (-) strand; PAM type: NRG; PAM sequence: TAG
taacaaccatgggcagaagg

SEQ ID NO: 113168 - DNA, 20 bp, Artificial Sequence
  Description of Artificial Sequence: Synthetic oligonucleotide
  Target: LAMA2; (-) strand; PAM type: NRG; PAM sequence: AGG
gggtaacaaccatgggcaga

SEQ ID NO: 113169 - DNA, 20 bp, Artificial Sequence
  Description of Artificial Sequence: Synthetic oligonucleotide
  Target: LAMA2; (-) strand; PAM type: NRG; PAM sequence: AAG
tgggtaacaaccatgggcag

SEQ ID NO: 113170 - DNA, 20 bp, Artificial Sequence
  Description of Artificial Sequence: Synthetic oligonucleotide
  Target: LAMA2; (-) strand; PAM type: NRG; PAM sequence: CAG
gaatgggtaacaaccatggg

SEQ ID NO: 113171 - DNA, 20 bp, Artificial Sequence
  Description of Artificial Sequence: Synthetic oligonucleotide
  Target: LAMA2; (-) strand; PAM type: NRG; PAM sequence: GGG
agagaatgggtaacaaccat

SEQ ID NO: 113172 - DNA, 20 bp, Artificial Sequence
  Description of Artificial Sequence: Synthetic oligonucleotide
  Target: LAMA2; (-) strand; PAM type: NRG; PAM sequence: TGG
tagagaatgggtaacaacca

SEQ ID NO: 113173 - DNA, 20 bp, Artificial Sequence
  Description of Artificial Sequence: Synthetic oligonucleotide
  Target: LAMA2; (-) strand; PAM type: NRG; PAM sequence: GGG
caccagagataatagagaat

SEQ ID NO: 113174 - DNA, 20 bp, Artificial Sequence
  Description of Artificial Sequence: Synthetic oligonucleotide
  Target: LAMA2; (-) strand; PAM type: NRG; PAM sequence: TGG
acaccagagataatagagaa

SEQ ID NO: 113175 - DNA, 20 bp, Artificial Sequence
  Description of Artificial Sequence: Synthetic oligonucleotide
  Target: LAMA2; (-) strand; PAM type: NRG; PAM sequence: GAG
gtgagacaccagagataata

SEQ ID NO: 113176 - DNA, 20 bp, Artificial Sequence
  Description of Artificial Sequence: Synthetic oligonucleotide
  Target: LAMA2; (-) strand; PAM type: NRG; PAM sequence: TAG
tggtgagacaccagagataa

SEQ ID NO: 113177 - DNA, 20 bp, Artificial Sequence
  Description of Artificial Sequence: Synthetic oligonucleotide
  Target: LAMA2; (-) strand; PAM type: NRG; PAM sequence: GAG
aaatttgtggtgagacacca

SEQ ID NO: 113178 - DNA, 20 bp, Artificial Sequence
  Description of Artificial Sequence: Synthetic oligonucleotide
  Target: LAMA2; (-) strand; PAM type: NRG; PAM sequence: CAG
agaaatttgtggtgagacac

SEQ ID NO: 113179 - DNA, 20 bp, Artificial Sequence
  Description of Artificial Sequence: Synthetic oligonucleotide
  Target: LAMA2; (-) strand; PAM type: NRG; PAM sequence: GAG
taacttgagaaatttgtggt

SEQ ID NO: 113180 - DNA, 20 bp, Artificial Sequence
  Description of Artificial Sequence: Synthetic oligonucleotide
  Target: LAMA2; (-) strand; PAM type: NRG; PAM sequence: TGG
tgtttaacttgagaaatttg

SEQ ID NO: 113181 - DNA, 20 bp, Artificial Sequence
  Description of Artificial Sequence: Synthetic oligonucleotide
  Target: LAMA2; (-) strand; PAM type: NRG; PAM sequence: GAG
aaatttcacctgtttaactt

SEQ ID NO: 113182 - DNA, 20 bp, Artificial Sequence
  Description of Artificial Sequence: Synthetic oligonucleotide
  Target: LAMA2; (-) strand; PAM type: NRG; PAM sequence: TAG
gtggaaaaacagaacagcta

SEQ ID NO: 113183 - DNA, 20 bp, Artificial Sequence
  Description of Artificial Sequence: Synthetic oligonucleotide
  Target: LAMA2; (-) strand; PAM type: NRG; PAM sequence: CAG
agacatgtggaaaaacagaa

SEQ ID NO: 113184 - DNA, 20 bp, Artificial Sequence
  Description of Artificial Sequence: Synthetic oligonucleotide
  Target: LAMA2; (-) strand; PAM type: NRG; PAM sequence: CAG
tgagaagacatgtggaaaaa

SEQ ID NO: 113185 - DNA, 20 bp, Artificial Sequence
  Description of Artificial Sequence: Synthetic oligonucleotide
  Target: LAMA2; (-) strand; PAM type: NRG; PAM sequence: TGG
tggatatatgagaagacatg

SEQ ID NO: 113186 - DNA, 20 bp, Artificial Sequence
  Description of Artificial Sequence: Synthetic oligonucleotide
  Target: LAMA2; (-) strand; PAM type: NRG; PAM sequence: AAG
aaatatattggatatatgag

SEQ ID NO: 113187 - DNA, 20 bp, Artificial Sequence
  Description of Artificial Sequence: Synthetic oligonucleotide
  Target: LAMA2; (-) strand; PAM type: NRG; PAM sequence: GAG
agaaaatatattggatatat

SEQ ID NO: 113188 - DNA, 20 bp, Artificial Sequence
  Description of Artificial Sequence: Synthetic oligonucleotide
  Target: LAMA2; (-) strand; PAM type: NRG; PAM sequence: TGG
aagtattagagaaaatatat

SEQ ID NO: 113189 - DNA, 20 bp, Artificial Sequence
  Description of Artificial Sequence: Synthetic oligonucleotide
  Target: LAMA2; (-) strand; PAM type: NRG; PAM sequence: GAG
aaaatactttaaaagtatta

SEQ ID NO: 113190 - DNA, 20 bp, Artificial Sequence
  Description of Artificial Sequence: Synthetic oligonucleotide
  Target: LAMA2; (-) strand; PAM type: NRG; PAM sequence: TAG
ataaaatactttaaaagtat

SEQ ID NO: 113191 - DNA, 20 bp, Artificial Sequence
  Description of Artificial Sequence: Synthetic oligonucleotide
  Target: LAMA2; (-) strand; PAM type: NRG; PAM sequence: AAG
atagtaataaaatactttaa

SEQ ID NO: 113192 - DNA, 20 bp, Artificial Sequence
  Description of Artificial Sequence: Synthetic oligonucleotide
  Target: LAMA2; (-) strand; PAM type: NRG; PAM sequence: TAG
acatattaactgacctgcta

SEQ ID NO: 113193 - DNA, 20 bp, Artificial Sequence
  Description of Artificial Sequence: Synthetic oligonucleotide
  Target: LAMA2; (-) strand; PAM type: NRG; PAM sequence: AGG
tcgatgcttttctttttata

SEQ ID NO: 113194 - DNA, 20 bp, Artificial Sequence
  Description of Artificial Sequence: Synthetic oligonucleotide
  Target: LAMA2; (-) strand; PAM type: NRG; PAM sequence: AAG
ttcgatgcttttctttttat

SEQ ID NO: 113195 - DNA, 20 bp, Artificial Sequence
  Description of Artificial Sequence: Synthetic oligonucleotide
  Target: LAMA2; (-) strand; PAM type: NRG; PAM sequence: CAG
aacatttgctttttccattg

SEQ ID NO: 113196 - DNA, 20 bp, Artificial Sequence
  Description of Artificial Sequence: Synthetic oligonucleotide
  Target: LAMA2; (-) strand; PAM type: NRG; PAM sequence: AAG
atttttcaactttatgtaag

SEQ ID NO: 113197 - DNA, 20 bp, Artificial Sequence
  Description of Artificial Sequence: Synthetic oligonucleotide
  Target: LAMA2; (-) strand; PAM type: NRG; PAM sequence: AAG
tgcatttttcaactttatgt

SEQ ID NO: 113198 - DNA, 20 bp, Artificial Sequence
  Description of Artificial Sequence: Synthetic oligonucleotide
  Target: LAMA2; (-) strand; PAM type: NRG; PAM sequence: GAG
ccatatgcttgtcatctatt

SEQ ID NO: 113199 - DNA, 20 bp, Artificial Sequence
  Description of Artificial Sequence: Synthetic oligonucleotide
  Target: LAMA2; (-) strand; PAM type: NRG; PAM sequence: AAG
tctttggatattgctactgc

SEQ ID NO: 113200 - DNA, 20 bp, Artificial Sequence
  Description of Artificial Sequence: Synthetic oligonucleotide
  Target: LAMA2; (-) strand; PAM type: NRG; PAM sequence: TGG
actgctttaagtgtgatctt

SEQ ID NO: 113201 - DNA, 20 bp, Artificial Sequence
  Description of Artificial Sequence: Synthetic oligonucleotide
  Target: LAMA2; (-) strand; PAM type: NRG; PAM sequence: AAG
aatttagattttactgcttt

SEQ ID NO: 113202 - DNA, 20 bp, Artificial Sequence
  Description of Artificial Sequence: Synthetic oligonucleotide
  Target: LAMA2; (-) strand; PAM type: NRG; PAM sequence: TAG
tcttcttttccttttaaatt

SEQ ID NO: 113203 - DNA, 20 bp, Artificial Sequence
  Description of Artificial Sequence: Synthetic oligonucleotide
  Target: LAMA2; (-) strand; PAM type: NRG; PAM sequence: AAG
ggtagtaaggttattttgcc

SEQ ID NO: 113204 - DNA, 20 bp, Artificial Sequence
  Description of Artificial Sequence: Synthetic oligonucleotide
  Target: LAMA2; (-) strand; PAM type: NRG; PAM sequence: AGG
tcttatcaaagcaggtagta

SEQ ID NO: 113205 - DNA, 20 bp, Artificial Sequence
  Description of Artificial Sequence: Synthetic oligonucleotide
  Target: LAMA2; (-) strand; PAM type: NRG; PAM sequence: AAG
atcttatcaaagcaggtagt

SEQ ID NO: 113206 - DNA, 20 bp, Artificial Sequence
  Description of Artificial Sequence: Synthetic oligonucleotide
  Target: LAMA2; (-) strand; PAM type: NRG; PAM sequence: TAG
gctaatcttatcaaagcagg

SEQ ID NO: 113207 - DNA, 20 bp, Artificial Sequence
  Description of Artificial Sequence: Synthetic oligonucleotide
  Target: LAMA2; (-) strand; PAM type: NRG; PAM sequence: AGG
agagctaatcttatcaaagc

SEQ ID NO: 113208 - DNA, 20 bp, Artificial Sequence
  Description of Artificial Sequence: Synthetic oligonucleotide
  Target: LAMA2; (-) strand; PAM type: NRG; PAM sequence: CAG
aagagctaatcttatcaaag

SEQ ID NO: 113209 - DNA, 20 bp, Artificial Sequence
  Description of Artificial Sequence: Synthetic oligonucleotide
  Target: LAMA2; (-) strand; PAM type: NRG; PAM sequence: AAG
tgtaagagctaatcttatca

SEQ ID NO: 113210 - DNA, 20 bp, Artificial Sequence
  Description of Artificial Sequence: Synthetic oligonucleotide
  Target: LAMA2; (-) strand; PAM type: NRG; PAM sequence: GAG
ttaataaatgtgtcctgtaa

SEQ ID NO: 113211 - DNA, 20 bp, Artificial Sequence
  Description of Artificial Sequence: Synthetic oligonucleotide
  Target: LAMA2; (-) strand; PAM type: NRG; PAM sequence: AAG
atttaataaatgtgtcctgt

SEQ ID NO: 113212 - DNA, 20 bp, Artificial Sequence
  Description of Artificial Sequence: Synthetic oligonucleotide
  Target: LAMA2; (-) strand; PAM type: NRG; PAM sequence: TGG
cacagcatctgatgcatagt

SEQ ID NO: 113213 - DNA, 20 bp, Artificial Sequence
  Description of Artificial Sequence: Synthetic oligonucleotide
  Target: LAMA2; (-) strand; PAM type: NRG; PAM sequence: TAG
gcagcacagcatctgatgca

SEQ ID NO: 113214 - DNA, 20 bp, Artificial Sequence
  Description of Artificial Sequence: Synthetic oligonucleotide
  Target: LAMA2; (-) strand; PAM type: NRG; PAM sequence: CAG
gcatcttcactgatgcagca

SEQ ID NO: 113215 - DNA, 20 bp, Artificial Sequence
  Description of Artificial Sequence: Synthetic oligonucleotide
  Target: LAMA2; (-) strand; PAM type: NRG; PAM sequence: CAG
cgtatgcatcttcactgatg

SEQ ID NO: 113216 - DNA, 20 bp, Artificial Sequence
  Description of Artificial Sequence: Synthetic oligonucleotide
  Target: LAMA2; (-) strand; PAM type: NRG; PAM sequence: AGG
caggtaagttactcaagggt

SEQ ID NO: 113217 - DNA, 20 bp, Artificial Sequence
  Description of Artificial Sequence: Synthetic oligonucleotide
  Target: LAMA2; (-) strand; PAM type: NRG; PAM sequence: TAG
gcaggtaagttactcaaggg

SEQ ID NO: 113218 - DNA, 20 bp, Artificial Sequence
  Description of Artificial Sequence: Synthetic oligonucleotide
  Target: LAMA2; (-) strand; PAM type: NRG; PAM sequence: GGG
gcagcaggtaagttactcaa

SEQ ID NO: 113219 - DNA, 20 bp, Artificial Sequence
  Description of Artificial Sequence: Synthetic oligonucleotide
  Target: LAMA2; (-) strand; PAM type: NRG; PAM sequence: AGG
tgcagcaggtaagttactca

SEQ ID NO: 113220 - DNA, 20 bp, Artificial Sequence
  Description of Artificial Sequence: Synthetic oligonucleotide
  Target: LAMA2; (-) strand; PAM type: NRG; PAM sequence: AAG
gtgcagcaggtaagttactc

SEQ ID NO: 113221 - DNA, 20 bp, Artificial Sequence
  Description of Artificial Sequence: Synthetic oligonucleotide
  Target: LAMA2; (-) strand; PAM type: NRG; PAM sequence: AAG
ttgctacttgtgcagcaggt

SEQ ID NO: 113222 - DNA, 20 bp, Artificial Sequence
  Description of Artificial Sequence: Synthetic oligonucleotide
  Target: LAMA2; (-) strand; PAM type: NRG; PAM sequence: AGG
taatttgctacttgtgcagc

SEQ ID NO: 113223 - DNA, 20 bp, Artificial Sequence
  Description of Artificial Sequence: Synthetic oligonucleotide
  Target: LAMA2; (-) strand; PAM type: NRG; PAM sequence: CAG
gtaatttgctacttgtgcag

SEQ ID NO: 113224 - DNA, 20 bp, Artificial Sequence
  Description of Artificial Sequence: Synthetic oligonucleotide
  Target: LAMA2; (-) strand; PAM type: NRG; PAM sequence: CAG
acagtaatttgctacttgtg

SEQ ID NO: 113225 - DNA, 20 bp, Artificial Sequence
  Description of Artificial Sequence: Synthetic oligonucleotide
  Target: LAMA2; (-) strand; PAM type: NRG; PAM sequence: CAG
tactgtatcctaaacagata

SEQ ID NO: 113226 - DNA, 20 bp, Artificial Sequence
  Description of Artificial Sequence: Synthetic oligonucleotide
  Target: LAMA2; (-) strand; PAM type: NRG; PAM sequence: CAG
ggtgtttactgtatcctaaa

SEQ ID NO: 113227 - DNA, 20 bp, Artificial Sequence
  Description of Artificial Sequence: Synthetic oligonucleotide
  Target: LAMA2; (-) strand; PAM type: NRG; PAM sequence: TGG
ctccctccatatgtctccct

SEQ ID NO: 113228 - DNA, 20 bp, Artificial Sequence
  Description of Artificial Sequence: Synthetic oligonucleotide
  Target: LAMA2; (-) strand; PAM type: NRG; PAM sequence: TAG
aaaaggacttagggctcagt

SEQ ID NO: 113229 - DNA, 20 bp, Artificial Sequence
  Description of Artificial Sequence: Synthetic oligonucleotide
  Target: LAMA2; (-) strand; PAM type: NRG; PAM sequence: CAG
ctaaaaaaggacttagggct

SEQ ID NO: 113230 - DNA, 20 bp, Artificial Sequence
  Description of Artificial Sequence: Synthetic oligonucleotide
  Target: LAMA2; (-) strand; PAM type: NRG; PAM sequence: GGG
ctcaactaaaaaaggactta

SEQ ID NO: 113231 - DNA, 20 bp, Artificial Sequence
  Description of Artificial Sequence: Synthetic oligonucleotide
  Target: LAMA2; (-) strand; PAM type: NRG; PAM sequence: AGG
cctcaactaaaaaaggactt

SEQ ID NO: 113232 - DNA, 20 bp, Artificial Sequence
  Description of Artificial Sequence: Synthetic oligonucleotide
  Target: LAMA2; (-) strand; PAM type: NRG; PAM sequence: TAG
ccctcaactaaaaaaggact

SEQ ID NO: 113233 - DNA, 20 bp, Artificial Sequence
  Description of Artificial Sequence: Synthetic oligonucleotide
  Target: LAMA2; (-) strand; PAM type: NRG; PAM sequence: AGG
cctaccccctcaactaaaaa

SEQ ID NO: 113234 - DNA, 20 bp, Artificial Sequence
  Description of Artificial Sequence: Synthetic oligonucleotide
  Target: LAMA2; (-) strand; PAM type: NRG; PAM sequence: AAG
tcctaccccctcaactaaaa

SEQ ID NO: 113235 - DNA, 20 bp, Artificial Sequence
  Description of Artificial Sequence: Synthetic oligonucleotide
  Target: LAMA2; (-) strand; PAM type: NRG; PAM sequence: TGG
tcatatgatgctttttggcc

SEQ ID NO: 113236 - DNA, 20 bp, Artificial Sequence
  Description of Artificial Sequence: Synthetic oligonucleotide
  Target: LAMA2; (-) strand; PAM type: NRG; PAM sequence: TGG
tcttttcatatgatgctttt

SEQ ID NO: 113237 - DNA, 20 bp, Artificial Sequence
  Description of Artificial Sequence: Synthetic oligonucleotide
  Target: LAMA2; (-) strand; PAM type: NRG; PAM sequence: CAG
ataattcaaactgattacaa

SEQ ID NO: 113238 - DNA, 20 bp, Artificial Sequence
  Description of Artificial Sequence: Synthetic oligonucleotide
  Target: LAMA2; (-) strand; PAM type: NRG; PAM sequence: CAG
ctggcccttgccaacatgcc

SEQ ID NO: 113239 - DNA, 20 bp, Artificial Sequence
  Description of Artificial Sequence: Synthetic oligonucleotide
  Target: LAMA2; (-) strand; PAM type: NRG; PAM sequence: TGG
ttaaacagcttcctgtgatc

SEQ ID NO: 113240 - DNA, 20 bp, Artificial Sequence
  Description of Artificial Sequence: Synthetic oligonucleotide
  Target: LAMA2; (-) strand; PAM type: NRG; PAM sequence: CAG
actcctcaacacagtttaaa

SEQ ID NO: 113241 - DNA, 20 bp, Artificial Sequence
  Description of Artificial Sequence: Synthetic oligonucleotide
  Target: LAMA2; (-) strand; PAM type: NRG; PAM sequence: CAG
gaaatgcaaactcctcaaca

SEQ ID NO: 113242 - DNA, 20 bp, Artificial Sequence
  Description of Artificial Sequence: Synthetic oligonucleotide
  Target: LAMA2; (-) strand; PAM type: NRG; PAM sequence: AAG
tacttaaaatcaagttcatc

SEQ ID NO: 113243 - DNA, 20 bp, Artificial Sequence
  Description of Artificial Sequence: Synthetic oligonucleotide
  Target: LAMA2; (-) strand; PAM type: NRG; PAM sequence: AAG
tcacatctctacttaaaatc

SEQ ID NO: 113244 - DNA, 20 bp, Artificial Sequence
  Description of Artificial Sequence: Synthetic oligonucleotide
  Target: LAMA2; (-) strand; PAM type: NRG; PAM sequence: GAG
gtcttccacactgacacctc

SEQ ID NO: 113245 - DNA, 20 bp, Artificial Sequence
  Description of Artificial Sequence: Synthetic oligonucleotide
  Target: LAMA2; (-) strand; PAM type: NRG; PAM sequence: TGG
tgttcgctttgtcttcagtt

SEQ ID NO: 113246 - DNA, 20 bp, Artificial Sequence
  Description of Artificial Sequence: Synthetic oligonucleotide
  Target: LAMA2; (-) strand; PAM type: NRG; PAM sequence: CAG
ccaattgttcgctttgtctt

SEQ ID NO: 113247 - DNA, 20 bp, Artificial Sequence
  Description of Artificial Sequence: Synthetic oligonucleotide
  Target: LAMA2; (-) strand; PAM type: NRG; PAM sequence: TAG
agcataatttacctcctgcc

SEQ ID NO: 113248 - DNA, 20 bp, Artificial Sequence
  Description of Artificial Sequence: Synthetic oligonucleotide
  Target: LAMA2; (-) strand; PAM type: NRG; PAM sequence: AAG
cccactgcatctcttacttc

SEQ ID NO: 113249 - DNA, 20 bp, Artificial Sequence
  Description of Artificial Sequence: Synthetic oligonucleotide
  Target: LAMA2; (-) strand; PAM type: NRG; PAM sequence: TGG
tgtgtaatggtatcacatgg

SEQ ID NO: 113250 - DNA, 20 bp, Artificial Sequence
  Description of Artificial Sequence: Synthetic oligonucleotide
  Target: LAMA2; (-) strand; PAM type: NRG; PAM sequence: TGG
agctgtgtaatggtatcaca

SEQ ID NO: 113251 - DNA, 20 bp, Artificial Sequence
  Description of Artificial Sequence: Synthetic oligonucleotide
  Target: LAMA2; (-) strand; PAM type: NRG; PAM sequence: TGG
tcattctaatagctgtgtaa

SEQ ID NO: 113252 - DNA, 20 bp, Artificial Sequence
  Description of Artificial Sequence: Synthetic oligonucleotide
  Target: LAMA2; (-) strand; PAM type: NRG; PAM sequence: TAG
tttaattttagtcattctaa

SEQ ID NO: 113253 - DNA, 20 bp, Artificial Sequence
  Description of Artificial Sequence: Synthetic oligonucleotide
  Target: LAMA2; (-) strand; PAM type: NRG; PAM sequence: TAG
atggtcagtctttttaattt

SEQ ID NO: 113254 - DNA, 20 bp, Artificial Sequence
  Description of Artificial Sequence: Synthetic oligonucleotide
  Target: LAMA2; (-) strand; PAM type: NRG; PAM sequence: CAG
ctgccagtactgagtatggt

SEQ ID NO: 113255 - DNA, 20 bp, Artificial Sequence
  Description of Artificial Sequence: Synthetic oligonucleotide
  Target: LAMA2; (-) strand; PAM type: NRG; PAM sequence: TGG
ccttctgccagtactgagta

SEQ ID NO: 113256 - DNA, 20 bp, Artificial Sequence
  Description of Artificial Sequence: Synthetic oligonucleotide
  Target: LAMA2; (-) strand; PAM type: NRG; PAM sequence: GAG
ctccaccttctgccagtact

SEQ ID NO: 113257 - DNA, 20 bp, Artificial Sequence
  Description of Artificial Sequence: Synthetic oligonucleotide
  Target: LAMA2; (-) strand; PAM type: NRG; PAM sequence: CAG
ccagtgtctccaccttctgc

SEQ ID NO: 113258 - DNA, 20 bp, Artificial Sequence
  Description of Artificial Sequence: Synthetic oligonucleotide
  Target: LAMA2; (-) strand; PAM type: NRG; PAM sequence: CAG
cagcagcagtgtatgagttc

SEQ ID NO: 113259 - DNA, 20 bp, Artificial Sequence
  Description of Artificial Sequence: Synthetic oligonucleotide
  Target: LAMA2; (-) strand; PAM type: NRG; PAM sequence: GAG
tatcctcagcagcagtgtat

SEQ ID NO: 113260 - DNA, 20 bp, Artificial Sequence
  Description of Artificial Sequence: Synthetic oligonucleotide
  Target: LAMA2; (-) strand; PAM type: NRG; PAM sequence: CAG
ccactttatatcctcagcag

SEQ ID NO: 113261 - DNA, 20 bp, Artificial Sequence
  Description of Artificial Sequence: Synthetic oligonucleotide
  Target: LAMA2; (-) strand; PAM type: NRG; PAM sequence: CAG
atgccactttatatcctcag

SEQ ID NO: 113262 - DNA, 20 bp, Artificial Sequence
  Description of Artificial Sequence: Synthetic oligonucleotide
  Target: LAMA2; (-) strand; PAM type: NRG; PAM sequence: CAG
gttatgccactttatatcct

SEQ ID NO: 113263 - DNA, 20 bp, Artificial Sequence
  Description of Artificial Sequence: Synthetic oligonucleotide
  Target: LAMA2; (-) strand; PAM type: NRG; PAM sequence: TGG
atatttagtcttttaagaaa

SEQ ID NO: 113264 - DNA, 20 bp, Artificial Sequence
  Description of Artificial Sequence: Synthetic oligonucleotide
  Target: LAMA2; (-) strand; PAM type: NRG; PAM sequence: AAG
agatgtatatttagtctttt

SEQ ID NO: 113265 - DNA, 20 bp, Artificial Sequence
  Description of Artificial Sequence: Synthetic oligonucleotide
  Target: LAMA2; (-) strand; PAM type: NRG; PAM sequence: TAG
ttgtatggtagatgtatatt

SEQ ID NO: 113266 - DNA, 20 bp, Artificial Sequence
  Description of Artificial Sequence: Synthetic oligonucleotide
  Target: LAMA2; (-) strand; PAM type: NRG; PAM sequence: TAG
gaaatgattggtttgtatgg

SEQ ID NO: 113267 - DNA, 20 bp, Artificial Sequence
  Description of Artificial Sequence: Synthetic oligonucleotide
  Target: LAMA2; (-) strand; PAM type: NRG; PAM sequence: TGG
agtgaaatgattggtttgta

SEQ ID NO: 113268 - DNA, 20 bp, Artificial Sequence
  Description of Artificial Sequence: Synthetic oligonucleotide
  Target: LAMA2; (-) strand; PAM type: NRG; PAM sequence: TGG
ataattaggagtgaaatgat

SEQ ID NO: 113269 - DNA, 20 bp, Artificial Sequence
  Description of Artificial Sequence: Synthetic oligonucleotide
  Target: LAMA2; (-) strand; PAM type: NRG; PAM sequence: GAG
tgtcctgggtgaataattag

SEQ ID NO: 113270 - DNA, 20 bp, Artificial Sequence
  Description of Artificial Sequence: Synthetic oligonucleotide
  Target: LAMA2; (-) strand; PAM type: NRG; PAM sequence: AGG
tgtgtcctgggtgaataatt

SEQ ID NO: 113271 - DNA, 20 bp, Artificial Sequence
  Description of Artificial Sequence: Synthetic oligonucleotide
  Target: LAMA2; (-) strand; PAM type: NRG; PAM sequence: TAG
ttgtgtcctgggtgaataat

SEQ ID NO: 113272 - DNA, 20 bp, Artificial Sequence
  Description of Artificial Sequence: Synthetic oligonucleotide
  Target: LAMA2; (-) strand; PAM type: NRG; PAM sequence: GGG
aatatgctttcttgtgtcct

SEQ ID NO: 113273 - DNA, 20 bp, Artificial Sequence
  Description of Artificial Sequence: Synthetic oligonucleotide
  Target: LAMA2; (-) strand; PAM type: NRG; PAM sequence: TGG
aaatatgctttcttgtgtcc

SEQ ID NO: 113274 - DNA, 20 bp, Artificial Sequence
  Description of Artificial Sequence: Synthetic oligonucleotide
  Target: LAMA2; (-) strand; PAM type: NRG; PAM sequence: AAG
taatgtgagcattttggtac

SEQ ID NO: 113275 - DNA, 20 bp, Artificial Sequence
  Description of Artificial Sequence: Synthetic oligonucleotide
  Target: LAMA2; (-) strand; PAM type: NRG; PAM sequence: TGG
taaaagtaatgtgagcattt

SEQ ID NO: 113276 - DNA, 20 bp, Artificial Sequence
  Description of Artificial Sequence: Synthetic oligonucleotide
  Target: LAMA2; (-) strand; PAM type: NRG; PAM sequence: GAG
aacacagataaaagtaatgt

SEQ ID NO: 113277 - DNA, 20 bp, Artificial Sequence
  Description of Artificial Sequence: Synthetic oligonucleotide
  Target: LAMA2; (-) strand; PAM type: NRG; PAM sequence: AAG
tttttgagtaacacagataa

SEQ ID NO: 113278 - DNA, 20 bp, Artificial Sequence
  Description of Artificial Sequence: Synthetic oligonucleotide
  Target: LAMA2; (-) strand; PAM type: NRG; PAM sequence: CAG
ttttcagtttttgagtaaca

SEQ ID NO: 113279 - DNA, 20 bp, Artificial Sequence
  Description of Artificial Sequence: Synthetic oligonucleotide
  Target: LAMA2; (-) strand; PAM type: NRG; PAM sequence: GAG
gtgatttgttttcagttttt

SEQ ID NO: 113280 - DNA, 20 bp, Artificial Sequence
  Description of Artificial Sequence: Synthetic oligonucleotide
  Target: LAMA2; (-) strand; PAM type: NRG; PAM sequence: CAG
atggatatgtgatttgtttt

SEQ ID NO: 113281 - DNA, 20 bp, Artificial Sequence
  Description of Artificial Sequence: Synthetic oligonucleotide
  Target: LAMA2; (-) strand; PAM type: NRG; PAM sequence: TGG
tatatctatttacctgtcga

SEQ ID NO: 113282 - DNA, 20 bp, Artificial Sequence
  Description of Artificial Sequence: Synthetic oligonucleotide
  Target: LAMA2; (-) strand; PAM type: NRG; PAM sequence: GAG
ttgctagtattccattgtat

SEQ ID NO: 113283 - DNA, 20 bp, Artificial Sequence
  Description of Artificial Sequence: Synthetic oligonucleotide
  Target: LAMA2; (-) strand; PAM type: NRG; PAM sequence: TAG
attgctgagtattttattgc

SEQ ID NO: 113284 - DNA, 20 bp, Artificial Sequence
  Description of Artificial Sequence: Synthetic oligonucleotide
  Target: LAMA2; (-) strand; PAM type: NRG; PAM sequence: GAG
atactttattttttattgct

SEQ ID NO: 113285 - DNA, 20 bp, Artificial Sequence
  Description of Artificial Sequence: Synthetic oligonucleotide
  Target: LAMA2; (-) strand; PAM type: NRG; PAM sequence: TGG
gccttttttgtctgcctatt

SEQ ID NO: 113286 - DNA, 20 bp, Artificial Sequence
  Description of Artificial Sequence: Synthetic oligonucleotide
  Target: LAMA2; (-) strand; PAM type: NRG; PAM sequence: TAG
tgctttctgtgactatagat

SEQ ID NO: 113287 - DNA, 20 bp, Artificial Sequence
  Description of Artificial Sequence: Synthetic oligonucleotide
  Target: LAMA2; (-) strand; PAM type: NRG; PAM sequence: TAG
ccgtctgctttctgtgacta

SEQ ID NO: 113288 - DNA, 20 bp, Artificial Sequence
  Description of Artificial Sequence: Synthetic oligonucleotide
  Target: LAMA2; (-) strand; PAM type: NRG; PAM sequence: TAG
gtacatataccattcacaag

SEQ ID NO: 113289 - DNA, 20 bp, Artificial Sequence
  Description of Artificial Sequence: Synthetic oligonucleotide
  Target: LAMA2; (-) strand; PAM type: NRG; PAM sequence: AAG
ttcgtacatataccattcac

SEQ ID NO: 113290 - DNA, 20 bp, Artificial Sequence
  Description of Artificial Sequence: Synthetic oligonucleotide
  Target: LAMA2; (-) strand; PAM type: NRG; PAM sequence: AAG
gaacacatccatcaccccag

SEQ ID NO: 113291 - DNA, 20 bp, Artificial Sequence
  Description of Artificial Sequence: Synthetic oligonucleotide
  Target: LAMA2; (-) strand; PAM type: NRG; PAM sequence: CAG
aatgaacacatccatcaccc

SEQ ID NO: 113292 - DNA, 20 bp, Artificial Sequence
  Description of Artificial Sequence: Synthetic oligonucleotide
  Target: LAMA2; (-) strand; PAM type: NRG; PAM sequence: CAG
catgtaattgtatacacctg

SEQ ID NO: 113293 - DNA, 20 bp, Artificial Sequence
  Description of Artificial Sequence: Synthetic oligonucleotide
  Target: LAMA2; (-) strand; PAM type: NRG; PAM sequence: AGG
tttttaaaacagttttactg

SEQ ID NO: 113294 - DNA, 20 bp, Artificial Sequence
  Description of Artificial Sequence: Synthetic oligonucleotide
  Target: LAMA2; (-) strand; PAM type: NRG; PAM sequence: GAG
atttttaaaacagttttact

SEQ ID NO: 113295 - DNA, 20 bp, Artificial Sequence
  Description of Artificial Sequence: Synthetic oligonucleotide
  Target: LAMA2; (-) strand; PAM type: NRG; PAM sequence: CAG
tatctgtcctatttttaaaa

SEQ ID NO: 113296 - DNA, 20 bp, Artificial Sequence
  Description of Artificial Sequence: Synthetic oligonucleotide
  Target: LAMA2; (-) strand; PAM type: NRG; PAM sequence: CAG
caccacatctaatcaatcaa

SEQ ID NO: 113297 - DNA, 20 bp, Artificial Sequence
  Description of Artificial Sequence: Synthetic oligonucleotide
  Target: LAMA2; (-) strand; PAM type: NRG; PAM sequence: GAG
acccaatctactaaactaga

SEQ ID NO: 113298 - DNA, 20 bp, Artificial Sequence
  Description of Artificial Sequence: Synthetic oligonucleotide
  Target: LAMA2; (-) strand; PAM type: NRG; PAM sequence: GAG
ccacccaatctactaaacta

SEQ ID NO: 113299 - DNA, 20 bp, Artificial Sequence
  Description of Artificial Sequence: Synthetic oligonucleotide
  Target: LAMA2; (-) strand; PAM type: NRG; PAM sequence: TAG
ccccacccaatctactaaac

SEQ ID NO: 113300 - DNA, 20 bp, Artificial Sequence
  Description of Artificial Sequence: Synthetic oligonucleotide
  Target: LAMA2; (-) strand; PAM type: NRG; PAM sequence: TGG
cttaacttacttttttttgt

SEQ ID NO: 113301 - DNA, 20 bp, Artificial Sequence
  Description of Artificial Sequence: Synthetic oligonucleotide
  Target: LAMA2; (-) strand; PAM type: NRG; PAM sequence: AAG
atattttccttgcgtacttt

SEQ ID NO: 113302 - DNA, 20 bp, Artificial Sequence
  Description of Artificial Sequence: Synthetic oligonucleotide
  Target: LAMA2; (-) strand; PAM type: NRG; PAM sequence: GAG
aaagtccacattcaacaggt

SEQ ID NO: 113303 - DNA, 20 bp, Artificial Sequence
  Description of Artificial Sequence: Synthetic oligonucleotide
  Target: LAMA2; (-) strand; PAM type: NRG; PAM sequence: AGG
cctaaaagtccacattcaac

SEQ ID NO: 113304 - DNA, 20 bp, Artificial Sequence
  Description of Artificial Sequence: Synthetic oligonucleotide
  Target: LAMA2; (-) strand; PAM type: NRG; PAM sequence: CAG
gcctaaaagtccacattcaa

SEQ ID NO: 113305 - DNA, 20 bp, Artificial Sequence
  Description of Artificial Sequence: Synthetic oligonucleotide
  Target: LAMA2; (-) strand; PAM type: NRG; PAM sequence: AAG
tggacctgatttttgcctaa

SEQ ID NO: 113306 - DNA, 20 bp, Artificial Sequence
  Description of Artificial Sequence: Synthetic oligonucleotide
  Target: LAMA2; (-) strand; PAM type: NRG; PAM sequence: TGG
gacttaaatgtatgtatgct

SEQ ID NO: 113307 - DNA, 20 bp, Artificial Sequence
  Description of Artificial Sequence: Synthetic oligonucleotide
  Target: LAMA2; (-) strand; PAM type: NRG; PAM sequence: AAG
ttagccatctgggcaaactc

SEQ ID NO: 113308 - DNA, 20 bp, Artificial Sequence
  Description of Artificial Sequence: Synthetic oligonucleotide
  Target: LAMA2; (-) strand; PAM type: NRG; PAM sequence: GGG
atctcaggttttagccatct

SEQ ID NO: 113309 - DNA, 20 bp, Artificial Sequence
  Description of Artificial Sequence: Synthetic oligonucleotide
  Target: LAMA2; (-) strand; PAM type: NRG; PAM sequence: TGG
catctcaggttttagccatc

SEQ ID NO: 113310 - DNA, 20 bp, Artificial Sequence
  Description of Artificial Sequence: Synthetic oligonucleotide
  Target: LAMA2; (-) strand; PAM type: NRG; PAM sequence: TAG
tttgcccacatctcaggttt

SEQ ID NO: 113311 - DNA, 20 bp, Artificial Sequence
  Description of Artificial Sequence: Synthetic oligonucleotide
  Target: LAMA2; (-) strand; PAM type: NRG; PAM sequence: AGG
ccttcctttgcccacatctc

SEQ ID NO: 113312 - DNA, 20 bp, Artificial Sequence
  Description of Artificial Sequence: Synthetic oligonucleotide
  Target: LAMA2; (-) strand; PAM type: NRG; PAM sequence: CAG
cccttcctttgcccacatct

SEQ ID NO: 113313 - DNA, 20 bp, Artificial Sequence
  Description of Artificial Sequence: Synthetic oligonucleotide
  Target: LAMA2; (-) strand; PAM type: NRG; PAM sequence: GGG
attctcaatctcctaccctg

SEQ ID NO: 113314 - DNA, 20 bp, Artificial Sequence
  Description of Artificial Sequence: Synthetic oligonucleotide
  Target: LAMA2; (-) strand; PAM type: NRG; PAM sequence: GGG
cattctcaatctcctaccct

SEQ ID NO: 113315 - DNA, 20 bp, Artificial Sequence
  Description of Artificial Sequence: Synthetic oligonucleotide
  Target: LAMA2; (-) strand; PAM type: NRG; PAM sequence: TGG
tcattctcaatctcctaccc

SEQ ID NO: 113316 - DNA, 20 bp, Artificial Sequence
  Description of Artificial Sequence: Synthetic oligonucleotide
  Target: LAMA2; (-) strand; PAM type: NRG; PAM sequence: TGG
ttccataatgtcaagctctc

SEQ ID NO: 113317 - DNA, 20 bp, Artificial Sequence
  Description of Artificial Sequence: Synthetic oligonucleotide
  Target: LAMA2; (-) strand; PAM type: NRG; PAM sequence: AAG
cttctggcttccataatgtc

SEQ ID NO: 113318 - DNA, 20 bp, Artificial Sequence
  Description of Artificial Sequence: Synthetic oligonucleotide
  Target: LAMA2; (-) strand; PAM type: NRG; PAM sequence: TGG
tccctataggaaatttcttc

SEQ ID NO: 113319 - DNA, 20 bp, Artificial Sequence
  Description of Artificial Sequence: Synthetic oligonucleotide
  Target: LAMA2; (-) strand; PAM type: NRG; PAM sequence: AGG
gttagcatttccttccctat

SEQ ID NO: 113320 - DNA, 20 bp, Artificial Sequence
  Description of Artificial Sequence: Synthetic oligonucleotide
  Target: LAMA2; (-) strand; PAM type: NRG; PAM sequence: TAG
tgttagcatttccttcccta

SEQ ID NO: 113321 - DNA, 20 bp, Artificial Sequence
  Description of Artificial Sequence: Synthetic oligonucleotide
  Target: LAMA2; (-) strand; PAM type: NRG; PAM sequence: TAG
tgtgcaatatttaatgctgt

SEQ ID NO: 113322 - DNA, 20 bp, Artificial Sequence
  Description of Artificial Sequence: Synthetic oligonucleotide
  Target: LAMA2; (-) strand; PAM type: NRG; PAM sequence: GAG
gcctatacccaaactcagtg

SEQ ID NO: 113323 - DNA, 20 bp, Artificial Sequence
  Description of Artificial Sequence: Synthetic oligonucleotide
  Target: LAMA2; (-) strand; PAM type: NRG; PAM sequence: TGG
ctgcctatacccaaactcag

SEQ ID NO: 113324 - DNA, 20 bp, Artificial Sequence
  Description of Artificial Sequence: Synthetic oligonucleotide
  Target: LAMA2; (-) strand; PAM type: NRG; PAM sequence: CAG
gacctgcctatacccaaact

SEQ ID NO: 113325 - DNA, 20 bp, Artificial Sequence
  Description of Artificial Sequence: Synthetic oligonucleotide
  Target: LAMA2; (-) strand; PAM type: NRG; PAM sequence: GGG
tggtcttgctaaagtcctca

SEQ ID NO: 113326 - DNA, 20 bp, Artificial Sequence
  Description of Artificial Sequence: Synthetic oligonucleotide
  Target: LAMA2; (-) strand; PAM type: NRG; PAM sequence: AGG
ctggtcttgctaaagtcctc

SEQ ID NO: 113327 - DNA, 20 bp, Artificial Sequence
  Description of Artificial Sequence: Synthetic oligonucleotide
  Target: LAMA2; (-) strand; PAM type: NRG; PAM sequence: CAG
tctggtcttgctaaagtcct

SEQ ID NO: 113328 - DNA, 20 bp, Artificial Sequence
  Description of Artificial Sequence: Synthetic oligonucleotide
  Target: LAMA2; (-) strand; PAM type: NRG; PAM sequence: AAG
tgtcatctctggtcttgcta

SEQ ID NO: 113329 - DNA, 20 bp, Artificial Sequence
  Description of Artificial Sequence: Synthetic oligonucleotide
  Target: LAMA2; (-) strand; PAM type: NRG; PAM sequence: TGG
tcccactactctgtcatctc

SEQ ID NO: 113330 - DNA, 20 bp, Artificial Sequence
  Description of Artificial Sequence: Synthetic oligonucleotide
  Target: LAMA2; (-) strand; PAM type: NRG; PAM sequence: GAG
agcaatcatccacattgctg

SEQ ID NO: 113331 - DNA, 20 bp, Artificial Sequence
  Description of Artificial Sequence: Synthetic oligonucleotide
  Target: LAMA2; (-) strand; PAM type: NRG; PAM sequence: TGG
ggagcaatcatccacattgc

SEQ ID NO: 113332 - DNA, 20 bp, Artificial Sequence
  Description of Artificial Sequence: Synthetic oligonucleotide
  Target: LAMA2; (-) strand; PAM type: NRG; PAM sequence: GAG
ataatctggtcactgaaaag

SEQ ID NO: 113333 - DNA, 20 bp, Artificial Sequence
  Description of Artificial Sequence: Synthetic oligonucleotide
  Target: LAMA2; (-) strand; PAM type: NRG; PAM sequence: AGG
aaataatctggtcactgaaa

SEQ ID NO: 113334 - DNA, 20 bp, Artificial Sequence
  Description of Artificial Sequence: Synthetic oligonucleotide
  Target: LAMA2; (-) strand; PAM type: NRG; PAM sequence: AAG
caaataatctggtcactgaa

SEQ ID NO: 113335 - DNA, 20 bp, Artificial Sequence
  Description of Artificial Sequence: Synthetic oligonucleotide
  Target: LAMA2; (-) strand; PAM type: NRG; PAM sequence: TGG
ttcatataaaacaaataatc

SEQ ID NO: 113336 - DNA, 20 bp, Artificial Sequence
  Description of Artificial Sequence: Synthetic oligonucleotide
  Target: LAMA2; (-) strand; PAM type: NRG; PAM sequence: GAG
agtgctcttgccaactagtt

SEQ ID NO: 113337 - DNA, 20 bp, Artificial Sequence
  Description of Artificial Sequence: Synthetic oligonucleotide
  Target: LAMA2; (-) strand; PAM type: NRG; PAM sequence: TAG
gagacagtgctcttgccaac

SEQ ID NO: 113338 - DNA, 20 bp, Artificial Sequence
  Description of Artificial Sequence: Synthetic oligonucleotide
  Target: LAMA2; (-) strand; PAM type: NRG; PAM sequence: CAG
tgtacttgaatttcaagaga

SEQ ID NO: 113339 - DNA, 20 bp, Artificial Sequence
  Description of Artificial Sequence: Synthetic oligonucleotide
  Target: LAMA2; (-) strand; PAM type: NRG; PAM sequence: GAG
ggactgtacttgaatttcaa

SEQ ID NO: 113340 - DNA, 20 bp, Artificial Sequence
  Description of Artificial Sequence: Synthetic oligonucleotide
  Target: LAMA2; (-) strand; PAM type: NRG; PAM sequence: AAG
aaggactgtacttgaatttc

SEQ ID NO: 113341 - DNA, 20 bp, Artificial Sequence
  Description of Artificial Sequence: Synthetic oligonucleotide
  Target: LAMA2; (-) strand; PAM type: NRG; PAM sequence: AGG
aagatggggaacactcctga

SEQ ID NO: 113342 - DNA, 20 bp, Artificial Sequence
  Description of Artificial Sequence: Synthetic oligonucleotide
  Target: LAMA2; (-) strand; PAM type: NRG; PAM sequence: AAG
aaagatggggaacactcctg

SEQ ID NO: 113343 - DNA, 20 bp, Artificial Sequence
  Description of Artificial Sequence: Synthetic oligonucleotide
  Target: LAMA2; (-) strand; PAM type: NRG; PAM sequence: GGG
taactgactcaagaaagatg

SEQ ID NO: 113344 - DNA, 20 bp, Artificial Sequence
  Description of Artificial Sequence: Synthetic oligonucleotide
  Target: LAMA2; (-) strand; PAM type: NRG; PAM sequence: GGG
gtaactgactcaagaaagat

SEQ ID NO: 113345 - DNA, 20 bp, Artificial Sequence
  Description of Artificial Sequence: Synthetic oligonucleotide
  Target: LAMA2; (-) strand; PAM type: NRG; PAM sequence: TGG
tgtaactgactcaagaaaga

SEQ ID NO: 113346 - DNA, 20 bp, Artificial Sequence
  Description of Artificial Sequence: Synthetic oligonucleotide
  Target: LAMA2; (-) strand; PAM type: NRG; PAM sequence: AAG
gttctgtaactgactcaaga

SEQ ID NO: 113347 - DNA, 20 bp, Artificial Sequence
  Description of Artificial Sequence: Synthetic oligonucleotide
  Target: LAMA2; (-) strand; PAM type: NRG; PAM sequence: AAG
tgtggttctgtaactgactc

SEQ ID NO: 113348 - DNA, 20 bp, Artificial Sequence
  Description of Artificial Sequence: Synthetic oligonucleotide
  Target: LAMA2; (-) strand; PAM type: NRG; PAM sequence: TGG
cacacttctgtcagggactg

SEQ ID NO: 113349 - DNA, 20 bp, Artificial Sequence
  Description of Artificial Sequence: Synthetic oligonucleotide
  Target: LAMA2; (-) strand; PAM type: NRG; PAM sequence: GGG
gatagggcacacttctgtca

SEQ ID NO: 113350 - DNA, 20 bp, Artificial Sequence
  Description of Artificial Sequence: Synthetic oligonucleotide
  Target: LAMA2; (-) strand; PAM type: NRG; PAM sequence: AGG
ggatagggcacacttctgtc

SEQ ID NO: 113351 - DNA, 20 bp, Artificial Sequence
  Description of Artificial Sequence: Synthetic oligonucleotide
  Target: LAMA2; (-) strand; PAM type: NRG; PAM sequence: CAG
gggatagggcacacttctgt

SEQ ID NO: 113352 - DNA, 20 bp, Artificial Sequence
  Description of Artificial Sequence: Synthetic oligonucleotide
  Target: LAMA2; (-) strand; PAM type: NRG; PAM sequence: GGG
cttgatgcatttaggggata

SEQ ID NO: 113353 - DNA, 20 bp, Artificial Sequence
  Description of Artificial Sequence: Synthetic oligonucleotide
  Target: LAMA2; (-) strand; PAM type: NRG; PAM sequence: AGG
acttgatgcatttaggggat

SEQ ID NO: 113354 - DNA, 20 bp, Artificial Sequence
  Description of Artificial Sequence: Synthetic oligonucleotide
  Target: LAMA2; (-) strand; PAM type: NRG; PAM sequence: TAG
tacttgatgcatttagggga

SEQ ID NO: 113355 - DNA, 20 bp, Artificial Sequence
  Description of Artificial Sequence: Synthetic oligonucleotide
  Target: LAMA2; (-) strand; PAM type: NRG; PAM sequence: GGG
atcctacttgatgcatttag

SEQ ID NO: 113356 - DNA, 20 bp, Artificial Sequence
  Description of Artificial Sequence: Synthetic oligonucleotide
  Target: LAMA2; (-) strand; PAM type: NRG; PAM sequence: GGG
catcctacttgatgcattta

SEQ ID NO: 113357 - DNA, 20 bp, Artificial Sequence
  Description of Artificial Sequence: Synthetic oligonucleotide
  Target: LAMA2; (-) strand; PAM type: NRG; PAM sequence: AGG
gcatcctacttgatgcattt

SEQ ID NO: 113358 - DNA, 20 bp, Artificial Sequence
  Description of Artificial Sequence: Synthetic oligonucleotide
  Target: LAMA2; (-) strand; PAM type: NRG; PAM sequence: TAG
tgcatcctacttgatgcatt

SEQ ID NO: 113359 - DNA, 20 bp, Artificial Sequence
  Description of Artificial Sequence: Synthetic oligonucleotide
  Target: LAMA2; (-) strand; PAM type: NRG; PAM sequence: GAG
gatccactgaaaatctaatt

SEQ ID NO: 113360 - DNA, 20 bp, Artificial Sequence
  Description of Artificial Sequence: Synthetic oligonucleotide
  Target: LAMA2; (-) strand; PAM type: NRG; PAM sequence: TGG
taagctaagtgtttttactt

SEQ ID NO: 113361 - DNA, 20 bp, Artificial Sequence
  Description of Artificial Sequence: Synthetic oligonucleotide
  Target: LAMA2; (-) strand; PAM type: NRG; PAM sequence: AAG
atgctgagttgttataagct

SEQ ID NO: 113362 - DNA, 20 bp, Artificial Sequence
  Description of Artificial Sequence: Synthetic oligonucleotide
  Target: LAMA2; (-) strand; PAM type: NRG; PAM sequence: AAG
aatcaatgctgagttgttat

SEQ ID NO: 113363 - DNA, 20 bp, Artificial Sequence
  Description of Artificial Sequence: Synthetic oligonucleotide
  Target: LAMA2; (-) strand; PAM type: NRG; PAM sequence: GAG
aatattttataatcaatgct

SEQ ID NO: 113364 - DNA, 20 bp, Artificial Sequence
  Description of Artificial Sequence: Synthetic oligonucleotide
  Target: LAMA2; (-) strand; PAM type: NRG; PAM sequence: AAG
tagacacagagtagggactt

SEQ ID NO: 113365 - DNA, 20 bp, Artificial Sequence
  Description of Artificial Sequence: Synthetic oligonucleotide
  Target: LAMA2; (-) strand; PAM type: NRG; PAM sequence: GGG
taaataatagacacagagta

SEQ ID NO: 113366 - DNA, 20 bp, Artificial Sequence
  Description of Artificial Sequence: Synthetic oligonucleotide
  Target: LAMA2; (-) strand; PAM type: NRG; PAM sequence: AGG
ttaaataatagacacagagt

SEQ ID NO: 113367 - DNA, 20 bp, Artificial Sequence
  Description of Artificial Sequence: Synthetic oligonucleotide
  Target: LAMA2; (-) strand; PAM type: NRG; PAM sequence: TAG
attaaataatagacacagag

SEQ ID NO: 113368 - DNA, 20 bp, Artificial Sequence
  Description of Artificial Sequence: Synthetic oligonucleotide
  Target: LAMA2; (-) strand; PAM type: NRG; PAM sequence: GAG
tttattaaataatagacaca

SEQ ID NO: 113369 - DNA, 20 bp, Artificial Sequence
  Description of Artificial Sequence: Synthetic oligonucleotide
  Target: LAMA2; (-) strand; PAM type: NRG; PAM sequence: CAG
attttattaaataatagaca

SEQ ID NO: 113370 - DNA, 20 bp, Artificial Sequence
  Description of Artificial Sequence: Synthetic oligonucleotide
  Target: LAMA2; (-) strand; PAM type: NRG; PAM sequence: TAG
ataaggattttattaaataa

SEQ ID NO: 113371 - DNA, 20 bp, Artificial Sequence
  Description of Artificial Sequence: Synthetic oligonucleotide
  Target: LAMA2; (-) strand; PAM type: NRG; PAM sequence: AGG
tataagtaggtagggaaata

SEQ ID NO: 113372 - DNA, 20 bp, Artificial Sequence
  Description of Artificial Sequence: Synthetic oligonucleotide
  Target: LAMA2; (-) strand; PAM type: NRG; PAM sequence: AAG
ttataagtaggtagggaaat

SEQ ID NO: 113373 - DNA, 20 bp, Artificial Sequence
  Description of Artificial Sequence: Synthetic oligonucleotide
  Target: LAMA2; (-) strand; PAM type: NRG; PAM sequence: GGG
atgtgatttataagtaggta

SEQ ID NO: 113374 - DNA, 20 bp, Artificial Sequence
  Description of Artificial Sequence: Synthetic oligonucleotide
  Target: LAMA2; (-) strand; PAM type: NRG; PAM sequence: AGG
gatgtgatttataagtaggt

SEQ ID NO: 113375 - DNA, 20 bp, Artificial Sequence
  Description of Artificial Sequence: Synthetic oligonucleotide
  Target: LAMA2; (-) strand; PAM type: NRG; PAM sequence: TAG
agatgtgatttataagtagg

SEQ ID NO: 113376 - DNA, 20 bp, Artificial Sequence
  Description of Artificial Sequence: Synthetic oligonucleotide
  Target: LAMA2; (-) strand; PAM type: NRG; PAM sequence: AGG
ttcagatgtgatttataagt

SEQ ID NO: 113377 - DNA, 20 bp, Artificial Sequence
  Description of Artificial Sequence: Synthetic oligonucleotide
  Target: LAMA2; (-) strand; PAM type: NRG; PAM sequence: TAG
gttcagatgtgatttataag

SEQ ID NO: 113378 - DNA, 20 bp, Artificial Sequence
  Description of Artificial Sequence: Synthetic oligonucleotide
  Target: LAMA2; (-) strand; PAM type: NRG; PAM sequence: AAG
tgagttcagatgtgatttat

SEQ ID NO: 113379 - DNA, 20 bp, Artificial Sequence
  Description of Artificial Sequence: Synthetic oligonucleotide
  Target: LAMA2; (-) strand; PAM type: NRG; PAM sequence: CAG
aatttcacagttgatgagtt

SEQ ID NO: 113380 - DNA, 20 bp, Artificial Sequence
  Description of Artificial Sequence: Synthetic oligonucleotide
  Target: LAMA2; (-) strand; PAM type: NRG; PAM sequence: GAG
cacaaaatttcacagttgat

SEQ ID NO: 113381 - DNA, 20 bp, Artificial Sequence
  Description of Artificial Sequence: Synthetic oligonucleotide
  Target: LAMA2; (-) strand; PAM type: NRG; PAM sequence: CAG
gctattgacacaaaatttca

SEQ ID NO: 113382 - DNA, 20 bp, Artificial Sequence
  Description of Artificial Sequence: Synthetic oligonucleotide
  Target: LAMA2; (-) strand; PAM type: NRG; PAM sequence: AGG
tctttacaaaatagaaaagt

SEQ ID NO: 113383 - DNA, 20 bp, Artificial Sequence
  Description of Artificial Sequence: Synthetic oligonucleotide
  Target: LAMA2; (-) strand; PAM type: NRG; PAM sequence: TAG
ttctttacaaaatagaaaag

SEQ ID NO: 113384 - DNA, 20 bp, Artificial Sequence
  Description of Artificial Sequence: Synthetic oligonucleotide
  Target: LAMA2; (-) strand; PAM type: NRG; PAM sequence: AAG
cttttctttacaaaatagaa

SEQ ID NO: 113385 - DNA, 20 bp, Artificial Sequence
  Description of Artificial Sequence: Synthetic oligonucleotide
  Target: LAMA2; (-) strand; PAM type: NRG; PAM sequence: TAG
tatttcttttctttacaaaa

SEQ ID NO: 113386 - DNA, 20 bp, Artificial Sequence
  Description of Artificial Sequence: Synthetic oligonucleotide
  Target: LAMA2; (-) strand; PAM type: NRG; PAM sequence: TAG
tgggttctaccaggaaatgc

SEQ ID NO: 113387 - DNA, 20 bp, Artificial Sequence
  Description of Artificial Sequence: Synthetic oligonucleotide
  Target: LAMA2; (-) strand; PAM type: NRG; PAM sequence: AGG
gcgatgaagtgggttctacc

SEQ ID NO: 113388 - DNA, 20 bp, Artificial Sequence
  Description of Artificial Sequence: Synthetic oligonucleotide
  Target: LAMA2; (-) strand; PAM type: NRG; PAM sequence: CAG
agcgatgaagtgggttctac

SEQ ID NO: 113389 - DNA, 20 bp, Artificial Sequence
  Description of Artificial Sequence: Synthetic oligonucleotide
  Target: LAMA2; (-) strand; PAM type: NRG; PAM sequence: GGG
atgagtgatagcgatgaagt

SEQ ID NO: 113390 - DNA, 20 bp, Artificial Sequence
  Description of Artificial Sequence: Synthetic oligonucleotide
  Target: LAMA2; (-) strand; PAM type: NRG; PAM sequence: TGG
catgagtgatagcgatgaag

SEQ ID NO: 113391 - DNA, 20 bp, Artificial Sequence
  Description of Artificial Sequence: Synthetic oligonucleotide
  Target: LAMA2; (-) strand; PAM type: NRG; PAM sequence: AAG
cttcatgagtgatagcgatg

SEQ ID NO: 113392 - DNA, 20 bp, Artificial Sequence
  Description of Artificial Sequence: Synthetic oligonucleotide
  Target: LAMA2; (-) strand; PAM type: NRG; PAM sequence: TAG
actctatccttcatgagtga

SEQ ID NO: 113393 - DNA, 20 bp, Artificial Sequence
  Description of Artificial Sequence: Synthetic oligonucleotide
  Target: LAMA2; (-) strand; PAM type: NRG; PAM sequence: GAG
tgctttactctatccttcat

SEQ ID NO: 113394 - DNA, 20 bp, Artificial Sequence
  Description of Artificial Sequence: Synthetic oligonucleotide
  Target: LAMA2; (-) strand; PAM type: NRG; PAM sequence: GAG
tatttttactgacttaaagg

SEQ ID NO: 113395 - DNA, 20 bp, Artificial Sequence
  Description of Artificial Sequence: Synthetic oligonucleotide
  Target: LAMA2; (-) strand; PAM type: NRG; PAM sequence: GGG
catatttttactgacttaaa

SEQ ID NO: 113396 - DNA, 20 bp, Artificial Sequence
  Description of Artificial Sequence: Synthetic oligonucleotide
  Target: LAMA2; (-) strand; PAM type: NRG; PAM sequence: AGG
gcatatttttactgacttaa

SEQ ID NO: 113397 - DNA, 20 bp, Artificial Sequence
  Description of Artificial Sequence: Synthetic oligonucleotide
  Target: LAMA2; (-) strand; PAM type: NRG; PAM sequence: AAG
ggcatatttttactgactta

SEQ ID NO: 113398 - DNA, 20 bp, Artificial Sequence
  Description of Artificial Sequence: Synthetic oligonucleotide
  Target: LAMA2; (-) strand; PAM type: NRG; PAM sequence: TGG
taactggcagagagacagga

SEQ ID NO: 113399 - DNA, 20 bp, Artificial Sequence
  Description of Artificial Sequence: Synthetic oligonucleotide
  Target: LAMA2; (-) strand; PAM type: NRG; PAM sequence: AGG
aaggtaactggcagagagac

SEQ ID NO: 113400 - DNA, 20 bp, Artificial Sequence
  Description of Artificial Sequence: Synthetic oligonucleotide
  Target: LAMA2; (-) strand; PAM type: NRG; PAM sequence: CAG
aaaggtaactggcagagaga

SEQ ID NO: 113401 - DNA, 20 bp, Artificial Sequence
  Description of Artificial Sequence: Synthetic oligonucleotide
  Target: LAMA2; (-) strand; PAM type: NRG; PAM sequence: GAG
cccaaaaggtaactggcaga

SEQ ID NO: 113402 - DNA, 20 bp, Artificial Sequence
  Description of Artificial Sequence: Synthetic oligonucleotide
  Target: LAMA2; (-) strand; PAM type: NRG; PAM sequence: GAG
ggcccaaaaggtaactggca

SEQ ID NO: 113403 - DNA, 20 bp, Artificial Sequence
  Description of Artificial Sequence: Synthetic oligonucleotide
  Target: LAMA2; (-) strand; PAM type: NRG; PAM sequence: CAG
ctggcccaaaaggtaactgg

SEQ ID NO: 113404 - DNA, 20 bp, Artificial Sequence
  Description of Artificial Sequence: Synthetic oligonucleotide
  Target: LAMA2; (-) strand; PAM type: NRG; PAM sequence: TGG
tcactggcccaaaaggtaac

SEQ ID NO: 113405 - DNA, 20 bp, Artificial Sequence
  Description of Artificial Sequence: Synthetic oligonucleotide
  Target: LAMA2; (-) strand; PAM type: NRG; PAM sequence: AGG
ttgaaattcactggcccaaa

SEQ ID NO: 113406 - DNA, 20 bp, Artificial Sequence
  Description of Artificial Sequence: Synthetic oligonucleotide
  Target: LAMA2; (-) strand; PAM type: NRG; PAM sequence: AAG
attgaaattcactggcccaa

SEQ ID NO: 113407 - DNA, 20 bp, Artificial Sequence
  Description of Artificial Sequence: Synthetic oligonucleotide
  Target: LAMA2; (-) strand; PAM type: NRG; PAM sequence: TGG
acaattgaattgaaattcac

SEQ ID NO: 113408 - DNA, 20 bp, Artificial Sequence
  Description of Artificial Sequence: Synthetic oligonucleotide
  Target: LAMA2; (-) strand; PAM type: NRG; PAM sequence: CAG
aagaaaacatgattaaagag

SEQ ID NO: 113409 - DNA, 20 bp, Artificial Sequence
  Description of Artificial Sequence: Synthetic oligonucleotide
  Target: LAMA2; (-) strand; PAM type: NRG; PAM sequence: GAG
tctaagaaaacatgattaaa

SEQ ID NO: 113410 - DNA, 20 bp, Artificial Sequence
  Description of Artificial Sequence: Synthetic oligonucleotide
  Target: LAMA2; (-) strand; PAM type: NRG; PAM sequence: AAG
attctaagaaaacatgatta

SEQ ID NO: 113411 - DNA, 20 bp, Artificial Sequence
  Description of Artificial Sequence: Synthetic oligonucleotide
  Target: LAMA2; (-) strand; PAM type: NRG; PAM sequence: AAG
gcatttttagaaatcattct

SEQ ID NO: 113412 - DNA, 20 bp, Artificial Sequence
  Description of Artificial Sequence: Synthetic oligonucleotide
  Target: LAMA2; (-) strand; PAM type: NRG; PAM sequence: TAG
tgaatgaatatatgcatttt

SEQ ID NO: 113413 - DNA, 20 bp, Artificial Sequence
  Description of Artificial Sequence: Synthetic oligonucleotide
  Target: LAMA2; (-) strand; PAM type: NRG; PAM sequence: TGG
ggcaagccagtgactggagg

SEQ ID NO: 113414 - DNA, 20 bp, Artificial Sequence
  Description of Artificial Sequence: Synthetic oligonucleotide
  Target: LAMA2; (-) strand; PAM type: NRG; PAM sequence: AGG
acaggcaagccagtgactgg

SEQ ID NO: 113415 - DNA, 20 bp, Artificial Sequence
  Description of Artificial Sequence: Synthetic oligonucleotide
  Target: LAMA2; (-) strand; PAM type: NRG; PAM sequence: GAG
cacaggcaagccagtgactg

SEQ ID NO: 113416 - DNA, 20 bp, Artificial Sequence
  Description of Artificial Sequence: Synthetic oligonucleotide
  Target: LAMA2; (-) strand; PAM type: NRG; PAM sequence: TGG
atcacaggcaagccagtgac

SEQ ID NO: 113417 - DNA, 20 bp, Artificial Sequence
  Description of Artificial Sequence: Synthetic oligonucleotide
  Target: LAMA2; (-) strand; PAM type: NRG; PAM sequence: CAG
cctctctatcacaggcaagc

SEQ ID NO: 113418 - DNA, 20 bp, Artificial Sequence
  Description of Artificial Sequence: Synthetic oligonucleotide
  Target: LAMA2; (-) strand; PAM type: NRG; PAM sequence: AAG
tctgcctctctatcacaggc

SEQ ID NO: 113419 - DNA, 20 bp, Artificial Sequence
  Description of Artificial Sequence: Synthetic oligonucleotide
  Target: LAMA2; (-) strand; PAM type: NRG; PAM sequence: AGG
agattctgcctctctatcac

SEQ ID NO: 113420 - DNA, 20 bp, Artificial Sequence
  Description of Artificial Sequence: Synthetic oligonucleotide
  Target: LAMA2; (-) strand; PAM type: NRG; PAM sequence: CAG
gagattctgcctctctatca

SEQ ID NO: 113421 - DNA, 20 bp, Artificial Sequence
  Description of Artificial Sequence: Synthetic oligonucleotide
  Target: LAMA2; (-) strand; PAM type: NRG; PAM sequence: GAG
ttttaatggtgtctgaaaat

SEQ ID NO: 113422 - DNA, 20 bp, Artificial Sequence
  Description of Artificial Sequence: Synthetic oligonucleotide
  Target: LAMA2; (-) strand; PAM type: NRG; PAM sequence: TGG
agacttggtgggtattttaa

SEQ ID NO: 113423 - DNA, 20 bp, Artificial Sequence
  Description of Artificial Sequence: Synthetic oligonucleotide
  Target: LAMA2; (-) strand; PAM type: NRG; PAM sequence: GGG
tctctttctacagacttggt

SEQ ID NO: 113424 - DNA, 20 bp, Artificial Sequence
  Description of Artificial Sequence: Synthetic oligonucleotide
  Target: LAMA2; (-) strand; PAM type: NRG; PAM sequence: TGG
gtctctttctacagacttgg

SEQ ID NO: 113425 - DNA, 20 bp, Artificial Sequence
  Description of Artificial Sequence: Synthetic oligonucleotide
  Target: LAMA2; (-) strand; PAM type: NRG; PAM sequence: TGG
atagtctctttctacagact

SEQ ID NO: 113426 - DNA, 20 bp, Artificial Sequence
  Description of Artificial Sequence: Synthetic oligonucleotide
  Target: LAMA2; (-) strand; PAM type: NRG; PAM sequence: CAG
atgaaaatagtctctttcta

SEQ ID NO: 113427 - DNA, 20 bp, Artificial Sequence
  Description of Artificial Sequence: Synthetic oligonucleotide
  Target: LAMA2; (-) strand; PAM type: NRG; PAM sequence: TAG
tgttgactggaagatgaaaa

SEQ ID NO: 113428 - DNA, 20 bp, Artificial Sequence
  Description of Artificial Sequence: Synthetic oligonucleotide
  Target: LAMA2; (-) strand; PAM type: NRG; PAM sequence: AAG
catatggggctgttgactgg

SEQ ID NO: 113429 - DNA, 20 bp, Artificial Sequence
  Description of Artificial Sequence: Synthetic oligonucleotide
  Target: LAMA2; (-) strand; PAM type: NRG; PAM sequence: TGG
tttcatatggggctgttgac

SEQ ID NO: 113430 - DNA, 20 bp, Artificial Sequence
  Description of Artificial Sequence: Synthetic oligonucleotide
  Target: LAMA2; (-) strand; PAM type: NRG; PAM sequence: GGG
ggcaaaggtattttcatatg

SEQ ID NO: 113431 - DNA, 20 bp, Artificial Sequence
  Description of Artificial Sequence: Synthetic oligonucleotide
  Target: LAMA2; (-) strand; PAM type: NRG; PAM sequence: GGG
cggcaaaggtattttcatat

SEQ ID NO: 113432 - DNA, 20 bp, Artificial Sequence
  Description of Artificial Sequence: Synthetic oligonucleotide
  Target: LAMA2; (-) strand; PAM type: NRG; PAM sequence: TGG
tcggcaaaggtattttcata

SEQ ID NO: 113433 - DNA, 20 bp, Artificial Sequence
  Description of Artificial Sequence: Synthetic oligonucleotide
  Target: LAMA2; (-) strand; PAM type: NRG; PAM sequence: AGG
ctttttatctagatcggcaa

SEQ ID NO: 113434 - DNA, 20 bp, Artificial Sequence
  Description of Artificial Sequence: Synthetic oligonucleotide
  Target: LAMA2; (-) strand; PAM type: NRG; PAM sequence: AAG
cctttttatctagatcggca

SEQ ID NO: 113435 - DNA, 20 bp, Artificial Sequence
  Description of Artificial Sequence: Synthetic oligonucleotide
  Target: LAMA2; (-) strand; PAM type: NRG; PAM sequence: CGG
acattcctttttatctagat

SEQ ID NO: 113436 - DNA, 20 bp, Artificial Sequence
  Description of Artificial Sequence: Synthetic oligonucleotide
  Target: LAMA2; (-) strand; PAM type: NRG; PAM sequence: TAG
catatacattcctttttatc

SEQ ID NO: 113437 - DNA, 20 bp, Artificial Sequence
  Description of Artificial Sequence: Synthetic oligonucleotide
  Target: LAMA2; (-) strand; PAM type: NRG; PAM sequence: AAG
agatttataaaactgttttc

SEQ ID NO: 113438 - DNA, 20 bp, Artificial Sequence
  Description of Artificial Sequence: Synthetic oligonucleotide
  Target: LAMA2; (-) strand; PAM type: NRG; PAM sequence: TAG
gactgggggctaaaagaaaa

SEQ ID NO: 113439 - DNA, 20 bp, Artificial Sequence
  Description of Artificial Sequence: Synthetic oligonucleotide
  Target: LAMA2; (-) strand; PAM type: NRG; PAM sequence: AAG
ttgactggactgggggctaa

SEQ ID NO: 113440 - DNA, 20 bp, Artificial Sequence
  Description of Artificial Sequence: Synthetic oligonucleotide
  Target: LAMA2; (-) strand; PAM type: NRG; PAM sequence: GGG
tatctccttgactggactgg

SEQ ID NO: 113441 - DNA, 20 bp, Artificial Sequence
  Description of Artificial Sequence: Synthetic oligonucleotide
  Target: LAMA2; (-) strand; PAM type: NRG; PAM sequence: GGG
atatctccttgactggactg

SEQ ID NO: 113442 - DNA, 20 bp, Artificial Sequence
  Description of Artificial Sequence: Synthetic oligonucleotide
  Target: LAMA2; (-) strand; PAM type: NRG; PAM sequence: GGG
tatatctccttgactggact

SEQ ID NO: 113443 - DNA, 20 bp, Artificial Sequence
  Description of Artificial Sequence: Synthetic oligonucleotide
  Target: LAMA2; (-) strand; PAM type: NRG; PAM sequence: TGG
atatatctccttgactggac

SEQ ID NO: 113444 - DNA, 20 bp, Artificial Sequence
  Description of Artificial Sequence: Synthetic oligonucleotide
  Target: LAMA2; (-) strand; PAM type: NRG; PAM sequence: TGG
tacacatatatctccttgac

SEQ ID NO: 113445 - DNA, 20 bp, Artificial Sequence
  Description of Artificial Sequence: Synthetic oligonucleotide
  Target: LAMA2; (-) strand; PAM type: NRG; PAM sequence: TAG
attatttttatatacataat

SEQ ID NO: 113446 - DNA, 20 bp, Artificial Sequence
  Description of Artificial Sequence: Synthetic oligonucleotide
  Target: LAMA2; (-) strand; PAM type: NRG; PAM sequence: AAG
ttaaatatagctagcaagtt

SEQ ID NO: 113447 - DNA, 20 bp, Artificial Sequence
  Description of Artificial Sequence: Synthetic oligonucleotide
  Target: LAMA2; (-) strand; PAM type: NRG; PAM sequence: AAG
tcctattaaatatagctagc

SEQ ID NO: 113448 - DNA, 20 bp, Artificial Sequence
  Description of Artificial Sequence: Synthetic oligonucleotide
  Target: LAMA2; (-) strand; PAM type: NRG; PAM sequence: TAG
attgtcctattaaatatagc

SEQ ID NO: 113449 - DNA, 20 bp, Artificial Sequence
  Description of Artificial Sequence: Synthetic oligonucleotide
  Target: LAMA2; (-) strand; PAM type: NRG; PAM sequence: TAG
aataattgtcctattaaata

SEQ ID NO: 113450 - DNA, 20 bp, Artificial Sequence
  Description of Artificial Sequence: Synthetic oligonucleotide
  Target: LAMA2; (-) strand; PAM type: NRG; PAM sequence: AAG
caaacaagaaaaatacctaa

SEQ ID NO: 113451 - DNA, 20 bp, Artificial Sequence
  Description of Artificial Sequence: Synthetic oligonucleotide
  Target: LAMA2; (-) strand; PAM type: NRG; PAM sequence: AAG
agacttttgtaaaaacaaac

SEQ ID NO: 113452 - DNA, 20 bp, Artificial Sequence
  Description of Artificial Sequence: Synthetic oligonucleotide
  Target: LAMA2; (-) strand; PAM type: NRG; PAM sequence: CAG
taccaatggacacctcaaac

SEQ ID NO: 113453 - DNA, 20 bp, Artificial Sequence
  Description of Artificial Sequence: Synthetic oligonucleotide
  Target: LAMA2; (-) strand; PAM type: NRG; PAM sequence: TGG
gactaaaatacacataccaa

SEQ ID NO: 113454 - DNA, 20 bp, Artificial Sequence
  Description of Artificial Sequence: Synthetic oligonucleotide
  Target: LAMA2; (-) strand; PAM type: NRG; PAM sequence: AGG
cacaattgccttattaaaaa

SEQ ID NO: 113455 - DNA, 20 bp, Artificial Sequence
  Description of Artificial Sequence: Synthetic oligonucleotide
  Target: LAMA2; (-) strand; PAM type: NRG; PAM sequence: AAG
acacaattgccttattaaaa

SEQ ID NO: 113456 - DNA, 20 bp, Artificial Sequence
  Description of Artificial Sequence: Synthetic oligonucleotide
  Target: LAMA2; (-) strand; PAM type: NRG; PAM sequence: AAG
tatagccctatcatttcaaa

SEQ ID NO: 113457 - DNA, 20 bp, Artificial Sequence
  Description of Artificial Sequence: Synthetic oligonucleotide
  Target: LAMA2; (-) strand; PAM type: NRG; PAM sequence: TAG
caaaattcccttgaagttta

SEQ ID NO: 113458 - DNA, 20 bp, Artificial Sequence
  Description of Artificial Sequence: Synthetic oligonucleotide
  Target: LAMA2; (-) strand; PAM type: NRG; PAM sequence: AAG
caaattccaaaattcccttg

SEQ ID NO: 113459 - DNA, 20 bp, Artificial Sequence
  Description of Artificial Sequence: Synthetic oligonucleotide
  Target: LAMA2; (-) strand; PAM type: NRG; PAM sequence: GAG
agtgttctttggaaaacaga

SEQ ID NO: 113460 - DNA, 20 bp, Artificial Sequence
  Description of Artificial Sequence: Synthetic oligonucleotide
  Target: LAMA2; (-) strand; PAM type: NRG; PAM sequence: GAG
tcagtgttctttggaaaaca

SEQ ID NO: 113461 - DNA, 20 bp, Artificial Sequence
  Description of Artificial Sequence: Synthetic oligonucleotide
  Target: LAMA2; (-) strand; PAM type: NRG; PAM sequence: CAG
aatcagtgttctttggaaaa

SEQ ID NO: 113462 - DNA, 20 bp, Artificial Sequence
  Description of Artificial Sequence: Synthetic oligonucleotide
  Target: LAMA2; (-) strand; PAM type: NRG; PAM sequence: TGG
ctttcagaatcagtgttctt

SEQ ID NO: 113463 - DNA, 20 bp, Artificial Sequence
  Description of Artificial Sequence: Synthetic oligonucleotide
  Target: LAMA2; (-) strand; PAM type: NRG; PAM sequence: CAG
aactcatcatctttcagaat

SEQ ID NO: 113464 - DNA, 20 bp, Artificial Sequence
  Description of Artificial Sequence: Synthetic oligonucleotide
  Target: LAMA2; (-) strand; PAM type: NRG; PAM sequence: CAG
tcactcaactcatcatcttt

SEQ ID NO: 113465 - DNA, 20 bp, Artificial Sequence
  Description of Artificial Sequence: Synthetic oligonucleotide
  Target: LAMA2; (-) strand; PAM type: NRG; PAM sequence: AAG
agagaaggacatagagcaaa

SEQ ID NO: 113466 - DNA, 20 bp, Artificial Sequence
  Description of Artificial Sequence: Synthetic oligonucleotide
  Target: LAMA2; (-) strand; PAM type: NRG; PAM sequence: GAG
tgttcctagagaaggacata

SEQ ID NO: 113467 - DNA, 20 bp, Artificial Sequence
  Description of Artificial Sequence: Synthetic oligonucleotide
  Target: LAMA2; (-) strand; PAM type: NRG; PAM sequence: TAG
aatgttcctagagaaggaca

SEQ ID NO: 113468 - DNA, 20 bp, Artificial Sequence
  Description of Artificial Sequence: Synthetic oligonucleotide
  Target: LAMA2; (-) strand; PAM type: NRG; PAM sequence: AGG
caatgcaatgttcctagaga

SEQ ID NO: 113469 - DNA, 20 bp, Artificial Sequence
  Description of Artificial Sequence: Synthetic oligonucleotide
  Target: LAMA2; (-) strand; PAM type: NRG; PAM sequence: AAG
gcaatgcaatgttcctagag

SEQ ID NO: 113470 - DNA, 20 bp, Artificial Sequence
  Description of Artificial Sequence: Synthetic oligonucleotide
  Target: LAMA2; (-) strand; PAM type: NRG; PAM sequence: GAG
tatgcaatgcaatgttccta

SEQ ID NO: 113471 - DNA, 20 bp, Artificial Sequence
  Description of Artificial Sequence: Synthetic oligonucleotide
  Target: LAMA2; (-) strand; PAM type: NRG; PAM sequence: TAG
aatatgcaatgcaatgttcc

SEQ ID NO: 113472 - DNA, 20 bp, Artificial Sequence
  Description of Artificial Sequence: Synthetic oligonucleotide
  Target: LAMA2; (-) strand; PAM type: NRG; PAM sequence: CAG
ttatagctgcccagatcttt

SEQ ID NO: 113473 - DNA, 20 bp, Artificial Sequence
  Description of Artificial Sequence: Synthetic oligonucleotide
  Target: LAMA2; (-) strand; PAM type: NRG; PAM sequence: CAG
ttcttaattttatagctgcc

SEQ ID NO: 113474 - DNA, 20 bp, Artificial Sequence
  Description of Artificial Sequence: Synthetic oligonucleotide
  Target: LAMA2; (-) strand; PAM type: NRG; PAM sequence: TAG
catgtatcttcttaatttta

SEQ ID NO: 113475 - DNA, 20 bp, Artificial Sequence
  Description of Artificial Sequence: Synthetic oligonucleotide
  Target: LAMA2; (-) strand; PAM type: NRG; PAM sequence: AAG
gacaaatactgggttataca

SEQ ID NO: 113476 - DNA, 20 bp, Artificial Sequence
  Description of Artificial Sequence: Synthetic oligonucleotide
  Target: LAMA2; (-) strand; PAM type: NRG; PAM sequence: GGG
aaataaatatgacaaatact

SEQ ID NO: 113477 - DNA, 20 bp, Artificial Sequence
  Description of Artificial Sequence: Synthetic oligonucleotide
  Target: LAMA2; (-) strand; PAM type: NRG; PAM sequence: TGG
caaataaatatgacaaatac

SEQ ID NO: 113478 - DNA, 20 bp, Artificial Sequence
  Description of Artificial Sequence: Synthetic oligonucleotide
  Target: LAMA2; (-) strand; PAM type: NRG; PAM sequence: TGG
gctagtttcttggatgttcc

SEQ ID NO: 113479 - DNA, 20 bp, Artificial Sequence
  Description of Artificial Sequence: Synthetic oligonucleotide
  Target: LAMA2; (-) strand; PAM type: NRG; PAM sequence: TGG
tctttaggatgctagtttct

SEQ ID NO: 113480 - DNA, 20 bp, Artificial Sequence
  Description of Artificial Sequence: Synthetic oligonucleotide
  Target: LAMA2; (-) strand; PAM type: NRG; PAM sequence: TAG
atgtttattctttaggatgc

SEQ ID NO: 113481 - DNA, 20 bp, Artificial Sequence
  Description of Artificial Sequence: Synthetic oligonucleotide
  Target: LAMA2; (-) strand; PAM type: NRG; PAM sequence: AGG
tttctaaatgtttattcttt

SEQ ID NO: 113482 - DNA, 20 bp, Artificial Sequence
  Description of Artificial Sequence: Synthetic oligonucleotide
  Target: LAMA2; (-) strand; PAM type: NRG; PAM sequence: TAG
atttctaaatgtttattctt

SEQ ID NO: 113483 - DNA, 20 bp, Artificial Sequence
  Description of Artificial Sequence: Synthetic oligonucleotide
  Target: LAMA2; (-) strand; PAM type: NRG; PAM sequence: GGG
tttgaaccagtgggttataa

SEQ ID NO: 113484 - DNA, 20 bp, Artificial Sequence
  Description of Artificial Sequence: Synthetic oligonucleotide
  Target: LAMA2; (-) strand; PAM type: NRG; PAM sequence: AGG
atttgaaccagtgggttata

SEQ ID NO: 113485 - DNA, 20 bp, Artificial Sequence
  Description of Artificial Sequence: Synthetic oligonucleotide
  Target: LAMA2; (-) strand; PAM type: NRG; PAM sequence: AAG
catttgaaccagtgggttat

SEQ ID NO: 113486 - DNA, 20 bp, Artificial Sequence
  Description of Artificial Sequence: Synthetic oligonucleotide
  Target: LAMA2; (-) strand; PAM type: NRG; PAM sequence: GGG
aaatgggcatttgaaccagt

SEQ ID NO: 113487 - DNA, 20 bp, Artificial Sequence
  Description of Artificial Sequence: Synthetic oligonucleotide
  Target: LAMA2; (-) strand; PAM type: NRG; PAM sequence: TGG
aaaatgggcatttgaaccag

SEQ ID NO: 113488 - DNA, 20 bp, Artificial Sequence
  Description of Artificial Sequence: Synthetic oligonucleotide
  Target: LAMA2; (-) strand; PAM type: NRG; PAM sequence: CAG
ttgaaaatgggcatttgaac

SEQ ID NO: 113489 - DNA, 20 bp, Artificial Sequence
  Description of Artificial Sequence: Synthetic oligonucleotide
  Target: LAMA2; (-) strand; PAM type: NRG; PAM sequence: GGG
ataagcaagggtttgaaaat

SEQ ID NO: 113490 - DNA, 20 bp, Artificial Sequence
  Description of Artificial Sequence: Synthetic oligonucleotide
  Target: LAMA2; (-) strand; PAM type: NRG; PAM sequence: TGG
aataagcaagggtttgaaaa

SEQ ID NO: 113491 - DNA, 20 bp, Artificial Sequence
  Description of Artificial Sequence: Synthetic oligonucleotide
  Target: LAMA2; (-) strand; PAM type: NRG; PAM sequence: GGG
tgtaggatctgaataagcaa

SEQ ID NO: 113492 - DNA, 20 bp, Artificial Sequence
  Description of Artificial Sequence: Synthetic oligonucleotide
  Target: LAMA2; (-) strand; PAM type: NRG; PAM sequence: AGG
atgtaggatctgaataagca

SEQ ID NO: 113493 - DNA, 20 bp, Artificial Sequence
  Description of Artificial Sequence: Synthetic oligonucleotide
  Target: LAMA2; (-) strand; PAM type: NRG; PAM sequence: AAG
gatgtaggatctgaataagc

SEQ ID NO: 113494 - DNA, 20 bp, Artificial Sequence
  Description of Artificial Sequence: Synthetic oligonucleotide
  Target: LAMA2; (-) strand; PAM type: NRG; PAM sequence: AAG
gtctgatgtaggatctgaat

SEQ ID NO: 113495 - DNA, 20 bp, Artificial Sequence
  Description of Artificial Sequence: Synthetic oligonucleotide
  Target: LAMA2; (-) strand; PAM type: NRG; PAM sequence: AGG
tctaaacctttgtctgatgt

SEQ ID NO: 113496 - DNA, 20 bp, Artificial Sequence
  Description of Artificial Sequence: Synthetic oligonucleotide
  Target: LAMA2; (-) strand; PAM type: NRG; PAM sequence: TAG
ctctaaacctttgtctgatg

SEQ ID NO: 113497 - DNA, 20 bp, Artificial Sequence
  Description of Artificial Sequence: Synthetic oligonucleotide
  Target: LAMA2; (-) strand; PAM type: NRG; PAM sequence: TGG
gtcccgtaagatgatagatt

SEQ ID NO: 113498 - DNA, 20 bp, Artificial Sequence
  Description of Artificial Sequence: Synthetic oligonucleotide
  Target: LAMA2; (-) strand; PAM type: NRG; PAM sequence: TAG
acatcagtcccgtaagatga

SEQ ID NO: 113499 - DNA, 20 bp, Artificial Sequence
  Description of Artificial Sequence: Synthetic oligonucleotide
  Target: LAMA2; (-) strand; PAM type: NRG; PAM sequence: AAG
cgtattgacatcagtcccgt

SEQ ID NO: 113500 - DNA, 20 bp, Artificial Sequence
  Description of Artificial Sequence: Synthetic oligonucleotide
  Target: LAMA2; (-) strand; PAM type: NRG; PAM sequence: CAG
tccttgatgcgtattgacat

SEQ ID NO: 113501 - DNA, 20 bp, Artificial Sequence
  Description of Artificial Sequence: Synthetic oligonucleotide
  Target: LAMA2; (-) strand; PAM type: NRG; PAM sequence: TAG
ctaccacatgtccttagatc

SEQ ID NO: 113502 - DNA, 20 bp, Artificial Sequence
  Description of Artificial Sequence: Synthetic oligonucleotide
  Target: LAMA2; (-) strand; PAM type: NRG; PAM sequence: TAG
gcttttctaccacatgtcct

SEQ ID NO: 113503 - DNA, 20 bp, Artificial Sequence
  Description of Artificial Sequence: Synthetic oligonucleotide
  Target: LAMA2; (-) strand; PAM type: NRG; PAM sequence: AGG
cccttcttaggggtcaagct

SEQ ID NO: 113504 - DNA, 20 bp, Artificial Sequence
  Description of Artificial Sequence: Synthetic oligonucleotide
  Target: LAMA2; (-) strand; PAM type: NRG; PAM sequence: TAG
ccccttcttaggggtcaagc

SEQ ID NO: 113505 - DNA, 20 bp, Artificial Sequence
  Description of Artificial Sequence: Synthetic oligonucleotide
  Target: LAMA2; (-) strand; PAM type: NRG; PAM sequence: AAG
ccgcccccttcttaggggtc

SEQ ID NO: 113506 - DNA, 20 bp, Artificial Sequence
  Description of Artificial Sequence: Synthetic oligonucleotide
  Target: LAMA2; (-) strand; PAM type: NRG; PAM sequence: GGG
cactaccgcccccttcttag

SEQ ID NO: 113507 - DNA, 20 bp, Artificial Sequence
  Description of Artificial Sequence: Synthetic oligonucleotide
  Target: LAMA2; (-) strand; PAM type: NRG; PAM sequence: GGG
tcactaccgcccccttctta

SEQ ID NO: 113508 - DNA, 20 bp, Artificial Sequence
  Description of Artificial Sequence: Synthetic oligonucleotide
  Target: LAMA2; (-) strand; PAM type: NRG; PAM sequence: AGG
ctcactaccgcccccttctt

SEQ ID NO: 113509 - DNA, 20 bp, Artificial Sequence
  Description of Artificial Sequence: Synthetic oligonucleotide
  Target: LAMA2; (-) strand; PAM type: NRG; PAM sequence: TAG
tctcactaccgcccccttct

SEQ ID NO: 113510 - DNA, 20 bp, Artificial Sequence
  Description of Artificial Sequence: Synthetic oligonucleotide
  Target: LAMA2; (-) strand; PAM type: NRG; PAM sequence: AGG
gcattgtttagaaagcagac

SEQ ID NO: 113511 - DNA, 20 bp, Artificial Sequence
  Description of Artificial Sequence: Synthetic oligonucleotide
  Target: LAMA2; (-) strand; PAM type: NRG; PAM sequence: CAG
tgcattgtttagaaagcaga

SEQ ID NO: 113512 - DNA, 20 bp, Artificial Sequence
  Description of Artificial Sequence: Synthetic oligonucleotide
  Target: LAMA2; (-) strand; PAM type: NRG; PAM sequence: CAG
aaactgcattgtttagaaag

SEQ ID NO: 113513 - DNA, 20 bp, Artificial Sequence
  Description of Artificial Sequence: Synthetic oligonucleotide
  Target: LAMA2; (-) strand; PAM type: NRG; PAM sequence: AAG
ttcaaactgcattgtttaga

SEQ ID NO: 113514 - DNA, 20 bp, Artificial Sequence
  Description of Artificial Sequence: Synthetic oligonucleotide
  Target: LAMA2; (-) strand; PAM type: NRG; PAM sequence: TAG
tctgttcaaactgcattgtt

SEQ ID NO: 113515 - DNA, 20 bp, Artificial Sequence
  Description of Artificial Sequence: Synthetic oligonucleotide
  Target: LAMA2; (-) strand; PAM type: NRG; PAM sequence: AGG
gatggaaaaaaggaaagatg

SEQ ID NO: 113516 - DNA, 20 bp, Artificial Sequence
  Description of Artificial Sequence: Synthetic oligonucleotide
  Target: LAMA2; (-) strand; PAM type: NRG; PAM sequence: GAG
agatggaaaaaaggaaagat

SEQ ID NO: 113517 - DNA, 20 bp, Artificial Sequence
  Description of Artificial Sequence: Synthetic oligonucleotide
  Target: LAMA2; (-) strand; PAM type: NRG; PAM sequence: AAG
gaaatagatggaaaaaagga

SEQ ID NO: 113518 - DNA, 20 bp, Artificial Sequence
  Description of Artificial Sequence: Synthetic oligonucleotide
  Target: LAMA2; (-) strand; PAM type: NRG; PAM sequence: AGG
ttcagaaatagatggaaaaa

SEQ ID NO: 113519 - DNA, 20 bp, Artificial Sequence
  Description of Artificial Sequence: Synthetic oligonucleotide
  Target: LAMA2; (-) strand; PAM type: NRG; PAM sequence: AAG
attcagaaatagatggaaaa

SEQ ID NO: 113520 - DNA, 20 bp, Artificial Sequence
  Description of Artificial Sequence: Synthetic oligonucleotide
  Target: LAMA2; (-) strand; PAM type: NRG; PAM sequence: TGG
gataagaattcagaaataga

SEQ ID NO: 113521 - DNA, 20 bp, Artificial Sequence
  Description of Artificial Sequence: Synthetic oligonucleotide
  Target: LAMA2; (-) strand; PAM type: NRG; PAM sequence: TAG
tgaagataagaattcagaaa

SEQ ID NO: 113522 - DNA, 20 bp, Artificial Sequence
  Description of Artificial Sequence: Synthetic oligonucleotide
  Target: LAMA2; (-) strand; PAM type: NRG; PAM sequence: CAG
atgtgatgaagataagaatt

SEQ ID NO: 113523 - DNA, 20 bp, Artificial Sequence
  Description of Artificial Sequence: Synthetic oligonucleotide
  Target: LAMA2; (-) strand; PAM type: NRG; PAM sequence: AAG
atttttaatgtgatgaagat

SEQ ID NO: 113524 - DNA, 20 bp, Artificial Sequence
  Description of Artificial Sequence: Synthetic oligonucleotide
  Target: LAMA2; (-) strand; PAM type: NRG; PAM sequence: AAG
aaggtatttttaatgtgatg

SEQ ID NO: 113525 - DNA, 20 bp, Artificial Sequence
  Description of Artificial Sequence: Synthetic oligonucleotide
  Target: LAMA2; (-) strand; PAM type: NRG; PAM sequence: AGG
cttttcttttgggtctctca

SEQ ID NO: 113526 - DNA, 20 bp, Artificial Sequence
  Description of Artificial Sequence: Synthetic oligonucleotide
  Target: LAMA2; (-) strand; PAM type: NRG; PAM sequence: AAG
gcttttcttttgggtctctc

SEQ ID NO: 113527 - DNA, 20 bp, Artificial Sequence
  Description of Artificial Sequence: Synthetic oligonucleotide
  Target: LAMA2; (-) strand; PAM type: NRG; PAM sequence: GGG
tgccttcttgcttttctttt

SEQ ID NO: 113528 - DNA, 20 bp, Artificial Sequence
  Description of Artificial Sequence: Synthetic oligonucleotide
  Target: LAMA2; (-) strand; PAM type: NRG; PAM sequence: TGG
atgccttcttgcttttcttt

SEQ ID NO: 113529 - DNA, 20 bp, Artificial Sequence
  Description of Artificial Sequence: Synthetic oligonucleotide
  Target: LAMA2; (-) strand; PAM type: NRG; PAM sequence: CAG
taagtgttgtgacagaggta

SEQ ID NO: 113530 - DNA, 20 bp, Artificial Sequence
  Description of Artificial Sequence: Synthetic oligonucleotide
  Target: LAMA2; (-) strand; PAM type: NRG; PAM sequence: AGG
gatgctaagtgttgtgacag

SEQ ID NO: 113531 - DNA, 20 bp, Artificial Sequence
  Description of Artificial Sequence: Synthetic oligonucleotide
  Target: LAMA2; (-) strand; PAM type: NRG; PAM sequence: GAG
ggatgctaagtgttgtgaca

SEQ ID NO: 113532 - DNA, 20 bp, Artificial Sequence
  Description of Artificial Sequence: Synthetic oligonucleotide
  Target: LAMA2; (-) strand; PAM type: NRG; PAM sequence: CAG
caggatgctaagtgttgtga

SEQ ID NO: 113533 - DNA, 20 bp, Artificial Sequence
  Description of Artificial Sequence: Synthetic oligonucleotide
  Target: LAMA2; (-) strand; PAM type: NRG; PAM sequence: AAG
acattttagaccaggatgct

SEQ ID NO: 113534 - DNA, 20 bp, Artificial Sequence
  Description of Artificial Sequence: Synthetic oligonucleotide
  Target: LAMA2; (-) strand; PAM type: NRG; PAM sequence: AGG
tgtaaattacattttagacc

SEQ ID NO: 113535 - DNA, 20 bp, Artificial Sequence
  Description of Artificial Sequence: Synthetic oligonucleotide
  Target: LAMA2; (-) strand; PAM type: NRG; PAM sequence: CAG
ctgtaaattacattttagac

SEQ ID NO: 113536 - DNA, 20 bp, Artificial Sequence
  Description of Artificial Sequence: Synthetic oligonucleotide
  Target: LAMA2; (-) strand; PAM type: NRG; PAM sequence: TAG
gtacactgtaaattacattt

SEQ ID NO: 113537 - DNA, 20 bp, Artificial Sequence
  Description of Artificial Sequence: Synthetic oligonucleotide
  Target: LAMA2; (-) strand; PAM type: NRG; PAM sequence: AGG
acaaggaagtggtgagatcc

SEQ ID NO: 113538 - DNA, 20 bp, Artificial Sequence
  Description of Artificial Sequence: Synthetic oligonucleotide
  Target: LAMA2; (-) strand; PAM type: NRG; PAM sequence: CAG
tacaaggaagtggtgagatc

SEQ ID NO: 113539 - DNA, 20 bp, Artificial Sequence
  Description of Artificial Sequence: Synthetic oligonucleotide
  Target: LAMA2; (-) strand; PAM type: NRG; PAM sequence: GAG
atgttgtacaaggaagtggt

SEQ ID NO: 113540 - DNA, 20 bp, Artificial Sequence
  Description of Artificial Sequence: Synthetic oligonucleotide
  Target: LAMA2; (-) strand; PAM type: NRG; PAM sequence: TGG
ggggatgttgtacaaggaag

SEQ ID NO: 113541 - DNA, 20 bp, Artificial Sequence
  Description of Artificial Sequence: Synthetic oligonucleotide
  Target: LAMA2; (-) strand; PAM type: NRG; PAM sequence: AAG
gaaggggatgttgtacaagg

SEQ ID NO: 113542 - DNA, 20 bp, Artificial Sequence
  Description of Artificial Sequence: Synthetic oligonucleotide
  Target: LAMA2; (-) strand; PAM type: NRG; PAM sequence: AGG
gtggaaggggatgttgtaca

SEQ ID NO: 113543 - DNA, 20 bp, Artificial Sequence
  Description of Artificial Sequence: Synthetic oligonucleotide
  Target: LAMA2; (-) strand; PAM type: NRG; PAM sequence: AAG
agtggaaggggatgttgtac

SEQ ID NO: 113544 - DNA, 20 bp, Artificial Sequence
  Description of Artificial Sequence: Synthetic oligonucleotide
  Target: LAMA2; (-) strand; PAM type: NRG; PAM sequence: GGG
attgtacatggaagtggaag

SEQ ID NO: 113545 - DNA, 20 bp, Artificial Sequence
  Description of Artificial Sequence: Synthetic oligonucleotide
  Target: LAMA2; (-) strand; PAM type: NRG; PAM sequence: GGG
gattgtacatggaagtggaa

SEQ ID NO: 113546 - DNA, 20 bp, Artificial Sequence
  Description of Artificial Sequence: Synthetic oligonucleotide
  Target: LAMA2; (-) strand; PAM type: NRG; PAM sequence: AGG
tgattgtacatggaagtgga

SEQ ID NO: 113547 - DNA, 20 bp, Artificial Sequence
  Description of Artificial Sequence: Synthetic oligonucleotide
  Target: LAMA2; (-) strand; PAM type: NRG; PAM sequence: AAG
atgattgtacatggaagtgg

SEQ ID NO: 113548 - DNA, 20 bp, Artificial Sequence
  Description of Artificial Sequence: Synthetic oligonucleotide
  Target: LAMA2; (-) strand; PAM type: NRG; PAM sequence: TGG
aatatgattgtacatggaag

SEQ ID NO: 113549 - DNA, 20 bp, Artificial Sequence
  Description of Artificial Sequence: Synthetic oligonucleotide
  Target: LAMA2; (-) strand; PAM type: NRG; PAM sequence: AAG
taaaatatgattgtacatgg

SEQ ID NO: 113550 - DNA, 20 bp, Artificial Sequence
  Description of Artificial Sequence: Synthetic oligonucleotide
  Target: LAMA2; (-) strand; PAM type: NRG; PAM sequence: TGG
ttgtaaaatatgattgtaca

SEQ ID NO: 113551 - DNA, 20 bp, Artificial Sequence
  Description of Artificial Sequence: Synthetic oligonucleotide
  Target: LAMA2; (-) strand; PAM type: NRG; PAM sequence: AAG
gggatttagactcatctgca

SEQ ID NO: 113552 - DNA, 20 bp, Artificial Sequence
  Description of Artificial Sequence: Synthetic oligonucleotide
  Target: LAMA2; (-) strand; PAM type: NRG; PAM sequence: TAG
ccacaggaactactgggatt

SEQ ID NO: 113553 - DNA, 20 bp, Artificial Sequence
  Description of Artificial Sequence: Synthetic oligonucleotide
  Target: LAMA2; (-) strand; PAM type: NRG; PAM sequence: GGG
tactatccacaggaactact

SEQ ID NO: 113554 - DNA, 20 bp, Artificial Sequence
  Description of Artificial Sequence: Synthetic oligonucleotide
  Target: LAMA2; (-) strand; PAM type: NRG; PAM sequence: TGG
ttactatccacaggaactac

SEQ ID NO: 113555 - DNA, 20 bp, Artificial Sequence
  Description of Artificial Sequence: Synthetic oligonucleotide
  Target: LAMA2; (-) strand; PAM type: NRG; PAM sequence: AGG
ctgtaagttttactatccac

SEQ ID NO: 113556 - DNA, 20 bp, Artificial Sequence
  Description of Artificial Sequence: Synthetic oligonucleotide
  Target: LAMA2; (-) strand; PAM type: NRG; PAM sequence: CAG
tctgtaagttttactatcca

SEQ ID NO: 113557 - DNA, 20 bp, Artificial Sequence
  Description of Artificial Sequence: Synthetic oligonucleotide
  Target: LAMA2; (-) strand; PAM type: NRG; PAM sequence: AAG
taatctatggctctttctgt

SEQ ID NO: 113558 - DNA, 20 bp, Artificial Sequence
  Description of Artificial Sequence: Synthetic oligonucleotide
  Target: LAMA2; (-) strand; PAM type: NRG; PAM sequence: TGG
ttagaaatatgcctaatcta

SEQ ID NO: 113559 - DNA, 20 bp, Artificial Sequence
  Description of Artificial Sequence: Synthetic oligonucleotide
  Target: LAMA2; (-) strand; PAM type: NRG; PAM sequence: TAG
ttaggaatcagataattaat

SEQ ID NO: 113560 - DNA, 20 bp, Artificial Sequence
  Description of Artificial Sequence: Synthetic oligonucleotide
  Target: LAMA2; (-) strand; PAM type: NRG; PAM sequence: CAG
aaagatatctaattaggaat

SEQ ID NO: 113561 - DNA, 20 bp, Artificial Sequence
  Description of Artificial Sequence: Synthetic oligonucleotide
  Target: LAMA2; (-) strand; PAM type: NRG; PAM sequence: AGG
aataacaaagatatctaatt

SEQ ID NO: 113562 - DNA, 20 bp, Artificial Sequence
  Description of Artificial Sequence: Synthetic oligonucleotide
  Target: LAMA2; (-) strand; PAM type: NRG; PAM sequence: TAG
aaataacaaagatatctaat

SEQ ID NO: 113563 - DNA, 20 bp, Artificial Sequence
  Description of Artificial Sequence: Synthetic oligonucleotide
  Target: LAMA2; (-) strand; PAM type: NRG; PAM sequence: AAG
gttaaaaatgctaaataaca

SEQ ID NO: 113564 - DNA, 20 bp, Artificial Sequence
  Description of Artificial Sequence: Synthetic oligonucleotide
  Target: LAMA2; (-) strand; PAM type: NRG; PAM sequence: AGG
agtagttagaaaataaagca

SEQ ID NO: 113565 - DNA, 20 bp, Artificial Sequence
  Description of Artificial Sequence: Synthetic oligonucleotide
  Target: LAMA2; (-) strand; PAM type: NRG; PAM sequence: AAG
aagtagttagaaaataaagc

SEQ ID NO: 113566 - DNA, 20 bp, Artificial Sequence
  Description of Artificial Sequence: Synthetic oligonucleotide
  Target: LAMA2; (-) strand; PAM type: NRG; PAM sequence: AAG
agataagtagttagaaaata

SEQ ID NO: 113567 - DNA, 20 bp, Artificial Sequence
  Description of Artificial Sequence: Synthetic oligonucleotide
  Target: LAMA2; (-) strand; PAM type: NRG; PAM sequence: TAG
ctataatctagataagtagt

SEQ ID NO: 113568 - DNA, 20 bp, Artificial Sequence
  Description of Artificial Sequence: Synthetic oligonucleotide
  Target: LAMA2; (-) strand; PAM type: NRG; PAM sequence: TAG
ttttctataatctagataag

SEQ ID NO: 113569 - DNA, 20 bp, Artificial Sequence
  Description of Artificial Sequence: Synthetic oligonucleotide
  Target: LAMA2; (-) strand; PAM type: NRG; PAM sequence: AAG
tagttttctataatctagat

SEQ ID NO: 113570 - DNA, 20 bp, Artificial Sequence
  Description of Artificial Sequence: Synthetic oligonucleotide
  Target: LAMA2; (-) strand; PAM type: NRG; PAM sequence: TAG
tgatgtagttttctataatc

SEQ ID NO: 113571 - DNA, 20 bp, Artificial Sequence
  Description of Artificial Sequence: Synthetic oligonucleotide
  Target: LAMA2; (-) strand; PAM type: NRG; PAM sequence: TAG
catcaaagatccatttgatg

SEQ ID NO: 113572 - DNA, 20 bp, Artificial Sequence
  Description of Artificial Sequence: Synthetic oligonucleotide
  Target: LAMA2; (-) strand; PAM type: NRG; PAM sequence: AAG
ataactataactgaacatca

SEQ ID NO: 113573 - DNA, 20 bp, Artificial Sequence
  Description of Artificial Sequence: Synthetic oligonucleotide
  Target: LAMA2; (-) strand; PAM type: NRG; PAM sequence: GAG
gcaaaccaatgaagataaaa

SEQ ID NO: 113574 - DNA, 20 bp, Artificial Sequence
  Description of Artificial Sequence: Synthetic oligonucleotide
  Target: LAMA2; (-) strand; PAM type: NRG; PAM sequence: AAG
aggcaaaccaatgaagataa

SEQ ID NO: 113575 - DNA, 20 bp, Artificial Sequence
  Description of Artificial Sequence: Synthetic oligonucleotide
  Target: LAMA2; (-) strand; PAM type: NRG; PAM sequence: AAG
ccagtgaaggcaaaccaatg

SEQ ID NO: 113576 - DNA, 20 bp, Artificial Sequence
  Description of Artificial Sequence: Synthetic oligonucleotide
  Target: LAMA2; (-) strand; PAM type: NRG; PAM sequence: AGG
aatagcttgaacaccagtga

SEQ ID NO: 113577 - DNA, 20 bp, Artificial Sequence
  Description of Artificial Sequence: Synthetic oligonucleotide
  Target: LAMA2; (-) strand; PAM type: NRG; PAM sequence: AAG
taatagcttgaacaccagtg

SEQ ID NO: 113578 - DNA, 20 bp, Artificial Sequence
  Description of Artificial Sequence: Synthetic oligonucleotide
  Target: LAMA2; (-) strand; PAM type: NRG; PAM sequence: CAG
gaaaataatagcttgaacac

SEQ ID NO: 113579 - DNA, 20 bp, Artificial Sequence
  Description of Artificial Sequence: Synthetic oligonucleotide
  Target: LAMA2; (-) strand; PAM type: NRG; PAM sequence: TAG
cccaaagagcatgaaaataa

SEQ ID NO: 113580 - DNA, 20 bp, Artificial Sequence
  Description of Artificial Sequence: Synthetic oligonucleotide
  Target: LAMA2; (-) strand; PAM type: NRG; PAM sequence: GAG
ttattaaactatcccccaaa

SEQ ID NO: 113581 - DNA, 20 bp, Artificial Sequence
  Description of Artificial Sequence: Synthetic oligonucleotide
  Target: LAMA2; (-) strand; PAM type: NRG; PAM sequence: AAG
cattattaaactatccccca

SEQ ID NO: 113582 - DNA, 20 bp, Artificial Sequence
  Description of Artificial Sequence: Synthetic oligonucleotide
  Target: LAMA2; (-) strand; PAM type: NRG; PAM sequence: CAG
atttagcaatttaataatta

SEQ ID NO: 113583 - DNA, 20 bp, Artificial Sequence
  Description of Artificial Sequence: Synthetic oligonucleotide
  Target: LAMA2; (-) strand; PAM type: NRG; PAM sequence: TAG
tcaagcacttgcactatatt

SEQ ID NO: 113584 - DNA, 20 bp, Artificial Sequence
  Description of Artificial Sequence: Synthetic oligonucleotide
  Target: LAMA2; (-) strand; PAM type: NRG; PAM sequence: AAG
gaattaacattgactttctc

SEQ ID NO: 113585 - DNA, 20 bp, Artificial Sequence
  Description of Artificial Sequence: Synthetic oligonucleotide
  Target: LAMA2; (-) strand; PAM type: NRG; PAM sequence: GAG
agacaaatttggtttaattc

SEQ ID NO: 113586 - DNA, 20 bp, Artificial Sequence
  Description of Artificial Sequence: Synthetic oligonucleotide
  Target: LAMA2; (-) strand; PAM type: NRG; PAM sequence: TGG
ttaatacttcaagacaaatt

SEQ ID NO: 113587 - DNA, 20 bp, Artificial Sequence
  Description of Artificial Sequence: Synthetic oligonucleotide
  Target: LAMA2; (-) strand; PAM type: NRG; PAM sequence: AAG
tatatcatcattaatacttc

SEQ ID NO: 113588 - DNA, 20 bp, Artificial Sequence
  Description of Artificial Sequence: Synthetic oligonucleotide
  Target: LAMA2; (-) strand; PAM type: NRG; PAM sequence: GAG
gaaagtttaacattttattt

SEQ ID NO: 113589 - DNA, 20 bp, Artificial Sequence
  Description of Artificial Sequence: Synthetic oligonucleotide
  Target: LAMA2; (-) strand; PAM type: NRG; PAM sequence: AAG
ttggctgtaaaggagaaaga

SEQ ID NO: 113590 - DNA, 20 bp, Artificial Sequence
  Description of Artificial Sequence: Synthetic oligonucleotide
  Target: LAMA2; (-) strand; PAM type: NRG; PAM sequence: AAG
tatattggctgtaaaggaga

SEQ ID NO: 113591 - DNA, 20 bp, Artificial Sequence
  Description of Artificial Sequence: Synthetic oligonucleotide
  Target: LAMA2; (-) strand; PAM type: NRG; PAM sequence: GAG
ttgatatattggctgtaaag

SEQ ID NO: 113592 - DNA, 20 bp, Artificial Sequence
  Description of Artificial Sequence: Synthetic oligonucleotide
  Target: LAMA2; (-) strand; PAM type: NRG; PAM sequence: AGG
aattgatatattggctgtaa

SEQ ID NO: 113593 - DNA, 20 bp, Artificial Sequence
  Description of Artificial Sequence: Synthetic oligonucleotide
  Target: LAMA2; (-) strand; PAM type: NRG; PAM sequence: AAG
caattgatatattggctgta

SEQ ID NO: 113594 - DNA, 20 bp, Artificial Sequence
  Description of Artificial Sequence: Synthetic oligonucleotide
  Target: LAMA2; (-) strand; PAM type: NRG; PAM sequence: TGG
tatatctacaattgatatat

SEQ ID NO: 113595 - DNA, 20 bp, Artificial Sequence
  Description of Artificial Sequence: Synthetic oligonucleotide
  Target: LAMA2; (-) strand; PAM type: NRG; PAM sequence: TAG
tgctatattctcctcctgat

SEQ ID NO: 113596 - DNA, 20 bp, Artificial Sequence
  Description of Artificial Sequence: Synthetic oligonucleotide
  Target: LAMA2; (-) strand; PAM type: NRG; PAM sequence: AAG
aaagttgtttccagaagacg

SEQ ID NO: 113597 - DNA, 20 bp, Artificial Sequence
  Description of Artificial Sequence: Synthetic oligonucleotide
  Target: LAMA2; (-) strand; PAM type: NRG; PAM sequence: AAG
aagaccaaagttgtttccag

SEQ ID NO: 113598 - DNA, 20 bp, Artificial Sequence
  Description of Artificial Sequence: Synthetic oligonucleotide
  Target: LAMA2; (-) strand; PAM type: NRG; PAM sequence: CAG
gtcaagaccaaagttgtttc

SEQ ID NO: 113599 - DNA, 20 bp, Artificial Sequence
  Description of Artificial Sequence: Synthetic oligonucleotide
  Target: LAMA2; (-) strand; PAM type: NRG; PAM sequence: AAG
ctgctttcaagtcaagacca

SEQ ID NO: 113600 - DNA, 20 bp, Artificial Sequence
  Description of Artificial Sequence: Synthetic oligonucleotide
  Target: LAMA2; (-) strand; PAM type: NRG; PAM sequence: AAG
ttgtcatctgctttcaagtc

SEQ ID NO: 113601 - DNA, 20 bp, Artificial Sequence
  Description of Artificial Sequence: Synthetic oligonucleotide
  Target: LAMA2; (-) strand; PAM type: NRG; PAM sequence: AAG
atattttgtcatctgctttc

SEQ ID NO: 113602 - DNA, 20 bp, Artificial Sequence
  Description of Artificial Sequence: Synthetic oligonucleotide
  Target: LAMA2; (-) strand; PAM type: NRG; PAM sequence: AGG
tcaagtttctcagcgttggc

SEQ ID NO: 113603 - DNA, 20 bp, Artificial Sequence
  Description of Artificial Sequence: Synthetic oligonucleotide
  Target: LAMA2; (-) strand; PAM type: NRG; PAM sequence: CAG
ctcaagtttctcagcgttgg

SEQ ID NO: 113604 - DNA, 20 bp, Artificial Sequence
  Description of Artificial Sequence: Synthetic oligonucleotide
  Target: LAMA2; (-) strand; PAM type: NRG; PAM sequence: TGG
tacctcaagtttctcagcgt

SEQ ID NO: 113605 - DNA, 20 bp, Artificial Sequence
  Description of Artificial Sequence: Synthetic oligonucleotide
  Target: LAMA2; (-) strand; PAM type: NRG; PAM sequence: CAG
ctaaattacctcaagtttct

SEQ ID NO: 113606 - DNA, 20 bp, Artificial Sequence
  Description of Artificial Sequence: Synthetic oligonucleotide
  Target: LAMA2; (-) strand; PAM type: NRG; PAM sequence: AAG
catataaactaaattacctc

SEQ ID NO: 113607 - DNA, 20 bp, Artificial Sequence
  Description of Artificial Sequence: Synthetic oligonucleotide
  Target: LAMA2; (-) strand; PAM type: NRG; PAM sequence: TAG
tttaattaaaacttaatcct

SEQ ID NO: 113608 - DNA, 20 bp, Artificial Sequence
  Description of Artificial Sequence: Synthetic oligonucleotide
  Target: LAMA2; (-) strand; PAM type: NRG; PAM sequence: TGG
cagaactctagtgagcatag

SEQ ID NO: 113609 - DNA, 20 bp, Artificial Sequence
  Description of Artificial Sequence: Synthetic oligonucleotide
  Target: LAMA2; (-) strand; PAM type: NRG; PAM sequence: TAG
cttcagaactctagtgagca

SEQ ID NO: 113610 - DNA, 20 bp, Artificial Sequence
  Description of Artificial Sequence: Synthetic oligonucleotide
  Target: LAMA2; (-) strand; PAM type: NRG; PAM sequence: GAG
ttaaacttcagaactctagt

SEQ ID NO: 113611 - DNA, 20 bp, Artificial Sequence
  Description of Artificial Sequence: Synthetic oligonucleotide
  Target: LAMA2; (-) strand; PAM type: NRG; PAM sequence: TAG
gtaattaaacttcagaactc

SEQ ID NO: 113612 - DNA, 20 bp, Artificial Sequence
  Description of Artificial Sequence: Synthetic oligonucleotide
  Target: LAMA2; (-) strand; PAM type: NRG; PAM sequence: CAG
ttcttattgtaattaaactt

SEQ ID NO: 113613 - DNA, 20 bp, Artificial Sequence
  Description of Artificial Sequence: Synthetic oligonucleotide
  Target: LAMA2; (-) strand; PAM type: NRG; PAM sequence: GGG
ttaggcctttctgcaaccaa

SEQ ID NO: 113614 - DNA, 20 bp, Artificial Sequence
  Description of Artificial Sequence: Synthetic oligonucleotide
  Target: LAMA2; (-) strand; PAM type: NRG; PAM sequence: AGG
attaggcctttctgcaacca

SEQ ID NO: 113615 - DNA, 20 bp, Artificial Sequence
  Description of Artificial Sequence: Synthetic oligonucleotide
  Target: LAMA2; (-) strand; PAM type: NRG; PAM sequence: AAG
gattaggcctttctgcaacc

SEQ ID NO: 113616 - DNA, 20 bp, Artificial Sequence
  Description of Artificial Sequence: Synthetic oligonucleotide
  Target: LAMA2; (-) strand; PAM type: NRG; PAM sequence: AGG
gcaacatgatgtttttgatt

SEQ ID NO: 113617 - DNA, 20 bp, Artificial Sequence
  Description of Artificial Sequence: Synthetic oligonucleotide
  Target: LAMA2; (-) strand; PAM type: NRG; PAM sequence: TAG
tgcaacatgatgtttttgat

SEQ ID NO: 113618 - DNA, 20 bp, Artificial Sequence
  Description of Artificial Sequence: Synthetic oligonucleotide
  Target: LAMA2; (-) strand; PAM type: NRG; PAM sequence: TGG
gtcctttggtttctaaatcc

SEQ ID NO: 113619 - DNA, 20 bp, Artificial Sequence
  Description of Artificial Sequence: Synthetic oligonucleotide
  Target: LAMA2; (-) strand; PAM type: NRG; PAM sequence: TGG
aagatgtcaaattagtcctt

SEQ ID NO: 113620 - DNA, 20 bp, Artificial Sequence
  Description of Artificial Sequence: Synthetic oligonucleotide
  Target: LAMA2; (-) strand; PAM type: NRG; PAM sequence: TAG
cttcaacaaagatgtcaaat

SEQ ID NO: 113621 - DNA, 20 bp, Artificial Sequence
  Description of Artificial Sequence: Synthetic oligonucleotide
  Target: LAMA2; (-) strand; PAM type: NRG; PAM sequence: AAG
tccaatccatctcttcaaca

SEQ ID NO: 113622 - DNA, 20 bp, Artificial Sequence
  Description of Artificial Sequence: Synthetic oligonucleotide
  Target: LAMA2; (-) strand; PAM type: NRG; PAM sequence: CAG
gcaggtgcatataaaggaaa

SEQ ID NO: 113623 - DNA, 20 bp, Artificial Sequence
  Description of Artificial Sequence: Synthetic oligonucleotide
  Target: LAMA2; (-) strand; PAM type: NRG; PAM sequence: AGG
ttttcagcaggtgcatataa

SEQ ID NO: 113624 - DNA, 20 bp, Artificial Sequence
  Description of Artificial Sequence: Synthetic oligonucleotide
  Target: LAMA2; (-) strand; PAM type: NRG; PAM sequence: AAG
cttttcagcaggtgcatata

SEQ ID NO: 113625 - DNA, 20 bp, Artificial Sequence
  Description of Artificial Sequence: Synthetic oligonucleotide
  Target: LAMA2; (-) strand; PAM type: NRG; PAM sequence: AGG
ctttcataattcttttcagc

SEQ ID NO: 113626 - DNA, 20 bp, Artificial Sequence
  Description of Artificial Sequence: Synthetic oligonucleotide
  Target: LAMA2; (-) strand; PAM type: NRG; PAM sequence: CAG
actttcataattcttttcag

SEQ ID NO: 113627 - DNA, 20 bp, Artificial Sequence
  Description of Artificial Sequence: Synthetic oligonucleotide
  Target: LAMA2; (-) strand; PAM type: NRG; PAM sequence: CAG
attactttcataattctttt

SEQ ID NO: 113628 - DNA, 20 bp, Artificial Sequence
  Description of Artificial Sequence: Synthetic oligonucleotide
  Target: LAMA2; (-) strand; PAM type: NRG; PAM sequence: TGG
acaagatccacattcaactc

SEQ ID NO: 113629 - DNA, 20 bp, Artificial Sequence
  Description of Artificial Sequence: Synthetic oligonucleotide
  Target: LAMA2; (-) strand; PAM type: NRG; PAM sequence: AAG
agaaggagaacagcaattac

SEQ ID NO: 113630 - DNA, 20 bp, Artificial Sequence
  Description of Artificial Sequence: Synthetic oligonucleotide
  Target: LAMA2; (-) strand; PAM type: NRG; PAM sequence: CAG
cagtgaatgtagaaggagaa

SEQ ID NO: 113631 - DNA, 20 bp, Artificial Sequence
  Description of Artificial Sequence: Synthetic oligonucleotide
  Target: LAMA2; (-) strand; PAM type: NRG; PAM sequence: GAG
atctccagtgaatgtagaag

SEQ ID NO: 113632 - DNA, 20 bp, Artificial Sequence
  Description of Artificial Sequence: Synthetic oligonucleotide
  Target: LAMA2; (-) strand; PAM type: NRG; PAM sequence: AGG
ttatctccagtgaatgtaga

SEQ ID NO: 113633 - DNA, 20 bp, Artificial Sequence
  Description of Artificial Sequence: Synthetic oligonucleotide
  Target: LAMA2; (-) strand; PAM type: NRG; PAM sequence: AAG
attatctccagtgaatgtag

SEQ ID NO: 113634 - DNA, 20 bp, Artificial Sequence
  Description of Artificial Sequence: Synthetic oligonucleotide
  Target: LAMA2; (-) strand; PAM type: NRG; PAM sequence: TAG
gccattatctccagtgaatg

SEQ ID NO: 113635 - DNA, 20 bp, Artificial Sequence
  Description of Artificial Sequence: Synthetic oligonucleotide
  Target: LAMA2; (-) strand; PAM type: NRG; PAM sequence: CAG
tgtcagagtgccattatctc

SEQ ID NO: 113636 - DNA, 20 bp, Artificial Sequence
  Description of Artificial Sequence: Synthetic oligonucleotide
  Target: LAMA2; (-) strand; PAM type: NRG; PAM sequence: GAG
cggaacactaagcaatgtca

SEQ ID NO: 113637 - DNA, 20 bp, Artificial Sequence
  Description of Artificial Sequence: Synthetic oligonucleotide
  Target: LAMA2; (-) strand; PAM type: NRG; PAM sequence: CAG
ttcggaacactaagcaatgt

SEQ ID NO: 113638 - DNA, 20 bp, Artificial Sequence
  Description of Artificial Sequence: Synthetic oligonucleotide
  Target: LAMA2; (-) strand; PAM type: NRG; PAM sequence: AAG
tgactaattttcggaacact

SEQ ID NO: 113639 - DNA, 20 bp, Artificial Sequence
  Description of Artificial Sequence: Synthetic oligonucleotide
  Target: LAMA2; (-) strand; PAM type: NRG; PAM sequence: CGG
ctggaacactgactaatttt

SEQ ID NO: 113640 - DNA, 20 bp, Artificial Sequence
  Description of Artificial Sequence: Synthetic oligonucleotide
  Target: LAMA2; (-) strand; PAM type: NRG; PAM sequence: TGG
aggttatactcatagcatcc

SEQ ID NO: 113641 - DNA, 20 bp, Artificial Sequence
  Description of Artificial Sequence: Synthetic oligonucleotide
  Target: LAMA2; (-) strand; PAM type: NRG; PAM sequence: TAG
aataaaataggttatactca

SEQ ID NO: 113642 - DNA, 20 bp, Artificial Sequence
  Description of Artificial Sequence: Synthetic oligonucleotide
  Target: LAMA2; (-) strand; PAM type: NRG; PAM sequence: AGG
ctaatgcttagcaataaaat

SEQ ID NO: 113643 - DNA, 20 bp, Artificial Sequence
  Description of Artificial Sequence: Synthetic oligonucleotide
  Target: LAMA2; (-) strand; PAM type: NRG; PAM sequence: TAG
gctaatgcttagcaataaaa

SEQ ID NO: 113644 - DNA, 20 bp, Artificial Sequence
  Description of Artificial Sequence: Synthetic oligonucleotide
  Target: LAMA2; (-) strand; PAM type: NRG; PAM sequence: TAG
gccattatgatgctaatgct

SEQ ID NO: 113645 - DNA, 20 bp, Artificial Sequence
  Description of Artificial Sequence: Synthetic oligonucleotide
  Target: LAMA2; (-) strand; PAM type: NRG; PAM sequence: AAG
cttgtattaggcatatggga

SEQ ID NO: 113646 - DNA, 20 bp, Artificial Sequence
  Description of Artificial Sequence: Synthetic oligonucleotide
  Target: LAMA2; (-) strand; PAM type: NRG; PAM sequence: GGG
agttcttgtattaggcatat

SEQ ID NO: 113647 - DNA, 20 bp, Artificial Sequence
  Description of Artificial Sequence: Synthetic oligonucleotide
  Target: LAMA2; (-) strand; PAM type: NRG; PAM sequence: TGG
tagttcttgtattaggcata

SEQ ID NO: 113648 - DNA, 20 bp, Artificial Sequence
  Description of Artificial Sequence: Synthetic oligonucleotide
  Target: LAMA2; (-) strand; PAM type: NRG; PAM sequence: AGG
actaatatagttcttgtatt

SEQ ID NO: 113649 - DNA, 20 bp, Artificial Sequence
  Description of Artificial Sequence: Synthetic oligonucleotide
  Target: LAMA2; (-) strand; PAM type: NRG; PAM sequence: TAG
aactaatatagttcttgtat

SEQ ID NO: 113650 - DNA, 20 bp, Artificial Sequence
  Description of Artificial Sequence: Synthetic oligonucleotide
  Target: LAMA2; (-) strand; PAM type: NRG; PAM sequence: TAG
gggcatgagaacaactaata

SEQ ID NO: 113651 - DNA, 20 bp, Artificial Sequence
  Description of Artificial Sequence: Synthetic oligonucleotide
  Target: LAMA2; (-) strand; PAM type: NRG; PAM sequence: GAG
aaaaatgttggcatgggcat

SEQ ID NO: 113652 - DNA, 20 bp, Artificial Sequence
  Description of Artificial Sequence: Synthetic oligonucleotide
  Target: LAMA2; (-) strand; PAM type: NRG; PAM sequence: GGG
ttaaaaaaaaatgttggcat

SEQ ID NO: 113653 - DNA, 20 bp, Artificial Sequence
  Description of Artificial Sequence: Synthetic oligonucleotide
  Target: LAMA2; (-) strand; PAM type: NRG; PAM sequence: TGG
attaaaaaaaaatgttggca

SEQ ID NO: 113654 - DNA, 20 bp, Artificial Sequence
  Description of Artificial Sequence: Synthetic oligonucleotide
  Target: LAMA2; (-) strand; PAM type: NRG; PAM sequence: TGG
gtgaaattaaaaaaaaatgt

SEQ ID NO: 113655 - DNA, 20 bp, Artificial Sequence
  Description of Artificial Sequence: Synthetic oligonucleotide
  Target: LAMA2; (-) strand; PAM type: NRG; PAM sequence: AAG
tccccatactgctagctaaa

SEQ ID NO: 113656 - DNA, 20 bp, Artificial Sequence
  Description of Artificial Sequence: Synthetic oligonucleotide
  Target: LAMA2; (-) strand; PAM type: NRG; PAM sequence: TAG
aatgtgtctccccatactgc

SEQ ID NO: 113657 - DNA, 20 bp, Artificial Sequence
  Description of Artificial Sequence: Synthetic oligonucleotide
  Target: LAMA2; (-) strand; PAM type: NRG; PAM sequence: AAG
tttgaactaactaaattagg

SEQ ID NO: 113658 - DNA, 20 bp, Artificial Sequence
  Description of Artificial Sequence: Synthetic oligonucleotide
  Target: LAMA2; (-) strand; PAM type: NRG; PAM sequence: AGG
ttttttgaactaactaaatt

SEQ ID NO: 113659 - DNA, 20 bp, Artificial Sequence
  Description of Artificial Sequence: Synthetic oligonucleotide
  Target: LAMA2; (-) strand; PAM type: NRG; PAM sequence: TAG
attttttgaactaactaaat

SEQ ID NO: 113660 - DNA, 20 bp, Artificial Sequence
  Description of Artificial Sequence: Synthetic oligonucleotide
  Target: LAMA2; (-) strand; PAM type: NRG; PAM sequence: TAG
gagtattttctgacattttt

SEQ ID NO: 113661 - DNA, 20 bp, Artificial Sequence
  Description of Artificial Sequence: Synthetic oligonucleotide
  Target: LAMA2; (-) strand; PAM type: NRG; PAM sequence: GAG
aaattaactacacagcacgt

SEQ ID NO: 113662 - DNA, 20 bp, Artificial Sequence
  Description of Artificial Sequence: Synthetic oligonucleotide
  Target: LAMA2; (-) strand; PAM type: NRG; PAM sequence: CAG
tgagcagtaaattaactaca

SEQ ID NO: 113663 - DNA, 20 bp, Artificial Sequence
  Description of Artificial Sequence: Synthetic oligonucleotide
  Target: LAMA2; (-) strand; PAM type: NRG; PAM sequence: CAG
atgttatgttttataatgag

SEQ ID NO: 113664 - DNA, 20 bp, Artificial Sequence
  Description of Artificial Sequence: Synthetic oligonucleotide
  Target: LAMA2; (-) strand; PAM type: NRG; PAM sequence: GAG
actatgttatgttttataat

SEQ ID NO: 113665 - DNA, 20 bp, Artificial Sequence
  Description of Artificial Sequence: Synthetic oligonucleotide
  Target: LAMA2; (-) strand; PAM type: NRG; PAM sequence: TAG
agcaccaagtaccatcctta

SEQ ID NO: 113666 - DNA, 20 bp, Artificial Sequence
  Description of Artificial Sequence: Synthetic oligonucleotide
  Target: LAMA2; (-) strand; PAM type: NRG; PAM sequence: AAG
attaacatttattgagcacc

SEQ ID NO: 113667 - DNA, 20 bp, Artificial Sequence
  Description of Artificial Sequence: Synthetic oligonucleotide
  Target: LAMA2; (-) strand; PAM type: NRG; PAM sequence: GAG
gagtgtaattaacatttatt

SEQ ID NO: 113668 - DNA, 20 bp, Artificial Sequence
  Description of Artificial Sequence: Synthetic oligonucleotide
  Target: LAMA2; (-) strand; PAM type: NRG; PAM sequence: GAG
aattaatcccattctaatta

SEQ ID NO: 113669 - DNA, 20 bp, Artificial Sequence
  Description of Artificial Sequence: Synthetic oligonucleotide
  Target: LAMA2; (-) strand; PAM type: NRG; PAM sequence: TAG
tcaattaatcccattctaat

SEQ ID NO: 113670 - DNA, 20 bp, Artificial Sequence
  Description of Artificial Sequence: Synthetic oligonucleotide
  Target: LAMA2; (-) strand; PAM type: NRG; PAM sequence: CGG
tagtctgtaataaactctta

SEQ ID NO: 113671 - DNA, 20 bp, Artificial Sequence
  Description of Artificial Sequence: Synthetic oligonucleotide
  Target: LAMA2; (-) strand; PAM type: NRG; PAM sequence: TAG
acaaaaaattaaaaacatgg

SEQ ID NO: 113672 - DNA, 20 bp, Artificial Sequence
  Description of Artificial Sequence: Synthetic oligonucleotide
  Target: LAMA2; (-) strand; PAM type: NRG; PAM sequence: TGG
aaaacaaaaaattaaaaaca

SEQ ID NO: 113673 - DNA, 20 bp, Artificial Sequence
  Description of Artificial Sequence: Synthetic oligonucleotide
  Target: LAMA2; (-) strand; PAM type: NRG; PAM sequence: CAG
ttggagtagaaacacctgga

SEQ ID NO: 113674 - DNA, 20 bp, Artificial Sequence
  Description of Artificial Sequence: Synthetic oligonucleotide
  Target: LAMA2; (-) strand; PAM type: NRG; PAM sequence: TGG
ctttttggagtagaaacacc

SEQ ID NO: 113675 - DNA, 20 bp, Artificial Sequence
  Description of Artificial Sequence: Synthetic oligonucleotide
  Target: LAMA2; (-) strand; PAM type: NRG; PAM sequence: TAG
cataatctgtctttttggag

SEQ ID NO: 113676 - DNA, 20 bp, Artificial Sequence
  Description of Artificial Sequence: Synthetic oligonucleotide
  Target: LAMA2; (-) strand; PAM type: NRG; PAM sequence: GAG
aaacataatctgtctttttg

SEQ ID NO: 113677 - DNA, 20 bp, Artificial Sequence
  Description of Artificial Sequence: Synthetic oligonucleotide
  Target: LAMA2; (-) strand; PAM type: NRG; PAM sequence: TGG
ccaaacataatctgtctttt

SEQ ID NO: 113678 - DNA, 20 bp, Artificial Sequence
  Description of Artificial Sequence: Synthetic oligonucleotide
  Target: LAMA2; (-) strand; PAM type: NRG; PAM sequence: GGG
tcacacttttcagctattct

SEQ ID NO: 113679 - DNA, 20 bp, Artificial Sequence
  Description of Artificial Sequence: Synthetic oligonucleotide
  Target: LAMA2; (-) strand; PAM type: NRG; PAM sequence: TGG
atcacacttttcagctattc

SEQ ID NO: 113680 - DNA, 20 bp, Artificial Sequence
  Description of Artificial Sequence: Synthetic oligonucleotide
  Target: LAMA2; (-) strand; PAM type: NRG; PAM sequence: CAG
taactgaccatcacactttt

SEQ ID NO: 113681 - DNA, 20 bp, Artificial Sequence
  Description of Artificial Sequence: Synthetic oligonucleotide
  Target: LAMA2; (-) strand; PAM type: NRG; PAM sequence: TAG
ctgaactttcactgctcgtt

SEQ ID NO: 113682 - DNA, 20 bp, Artificial Sequence
  Description of Artificial Sequence: Synthetic oligonucleotide
  Target: LAMA2; (-) strand; PAM type: NRG; PAM sequence: GAG
cacactagctgtcatagaat

SEQ ID NO: 113683 - DNA, 20 bp, Artificial Sequence
  Description of Artificial Sequence: Synthetic oligonucleotide
  Target: LAMA2; (-) strand; PAM type: NRG; PAM sequence: TAG
agcctgcacactagctgtca

SEQ ID NO: 113684 - DNA, 20 bp, Artificial Sequence
  Description of Artificial Sequence: Synthetic oligonucleotide
  Target: LAMA2; (-) strand; PAM type: NRG; PAM sequence: TAG
agaaatttcagcctgcacac

SEQ ID NO: 113685 - DNA, 20 bp, Artificial Sequence
  Description of Artificial Sequence: Synthetic oligonucleotide
  Target: LAMA2; (-) strand; PAM type: NRG; PAM sequence: CAG
gatttggggagaagaaattt

SEQ ID NO: 113686 - DNA, 20 bp, Artificial Sequence
  Description of Artificial Sequence: Synthetic oligonucleotide
  Target: LAMA2; (-) strand; PAM type: NRG; PAM sequence: AAG
atgagtttagatttggggag

SEQ ID NO: 113687 - DNA, 20 bp, Artificial Sequence
  Description of Artificial Sequence: Synthetic oligonucleotide
  Target: LAMA2; (-) strand; PAM type: NRG; PAM sequence: GAG
tctatgagtttagatttggg

SEQ ID NO: 113688 - DNA, 20 bp, Artificial Sequence
  Description of Artificial Sequence: Synthetic oligonucleotide
  Target: LAMA2; (-) strand; PAM type: NRG; PAM sequence: GGG
catctatgagtttagatttg

SEQ ID NO: 113689 - DNA, 20 bp, Artificial Sequence
  Description of Artificial Sequence: Synthetic oligonucleotide
  Target: LAMA2; (-) strand; PAM type: NRG; PAM sequence: GGG
tcatctatgagtttagattt

SEQ ID NO: 113690 - DNA, 20 bp, Artificial Sequence
  Description of Artificial Sequence: Synthetic oligonucleotide
  Target: LAMA2; (-) strand; PAM type: NRG; PAM sequence: TGG
ttcatctatgagtttagatt

SEQ ID NO: 113691 - DNA, 20 bp, Artificial Sequence
  Description of Artificial Sequence: Synthetic oligonucleotide
  Target: LAMA2; (-) strand; PAM type: NRG; PAM sequence: TAG
agttgcttcatctatgagtt

SEQ ID NO: 113692 - DNA, 20 bp, Artificial Sequence
  Description of Artificial Sequence: Synthetic oligonucleotide
  Target: LAMA2; (-) strand; PAM type: NRG; PAM sequence: GAG
tagacagttgcttcatctat

SEQ ID NO: 113693 - DNA, 20 bp, Artificial Sequence
  Description of Artificial Sequence: Synthetic oligonucleotide
  Target: LAMA2; (-) strand; PAM type: NRG; PAM sequence: CAG
aagctcatcagataattaga

SEQ ID NO: 113694 - DNA, 20 bp, Artificial Sequence
  Description of Artificial Sequence: Synthetic oligonucleotide
  Target: LAMA2; (-) strand; PAM type: NRG; PAM sequence: TAG
catgaagctcatcagataat

SEQ ID NO: 113695 - DNA, 20 bp, Artificial Sequence
  Description of Artificial Sequence: Synthetic oligonucleotide
  Target: LAMA2; (-) strand; PAM type: NRG; PAM sequence: CAG
atttgcaccatgaagctcat

SEQ ID NO: 113696 - DNA, 20 bp, Artificial Sequence
  Description of Artificial Sequence: Synthetic oligonucleotide
  Target: LAMA2; (-) strand; PAM type: NRG; PAM sequence: AAG
gccaatttatttgcaccatg

SEQ ID NO: 113697 - DNA, 20 bp, Artificial Sequence
  Description of Artificial Sequence: Synthetic oligonucleotide
  Target: LAMA2; (-) strand; PAM type: NRG; PAM sequence: GAG
aatacattacaatgaatgca

SEQ ID NO: 113698 - DNA, 20 bp, Artificial Sequence
  Description of Artificial Sequence: Synthetic oligonucleotide
  Target: LAMA2; (-) strand; PAM type: NRG; PAM sequence: CAG
caaatacattacaatgaatg

SEQ ID NO: 113699 - DNA, 20 bp, Artificial Sequence
  Description of Artificial Sequence: Synthetic oligonucleotide
  Target: LAMA2; (-) strand; PAM type: NRG; PAM sequence: TGG
gaatttctaggtaataactg

SEQ ID NO: 113700 - DNA, 20 bp, Artificial Sequence
  Description of Artificial Sequence: Synthetic oligonucleotide
  Target: LAMA2; (-) strand; PAM type: NRG; PAM sequence: AGG
tgactggcaaatgaatttct

SEQ ID NO: 113701 - DNA, 20 bp, Artificial Sequence
  Description of Artificial Sequence: Synthetic oligonucleotide
  Target: LAMA2; (-) strand; PAM type: NRG; PAM sequence: TAG
atgactggcaaatgaatttc

SEQ ID NO: 113702 - DNA, 20 bp, Artificial Sequence
  Description of Artificial Sequence: Synthetic oligonucleotide
  Target: LAMA2; (-) strand; PAM type: NRG; PAM sequence: TGG
acaaacttttggtgaatgac

SEQ ID NO: 113703 - DNA, 20 bp, Artificial Sequence
  Description of Artificial Sequence: Synthetic oligonucleotide
  Target: LAMA2; (-) strand; PAM type: NRG; PAM sequence: TGG
gtagatactcaacaaacttt

SEQ ID NO: 113704 - DNA, 20 bp, Artificial Sequence
  Description of Artificial Sequence: Synthetic oligonucleotide
  Target: LAMA2; (-) strand; PAM type: NRG; PAM sequence: TAG
gtatggagcctgtcacatag

SEQ ID NO: 113705 - DNA, 20 bp, Artificial Sequence
  Description of Artificial Sequence: Synthetic oligonucleotide
  Target: LAMA2; (-) strand; PAM type: NRG; PAM sequence: TAG
ttggtatggagcctgtcaca

SEQ ID NO: 113706 - DNA, 20 bp, Artificial Sequence
  Description of Artificial Sequence: Synthetic oligonucleotide
  Target: LAMA2; (-) strand; PAM type: NRG; PAM sequence: GAG
gattcctagtatttggtatg

SEQ ID NO: 113707 - DNA, 20 bp, Artificial Sequence
  Description of Artificial Sequence: Synthetic oligonucleotide
  Target: LAMA2; (-) strand; PAM type: NRG; PAM sequence: TGG
tggattcctagtatttggta

SEQ ID NO: 113708 - DNA, 20 bp, Artificial Sequence
  Description of Artificial Sequence: Synthetic oligonucleotide
  Target: LAMA2; (-) strand; PAM type: NRG; PAM sequence: TGG
accactggattcctagtatt

SEQ ID NO: 113709 - DNA, 20 bp, Artificial Sequence
  Description of Artificial Sequence: Synthetic oligonucleotide
  Target: LAMA2; (-) strand; PAM type: NRG; PAM sequence: TAG
ttgaacaaccactggattcc

SEQ ID NO: 113710 - DNA, 20 bp, Artificial Sequence
  Description of Artificial Sequence: Synthetic oligonucleotide
  Target: LAMA2; (-) strand; PAM type: NRG; PAM sequence: TGG
tcttagatttgaacaaccac

SEQ ID NO: 113711 - DNA, 20 bp, Artificial Sequence
  Description of Artificial Sequence: Synthetic oligonucleotide
  Target: LAMA2; (-) strand; PAM type: NRG; PAM sequence: TAG
tgatcttgtaaagcaaatct

SEQ ID NO: 113712 - DNA, 20 bp, Artificial Sequence
  Description of Artificial Sequence: Synthetic oligonucleotide
  Target: LAMA2; (-) strand; PAM type: NRG; PAM sequence: AAG
atatggttaatgatcttgta

SEQ ID NO: 113713 - DNA, 20 bp, Artificial Sequence
  Description of Artificial Sequence: Synthetic oligonucleotide
  Target: LAMA2; (-) strand; PAM type: NRG; PAM sequence: TGG
ttaattcactcaataatata

SEQ ID NO: 113714 - DNA, 20 bp, Artificial Sequence
  Description of Artificial Sequence: Synthetic oligonucleotide
  Target: LAMA2; (-) strand; PAM type: NRG; PAM sequence: TGG
gatttgaataaccttaggtt

SEQ ID NO: 113715 - DNA, 20 bp, Artificial Sequence
  Description of Artificial Sequence: Synthetic oligonucleotide
  Target: LAMA2; (-) strand; PAM type: NRG; PAM sequence: AGG
agctagatttgaataacctt

SEQ ID NO: 113716 - DNA, 20 bp, Artificial Sequence
  Description of Artificial Sequence: Synthetic oligonucleotide
  Target: LAMA2; (-) strand; PAM type: NRG; PAM sequence: TAG
aagctagatttgaataacct

SEQ ID NO: 113717 - DNA, 20 bp, Artificial Sequence
  Description of Artificial Sequence: Synthetic oligonucleotide
  Target: LAMA2; (-) strand; PAM type: NRG; PAM sequence: TAG
atcactagaataaatgaagc

SEQ ID NO: 113718 - DNA, 20 bp, Artificial Sequence
  Description of Artificial Sequence: Synthetic oligonucleotide
  Target: LAMA2; (-) strand; PAM type: NRG; PAM sequence: AAG
aatcatcactagaataaatg

SEQ ID NO: 113719 - DNA, 20 bp, Artificial Sequence
  Description of Artificial Sequence: Synthetic oligonucleotide
  Target: LAMA2; (-) strand; PAM type: NRG; PAM sequence: TAG
atgataattaaaatcatcac

SEQ ID NO: 113720 - DNA, 20 bp, Artificial Sequence
  Description of Artificial Sequence: Synthetic oligonucleotide
  Target: LAMA2; (-) strand; PAM type: NRG; PAM sequence: TAG
atttaacaggcacaccttta

SEQ ID NO: 113721 - DNA, 20 bp, Artificial Sequence
  Description of Artificial Sequence: Synthetic oligonucleotide
  Target: LAMA2; (-) strand; PAM type: NRG; PAM sequence: AGG
cagattttatagaatttaac

SEQ ID NO: 113722 - DNA, 20 bp, Artificial Sequence
  Description of Artificial Sequence: Synthetic oligonucleotide
  Target: LAMA2; (-) strand; PAM type: NRG; PAM sequence: CAG
acagattttatagaatttaa

SEQ ID NO: 113723 - DNA, 20 bp, Artificial Sequence
  Description of Artificial Sequence: Synthetic oligonucleotide
  Target: LAMA2; (-) strand; PAM type: NRG; PAM sequence: TAG
tcagattttaacagatttta

SEQ ID NO: 113724 - DNA, 20 bp, Artificial Sequence
  Description of Artificial Sequence: Synthetic oligonucleotide
  Target: LAMA2; (-) strand; PAM type: NRG; PAM sequence: CAG
ttaacagattcagattttaa

SEQ ID NO: 113725 - DNA, 20 bp, Artificial Sequence
  Description of Artificial Sequence: Synthetic oligonucleotide
  Target: LAMA2; (-) strand; PAM type: NRG; PAM sequence: CAG
aaagattcatttaacagatt

SEQ ID NO: 113726 - DNA, 20 bp, Artificial Sequence
  Description of Artificial Sequence: Synthetic oligonucleotide
  Target: LAMA2; (-) strand; PAM type: NRG; PAM sequence: CAG
agtgataaagattcatttaa

SEQ ID NO: 113727 - DNA, 20 bp, Artificial Sequence
  Description of Artificial Sequence: Synthetic oligonucleotide
  Target: LAMA2; (-) strand; PAM type: NRG; PAM sequence: AAG
gtaaaaacattttagtgata

SEQ ID NO: 113728 - DNA, 20 bp, Artificial Sequence
  Description of Artificial Sequence: Synthetic oligonucleotide
  Target: LAMA2; (-) strand; PAM type: NRG; PAM sequence: TAG
tcatgaaagtaaaaacattt

SEQ ID NO: 113729 - DNA, 20 bp, Artificial Sequence
  Description of Artificial Sequence: Synthetic oligonucleotide
  Target: LAMA2; (-) strand; PAM type: NRG; PAM sequence: AAG
tatgcaatgctgtatcatga

SEQ ID NO: 113730 - DNA, 20 bp, Artificial Sequence
  Description of Artificial Sequence: Synthetic oligonucleotide
  Target: LAMA2; (-) strand; PAM type: NRG; PAM sequence: TAG
aatgtgccacaccatggaaa

SEQ ID NO: 113731 - DNA, 20 bp, Artificial Sequence
  Description of Artificial Sequence: Synthetic oligonucleotide
  Target: LAMA2; (-) strand; PAM type: NRG; PAM sequence: TGG
tgaaataatgtgccacacca

SEQ ID NO: 113732 - DNA, 20 bp, Artificial Sequence
  Description of Artificial Sequence: Synthetic oligonucleotide
  Target: LAMA2; (-) strand; PAM type: NRG; PAM sequence: TGG
aatcacaaatatacctctaa

SEQ ID NO: 113733 - DNA, 20 bp, Artificial Sequence
  Description of Artificial Sequence: Synthetic oligonucleotide
  Target: LAMA2; (-) strand; PAM type: NRG; PAM sequence: TGG
aacaggtaactatgaatgtt

SEQ ID NO: 113734 - DNA, 20 bp, Artificial Sequence
  Description of Artificial Sequence: Synthetic oligonucleotide
  Target: LAMA2; (-) strand; PAM type: NRG; PAM sequence: AGG
ctgtctgcaggcaaaataac

SEQ ID NO: 113735 - DNA, 20 bp, Artificial Sequence
  Description of Artificial Sequence: Synthetic oligonucleotide
  Target: LAMA2; (-) strand; PAM type: NRG; PAM sequence: CAG
cctgtctgcaggcaaaataa

SEQ ID NO: 113736 - DNA, 20 bp, Artificial Sequence
  Description of Artificial Sequence: Synthetic oligonucleotide
  Target: LAMA2; (-) strand; PAM type: NRG; PAM sequence: AGG
catactgagaacctgtctgc

SEQ ID NO: 113737 - DNA, 20 bp, Artificial Sequence
  Description of Artificial Sequence: Synthetic oligonucleotide
  Target: LAMA2; (-) strand; PAM type: NRG; PAM sequence: CAG
tcatactgagaacctgtctg

SEQ ID NO: 113738 - DNA, 20 bp, Artificial Sequence
  Description of Artificial Sequence: Synthetic oligonucleotide
  Target: LAMA2; (-) strand; PAM type: NRG; PAM sequence: GAG
cttttgcactttgtcatact

SEQ ID NO: 113739 - DNA, 20 bp, Artificial Sequence
  Description of Artificial Sequence: Synthetic oligonucleotide
  Target: LAMA2; (-) strand; PAM type: NRG; PAM sequence: GAG
tattgcctctcaaacagctt

SEQ ID NO: 113740 - DNA, 20 bp, Artificial Sequence
  Description of Artificial Sequence: Synthetic oligonucleotide
  Target: LAMA2; (-) strand; PAM type: NRG; PAM sequence: CAG
tataaatattgcctctcaaa

SEQ ID NO: 113741 - DNA, 20 bp, Artificial Sequence
  Description of Artificial Sequence: Synthetic oligonucleotide
  Target: LAMA2; (-) strand; PAM type: NRG; PAM sequence: TGG
tattctgtagtgttcatgaa

SEQ ID NO: 113742 - DNA, 20 bp, Artificial Sequence
  Description of Artificial Sequence: Synthetic oligonucleotide
  Target: LAMA2; (-) strand; PAM type: NRG; PAM sequence: TAG
tgtacaatgtcactattctg

SEQ ID NO: 113743 - DNA, 20 bp, Artificial Sequence
  Description of Artificial Sequence: Synthetic oligonucleotide
  Target: LAMA2; (-) strand; PAM type: NRG; PAM sequence: GGG
ttcttatcaatctaataaat

SEQ ID NO: 113744 - DNA, 20 bp, Artificial Sequence
  Description of Artificial Sequence: Synthetic oligonucleotide
  Target: LAMA2; (-) strand; PAM type: NRG; PAM sequence: TGG
gttcttatcaatctaataaa

SEQ ID NO: 113745 - DNA, 20 bp, Artificial Sequence
  Description of Artificial Sequence: Synthetic oligonucleotide
  Target: LAMA2; (-) strand; PAM type: NRG; PAM sequence: AAG
tactttgaaatatgaattta

SEQ ID NO: 113746 - DNA, 20 bp, Artificial Sequence
  Description of Artificial Sequence: Synthetic oligonucleotide
  Target: LAMA2; (-) strand; PAM type: NRG; PAM sequence: TGG
cgtagctcacaatatcagct

SEQ ID NO: 113747 - DNA, 20 bp, Artificial Sequence
  Description of Artificial Sequence: Synthetic oligonucleotide
  Target: LAMA2; (-) strand; PAM type: NRG; PAM sequence: CAG
atgaccgtagctcacaatat

SEQ ID NO: 113748 - DNA, 20 bp, Artificial Sequence
  Description of Artificial Sequence: Synthetic oligonucleotide
  Target: LAMA2; (-) strand; PAM type: NRG; PAM sequence: TAG
ttagaatcaaaatatgaccg

SEQ ID NO: 113749 - DNA, 20 bp, Artificial Sequence
  Description of Artificial Sequence: Synthetic oligonucleotide
  Target: LAMA2; (-) strand; PAM type: NRG; PAM sequence: TAG
acccttgacggcagtgaaat

SEQ ID NO: 113750 - DNA, 20 bp, Artificial Sequence
  Description of Artificial Sequence: Synthetic oligonucleotide
  Target: LAMA2; (-) strand; PAM type: NRG; PAM sequence: CAG
tagacttatacccttgacgg

SEQ ID NO: 113751 - DNA, 20 bp, Artificial Sequence
  Description of Artificial Sequence: Synthetic oligonucleotide
  Target: LAMA2; (-) strand; PAM type: NRG; PAM sequence: CGG
aaatagacttatacccttga

SEQ ID NO: 113752 - DNA, 20 bp, Artificial Sequence
  Description of Artificial Sequence: Synthetic oligonucleotide
  Target: LAMA2; (-) strand; PAM type: NRG; PAM sequence: TAG
agccccaatagaactaaaaa

SEQ ID NO: 113753 - DNA, 20 bp, Artificial Sequence
  Description of Artificial Sequence: Synthetic oligonucleotide
  Target: LAMA2; (-) strand; PAM type: NRG; PAM sequence: TAG
aagaaatgcaaaagccccaa

SEQ ID NO: 113754 - DNA, 20 bp, Artificial Sequence
  Description of Artificial Sequence: Synthetic oligonucleotide
  Target: LAMA2; (-) strand; PAM type: NRG; PAM sequence: AAG
tacaaaggaaagaaatgcaa

SEQ ID NO: 113755 - DNA, 20 bp, Artificial Sequence
  Description of Artificial Sequence: Synthetic oligonucleotide
  Target: LAMA2; (-) strand; PAM type: NRG; PAM sequence: AAG
tcacagggatctacaaagga

SEQ ID NO: 113756 - DNA, 20 bp, Artificial Sequence
  Description of Artificial Sequence: Synthetic oligonucleotide
  Target: LAMA2; (-) strand; PAM type: NRG; PAM sequence: AGG
catttcacagggatctacaa

SEQ ID NO: 113757 - DNA, 20 bp, Artificial Sequence
  Description of Artificial Sequence: Synthetic oligonucleotide
  Target: LAMA2; (-) strand; PAM type: NRG; PAM sequence: AAG
tcatttcacagggatctaca

SEQ ID NO: 113758 - DNA, 20 bp, Artificial Sequence
  Description of Artificial Sequence: Synthetic oligonucleotide
  Target: LAMA2; (-) strand; PAM type: NRG; PAM sequence: GGG
ctttaaaaaatcatttcaca

SEQ ID NO: 113759 - DNA, 20 bp, Artificial Sequence
  Description of Artificial Sequence: Synthetic oligonucleotide
  Target: LAMA2; (-) strand; PAM type: NRG; PAM sequence: AGG
tctttaaaaaatcatttcac

SEQ ID NO: 113760 - DNA, 20 bp, Artificial Sequence
  Description of Artificial Sequence: Synthetic oligonucleotide
  Target: LAMA2; (-) strand; PAM type: NRG; PAM sequence: CAG
atctttaaaaaatcatttca

SEQ ID NO: 113761 - DNA, 20 bp, Artificial Sequence
  Description of Artificial Sequence: Synthetic oligonucleotide
  Target: LAMA2; (-) strand; PAM type: NRG; PAM sequence: TAG
cttataattacattttcatt

SEQ ID NO: 113762 - DNA, 20 bp, Artificial Sequence
  Description of Artificial Sequence: Synthetic oligonucleotide
  Target: LAMA2; (-) strand; PAM type: NRG; PAM sequence: AGG
catactagataacgggaaag

SEQ ID NO: 113763 - DNA, 20 bp, Artificial Sequence
  Description of Artificial Sequence: Synthetic oligonucleotide
  Target: LAMA2; (-) strand; PAM type: NRG; PAM sequence: GAG
tcatactagataacgggaaa

SEQ ID NO: 113764 - DNA, 20 bp, Artificial Sequence
  Description of Artificial Sequence: Synthetic oligonucleotide
  Target: LAMA2; (-) strand; PAM type: NRG; PAM sequence: AAG
tttcatactagataacggga

SEQ ID NO: 113765 - DNA, 20 bp, Artificial Sequence
  Description of Artificial Sequence: Synthetic oligonucleotide
  Target: LAMA2; (-) strand; PAM type: NRG; PAM sequence: GGG
ttgctttcatactagataac

SEQ ID NO: 113766 - DNA, 20 bp, Artificial Sequence
  Description of Artificial Sequence: Synthetic oligonucleotide
  Target: LAMA2; (-) strand; PAM type: NRG; PAM sequence: CGG
cttgctttcatactagataa

SEQ ID NO: 113767 - DNA, 20 bp, Artificial Sequence
  Description of Artificial Sequence: Synthetic oligonucleotide
  Target: LAMA2; (-) strand; PAM type: NRG; PAM sequence: TAG
attttaccttgctttcatac

SEQ ID NO: 113768 - DNA, 20 bp, Artificial Sequence
  Description of Artificial Sequence: Synthetic oligonucleotide
  Target: LAMA2; (-) strand; PAM type: NRG; PAM sequence: AGG
ccaacccatgcactcgaaga

SEQ ID NO: 113769 - DNA, 20 bp, Artificial Sequence
  Description of Artificial Sequence: Synthetic oligonucleotide
  Target: LAMA2; (-) strand; PAM type: NRG; PAM sequence: AAG
cccaacccatgcactcgaag

SEQ ID NO: 113770 - DNA, 20 bp, Artificial Sequence
  Description of Artificial Sequence: Synthetic oligonucleotide
  Target: LAMA2; (-) strand; PAM type: NRG; PAM sequence: AAG
ttacccaacccatgcactcg

SEQ ID NO: 113771 - DNA, 20 bp, Artificial Sequence
  Description of Artificial Sequence: Synthetic oligonucleotide
  Target: LAMA2; (-) strand; PAM type: NRG; PAM sequence: AAG
gcacggctgctttatctaag

SEQ ID NO: 113772 - DNA, 20 bp, Artificial Sequence
  Description of Artificial Sequence: Synthetic oligonucleotide
  Target: LAMA2; (-) strand; PAM type: NRG; PAM sequence: AAG
tctgcacggctgctttatct

SEQ ID NO: 113773 - DNA, 20 bp, Artificial Sequence
  Description of Artificial Sequence: Synthetic oligonucleotide
  Target: LAMA2; (-) strand; PAM type: NRG; PAM sequence: CGG
ggtgttgctctgcttctgca

SEQ ID NO: 113774 - DNA, 20 bp, Artificial Sequence
  Description of Artificial Sequence: Synthetic oligonucleotide
  Target: LAMA2; (-) strand; PAM type: NRG; PAM sequence: TGG
tactatgaacaaagctgtac

SEQ ID NO: 113775 - DNA, 20 bp, Artificial Sequence
  Description of Artificial Sequence: Synthetic oligonucleotide
  Target: LAMA2; (-) strand; PAM type: NRG; PAM sequence: AAG
cgtgaaacatactatgaaca

SEQ ID NO: 113776 - DNA, 20 bp, Artificial Sequence
  Description of Artificial Sequence: Synthetic oligonucleotide
  Target: LAMA2; (-) strand; PAM type: NRG; PAM sequence: CGG
gagaactctcacagaatgca

SEQ ID NO: 113777 - DNA, 20 bp, Artificial Sequence
  Description of Artificial Sequence: Synthetic oligonucleotide
  Target: LAMA2; (-) strand; PAM type: NRG; PAM sequence: CAG
gggcagcaggagaactctca

SEQ ID NO: 113778 - DNA, 20 bp, Artificial Sequence
  Description of Artificial Sequence: Synthetic oligonucleotide
  Target: LAMA2; (-) strand; PAM type: NRG; PAM sequence: GAG
cggccagcaaggggcagcag

SEQ ID NO: 113779 - DNA, 20 bp, Artificial Sequence
  Description of Artificial Sequence: Synthetic oligonucleotide
  Target: LAMA2; (-) strand; PAM type: NRG; PAM sequence: AGG
gtcggccagcaaggggcagc

SEQ ID NO: 113780 - DNA, 20 bp, Artificial Sequence
  Description of Artificial Sequence: Synthetic oligonucleotide
  Target: LAMA2; (-) strand; PAM type: NRG; PAM sequence: CAG
tgtcggccagcaaggggcag

SEQ ID NO: 113781 - DNA, 20 bp, Artificial Sequence
  Description of Artificial Sequence: Synthetic oligonucleotide
  Target: LAMA2; (-) strand; PAM type: NRG; PAM sequence: CAG
gaatgtcggccagcaagggg

SEQ ID NO: 113782 - DNA, 20 bp, Artificial Sequence
  Description of Artificial Sequence: Synthetic oligonucleotide
  Target: LAMA2; (-) strand; PAM type: NRG; PAM sequence: GGG
gcagaatgtcggccagcaag

SEQ ID NO: 113783 - DNA, 20 bp, Artificial Sequence
  Description of Artificial Sequence: Synthetic oligonucleotide
  Target: LAMA2; (-) strand; PAM type: NRG; PAM sequence: GGG
agcagaatgtcggccagcaa

SEQ ID NO: 113784 - DNA, 20 bp, Artificial Sequence
  Description of Artificial Sequence: Synthetic oligonucleotide
  Target: LAMA2; (-) strand; PAM type: NRG; PAM sequence: AGG
cagcagaatgtcggccagca

SEQ ID NO: 113785 - DNA, 20 bp, Artificial Sequence
  Description of Artificial Sequence: Synthetic oligonucleotide
  Target: LAMA2; (-) strand; PAM type: NRG; PAM sequence: AAG
gcagcagaatgtcggccagc

SEQ ID NO: 113786 - DNA, 20 bp, Artificial Sequence
  Description of Artificial Sequence: Synthetic oligonucleotide
  Target: LAMA2; (-) strand; PAM type: NRG; PAM sequence: CAG
gtaagcagcagaatgtcggc

SEQ ID NO: 113787 - DNA, 20 bp, Artificial Sequence
  Description of Artificial Sequence: Synthetic oligonucleotide
  Target: LAMA2; (-) strand; PAM type: NRG; PAM sequence: CGG
gtgggtaagcagcagaatgt

SEQ ID NO: 113788 - DNA, 20 bp, Artificial Sequence
  Description of Artificial Sequence: Synthetic oligonucleotide
  Target: LAMA2; (-) strand; PAM type: NRG; PAM sequence: CAG
aactgatggtgggtaagcag

SEQ ID NO: 113789 - DNA, 20 bp, Artificial Sequence
  Description of Artificial Sequence: Synthetic oligonucleotide
  Target: LAMA2; (-) strand; PAM type: NRG; PAM sequence: CAG
cccaactgatggtgggtaag

SEQ ID NO: 113790 - DNA, 20 bp, Artificial Sequence
  Description of Artificial Sequence: Synthetic oligonucleotide
  Target: LAMA2; (-) strand; PAM type: NRG; PAM sequence: AAG
cagcccaactgatggtgggt

SEQ ID NO: 113791 - DNA, 20 bp, Artificial Sequence
  Description of Artificial Sequence: Synthetic oligonucleotide
  Target: LAMA2; (-) strand; PAM type: NRG; PAM sequence: GGG
attgcagcccaactgatggt

SEQ ID NO: 113792 - DNA, 20 bp, Artificial Sequence
  Description of Artificial Sequence: Synthetic oligonucleotide
  Target: LAMA2; (-) strand; PAM type: NRG; PAM sequence: TGG
aattgcagcccaactgatgg

SEQ ID NO: 113793 - DNA, 20 bp, Artificial Sequence
  Description of Artificial Sequence: Synthetic oligonucleotide
  Target: LAMA2; (-) strand; PAM type: NRG; PAM sequence: TGG
tcaaattgcagcccaactga

SEQ ID NO: 113794 - DNA, 20 bp, Artificial Sequence
  Description of Artificial Sequence: Synthetic oligonucleotide
  Target: LAMA2; (-) strand; PAM type: NRG; PAM sequence: CAG
tggtgagacaactcaaattg

SEQ ID NO: 113795 - DNA, 20 bp, Artificial Sequence
  Description of Artificial Sequence: Synthetic oligonucleotide
  Target: LAMA2; (-) strand; PAM type: NRG; PAM sequence: GAG
caaatctcatcactgctggt

SEQ ID NO: 113796 - DNA, 20 bp, Artificial Sequence
  Description of Artificial Sequence: Synthetic oligonucleotide
  Target: LAMA2; (-) strand; PAM type: NRG; PAM sequence: TGG
agagcaaatctcatcactgc

SEQ ID NO: 113797 - DNA, 20 bp, Artificial Sequence
  Description of Artificial Sequence: Synthetic oligonucleotide
  Target: LAMA2; (-) strand; PAM type: NRG; PAM sequence: GAG
gatggttgaacaagtgagca

SEQ ID NO: 113798 - DNA, 20 bp, Artificial Sequence
  Description of Artificial Sequence: Synthetic oligonucleotide
  Target: LAMA2; (-) strand; PAM type: NRG; PAM sequence: CAG
cagatggttgaacaagtgag

SEQ ID NO: 113799 - DNA, 20 bp, Artificial Sequence
  Description of Artificial Sequence: Synthetic oligonucleotide
  Target: LAMA2; (-) strand; PAM type: NRG; PAM sequence: GAG
gtgcagatggttgaacaagt

SEQ ID NO: 113800 - DNA, 20 bp, Artificial Sequence
  Description of Artificial Sequence: Synthetic oligonucleotide
  Target: LAMA2; (-) strand; PAM type: NRG; PAM sequence: AAG
ctgtgtgcagatggttgaac

SEQ ID NO: 113801 - DNA, 20 bp, Artificial Sequence
  Description of Artificial Sequence: Synthetic oligonucleotide
  Target: LAMA2; (-) strand; PAM type: NRG; PAM sequence: TGG
ccaggggcactgtgtgcaga

SEQ ID NO: 113802 - DNA, 20 bp, Artificial Sequence
  Description of Artificial Sequence: Synthetic oligonucleotide
  Target: LAMA2; (-) strand; PAM type: NRG; PAM sequence: CAG
gtcaccaggggcactgtgtg

SEQ ID NO: 113803 - DNA, 20 bp, Artificial Sequence
  Description of Artificial Sequence: Synthetic oligonucleotide
  Target: LAMA2; (-) strand; PAM type: NRG; PAM sequence: GGG
tgtgtgctgctggtcaccag

SEQ ID NO: 113804 - DNA, 20 bp, Artificial Sequence
  Description of Artificial Sequence: Synthetic oligonucleotide
  Target: LAMA2; (-) strand; PAM type: NRG; PAM sequence: GGG
gtgtgtgctgctggtcacca

SEQ ID NO: 113805 - DNA, 20 bp, Artificial Sequence
  Description of Artificial Sequence: Synthetic oligonucleotide
  Target: LAMA2; (-) strand; PAM type: NRG; PAM sequence: AGG
agtgtgtgctgctggtcacc

SEQ ID NO: 113806 - DNA, 20 bp, Artificial Sequence
  Description of Artificial Sequence: Synthetic oligonucleotide
  Target: LAMA2; (-) strand; PAM type: NRG; PAM sequence: CAG
gagtgtgtgctgctggtcac

SEQ ID NO: 113807 - DNA, 20 bp, Artificial Sequence
  Description of Artificial Sequence: Synthetic oligonucleotide
  Target: LAMA2; (-) strand; PAM type: NRG; PAM sequence: TGG
gccttttgagtgtgtgctgc

SEQ ID NO: 113808 - DNA, 20 bp, Artificial Sequence
  Description of Artificial Sequence: Synthetic oligonucleotide
  Target: LAMA2; (-) strand; PAM type: NRG; PAM sequence: GAG
aaattgaccagctgcctttt

SEQ ID NO: 113809 - DNA, 20 bp, Artificial Sequence
  Description of Artificial Sequence: Synthetic oligonucleotide
  Target: LAMA2; (-) strand; PAM type: NRG; PAM sequence: CAG
actgtgtaccagaaattgac

SEQ ID NO: 113810 - DNA, 20 bp, Artificial Sequence
  Description of Artificial Sequence: Synthetic oligonucleotide
  Target: LAMA2; (-) strand; PAM type: NRG; PAM sequence: CAG
cccagaactagactgtgtac

SEQ ID NO: 113811 - DNA, 20 bp, Artificial Sequence
  Description of Artificial Sequence: Synthetic oligonucleotide
  Target: LAMA2; (-) strand; PAM type: NRG; PAM sequence: TAG
tttaccgtgtttcccagaac

SEQ ID NO: 113812 - DNA, 20 bp, Artificial Sequence
  Description of Artificial Sequence: Synthetic oligonucleotide
  Target: LAMA2; (-) strand; PAM type: NRG; PAM sequence: CAG
gaccactttaccgtgtttcc

SEQ ID NO: 113813 - DNA, 20 bp, Artificial Sequence
  Description of Artificial Sequence: Synthetic oligonucleotide
  Target: LAMA2; (-) strand; PAM type: NRG; PAM sequence: GAG
gggcccggggttcaactcaa

SEQ ID NO: 113814 - DNA, 20 bp, Artificial Sequence
  Description of Artificial Sequence: Synthetic oligonucleotide
  Target: LAMA2; (-) strand; PAM type: NRG; PAM sequence: AAG
cagggcccggggttcaactc

SEQ ID NO: 113815 - DNA, 20 bp, Artificial Sequence
  Description of Artificial Sequence: Synthetic oligonucleotide
  Target: LAMA2; (-) strand; PAM type: NRG; PAM sequence: GGG
actagggaggccagggcccg

SEQ ID NO: 113816 - DNA, 20 bp, Artificial Sequence
  Description of Artificial Sequence: Synthetic oligonucleotide
  Target: LAMA2; (-) strand; PAM type: NRG; PAM sequence: GGG
cactagggaggccagggccc

SEQ ID NO: 113817 - DNA, 20 bp, Artificial Sequence
  Description of Artificial Sequence: Synthetic oligonucleotide
  Target: LAMA2; (-) strand; PAM type: NRG; PAM sequence: CGG
gcactagggaggccagggcc

SEQ ID NO: 113818 - DNA, 20 bp, Artificial Sequence
  Description of Artificial Sequence: Synthetic oligonucleotide
  Target: LAMA2; (-) strand; PAM type: NRG; PAM sequence: GGG
gcatggcactagggaggcca

SEQ ID NO: 113819 - DNA, 20 bp, Artificial Sequence
  Description of Artificial Sequence: Synthetic oligonucleotide
  Target: LAMA2; (-) strand; PAM type: NRG; PAM sequence: AGG
agcatggcactagggaggcc

SEQ ID NO: 113820 - DNA, 20 bp, Artificial Sequence
  Description of Artificial Sequence: Synthetic oligonucleotide
  Target: LAMA2; (-) strand; PAM type: NRG; PAM sequence: CAG
cagcatggcactagggaggc

SEQ ID NO: 113821 - DNA, 20 bp, Artificial Sequence
  Description of Artificial Sequence: Synthetic oligonucleotide
  Target: LAMA2; (-) strand; PAM type: NRG; PAM sequence: AGG
cagacagcatggcactaggg

SEQ ID NO: 113822 - DNA, 20 bp, Artificial Sequence
  Description of Artificial Sequence: Synthetic oligonucleotide
  Target: LAMA2; (-) strand; PAM type: NRG; PAM sequence: GAG
gcagacagcatggcactagg

SEQ ID NO: 113823 - DNA, 20 bp, Artificial Sequence
  Description of Artificial Sequence: Synthetic oligonucleotide
  Target: LAMA2; (-) strand; PAM type: NRG; PAM sequence: GGG
cagcagacagcatggcacta

SEQ ID NO: 113824 - DNA, 20 bp, Artificial Sequence
  Description of Artificial Sequence: Synthetic oligonucleotide
  Target: LAMA2; (-) strand; PAM type: NRG; PAM sequence: AGG
tcagcagacagcatggcact

SEQ ID NO: 113825 - DNA, 20 bp, Artificial Sequence
  Description of Artificial Sequence: Synthetic oligonucleotide
  Target: LAMA2; (-) strand; PAM type: NRG; PAM sequence: TAG
ttcagcagacagcatggcac

SEQ ID NO: 113826 - DNA, 20 bp, Artificial Sequence
  Description of Artificial Sequence: Synthetic oligonucleotide
  Target: LAMA2; (-) strand; PAM type: NRG; PAM sequence: TGG
tgattcttcagcagacagca

SEQ ID NO: 113827 - DNA, 20 bp, Artificial Sequence
  Description of Artificial Sequence: Synthetic oligonucleotide
  Target: LAMA2; (-) strand; PAM type: NRG; PAM sequence: CAG
cagtttgattcttcagcaga

SEQ ID NO: 113828 - DNA, 20 bp, Artificial Sequence
  Description of Artificial Sequence: Synthetic oligonucleotide
  Target: LAMA2; (-) strand; PAM type: NRG; PAM sequence: CAG
agcacagtttgattcttcag

SEQ ID NO: 113829 - DNA, 20 bp, Artificial Sequence
  Description of Artificial Sequence: Synthetic oligonucleotide
  Target: LAMA2; (-) strand; PAM type: NRG; PAM sequence: CAG
gagagcacagtttgattctt

SEQ ID NO: 113830 - DNA, 20 bp, Artificial Sequence
  Description of Artificial Sequence: Synthetic oligonucleotide
  Target: LAMA2; (-) strand; PAM type: NRG; PAM sequence: CAG
gtggtaagcatgtgagagca

SEQ ID NO: 113831 - DNA, 20 bp, Artificial Sequence
  Description of Artificial Sequence: Synthetic oligonucleotide
  Target: LAMA2; (-) strand; PAM type: NRG; PAM sequence: GAG
aggcagtggtaagcatgtga

SEQ ID NO: 113832 - DNA, 20 bp, Artificial Sequence
  Description of Artificial Sequence: Synthetic oligonucleotide
  Target: LAMA2; (-) strand; PAM type: NRG; PAM sequence: GAG
gaaggcagtggtaagcatgt

SEQ ID NO: 113833 - DNA, 20 bp, Artificial Sequence
  Description of Artificial Sequence: Synthetic oligonucleotide
  Target: LAMA2; (-) strand; PAM type: NRG; PAM sequence: AAG
aaaagcaagaaggcagtggt

SEQ ID NO: 113834 - DNA, 20 bp, Artificial Sequence
  Description of Artificial Sequence: Synthetic oligonucleotide
  Target: LAMA2; (-) strand; PAM type: NRG; PAM sequence: TGG
tgcaaaaagcaagaaggcag

SEQ ID NO: 113835 - DNA, 20 bp, Artificial Sequence
  Description of Artificial Sequence: Synthetic oligonucleotide
  Target: LAMA2; (-) strand; PAM type: NRG; PAM sequence: CAG
gcctgcaaaaagcaagaagg

SEQ ID NO: 113836 - DNA, 20 bp, Artificial Sequence
  Description of Artificial Sequence: Synthetic oligonucleotide
  Target: LAMA2; (-) strand; PAM type: NRG; PAM sequence: AGG
caggcctgcaaaaagcaaga

SEQ ID NO: 113837 - DNA, 20 bp, Artificial Sequence
  Description of Artificial Sequence: Synthetic oligonucleotide
  Target: LAMA2; (-) strand; PAM type: NRG; PAM sequence: AAG
gcaggcctgcaaaaagcaag

SEQ ID NO: 113838 - DNA, 20 bp, Artificial Sequence
  Description of Artificial Sequence: Synthetic oligonucleotide
  Target: LAMA2; (-) strand; PAM type: NRG; PAM sequence: AAG
tctgcaggcctgcaaaaagc

SEQ ID NO: 113839 - DNA, 20 bp, Artificial Sequence
  Description of Artificial Sequence: Synthetic oligonucleotide
  Target: LAMA2; (-) strand; PAM type: NRG; PAM sequence: AAG
catatctgcaggcctgcaaa

SEQ ID NO: 113840 - DNA, 20 bp, Artificial Sequence
  Description of Artificial Sequence: Synthetic oligonucleotide
  Target: LAMA2; (-) strand; PAM type: NRG; PAM sequence: AGG
gtaaatgtttgcatatctgc

SEQ ID NO: 113841 - DNA, 20 bp, Artificial Sequence
  Description of Artificial Sequence: Synthetic oligonucleotide
  Target: LAMA2; (-) strand; PAM type: NRG; PAM sequence: CAG
tgtaaatgtttgcatatctg

SEQ ID NO: 113842 - DNA, 20 bp, Artificial Sequence
  Description of Artificial Sequence: Synthetic oligonucleotide
  Target: LAMA2; (-) strand; PAM type: NRG; PAM sequence: AGG
agctttgacaagaggtgcaa

SEQ ID NO: 113843 - DNA, 20 bp, Artificial Sequence
  Description of Artificial Sequence: Synthetic oligonucleotide
  Target: LAMA2; (-) strand; PAM type: NRG; PAM sequence: AAG
cagctttgacaagaggtgca

SEQ ID NO: 113844 - DNA, 20 bp, Artificial Sequence
  Description of Artificial Sequence: Synthetic oligonucleotide
  Target: LAMA2; (-) strand; PAM type: NRG; PAM sequence: AGG
agataaacagctttgacaag

SEQ ID NO: 113845 - DNA, 20 bp, Artificial Sequence
  Description of Artificial Sequence: Synthetic oligonucleotide
  Target: LAMA2; (-) strand; PAM type: NRG; PAM sequence: GAG
tagataaacagctttgacaa

SEQ ID NO: 113846 - DNA, 20 bp, Artificial Sequence
  Description of Artificial Sequence: Synthetic oligonucleotide
  Target: LAMA2; (-) strand; PAM type: NRG; PAM sequence: AAG
aatagataaacagctttgac

SEQ ID NO: 113847 - DNA, 20 bp, Artificial Sequence
  Description of Artificial Sequence: Synthetic oligonucleotide
  Target: LAMA2; (-) strand; PAM type: NRG; PAM sequence: CAG
taaacatgtcaatagataaa

SEQ ID NO: 113848 - DNA, 20 bp, Artificial Sequence
  Description of Artificial Sequence: Synthetic oligonucleotide
  Target: LAMA2; (-) strand; PAM type: NRG; PAM sequence: TAG
gttttaaataaacatgtcaa

SEQ ID NO: 113849 - DNA, 20 bp, Artificial Sequence
  Description of Artificial Sequence: Synthetic oligonucleotide
  Target: LAMA2; (-) strand; PAM type: NRG; PAM sequence: TAG
ccttcatctggcaccatagc

SEQ ID NO: 113850 - DNA, 20 bp, Artificial Sequence
  Description of Artificial Sequence: Synthetic oligonucleotide
  Target: LAMA2; (-) strand; PAM type: NRG; PAM sequence: TAG
gattccttcatctggcacca

SEQ ID NO: 113851 - DNA, 20 bp, Artificial Sequence
  Description of Artificial Sequence: Synthetic oligonucleotide
  Target: LAMA2; (-) strand; PAM type: NRG; PAM sequence: TGG
tttccagagattccttcatc

SEQ ID NO: 113852 - DNA, 20 bp, Artificial Sequence
  Description of Artificial Sequence: Synthetic oligonucleotide
  Target: LAMA2; (-) strand; PAM type: NRG; PAM sequence: GAG
ttttaaatatagtatttcca

SEQ ID NO: 113853 - DNA, 20 bp, Artificial Sequence
  Description of Artificial Sequence: Synthetic oligonucleotide
  Target: LAMA2; (-) strand; PAM type: NRG; PAM sequence: CAG
tattttaaatatagtatttc

SEQ ID NO: 113854 - DNA, 20 bp, Artificial Sequence
  Description of Artificial Sequence: Synthetic oligonucleotide
  Target: LAMA2; (-) strand; PAM type: NRG; PAM sequence: TAG
gcaaatacttattttaaata

SEQ ID NO: 113855 - DNA, 20 bp, Artificial Sequence
  Description of Artificial Sequence: Synthetic oligonucleotide
  Target: LAMA2; (-) strand; PAM type: NRG; PAM sequence: GAG
aaatgctcctgagaagctag

SEQ ID NO: 113856 - DNA, 20 bp, Artificial Sequence
  Description of Artificial Sequence: Synthetic oligonucleotide
  Target: LAMA2; (-) strand; PAM type: NRG; PAM sequence: AGG
taaaatgctcctgagaagct

SEQ ID NO: 113857 - DNA, 20 bp, Artificial Sequence
  Description of Artificial Sequence: Synthetic oligonucleotide
  Target: LAMA2; (-) strand; PAM type: NRG; PAM sequence: TAG
ttaaaatgctcctgagaagc

SEQ ID NO: 113858 - DNA, 20 bp, Artificial Sequence
  Description of Artificial Sequence: Synthetic oligonucleotide
  Target: LAMA2; (-) strand; PAM type: NRG; PAM sequence: AAG
agaattaaaatgctcctgag

SEQ ID NO: 113859 - DNA, 20 bp, Artificial Sequence
  Description of Artificial Sequence: Synthetic oligonucleotide
  Target: LAMA2; (-) strand; PAM type: NRG; PAM sequence: GAG
gtaagaattaaaatgctcct

SEQ ID NO: 113860 - DNA, 20 bp, Artificial Sequence
  Description of Artificial Sequence: Synthetic oligonucleotide
  Target: LAMA2; (-) strand; PAM type: NRG; PAM sequence: AAG
gcttttatgctaatgctagt

SEQ ID NO: 113861 - DNA, 20 bp, Artificial Sequence
  Description of Artificial Sequence: Synthetic oligonucleotide
  Target: LAMA2; (-) strand; PAM type: NRG; PAM sequence: TAG
cacagcttttatgctaatgc

SEQ ID NO: 113862 - DNA, 20 bp, Artificial Sequence
  Description of Artificial Sequence: Synthetic oligonucleotide
  Target: LAMA2; (-) strand; PAM type: NRG; PAM sequence: CAG
ttatggaggcccattgctca

SEQ ID NO: 113863 - DNA, 20 bp, Artificial Sequence
  Description of Artificial Sequence: Synthetic oligonucleotide
  Target: LAMA2; (-) strand; PAM type: NRG; PAM sequence: AGG
gtttgttcagccatttatgg

SEQ ID NO: 113864 - DNA, 20 bp, Artificial Sequence
  Description of Artificial Sequence: Synthetic oligonucleotide
  Target: LAMA2; (-) strand; PAM type: NRG; PAM sequence: GAG
ggtttgttcagccatttatg

SEQ ID NO: 113865 - DNA, 20 bp, Artificial Sequence
  Description of Artificial Sequence: Synthetic oligonucleotide
  Target: LAMA2; (-) strand; PAM type: NRG; PAM sequence: TGG
gaggtttgttcagccattta

SEQ ID NO: 113866 - DNA, 20 bp, Artificial Sequence
  Description of Artificial Sequence: Synthetic oligonucleotide
  Target: LAMA2; (-) strand; PAM type: NRG; PAM sequence: CAG
gcacatctctgaggtttgtt

SEQ ID NO: 113867 - DNA, 20 bp, Artificial Sequence
  Description of Artificial Sequence: Synthetic oligonucleotide
  Target: LAMA2; (-) strand; PAM type: NRG; PAM sequence: AGG
accagccctgcacatctctg

SEQ ID NO: 113868 - DNA, 20 bp, Artificial Sequence
  Description of Artificial Sequence: Synthetic oligonucleotide
  Target: LAMA2; (-) strand; PAM type: NRG; PAM sequence: GAG
taccagccctgcacatctct

SEQ ID NO: 113869 - DNA, 20 bp, Artificial Sequence
  Description of Artificial Sequence: Synthetic oligonucleotide
  Target: LAMA2; (-) strand; PAM type: NRG; PAM sequence: CAG
tagctctagccagaggatac

SEQ ID NO: 113870 - DNA, 20 bp, Artificial Sequence
  Description of Artificial Sequence: Synthetic oligonucleotide
  Target: LAMA2; (-) strand; PAM type: NRG; PAM sequence: AGG
aggcttttagctctagccag

SEQ ID NO: 113871 - DNA, 20 bp, Artificial Sequence
  Description of Artificial Sequence: Synthetic oligonucleotide
  Target: LAMA2; (-) strand; PAM type: NRG; PAM sequence: GAG
caggcttttagctctagcca

SEQ ID NO: 113872 - DNA, 20 bp, Artificial Sequence
  Description of Artificial Sequence: Synthetic oligonucleotide
  Target: LAMA2; (-) strand; PAM type: NRG; PAM sequence: CAG
accaggcttttagctctagc

SEQ ID NO: 113873 - DNA, 20 bp, Artificial Sequence
  Description of Artificial Sequence: Synthetic oligonucleotide
  Target: LAMA2; (-) strand; PAM type: NRG; PAM sequence: TAG
aaacaccaggcttttagctc

SEQ ID NO: 113874 - DNA, 20 bp, Artificial Sequence
  Description of Artificial Sequence: Synthetic oligonucleotide
  Target: LAMA2; (-) strand; PAM type: NRG; PAM sequence: TAG
atgccaaaacaccaggcttt

SEQ ID NO: 113875 - DNA, 20 bp, Artificial Sequence
  Description of Artificial Sequence: Synthetic oligonucleotide
  Target: LAMA2; (-) strand; PAM type: NRG; PAM sequence: AGG
ctctgaaatgccaaaacacc

SEQ ID NO: 113876 - DNA, 20 bp, Artificial Sequence
  Description of Artificial Sequence: Synthetic oligonucleotide
  Target: LAMA2; (-) strand; PAM type: NRG; PAM sequence: CAG
gctctgaaatgccaaaacac

SEQ ID NO: 113877 - DNA, 20 bp, Artificial Sequence
  Description of Artificial Sequence: Synthetic oligonucleotide
  Target: LAMA2; (-) strand; PAM type: NRG; PAM sequence: GGG
tccagaaatctggcacagct

SEQ ID NO: 113878 - DNA, 20 bp, Artificial Sequence
  Description of Artificial Sequence: Synthetic oligonucleotide
  Target: LAMA2; (-) strand; PAM type: NRG; PAM sequence: TGG
ttccagaaatctggcacagc

SEQ ID NO: 113879 - DNA, 20 bp, Artificial Sequence
  Description of Artificial Sequence: Synthetic oligonucleotide
  Target: LAMA2; (-) strand; PAM type: NRG; PAM sequence: CAG
ttctttccagaaatctggca

SEQ ID NO: 113880 - DNA, 20 bp, Artificial Sequence
  Description of Artificial Sequence: Synthetic oligonucleotide
  Target: LAMA2; (-) strand; PAM type: NRG; PAM sequence: TGG
ttatcttctttccagaaatc

SEQ ID NO: 113881 - DNA, 20 bp, Artificial Sequence
  Description of Artificial Sequence: Synthetic oligonucleotide
  Target: LAMA2; (-) strand; PAM type: NRG; PAM sequence: CAG
cggctttattatcttctttc

SEQ ID NO: 113882 - DNA, 20 bp, Artificial Sequence
  Description of Artificial Sequence: Synthetic oligonucleotide
  Target: LAMA2; (-) strand; PAM type: NRG; PAM sequence: CGG
aaaaatttcttggatcagtt

SEQ ID NO: 113883 - DNA, 20 bp, Artificial Sequence
  Description of Artificial Sequence: Synthetic oligonucleotide
  Target: LAMA2; (-) strand; PAM type: NRG; PAM sequence: CAG
gttttaaaaatttcttggat

SEQ ID NO: 113884 - DNA, 20 bp, Artificial Sequence
  Description of Artificial Sequence: Synthetic oligonucleotide
  Target: LAMA2; (-) strand; PAM type: NRG; PAM sequence: TGG
cctcggttttaaaaatttct

SEQ ID NO: 113885 - DNA, 20 bp, Artificial Sequence
  Description of Artificial Sequence: Synthetic oligonucleotide
  Target: LAMA2; (-) strand; PAM type: NRG; PAM sequence: CGG
tcttattaaaaatctagcct

SEQ ID NO: 113886 - DNA, 20 bp, Artificial Sequence
  Description of Artificial Sequence: Synthetic oligonucleotide
  Target: LAMA2; (-) strand; PAM type: NRG; PAM sequence: TAG
tatttctcttattaaaaatc

SEQ ID NO: 113887 - DNA, 20 bp, Artificial Sequence
  Description of Artificial Sequence: Synthetic oligonucleotide
  Target: LAMA2; (-) strand; PAM type: NRG; PAM sequence: TGG
ctgtatcatgataaaacgca

SEQ ID NO: 113888 - DNA, 20 bp, Artificial Sequence
  Description of Artificial Sequence: Synthetic oligonucleotide
  Target: LAMA2; (-) strand; PAM type: NRG; PAM sequence: TGG
agcaaatgtagcacaactag

SEQ ID NO: 113889 - DNA, 20 bp, Artificial Sequence
  Description of Artificial Sequence: Synthetic oligonucleotide
  Target: LAMA2; (-) strand; PAM type: NRG; PAM sequence: TAG
ctcagcaaatgtagcacaac

SEQ ID NO: 113890 - DNA, 20 bp, Artificial Sequence
  Description of Artificial Sequence: Synthetic oligonucleotide
  Target: LAMA2; (-) strand; PAM type: NRG; PAM sequence: TAG
tttagccatctcagcaaatg

SEQ ID NO: 113891 - DNA, 20 bp, Artificial Sequence
  Description of Artificial Sequence: Synthetic oligonucleotide
  Target: LAMA2; (-) strand; PAM type: NRG; PAM sequence: CAG
ccttcgctttttagccatct

SEQ ID NO: 113892 - DNA, 20 bp, Artificial Sequence
  Description of Artificial Sequence: Synthetic oligonucleotide
  Target: LAMA2; (-) strand; PAM type: NRG; PAM sequence: TAG
gaaagccagccttcgctttt

SEQ ID NO: 113893 - DNA, 20 bp, Artificial Sequence
  Description of Artificial Sequence: Synthetic oligonucleotide
  Target: LAMA2; (-) strand; PAM type: NRG; PAM sequence: CAG
acatatatttccatgaaagc

SEQ ID NO: 113894 - DNA, 20 bp, Artificial Sequence
  Description of Artificial Sequence: Synthetic oligonucleotide
  Target: LAMA2; (-) strand; PAM type: NRG; PAM sequence: AAG
attaacatatatttccatga

SEQ ID NO: 113895 - DNA, 20 bp, Artificial Sequence
  Description of Artificial Sequence: Synthetic oligonucleotide
  Target: LAMA2; (-) strand; PAM type: NRG; PAM sequence: CAG
aaacctacacagtgccatcc

SEQ ID NO: 113896 - DNA, 20 bp, Artificial Sequence
  Description of Artificial Sequence: Synthetic oligonucleotide
  Target: LAMA2; (-) strand; PAM type: NRG; PAM sequence: CAG
ggcaaaattacaaacctaca

SEQ ID NO: 113897 - DNA, 20 bp, Artificial Sequence
  Description of Artificial Sequence: Synthetic oligonucleotide
  Target: LAMA2; (-) strand; PAM type: NRG; PAM sequence: AGG
tcttgagggtcaccactcaa

SEQ ID NO: 113898 - DNA, 20 bp, Artificial Sequence
  Description of Artificial Sequence: Synthetic oligonucleotide
  Target: LAMA2; (-) strand; PAM type: NRG; PAM sequence: AAG
ttcttgagggtcaccactca

SEQ ID NO: 113899 - DNA, 20 bp, Artificial Sequence
  Description of Artificial Sequence: Synthetic oligonucleotide
  Target: LAMA2; (-) strand; PAM type: NRG; PAM sequence: GGG
cacgggtccctgtttcttga

SEQ ID NO: 113900 - DNA, 20 bp, Artificial Sequence
  Description of Artificial Sequence: Synthetic oligonucleotide
  Target: LAMA2; (-) strand; PAM type: NRG; PAM sequence: AGG
ccacgggtccctgtttcttg

SEQ ID NO: 113901 - DNA, 20 bp, Artificial Sequence
  Description of Artificial Sequence: Synthetic oligonucleotide
  Target: LAMA2; (-) strand; PAM type: NRG; PAM sequence: GAG
accacgggtccctgtttctt

SEQ ID NO: 113902 - DNA, 20 bp, Artificial Sequence
  Description of Artificial Sequence: Synthetic oligonucleotide
  Target: LAMA2; (-) strand; PAM type: NRG; PAM sequence: GGG
ctggactcaatggtaaccac

SEQ ID NO: 113903 - DNA, 20 bp, Artificial Sequence
  Description of Artificial Sequence: Synthetic oligonucleotide
  Target: LAMA2; (-) strand; PAM type: NRG; PAM sequence: CGG
actggactcaatggtaacca

SEQ ID NO: 113904 - DNA, 20 bp, Artificial Sequence
  Description of Artificial Sequence: Synthetic oligonucleotide
  Target: LAMA2; (-) strand; PAM type: NRG; PAM sequence: TGG
cataaggtgactggactcaa

SEQ ID NO: 113905 - DNA, 20 bp, Artificial Sequence
  Description of Artificial Sequence: Synthetic oligonucleotide
  Target: LAMA2; (-) strand; PAM type: NRG; PAM sequence: TGG
aaatagtcacataaggtgac

SEQ ID NO: 113906 - DNA, 20 bp, Artificial Sequence
  Description of Artificial Sequence: Synthetic oligonucleotide
  Target: LAMA2; (-) strand; PAM type: NRG; PAM sequence: AGG
aggggataaatagtcacata

SEQ ID NO: 113907 - DNA, 20 bp, Artificial Sequence
  Description of Artificial Sequence: Synthetic oligonucleotide
  Target: LAMA2; (-) strand; PAM type: NRG; PAM sequence: AAG
caggggataaatagtcacat

SEQ ID NO: 113908 - DNA, 20 bp, Artificial Sequence
  Description of Artificial Sequence: Synthetic oligonucleotide
  Target: LAMA2; (-) strand; PAM type: NRG; PAM sequence: TAG
ggacaattacaggggataaa

SEQ ID NO: 113909 - DNA, 20 bp, Artificial Sequence
  Description of Artificial Sequence: Synthetic oligonucleotide
  Target: LAMA2; (-) strand; PAM type: NRG; PAM sequence: GGG
caatattaggacaattacag

SEQ ID NO: 113910 - DNA, 20 bp, Artificial Sequence
  Description of Artificial Sequence: Synthetic oligonucleotide
  Target: LAMA2; (-) strand; PAM type: NRG; PAM sequence: GGG
tcaatattaggacaattaca

SEQ ID NO: 113911 - DNA, 20 bp, Artificial Sequence
  Description of Artificial Sequence: Synthetic oligonucleotide
  Target: LAMA2; (-) strand; PAM type: NRG; PAM sequence: AGG
ctcaatattaggacaattac

SEQ ID NO: 113912 - DNA, 20 bp, Artificial Sequence
  Description of Artificial Sequence: Synthetic oligonucleotide
  Target: LAMA2; (-) strand; PAM type: NRG; PAM sequence: CAG
cctcaatattaggacaatta

SEQ ID NO: 113913 - DNA, 20 bp, Artificial Sequence
  Description of Artificial Sequence: Synthetic oligonucleotide
  Target: LAMA2; (-) strand; PAM type: NRG; PAM sequence: AGG
gatttagcaacctcaatatt

SEQ ID NO: 113914 - DNA, 20 bp, Artificial Sequence
  Description of Artificial Sequence: Synthetic oligonucleotide
  Target: LAMA2; (-) strand; PAM type: NRG; PAM sequence: TAG
tgatttagcaacctcaatat

SEQ ID NO: 113915 - DNA, 20 bp, Artificial Sequence
  Description of Artificial Sequence: Synthetic oligonucleotide
  Target: LAMA2; (-) strand; PAM type: NRG; PAM sequence: TAG
aaccattccaaaatatgatt

SEQ ID NO: 113916 - DNA, 20 bp, Artificial Sequence
  Description of Artificial Sequence: Synthetic oligonucleotide
  Target: LAMA2; (-) strand; PAM type: NRG; PAM sequence: AAG
tattgtttcatggaaacaca

SEQ ID NO: 113917 - DNA, 20 bp, Artificial Sequence
  Description of Artificial Sequence: Synthetic oligonucleotide
  Target: LAMA2; (-) strand; PAM type: NRG; PAM sequence: TGG
ttatatagtttattgtttca

SEQ ID NO: 113918 - DNA, 20 bp, Artificial Sequence
  Description of Artificial Sequence: Synthetic oligonucleotide
  Target: LAMA2; (-) strand; PAM type: NRG; PAM sequence: TAG
aatcactcctacaagttata

SEQ ID NO: 113919 - DNA, 20 bp, Artificial Sequence
  Description of Artificial Sequence: Synthetic oligonucleotide
  Target: LAMA2; (-) strand; PAM type: NRG; PAM sequence: AAG
ctaaagtaaatcactcctac

SEQ ID NO: 113920 - DNA, 20 bp, Artificial Sequence
  Description of Artificial Sequence: Synthetic oligonucleotide
  Target: LAMA2; (-) strand; PAM type: NRG; PAM sequence: AAG
tttcagaggtcttgttacta

SEQ ID NO: 113921 - DNA, 20 bp, Artificial Sequence
  Description of Artificial Sequence: Synthetic oligonucleotide
  Target: LAMA2; (-) strand; PAM type: NRG; PAM sequence: AGG
cttatcaccatttttttcag

SEQ ID NO: 113922 - DNA, 20 bp, Artificial Sequence
  Description of Artificial Sequence: Synthetic oligonucleotide
  Target: LAMA2; (-) strand; PAM type: NRG; PAM sequence: GAG
acttatcaccatttttttca

SEQ ID NO: 113923 - DNA, 20 bp, Artificial Sequence
  Description of Artificial Sequence: Synthetic oligonucleotide
  Target: LAMA2; (-) strand; PAM type: NRG; PAM sequence: CAG
tgacttatcaccattttttt

SEQ ID NO: 113924 - DNA, 20 bp, Artificial Sequence
  Description of Artificial Sequence: Synthetic oligonucleotide
  Target: LAMA2; (-) strand; PAM type: NRG; PAM sequence: AAG
tccatattttcctttatgga

SEQ ID NO: 113925 - DNA, 20 bp, Artificial Sequence
  Description of Artificial Sequence: Synthetic oligonucleotide
  Target: LAMA2; (-) strand; PAM type: NRG; PAM sequence: TGG
tgcttccatattttccttta

SEQ ID NO: 113926 - DNA, 20 bp, Artificial Sequence
  Description of Artificial Sequence: Synthetic oligonucleotide
  Target: LAMA2; (-) strand; PAM type: NRG; PAM sequence: CAG
gagaaggtgaatttcattaa

SEQ ID NO: 113927 - DNA, 20 bp, Artificial Sequence
  Description of Artificial Sequence: Synthetic oligonucleotide
  Target: LAMA2; (-) strand; PAM type: NRG; PAM sequence: AGG
tcttgcataatgcacagaga

SEQ ID NO: 113928 - DNA, 20 bp, Artificial Sequence
  Description of Artificial Sequence: Synthetic oligonucleotide
  Target: LAMA2; (-) strand; PAM type: NRG; PAM sequence: AAG
ttcttgcataatgcacagag

SEQ ID NO: 113929 - DNA, 20 bp, Artificial Sequence
  Description of Artificial Sequence: Synthetic oligonucleotide
  Target: LAMA2; (-) strand; PAM type: NRG; PAM sequence: GAG
tttttcttgcataatgcaca

SEQ ID NO: 113930 - DNA, 20 bp, Artificial Sequence
  Description of Artificial Sequence: Synthetic oligonucleotide
  Target: LAMA2; (-) strand; PAM type: NRG; PAM sequence: CAG
tatttttcttgcataatgca

SEQ ID NO: 113931 - DNA, 20 bp, Artificial Sequence
  Description of Artificial Sequence: Synthetic oligonucleotide
  Target: LAMA2; (-) strand; PAM type: NRG; PAM sequence: GAG
aacatgcccaactgtagggt

SEQ ID NO: 113932 - DNA, 20 bp, Artificial Sequence
  Description of Artificial Sequence: Synthetic oligonucleotide
  Target: LAMA2; (-) strand; PAM type: NRG; PAM sequence: GGG
aaagaacatgcccaactgta

SEQ ID NO: 113933 - DNA, 20 bp, Artificial Sequence
  Description of Artificial Sequence: Synthetic oligonucleotide
  Target: LAMA2; (-) strand; PAM type: NRG; PAM sequence: AGG
taaagaacatgcccaactgt

SEQ ID NO: 113934 - DNA, 20 bp, Artificial Sequence
  Description of Artificial Sequence: Synthetic oligonucleotide
  Target: LAMA2; (-) strand; PAM type: NRG; PAM sequence: TAG
ataaagaacatgcccaactg

SEQ ID NO: 113935 - DNA, 20 bp, Artificial Sequence
  Description of Artificial Sequence: Synthetic oligonucleotide
  Target: LAMA2; (-) strand; PAM type: NRG; PAM sequence: AAG
tcagtcagctggttgttata

SEQ ID NO: 113936 - DNA, 20 bp, Artificial Sequence
  Description of Artificial Sequence: Synthetic oligonucleotide
  Target: LAMA2; (-) strand; PAM type: NRG; PAM sequence: TGG
ttttcgttcagtcagtcagc

SEQ ID NO: 113937 - DNA, 20 bp, Artificial Sequence
  Description of Artificial Sequence: Synthetic oligonucleotide
  Target: LAMA2; (-) strand; PAM type: NRG; PAM sequence: CAG
tttcttttcgttcagtcagt

SEQ ID NO: 113938 - DNA, 20 bp, Artificial Sequence
  Description of Artificial Sequence: Synthetic oligonucleotide
  Target: LAMA2; (-) strand; PAM type: NRG; PAM sequence: CAG
aggttttcttttcgttcagt

SEQ ID NO: 113939 - DNA, 20 bp, Artificial Sequence
  Description of Artificial Sequence: Synthetic oligonucleotide
  Target: LAMA2; (-) strand; PAM type: NRG; PAM sequence: CAG
cccaaggttttcttttcgtt

SEQ ID NO: 113940 - DNA, 20 bp, Artificial Sequence
  Description of Artificial Sequence: Synthetic oligonucleotide
  Target: LAMA2; (-) strand; PAM type: NRG; PAM sequence: AGG
ataatttttccttgttccca

SEQ ID NO: 113941 - DNA, 20 bp, Artificial Sequence
  Description of Artificial Sequence: Synthetic oligonucleotide
  Target: LAMA2; (-) strand; PAM type: NRG; PAM sequence: AAG
gataatttttccttgttccc

SEQ ID NO: 113942 - DNA, 20 bp, Artificial Sequence
  Description of Artificial Sequence: Synthetic oligonucleotide
  Target: LAMA2; (-) strand; PAM type: NRG; PAM sequence: TGG
tccacccccgcactcctttc

SEQ ID NO: 113943 - DNA, 20 bp, Artificial Sequence
  Description of Artificial Sequence: Synthetic oligonucleotide
  Target: LAMA2; (-) strand; PAM type: NRG; PAM sequence: AGG
caggtgatttatttcatgtc

SEQ ID NO: 113944 - DNA, 20 bp, Artificial Sequence
  Description of Artificial Sequence: Synthetic oligonucleotide
  Target: LAMA2; (-) strand; PAM type: NRG; PAM sequence: CAG
tcaggtgatttatttcatgt

SEQ ID NO: 113945 - DNA, 20 bp, Artificial Sequence
  Description of Artificial Sequence: Synthetic oligonucleotide
  Target: LAMA2; (-) strand; PAM type: NRG; PAM sequence: AGG
agaccttggcagtgtatatc

SEQ ID NO: 113946 - DNA, 20 bp, Artificial Sequence
  Description of Artificial Sequence: Synthetic oligonucleotide
  Target: LAMA2; (-) strand; PAM type: NRG; PAM sequence: CAG
tagaccttggcagtgtatat

SEQ ID NO: 113947 - DNA, 20 bp, Artificial Sequence
  Description of Artificial Sequence: Synthetic oligonucleotide
  Target: LAMA2; (-) strand; PAM type: NRG; PAM sequence: CAG
aaaaacaaattagaccttgg

SEQ ID NO: 113948 - DNA, 20 bp, Artificial Sequence
  Description of Artificial Sequence: Synthetic oligonucleotide
  Target: LAMA2; (-) strand; PAM type: NRG; PAM sequence: TGG
tggaaaaacaaattagacct

SEQ ID NO: 113949 - DNA, 20 bp, Artificial Sequence
  Description of Artificial Sequence: Synthetic oligonucleotide
  Target: LAMA2; (-) strand; PAM type: NRG; PAM sequence: TAG
aaacaggtggaaaaacaaat

SEQ ID NO: 113950 - DNA, 20 bp, Artificial Sequence
  Description of Artificial Sequence: Synthetic oligonucleotide
  Target: LAMA2; (-) strand; PAM type: NRG; PAM sequence: TGG
atggcatgaggaaaaacagg

SEQ ID NO: 113951 - DNA, 20 bp, Artificial Sequence
  Description of Artificial Sequence: Synthetic oligonucleotide
  Target: LAMA2; (-) strand; PAM type: NRG; PAM sequence: AGG
cacatggcatgaggaaaaac

SEQ ID NO: 113952 - DNA, 20 bp, Artificial Sequence
  Description of Artificial Sequence: Synthetic oligonucleotide
  Target: LAMA2; (-) strand; PAM type: NRG; PAM sequence: CAG
acacatggcatgaggaaaaa

SEQ ID NO: 113953 - DNA, 20 bp, Artificial Sequence
  Description of Artificial Sequence: Synthetic oligonucleotide
  Target: LAMA2; (-) strand; PAM type: NRG; PAM sequence: AGG
aatgaaaaacacatggcatg

SEQ ID NO: 113954 - DNA, 20 bp, Artificial Sequence
  Description of Artificial Sequence: Synthetic oligonucleotide
  Target: LAMA2; (-) strand; PAM type: NRG; PAM sequence: GAG
taatgaaaaacacatggcat

SEQ ID NO: 113955 - DNA, 20 bp, Artificial Sequence
  Description of Artificial Sequence: Synthetic oligonucleotide
  Target: LAMA2; (-) strand; PAM type: NRG; PAM sequence: TGG
ttatcttaatgaaaaacaca

SEQ ID NO: 113956 - DNA, 20 bp, Artificial Sequence
  Description of Artificial Sequence: Synthetic oligonucleotide
  Target: LAMA2; (-) strand; PAM type: NRG; PAM sequence: AAG
cctcattgtcccatgatgcc

SEQ ID NO: 113957 - DNA, 20 bp, Artificial Sequence
  Description of Artificial Sequence: Synthetic oligonucleotide
  Target: LAMA2; (-) strand; PAM type: NRG; PAM sequence: GGG
tcaatatattgtagttgata

SEQ ID NO: 113958 - DNA, 20 bp, Artificial Sequence
  Description of Artificial Sequence: Synthetic oligonucleotide
  Target: LAMA2; (-) strand; PAM type: NRG; PAM sequence: AGG
atcaatatattgtagttgat

SEQ ID NO: 113959 - DNA, 20 bp, Artificial Sequence
  Description of Artificial Sequence: Synthetic oligonucleotide
  Target: LAMA2; (-) strand; PAM type: NRG; PAM sequence: TAG
catcaatatattgtagttga

SEQ ID NO: 113960 - DNA, 20 bp, Artificial Sequence
  Description of Artificial Sequence: Synthetic oligonucleotide
  Target: LAMA2; (-) strand; PAM type: NRG; PAM sequence: TAG
cagtcggcatcaatatattg

SEQ ID NO: 113961 - DNA, 20 bp, Artificial Sequence
  Description of Artificial Sequence: Synthetic oligonucleotide
  Target: LAMA2; (-) strand; PAM type: NRG; PAM sequence: CGG
atcggtaaaaactgtccagt

SEQ ID NO: 113962 - DNA, 20 bp, Artificial Sequence
  Description of Artificial Sequence: Synthetic oligonucleotide
  Target: LAMA2; (-) strand; PAM type: NRG; PAM sequence: CAG
cagcatcggtaaaaactgtc

SEQ ID NO: 113963 - DNA, 20 bp, Artificial Sequence
  Description of Artificial Sequence: Synthetic oligonucleotide
  Target: LAMA2; (-) strand; PAM type: NRG; PAM sequence: CGG
tatgtggtggtaatcagcat

SEQ ID NO: 113964 - DNA, 20 bp, Artificial Sequence
  Description of Artificial Sequence: Synthetic oligonucleotide
  Target: LAMA2; (-) strand; PAM type: NRG; PAM sequence: CAG
attctttatgtggtggtaat

SEQ ID NO: 113965 - DNA, 20 bp, Artificial Sequence
  Description of Artificial Sequence: Synthetic oligonucleotide
  Target: LAMA2; (-) strand; PAM type: NRG; PAM sequence: TGG
aaagataattctttatgtgg

SEQ ID NO: 113966 - DNA, 20 bp, Artificial Sequence
  Description of Artificial Sequence: Synthetic oligonucleotide
  Target: LAMA2; (-) strand; PAM type: NRG; PAM sequence: TGG
gaaaaagataattctttatg

SEQ ID NO: 113967 - DNA, 20 bp, Artificial Sequence
  Description of Artificial Sequence: Synthetic oligonucleotide
  Target: LAMA2; (-) strand; PAM type: NRG; PAM sequence: AAG
gaaggtatatagaagtgaaa

SEQ ID NO: 113968 - DNA, 20 bp, Artificial Sequence
  Description of Artificial Sequence: Synthetic oligonucleotide
  Target: LAMA2; (-) strand; PAM type: NRG; PAM sequence: AAG
tgaatagtgaaggtatatag

SEQ ID NO: 113969 - DNA, 20 bp, Artificial Sequence
  Description of Artificial Sequence: Synthetic oligonucleotide
  Target: LAMA2; (-) strand; PAM type: NRG; PAM sequence: TAG
ttttgaatagtgaaggtata

SEQ ID NO: 113970 - DNA, 20 bp, Artificial Sequence
  Description of Artificial Sequence: Synthetic oligonucleotide
  Target: LAMA2; (-) strand; PAM type: NRG; PAM sequence: AGG
gctactattttgaatagtga

SEQ ID NO: 113971 - DNA, 20 bp, Artificial Sequence
  Description of Artificial Sequence: Synthetic oligonucleotide
  Target: LAMA2; (-) strand; PAM type: NRG; PAM sequence: AAG
ggctactattttgaatagtg

SEQ ID NO: 113972 - DNA, 20 bp, Artificial Sequence
  Description of Artificial Sequence: Synthetic oligonucleotide
  Target: LAMA2; (-) strand; PAM type: NRG; PAM sequence: TAG
cttgtggctactattttgaa

SEQ ID NO: 113973 - DNA, 20 bp, Artificial Sequence
  Description of Artificial Sequence: Synthetic oligonucleotide
  Target: LAMA2; (-) strand; PAM type: NRG; PAM sequence: TGG
taaatagctactgtgacttg

SEQ ID NO: 113974 - DNA, 20 bp, Artificial Sequence
  Description of Artificial Sequence: Synthetic oligonucleotide
  Target: LAMA2; (-) strand; PAM type: NRG; PAM sequence: TAG
tgatttaatttacaattaaa

SEQ ID NO: 113975 - DNA, 20 bp, Artificial Sequence
  Description of Artificial Sequence: Synthetic oligonucleotide
  Target: LAMA2; (-) strand; PAM type: NRG; PAM sequence: GAG
gaaatgtagcttgtctcaat

SEQ ID NO: 113976 - DNA, 20 bp, Artificial Sequence
  Description of Artificial Sequence: Synthetic oligonucleotide
  Target: LAMA2; (-) strand; PAM type: NRG; PAM sequence: TAG
ggctattaggacttgaaatg

SEQ ID NO: 113977 - DNA, 20 bp, Artificial Sequence
  Description of Artificial Sequence: Synthetic oligonucleotide
  Target: LAMA2; (-) strand; PAM type: NRG; PAM sequence: AGG
actagccacatgtggctatt

SEQ ID NO: 113978 - DNA, 20 bp, Artificial Sequence
  Description of Artificial Sequence: Synthetic oligonucleotide
  Target: LAMA2; (-) strand; PAM type: NRG; PAM sequence: TAG
tactagccacatgtggctat

SEQ ID NO: 113979 - DNA, 20 bp, Artificial Sequence
  Description of Artificial Sequence: Synthetic oligonucleotide
  Target: LAMA2; (-) strand; PAM type: NRG; PAM sequence: TGG
cagtagttactagccacatg

SEQ ID NO: 113980 - DNA, 20 bp, Artificial Sequence
  Description of Artificial Sequence: Synthetic oligonucleotide
  Target: LAMA2; (-) strand; PAM type: NRG; PAM sequence: TAG
ctgtccaaatcagtagttac

SEQ ID NO: 113981 - DNA, 20 bp, Artificial Sequence
  Description of Artificial Sequence: Synthetic oligonucleotide
  Target: LAMA2; (-) strand; PAM type: NRG; PAM sequence: TAG
ttctgcactgtccaaatcag

SEQ ID NO: 113982 - DNA, 20 bp, Artificial Sequence
  Description of Artificial Sequence: Synthetic oligonucleotide
  Target: LAMA2; (-) strand; PAM type: NRG; PAM sequence: CAG
gttttctgcactgtccaaat

SEQ ID NO: 113983 - DNA, 20 bp, Artificial Sequence
  Description of Artificial Sequence: Synthetic oligonucleotide
  Target: LAMA2; (-) strand; PAM type: NRG; PAM sequence: TGG
cacagaacttcctgtgatga

SEQ ID NO: 113984 - DNA, 20 bp, Artificial Sequence
  Description of Artificial Sequence: Synthetic oligonucleotide
  Target: LAMA2; (-) strand; PAM type: NRG; PAM sequence: CAG
attataacagtgctattcca

SEQ ID NO: 113985 - DNA, 20 bp, Artificial Sequence
  Description of Artificial Sequence: Synthetic oligonucleotide
  Target: LAMA2; (-) strand; PAM type: NRG; PAM sequence: CAG
tgatacttctttaattataa

SEQ ID NO: 113986 - DNA, 20 bp, Artificial Sequence
  Description of Artificial Sequence: Synthetic oligonucleotide
  Target: LAMA2; (-) strand; PAM type: NRG; PAM sequence: CAG
aacaaaggctatcagaatgt

SEQ ID NO: 113987 - DNA, 20 bp, Artificial Sequence
  Description of Artificial Sequence: Synthetic oligonucleotide
  Target: LAMA2; (-) strand; PAM type: NRG; PAM sequence: CAG
gctcaacaaacaaaggctat

SEQ ID NO: 113988 - DNA, 20 bp, Artificial Sequence
  Description of Artificial Sequence: Synthetic oligonucleotide
  Target: LAMA2; (-) strand; PAM type: NRG; PAM sequence: AGG
agtaagtgctcaacaaacaa

SEQ ID NO: 113989 - DNA, 20 bp, Artificial Sequence
  Description of Artificial Sequence: Synthetic oligonucleotide
  Target: LAMA2; (-) strand; PAM type: NRG; PAM sequence: AAG
cagtaagtgctcaacaaaca

SEQ ID NO: 113990 - DNA, 20 bp, Artificial Sequence
  Description of Artificial Sequence: Synthetic oligonucleotide
  Target: LAMA2; (-) strand; PAM type: NRG; PAM sequence: AAG
ggaatagcactgcacacagt

SEQ ID NO: 113991 - DNA, 20 bp, Artificial Sequence
  Description of Artificial Sequence: Synthetic oligonucleotide
  Target: LAMA2; (-) strand; PAM type: NRG; PAM sequence: CAG
ttaaggaatagcactgcaca

SEQ ID NO: 113992 - DNA, 20 bp, Artificial Sequence
  Description of Artificial Sequence: Synthetic oligonucleotide
  Target: LAMA2; (-) strand; PAM type: NRG; PAM sequence: TAG
aggtttaataaattaaggaa

SEQ ID NO: 113993 - DNA, 20 bp, Artificial Sequence
  Description of Artificial Sequence: Synthetic oligonucleotide
  Target: LAMA2; (-) strand; PAM type: NRG; PAM sequence: AGG
tgcaaaggtttaataaatta

SEQ ID NO: 113994 - DNA, 20 bp, Artificial Sequence
  Description of Artificial Sequence: Synthetic oligonucleotide
  Target: LAMA2; (-) strand; PAM type: NRG; PAM sequence: AAG
ttgcaaaggtttaataaatt

SEQ ID NO: 113995 - DNA, 20 bp, Artificial Sequence
  Description of Artificial Sequence: Synthetic oligonucleotide
  Target: LAMA2; (-) strand; PAM type: NRG; PAM sequence: AGG
cctacataatcaaattgcaa

SEQ ID NO: 113996 - DNA, 20 bp, Artificial Sequence
  Description of Artificial Sequence: Synthetic oligonucleotide
  Target: LAMA2; (-) strand; PAM type: NRG; PAM sequence: AAG
acctacataatcaaattgca

SEQ ID NO: 113997 - DNA, 20 bp, Artificial Sequence
  Description of Artificial Sequence: Synthetic oligonucleotide
  Target: LAMA2; (-) strand; PAM type: NRG; PAM sequence: TAG
gggcatgataataataatca

SEQ ID NO: 113998 - DNA, 20 bp, Artificial Sequence
  Description of Artificial Sequence: Synthetic oligonucleotide
  Target: LAMA2; (-) strand; PAM type: NRG; PAM sequence: GGG
agtgttcttatatgtgaaat

SEQ ID NO: 113999 - DNA, 20 bp, Artificial Sequence
  Description of Artificial Sequence: Synthetic oligonucleotide
  Target: LAMA2; (-) strand; PAM type: NRG; PAM sequence: TGG
cagtgttcttatatgtgaaa

SEQ ID NO: 114000 - DNA, 20 bp, Artificial Sequence
  Description of Artificial Sequence: Synthetic oligonucleotide
  Target: LAMA2; (-) strand; PAM type: NRG; PAM sequence: CAG
gatctaagttctccaagact

SEQ ID NO: 114001 - DNA, 20 bp, Artificial Sequence
  Description of Artificial Sequence: Synthetic oligonucleotide
  Target: LAMA2; (-) strand; PAM type: NRG; PAM sequence: AAG
gcaagtgatctaagttctcc

SEQ ID NO: 114002 - DNA, 20 bp, Artificial Sequence
  Description of Artificial Sequence: Synthetic oligonucleotide
  Target: LAMA2; (-) strand; PAM type: NRG; PAM sequence: AAG
ccagatgttgcaagtgatct

SEQ ID NO: 114003 - DNA, 20 bp, Artificial Sequence
  Description of Artificial Sequence: Synthetic oligonucleotide
  Target: LAMA2; (-) strand; PAM type: NRG; PAM sequence: AAG
cccttgagtccagatgttgc

SEQ ID NO: 114004 - DNA, 20 bp, Artificial Sequence
  Description of Artificial Sequence: Synthetic oligonucleotide
  Target: LAMA2; (-) strand; PAM type: NRG; PAM sequence: CAG
gaagtccttgcccttgagtc

SEQ ID NO: 114005 - DNA, 20 bp, Artificial Sequence
  Description of Artificial Sequence: Synthetic oligonucleotide
  Target: LAMA2; (-) strand; PAM type: NRG; PAM sequence: GAG
gaaatgaagtccttgccctt

SEQ ID NO: 114006 - DNA, 20 bp, Artificial Sequence
  Description of Artificial Sequence: Synthetic oligonucleotide
  Target: LAMA2; (-) strand; PAM type: NRG; PAM sequence: AAG
tgccagcagattaggaaatg

SEQ ID NO: 114007 - DNA, 20 bp, Artificial Sequence
  Description of Artificial Sequence: Synthetic oligonucleotide
  Target: LAMA2; (-) strand; PAM type: NRG; PAM sequence: AGG
ggcaagtgtgccagcagatt

SEQ ID NO: 114008 - DNA, 20 bp, Artificial Sequence
  Description of Artificial Sequence: Synthetic oligonucleotide
  Target: LAMA2; (-) strand; PAM type: NRG; PAM sequence: TAG
gggcaagtgtgccagcagat

SEQ ID NO: 114009 - DNA, 20 bp, Artificial Sequence
  Description of Artificial Sequence: Synthetic oligonucleotide
  Target: LAMA2; (-) strand; PAM type: NRG; PAM sequence: CAG
aaatggggcaagtgtgccag

SEQ ID NO: 114010 - DNA, 20 bp, Artificial Sequence
  Description of Artificial Sequence: Synthetic oligonucleotide
  Target: LAMA2; (-) strand; PAM type: NRG; PAM sequence: CAG
ataaaatggggcaagtgtgc

SEQ ID NO: 114011 - DNA, 20 bp, Artificial Sequence
  Description of Artificial Sequence: Synthetic oligonucleotide
  Target: LAMA2; (-) strand; PAM type: NRG; PAM sequence: AAG
actacttcataaaatggggc

SEQ ID NO: 114012 - DNA, 20 bp, Artificial Sequence
  Description of Artificial Sequence: Synthetic oligonucleotide
  Target: LAMA2; (-) strand; PAM type: NRG; PAM sequence: GGG
gcatactacttcataaaatg

SEQ ID NO: 114013 - DNA, 20 bp, Artificial Sequence
  Description of Artificial Sequence: Synthetic oligonucleotide
  Target: LAMA2; (-) strand; PAM type: NRG; PAM sequence: GGG
tgcatactacttcataaaat

SEQ ID NO: 114014 - DNA, 20 bp, Artificial Sequence
  Description of Artificial Sequence: Synthetic oligonucleotide
  Target: LAMA2; (-) strand; PAM type: NRG; PAM sequence: TGG
ttgcatactacttcataaaa

SEQ ID NO: 114015 - DNA, 20 bp, Artificial Sequence
  Description of Artificial Sequence: Synthetic oligonucleotide
  Target: LAMA2; (-) strand; PAM type: NRG; PAM sequence: AAG
attagaacaataacaaaata

SEQ ID NO: 114016 - DNA, 20 bp, Artificial Sequence
  Description of Artificial Sequence: Synthetic oligonucleotide
  Target: LAMA2; (-) strand; PAM type: NRG; PAM sequence: TAG
ccaaagtctgtattctacat

SEQ ID NO: 114017 - DNA, 20 bp, Artificial Sequence
  Description of Artificial Sequence: Synthetic oligonucleotide
  Target: LAMA2; (-) strand; PAM type: NRG; PAM sequence: AAG
tagtttacagattgacccca

SEQ ID NO: 114018 - DNA, 20 bp, Artificial Sequence
  Description of Artificial Sequence: Synthetic oligonucleotide
  Target: LAMA2; (-) strand; PAM type: NRG; PAM sequence: CAG
taacagattaatttagttta

SEQ ID NO: 114019 - DNA, 20 bp, Artificial Sequence
  Description of Artificial Sequence: Synthetic oligonucleotide
  Target: LAMA2; (-) strand; PAM type: NRG; PAM sequence: TAG
ttttttttaacagattaatt

SEQ ID NO: 114020 - DNA, 20 bp, Artificial Sequence
  Description of Artificial Sequence: Synthetic oligonucleotide
  Target: LAMA2; (-) strand; PAM type: NRG; PAM sequence: CAG
aaaaaaatgtttttttttaa

SEQ ID NO: 114021 - DNA, 20 bp, Artificial Sequence
  Description of Artificial Sequence: Synthetic oligonucleotide
  Target: LAMA2; (-) strand; PAM type: NRG; PAM sequence: GAG
tccagcctgggctacagagt

SEQ ID NO: 114022 - DNA, 20 bp, Artificial Sequence
  Description of Artificial Sequence: Synthetic oligonucleotide
  Target: LAMA2; (-) strand; PAM type: NRG; PAM sequence: GAG
gcactccagcctgggctaca

SEQ ID NO: 114023 - DNA, 20 bp, Artificial Sequence
  Description of Artificial Sequence: Synthetic oligonucleotide
  Target: LAMA2; (-) strand; PAM type: NRG; PAM sequence: CAG
ctgcactccagcctgggcta

SEQ ID NO: 114024 - DNA, 20 bp, Artificial Sequence
  Description of Artificial Sequence: Synthetic oligonucleotide
  Target: LAMA2; (-) strand; PAM type: NRG; PAM sequence: GGG
gtgccactgcactccagcct

SEQ ID NO: 114025 - DNA, 20 bp, Artificial Sequence
  Description of Artificial Sequence: Synthetic oligonucleotide
  Target: LAMA2; (-) strand; PAM type: NRG; PAM sequence: TGG
tgtgccactgcactccagcc

SEQ ID NO: 114026 - DNA, 20 bp, Artificial Sequence
  Description of Artificial Sequence: Synthetic oligonucleotide
  Target: LAMA2; (-) strand; PAM type: NRG; PAM sequence: CAG
atggttgtgccactgcactc

SEQ ID NO: 114027 - DNA, 20 bp, Artificial Sequence
  Description of Artificial Sequence: Synthetic oligonucleotide
  Target: LAMA2; (-) strand; PAM type: NRG; PAM sequence: TGG
gccaaggctgcagtgaatta

SEQ ID NO: 114028 - DNA, 20 bp, Artificial Sequence
  Description of Artificial Sequence: Synthetic oligonucleotide
  Target: LAMA2; (-) strand; PAM type: NRG; PAM sequence: CAG
agcccaggaggccaaggctg

SEQ ID NO: 114029 - DNA, 20 bp, Artificial Sequence
  Description of Artificial Sequence: Synthetic oligonucleotide
  Target: LAMA2; (-) strand; PAM type: NRG; PAM sequence: AGG
cttttgagcccaggaggcca

SEQ ID NO: 114030 - DNA, 20 bp, Artificial Sequence
  Description of Artificial Sequence: Synthetic oligonucleotide
  Target: LAMA2; (-) strand; PAM type: NRG; PAM sequence: AAG
tcttttgagcccaggaggcc

SEQ ID NO: 114031 - DNA, 20 bp, Artificial Sequence
  Description of Artificial Sequence: Synthetic oligonucleotide
  Target: LAMA2; (-) strand; PAM type: NRG; PAM sequence: AGG
gaggatcttttgagcccagg

SEQ ID NO: 114032 - DNA, 20 bp, Artificial Sequence
  Description of Artificial Sequence: Synthetic oligonucleotide
  Target: LAMA2; (-) strand; PAM type: NRG; PAM sequence: GAG
agaggatcttttgagcccag

SEQ ID NO: 114033 - DNA, 20 bp, Artificial Sequence
  Description of Artificial Sequence: Synthetic oligonucleotide
  Target: LAMA2; (-) strand; PAM type: NRG; PAM sequence: AGG
agagaggatcttttgagccc

SEQ ID NO: 114034 - DNA, 20 bp, Artificial Sequence
  Description of Artificial Sequence: Synthetic oligonucleotide
  Target: LAMA2; (-) strand; PAM type: NRG; PAM sequence: CAG
gagagaggatcttttgagcc

SEQ ID NO: 114035 - DNA, 20 bp, Artificial Sequence
  Description of Artificial Sequence: Synthetic oligonucleotide
  Target: LAMA2; (-) strand; PAM type: NRG; PAM sequence: GAG
ctgaggagagaggatctttt

SEQ ID NO: 114036 - DNA, 20 bp, Artificial Sequence
  Description of Artificial Sequence: Synthetic oligonucleotide
  Target: LAMA2; (-) strand; PAM type: NRG; PAM sequence: AGG
cttggagatgctgaggagag

SEQ ID NO: 114037 - DNA, 20 bp, Artificial Sequence
  Description of Artificial Sequence: Synthetic oligonucleotide
  Target: LAMA2; (-) strand; PAM type: NRG; PAM sequence: GAG
acttggagatgctgaggaga

SEQ ID NO: 114038 - DNA, 20 bp, Artificial Sequence
  Description of Artificial Sequence: Synthetic oligonucleotide
  Target: LAMA2; (-) strand; PAM type: NRG; PAM sequence: GAG
ttacttggagatgctgagga

SEQ ID NO: 114039 - DNA, 20 bp, Artificial Sequence
  Description of Artificial Sequence: Synthetic oligonucleotide
  Target: LAMA2; (-) strand; PAM type: NRG; PAM sequence: GAG
agttacttggagatgctgag

SEQ ID NO: 114040 - DNA, 20 bp, Artificial Sequence
  Description of Artificial Sequence: Synthetic oligonucleotide
  Target: LAMA2; (-) strand; PAM type: NRG; PAM sequence: AGG
ccagttacttggagatgctg

SEQ ID NO: 114041 - DNA, 20 bp, Artificial Sequence
  Description of Artificial Sequence: Synthetic oligonucleotide
  Target: LAMA2; (-) strand; PAM type: NRG; PAM sequence: GAG
cccagttacttggagatgct

SEQ ID NO: 114042 - DNA, 20 bp, Artificial Sequence
  Description of Artificial Sequence: Synthetic oligonucleotide
  Target: LAMA2; (-) strand; PAM type: NRG; PAM sequence: GAG
cctggagtcccagttacttg

SEQ ID NO: 114043 - DNA, 20 bp, Artificial Sequence
  Description of Artificial Sequence: Synthetic oligonucleotide
  Target: LAMA2; (-) strand; PAM type: NRG; PAM sequence: TGG
tgcctggagtcccagttact

SEQ ID NO: 114044 - DNA, 20 bp, Artificial Sequence
  Description of Artificial Sequence: Synthetic oligonucleotide
  Target: LAMA2; (-) strand; PAM type: NRG; PAM sequence: CAG
ttggtgtgtgcctggagtcc

SEQ ID NO: 114045 - DNA, 20 bp, Artificial Sequence
  Description of Artificial Sequence: Synthetic oligonucleotide
  Target: LAMA2; (-) strand; PAM type: NRG; PAM sequence: GAG
ggcatgttggtgtgtgcctg

SEQ ID NO: 114046 - DNA, 20 bp, Artificial Sequence
  Description of Artificial Sequence: Synthetic oligonucleotide
  Target: LAMA2; (-) strand; PAM type: NRG; PAM sequence: TGG
tgggcatgttggtgtgtgcc

SEQ ID NO: 114047 - DNA, 20 bp, Artificial Sequence
  Description of Artificial Sequence: Synthetic oligonucleotide
  Target: LAMA2; (-) strand; PAM type: NRG; PAM sequence: TGG
aaaaaagtagctgggcatgt

SEQ ID NO: 114048 - DNA, 20 bp, Artificial Sequence
  Description of Artificial Sequence: Synthetic oligonucleotide
  Target: LAMA2; (-) strand; PAM type: NRG; PAM sequence: GGG
cccctccaaaaaaagtagct

SEQ ID NO: 114049 - DNA, 20 bp, Artificial Sequence
  Description of Artificial Sequence: Synthetic oligonucleotide
  Target: LAMA2; (-) strand; PAM type: NRG; PAM sequence: TGG
tcccctccaaaaaaagtagc

SEQ ID NO: 114050 - DNA, 20 bp, Artificial Sequence
  Description of Artificial Sequence: Synthetic oligonucleotide
  Target: LAMA2; (-) strand; PAM type: NRG; PAM sequence: TAG
gccctcccctccaaaaaaag

SEQ ID NO: 114051 - DNA, 20 bp, Artificial Sequence
  Description of Artificial Sequence: Synthetic oligonucleotide
  Target: LAMA2; (-) strand; PAM type: NRG; PAM sequence: AAG
tttgccctcccctccaaaaa

SEQ ID NO: 114052 - DNA, 20 bp, Artificial Sequence
  Description of Artificial Sequence: Synthetic oligonucleotide
  Target: LAMA2; (-) strand; PAM type: NRG; PAM sequence: GAG
ccagcctgaggcaacagagt

SEQ ID NO: 114053 - DNA, 20 bp, Artificial Sequence
  Description of Artificial Sequence: Synthetic oligonucleotide
  Target: LAMA2; (-) strand; PAM type: NRG; PAM sequence: GAG
aagaccagcctgaggcaaca

SEQ ID NO: 114054 - DNA, 20 bp, Artificial Sequence
  Description of Artificial Sequence: Synthetic oligonucleotide
  Target: LAMA2; (-) strand; PAM type: NRG; PAM sequence: CAG
acaagaccagcctgaggcaa

SEQ ID NO: 114055 - DNA, 20 bp, Artificial Sequence
  Description of Artificial Sequence: Synthetic oligonucleotide
  Target: LAMA2; (-) strand; PAM type: NRG; PAM sequence: AGG
ttcaagacaagaccagcctg

SEQ ID NO: 114056 - DNA, 20 bp, Artificial Sequence
  Description of Artificial Sequence: Synthetic oligonucleotide
  Target: LAMA2; (-) strand; PAM type: NRG; PAM sequence: GAG
gttcaagacaagaccagcct

SEQ ID NO: 114057 - DNA, 20 bp, Artificial Sequence
  Description of Artificial Sequence: Synthetic oligonucleotide
  Target: LAMA2; (-) strand; PAM type: NRG; PAM sequence: CAG
ccacgagttcaagacaagac

SEQ ID NO: 114058 - DNA, 20 bp, Artificial Sequence
  Description of Artificial Sequence: Synthetic oligonucleotide
  Target: LAMA2; (-) strand; PAM type: NRG; PAM sequence: AAG
tgaggccacgagttcaagac

SEQ ID NO: 114059 - DNA, 20 bp, Artificial Sequence
  Description of Artificial Sequence: Synthetic oligonucleotide
  Target: LAMA2; (-) strand; PAM type: NRG; PAM sequence: AAG
tcgcttgaggccacgagttc

SEQ ID NO: 114060 - DNA, 20 bp, Artificial Sequence
  Description of Artificial Sequence: Synthetic oligonucleotide
  Target: LAMA2; (-) strand; PAM type: NRG; PAM sequence: GAG
ggaggatcgcttgaggccac

SEQ ID NO: 114061 - DNA, 20 bp, Artificial Sequence
  Description of Artificial Sequence: Synthetic oligonucleotide
  Target: LAMA2; (-) strand; PAM type: NRG; PAM sequence: AGG
cgaagagggaggatcgcttg

SEQ ID NO: 114062 - DNA, 20 bp, Artificial Sequence
  Description of Artificial Sequence: Synthetic oligonucleotide
  Target: LAMA2; (-) strand; PAM type: NRG; PAM sequence: GAG
ccgaagagggaggatcgctt

SEQ ID NO: 114063 - DNA, 20 bp, Artificial Sequence
  Description of Artificial Sequence: Synthetic oligonucleotide
  Target: LAMA2; (-) strand; PAM type: NRG; PAM sequence: AGG
ttttgggaggccgaagaggg

SEQ ID NO: 114064 - DNA, 20 bp, Artificial Sequence
  Description of Artificial Sequence: Synthetic oligonucleotide
  Target: LAMA2; (-) strand; PAM type: NRG; PAM sequence: GAG
attttgggaggccgaagagg

SEQ ID NO: 114065 - DNA, 20 bp, Artificial Sequence
  Description of Artificial Sequence: Synthetic oligonucleotide
  Target: LAMA2; (-) strand; PAM type: NRG; PAM sequence: GGG
gcattttgggaggccgaaga

SEQ ID NO: 114066 - DNA, 20 bp, Artificial Sequence
  Description of Artificial Sequence: Synthetic oligonucleotide
  Target: LAMA2; (-) strand; PAM type: NRG; PAM sequence: AGG
tgcattttgggaggccgaag

SEQ ID NO: 114067 - DNA, 20 bp, Artificial Sequence
  Description of Artificial Sequence: Synthetic oligonucleotide
  Target: LAMA2; (-) strand; PAM type: NRG; PAM sequence: GAG
ctgcattttgggaggccgaa

SEQ ID NO: 114068 - DNA, 20 bp, Artificial Sequence
  Description of Artificial Sequence: Synthetic oligonucleotide
  Target: LAMA2; (-) strand; PAM type: NRG; PAM sequence: AAG
ccctgcattttgggaggccg

SEQ ID NO: 114069 - DNA, 20 bp, Artificial Sequence
  Description of Artificial Sequence: Synthetic oligonucleotide
  Target: LAMA2; (-) strand; PAM type: NRG; PAM sequence: AGG
tgtaatccctgcattttggg

SEQ ID NO: 114070 - DNA, 20 bp, Artificial Sequence
  Description of Artificial Sequence: Synthetic oligonucleotide
  Target: LAMA2; (-) strand; PAM type: NRG; PAM sequence: GAG
ctgtaatccctgcattttgg

SEQ ID NO: 114071 - DNA, 20 bp, Artificial Sequence
  Description of Artificial Sequence: Synthetic oligonucleotide
  Target: LAMA2; (-) strand; PAM type: NRG; PAM sequence: GGG
tcctgtaatccctgcatttt

SEQ ID NO: 114072 - DNA, 20 bp, Artificial Sequence
  Description of Artificial Sequence: Synthetic oligonucleotide
  Target: LAMA2; (-) strand; PAM type: NRG; PAM sequence: TGG
ttcctgtaatccctgcattt

SEQ ID NO: 114073 - DNA, 20 bp, Artificial Sequence
  Description of Artificial Sequence: Synthetic oligonucleotide
  Target: LAMA2; (-) strand; PAM type: NRG; PAM sequence: TGG
ggtttactggccgagtgtag

SEQ ID NO: 114074 - DNA, 20 bp, Artificial Sequence
  Description of Artificial Sequence: Synthetic oligonucleotide
  Target: LAMA2; (-) strand; PAM type: NRG; PAM sequence: TAG
ttaggtttactggccgagtg

SEQ ID NO: 114075 - DNA, 20 bp, Artificial Sequence
  Description of Artificial Sequence: Synthetic oligonucleotide
  Target: LAMA2; (-) strand; PAM type: NRG; PAM sequence: GAG
aaaaattaggtttactggcc

SEQ ID NO: 114076 - DNA, 20 bp, Artificial Sequence
  Description of Artificial Sequence: Synthetic oligonucleotide
  Target: LAMA2; (-) strand; PAM type: NRG; PAM sequence: TGG
tgtttaaaaattaggtttac

SEQ ID NO: 114077 - DNA, 20 bp, Artificial Sequence
  Description of Artificial Sequence: Synthetic oligonucleotide
  Target: LAMA2; (-) strand; PAM type: NRG; PAM sequence: AGG
aaaacagatgtttaaaaatt

SEQ ID NO: 114078 - DNA, 20 bp, Artificial Sequence
  Description of Artificial Sequence: Synthetic oligonucleotide
  Target: LAMA2; (-) strand; PAM type: NRG; PAM sequence: TAG
aaaaacagatgtttaaaaat

SEQ ID NO: 114079 - DNA, 20 bp, Artificial Sequence
  Description of Artificial Sequence: Synthetic oligonucleotide
  Target: LAMA2; (-) strand; PAM type: NRG; PAM sequence: CAG
ggattatatagtctaaaaaa

SEQ ID NO: 114080 - DNA, 20 bp, Artificial Sequence
  Description of Artificial Sequence: Synthetic oligonucleotide
  Target: LAMA2; (-) strand; PAM type: NRG; PAM sequence: TAG
aaacattcttttggattata

SEQ ID NO: 114081 - DNA, 20 bp, Artificial Sequence
  Description of Artificial Sequence: Synthetic oligonucleotide
  Target: LAMA2; (-) strand; PAM type: NRG; PAM sequence: TGG
aagtccaagaaacattcttt

SEQ ID NO: 114082 - DNA, 20 bp, Artificial Sequence
  Description of Artificial Sequence: Synthetic oligonucleotide
  Target: LAMA2; (-) strand; PAM type: NRG; PAM sequence: AAG
ttttaagtaaaacaaagtcc

SEQ ID NO: 114083 - DNA, 20 bp, Artificial Sequence
  Description of Artificial Sequence: Synthetic oligonucleotide
  Target: LAMA2; (-) strand; PAM type: NRG; PAM sequence: AAG
taaggcttttaagtaaaaca

SEQ ID NO: 114084 - DNA, 20 bp, Artificial Sequence
  Description of Artificial Sequence: Synthetic oligonucleotide
  Target: LAMA2; (-) strand; PAM type: NRG; PAM sequence: AAG
catatctctttaaggctttt

SEQ ID NO: 114085 - DNA, 20 bp, Artificial Sequence
  Description of Artificial Sequence: Synthetic oligonucleotide
  Target: LAMA2; (-) strand; PAM type: NRG; PAM sequence: AGG
taatattacatatctcttta

SEQ ID NO: 114086 - DNA, 20 bp, Artificial Sequence
  Description of Artificial Sequence: Synthetic oligonucleotide
  Target: LAMA2; (-) strand; PAM type: NRG; PAM sequence: AAG
ataatattacatatctcttt

SEQ ID NO: 114087 - DNA, 20 bp, Artificial Sequence
  Description of Artificial Sequence: Synthetic oligonucleotide
  Target: LAMA2; (-) strand; PAM type: NRG; PAM sequence: AAG
ttgggagatagctaaaaaat

SEQ ID NO: 114088 - DNA, 20 bp, Artificial Sequence
  Description of Artificial Sequence: Synthetic oligonucleotide
  Target: LAMA2; (-) strand; PAM type: NRG; PAM sequence: TAG
tgaggctttttcttgggaga

SEQ ID NO: 114089 - DNA, 20 bp, Artificial Sequence
  Description of Artificial Sequence: Synthetic oligonucleotide
  Target: LAMA2; (-) strand; PAM type: NRG; PAM sequence: GAG
tatttgaggctttttcttgg

SEQ ID NO: 114090 - DNA, 20 bp, Artificial Sequence
  Description of Artificial Sequence: Synthetic oligonucleotide
  Target: LAMA2; (-) strand; PAM type: NRG; PAM sequence: GGG
tttatttgaggctttttctt

SEQ ID NO: 114091 - DNA, 20 bp, Artificial Sequence
  Description of Artificial Sequence: Synthetic oligonucleotide
  Target: LAMA2; (-) strand; PAM type: NRG; PAM sequence: TGG
ttttatttgaggctttttct

SEQ ID NO: 114092 - DNA, 20 bp, Artificial Sequence
  Description of Artificial Sequence: Synthetic oligonucleotide
  Target: LAMA2; (-) strand; PAM type: NRG; PAM sequence: AGG
aaaagatttttttttatttg

SEQ ID NO: 114093 - DNA, 20 bp, Artificial Sequence
  Description of Artificial Sequence: Synthetic oligonucleotide
  Target: LAMA2; (-) strand; PAM type: NRG; PAM sequence: GAG
aaaaagatttttttttattt

SEQ ID NO: 114094 - DNA, 20 bp, Artificial Sequence
  Description of Artificial Sequence: Synthetic oligonucleotide
  Target: LAMA2; (-) strand; PAM type: NRG; PAM sequence: AAG
aacgtttatttattttgaaa

SEQ ID NO: 114095 - DNA, 20 bp, Artificial Sequence
  Description of Artificial Sequence: Synthetic oligonucleotide
  Target: LAMA2; (-) strand; PAM type: NRG; PAM sequence: TAG
taaaaaccttgctcaaaagt

SEQ ID NO: 114096 - DNA, 20 bp, Artificial Sequence
  Description of Artificial Sequence: Synthetic oligonucleotide
  Target: LAMA2; (-) strand; PAM type: NRG; PAM sequence: AAG
tttttaaaaaccttgctcaa

SEQ ID NO: 114097 - DNA, 20 bp, Artificial Sequence
  Description of Artificial Sequence: Synthetic oligonucleotide
  Target: LAMA2; (-) strand; PAM type: NRG; PAM sequence: AAG
taaacaaactatataccaaa

SEQ ID NO: 114098 - DNA, 20 bp, Artificial Sequence
  Description of Artificial Sequence: Synthetic oligonucleotide
  Target: LAMA2; (-) strand; PAM type: NRG; PAM sequence: CAG
agagaagataattgcatagg

SEQ ID NO: 114099 - DNA, 20 bp, Artificial Sequence
  Description of Artificial Sequence: Synthetic oligonucleotide
  Target: LAMA2; (-) strand; PAM type: NRG; PAM sequence: AGG
caaagagaagataattgcat

SEQ ID NO: 114100 - DNA, 20 bp, Artificial Sequence
  Description of Artificial Sequence: Synthetic oligonucleotide
  Target: LAMA2; (-) strand; PAM type: NRG; PAM sequence: TAG
ccaaagagaagataattgca

SEQ ID NO: 114101 - DNA, 20 bp, Artificial Sequence
  Description of Artificial Sequence: Synthetic oligonucleotide
  Target: LAMA2; (-) strand; PAM type: NRG; PAM sequence: AAG
ttatttttttcaccaaagag

SEQ ID NO: 114102 - DNA, 20 bp, Artificial Sequence
  Description of Artificial Sequence: Synthetic oligonucleotide
  Target: LAMA2; (-) strand; PAM type: NRG; PAM sequence: GAG
gttttatttttttcaccaaa

SEQ ID NO: 114103 - DNA, 20 bp, Artificial Sequence
  Description of Artificial Sequence: Synthetic oligonucleotide
  Target: LAMA2; (-) strand; PAM type: NRG; PAM sequence: AAG
aagttttatttttttcacca

SEQ ID NO: 114104 - DNA, 20 bp, Artificial Sequence
  Description of Artificial Sequence: Synthetic oligonucleotide
  Target: LAMA2; (-) strand; PAM type: NRG; PAM sequence: AAG
ctttatatgtgtaatgaaat

SEQ ID NO: 114105 - DNA, 20 bp, Artificial Sequence
  Description of Artificial Sequence: Synthetic oligonucleotide
  Target: LAMA2; (-) strand; PAM type: NRG; PAM sequence: AGG
agcatttaaacatgaggtac

SEQ ID NO: 114106 - DNA, 20 bp, Artificial Sequence
  Description of Artificial Sequence: Synthetic oligonucleotide
  Target: LAMA2; (-) strand; PAM type: NRG; PAM sequence: CAG
cagcatttaaacatgaggta

SEQ ID NO: 114107 - DNA, 20 bp, Artificial Sequence
  Description of Artificial Sequence: Synthetic oligonucleotide
  Target: LAMA2; (-) strand; PAM type: NRG; PAM sequence: AGG
acccacagcatttaaacatg

SEQ ID NO: 114108 - DNA, 20 bp, Artificial Sequence
  Description of Artificial Sequence: Synthetic oligonucleotide
  Target: LAMA2; (-) strand; PAM type: NRG; PAM sequence: GAG
cacccacagcatttaaacat

SEQ ID NO: 114109 - DNA, 20 bp, Artificial Sequence
  Description of Artificial Sequence: Synthetic oligonucleotide
  Target: LAMA2; (-) strand; PAM type: NRG; PAM sequence: CAG
tttagcaataatctcaccca

SEQ ID NO: 114110 - DNA, 20 bp, Artificial Sequence
  Description of Artificial Sequence: Synthetic oligonucleotide
  Target: LAMA2; (-) strand; PAM type: NRG; PAM sequence: TAG
tttgtagtccttctcccctt

SEQ ID NO: 114111 - DNA, 20 bp, Artificial Sequence
  Description of Artificial Sequence: Synthetic oligonucleotide
  Target: LAMA2; (-) strand; PAM type: NRG; PAM sequence: TAG
ctgcagaaggagtctttttg

SEQ ID NO: 114112 - DNA, 20 bp, Artificial Sequence
  Description of Artificial Sequence: Synthetic oligonucleotide
  Target: LAMA2; (-) strand; PAM type: NRG; PAM sequence: GAG
ttcatgttatcctgcagaag

SEQ ID NO: 114113 - DNA, 20 bp, Artificial Sequence
  Description of Artificial Sequence: Synthetic oligonucleotide
  Target: LAMA2; (-) strand; PAM type: NRG; PAM sequence: AGG
tgttcatgttatcctgcaga

SEQ ID NO: 114114 - DNA, 20 bp, Artificial Sequence
  Description of Artificial Sequence: Synthetic oligonucleotide
  Target: LAMA2; (-) strand; PAM type: NRG; PAM sequence: AAG
atgttcatgttatcctgcag

SEQ ID NO: 114115 - DNA, 20 bp, Artificial Sequence
  Description of Artificial Sequence: Synthetic oligonucleotide
  Target: LAMA2; (-) strand; PAM type: NRG; PAM sequence: CAG
tggatgttcatgttatcctg

SEQ ID NO: 114116 - DNA, 20 bp, Artificial Sequence
  Description of Artificial Sequence: Synthetic oligonucleotide
  Target: LAMA2; (-) strand; PAM type: NRG; PAM sequence: TGG
tgtctactggttggtctaaa

SEQ ID NO: 114117 - DNA, 20 bp, Artificial Sequence
  Description of Artificial Sequence: Synthetic oligonucleotide
  Target: LAMA2; (-) strand; PAM type: NRG; PAM sequence: TGG
ggtttccattgtctactggt

SEQ ID NO: 114118 - DNA, 20 bp, Artificial Sequence
  Description of Artificial Sequence: Synthetic oligonucleotide
  Target: LAMA2; (-) strand; PAM type: NRG; PAM sequence: TGG
ctctggtttccattgtctac

SEQ ID NO: 114119 - DNA, 20 bp, Artificial Sequence
  Description of Artificial Sequence: Synthetic oligonucleotide
  Target: LAMA2; (-) strand; PAM type: NRG; PAM sequence: TGG
cacgtgtacccagcaaactc

SEQ ID NO: 114120 - DNA, 20 bp, Artificial Sequence
  Description of Artificial Sequence: Synthetic oligonucleotide
  Target: LAMA2; (-) strand; PAM type: NRG; PAM sequence: CAG
aaactgtgcacacgtgtacc

SEQ ID NO: 114121 - DNA, 20 bp, Artificial Sequence
  Description of Artificial Sequence: Synthetic oligonucleotide
  Target: LAMA2; (-) strand; PAM type: NRG; PAM sequence: AGG
cttgtggagcagacacatgc

SEQ ID NO: 114122 - DNA, 20 bp, Artificial Sequence
  Description of Artificial Sequence: Synthetic oligonucleotide
  Target: LAMA2; (-) strand; PAM type: NRG; PAM sequence: CAG
ccttgtggagcagacacatg

SEQ ID NO: 114123 - DNA, 20 bp, Artificial Sequence
  Description of Artificial Sequence: Synthetic oligonucleotide
  Target: LAMA2; (-) strand; PAM type: NRG; PAM sequence: CAG
gggaaggaagccttgtggag

SEQ ID NO: 114124 - DNA, 20 bp, Artificial Sequence
  Description of Artificial Sequence: Synthetic oligonucleotide
  Target: LAMA2; (-) strand; PAM type: NRG; PAM sequence: GAG
tatgggaaggaagccttgtg

SEQ ID NO: 114125 - DNA, 20 bp, Artificial Sequence
  Description of Artificial Sequence: Synthetic oligonucleotide
  Target: LAMA2; (-) strand; PAM type: NRG; PAM sequence: TGG
actatgggaaggaagccttg

SEQ ID NO: 114126 - DNA, 20 bp, Artificial Sequence
  Description of Artificial Sequence: Synthetic oligonucleotide
  Target: LAMA2; (-) strand; PAM type: NRG; PAM sequence: AAG
agtctctgactatgggaagg

SEQ ID NO: 114127 - DNA, 20 bp, Artificial Sequence
  Description of Artificial Sequence: Synthetic oligonucleotide
  Target: LAMA2; (-) strand; PAM type: NRG; PAM sequence: AGG
tgtagtctctgactatggga

SEQ ID NO: 114128 - DNA, 20 bp, Artificial Sequence
  Description of Artificial Sequence: Synthetic oligonucleotide
  Target: LAMA2; (-) strand; PAM type: NRG; PAM sequence: AAG
gtgtagtctctgactatggg

SEQ ID NO: 114129 - DNA, 20 bp, Artificial Sequence
  Description of Artificial Sequence: Synthetic oligonucleotide
  Target: LAMA2; (-) strand; PAM type: NRG; PAM sequence: GGG
gtagtgtagtctctgactat

SEQ ID NO: 114130 - DNA, 20 bp, Artificial Sequence
  Description of Artificial Sequence: Synthetic oligonucleotide
  Target: LAMA2; (-) strand; PAM type: NRG; PAM sequence: TGG
ggtagtgtagtctctgacta

SEQ ID NO: 114131 - DNA, 20 bp, Artificial Sequence
  Description of Artificial Sequence: Synthetic oligonucleotide
  Target: LAMA2; (-) strand; PAM type: NRG; PAM sequence: TAG
tcattagggtgatggtagtg

SEQ ID NO: 114132 - DNA, 20 bp, Artificial Sequence
  Description of Artificial Sequence: Synthetic oligonucleotide
  Target: LAMA2; (-) strand; PAM type: NRG; PAM sequence: TAG
caatatcattagggtgatgg

SEQ ID NO: 114133 - DNA, 20 bp, Artificial Sequence
  Description of Artificial Sequence: Synthetic oligonucleotide
  Target: LAMA2; (-) strand; PAM type: NRG; PAM sequence: TGG
aagcaatatcattagggtga

SEQ ID NO: 114134 - DNA, 20 bp, Artificial Sequence
  Description of Artificial Sequence: Synthetic oligonucleotide
  Target: LAMA2; (-) strand; PAM type: NRG; PAM sequence: GGG
aagcaaaagcaatatcatta

SEQ ID NO: 114135 - DNA, 20 bp, Artificial Sequence
  Description of Artificial Sequence: Synthetic oligonucleotide
  Target: LAMA2; (-) strand; PAM type: NRG; PAM sequence: AGG
aaagcaaaagcaatatcatt

SEQ ID NO: 114136 - DNA, 20 bp, Artificial Sequence
  Description of Artificial Sequence: Synthetic oligonucleotide
  Target: LAMA2; (-) strand; PAM type: NRG; PAM sequence: TAG
aaaagcaaaagcaatatcat

SEQ ID NO: 114137 - DNA, 20 bp, Artificial Sequence
  Description of Artificial Sequence: Synthetic oligonucleotide
  Target: LAMA2; (-) strand; PAM type: NRG; PAM sequence: AAG
aatagtcaaatgaaaagcaa

SEQ ID NO: 114138 - DNA, 20 bp, Artificial Sequence
  Description of Artificial Sequence: Synthetic oligonucleotide
  Target: LAMA2; (-) strand; PAM type: NRG; PAM sequence: AAG
ctattgaatagtcaaatgaa

SEQ ID NO: 114139 - DNA, 20 bp, Artificial Sequence
  Description of Artificial Sequence: Synthetic oligonucleotide
  Target: LAMA2; (-) strand; PAM type: NRG; PAM sequence: TAG
tttacttctggcctattgaa

SEQ ID NO: 114140 - DNA, 20 bp, Artificial Sequence
  Description of Artificial Sequence: Synthetic oligonucleotide
  Target: LAMA2; (-) strand; PAM type: NRG; PAM sequence: TGG
tatttcttcagatttacttc

SEQ ID NO: 114141 - DNA, 20 bp, Artificial Sequence
  Description of Artificial Sequence: Synthetic oligonucleotide
  Target: LAMA2; (-) strand; PAM type: NRG; PAM sequence: CAG
aggcagccggaatatttctt

SEQ ID NO: 114142 - DNA, 20 bp, Artificial Sequence
  Description of Artificial Sequence: Synthetic oligonucleotide
  Target: LAMA2; (-) strand; PAM type: NRG; PAM sequence: CGG
ttcaatatctttgaggcagc

SEQ ID NO: 114143 - DNA, 20 bp, Artificial Sequence
  Description of Artificial Sequence: Synthetic oligonucleotide
  Target: LAMA2; (-) strand; PAM type: NRG; PAM sequence: CAG
aaatttcaatatctttgagg

SEQ ID NO: 114144 - DNA, 20 bp, Artificial Sequence
  Description of Artificial Sequence: Synthetic oligonucleotide
  Target: LAMA2; (-) strand; PAM type: NRG; PAM sequence: AGG
ttgaaatttcaatatctttg

SEQ ID NO: 114145 - DNA, 20 bp, Artificial Sequence
  Description of Artificial Sequence: Synthetic oligonucleotide
  Target: LAMA2; (-) strand; PAM type: NRG; PAM sequence: GAG
cttgaaatttcaatatcttt

SEQ ID NO: 114146 - DNA, 20 bp, Artificial Sequence
  Description of Artificial Sequence: Synthetic oligonucleotide
  Target: LAMA2; (-) strand; PAM type: NRG; PAM sequence: GAG
actactgagtatattgtacg

SEQ ID NO: 114147 - DNA, 20 bp, Artificial Sequence
  Description of Artificial Sequence: Synthetic oligonucleotide
  Target: LAMA2; (-) strand; PAM type: NRG; PAM sequence: CGG
ggactactgagtatattgta

SEQ ID NO: 114148 - DNA, 20 bp, Artificial Sequence
  Description of Artificial Sequence: Synthetic oligonucleotide
  Target: LAMA2; (-) strand; PAM type: NRG; PAM sequence: GAG
ccaacataatcgggactact

SEQ ID NO: 114149 - DNA, 20 bp, Artificial Sequence
  Description of Artificial Sequence: Synthetic oligonucleotide
  Target: LAMA2; (-) strand; PAM type: NRG; PAM sequence: GGG
ttggtaacaccaacataatc

SEQ ID NO: 114150 - DNA, 20 bp, Artificial Sequence
  Description of Artificial Sequence: Synthetic oligonucleotide
  Target: LAMA2; (-) strand; PAM type: NRG; PAM sequence: CGG
tttggtaacaccaacataat

SEQ ID NO: 114151 - DNA, 20 bp, Artificial Sequence
  Description of Artificial Sequence: Synthetic oligonucleotide
  Target: LAMA2; (-) strand; PAM type: NRG; PAM sequence: TGG
aacctccagggaacatcctt

SEQ ID NO: 114152 - DNA, 20 bp, Artificial Sequence
  Description of Artificial Sequence: Synthetic oligonucleotide
  Target: LAMA2; (-) strand; PAM type: NRG; PAM sequence: GGG
caaaaacagaccaacctcca

SEQ ID NO: 114153 - DNA, 20 bp, Artificial Sequence
  Description of Artificial Sequence: Synthetic oligonucleotide
  Target: LAMA2; (-) strand; PAM type: NRG; PAM sequence: AGG
tcaaaaacagaccaacctcc

SEQ ID NO: 114154 - DNA, 20 bp, Artificial Sequence
  Description of Artificial Sequence: Synthetic oligonucleotide
  Target: LAMA2; (-) strand; PAM type: NRG; PAM sequence: CAG
atcaaaaacagaccaacctc

SEQ ID NO: 114155 - DNA, 20 bp, Artificial Sequence
  Description of Artificial Sequence: Synthetic oligonucleotide
  Target: LAMA2; (-) strand; PAM type: NRG; PAM sequence: CAG
gtttagagaactatcaaaaa

SEQ ID NO: 114156 - DNA, 20 bp, Artificial Sequence
  Description of Artificial Sequence: Synthetic oligonucleotide
  Target: LAMA2; (-) strand; PAM type: NRG; PAM sequence: GAG
atctgatataaatgtgttta

SEQ ID NO: 114157 - DNA, 20 bp, Artificial Sequence
  Description of Artificial Sequence: Synthetic oligonucleotide
  Target: LAMA2; (-) strand; PAM type: NRG; PAM sequence: TAG
aaatctgatataaatgtgtt

SEQ ID NO: 114158 - DNA, 20 bp, Artificial Sequence
  Description of Artificial Sequence: Synthetic oligonucleotide
  Target: LAMA2; (-) strand; PAM type: NRG; PAM sequence: AAG
taggagcagccacactaagt

SEQ ID NO: 114159 - DNA, 20 bp, Artificial Sequence
  Description of Artificial Sequence: Synthetic oligonucleotide
  Target: LAMA2; (-) strand; PAM type: NRG; PAM sequence: AAG
cttgtaggagcagccacact

SEQ ID NO: 114160 - DNA, 20 bp, Artificial Sequence
  Description of Artificial Sequence: Synthetic oligonucleotide
  Target: LAMA2; (-) strand; PAM type: NRG; PAM sequence: CAG
aagactgatccttgtaggag

SEQ ID NO: 114161 - DNA, 20 bp, Artificial Sequence
  Description of Artificial Sequence: Synthetic oligonucleotide
  Target: LAMA2; (-) strand; PAM type: NRG; PAM sequence: GAG
caaaagactgatccttgtag

SEQ ID NO: 114162 - DNA, 20 bp, Artificial Sequence
  Description of Artificial Sequence: Synthetic oligonucleotide
  Target: LAMA2; (-) strand; PAM type: NRG; PAM sequence: AGG
aacaaaagactgatccttgt

SEQ ID NO: 114163 - DNA, 20 bp, Artificial Sequence
  Description of Artificial Sequence: Synthetic oligonucleotide
  Target: LAMA2; (-) strand; PAM type: NRG; PAM sequence: TAG
taacaaaagactgatccttg

SEQ ID NO: 114164 - DNA, 20 bp, Artificial Sequence
  Description of Artificial Sequence: Synthetic oligonucleotide
  Target: LAMA2; (-) strand; PAM type: NRG; PAM sequence: AAG
aaagtaaaatatattaacaa

SEQ ID NO: 114165 - DNA, 20 bp, Artificial Sequence
  Description of Artificial Sequence: Synthetic oligonucleotide
  Target: LAMA2; (-) strand; PAM type: NRG; PAM sequence: AAG
taagagtaggatcagtagaa

SEQ ID NO: 114166 - DNA, 20 bp, Artificial Sequence
  Description of Artificial Sequence: Synthetic oligonucleotide
  Target: LAMA2; (-) strand; PAM type: NRG; PAM sequence: TAG
tcgtttaagagtaggatcag

SEQ ID NO: 114167 - DNA, 20 bp, Artificial Sequence
  Description of Artificial Sequence: Synthetic oligonucleotide
  Target: LAMA2; (-) strand; PAM type: NRG; PAM sequence: CAG
ttatcgtttaagagtaggat

SEQ ID NO: 114168 - DNA, 20 bp, Artificial Sequence
  Description of Artificial Sequence: Synthetic oligonucleotide
  Target: LAMA2; (-) strand; PAM type: NRG; PAM sequence: AGG
ttgctttatcgtttaagagt

SEQ ID NO: 114169 - DNA, 20 bp, Artificial Sequence
  Description of Artificial Sequence: Synthetic oligonucleotide
  Target: LAMA2; (-) strand; PAM type: NRG; PAM sequence: TAG
cttgctttatcgtttaagag

SEQ ID NO: 114170 - DNA, 20 bp, Artificial Sequence
  Description of Artificial Sequence: Synthetic oligonucleotide
  Target: LAMA2; (-) strand; PAM type: NRG; PAM sequence: GAG
aatcttgctttatcgtttaa

SEQ ID NO: 114171 - DNA, 20 bp, Artificial Sequence
  Description of Artificial Sequence: Synthetic oligonucleotide
  Target: LAMA2; (-) strand; PAM type: NRG; PAM sequence: AAG
ttaatcttgctttatcgttt

SEQ ID NO: 114172 - DNA, 20 bp, Artificial Sequence
  Description of Artificial Sequence: Synthetic oligonucleotide
  Target: LAMA2; (-) strand; PAM type: NRG; PAM sequence: GAG
ttttttatcatggtaattta

SEQ ID NO: 114173 - DNA, 20 bp, Artificial Sequence
  Description of Artificial Sequence: Synthetic oligonucleotide
  Target: LAMA2; (-) strand; PAM type: NRG; PAM sequence: TAG
cattttttatcatggtaatt

SEQ ID NO: 114174 - DNA, 20 bp, Artificial Sequence
  Description of Artificial Sequence: Synthetic oligonucleotide
  Target: LAMA2; (-) strand; PAM type: NRG; PAM sequence: TGG
cataataccattttttatca

SEQ ID NO: 114175 - DNA, 20 bp, Artificial Sequence
  Description of Artificial Sequence: Synthetic oligonucleotide
  Target: LAMA2; (-) strand; PAM type: NRG; PAM sequence: AGG
gaaaattggatcacaattct

SEQ ID NO: 114176 - DNA, 20 bp, Artificial Sequence
  Description of Artificial Sequence: Synthetic oligonucleotide
  Target: LAMA2; (-) strand; PAM type: NRG; PAM sequence: TAG
ggaaaattggatcacaattc

SEQ ID NO: 114177 - DNA, 20 bp, Artificial Sequence
  Description of Artificial Sequence: Synthetic oligonucleotide
  Target: LAMA2; (-) strand; PAM type: NRG; PAM sequence: TGG
gagctatacatttggaaaat

SEQ ID NO: 114178 - DNA, 20 bp, Artificial Sequence
  Description of Artificial Sequence: Synthetic oligonucleotide
  Target: LAMA2; (-) strand; PAM type: NRG; PAM sequence: TGG
gctataaagagctatacatt

SEQ ID NO: 114179 - DNA, 20 bp, Artificial Sequence
  Description of Artificial Sequence: Synthetic oligonucleotide
  Target: LAMA2; (-) strand; PAM type: NRG; PAM sequence: GAG
ttaatgatatgtgctataaa

SEQ ID NO: 114180 - DNA, 20 bp, Artificial Sequence
  Description of Artificial Sequence: Synthetic oligonucleotide
  Target: LAMA2; (-) strand; PAM type: NRG; PAM sequence: AAG
tattaatgatatgtgctata

SEQ ID NO: 114181 - DNA, 20 bp, Artificial Sequence
  Description of Artificial Sequence: Synthetic oligonucleotide
  Target: LAMA2; (-) strand; PAM type: NRG; PAM sequence: TAG
gagaaaaacagaaaagagat

SEQ ID NO: 114182 - DNA, 20 bp, Artificial Sequence
  Description of Artificial Sequence: Synthetic oligonucleotide
  Target: LAMA2; (-) strand; PAM type: NRG; PAM sequence: GAG
aaaaagagaaaaacagaaaa

SEQ ID NO: 114183 - DNA, 20 bp, Artificial Sequence
  Description of Artificial Sequence: Synthetic oligonucleotide
  Target: LAMA2; (-) strand; PAM type: NRG; PAM sequence: AAG
aaaaaaagagaaaaacagaa

SEQ ID NO: 114184 - DNA, 20 bp, Artificial Sequence
  Description of Artificial Sequence: Synthetic oligonucleotide
  Target: LAMA2; (-) strand; PAM type: NRG; PAM sequence: CAG
gttggaaaaaaagagaaaaa

SEQ ID NO: 114185 - DNA, 20 bp, Artificial Sequence
  Description of Artificial Sequence: Synthetic oligonucleotide
  Target: LAMA2; (-) strand; PAM type: NRG; PAM sequence: GAG
aaagtagtgttggaaaaaaa

SEQ ID NO: 114186 - DNA, 20 bp, Artificial Sequence
  Description of Artificial Sequence: Synthetic oligonucleotide
  Target: LAMA2; (-) strand; PAM type: NRG; PAM sequence: AAG
gaaaagtagtgttggaaaaa

SEQ ID NO: 114187 - DNA, 20 bp, Artificial Sequence
  Description of Artificial Sequence: Synthetic oligonucleotide
  Target: LAMA2; (-) strand; PAM type: NRG; PAM sequence: TGG
ggaaaagggaaaagtagtgt

SEQ ID NO: 114188 - DNA, 20 bp, Artificial Sequence
  Description of Artificial Sequence: Synthetic oligonucleotide
  Target: LAMA2; (-) strand; PAM type: NRG; PAM sequence: TAG
aaataaggaaaagggaaaag

SEQ ID NO: 114189 - DNA, 20 bp, Artificial Sequence
  Description of Artificial Sequence: Synthetic oligonucleotide
  Target: LAMA2; (-) strand; PAM type: NRG; PAM sequence: AAG
caaaaataaggaaaagggaa

SEQ ID NO: 114190 - DNA, 20 bp, Artificial Sequence
  Description of Artificial Sequence: Synthetic oligonucleotide
  Target: LAMA2; (-) strand; PAM type: NRG; PAM sequence: GGG
gatgacaaaaataaggaaaa

SEQ ID NO: 114191 - DNA, 20 bp, Artificial Sequence
  Description of Artificial Sequence: Synthetic oligonucleotide
  Target: LAMA2; (-) strand; PAM type: NRG; PAM sequence: AGG
ggatgacaaaaataaggaaa

SEQ ID NO: 114192 - DNA, 20 bp, Artificial Sequence
  Description of Artificial Sequence: Synthetic oligonucleotide
  Target: LAMA2; (-) strand; PAM type: NRG; PAM sequence: AAG
tggatgacaaaaataaggaa

SEQ ID NO: 114193 - DNA, 20 bp, Artificial Sequence
  Description of Artificial Sequence: Synthetic oligonucleotide
  Target: LAMA2; (-) strand; PAM type: NRG; PAM sequence: AGG
taaaatggatgacaaaaata

SEQ ID NO: 114194 - DNA, 20 bp, Artificial Sequence
  Description of Artificial Sequence: Synthetic oligonucleotide
  Target: LAMA2; (-) strand; PAM type: NRG; PAM sequence: AAG
ttaaaatggatgacaaaaat

SEQ ID NO: 114195 - DNA, 20 bp, Artificial Sequence
  Description of Artificial Sequence: Synthetic oligonucleotide
  Target: LAMA2; (-) strand; PAM type: NRG; PAM sequence: TGG
aaagtaaaataaatttaaaa

SEQ ID NO: 114196 - DNA, 20 bp, Artificial Sequence
  Description of Artificial Sequence: Synthetic oligonucleotide
  Target: LAMA2; (-) strand; PAM type: NRG; PAM sequence: AAG
aagctatatacaacacataa

SEQ ID NO: 114197 - DNA, 20 bp, Artificial Sequence
  Description of Artificial Sequence: Synthetic oligonucleotide
  Target: LAMA2; (-) strand; PAM type: NRG; PAM sequence: AAG
aaaatgtaaggttgctaata

SEQ ID NO: 114198 - DNA, 20 bp, Artificial Sequence
  Description of Artificial Sequence: Synthetic oligonucleotide
  Target: LAMA2; (-) strand; PAM type: NRG; PAM sequence: AGG
atggttccagaaaaaatgta

SEQ ID NO: 114199 - DNA, 20 bp, Artificial Sequence
  Description of Artificial Sequence: Synthetic oligonucleotide
  Target: LAMA2; (-) strand; PAM type: NRG; PAM sequence: AAG
aatggttccagaaaaaatgt

SEQ ID NO: 114200 - DNA, 20 bp, Artificial Sequence
  Description of Artificial Sequence: Synthetic oligonucleotide
  Target: LAMA2; (-) strand; PAM type: NRG; PAM sequence: CAG
tgtgtaaacttcaatggttc

SEQ ID NO: 114201 - DNA, 20 bp, Artificial Sequence
  Description of Artificial Sequence: Synthetic oligonucleotide
  Target: LAMA2; (-) strand; PAM type: NRG; PAM sequence: TGG
gctacttgtgtaaacttcaa

SEQ ID NO: 114202 - DNA, 20 bp, Artificial Sequence
  Description of Artificial Sequence: Synthetic oligonucleotide
  Target: LAMA2; (-) strand; PAM type: NRG; PAM sequence: CGG
agactatgcactaatggcta

SEQ ID NO: 114203 - DNA, 20 bp, Artificial Sequence
  Description of Artificial Sequence: Synthetic oligonucleotide
  Target: LAMA2; (-) strand; PAM type: NRG; PAM sequence: TGG
gacaacagactatgcactaa

SEQ ID NO: 114204 - DNA, 20 bp, Artificial Sequence
  Description of Artificial Sequence: Synthetic oligonucleotide
  Target: LAMA2; (-) strand; PAM type: NRG; PAM sequence: CAG
gacttcaagtttgtagacaa

SEQ ID NO: 114205 - DNA, 20 bp, Artificial Sequence
  Description of Artificial Sequence: Synthetic oligonucleotide
  Target: LAMA2; (-) strand; PAM type: NRG; PAM sequence: TAG
ggggctagacttcaagtttg

SEQ ID NO: 114206 - DNA, 20 bp, Artificial Sequence
  Description of Artificial Sequence: Synthetic oligonucleotide
  Target: LAMA2; (-) strand; PAM type: NRG; PAM sequence: AAG
agacaagggggctagacttc

SEQ ID NO: 114207 - DNA, 20 bp, Artificial Sequence
  Description of Artificial Sequence: Synthetic oligonucleotide
  Target: LAMA2; (-) strand; PAM type: NRG; PAM sequence: TAG
tatttcaaagacaagggggc

SEQ ID NO: 114208 - DNA, 20 bp, Artificial Sequence
  Description of Artificial Sequence: Synthetic oligonucleotide
  Target: LAMA2; (-) strand; PAM type: NRG; PAM sequence: GGG
atgttatttcaaagacaagg

SEQ ID NO: 114209 - DNA, 20 bp, Artificial Sequence
  Description of Artificial Sequence: Synthetic oligonucleotide
  Target: LAMA2; (-) strand; PAM type: NRG; PAM sequence: GGG
tatgttatttcaaagacaag

SEQ ID NO: 114210 - DNA, 20 bp, Artificial Sequence
  Description of Artificial Sequence: Synthetic oligonucleotide
  Target: LAMA2; (-) strand; PAM type: NRG; PAM sequence: GGG
ctatgttatttcaaagacaa

SEQ ID NO: 114211 - DNA, 20 bp, Artificial Sequence
  Description of Artificial Sequence: Synthetic oligonucleotide
  Target: LAMA2; (-) strand; PAM type: NRG; PAM sequence: AGG
tctatgttatttcaaagaca

SEQ ID NO: 114212 - DNA, 20 bp, Artificial Sequence
  Description of Artificial Sequence: Synthetic oligonucleotide
  Target: LAMA2; (-) strand; PAM type: NRG; PAM sequence: AAG
gtctatgttatttcaaagac

SEQ ID NO: 114213 - DNA, 20 bp, Artificial Sequence
  Description of Artificial Sequence: Synthetic oligonucleotide
  Target: LAMA2; (-) strand; PAM type: NRG; PAM sequence: AAG
tcccagtctatgttatttca

SEQ ID NO: 114214 - DNA, 20 bp, Artificial Sequence
  Description of Artificial Sequence: Synthetic oligonucleotide
  Target: LAMA2; (-) strand; PAM type: NRG; PAM sequence: CAG
gagttgattgccacaggtcc

SEQ ID NO: 114215 - DNA, 20 bp, Artificial Sequence
  Description of Artificial Sequence: Synthetic oligonucleotide
  Target: LAMA2; (-) strand; PAM type: NRG; PAM sequence: AGG
tttgcagagttgattgccac

SEQ ID NO: 114216 - DNA, 20 bp, Artificial Sequence
  Description of Artificial Sequence: Synthetic oligonucleotide
  Target: LAMA2; (-) strand; PAM type: NRG; PAM sequence: CAG
ctttgcagagttgattgcca

SEQ ID NO: 114217 - DNA, 20 bp, Artificial Sequence
  Description of Artificial Sequence: Synthetic oligonucleotide
  Target: LAMA2; (-) strand; PAM type: NRG; PAM sequence: GAG
gtcaaacacaagtctttgca

SEQ ID NO: 114218 - DNA, 20 bp, Artificial Sequence
  Description of Artificial Sequence: Synthetic oligonucleotide
  Target: LAMA2; (-) strand; PAM type: NRG; PAM sequence: CAG
atgtcaaacacaagtctttg

SEQ ID NO: 114219 - DNA, 20 bp, Artificial Sequence
  Description of Artificial Sequence: Synthetic oligonucleotide
  Target: LAMA2; (-) strand; PAM type: NRG; PAM sequence: AAG
tttgcaggcatgtcaaacac

SEQ ID NO: 114220 - DNA, 20 bp, Artificial Sequence
  Description of Artificial Sequence: Synthetic oligonucleotide
  Target: LAMA2; (-) strand; PAM type: NRG; PAM sequence: AGG
cagctaacaaaggactttgc

SEQ ID NO: 114221 - DNA, 20 bp, Artificial Sequence
  Description of Artificial Sequence: Synthetic oligonucleotide
  Target: LAMA2; (-) strand; PAM type: NRG; PAM sequence: CAG
tcagctaacaaaggactttg

SEQ ID NO: 114222 - DNA, 20 bp, Artificial Sequence
  Description of Artificial Sequence: Synthetic oligonucleotide
  Target: LAMA2; (-) strand; PAM type: NRG; PAM sequence: AGG
ctgaggatatcagctaacaa

SEQ ID NO: 114223 - DNA, 20 bp, Artificial Sequence
  Description of Artificial Sequence: Synthetic oligonucleotide
  Target: LAMA2; (-) strand; PAM type: NRG; PAM sequence: AAG
actgaggatatcagctaaca

SEQ ID NO: 114224 - DNA, 20 bp, Artificial Sequence
  Description of Artificial Sequence: Synthetic oligonucleotide
  Target: LAMA2; (-) strand; PAM type: NRG; PAM sequence: CAG
agaagagttactgaggatat

SEQ ID NO: 114225 - DNA, 20 bp, Artificial Sequence
  Description of Artificial Sequence: Synthetic oligonucleotide
  Target: LAMA2; (-) strand; PAM type: NRG; PAM sequence: AGG
gcatcaaagaagagttactg

SEQ ID NO: 114226 - DNA, 20 bp, Artificial Sequence
  Description of Artificial Sequence: Synthetic oligonucleotide
  Target: LAMA2; (-) strand; PAM type: NRG; PAM sequence: GAG
agcatcaaagaagagttact

SEQ ID NO: 114227 - DNA, 20 bp, Artificial Sequence
  Description of Artificial Sequence: Synthetic oligonucleotide
  Target: LAMA2; (-) strand; PAM type: NRG; PAM sequence: GAG
gatgctttagcatcaaagaa

SEQ ID NO: 114228 - DNA, 20 bp, Artificial Sequence
  Description of Artificial Sequence: Synthetic oligonucleotide
  Target: LAMA2; (-) strand; PAM type: NRG; PAM sequence: AAG
aggatgctttagcatcaaag

SEQ ID NO: 114229 - DNA, 20 bp, Artificial Sequence
  Description of Artificial Sequence: Synthetic oligonucleotide
  Target: LAMA2; (-) strand; PAM type: NRG; PAM sequence: AAG
gctaggatgctttagcatca

SEQ ID NO: 114230 - DNA, 20 bp, Artificial Sequence
  Description of Artificial Sequence: Synthetic oligonucleotide
  Target: LAMA2; (-) strand; PAM type: NRG; PAM sequence: TAG
aggggaatgctaggatgctt

SEQ ID NO: 114231 - DNA, 20 bp, Artificial Sequence
  Description of Artificial Sequence: Synthetic oligonucleotide
  Target: LAMA2; (-) strand; PAM type: NRG; PAM sequence: AGG
aacgaaaataggggaatgct

SEQ ID NO: 114232 - DNA, 20 bp, Artificial Sequence
  Description of Artificial Sequence: Synthetic oligonucleotide
  Target: LAMA2; (-) strand; PAM type: NRG; PAM sequence: TAG
aaacgaaaataggggaatgc

SEQ ID NO: 114233 - DNA, 20 bp, Artificial Sequence
  Description of Artificial Sequence: Synthetic oligonucleotide
  Target: LAMA2; (-) strand; PAM type: NRG; PAM sequence: GGG
aaatagttaaacgaaaatag

SEQ ID NO: 114234 - DNA, 20 bp, Artificial Sequence
  Description of Artificial Sequence: Synthetic oligonucleotide
  Target: LAMA2; (-) strand; PAM type: NRG; PAM sequence: GGG
aaaatagttaaacgaaaata

SEQ ID NO: 114235 - DNA, 20 bp, Artificial Sequence
  Description of Artificial Sequence: Synthetic oligonucleotide
  Target: LAMA2; (-) strand; PAM type: NRG; PAM sequence: AGG
caaaatagttaaacgaaaat

SEQ ID NO: 114236 - DNA, 20 bp, Artificial Sequence
  Description of Artificial Sequence: Synthetic oligonucleotide
  Target: LAMA2; (-) strand; PAM type: NRG; PAM sequence: TAG
gcaaaatagttaaacgaaaa

SEQ ID NO: 114237 - DNA, 20 bp, Artificial Sequence
  Description of Artificial Sequence: Synthetic oligonucleotide
  Target: LAMA2; (-) strand; PAM type: NRG; PAM sequence: TAG
actgaagaaacagtgcaaaa

SEQ ID NO: 114238 - DNA, 20 bp, Artificial Sequence
  Description of Artificial Sequence: Synthetic oligonucleotide
  Target: LAMA2; (-) strand; PAM type: NRG; PAM sequence: CAG
gtcagtgtcaactgaagaaa

SEQ ID NO: 114239 - DNA, 20 bp, Artificial Sequence
  Description of Artificial Sequence: Synthetic oligonucleotide
  Target: LAMA2; (-) strand; PAM type: NRG; PAM sequence: AAG
atatgggtcagtgtcaactg

SEQ ID NO: 114240 - DNA, 20 bp, Artificial Sequence
  Description of Artificial Sequence: Synthetic oligonucleotide
  Target: LAMA2; (-) strand; PAM type: NRG; PAM sequence: CAG
ggtctttctcacatatgggt

SEQ ID NO: 114241 - DNA, 20 bp, Artificial Sequence
  Description of Artificial Sequence: Synthetic oligonucleotide
  Target: LAMA2; (-) strand; PAM type: NRG; PAM sequence: GGG
ccggggtctttctcacatat

SEQ ID NO: 114242 - DNA, 20 bp, Artificial Sequence
  Description of Artificial Sequence: Synthetic oligonucleotide
  Target: LAMA2; (-) strand; PAM type: NRG; PAM sequence: TGG
gccggggtctttctcacata

SEQ ID NO: 114243 - DNA, 20 bp, Artificial Sequence
  Description of Artificial Sequence: Synthetic oligonucleotide
  Target: LAMA2; (-) strand; PAM type: NRG; PAM sequence: GGG
agagagtagagctatggccg

SEQ ID NO: 114244 - DNA, 20 bp, Artificial Sequence
  Description of Artificial Sequence: Synthetic oligonucleotide
  Target: LAMA2; (-) strand; PAM type: NRG; PAM sequence: GGG
aagagagtagagctatggcc

SEQ ID NO: 114245 - DNA, 20 bp, Artificial Sequence
  Description of Artificial Sequence: Synthetic oligonucleotide
  Target: LAMA2; (-) strand; PAM type: NRG; PAM sequence: CGG
taagagagtagagctatggc

SEQ ID NO: 114246 - DNA, 20 bp, Artificial Sequence
  Description of Artificial Sequence: Synthetic oligonucleotide
  Target: LAMA2; (-) strand; PAM type: NRG; PAM sequence: TGG
attttaagagagtagagcta

SEQ ID NO: 114247 - DNA, 20 bp, Artificial Sequence
  Description of Artificial Sequence: Synthetic oligonucleotide
  Target: LAMA2; (-) strand; PAM type: NRG; PAM sequence: GAG
atggatattttaagagagta

SEQ ID NO: 114248 - DNA, 20 bp, Artificial Sequence
  Description of Artificial Sequence: Synthetic oligonucleotide
  Target: LAMA2; (-) strand; PAM type: NRG; PAM sequence: TAG
ttatggatattttaagagag

SEQ ID NO: 114249 - DNA, 20 bp, Artificial Sequence
  Description of Artificial Sequence: Synthetic oligonucleotide
  Target: LAMA2; (-) strand; PAM type: NRG; PAM sequence: GAG
tgcttatggatattttaaga

SEQ ID NO: 114250 - DNA, 20 bp, Artificial Sequence
  Description of Artificial Sequence: Synthetic oligonucleotide
  Target: LAMA2; (-) strand; PAM type: NRG; PAM sequence: GAG
cttgcttatggatattttaa

SEQ ID NO: 114251 - DNA, 20 bp, Artificial Sequence
  Description of Artificial Sequence: Synthetic oligonucleotide
  Target: LAMA2; (-) strand; PAM type: NRG; PAM sequence: AAG
ctcttgcttatggatatttt

SEQ ID NO: 114252 - DNA, 20 bp, Artificial Sequence
  Description of Artificial Sequence: Synthetic oligonucleotide
  Target: LAMA2; (-) strand; PAM type: NRG; PAM sequence: TGG
tgactattgactcttgctta

SEQ ID NO: 114253 - DNA, 20 bp, Artificial Sequence
  Description of Artificial Sequence: Synthetic oligonucleotide
  Target: LAMA2; (-) strand; PAM type: NRG; PAM sequence: GAG
aaaacaagctgatcactatt

SEQ ID NO: 114254 - DNA, 20 bp, Artificial Sequence
  Description of Artificial Sequence: Synthetic oligonucleotide
  Target: LAMA2; (-) strand; PAM type: NRG; PAM sequence: AAG
aacgttttcattttaaaaac

SEQ ID NO: 114255 - DNA, 20 bp, Artificial Sequence
  Description of Artificial Sequence: Synthetic oligonucleotide
  Target: LAMA2; (-) strand; PAM type: NRG; PAM sequence: GAG
taggataattaaaaatgtat

SEQ ID NO: 114256 - DNA, 20 bp, Artificial Sequence
  Description of Artificial Sequence: Synthetic oligonucleotide
  Target: LAMA2; (-) strand; PAM type: NRG; PAM sequence: AGG
atgaataattgtattatgat

SEQ ID NO: 114257 - DNA, 20 bp, Artificial Sequence
  Description of Artificial Sequence: Synthetic oligonucleotide
  Target: LAMA2; (-) strand; PAM type: NRG; PAM sequence: TAG
aatgaataattgtattatga

SEQ ID NO: 114258 - DNA, 20 bp, Artificial Sequence
  Description of Artificial Sequence: Synthetic oligonucleotide
  Target: LAMA2; (-) strand; PAM type: NRG; PAM sequence: CAG
ataattttgattagaagcag

SEQ ID NO: 114259 - DNA, 20 bp, Artificial Sequence
  Description of Artificial Sequence: Synthetic oligonucleotide
  Target: LAMA2; (-) strand; PAM type: NRG; PAM sequence: CAG
aagataattttgattagaag

SEQ ID NO: 114260 - DNA, 20 bp, Artificial Sequence
  Description of Artificial Sequence: Synthetic oligonucleotide
  Target: LAMA2; (-) strand; PAM type: NRG; PAM sequence: AAG
tttaagataattttgattag

SEQ ID NO: 114261 - DNA, 20 bp, Artificial Sequence
  Description of Artificial Sequence: Synthetic oligonucleotide
  Target: LAMA2; (-) strand; PAM type: NRG; PAM sequence: TAG
tggtttaagataattttgat

SEQ ID NO: 114262 - DNA, 20 bp, Artificial Sequence
  Description of Artificial Sequence: Synthetic oligonucleotide
  Target: LAMA2; (-) strand; PAM type: NRG; PAM sequence: AAG
taattctattggagtggttt

SEQ ID NO: 114263 - DNA, 20 bp, Artificial Sequence
  Description of Artificial Sequence: Synthetic oligonucleotide
  Target: LAMA2; (-) strand; PAM type: NRG; PAM sequence: TGG
tttccctaattctattggag

SEQ ID NO: 114264 - DNA, 20 bp, Artificial Sequence
  Description of Artificial Sequence: Synthetic oligonucleotide
  Target: LAMA2; (-) strand; PAM type: NRG; PAM sequence: GAG
tcatttccctaattctattg

SEQ ID NO: 114265 - DNA, 20 bp, Artificial Sequence
  Description of Artificial Sequence: Synthetic oligonucleotide
  Target: LAMA2; (-) strand; PAM type: NRG; PAM sequence: TGG
cttcatttccctaattctat

SEQ ID NO: 114266 - DNA, 20 bp, Artificial Sequence
  Description of Artificial Sequence: Synthetic oligonucleotide
  Target: LAMA2; (-) strand; PAM type: NRG; PAM sequence: TGG
aaacctcatcattcaagtgg

SEQ ID NO: 114267 - DNA, 20 bp, Artificial Sequence
  Description of Artificial Sequence: Synthetic oligonucleotide
  Target: LAMA2; (-) strand; PAM type: NRG; PAM sequence: TGG
tttaaacctcatcattcaag

SEQ ID NO: 114268 - DNA, 20 bp, Artificial Sequence
  Description of Artificial Sequence: Synthetic oligonucleotide
  Target: LAMA2; (-) strand; PAM type: NRG; PAM sequence: AAG
gtctttaaacctcatcattc

SEQ ID NO: 114269 - DNA, 20 bp, Artificial Sequence
  Description of Artificial Sequence: Synthetic oligonucleotide
  Target: LAMA2; (-) strand; PAM type: NRG; PAM sequence: CAG
agatcctgaaagttctgttc

SEQ ID NO: 114270 - DNA, 20 bp, Artificial Sequence
  Description of Artificial Sequence: Synthetic oligonucleotide
  Target: LAMA2; (-) strand; PAM type: NRG; PAM sequence: AAG
atgaacaatgaagatcctga

SEQ ID NO: 114271 - DNA, 20 bp, Artificial Sequence
  Description of Artificial Sequence: Synthetic oligonucleotide
  Target: LAMA2; (-) strand; PAM type: NRG; PAM sequence: AAG
gcctgtagctatgaacaatg

SEQ ID NO: 114272 - DNA, 20 bp, Artificial Sequence
  Description of Artificial Sequence: Synthetic oligonucleotide
  Target: LAMA2; (-) strand; PAM type: NRG; PAM sequence: TAG
caattccaaattggagcctg

SEQ ID NO: 114273 - DNA, 20 bp, Artificial Sequence
  Description of Artificial Sequence: Synthetic oligonucleotide
  Target: LAMA2; (-) strand; PAM type: NRG; PAM sequence: GAG
ctatggccaattccaaattg

SEQ ID NO: 114274 - DNA, 20 bp, Artificial Sequence
  Description of Artificial Sequence: Synthetic oligonucleotide
  Target: LAMA2; (-) strand; PAM type: NRG; PAM sequence: TGG
gtctatggccaattccaaat

SEQ ID NO: 114275 - DNA, 20 bp, Artificial Sequence
  Description of Artificial Sequence: Synthetic oligonucleotide
  Target: LAMA2; (-) strand; PAM type: NRG; PAM sequence: TGG
cttctcagagtgggtgtcta

SEQ ID NO: 114276 - DNA, 20 bp, Artificial Sequence
  Description of Artificial Sequence: Synthetic oligonucleotide
  Target: LAMA2; (-) strand; PAM type: NRG; PAM sequence: GGG
attcccaaacttctcagagt

SEQ ID NO: 114277 - DNA, 20 bp, Artificial Sequence
  Description of Artificial Sequence: Synthetic oligonucleotide
  Target: LAMA2; (-) strand; PAM type: NRG; PAM sequence: TGG
tattcccaaacttctcagag

SEQ ID NO: 114278 - DNA, 20 bp, Artificial Sequence
  Description of Artificial Sequence: Synthetic oligonucleotide
  Target: LAMA2; (-) strand; PAM type: NRG; PAM sequence: GAG
tcttattcccaaacttctca

SEQ ID NO: 114279 - DNA, 20 bp, Artificial Sequence
  Description of Artificial Sequence: Synthetic oligonucleotide
  Target: LAMA2; (-) strand; PAM type: NRG; PAM sequence: CAG
tttcttattcccaaacttct

SEQ ID NO: 114280 - DNA, 20 bp, Artificial Sequence
  Description of Artificial Sequence: Synthetic oligonucleotide
  Target: LAMA2; (-) strand; PAM type: NRG; PAM sequence: TAG
agtatgggtccttacagttt

SEQ ID NO: 114281 - DNA, 20 bp, Artificial Sequence
  Description of Artificial Sequence: Synthetic oligonucleotide
  Target: LAMA2; (-) strand; PAM type: NRG; PAM sequence: CAG
gaagccagtatgggtcctta

SEQ ID NO: 114282 - DNA, 20 bp, Artificial Sequence
  Description of Artificial Sequence: Synthetic oligonucleotide
  Target: LAMA2; (-) strand; PAM type: NRG; PAM sequence: GGG
ttcctttaagaagccagtat

SEQ ID NO: 114283 - DNA, 20 bp, Artificial Sequence
  Description of Artificial Sequence: Synthetic oligonucleotide
  Target: LAMA2; (-) strand; PAM type: NRG; PAM sequence: TGG
cttcctttaagaagccagta

SEQ ID NO: 114284 - DNA, 20 bp, Artificial Sequence
  Description of Artificial Sequence: Synthetic oligonucleotide
  Target: LAMA2; (-) strand; PAM type: NRG; PAM sequence: CAG
taaaacttcctttaagaagc

SEQ ID NO: 114285 - DNA, 20 bp, Artificial Sequence
  Description of Artificial Sequence: Synthetic oligonucleotide
  Target: LAMA2; (-) strand; PAM type: NRG; PAM sequence: AAG
tcagtaaaacttcctttaag

SEQ ID NO: 114286 - DNA, 20 bp, Artificial Sequence
  Description of Artificial Sequence: Synthetic oligonucleotide
  Target: LAMA2; (-) strand; PAM type: NRG; PAM sequence: AAG
ttctcagtaaaacttccttt

SEQ ID NO: 114287 - DNA, 20 bp, Artificial Sequence
  Description of Artificial Sequence: Synthetic oligonucleotide
  Target: LAMA2; (-) strand; PAM type: NRG; PAM sequence: CAG
gctttgaagattaaaattct

SEQ ID NO: 114288 - DNA, 20 bp, Artificial Sequence
  Description of Artificial Sequence: Synthetic oligonucleotide
  Target: LAMA2; (-) strand; PAM type: NRG; PAM sequence: AAG
tgaatgagagttaggctttg

SEQ ID NO: 114289 - DNA, 20 bp, Artificial Sequence
  Description of Artificial Sequence: Synthetic oligonucleotide
  Target: LAMA2; (-) strand; PAM type: NRG; PAM sequence: AGG
tttgaatgtgaatgagagtt

SEQ ID NO: 114290 - DNA, 20 bp, Artificial Sequence
  Description of Artificial Sequence: Synthetic oligonucleotide
  Target: LAMA2; (-) strand; PAM type: NRG; PAM sequence: TAG
ttttgaatgtgaatgagagt

SEQ ID NO: 114291 - DNA, 20 bp, Artificial Sequence
  Description of Artificial Sequence: Synthetic oligonucleotide
  Target: LAMA2; (-) strand; PAM type: NRG; PAM sequence: GAG
tatcttttgaatgtgaatga

SEQ ID NO: 114292 - DNA, 20 bp, Artificial Sequence
  Description of Artificial Sequence: Synthetic oligonucleotide
  Target: LAMA2; (-) strand; PAM type: NRG; PAM sequence: GAG
tatatcttttgaatgtgaat

SEQ ID NO: 114293 - DNA, 20 bp, Artificial Sequence
  Description of Artificial Sequence: Synthetic oligonucleotide
  Target: LAMA2; (-) strand; PAM type: NRG; PAM sequence: CAG
gaggctattcattttccgga

SEQ ID NO: 114294 - DNA, 20 bp, Artificial Sequence
  Description of Artificial Sequence: Synthetic oligonucleotide
  Target: LAMA2; (-) strand; PAM type: NRG; PAM sequence: CGG
tgcagaggctattcattttc

SEQ ID NO: 114295 - DNA, 20 bp, Artificial Sequence
  Description of Artificial Sequence: Synthetic oligonucleotide
  Target: LAMA2; (-) strand; PAM type: NRG; PAM sequence: AGG
atcataatttccacgtgcag

SEQ ID NO: 114296 - DNA, 20 bp, Artificial Sequence
  Description of Artificial Sequence: Synthetic oligonucleotide
  Target: LAMA2; (-) strand; PAM type: NRG; PAM sequence: GAG
aatcataatttccacgtgca

SEQ ID NO: 114297 - DNA, 20 bp, Artificial Sequence
  Description of Artificial Sequence: Synthetic oligonucleotide
  Target: LAMA2; (-) strand; PAM type: NRG; PAM sequence: CAG
ggaatcataatttccacgtg

SEQ ID NO: 114298 - DNA, 20 bp, Artificial Sequence
  Description of Artificial Sequence: Synthetic oligonucleotide
  Target: LAMA2; (-) strand; PAM type: NRG; PAM sequence: GGG
gttactgcaaagtgccttta

SEQ ID NO: 114299 - DNA, 20 bp, Artificial Sequence
  Description of Artificial Sequence: Synthetic oligonucleotide
  Target: LAMA2; (-) strand; PAM type: NRG; PAM sequence: AGG
ggttactgcaaagtgccttt

SEQ ID NO: 114300 - DNA, 20 bp, Artificial Sequence
  Description of Artificial Sequence: Synthetic oligonucleotide
  Target: LAMA2; (-) strand; PAM type: NRG; PAM sequence: TAG
tggttactgcaaagtgcctt

SEQ ID NO: 114301 - DNA, 20 bp, Artificial Sequence
  Description of Artificial Sequence: Synthetic oligonucleotide
  Target: LAMA2; (-) strand; PAM type: NRG; PAM sequence: AAG
aataattcctggttactgca

SEQ ID NO: 114302 - DNA, 20 bp, Artificial Sequence
  Description of Artificial Sequence: Synthetic oligonucleotide
  Target: LAMA2; (-) strand; PAM type: NRG; PAM sequence: TGG
tttagttgcaaaataattcc

SEQ ID NO: 114303 - DNA, 20 bp, Artificial Sequence
  Description of Artificial Sequence: Synthetic oligonucleotide
  Target: LAMA2; (-) strand; PAM type: NRG; PAM sequence: TAG
caaatttctgcctcatattt

SEQ ID NO: 114304 - DNA, 20 bp, Artificial Sequence
  Description of Artificial Sequence: Synthetic oligonucleotide
  Target: LAMA2; (-) strand; PAM type: NRG; PAM sequence: CAG
gttcagataaaactactgtg

SEQ ID NO: 114305 - DNA, 20 bp, Artificial Sequence
  Description of Artificial Sequence: Synthetic oligonucleotide
  Target: LAMA2; (-) strand; PAM type: NRG; PAM sequence: CAG
tcatggagttttagatagtt

SEQ ID NO: 114306 - DNA, 20 bp, Artificial Sequence
  Description of Artificial Sequence: Synthetic oligonucleotide
  Target: LAMA2; (-) strand; PAM type: NRG; PAM sequence: TAG
tcaaatcatggagttttaga

SEQ ID NO: 114307 - DNA, 20 bp, Artificial Sequence
  Description of Artificial Sequence: Synthetic oligonucleotide
  Target: LAMA2; (-) strand; PAM type: NRG; PAM sequence: TAG
attttcaaatcatggagttt

SEQ ID NO: 114308 - DNA, 20 bp, Artificial Sequence
  Description of Artificial Sequence: Synthetic oligonucleotide
  Target: LAMA2; (-) strand; PAM type: NRG; PAM sequence: GAG
attccaattttcaaatcatg

SEQ ID NO: 114309 - DNA, 20 bp, Artificial Sequence
  Description of Artificial Sequence: Synthetic oligonucleotide
  Target: LAMA2; (-) strand; PAM type: NRG; PAM sequence: TGG
ctattccaattttcaaatca

SEQ ID NO: 114310 - DNA, 20 bp, Artificial Sequence
  Description of Artificial Sequence: Synthetic oligonucleotide
  Target: LAMA2; (-) strand; PAM type: NRG; PAM sequence: TGG
cagttaaatgacacaagagc

SEQ ID NO: 114311 - DNA, 20 bp, Artificial Sequence
  Description of Artificial Sequence: Synthetic oligonucleotide
  Target: LAMA2; (-) strand; PAM type: NRG; PAM sequence: GAG
agaccagttaaatgacacaa

SEQ ID NO: 114312 - DNA, 20 bp, Artificial Sequence
  Description of Artificial Sequence: Synthetic oligonucleotide
  Target: LAMA2; (-) strand; PAM type: NRG; PAM sequence: AAG
caagaccagttaaatgacac

SEQ ID NO: 114313 - DNA, 20 bp, Artificial Sequence
  Description of Artificial Sequence: Synthetic oligonucleotide
  Target: LAMA2; (-) strand; PAM type: NRG; PAM sequence: CAG
ctcccacagtgtttcaagac

SEQ ID NO: 114314 - DNA, 20 bp, Artificial Sequence
  Description of Artificial Sequence: Synthetic oligonucleotide
  Target: LAMA2; (-) strand; PAM type: NRG; PAM sequence: AAG
ttttcctcccacagtgtttc

SEQ ID NO: 114315 - DNA, 20 bp, Artificial Sequence
  Description of Artificial Sequence: Synthetic oligonucleotide
  Target: LAMA2; (-) strand; PAM type: NRG; PAM sequence: CAG
tgtaggctattttcctccca

SEQ ID NO: 114316 - DNA, 20 bp, Artificial Sequence
  Description of Artificial Sequence: Synthetic oligonucleotide
  Target: LAMA2; (-) strand; PAM type: NRG; PAM sequence: AGG
agcaaagaatcctttaatgt

SEQ ID NO: 114317 - DNA, 20 bp, Artificial Sequence
  Description of Artificial Sequence: Synthetic oligonucleotide
  Target: LAMA2; (-) strand; PAM type: NRG; PAM sequence: TAG
aagcaaagaatcctttaatg

SEQ ID NO: 114318 - DNA, 20 bp, Artificial Sequence
  Description of Artificial Sequence: Synthetic oligonucleotide
  Target: LAMA2; (-) strand; PAM type: NRG; PAM sequence: AAG
attttgtaggagtaaaagca

SEQ ID NO: 114319 - DNA, 20 bp, Artificial Sequence
  Description of Artificial Sequence: Synthetic oligonucleotide
  Target: LAMA2; (-) strand; PAM type: NRG; PAM sequence: AAG
cctagattttgtaggagtaa

SEQ ID NO: 114320 - DNA, 20 bp, Artificial Sequence
  Description of Artificial Sequence: Synthetic oligonucleotide
  Target: LAMA2; (-) strand; PAM type: NRG; PAM sequence: GAG
taaagtcctagattttgtag

SEQ ID NO: 114321 - DNA, 20 bp, Artificial Sequence
  Description of Artificial Sequence: Synthetic oligonucleotide
  Target: LAMA2; (-) strand; PAM type: NRG; PAM sequence: AGG
tttaaagtcctagattttgt

SEQ ID NO: 114322 - DNA, 20 bp, Artificial Sequence
  Description of Artificial Sequence: Synthetic oligonucleotide
  Target: LAMA2; (-) strand; PAM type: NRG; PAM sequence: TAG
ttttaaagtcctagattttg

SEQ ID NO: 114323 - DNA, 20 bp, Artificial Sequence
  Description of Artificial Sequence: Synthetic oligonucleotide
  Target: LAMA2; (-) strand; PAM type: NRG; PAM sequence: TAG
aatattcatttttaaagtcc

SEQ ID NO: 114324 - DNA, 20 bp, Artificial Sequence
  Description of Artificial Sequence: Synthetic oligonucleotide
  Target: LAMA2; (-) strand; PAM type: NRG; PAM sequence: AAG
gcttaaaatattcattttta

SEQ ID NO: 114325 - DNA, 20 bp, Artificial Sequence
  Description of Artificial Sequence: Synthetic oligonucleotide
  Target: LAMA2; (-) strand; PAM type: NRG; PAM sequence: AAG
cccatgtagttaggaattta

SEQ ID NO: 114326 - DNA, 20 bp, Artificial Sequence
  Description of Artificial Sequence: Synthetic oligonucleotide
  Target: LAMA2; (-) strand; PAM type: NRG; PAM sequence: AGG
ttaagcaagcccatgtagtt

SEQ ID NO: 114327 - DNA, 20 bp, Artificial Sequence
  Description of Artificial Sequence: Synthetic oligonucleotide
  Target: LAMA2; (-) strand; PAM type: NRG; PAM sequence: TAG
tttaagcaagcccatgtagt

SEQ ID NO: 114328 - DNA, 20 bp, Artificial Sequence
  Description of Artificial Sequence: Synthetic oligonucleotide
  Target: LAMA2; (-) strand; PAM type: NRG; PAM sequence: TAG
tttatttaagcaagcccatg

SEQ ID NO: 114329 - DNA, 20 bp, Artificial Sequence
  Description of Artificial Sequence: Synthetic oligonucleotide
  Target: LAMA2; (-) strand; PAM type: NRG; PAM sequence: AAG
ttgctagtatttatttaagc

SEQ ID NO: 114330 - DNA, 20 bp, Artificial Sequence
  Description of Artificial Sequence: Synthetic oligonucleotide
  Target: LAMA2; (-) strand; PAM type: NRG; PAM sequence: AAG
gaatttgctagtatttattt

SEQ ID NO: 114331 - DNA, 20 bp, Artificial Sequence
  Description of Artificial Sequence: Synthetic oligonucleotide
  Target: LAMA2; (-) strand; PAM type: NRG; PAM sequence: TAG
tttctactttatgaatttgc

SEQ ID NO: 114332 - DNA, 20 bp, Artificial Sequence
  Description of Artificial Sequence: Synthetic oligonucleotide
  Target: LAMA2; (-) strand; PAM type: NRG; PAM sequence: AGG
tagtcacttttaatggcagg

SEQ ID NO: 114333 - DNA, 20 bp, Artificial Sequence
  Description of Artificial Sequence: Synthetic oligonucleotide
  Target: LAMA2; (-) strand; PAM type: NRG; PAM sequence: GAG
atagtcacttttaatggcag

SEQ ID NO: 114334 - DNA, 20 bp, Artificial Sequence
  Description of Artificial Sequence: Synthetic oligonucleotide
  Target: LAMA2; (-) strand; PAM type: NRG; PAM sequence: AGG
agatagtcacttttaatggc

SEQ ID NO: 114335 - DNA, 20 bp, Artificial Sequence
  Description of Artificial Sequence: Synthetic oligonucleotide
  Target: LAMA2; (-) strand; PAM type: NRG; PAM sequence: CAG
tagatagtcacttttaatgg

SEQ ID NO: 114336 - DNA, 20 bp, Artificial Sequence
  Description of Artificial Sequence: Synthetic oligonucleotide
  Target: LAMA2; (-) strand; PAM type: NRG; PAM sequence: TGG
atgtagatagtcacttttaa

SEQ ID NO: 114337 - DNA, 20 bp, Artificial Sequence
  Description of Artificial Sequence: Synthetic oligonucleotide
  Target: LAMA2; (-) strand; PAM type: NRG; PAM sequence: TAG
actctctcagtaaatgtaga

SEQ ID NO: 114338 - DNA, 20 bp, Artificial Sequence
  Description of Artificial Sequence: Synthetic oligonucleotide
  Target: LAMA2; (-) strand; PAM type: NRG; PAM sequence: TAG
tatcactctctcagtaaatg

SEQ ID NO: 114339 - DNA, 20 bp, Artificial Sequence
  Description of Artificial Sequence: Synthetic oligonucleotide
  Target: LAMA2; (-) strand; PAM type: NRG; PAM sequence: CAG
tgtggaagatatcactctct

SEQ ID NO: 114340 - DNA, 20 bp, Artificial Sequence
  Description of Artificial Sequence: Synthetic oligonucleotide
  Target: LAMA2; (-) strand; PAM type: NRG; PAM sequence: AAG
tttttttcttacatatgtgg

SEQ ID NO: 114341 - DNA, 20 bp, Artificial Sequence
  Description of Artificial Sequence: Synthetic oligonucleotide
  Target: LAMA2; (-) strand; PAM type: NRG; PAM sequence: TGG
acttttttttcttacatatg

SEQ ID NO: 114342 - DNA, 20 bp, Artificial Sequence
  Description of Artificial Sequence: Synthetic oligonucleotide
  Target: LAMA2; (-) strand; PAM type: NRG; PAM sequence: TAG
gtatttaaaatgaatcttga

SEQ ID NO: 114343 - DNA, 20 bp, Artificial Sequence
  Description of Artificial Sequence: Synthetic oligonucleotide
  Target: LAMA2; (-) strand; PAM type: NRG; PAM sequence: TAG
caaagctgtgcagaagcata

SEQ ID NO: 114344 - DNA, 20 bp, Artificial Sequence
  Description of Artificial Sequence: Synthetic oligonucleotide
  Target: LAMA2; (-) strand; PAM type: NRG; PAM sequence: AAG
tcaatctcaaagctgtgcag

SEQ ID NO: 114345 - DNA, 20 bp, Artificial Sequence
  Description of Artificial Sequence: Synthetic oligonucleotide
  Target: LAMA2; (-) strand; PAM type: NRG; PAM sequence: CAG
atctcaatctcaaagctgtg

SEQ ID NO: 114346 - DNA, 20 bp, Artificial Sequence
  Description of Artificial Sequence: Synthetic oligonucleotide
  Target: LAMA2; (-) strand; PAM type: NRG; PAM sequence: AAG
agctccccatctcaatctca

SEQ ID NO: 114347 - DNA, 20 bp, Artificial Sequence
  Description of Artificial Sequence: Synthetic oligonucleotide
  Target: LAMA2; (-) strand; PAM type: NRG; PAM sequence: CAG
aggtgcaaaagggagaaaat

SEQ ID NO: 114348 - DNA, 20 bp, Artificial Sequence
  Description of Artificial Sequence: Synthetic oligonucleotide
  Target: LAMA2; (-) strand; PAM type: NRG; PAM sequence: GAG
tgtaaataaggtgcaaaagg

SEQ ID NO: 114349 - DNA, 20 bp, Artificial Sequence
  Description of Artificial Sequence: Synthetic oligonucleotide
  Target: LAMA2; (-) strand; PAM type: NRG; PAM sequence: GGG
aatgtaaataaggtgcaaaa

SEQ ID NO: 114350 - DNA, 20 bp, Artificial Sequence
  Description of Artificial Sequence: Synthetic oligonucleotide
  Target: LAMA2; (-) strand; PAM type: NRG; PAM sequence: AGG
aaatgtaaataaggtgcaaa

SEQ ID NO: 114351 - DNA, 20 bp, Artificial Sequence
  Description of Artificial Sequence: Synthetic oligonucleotide
  Target: LAMA2; (-) strand; PAM type: NRG; PAM sequence: AAG
gaaatgtaaataaggtgcaa

SEQ ID NO: 114352 - DNA, 20 bp, Artificial Sequence
  Description of Artificial Sequence: Synthetic oligonucleotide
  Target: LAMA2; (-) strand; PAM type: NRG; PAM sequence: AGG
ttcaagtagaaatgtaaata

SEQ ID NO: 114353 - DNA, 20 bp, Artificial Sequence
  Description of Artificial Sequence: Synthetic oligonucleotide
  Target: LAMA2; (-) strand; PAM type: NRG; PAM sequence: AAG
tttcaagtagaaatgtaaat

SEQ ID NO: 114354 - DNA, 20 bp, Artificial Sequence
  Description of Artificial Sequence: Synthetic oligonucleotide
  Target: LAMA2; (-) strand; PAM type: NRG; PAM sequence: TAG
taaaacagttacatttcaag

SEQ ID NO: 114355 - DNA, 20 bp, Artificial Sequence
  Description of Artificial Sequence: Synthetic oligonucleotide
  Target: LAMA2; (-) strand; PAM type: NRG; PAM sequence: AAG
aattaaaacagttacatttc

SEQ ID NO: 114356 - DNA, 20 bp, Artificial Sequence
  Description of Artificial Sequence: Synthetic oligonucleotide
  Target: LAMA2; (-) strand; PAM type: NRG; PAM sequence: CAG
tgctcagtataaaattaaaa

SEQ ID NO: 114357 - DNA, 20 bp, Artificial Sequence
  Description of Artificial Sequence: Synthetic oligonucleotide
  Target: LAMA2; (-) strand; PAM type: NRG; PAM sequence: CAG
gtaataccattgtccttgct

SEQ ID NO: 114358 - DNA, 20 bp, Artificial Sequence
  Description of Artificial Sequence: Synthetic oligonucleotide
  Target: LAMA2; (-) strand; PAM type: NRG; PAM sequence: AAG
ctagttttttctcaatatta

SEQ ID NO: 114359 - DNA, 20 bp, Artificial Sequence
  Description of Artificial Sequence: Synthetic oligonucleotide
  Target: LAMA2; (-) strand; PAM type: NRG; PAM sequence: TAG
aaaacaaacatcgcatagtc

SEQ ID NO: 114360 - DNA, 20 bp, Artificial Sequence
  Description of Artificial Sequence: Synthetic oligonucleotide
  Target: LAMA2; (-) strand; PAM type: NRG; PAM sequence: TAG
taaataaaacaaacatcgca

SEQ ID NO: 114361 - DNA, 20 bp, Artificial Sequence
  Description of Artificial Sequence: Synthetic oligonucleotide
  Target: LAMA2; (-) strand; PAM type: NRG; PAM sequence: AAG
ctgcatttttccccagtgat

SEQ ID NO: 114362 - DNA, 20 bp, Artificial Sequence
  Description of Artificial Sequence: Synthetic oligonucleotide
  Target: LAMA2; (-) strand; PAM type: NRG; PAM sequence: CAG
tctgtgtctgcatttttccc

SEQ ID NO: 114363 - DNA, 20 bp, Artificial Sequence
  Description of Artificial Sequence: Synthetic oligonucleotide
  Target: LAMA2; (-) strand; PAM type: NRG; PAM sequence: GGG
attgtttatgttttacagat

SEQ ID NO: 114364 - DNA, 20 bp, Artificial Sequence
  Description of Artificial Sequence: Synthetic oligonucleotide
  Target: LAMA2; (-) strand; PAM type: NRG; PAM sequence: TGG
aattgtttatgttttacaga

SEQ ID NO: 114365 - DNA, 20 bp, Artificial Sequence
  Description of Artificial Sequence: Synthetic oligonucleotide
  Target: LAMA2; (-) strand; PAM type: NRG; PAM sequence: CAG
acttaattgtttatgtttta

SEQ ID NO: 114366 - DNA, 20 bp, Artificial Sequence
  Description of Artificial Sequence: Synthetic oligonucleotide
  Target: LAMA2; (-) strand; PAM type: NRG; PAM sequence: AAG
tgtctagggagattgtccct

SEQ ID NO: 114367 - DNA, 20 bp, Artificial Sequence
  Description of Artificial Sequence: Synthetic oligonucleotide
  Target: LAMA2; (-) strand; PAM type: NRG; PAM sequence: GAG
caagcaggtacatgtctagg

SEQ ID NO: 114368 - DNA, 20 bp, Artificial Sequence
  Description of Artificial Sequence: Synthetic oligonucleotide
  Target: LAMA2; (-) strand; PAM type: NRG; PAM sequence: GGG
cacaagcaggtacatgtcta

SEQ ID NO: 114369 - DNA, 20 bp, Artificial Sequence
  Description of Artificial Sequence: Synthetic oligonucleotide
  Target: LAMA2; (-) strand; PAM type: NRG; PAM sequence: AGG
acacaagcaggtacatgtct

SEQ ID NO: 114370 - DNA, 20 bp, Artificial Sequence
  Description of Artificial Sequence: Synthetic oligonucleotide
  Target: LAMA2; (-) strand; PAM type: NRG; PAM sequence: TAG
cacacaagcaggtacatgtc

SEQ ID NO: 114371 - DNA, 20 bp, Artificial Sequence
  Description of Artificial Sequence: Synthetic oligonucleotide
  Target: LAMA2; (-) strand; PAM type: NRG; PAM sequence: AGG
agtcaaactgacacacaagc

SEQ ID NO: 114372 - DNA, 20 bp, Artificial Sequence
  Description of Artificial Sequence: Synthetic oligonucleotide
  Target: LAMA2; (-) strand; PAM type: NRG; PAM sequence: CAG
aagtcaaactgacacacaag

SEQ ID NO: 114373 - DNA, 20 bp, Artificial Sequence
  Description of Artificial Sequence: Synthetic oligonucleotide
  Target: LAMA2; (-) strand; PAM type: NRG; PAM sequence: AAG
tttaagtcaaactgacacac

SEQ ID NO: 114374 - DNA, 20 bp, Artificial Sequence
  Description of Artificial Sequence: Synthetic oligonucleotide
  Target: LAMA2; (-) strand; PAM type: NRG; PAM sequence: AAG
gttgtttaaaccaaagattt

SEQ ID NO: 114375 - DNA, 20 bp, Artificial Sequence
  Description of Artificial Sequence: Synthetic oligonucleotide
  Target: LAMA2; (-) strand; PAM type: NRG; PAM sequence: AAG
tgttgttgttgtttaaacca

SEQ ID NO: 114376 - DNA, 20 bp, Artificial Sequence
  Description of Artificial Sequence: Synthetic oligonucleotide
  Target: LAMA2; (-) strand; PAM type: NRG; PAM sequence: AGG
tatagaagattatcactgtt

SEQ ID NO: 114377 - DNA, 20 bp, Artificial Sequence
  Description of Artificial Sequence: Synthetic oligonucleotide
  Target: LAMA2; (-) strand; PAM type: NRG; PAM sequence: TAG
atatagaagattatcactgt

SEQ ID NO: 114378 - DNA, 20 bp, Artificial Sequence
  Description of Artificial Sequence: Synthetic oligonucleotide
  Target: LAMA2; (-) strand; PAM type: NRG; PAM sequence: AAG
gcttttgattttaaatatag

SEQ ID NO: 114379 - DNA, 20 bp, Artificial Sequence
  Description of Artificial Sequence: Synthetic oligonucleotide
  Target: LAMA2; (-) strand; PAM type: NRG; PAM sequence: TAG
agagcttttgattttaaata

SEQ ID NO: 114380 - DNA, 20 bp, Artificial Sequence
  Description of Artificial Sequence: Synthetic oligonucleotide
  Target: LAMA2; (-) strand; PAM type: NRG; PAM sequence: GAG
tagcctctacttttattcta

SEQ ID NO: 114381 - DNA, 20 bp, Artificial Sequence
  Description of Artificial Sequence: Synthetic oligonucleotide
  Target: LAMA2; (-) strand; PAM type: NRG; PAM sequence: TAG
tatagcctctacttttattc

SEQ ID NO: 114382 - DNA, 20 bp, Artificial Sequence
  Description of Artificial Sequence: Synthetic oligonucleotide
  Target: LAMA2; (-) strand; PAM type: NRG; PAM sequence: TAG
ttttgttaaaatcagaatta

SEQ ID NO: 114383 - DNA, 20 bp, Artificial Sequence
  Description of Artificial Sequence: Synthetic oligonucleotide
  Target: LAMA2; (-) strand; PAM type: NRG; PAM sequence: CAG
tgagcagtttttgttaaaat

SEQ ID NO: 114384 - DNA, 20 bp, Artificial Sequence
  Description of Artificial Sequence: Synthetic oligonucleotide
  Target: LAMA2; (-) strand; PAM type: NRG; PAM sequence: CAG
ataacttcaaatcttctgag

SEQ ID NO: 114385 - DNA, 20 bp, Artificial Sequence
  Description of Artificial Sequence: Synthetic oligonucleotide
  Target: LAMA2; (-) strand; PAM type: NRG; PAM sequence: GAG
atgataacttcaaatcttct

SEQ ID NO: 114386 - DNA, 20 bp, Artificial Sequence
  Description of Artificial Sequence: Synthetic oligonucleotide
  Target: LAMA2; (-) strand; PAM type: NRG; PAM sequence: TAG
agttgaagaaatattatttc

SEQ ID NO: 114387 - DNA, 20 bp, Artificial Sequence
  Description of Artificial Sequence: Synthetic oligonucleotide
  Target: LAMA2; (-) strand; PAM type: NRG; PAM sequence: AAG
ggaaagtttaagagcagttg

SEQ ID NO: 114388 - DNA, 20 bp, Artificial Sequence
  Description of Artificial Sequence: Synthetic oligonucleotide
  Target: LAMA2; (-) strand; PAM type: NRG; PAM sequence: CAG
aaacatggaaagtttaagag

SEQ ID NO: 114389 - DNA, 20 bp, Artificial Sequence
  Description of Artificial Sequence: Synthetic oligonucleotide
  Target: LAMA2; (-) strand; PAM type: NRG; PAM sequence: GAG
ggaaaacatggaaagtttaa

SEQ ID NO: 114390 - DNA, 20 bp, Artificial Sequence
  Description of Artificial Sequence: Synthetic oligonucleotide
  Target: LAMA2; (-) strand; PAM type: NRG; PAM sequence: AAG
caggaaaacatggaaagttt

SEQ ID NO: 114391 - DNA, 20 bp, Artificial Sequence
  Description of Artificial Sequence: Synthetic oligonucleotide
  Target: LAMA2; (-) strand; PAM type: NRG; PAM sequence: AAG
agaaagcaggaaaacatgga

SEQ ID NO: 114392 - DNA, 20 bp, Artificial Sequence
  Description of Artificial Sequence: Synthetic oligonucleotide
  Target: LAMA2; (-) strand; PAM type: NRG; PAM sequence: TGG
gtttagaaagcaggaaaaca

SEQ ID NO: 114393 - DNA, 20 bp, Artificial Sequence
  Description of Artificial Sequence: Synthetic oligonucleotide
  Target: LAMA2; (-) strand; PAM type: NRG; PAM sequence: AGG
acatcataggtttagaaagc

SEQ ID NO: 114394 - DNA, 20 bp, Artificial Sequence
  Description of Artificial Sequence: Synthetic oligonucleotide
  Target: LAMA2; (-) strand; PAM type: NRG; PAM sequence: CAG
tacatcataggtttagaaag

SEQ ID NO: 114395 - DNA, 20 bp, Artificial Sequence
  Description of Artificial Sequence: Synthetic oligonucleotide
  Target: LAMA2; (-) strand; PAM type: NRG; PAM sequence: AAG
aaatacatcataggtttaga

SEQ ID NO: 114396 - DNA, 20 bp, Artificial Sequence
  Description of Artificial Sequence: Synthetic oligonucleotide
  Target: LAMA2; (-) strand; PAM type: NRG; PAM sequence: TAG
tatgaaatacatcataggtt

SEQ ID NO: 114397 - DNA, 20 bp, Artificial Sequence
  Description of Artificial Sequence: Synthetic oligonucleotide
  Target: LAMA2; (-) strand; PAM type: NRG; PAM sequence: AGG
gtgattatgaaatacatcat

SEQ ID NO: 114398 - DNA, 20 bp, Artificial Sequence
  Description of Artificial Sequence: Synthetic oligonucleotide
  Target: LAMA2; (-) strand; PAM type: NRG; PAM sequence: TAG
tgtgattatgaaatacatca

SEQ ID NO: 114399 - DNA, 20 bp, Artificial Sequence
  Description of Artificial Sequence: Synthetic oligonucleotide
  Target: LAMA2; (-) strand; PAM type: NRG; PAM sequence: AAG
ttagaaatgaaaatttaaat

SEQ ID NO: 114400 - DNA, 20 bp, Artificial Sequence
  Description of Artificial Sequence: Synthetic oligonucleotide
  Target: LAMA2; (-) strand; PAM type: NRG; PAM sequence: TAG
aaaagaagagtagaaaccat

SEQ ID NO: 114401 - DNA, 20 bp, Artificial Sequence
  Description of Artificial Sequence: Synthetic oligonucleotide
  Target: LAMA2; (-) strand; PAM type: NRG; PAM sequence: TAG
tgagtaaaggaaaagaagag

SEQ ID NO: 114402 - DNA, 20 bp, Artificial Sequence
  Description of Artificial Sequence: Synthetic oligonucleotide
  Target: LAMA2; (-) strand; PAM type: NRG; PAM sequence: GAG
ctgtgagtaaaggaaaagaa

SEQ ID NO: 114403 - DNA, 20 bp, Artificial Sequence
  Description of Artificial Sequence: Synthetic oligonucleotide
  Target: LAMA2; (-) strand; PAM type: NRG; PAM sequence: AAG
ttctgtgagtaaaggaaaag

SEQ ID NO: 114404 - DNA, 20 bp, Artificial Sequence
  Description of Artificial Sequence: Synthetic oligonucleotide
  Target: LAMA2; (-) strand; PAM type: NRG; PAM sequence: AAG
acattctgtgagtaaaggaa

SEQ ID NO: 114405 - DNA, 20 bp, Artificial Sequence
  Description of Artificial Sequence: Synthetic oligonucleotide
  Target: LAMA2; (-) strand; PAM type: NRG; PAM sequence: AGG
tgtaaacattctgtgagtaa

SEQ ID NO: 114406 - DNA, 20 bp, Artificial Sequence
  Description of Artificial Sequence: Synthetic oligonucleotide
  Target: LAMA2; (-) strand; PAM type: NRG; PAM sequence: AAG
gtgtaaacattctgtgagta

SEQ ID NO: 114407 - DNA, 20 bp, Artificial Sequence
  Description of Artificial Sequence: Synthetic oligonucleotide
  Target: LAMA2; (-) strand; PAM type: NRG; PAM sequence: GAG
taactgtgtaaacattctgt

SEQ ID NO: 114408 - DNA, 20 bp, Artificial Sequence
  Description of Artificial Sequence: Synthetic oligonucleotide
  Target: LAMA2; (-) strand; PAM type: NRG; PAM sequence: AAG
ccacaaaaccaggcttagga

SEQ ID NO: 114409 - DNA, 20 bp, Artificial Sequence
  Description of Artificial Sequence: Synthetic oligonucleotide
  Target: LAMA2; (-) strand; PAM type: NRG; PAM sequence: AGG
agctccacaaaaccaggctt

SEQ ID NO: 114410 - DNA, 20 bp, Artificial Sequence
  Description of Artificial Sequence: Synthetic oligonucleotide
  Target: LAMA2; (-) strand; PAM type: NRG; PAM sequence: TAG
gagctccacaaaaccaggct

SEQ ID NO: 114411 - DNA, 20 bp, Artificial Sequence
  Description of Artificial Sequence: Synthetic oligonucleotide
  Target: LAMA2; (-) strand; PAM type: NRG; PAM sequence: AGG
ggggagagctccacaaaacc

SEQ ID NO: 114412 - DNA, 20 bp, Artificial Sequence
  Description of Artificial Sequence: Synthetic oligonucleotide
  Target: LAMA2; (-) strand; PAM type: NRG; PAM sequence: CAG
aggggagagctccacaaaac

SEQ ID NO: 114413 - DNA, 20 bp, Artificial Sequence
  Description of Artificial Sequence: Synthetic oligonucleotide
  Target: LAMA2; (-) strand; PAM type: NRG; PAM sequence: GAG
acatcaattggcacagggga

SEQ ID NO: 114414 - DNA, 20 bp, Artificial Sequence
  Description of Artificial Sequence: Synthetic oligonucleotide
  Target: LAMA2; (-) strand; PAM type: NRG; PAM sequence: GAG
ctacatcaattggcacaggg

SEQ ID NO: 114415 - DNA, 20 bp, Artificial Sequence
  Description of Artificial Sequence: Synthetic oligonucleotide
  Target: LAMA2; (-) strand; PAM type: NRG; PAM sequence: GGG
tcctacatcaattggcacag

SEQ ID NO: 114416 - DNA, 20 bp, Artificial Sequence
  Description of Artificial Sequence: Synthetic oligonucleotide
  Target: LAMA2; (-) strand; PAM type: NRG; PAM sequence: GGG
ttcctacatcaattggcaca

SEQ ID NO: 114417 - DNA, 20 bp, Artificial Sequence
  Description of Artificial Sequence: Synthetic oligonucleotide
  Target: LAMA2; (-) strand; PAM type: NRG; PAM sequence: AGG
gttcctacatcaattggcac

SEQ ID NO: 114418 - DNA, 20 bp, Artificial Sequence
  Description of Artificial Sequence: Synthetic oligonucleotide
  Target: LAMA2; (-) strand; PAM type: NRG; PAM sequence: CAG
tgttcctacatcaattggca

SEQ ID NO: 114419 - DNA, 20 bp, Artificial Sequence
  Description of Artificial Sequence: Synthetic oligonucleotide
  Target: LAMA2; (-) strand; PAM type: NRG; PAM sequence: TGG
atttctgttcctacatcaat

SEQ ID NO: 114420 - DNA, 20 bp, Artificial Sequence
  Description of Artificial Sequence: Synthetic oligonucleotide
  Target: LAMA2; (-) strand; PAM type: NRG; PAM sequence: AGG
cattcttggtgctgaatgac

SEQ ID NO: 114421 - DNA, 20 bp, Artificial Sequence
  Description of Artificial Sequence: Synthetic oligonucleotide
  Target: LAMA2; (-) strand; PAM type: NRG; PAM sequence: CAG
tcattcttggtgctgaatga

SEQ ID NO: 114422 - DNA, 20 bp, Artificial Sequence
  Description of Artificial Sequence: Synthetic oligonucleotide
  Target: LAMA2; (-) strand; PAM type: NRG; PAM sequence: TGG
aatgatgccggactcattct

SEQ ID NO: 114423 - DNA, 20 bp, Artificial Sequence
  Description of Artificial Sequence: Synthetic oligonucleotide
  Target: LAMA2; (-) strand; PAM type: NRG; PAM sequence: CGG
acttcccaaaagaatgatgc

SEQ ID NO: 114424 - DNA, 20 bp, Artificial Sequence
  Description of Artificial Sequence: Synthetic oligonucleotide
  Target: LAMA2; (-) strand; PAM type: NRG; PAM sequence: AAG
ggtgtccctccacttcccaa

SEQ ID NO: 114425 - DNA, 20 bp, Artificial Sequence
  Description of Artificial Sequence: Synthetic oligonucleotide
  Target: LAMA2; (-) strand; PAM type: NRG; PAM sequence: TGG
cgttttctcctaggtggtgc

SEQ ID NO: 114426 - DNA, 20 bp, Artificial Sequence
  Description of Artificial Sequence: Synthetic oligonucleotide
  Target: LAMA2; (-) strand; PAM type: NRG; PAM sequence: TGG
tgccttcgttttctcctagg

SEQ ID NO: 114427 - DNA, 20 bp, Artificial Sequence
  Description of Artificial Sequence: Synthetic oligonucleotide
  Target: LAMA2; (-) strand; PAM type: NRG; PAM sequence: AGG
gtctgccttcgttttctcct

SEQ ID NO: 114428 - DNA, 20 bp, Artificial Sequence
  Description of Artificial Sequence: Synthetic oligonucleotide
  Target: LAMA2; (-) strand; PAM type: NRG; PAM sequence: TAG
agtctgccttcgttttctcc

SEQ ID NO: 114429 - DNA, 20 bp, Artificial Sequence
  Description of Artificial Sequence: Synthetic oligonucleotide
  Target: LAMA2; (-) strand; PAM type: NRG; PAM sequence: CAG
taggtgtgagggtacctgtc

SEQ ID NO: 114430 - DNA, 20 bp, Artificial Sequence
  Description of Artificial Sequence: Synthetic oligonucleotide
  Target: LAMA2; (-) strand; PAM type: NRG; PAM sequence: GGG
gcattatcagctaggtgtga

SEQ ID NO: 114431 - DNA, 20 bp, Artificial Sequence
  Description of Artificial Sequence: Synthetic oligonucleotide
  Target: LAMA2; (-) strand; PAM type: NRG; PAM sequence: AGG
tgcattatcagctaggtgtg

SEQ ID NO: 114432 - DNA, 20 bp, Artificial Sequence
  Description of Artificial Sequence: Synthetic oligonucleotide
  Target: LAMA2; (-) strand; PAM type: NRG; PAM sequence: GAG
atgcattatcagctaggtgt

SEQ ID NO: 114433 - DNA, 20 bp, Artificial Sequence
  Description of Artificial Sequence: Synthetic oligonucleotide
  Target: LAMA2; (-) strand; PAM type: NRG; PAM sequence: AGG
gggaaaatgcattatcagct

SEQ ID NO: 114434 - DNA, 20 bp, Artificial Sequence
  Description of Artificial Sequence: Synthetic oligonucleotide
  Target: LAMA2; (-) strand; PAM type: NRG; PAM sequence: TAG
agggaaaatgcattatcagc

SEQ ID NO: 114435 - DNA, 20 bp, Artificial Sequence
  Description of Artificial Sequence: Synthetic oligonucleotide
  Target: LAMA2; (-) strand; PAM type: NRG; PAM sequence: CAG
cattagggaaaatgcattat

SEQ ID NO: 114436 - DNA, 20 bp, Artificial Sequence
  Description of Artificial Sequence: Synthetic oligonucleotide
  Target: LAMA2; (-) strand; PAM type: NRG; PAM sequence: GGG
actgctttatataagcatta

SEQ ID NO: 114437 - DNA, 20 bp, Artificial Sequence
  Description of Artificial Sequence: Synthetic oligonucleotide
  Target: LAMA2; (-) strand; PAM type: NRG; PAM sequence: AGG
aactgctttatataagcatt

SEQ ID NO: 114438 - DNA, 20 bp, Artificial Sequence
  Description of Artificial Sequence: Synthetic oligonucleotide
  Target: LAMA2; (-) strand; PAM type: NRG; PAM sequence: TAG
taactgctttatataagcat

SEQ ID NO: 114439 - DNA, 20 bp, Artificial Sequence
  Description of Artificial Sequence: Synthetic oligonucleotide
  Target: LAMA2; (-) strand; PAM type: NRG; PAM sequence: AAG
gtaagttaactgctttatat

SEQ ID NO: 114440 - DNA, 20 bp, Artificial Sequence
  Description of Artificial Sequence: Synthetic oligonucleotide
  Target: LAMA2; (-) strand; PAM type: NRG; PAM sequence: AAG
gaaactaaaaatacaaaagt

SEQ ID NO: 114441 - DNA, 20 bp, Artificial Sequence
  Description of Artificial Sequence: Synthetic oligonucleotide
  Target: LAMA2; (-) strand; PAM type: NRG; PAM sequence: AAG
atacgaaactaaaaatacaa

SEQ ID NO: 114442 - DNA, 20 bp, Artificial Sequence
  Description of Artificial Sequence: Synthetic oligonucleotide
  Target: LAMA2; (-) strand; PAM type: NRG; PAM sequence: CAG
cttgctagccaagatgagag

SEQ ID NO: 114443 - DNA, 20 bp, Artificial Sequence
  Description of Artificial Sequence: Synthetic oligonucleotide
  Target: LAMA2; (-) strand; PAM type: NRG; PAM sequence: GAG
gtccttgctagccaagatga

SEQ ID NO: 114444 - DNA, 20 bp, Artificial Sequence
  Description of Artificial Sequence: Synthetic oligonucleotide
  Target: LAMA2; (-) strand; PAM type: NRG; PAM sequence: GAG
cagtccttgctagccaagat

SEQ ID NO: 114445 - DNA, 20 bp, Artificial Sequence
  Description of Artificial Sequence: Synthetic oligonucleotide
  Target: LAMA2; (-) strand; PAM type: NRG; PAM sequence: AAG
atgttcagtccttgctagcc

SEQ ID NO: 114446 - DNA, 20 bp, Artificial Sequence
  Description of Artificial Sequence: Synthetic oligonucleotide
  Target: LAMA2; (-) strand; PAM type: NRG; PAM sequence: TAG
atggaatgttcagtccttgc

SEQ ID NO: 114447 - DNA, 20 bp, Artificial Sequence
  Description of Artificial Sequence: Synthetic oligonucleotide
  Target: LAMA2; (-) strand; PAM type: NRG; PAM sequence: CAG
gcatggaaatatggaatgtt

SEQ ID NO: 114448 - DNA, 20 bp, Artificial Sequence
  Description of Artificial Sequence: Synthetic oligonucleotide
  Target: LAMA2; (-) strand; PAM type: NRG; PAM sequence: TGG
aggaggccagcatggaaata

SEQ ID NO: 114449 - DNA, 20 bp, Artificial Sequence
  Description of Artificial Sequence: Synthetic oligonucleotide
  Target: LAMA2; (-) strand; PAM type: NRG; PAM sequence: TGG
agtgaaataggaggccagca

SEQ ID NO: 114450 - DNA, 20 bp, Artificial Sequence
  Description of Artificial Sequence: Synthetic oligonucleotide
  Target: LAMA2; (-) strand; PAM type: NRG; PAM sequence: CAG
atgtgagtgaaataggaggc

SEQ ID NO: 114451 - DNA, 20 bp, Artificial Sequence
  Description of Artificial Sequence: Synthetic oligonucleotide
  Target: LAMA2; (-) strand; PAM type: NRG; PAM sequence: AGG
gatgatgtgagtgaaatagg

SEQ ID NO: 114452 - DNA, 20 bp, Artificial Sequence
  Description of Artificial Sequence: Synthetic oligonucleotide
  Target: LAMA2; (-) strand; PAM type: NRG; PAM sequence: GAG
agatgatgtgagtgaaatag

SEQ ID NO: 114453 - DNA, 20 bp, Artificial Sequence
  Description of Artificial Sequence: Synthetic oligonucleotide
  Target: LAMA2; (-) strand; PAM type: NRG; PAM sequence: AGG
ggagatgatgtgagtgaaat

SEQ ID NO: 114454 - DNA, 20 bp, Artificial Sequence
  Description of Artificial Sequence: Synthetic oligonucleotide
  Target: LAMA2; (-) strand; PAM type: NRG; PAM sequence: TAG
gggagatgatgtgagtgaaa

SEQ ID NO: 114455 - DNA, 20 bp, Artificial Sequence
  Description of Artificial Sequence: Synthetic oligonucleotide
  Target: LAMA2; (-) strand; PAM type: NRG; PAM sequence: GAG
ttgtcctggggagatgatgt

SEQ ID NO: 114456 - DNA, 20 bp, Artificial Sequence
  Description of Artificial Sequence: Synthetic oligonucleotide
  Target: LAMA2; (-) strand; PAM type: NRG; PAM sequence: GAG
gagaagacaattgtcctggg

SEQ ID NO: 114457 - DNA, 20 bp, Artificial Sequence
  Description of Artificial Sequence: Synthetic oligonucleotide
  Target: LAMA2; (-) strand; PAM type: NRG; PAM sequence: GGG
tagagaagacaattgtcctg

SEQ ID NO: 114458 - DNA, 20 bp, Artificial Sequence
  Description of Artificial Sequence: Synthetic oligonucleotide
  Target: LAMA2; (-) strand; PAM type: NRG; PAM sequence: GGG
ctagagaagacaattgtcct

SEQ ID NO: 114459 - DNA, 20 bp, Artificial Sequence
  Description of Artificial Sequence: Synthetic oligonucleotide
  Target: LAMA2; (-) strand; PAM type: NRG; PAM sequence: TGG
cctagagaagacaattgtcc

SEQ ID NO: 114460 - DNA, 20 bp, Artificial Sequence
  Description of Artificial Sequence: Synthetic oligonucleotide
  Target: LAMA2; (-) strand; PAM type: NRG; PAM sequence: AAG
tcaacaggaacatcctagag

SEQ ID NO: 114461 - DNA, 20 bp, Artificial Sequence
  Description of Artificial Sequence: Synthetic oligonucleotide
  Target: LAMA2; (-) strand; PAM type: NRG; PAM sequence: GAG
tgatcaacaggaacatccta

SEQ ID NO: 114462 - DNA, 20 bp, Artificial Sequence
  Description of Artificial Sequence: Synthetic oligonucleotide
  Target: LAMA2; (-) strand; PAM type: NRG; PAM sequence: TAG
attgatcaacaggaacatcc

SEQ ID NO: 114463 - DNA, 20 bp, Artificial Sequence
  Description of Artificial Sequence: Synthetic oligonucleotide
  Target: LAMA2; (-) strand; PAM type: NRG; PAM sequence: AGG
tgcacctacaattgatcaac

SEQ ID NO: 114464 - DNA, 20 bp, Artificial Sequence
  Description of Artificial Sequence: Synthetic oligonucleotide
  Target: LAMA2; (-) strand; PAM type: NRG; PAM sequence: CAG
ttgcacctacaattgatcaa

SEQ ID NO: 114465 - DNA, 20 bp, Artificial Sequence
  Description of Artificial Sequence: Synthetic oligonucleotide
  Target: LAMA2; (-) strand; PAM type: NRG; PAM sequence: GGG
aaatataggtgcaaatatga

SEQ ID NO: 114466 - DNA, 20 bp, Artificial Sequence
  Description of Artificial Sequence: Synthetic oligonucleotide
  Target: LAMA2; (-) strand; PAM type: NRG; PAM sequence: AGG
gaaatataggtgcaaatatg

SEQ ID NO: 114467 - DNA, 20 bp, Artificial Sequence
  Description of Artificial Sequence: Synthetic oligonucleotide
  Target: LAMA2; (-) strand; PAM type: NRG; PAM sequence: GAG
ggaaatataggtgcaaatat

SEQ ID NO: 114468 - DNA, 20 bp, Artificial Sequence
  Description of Artificial Sequence: Synthetic oligonucleotide
  Target: LAMA2; (-) strand; PAM type: NRG; PAM sequence: AGG
gttaaacccataggaaatat

SEQ ID NO: 114469 - DNA, 20 bp, Artificial Sequence
  Description of Artificial Sequence: Synthetic oligonucleotide
  Target: LAMA2; (-) strand; PAM type: NRG; PAM sequence: TAG
tgttaaacccataggaaata

SEQ ID NO: 114470 - DNA, 20 bp, Artificial Sequence
  Description of Artificial Sequence: Synthetic oligonucleotide
  Target: LAMA2; (-) strand; PAM type: NRG; PAM sequence: AGG
tatgcatatgttaaacccat

SEQ ID NO: 114471 - DNA, 20 bp, Artificial Sequence
  Description of Artificial Sequence: Synthetic oligonucleotide
  Target: LAMA2; (-) strand; PAM type: NRG; PAM sequence: TAG
atatgcatatgttaaaccca

SEQ ID NO: 114472 - DNA, 20 bp, Artificial Sequence
  Description of Artificial Sequence: Synthetic oligonucleotide
  Target: LAMA2; (-) strand; PAM type: NRG; PAM sequence: AAG
agataatgtgaatatatttt

SEQ ID NO: 114473 - DNA, 20 bp, Artificial Sequence
  Description of Artificial Sequence: Synthetic oligonucleotide
  Target: LAMA2; (-) strand; PAM type: NRG; PAM sequence: AAG
acttggagacagtagaaatt

SEQ ID NO: 114474 - DNA, 20 bp, Artificial Sequence
  Description of Artificial Sequence: Synthetic oligonucleotide
  Target: LAMA2; (-) strand; PAM type: NRG; PAM sequence: TAG
ggagtcggacttggagacag

SEQ ID NO: 114475 - DNA, 20 bp, Artificial Sequence
  Description of Artificial Sequence: Synthetic oligonucleotide
  Target: LAMA2; (-) strand; PAM type: NRG; PAM sequence: CAG
taaggagtcggacttggaga

SEQ ID NO: 114476 - DNA, 20 bp, Artificial Sequence
  Description of Artificial Sequence: Synthetic oligonucleotide
  Target: LAMA2; (-) strand; PAM type: NRG; PAM sequence: GAG
ttggtaaggagtcggacttg

SEQ ID NO: 114477 - DNA, 20 bp, Artificial Sequence
  Description of Artificial Sequence: Synthetic oligonucleotide
  Target: LAMA2; (-) strand; PAM type: NRG; PAM sequence: TGG
atttggtaaggagtcggact

SEQ ID NO: 114478 - DNA, 20 bp, Artificial Sequence
  Description of Artificial Sequence: Synthetic oligonucleotide
  Target: LAMA2; (-) strand; PAM type: NRG; PAM sequence: CGG
ctacagatttggtaaggagt

SEQ ID NO: 114479 - DNA, 20 bp, Artificial Sequence
  Description of Artificial Sequence: Synthetic oligonucleotide
  Target: LAMA2; (-) strand; PAM type: NRG; PAM sequence: GAG
ctgtctacagatttggtaag

SEQ ID NO: 114480 - DNA, 20 bp, Artificial Sequence
  Description of Artificial Sequence: Synthetic oligonucleotide
  Target: LAMA2; (-) strand; PAM type: NRG; PAM sequence: AGG
gactgtctacagatttggta

SEQ ID NO: 114481 - DNA, 20 bp, Artificial Sequence
  Description of Artificial Sequence: Synthetic oligonucleotide
  Target: LAMA2; (-) strand; PAM type: NRG; PAM sequence: AAG
tgactgtctacagatttggt

SEQ ID NO: 114482 - DNA, 20 bp, Artificial Sequence
  Description of Artificial Sequence: Synthetic oligonucleotide
  Target: LAMA2; (-) strand; PAM type: NRG; PAM sequence: TGG
aagctgactgtctacagatt

SEQ ID NO: 114483 - DNA, 20 bp, Artificial Sequence
  Description of Artificial Sequence: Synthetic oligonucleotide
  Target: LAMA2; (-) strand; PAM type: NRG; PAM sequence: CAG
ggaccgaagctgactgtcta

SEQ ID NO: 114484 - DNA, 20 bp, Artificial Sequence
  Description of Artificial Sequence: Synthetic oligonucleotide
  Target: LAMA2; (-) strand; PAM type: NRG; PAM sequence: AAG
catttaaatttaagggaccg

SEQ ID NO: 114485 - DNA, 20 bp, Artificial Sequence
  Description of Artificial Sequence: Synthetic oligonucleotide
  Target: LAMA2; (-) strand; PAM type: NRG; PAM sequence: GGG
gaatttacatttaaatttaa

SEQ ID NO: 114486 - DNA, 20 bp, Artificial Sequence
  Description of Artificial Sequence: Synthetic oligonucleotide
  Target: LAMA2; (-) strand; PAM type: NRG; PAM sequence: AGG
ggaatttacatttaaattta

SEQ ID NO: 114487 - DNA, 20 bp, Artificial Sequence
  Description of Artificial Sequence: Synthetic oligonucleotide
  Target: LAMA2; (-) strand; PAM type: NRG; PAM sequence: AAG
aggaatttacatttaaattt

SEQ ID NO: 114488 - DNA, 20 bp, Artificial Sequence
  Description of Artificial Sequence: Synthetic oligonucleotide
  Target: LAMA2; (-) strand; PAM type: NRG; PAM sequence: AGG
aactgggaaaatgatcttag

SEQ ID NO: 114489 - DNA, 20 bp, Artificial Sequence
  Description of Artificial Sequence: Synthetic oligonucleotide
  Target: LAMA2; (-) strand; PAM type: NRG; PAM sequence: GAG
caactgggaaaatgatctta

SEQ ID NO: 114490 - DNA, 20 bp, Artificial Sequence
  Description of Artificial Sequence: Synthetic oligonucleotide
  Target: LAMA2; (-) strand; PAM type: NRG; PAM sequence: TAG
tgcaactgggaaaatgatct

SEQ ID NO: 114491 - DNA, 20 bp, Artificial Sequence
  Description of Artificial Sequence: Synthetic oligonucleotide
  Target: LAMA2; (-) strand; PAM type: NRG; PAM sequence: GGG
ttacttcagcttgtgcaact

SEQ ID NO: 114492 - DNA, 20 bp, Artificial Sequence
  Description of Artificial Sequence: Synthetic oligonucleotide
  Target: LAMA2; (-) strand; PAM type: NRG; PAM sequence: TGG
attacttcagcttgtgcaac

SEQ ID NO: 114493 - DNA, 20 bp, Artificial Sequence
  Description of Artificial Sequence: Synthetic oligonucleotide
  Target: LAMA2; (-) strand; PAM type: NRG; PAM sequence: CAG
ggcccaaaagactattactt

SEQ ID NO: 114494 - DNA, 20 bp, Artificial Sequence
  Description of Artificial Sequence: Synthetic oligonucleotide
  Target: LAMA2; (-) strand; PAM type: NRG; PAM sequence: AAG
atgggatgagtcaggcccaa

SEQ ID NO: 114495 - DNA, 20 bp, Artificial Sequence
  Description of Artificial Sequence: Synthetic oligonucleotide
  Target: LAMA2; (-) strand; PAM type: NRG; PAM sequence: AGG
cagagaggatgggatgagtc

SEQ ID NO: 114496 - DNA, 20 bp, Artificial Sequence
  Description of Artificial Sequence: Synthetic oligonucleotide
  Target: LAMA2; (-) strand; PAM type: NRG; PAM sequence: CAG
ccagagaggatgggatgagt

SEQ ID NO: 114497 - DNA, 20 bp, Artificial Sequence
  Description of Artificial Sequence: Synthetic oligonucleotide
  Target: LAMA2; (-) strand; PAM type: NRG; PAM sequence: GAG
gtgtccagagaggatgggat

SEQ ID NO: 114498 - DNA, 20 bp, Artificial Sequence
  Description of Artificial Sequence: Synthetic oligonucleotide
  Target: LAMA2; (-) strand; PAM type: NRG; PAM sequence: GGG
tctttgtgtccagagaggat

SEQ ID NO: 114499 - DNA, 20 bp, Artificial Sequence
  Description of Artificial Sequence: Synthetic oligonucleotide
  Target: LAMA2; (-) strand; PAM type: NRG; PAM sequence: TGG
ttctttgtgtccagagagga

SEQ ID NO: 114500 - DNA, 20 bp, Artificial Sequence
  Description of Artificial Sequence: Synthetic oligonucleotide
  Target: LAMA2; (-) strand; PAM type: NRG; PAM sequence: AGG
gcccttctttgtgtccagag

SEQ ID NO: 114501 - DNA, 20 bp, Artificial Sequence
  Description of Artificial Sequence: Synthetic oligonucleotide
  Target: LAMA2; (-) strand; PAM type: NRG; PAM sequence: GAG
tgcccttctttgtgtccaga

SEQ ID NO: 114502 - DNA, 20 bp, Artificial Sequence
  Description of Artificial Sequence: Synthetic oligonucleotide
  Target: LAMA2; (-) strand; PAM type: NRG; PAM sequence: GAG
tctgcccttctttgtgtcca

SEQ ID NO: 114503 - DNA, 20 bp, Artificial Sequence
  Description of Artificial Sequence: Synthetic oligonucleotide
  Target: LAMA2; (-) strand; PAM type: NRG; PAM sequence: CAG
tttctgcccttctttgtgtc

SEQ ID NO: 114504 - DNA, 20 bp, Artificial Sequence
  Description of Artificial Sequence: Synthetic oligonucleotide
  Target: LAMA2; (-) strand; PAM type: NRG; PAM sequence: CAG
gtgttctacttgctttctcc

SEQ ID NO: 114505 - DNA, 20 bp, Artificial Sequence
  Description of Artificial Sequence: Synthetic oligonucleotide
  Target: LAMA2; (-) strand; PAM type: NRG; PAM sequence: TGG
aaaattgtccctgtctgtgt

SEQ ID NO: 114506 - DNA, 20 bp, Artificial Sequence
  Description of Artificial Sequence: Synthetic oligonucleotide
  Target: LAMA2; (-) strand; PAM type: NRG; PAM sequence: GGG
taacatccttgaatgctatt

SEQ ID NO: 114507 - DNA, 20 bp, Artificial Sequence
  Description of Artificial Sequence: Synthetic oligonucleotide
  Target: LAMA2; (-) strand; PAM type: NRG; PAM sequence: TGG
ttaacatccttgaatgctat

SEQ ID NO: 114508 - DNA, 20 bp, Artificial Sequence
  Description of Artificial Sequence: Synthetic oligonucleotide
  Target: LAMA2; (-) strand; PAM type: NRG; PAM sequence: AGG
ccggctggttgacattcttt

SEQ ID NO: 114509 - DNA, 20 bp, Artificial Sequence
  Description of Artificial Sequence: Synthetic oligonucleotide
  Target: LAMA2; (-) strand; PAM type: NRG; PAM sequence: TAG
cccggctggttgacattctt

SEQ ID NO: 114510 - DNA, 20 bp, Artificial Sequence
  Description of Artificial Sequence: Synthetic oligonucleotide
  Target: LAMA2; (-) strand; PAM type: NRG; PAM sequence: TGG
catgggccactacacccggc

SEQ ID NO: 114511 - DNA, 20 bp, Artificial Sequence
  Description of Artificial Sequence: Synthetic oligonucleotide
  Target: LAMA2; (-) strand; PAM type: NRG; PAM sequence: CGG
cagacatgggccactacacc

SEQ ID NO: 114512 - DNA, 20 bp, Artificial Sequence
  Description of Artificial Sequence: Synthetic oligonucleotide
  Target: LAMA2; (-) strand; PAM type: NRG; PAM sequence: GGG
agtgctgggattacagacat

SEQ ID NO: 114513 - DNA, 20 bp, Artificial Sequence
  Description of Artificial Sequence: Synthetic oligonucleotide
  Target: LAMA2; (-) strand; PAM type: NRG; PAM sequence: TGG
aagtgctgggattacagaca

SEQ ID NO: 114514 - DNA, 20 bp, Artificial Sequence
  Description of Artificial Sequence: Synthetic oligonucleotide
  Target: LAMA2; (-) strand; PAM type: NRG; PAM sequence: CAG
ctgccaaagtgctgggatta

SEQ ID NO: 114515 - DNA, 20 bp, Artificial Sequence
  Description of Artificial Sequence: Synthetic oligonucleotide
  Target: LAMA2; (-) strand; PAM type: NRG; PAM sequence: GGG
ctttgacctgccaaagtgct

SEQ ID NO: 114516 - DNA, 20 bp, Artificial Sequence
  Description of Artificial Sequence: Synthetic oligonucleotide
  Target: LAMA2; (-) strand; PAM type: NRG; PAM sequence: TGG
gctttgacctgccaaagtgc

SEQ ID NO: 114517 - DNA, 20 bp, Artificial Sequence
  Description of Artificial Sequence: Synthetic oligonucleotide
  Target: LAMA2; (-) strand; PAM type: NRG; PAM sequence: AAG
cctcctgctttgacctgcca

SEQ ID NO: 114518 - DNA, 20 bp, Artificial Sequence
  Description of Artificial Sequence: Synthetic oligonucleotide
  Target: LAMA2; (-) strand; PAM type: NRG; PAM sequence: GGG
tagcctagtttcaaactcct

SEQ ID NO: 114519 - DNA, 20 bp, Artificial Sequence
  Description of Artificial Sequence: Synthetic oligonucleotide
  Target: LAMA2; (-) strand; PAM type: NRG; PAM sequence: TGG
ctagcctagtttcaaactcc

SEQ ID NO: 114520 - DNA, 20 bp, Artificial Sequence
  Description of Artificial Sequence: Synthetic oligonucleotide
  Target: LAMA2; (-) strand; PAM type: NRG; PAM sequence: TAG
tcttatcatgctgcctagcc

SEQ ID NO: 114521 - DNA, 20 bp, Artificial Sequence
  Description of Artificial Sequence: Synthetic oligonucleotide
  Target: LAMA2; (-) strand; PAM type: NRG; PAM sequence: TAG
aagggtcttatcatgctgcc

SEQ ID NO: 114522 - DNA, 20 bp, Artificial Sequence
  Description of Artificial Sequence: Synthetic oligonucleotide
  Target: LAMA2; (-) strand; PAM type: NRG; PAM sequence: GGG
aaacattttttgtagagaaa

SEQ ID NO: 114523 - DNA, 20 bp, Artificial Sequence
  Description of Artificial Sequence: Synthetic oligonucleotide
  Target: LAMA2; (-) strand; PAM type: NRG; PAM sequence: AGG
taaacattttttgtagagaa

SEQ ID NO: 114524 - DNA, 20 bp, Artificial Sequence
  Description of Artificial Sequence: Synthetic oligonucleotide
  Target: LAMA2; (-) strand; PAM type: NRG; PAM sequence: AAG
ttaaacattttttgtagaga

SEQ ID NO: 114525 - DNA, 20 bp, Artificial Sequence
  Description of Artificial Sequence: Synthetic oligonucleotide
  Target: LAMA2; (-) strand; PAM type: NRG; PAM sequence: GAG
atttttaaacattttttgta

SEQ ID NO: 114526 - DNA, 20 bp, Artificial Sequence
  Description of Artificial Sequence: Synthetic oligonucleotide
  Target: LAMA2; (-) strand; PAM type: NRG; PAM sequence: TAG
taatttttaaacattttttg

SEQ ID NO: 114527 - DNA, 20 bp, Artificial Sequence
  Description of Artificial Sequence: Synthetic oligonucleotide
  Target: LAMA2; (-) strand; PAM type: NRG; PAM sequence: CAG
gtcctgaatagctggaatca

SEQ ID NO: 114528 - DNA, 20 bp, Artificial Sequence
  Description of Artificial Sequence: Synthetic oligonucleotide
  Target: LAMA2; (-) strand; PAM type: NRG; PAM sequence: TGG
gaatagcagtcctgaatagc

SEQ ID NO: 114529 - DNA, 20 bp, Artificial Sequence
  Description of Artificial Sequence: Synthetic oligonucleotide
  Target: LAMA2; (-) strand; PAM type: NRG; PAM sequence: TAG
agctgaatagcagtcctgaa

SEQ ID NO: 114530 - DNA, 20 bp, Artificial Sequence
  Description of Artificial Sequence: Synthetic oligonucleotide
  Target: LAMA2; (-) strand; PAM type: NRG; PAM sequence: CAG
tggcgtgaacagctgaatag

SEQ ID NO: 114531 - DNA, 20 bp, Artificial Sequence
  Description of Artificial Sequence: Synthetic oligonucleotide
  Target: LAMA2; (-) strand; PAM type: NRG; PAM sequence: TAG
tggtggcgtgaacagctgaa

SEQ ID NO: 114532 - DNA, 20 bp, Artificial Sequence
  Description of Artificial Sequence: Synthetic oligonucleotide
  Target: LAMA2; (-) strand; PAM type: NRG; PAM sequence: CAG
ctagagtgtggtggcgtgaa

SEQ ID NO: 114533 - DNA, 20 bp, Artificial Sequence
  Description of Artificial Sequence: Synthetic oligonucleotide
  Target: LAMA2; (-) strand; PAM type: NRG; PAM sequence: TGG
tcatccaggctagagtgtgg

SEQ ID NO: 114534 - DNA, 20 bp, Artificial Sequence
  Description of Artificial Sequence: Synthetic oligonucleotide
  Target: LAMA2; (-) strand; PAM type: NRG; PAM sequence: TGG
ctgtcatccaggctagagtg

SEQ ID NO: 114535 - DNA, 20 bp, Artificial Sequence
  Description of Artificial Sequence: Synthetic oligonucleotide
  Target: LAMA2; (-) strand; PAM type: NRG; PAM sequence: GAG
tcactctgtcatccaggcta

SEQ ID NO: 114536 - DNA, 20 bp, Artificial Sequence
  Description of Artificial Sequence: Synthetic oligonucleotide
  Target: LAMA2; (-) strand; PAM type: NRG; PAM sequence: TAG
tctcactctgtcatccaggc

SEQ ID NO: 114537 - DNA, 20 bp, Artificial Sequence
  Description of Artificial Sequence: Synthetic oligonucleotide
  Target: LAMA2; (-) strand; PAM type: NRG; PAM sequence: AGG
agagtctcactctgtcatcc

SEQ ID NO: 114538 - DNA, 20 bp, Artificial Sequence
  Description of Artificial Sequence: Synthetic oligonucleotide
  Target: LAMA2; (-) strand; PAM type: NRG; PAM sequence: CAG
cagagtctcactctgtcatc

SEQ ID NO: 114539 - DNA, 20 bp, Artificial Sequence
  Description of Artificial Sequence: Synthetic oligonucleotide
  Target: LAMA2; (-) strand; PAM type: NRG; PAM sequence: GAG
ttaaaaaaagttttgagaca

SEQ ID NO: 114540 - DNA, 20 bp, Artificial Sequence
  Description of Artificial Sequence: Synthetic oligonucleotide
  Target: LAMA2; (-) strand; PAM type: NRG; PAM sequence: CAG
ttttaaaaaaagttttgaga

SEQ ID NO: 114541 - DNA, 20 bp, Artificial Sequence
  Description of Artificial Sequence: Synthetic oligonucleotide
  Target: LAMA2; (-) strand; PAM type: NRG; PAM sequence: GAG
tcttttttaaaaaaagtttt

SEQ ID NO: 114542 - DNA, 20 bp, Artificial Sequence
  Description of Artificial Sequence: Synthetic oligonucleotide
  Target: LAMA2; (-) strand; PAM type: NRG; PAM sequence: AAG
ttgatactcttttttaaaaa

SEQ ID NO: 114543 - DNA, 20 bp, Artificial Sequence
  Description of Artificial Sequence: Synthetic oligonucleotide
  Target: LAMA2; (-) strand; PAM type: NRG; PAM sequence: AAG
gacaggggatatagatacta

SEQ ID NO: 114544 - DNA, 20 bp, Artificial Sequence
  Description of Artificial Sequence: Synthetic oligonucleotide
  Target: LAMA2; (-) strand; PAM type: NRG; PAM sequence: TAG
aatcaaatggacaggggata

SEQ ID NO: 114545 - DNA, 20 bp, Artificial Sequence
  Description of Artificial Sequence: Synthetic oligonucleotide
  Target: LAMA2; (-) strand; PAM type: NRG; PAM sequence: GGG
taacagaatcaaatggacag

SEQ ID NO: 114546 - DNA, 20 bp, Artificial Sequence
  Description of Artificial Sequence: Synthetic oligonucleotide
  Target: LAMA2; (-) strand; PAM type: NRG; PAM sequence: GGG
ttaacagaatcaaatggaca

SEQ ID NO: 114547 - DNA, 20 bp, Artificial Sequence
  Description of Artificial Sequence: Synthetic oligonucleotide
  Target: LAMA2; (-) strand; PAM type: NRG; PAM sequence: AGG
tttaacagaatcaaatggac

SEQ ID NO: 114548 - DNA, 20 bp, Artificial Sequence
  Description of Artificial Sequence: Synthetic oligonucleotide
  Target: LAMA2; (-) strand; PAM type: NRG; PAM sequence: CAG
ttttaacagaatcaaatgga

SEQ ID NO: 114549 - DNA, 20 bp, Artificial Sequence
  Description of Artificial Sequence: Synthetic oligonucleotide
  Target: LAMA2; (-) strand; PAM type: NRG; PAM sequence: TGG
ttgcttttaacagaatcaaa

SEQ ID NO: 114550 - DNA, 20 bp, Artificial Sequence
  Description of Artificial Sequence: Synthetic oligonucleotide
  Target: LAMA2; (-) strand; PAM type: NRG; PAM sequence: CAG
agttgagggattgcttttaa

SEQ ID NO: 114551 - DNA, 20 bp, Artificial Sequence
  Description of Artificial Sequence: Synthetic oligonucleotide
  Target: LAMA2; (-) strand; PAM type: NRG; PAM sequence: GGG
gcttaaatctgggcagttga

SEQ ID NO: 114552 - DNA, 20 bp, Artificial Sequence
  Description of Artificial Sequence: Synthetic oligonucleotide
  Target: LAMA2; (-) strand; PAM type: NRG; PAM sequence: AGG
tgcttaaatctgggcagttg

SEQ ID NO: 114553 - DNA, 20 bp, Artificial Sequence
  Description of Artificial Sequence: Synthetic oligonucleotide
  Target: LAMA2; (-) strand; PAM type: NRG; PAM sequence: GAG
atgcttaaatctgggcagtt

SEQ ID NO: 114554 - DNA, 20 bp, Artificial Sequence
  Description of Artificial Sequence: Synthetic oligonucleotide
  Target: LAMA2; (-) strand; PAM type: NRG; PAM sequence: CAG
gtatgatgcttaaatctggg

SEQ ID NO: 114555 - DNA, 20 bp, Artificial Sequence
  Description of Artificial Sequence: Synthetic oligonucleotide
  Target: LAMA2; (-) strand; PAM type: NRG; PAM sequence: GGG
gaggtatgatgcttaaatct

SEQ ID NO: 114556 - DNA, 20 bp, Artificial Sequence
  Description of Artificial Sequence: Synthetic oligonucleotide
  Target: LAMA2; (-) strand; PAM type: NRG; PAM sequence: TGG
agaggtatgatgcttaaatc

SEQ ID NO: 114557 - DNA, 20 bp, Artificial Sequence
  Description of Artificial Sequence: Synthetic oligonucleotide
  Target: LAMA2; (-) strand; PAM type: NRG; PAM sequence: AGG
aagaataccaaggcaataag

SEQ ID NO: 114558 - DNA, 20 bp, Artificial Sequence
  Description of Artificial Sequence: Synthetic oligonucleotide
  Target: LAMA2; (-) strand; PAM type: NRG; PAM sequence: GAG
aaagaataccaaggcaataa

SEQ ID NO: 114559 - DNA, 20 bp, Artificial Sequence
  Description of Artificial Sequence: Synthetic oligonucleotide
  Target: LAMA2; (-) strand; PAM type: NRG; PAM sequence: AAG
ttaaagaataccaaggcaat

SEQ ID NO: 114560 - DNA, 20 bp, Artificial Sequence
  Description of Artificial Sequence: Synthetic oligonucleotide
  Target: LAMA2; (-) strand; PAM type: NRG; PAM sequence: AGG
gaagatattaaagaatacca

SEQ ID NO: 114561 - DNA, 20 bp, Artificial Sequence
  Description of Artificial Sequence: Synthetic oligonucleotide
  Target: LAMA2; (-) strand; PAM type: NRG; PAM sequence: AAG
tgaagatattaaagaatacc

SEQ ID NO: 114562 - DNA, 20 bp, Artificial Sequence
  Description of Artificial Sequence: Synthetic oligonucleotide
  Target: LAMA2; (-) strand; PAM type: NRG; PAM sequence: AAG
aaatgtgattgaagatatta

SEQ ID NO: 114563 - DNA, 20 bp, Artificial Sequence
  Description of Artificial Sequence: Synthetic oligonucleotide
  Target: LAMA2; (-) strand; PAM type: NRG; PAM sequence: AAG
cgttttaaaaaatgtgattg

SEQ ID NO: 114564 - DNA, 20 bp, Artificial Sequence
  Description of Artificial Sequence: Synthetic oligonucleotide
  Target: LAMA2; (-) strand; PAM type: NRG; PAM sequence: TGG
ttgagaaaaactagattaaa

SEQ ID NO: 114565 - DNA, 20 bp, Artificial Sequence
  Description of Artificial Sequence: Synthetic oligonucleotide
  Target: LAMA2; (-) strand; PAM type: NRG; PAM sequence: TAG
accctttcattgagaaaaac

SEQ ID NO: 114566 - DNA, 20 bp, Artificial Sequence
  Description of Artificial Sequence: Synthetic oligonucleotide
  Target: LAMA2; (-) strand; PAM type: NRG; PAM sequence: GAG
ttcctatgaaccctttcatt

SEQ ID NO: 114567 - DNA, 20 bp, Artificial Sequence
  Description of Artificial Sequence: Synthetic oligonucleotide
  Target: LAMA2; (-) strand; PAM type: NRG; PAM sequence: CAG
ttgtgttcttttggtcatgg

SEQ ID NO: 114568 - DNA, 20 bp, Artificial Sequence
  Description of Artificial Sequence: Synthetic oligonucleotide
  Target: LAMA2; (-) strand; PAM type: NRG; PAM sequence: TGG
gcattgtgttcttttggtca

SEQ ID NO: 114569 - DNA, 20 bp, Artificial Sequence
  Description of Artificial Sequence: Synthetic oligonucleotide
  Target: LAMA2; (-) strand; PAM type: NRG; PAM sequence: TGG
tgtaaagcattgtgttcttt

SEQ ID NO: 114570 - DNA, 20 bp, Artificial Sequence
  Description of Artificial Sequence: Synthetic oligonucleotide
  Target: LAMA2; (-) strand; PAM type: NRG; PAM sequence: AAG
tacttaaggatatatttgta

SEQ ID NO: 114571 - DNA, 20 bp, Artificial Sequence
  Description of Artificial Sequence: Synthetic oligonucleotide
  Target: LAMA2; (-) strand; PAM type: NRG; PAM sequence: AGG
caagggtatgtgcatactta

SEQ ID NO: 114572 - DNA, 20 bp, Artificial Sequence
  Description of Artificial Sequence: Synthetic oligonucleotide
  Target: LAMA2; (-) strand; PAM type: NRG; PAM sequence: AAG
acaagggtatgtgcatactt

SEQ ID NO: 114573 - DNA, 20 bp, Artificial Sequence
  Description of Artificial Sequence: Synthetic oligonucleotide
  Target: LAMA2; (-) strand; PAM type: NRG; PAM sequence: GGG
taacatgatctggtttacaa

SEQ ID NO: 114574 - DNA, 20 bp, Artificial Sequence
  Description of Artificial Sequence: Synthetic oligonucleotide
  Target: LAMA2; (-) strand; PAM type: NRG; PAM sequence: AGG
ataacatgatctggtttaca

SEQ ID NO: 114575 - DNA, 20 bp, Artificial Sequence
  Description of Artificial Sequence: Synthetic oligonucleotide
  Target: LAMA2; (-) strand; PAM type: NRG; PAM sequence: AAG
aataacatgatctggtttac

SEQ ID NO: 114576 - DNA, 20 bp, Artificial Sequence
  Description of Artificial Sequence: Synthetic oligonucleotide
  Target: LAMA2; (-) strand; PAM type: NRG; PAM sequence: TGG
taatcacaaataacatgatc

SEQ ID NO: 114577 - DNA, 20 bp, Artificial Sequence
  Description of Artificial Sequence: Synthetic oligonucleotide
  Target: LAMA2; (-) strand; PAM type: NRG; PAM sequence: AAG
tattttttagaaaaataaat

SEQ ID NO: 114578 - DNA, 20 bp, Artificial Sequence
  Description of Artificial Sequence: Synthetic oligonucleotide
  Target: LAMA2; (-) strand; PAM type: NRG; PAM sequence: TAG
tgtgtgggctttgtattttt

SEQ ID NO: 114579 - DNA, 20 bp, Artificial Sequence
  Description of Artificial Sequence: Synthetic oligonucleotide
  Target: LAMA2; (-) strand; PAM type: NRG; PAM sequence: GGG
tctttgtgaatattttgtgt

SEQ ID NO: 114580 - DNA, 20 bp, Artificial Sequence
  Description of Artificial Sequence: Synthetic oligonucleotide
  Target: LAMA2; (-) strand; PAM type: NRG; PAM sequence: TGG
ctctttgtgaatattttgtg

SEQ ID NO: 114581 - DNA, 20 bp, Artificial Sequence
  Description of Artificial Sequence: Synthetic oligonucleotide
  Target: LAMA2; (-) strand; PAM type: NRG; PAM sequence: GGG
actcgtggttatacatcttt

SEQ ID NO: 114582 - DNA, 20 bp, Artificial Sequence
  Description of Artificial Sequence: Synthetic oligonucleotide
  Target: LAMA2; (-) strand; PAM type: NRG; PAM sequence: TGG
tactcgtggttatacatctt

SEQ ID NO: 114583 - DNA, 20 bp, Artificial Sequence
  Description of Artificial Sequence: Synthetic oligonucleotide
  Target: LAMA2; (-) strand; PAM type: NRG; PAM sequence: TGG
gaaataatccaagttactcg

SEQ ID NO: 114584 - DNA, 20 bp, Artificial Sequence
  Description of Artificial Sequence: Synthetic oligonucleotide
  Target: LAMA2; (-) strand; PAM type: NRG; PAM sequence: AAG
ctgcattcctgaaataatcc

SEQ ID NO: 114585 - DNA, 20 bp, Artificial Sequence
  Description of Artificial Sequence: Synthetic oligonucleotide
  Target: LAMA2; (-) strand; PAM type: NRG; PAM sequence: TGG
caggcgtgagccactgtgcc

SEQ ID NO: 114586 - DNA, 20 bp, Artificial Sequence
  Description of Artificial Sequence: Synthetic oligonucleotide
  Target: LAMA2; (-) strand; PAM type: NRG; PAM sequence: GAG
agtgctgggattacaggcgt

SEQ ID NO: 114587 - DNA, 20 bp, Artificial Sequence
  Description of Artificial Sequence: Synthetic oligonucleotide
  Target: LAMA2; (-) strand; PAM type: NRG; PAM sequence: AGG
tcccaaagtgctgggattac

SEQ ID NO: 114588 - DNA, 20 bp, Artificial Sequence
  Description of Artificial Sequence: Synthetic oligonucleotide
  Target: LAMA2; (-) strand; PAM type: NRG; PAM sequence: CAG
ctcccaaagtgctgggatta

SEQ ID NO: 114589 - DNA, 20 bp, Artificial Sequence
  Description of Artificial Sequence: Synthetic oligonucleotide
  Target: LAMA2; (-) strand; PAM type: NRG; PAM sequence: GGG
ccttggcctcccaaagtgct

SEQ ID NO: 114590 - DNA, 20 bp, Artificial Sequence
  Description of Artificial Sequence: Synthetic oligonucleotide
  Target: LAMA2; (-) strand; PAM type: NRG; PAM sequence: TGG
accttggcctcccaaagtgc

SEQ ID NO: 114591 - DNA, 20 bp, Artificial Sequence
  Description of Artificial Sequence: Synthetic oligonucleotide
  Target: LAMA2; (-) strand; PAM type: NRG; PAM sequence: AAG
ctacccaccttggcctccca

SEQ ID NO: 114592 - DNA, 20 bp, Artificial Sequence
  Description of Artificial Sequence: Synthetic oligonucleotide
  Target: LAMA2; (-) strand; PAM type: NRG; PAM sequence: TGG
accttgtgatctacccacct

SEQ ID NO: 114593 - DNA, 20 bp, Artificial Sequence
  Description of Artificial Sequence: Synthetic oligonucleotide
  Target: LAMA2; (-) strand; PAM type: NRG; PAM sequence: TGG
tttcactatgttggccaggc

SEQ ID NO: 114594 - DNA, 20 bp, Artificial Sequence
  Description of Artificial Sequence: Synthetic oligonucleotide
  Target: LAMA2; (-) strand; PAM type: NRG; PAM sequence: AGG
aggatttcactatgttggcc

SEQ ID NO: 114595 - DNA, 20 bp, Artificial Sequence
  Description of Artificial Sequence: Synthetic oligonucleotide
  Target: LAMA2; (-) strand; PAM type: NRG; PAM sequence: CAG
caggatttcactatgttggc

SEQ ID NO: 114596 - DNA, 20 bp, Artificial Sequence
  Description of Artificial Sequence: Synthetic oligonucleotide
  Target: LAMA2; (-) strand; PAM type: NRG; PAM sequence: TGG
tagacaggatttcactatgt

SEQ ID NO: 114597 - DNA, 20 bp, Artificial Sequence
  Description of Artificial Sequence: Synthetic oligonucleotide
  Target: LAMA2; (-) strand; PAM type: NRG; PAM sequence: AGG
ttttagtatacaaattagac

SEQ ID NO: 114598 - DNA, 20 bp, Artificial Sequence
  Description of Artificial Sequence: Synthetic oligonucleotide
  Target: LAMA2; (-) strand; PAM type: NRG; PAM sequence: CAG
tttttagtatacaaattaga

SEQ ID NO: 114599 - DNA, 20 bp, Artificial Sequence
  Description of Artificial Sequence: Synthetic oligonucleotide
  Target: LAMA2; (-) strand; PAM type: NRG; PAM sequence: TAG
tgtatttttagtatacaaat

SEQ ID NO: 114600 - DNA, 20 bp, Artificial Sequence
  Description of Artificial Sequence: Synthetic oligonucleotide
  Target: LAMA2; (-) strand; PAM type: NRG; PAM sequence: TAG
tggctaattttttgtatttt

SEQ ID NO: 114601 - DNA, 20 bp, Artificial Sequence
  Description of Artificial Sequence: Synthetic oligonucleotide
  Target: LAMA2; (-) strand; PAM type: NRG; PAM sequence: TGG
taggcacctgctaccatgcc

SEQ ID NO: 114602 - DNA, 20 bp, Artificial Sequence
  Description of Artificial Sequence: Synthetic oligonucleotide
  Target: LAMA2; (-) strand; PAM type: NRG; PAM sequence: AGG
tcccaagtaactgggattat

SEQ ID NO: 114603 - DNA, 20 bp, Artificial Sequence
  Description of Artificial Sequence: Synthetic oligonucleotide
  Target: LAMA2; (-) strand; PAM type: NRG; PAM sequence: TAG
ctcccaagtaactgggatta

SEQ ID NO: 114604 - DNA, 20 bp, Artificial Sequence
  Description of Artificial Sequence: Synthetic oligonucleotide
  Target: LAMA2; (-) strand; PAM type: NRG; PAM sequence: GGG
cctcagcctcccaagtaact

SEQ ID NO: 114605 - DNA, 20 bp, Artificial Sequence
  Description of Artificial Sequence: Synthetic oligonucleotide
  Target: LAMA2; (-) strand; PAM type: NRG; PAM sequence: TGG
gcctcagcctcccaagtaac

SEQ ID NO: 114606 - DNA, 20 bp, Artificial Sequence
  Description of Artificial Sequence: Synthetic oligonucleotide
  Target: LAMA2; (-) strand; PAM type: NRG; PAM sequence: AAG
ttctcctgcctcagcctccc

SEQ ID NO: 114607 - DNA, 20 bp, Artificial Sequence
  Description of Artificial Sequence: Synthetic oligonucleotide
  Target: LAMA2; (-) strand; PAM type: NRG; PAM sequence: CAG
ttcaagcaattctcctgcct

SEQ ID NO: 114608 - DNA, 20 bp, Artificial Sequence
  Description of Artificial Sequence: Synthetic oligonucleotide
  Target: LAMA2; (-) strand; PAM type: NRG; PAM sequence: AAG
aacctcggcctcccaggttc

SEQ ID NO: 114609 - DNA, 20 bp, Artificial Sequence
  Description of Artificial Sequence: Synthetic oligonucleotide
  Target: LAMA2; (-) strand; PAM type: NRG; PAM sequence: AGG
cactgcaacctcggcctccc

SEQ ID NO: 114610 - DNA, 20 bp, Artificial Sequence
  Description of Artificial Sequence: Synthetic oligonucleotide
  Target: LAMA2; (-) strand; PAM type: NRG; PAM sequence: CAG
tcactgcaacctcggcctcc

SEQ ID NO: 114611 - DNA, 20 bp, Artificial Sequence
  Description of Artificial Sequence: Synthetic oligonucleotide
  Target: LAMA2; (-) strand; PAM type: NRG; PAM sequence: CGG
atctcggctcactgcaacct

SEQ ID NO: 114612 - DNA, 20 bp, Artificial Sequence
  Description of Artificial Sequence: Synthetic oligonucleotide
  Target: LAMA2; (-) strand; PAM type: NRG; PAM sequence: CGG
ggagtgcaatggcacaatct

SEQ ID NO: 114613 - DNA, 20 bp, Artificial Sequence
  Description of Artificial Sequence: Synthetic oligonucleotide
  Target: LAMA2; (-) strand; PAM type: NRG; PAM sequence: TGG
tcgcgcaggctggagtgcaa

SEQ ID NO: 114614 - DNA, 20 bp, Artificial Sequence
  Description of Artificial Sequence: Synthetic oligonucleotide
  Target: LAMA2; (-) strand; PAM type: NRG; PAM sequence: GAG
tcacattgtcgcgcaggctg

SEQ ID NO: 114615 - DNA, 20 bp, Artificial Sequence
  Description of Artificial Sequence: Synthetic oligonucleotide
  Target: LAMA2; (-) strand; PAM type: NRG; PAM sequence: TGG
tctcacattgtcgcgcaggc

SEQ ID NO: 114616 - DNA, 20 bp, Artificial Sequence
  Description of Artificial Sequence: Synthetic oligonucleotide
  Target: LAMA2; (-) strand; PAM type: NRG; PAM sequence: AGG
ggagtctcacattgtcgcgc

SEQ ID NO: 114617 - DNA, 20 bp, Artificial Sequence
  Description of Artificial Sequence: Synthetic oligonucleotide
  Target: LAMA2; (-) strand; PAM type: NRG; PAM sequence: CAG
cggagtctcacattgtcgcg

SEQ ID NO: 114618 - DNA, 20 bp, Artificial Sequence
  Description of Artificial Sequence: Synthetic oligonucleotide
  Target: LAMA2; (-) strand; PAM type: NRG; PAM sequence: GAG
tttttttttttttcgagtcg

SEQ ID NO: 114619 - DNA, 20 bp, Artificial Sequence
  Description of Artificial Sequence: Synthetic oligonucleotide
  Target: LAMA2; (-) strand; PAM type: NRG; PAM sequence: CGG
tttttttttttttttcgagt

SEQ ID NO: 114620 - DNA, 20 bp, Artificial Sequence
  Description of Artificial Sequence: Synthetic oligonucleotide
  Target: LAMA2; (-) strand; PAM type: NRG; PAM sequence: GAG
tttctttttttttttttttc

SEQ ID NO: 114621 - DNA, 20 bp, Artificial Sequence
  Description of Artificial Sequence: Synthetic oligonucleotide
  Target: LAMA2; (-) strand; PAM type: NRG; PAM sequence: TAG
tgacaagattatattatttt

SEQ ID NO: 114622 - DNA, 20 bp, Artificial Sequence
  Description of Artificial Sequence: Synthetic oligonucleotide
  Target: LAMA2; (-) strand; PAM type: NRG; PAM sequence: AAG
tgtttttactatctattgac

SEQ ID NO: 114623 - DNA, 20 bp, Artificial Sequence
  Description of Artificial Sequence: Synthetic oligonucleotide
  Target: LAMA2; (-) strand; PAM type: NRG; PAM sequence: AAG
tccttcctcttagtttactt

SEQ ID NO: 114624 - DNA, 20 bp, Artificial Sequence
  Description of Artificial Sequence: Synthetic oligonucleotide
  Target: LAMA2; (-) strand; PAM type: NRG; PAM sequence: TAG
ctaaggaagttccttcctct

SEQ ID NO: 114625 - DNA, 20 bp, Artificial Sequence
  Description of Artificial Sequence: Synthetic oligonucleotide
  Target: LAMA2; (-) strand; PAM type: NRG; PAM sequence: AAG
ttttttatagatggctaagg

SEQ ID NO: 114626 - DNA, 20 bp, Artificial Sequence
  Description of Artificial Sequence: Synthetic oligonucleotide
  Target: LAMA2; (-) strand; PAM type: NRG; PAM sequence: AGG
tttttttttatagatggcta

SEQ ID NO: 114627 - DNA, 20 bp, Artificial Sequence
  Description of Artificial Sequence: Synthetic oligonucleotide
  Target: LAMA2; (-) strand; PAM type: NRG; PAM sequence: AAG
ttttttttttatagatggct

SEQ ID NO: 114628 - DNA, 20 bp, Artificial Sequence
  Description of Artificial Sequence: Synthetic oligonucleotide
  Target: LAMA2; (-) strand; PAM type: NRG; PAM sequence: TGG
tatagttttttttttataga

SEQ ID NO: 114629 - DNA, 20 bp, Artificial Sequence
  Description of Artificial Sequence: Synthetic oligonucleotide
  Target: LAMA2; (-) strand; PAM type: NRG; PAM sequence: TAG
ttgttatagtttttttttta

SEQ ID NO: 114630 - DNA, 20 bp, Artificial Sequence
  Description of Artificial Sequence: Synthetic oligonucleotide
  Target: LAMA2; (-) strand; PAM type: NRG; PAM sequence: TAG
taaatcaggaatacttgtta

SEQ ID NO: 114631 - DNA, 20 bp, Artificial Sequence
  Description of Artificial Sequence: Synthetic oligonucleotide
  Target: LAMA2; (-) strand; PAM type: NRG; PAM sequence: AGG
taatgtcttttttttaaatc

SEQ ID NO: 114632 - DNA, 20 bp, Artificial Sequence
  Description of Artificial Sequence: Synthetic oligonucleotide
  Target: LAMA2; (-) strand; PAM type: NRG; PAM sequence: CAG
ataatgtcttttttttaaat

SEQ ID NO: 114633 - DNA, 20 bp, Artificial Sequence
  Description of Artificial Sequence: Synthetic oligonucleotide
  Target: LAMA2; (-) strand; PAM type: NRG; PAM sequence: TAG
gtttcttgggcttgatttta

SEQ ID NO: 114634 - DNA, 20 bp, Artificial Sequence
  Description of Artificial Sequence: Synthetic oligonucleotide
  Target: LAMA2; (-) strand; PAM type: NRG; PAM sequence: GGG
aaaatagtcatctgtttctt

SEQ ID NO: 114635 - DNA, 20 bp, Artificial Sequence
  Description of Artificial Sequence: Synthetic oligonucleotide
  Target: LAMA2; (-) strand; PAM type: NRG; PAM sequence: TGG
caaaatagtcatctgtttct

SEQ ID NO: 114636 - DNA, 20 bp, Artificial Sequence
  Description of Artificial Sequence: Synthetic oligonucleotide
  Target: LAMA2; (-) strand; PAM type: NRG; PAM sequence: TAG
taagatcagtgcagtcaaaa

SEQ ID NO: 114637 - DNA, 20 bp, Artificial Sequence
  Description of Artificial Sequence: Synthetic oligonucleotide
  Target: LAMA2; (-) strand; PAM type: NRG; PAM sequence: CAG
tatgctagctaagatcagtg

SEQ ID NO: 114638 - DNA, 20 bp, Artificial Sequence
  Description of Artificial Sequence: Synthetic oligonucleotide
  Target: LAMA2; (-) strand; PAM type: NRG; PAM sequence: CAG
cttactatgctagctaagat

SEQ ID NO: 114639 - DNA, 20 bp, Artificial Sequence
  Description of Artificial Sequence: Synthetic oligonucleotide
  Target: LAMA2; (-) strand; PAM type: NRG; PAM sequence: AAG
cttttcttactatgctagct

SEQ ID NO: 114640 - DNA, 20 bp, Artificial Sequence
  Description of Artificial Sequence: Synthetic oligonucleotide
  Target: LAMA2; (-) strand; PAM type: NRG; PAM sequence: TAG
ttgttcttttcttactatgc

SEQ ID NO: 114641 - DNA, 20 bp, Artificial Sequence
  Description of Artificial Sequence: Synthetic oligonucleotide
  Target: LAMA2; (-) strand; PAM type: NRG; PAM sequence: GGG
ttttataattttctccatat

SEQ ID NO: 114642 - DNA, 20 bp, Artificial Sequence
  Description of Artificial Sequence: Synthetic oligonucleotide
  Target: LAMA2; (-) strand; PAM type: NRG; PAM sequence: TGG
attttataattttctccata

SEQ ID NO: 114643 - DNA, 20 bp, Artificial Sequence
  Description of Artificial Sequence: Synthetic oligonucleotide
  Target: LAMA2; (-) strand; PAM type: NRG; PAM sequence: TGG
ataatcattgagaaatactt

SEQ ID NO: 114644 - DNA, 20 bp, Artificial Sequence
  Description of Artificial Sequence: Synthetic oligonucleotide
  Target: LAMA2; (-) strand; PAM type: NRG; PAM sequence: GAG
atttattgactataatcatt

SEQ ID NO: 114645 - DNA, 20 bp, Artificial Sequence
  Description of Artificial Sequence: Synthetic oligonucleotide
  Target: LAMA2; (-) strand; PAM type: NRG; PAM sequence: GAG
aatgacatatttttaatatt

SEQ ID NO: 114646 - DNA, 20 bp, Artificial Sequence
  Description of Artificial Sequence: Synthetic oligonucleotide
  Target: LAMA2; (-) strand; PAM type: NRG; PAM sequence: GAG
aatctacatatcattttggg

SEQ ID NO: 114647 - DNA, 20 bp, Artificial Sequence
  Description of Artificial Sequence: Synthetic oligonucleotide
  Target: LAMA2; (-) strand; PAM type: NRG; PAM sequence: GGG
tgaatctacatatcattttg

SEQ ID NO: 114648 - DNA, 20 bp, Artificial Sequence
  Description of Artificial Sequence: Synthetic oligonucleotide
  Target: LAMA2; (-) strand; PAM type: NRG; PAM sequence: GGG
ttgaatctacatatcatttt

SEQ ID NO: 114649 - DNA, 20 bp, Artificial Sequence
  Description of Artificial Sequence: Synthetic oligonucleotide
  Target: LAMA2; (-) strand; PAM type: NRG; PAM sequence: TGG
attgaatctacatatcattt

SEQ ID NO: 114650 - DNA, 20 bp, Artificial Sequence
  Description of Artificial Sequence: Synthetic oligonucleotide
  Target: LAMA2; (-) strand; PAM type: NRG; PAM sequence: AGG
tcatgattcacagaaaaata

SEQ ID NO: 114651 - DNA, 20 bp, Artificial Sequence
  Description of Artificial Sequence: Synthetic oligonucleotide
  Target: LAMA2; (-) strand; PAM type: NRG; PAM sequence: AAG
gtcatgattcacagaaaaat

SEQ ID NO: 114652 - DNA, 20 bp, Artificial Sequence
  Description of Artificial Sequence: Synthetic oligonucleotide
  Target: LAMA2; (-) strand; PAM type: NRG; PAM sequence: CAG
gaataagctgtcatgattca

SEQ ID NO: 114653 - DNA, 20 bp, Artificial Sequence
  Description of Artificial Sequence: Synthetic oligonucleotide
  Target: LAMA2; (-) strand; PAM type: NRG; PAM sequence: AAG
tttgatataaattttagaat

SEQ ID NO: 114654 - DNA, 20 bp, Artificial Sequence
  Description of Artificial Sequence: Synthetic oligonucleotide
  Target: LAMA2; (-) strand; PAM type: NRG; PAM sequence: TAG
ttcatctttgatataaattt

SEQ ID NO: 114655 - DNA, 20 bp, Artificial Sequence
  Description of Artificial Sequence: Synthetic oligonucleotide
  Target: LAMA2; (-) strand; PAM type: NRG; PAM sequence: AGG
ctacgctattcttctattct

SEQ ID NO: 114656 - DNA, 20 bp, Artificial Sequence
  Description of Artificial Sequence: Synthetic oligonucleotide
  Target: LAMA2; (-) strand; PAM type: NRG; PAM sequence: TAG
actacgctattcttctattc

SEQ ID NO: 114657 - DNA, 20 bp, Artificial Sequence
  Description of Artificial Sequence: Synthetic oligonucleotide
  Target: LAMA2; (-) strand; PAM type: NRG; PAM sequence: CAG
tgtgctgatatctggtggaa

SEQ ID NO: 114658 - DNA, 20 bp, Artificial Sequence
  Description of Artificial Sequence: Synthetic oligonucleotide
  Target: LAMA2; (-) strand; PAM type: NRG; PAM sequence: TGG
tctaatgtgctgatatctgg

SEQ ID NO: 114659 - DNA, 20 bp, Artificial Sequence
  Description of Artificial Sequence: Synthetic oligonucleotide
  Target: LAMA2; (-) strand; PAM type: NRG; PAM sequence: TGG
ccttctaatgtgctgatatc

SEQ ID NO: 114660 - DNA, 20 bp, Artificial Sequence
  Description of Artificial Sequence: Synthetic oligonucleotide
  Target: LAMA2; (-) strand; PAM type: NRG; PAM sequence: TAG
ttatacatgaattaacatga

SEQ ID NO: 114661 - DNA, 20 bp, Artificial Sequence
  Description of Artificial Sequence: Synthetic oligonucleotide
  Target: LAMA2; (-) strand; PAM type: NRG; PAM sequence: CAG
tcaattctttcctatttgca

SEQ ID NO: 114662 - DNA, 20 bp, Artificial Sequence
  Description of Artificial Sequence: Synthetic oligonucleotide
  Target: LAMA2; (-) strand; PAM type: NRG; PAM sequence: GGG
tctatgcttgtgtattttca

SEQ ID NO: 114663 - DNA, 20 bp, Artificial Sequence
  Description of Artificial Sequence: Synthetic oligonucleotide
  Target: LAMA2; (-) strand; PAM type: NRG; PAM sequence: AGG
atctatgcttgtgtattttc

SEQ ID NO: 114664 - DNA, 20 bp, Artificial Sequence
  Description of Artificial Sequence: Synthetic oligonucleotide
  Target: LAMA2; (-) strand; PAM type: NRG; PAM sequence: CAG
catctatgcttgtgtatttt

SEQ ID NO: 114665 - DNA, 20 bp, Artificial Sequence
  Description of Artificial Sequence: Synthetic oligonucleotide
  Target: LAMA2; (-) strand; PAM type: NRG; PAM sequence: CAG
ccctgaaatcattcactgaa

SEQ ID NO: 114666 - DNA, 20 bp, Artificial Sequence
  Description of Artificial Sequence: Synthetic oligonucleotide
  Target: LAMA2; (-) strand; PAM type: NRG; PAM sequence: TAG
tttgatatgaaaaagaaatt

SEQ ID NO: 114667 - DNA, 20 bp, Artificial Sequence
  Description of Artificial Sequence: Synthetic oligonucleotide
  Target: LAMA2; (-) strand; PAM type: NRG; PAM sequence: AAG
ttttttggtttgatatgaaa

SEQ ID NO: 114668 - DNA, 20 bp, Artificial Sequence
  Description of Artificial Sequence: Synthetic oligonucleotide
  Target: LAMA2; (-) strand; PAM type: NRG; PAM sequence: TGG
tttattgtgaatttattttt

SEQ ID NO: 114669 - DNA, 20 bp, Artificial Sequence
  Description of Artificial Sequence: Synthetic oligonucleotide
  Target: LAMA2; (-) strand; PAM type: NRG; PAM sequence: AAG
atttttgtccttccatattt

SEQ ID NO: 114670 - DNA, 20 bp, Artificial Sequence
  Description of Artificial Sequence: Synthetic oligonucleotide
  Target: LAMA2; (-) strand; PAM type: NRG; PAM sequence: AAG
attttcttctaagaatttta

SEQ ID NO: 114671 - DNA, 20 bp, Artificial Sequence
  Description of Artificial Sequence: Synthetic oligonucleotide
  Target: LAMA2; (-) strand; PAM type: NRG; PAM sequence: AAG
atcctggtatattttcttct

SEQ ID NO: 114672 - DNA, 20 bp, Artificial Sequence
  Description of Artificial Sequence: Synthetic oligonucleotide
  Target: LAMA2; (-) strand; PAM type: NRG; PAM sequence: TGG
cgaaggtcaaaatttaatcc

SEQ ID NO: 114673 - DNA, 20 bp, Artificial Sequence
  Description of Artificial Sequence: Synthetic oligonucleotide
  Target: LAMA2; (-) strand; PAM type: NRG; PAM sequence: AGG
atcaagtgttcttttcccga

SEQ ID NO: 114674 - DNA, 20 bp, Artificial Sequence
  Description of Artificial Sequence: Synthetic oligonucleotide
  Target: LAMA2; (-) strand; PAM type: NRG; PAM sequence: AAG
aatcaagtgttcttttcccg

SEQ ID NO: 114675 - DNA, 20 bp, Artificial Sequence
  Description of Artificial Sequence: Synthetic oligonucleotide
  Target: LAMA2; (-) strand; PAM type: NRG; PAM sequence: AAG
taatcttgttttgttcaatc

SEQ ID NO: 114676 - DNA, 20 bp, Artificial Sequence
  Description of Artificial Sequence: Synthetic oligonucleotide
  Target: LAMA2; (-) strand; PAM type: NRG; PAM sequence: CAG
caaagagtttaattttaatg

SEQ ID NO: 114677 - DNA, 20 bp, Artificial Sequence
  Description of Artificial Sequence: Synthetic oligonucleotide
  Target: LAMA2; (-) strand; PAM type: NRG; PAM sequence: GAG
tgtgttgtttgatgaccaaa

SEQ ID NO: 114678 - DNA, 20 bp, Artificial Sequence
  Description of Artificial Sequence: Synthetic oligonucleotide
  Target: LAMA2; (-) strand; PAM type: NRG; PAM sequence: AAG
tttgtgttgtttgatgacca

SEQ ID NO: 114679 - DNA, 20 bp, Artificial Sequence
  Description of Artificial Sequence: Synthetic oligonucleotide
  Target: LAMA2; (-) strand; PAM type: NRG; PAM sequence: AGG
tactgtacatttccagactg

SEQ ID NO: 114680 - DNA, 20 bp, Artificial Sequence
  Description of Artificial Sequence: Synthetic oligonucleotide
  Target: LAMA2; (-) strand; PAM type: NRG; PAM sequence: GAG
atactgtacatttccagact

SEQ ID NO: 114681 - DNA, 20 bp, Artificial Sequence
  Description of Artificial Sequence: Synthetic oligonucleotide
  Target: LAMA2; (-) strand; PAM type: NRG; PAM sequence: CAG
ttatatatactgtacatttc

SEQ ID NO: 114682 - DNA, 20 bp, Artificial Sequence
  Description of Artificial Sequence: Synthetic oligonucleotide
  Target: LAMA2; (-) strand; PAM type: NRG; PAM sequence: TAG
gacaaggactgtattccctg

SEQ ID NO: 114683 - DNA, 20 bp, Artificial Sequence
  Description of Artificial Sequence: Synthetic oligonucleotide
  Target: LAMA2; (-) strand; PAM type: NRG; PAM sequence: AGG
cttttccccttttggggaca

SEQ ID NO: 114684 - DNA, 20 bp, Artificial Sequence
  Description of Artificial Sequence: Synthetic oligonucleotide
  Target: LAMA2; (-) strand; PAM type: NRG; PAM sequence: AAG
gcttttccccttttggggac

SEQ ID NO: 114685 - DNA, 20 bp, Artificial Sequence
  Description of Artificial Sequence: Synthetic oligonucleotide
  Target: LAMA2; (-) strand; PAM type: NRG; PAM sequence: GGG
agtgagcttttccccttttg

SEQ ID NO: 114686 - DNA, 20 bp, Artificial Sequence
  Description of Artificial Sequence: Synthetic oligonucleotide
  Target: LAMA2; (-) strand; PAM type: NRG; PAM sequence: GGG
cagtgagcttttcccctttt

SEQ ID NO: 114687 - DNA, 20 bp, Artificial Sequence
  Description of Artificial Sequence: Synthetic oligonucleotide
  Target: LAMA2; (-) strand; PAM type: NRG; PAM sequence: TGG
gcagtgagcttttccccttt

SEQ ID NO: 114688 - DNA, 20 bp, Artificial Sequence
  Description of Artificial Sequence: Synthetic oligonucleotide
  Target: LAMA2; (-) strand; PAM type: NRG; PAM sequence: GAG
atcccattataaactgcagt

SEQ ID NO: 114689 - DNA, 20 bp, Artificial Sequence
  Description of Artificial Sequence: Synthetic oligonucleotide
  Target: LAMA2; (-) strand; PAM type: NRG; PAM sequence: CAG
cgatatcccattataaactg

SEQ ID NO: 114690 - DNA, 20 bp, Artificial Sequence
  Description of Artificial Sequence: Synthetic oligonucleotide
  Target: LAMA2; (-) strand; PAM type: NRG; PAM sequence: TGG
taatactataacaaccagta

SEQ ID NO: 114691 - DNA, 20 bp, Artificial Sequence
  Description of Artificial Sequence: Synthetic oligonucleotide
  Target: LAMA2; (-) strand; PAM type: NRG; PAM sequence: CAG
ctttctaatactataacaac

SEQ ID NO: 114692 - DNA, 20 bp, Artificial Sequence
  Description of Artificial Sequence: Synthetic oligonucleotide
  Target: LAMA2; (-) strand; PAM type: NRG; PAM sequence: GGG
tttctaccagcagtgatcaa

SEQ ID NO: 114693 - DNA, 20 bp, Artificial Sequence
  Description of Artificial Sequence: Synthetic oligonucleotide
  Target: LAMA2; (-) strand; PAM type: NRG; PAM sequence: AGG
ttttctaccagcagtgatca

SEQ ID NO: 114694 - DNA, 20 bp, Artificial Sequence
  Description of Artificial Sequence: Synthetic oligonucleotide
  Target: LAMA2; (-) strand; PAM type: NRG; PAM sequence: AAG
tttttctaccagcagtgatc

SEQ ID NO: 114695 - DNA, 20 bp, Artificial Sequence
  Description of Artificial Sequence: Synthetic oligonucleotide
  Target: LAMA2; (-) strand; PAM type: NRG; PAM sequence: CAG
aaatttactttttctaccag

SEQ ID NO: 114696 - DNA, 20 bp, Artificial Sequence
  Description of Artificial Sequence: Synthetic oligonucleotide
  Target: LAMA2; (-) strand; PAM type: NRG; PAM sequence: CAG
tagaaatttactttttctac

SEQ ID NO: 114697 - DNA, 20 bp, Artificial Sequence
  Description of Artificial Sequence: Synthetic oligonucleotide
  Target: LAMA2; (-) strand; PAM type: NRG; PAM sequence: TAG
attgttttccaaagtgactt

SEQ ID NO: 114698 - DNA, 20 bp, Artificial Sequence
  Description of Artificial Sequence: Synthetic oligonucleotide
  Target: LAMA2; (-) strand; PAM type: NRG; PAM sequence: AAG
tagtgccaaattgttttcca

SEQ ID NO: 114699 - DNA, 20 bp, Artificial Sequence
  Description of Artificial Sequence: Synthetic oligonucleotide
  Target: LAMA2; (-) strand; PAM type: NRG; PAM sequence: TAG
acatgttcaacttcaggaga

SEQ ID NO: 114700 - DNA, 20 bp, Artificial Sequence
  Description of Artificial Sequence: Synthetic oligonucleotide
  Target: LAMA2; (-) strand; PAM type: NRG; PAM sequence: GAG
atgcacatgttcaacttcag

SEQ ID NO: 114701 - DNA, 20 bp, Artificial Sequence
  Description of Artificial Sequence: Synthetic oligonucleotide
  Target: LAMA2; (-) strand; PAM type: NRG; PAM sequence: AGG
gtatgcacatgttcaacttc

SEQ ID NO: 114702 - DNA, 20 bp, Artificial Sequence
  Description of Artificial Sequence: Synthetic oligonucleotide
  Target: LAMA2; (-) strand; PAM type: NRG; PAM sequence: CAG
agtatgcacatgttcaactt

SEQ ID NO: 114703 - DNA, 20 bp, Artificial Sequence
  Description of Artificial Sequence: Synthetic oligonucleotide
  Target: LAMA2; (-) strand; PAM type: NRG; PAM sequence: GAG
tggaattgctggcttgtaga

SEQ ID NO: 114704 - DNA, 20 bp, Artificial Sequence
  Description of Artificial Sequence: Synthetic oligonucleotide
  Target: LAMA2; (-) strand; PAM type: NRG; PAM sequence: GAG
agtggaattgctggcttgta

SEQ ID NO: 114705 - DNA, 20 bp, Artificial Sequence
  Description of Artificial Sequence: Synthetic oligonucleotide
  Target: LAMA2; (-) strand; PAM type: NRG; PAM sequence: TAG
ggagtggaattgctggcttg

SEQ ID NO: 114706 - DNA, 20 bp, Artificial Sequence
  Description of Artificial Sequence: Synthetic oligonucleotide
  Target: LAMA2; (-) strand; PAM type: NRG; PAM sequence: TGG
gtacccaggagtggaattgc

SEQ ID NO: 114707 - DNA, 20 bp, Artificial Sequence
  Description of Artificial Sequence: Synthetic oligonucleotide
  Target: LAMA2; (-) strand; PAM type: NRG; PAM sequence: TGG
tctgggtctgtacccaggag

SEQ ID NO: 114708 - DNA, 20 bp, Artificial Sequence
  Description of Artificial Sequence: Synthetic oligonucleotide
  Target: LAMA2; (-) strand; PAM type: NRG; PAM sequence: GAG
aaatctgggtctgtacccag

SEQ ID NO: 114709 - DNA, 20 bp, Artificial Sequence
  Description of Artificial Sequence: Synthetic oligonucleotide
  Target: LAMA2; (-) strand; PAM type: NRG; PAM sequence: AGG
aaaaatctgggtctgtaccc

SEQ ID NO: 114710 - DNA, 20 bp, Artificial Sequence
  Description of Artificial Sequence: Synthetic oligonucleotide
  Target: LAMA2; (-) strand; PAM type: NRG; PAM sequence: CAG
caaaaatctgggtctgtacc

SEQ ID NO: 114711 - DNA, 20 bp, Artificial Sequence
  Description of Artificial Sequence: Synthetic oligonucleotide
  Target: LAMA2; (-) strand; PAM type: NRG; PAM sequence: GGG
atgcccatgtgcaaaaatct

SEQ ID NO: 114712 - DNA, 20 bp, Artificial Sequence
  Description of Artificial Sequence: Synthetic oligonucleotide
  Target: LAMA2; (-) strand; PAM type: NRG; PAM sequence: TGG
tatgcccatgtgcaaaaatc

SEQ ID NO: 114713 - DNA, 20 bp, Artificial Sequence
  Description of Artificial Sequence: Synthetic oligonucleotide
  Target: LAMA2; (-) strand; PAM type: NRG; PAM sequence: AAG
ctagtttctctgctattata

SEQ ID NO: 114714 - DNA, 20 bp, Artificial Sequence
  Description of Artificial Sequence: Synthetic oligonucleotide
  Target: LAMA2; (-) strand; PAM type: NRG; PAM sequence: TAG
atgaacacttgggttgtttc

SEQ ID NO: 114715 - DNA, 20 bp, Artificial Sequence
  Description of Artificial Sequence: Synthetic oligonucleotide
  Target: LAMA2; (-) strand; PAM type: NRG; PAM sequence: GGG
tctccagctgatgaacactt

SEQ ID NO: 114716 - DNA, 20 bp, Artificial Sequence
  Description of Artificial Sequence: Synthetic oligonucleotide
  Target: LAMA2; (-) strand; PAM type: NRG; PAM sequence: TGG
ttctccagctgatgaacact

SEQ ID NO: 114717 - DNA, 20 bp, Artificial Sequence
  Description of Artificial Sequence: Synthetic oligonucleotide
  Target: LAMA2; (-) strand; PAM type: NRG; PAM sequence: CAG
cagtttgcctctctgttctc

SEQ ID NO: 114718 - DNA, 20 bp, Artificial Sequence
  Description of Artificial Sequence: Synthetic oligonucleotide
  Target: LAMA2; (-) strand; PAM type: NRG; PAM sequence: CAG
cccattatgcaaaagtgcca

SEQ ID NO: 114719 - DNA, 20 bp, Artificial Sequence
  Description of Artificial Sequence: Synthetic oligonucleotide
  Target: LAMA2; (-) strand; PAM type: NRG; PAM sequence: AAG
cttgatatcccattatgcaa

SEQ ID NO: 114720 - DNA, 20 bp, Artificial Sequence
  Description of Artificial Sequence: Synthetic oligonucleotide
  Target: LAMA2; (-) strand; PAM type: NRG; PAM sequence: TAG
atttattatgttgttatatt

SEQ ID NO: 114721 - DNA, 20 bp, Artificial Sequence
  Description of Artificial Sequence: Synthetic oligonucleotide
  Target: LAMA2; (-) strand; PAM type: NRG; PAM sequence: TAG
tctacaaaaatggtaccata

SEQ ID NO: 114722 - DNA, 20 bp, Artificial Sequence
  Description of Artificial Sequence: Synthetic oligonucleotide
  Target: LAMA2; (-) strand; PAM type: NRG; PAM sequence: TGG
gtatgagaaatctacaaaaa

SEQ ID NO: 114723 - DNA, 20 bp, Artificial Sequence
  Description of Artificial Sequence: Synthetic oligonucleotide
  Target: LAMA2; (-) strand; PAM type: NRG; PAM sequence: GAG
ttgtttagtgctacttgtat

SEQ ID NO: 114724 - DNA, 20 bp, Artificial Sequence
  Description of Artificial Sequence: Synthetic oligonucleotide
  Target: LAMA2; (-) strand; PAM type: NRG; PAM sequence: TAG
tctgtaaacaatatgttgtt

SEQ ID NO: 114725 - DNA, 20 bp, Artificial Sequence
  Description of Artificial Sequence: Synthetic oligonucleotide
  Target: LAMA2; (-) strand; PAM type: NRG; PAM sequence: TGG
ctcagaggtaaccacaaatg

SEQ ID NO: 114726 - DNA, 20 bp, Artificial Sequence
  Description of Artificial Sequence: Synthetic oligonucleotide
  Target: LAMA2; (-) strand; PAM type: NRG; PAM sequence: AGG
tccttgcttctccatctcag

SEQ ID NO: 114727 - DNA, 20 bp, Artificial Sequence
  Description of Artificial Sequence: Synthetic oligonucleotide
  Target: LAMA2; (-) strand; PAM type: NRG; PAM sequence: GAG
ctccttgcttctccatctca

SEQ ID NO: 114728 - DNA, 20 bp, Artificial Sequence
  Description of Artificial Sequence: Synthetic oligonucleotide
  Target: LAMA2; (-) strand; PAM type: NRG; PAM sequence: CAG
atctccttgcttctccatct

SEQ ID NO: 114729 - DNA, 20 bp, Artificial Sequence
  Description of Artificial Sequence: Synthetic oligonucleotide
  Target: LAMA2; (-) strand; PAM type: NRG; PAM sequence: GAG
aataccattgcatctcttat

SEQ ID NO: 114730 - DNA, 20 bp, Artificial Sequence
  Description of Artificial Sequence: Synthetic oligonucleotide
  Target: LAMA2; (-) strand; PAM type: NRG; PAM sequence: CAG
gtaaatctaccaccaaattt

SEQ ID NO: 114731 - DNA, 20 bp, Artificial Sequence
  Description of Artificial Sequence: Synthetic oligonucleotide
  Target: LAMA2; (-) strand; PAM type: NRG; PAM sequence: AAG
tgatatacatgtaaacgatg

SEQ ID NO: 114732 - DNA, 20 bp, Artificial Sequence
  Description of Artificial Sequence: Synthetic oligonucleotide
  Target: LAMA2; (-) strand; PAM type: NRG; PAM sequence: GAG
tgatatattcttcacaatat

SEQ ID NO: 114733 - DNA, 20 bp, Artificial Sequence
  Description of Artificial Sequence: Synthetic oligonucleotide
  Target: LAMA2; (-) strand; PAM type: NRG; PAM sequence: AAG
tagtgcttattatgtgtagt

SEQ ID NO: 114734 - DNA, 20 bp, Artificial Sequence
  Description of Artificial Sequence: Synthetic oligonucleotide
  Target: LAMA2; (-) strand; PAM type: NRG; PAM sequence: TAG
tatttagtgcttattatgtg

SEQ ID NO: 114735 - DNA, 20 bp, Artificial Sequence
  Description of Artificial Sequence: Synthetic oligonucleotide
  Target: LAMA2; (-) strand; PAM type: NRG; PAM sequence: TAG
atttgtattttatatttatt

SEQ ID NO: 114736 - DNA, 20 bp, Artificial Sequence
  Description of Artificial Sequence: Synthetic oligonucleotide
  Target: LAMA2; (-) strand; PAM type: NRG; PAM sequence: GGG
ataaacaaaaaaattgacga

SEQ ID NO: 114737 - DNA, 20 bp, Artificial Sequence
  Description of Artificial Sequence: Synthetic oligonucleotide
  Target: LAMA2; (-) strand; PAM type: NRG; PAM sequence: AGG
gataaacaaaaaaattgacg

SEQ ID NO: 114738 - DNA, 20 bp, Artificial Sequence
  Description of Artificial Sequence: Synthetic oligonucleotide
  Target: LAMA2; (-) strand; PAM type: NRG; PAM sequence: GAG
agataaacaaaaaaattgac

SEQ ID NO: 114739 - DNA, 20 bp, Artificial Sequence
  Description of Artificial Sequence: Synthetic oligonucleotide
  Target: LAMA2; (-) strand; PAM type: NRG; PAM sequence: AAG
gagaaaaaagtttatttttc

SEQ ID NO: 114740 - DNA, 20 bp, Artificial Sequence
  Description of Artificial Sequence: Synthetic oligonucleotide
  Target: LAMA2; (-) strand; PAM type: NRG; PAM sequence: AAG
tcatttgcaatatgagaaaa

SEQ ID NO: 114741 - DNA, 20 bp, Artificial Sequence
  Description of Artificial Sequence: Synthetic oligonucleotide
  Target: LAMA2; (-) strand; PAM type: NRG; PAM sequence: GAG
tagcttatcatttgcaatat

SEQ ID NO: 114742 - DNA, 20 bp, Artificial Sequence
  Description of Artificial Sequence: Synthetic oligonucleotide
  Target: LAMA2; (-) strand; PAM type: NRG; PAM sequence: TAG
tctggtattcttattataac

SEQ ID NO: 114743 - DNA, 20 bp, Artificial Sequence
  Description of Artificial Sequence: Synthetic oligonucleotide
  Target: LAMA2; (-) strand; PAM type: NRG; PAM sequence: TGG
ctatttcagaatatttgatc

SEQ ID NO: 114744 - DNA, 20 bp, Artificial Sequence
  Description of Artificial Sequence: Synthetic oligonucleotide
  Target: LAMA2; (-) strand; PAM type: NRG; PAM sequence: CAG
cctttagtggaaatctattt

SEQ ID NO: 114745 - DNA, 20 bp, Artificial Sequence
  Description of Artificial Sequence: Synthetic oligonucleotide
  Target: LAMA2; (-) strand; PAM type: NRG; PAM sequence: TGG
aggaatcaagtatcctttag

SEQ ID NO: 114746 - DNA, 20 bp, Artificial Sequence
  Description of Artificial Sequence: Synthetic oligonucleotide
  Target: LAMA2; (-) strand; PAM type: NRG; PAM sequence: TAG
tgaaggaatcaagtatcctt

SEQ ID NO: 114747 - DNA, 20 bp, Artificial Sequence
  Description of Artificial Sequence: Synthetic oligonucleotide
  Target: LAMA2; (-) strand; PAM type: NRG; PAM sequence: AAG
ctggcaatgatgaaggaatc

SEQ ID NO: 114748 - DNA, 20 bp, Artificial Sequence
  Description of Artificial Sequence: Synthetic oligonucleotide
  Target: LAMA2; (-) strand; PAM type: NRG; PAM sequence: AGG
taaatatctggcaatgatga

SEQ ID NO: 114749 - DNA, 20 bp, Artificial Sequence
  Description of Artificial Sequence: Synthetic oligonucleotide
  Target: LAMA2; (-) strand; PAM type: NRG; PAM sequence: AAG
ttaaatatctggcaatgatg

SEQ ID NO: 114750 - DNA, 20 bp, Artificial Sequence
  Description of Artificial Sequence: Synthetic oligonucleotide
  Target: LAMA2; (-) strand; PAM type: NRG; PAM sequence: TGG
gtaggtagtgtttaaatatc

SEQ ID NO: 114751 - DNA, 20 bp, Artificial Sequence
  Description of Artificial Sequence: Synthetic oligonucleotide
  Target: LAMA2; (-) strand; PAM type: NRG; PAM sequence: TAG
agaaatttggagccagtagg

SEQ ID NO: 114752 - DNA, 20 bp, Artificial Sequence
  Description of Artificial Sequence: Synthetic oligonucleotide
  Target: LAMA2; (-) strand; PAM type: NRG; PAM sequence: AGG
aggagaaatttggagccagt

SEQ ID NO: 114753 - DNA, 20 bp, Artificial Sequence
  Description of Artificial Sequence: Synthetic oligonucleotide
  Target: LAMA2; (-) strand; PAM type: NRG; PAM sequence: TAG
gaggagaaatttggagccag

SEQ ID NO: 114754 - DNA, 20 bp, Artificial Sequence
  Description of Artificial Sequence: Synthetic oligonucleotide
  Target: LAMA2; (-) strand; PAM type: NRG; PAM sequence: CAG
gaagaggagaaatttggagc

SEQ ID NO: 114755 - DNA, 20 bp, Artificial Sequence
  Description of Artificial Sequence: Synthetic oligonucleotide
  Target: LAMA2; (-) strand; PAM type: NRG; PAM sequence: GAG
tcttgaagaggagaaatttg

SEQ ID NO: 114756 - DNA, 20 bp, Artificial Sequence
  Description of Artificial Sequence: Synthetic oligonucleotide
  Target: LAMA2; (-) strand; PAM type: NRG; PAM sequence: TGG
tatcttgaagaggagaaatt

SEQ ID NO: 114757 - DNA, 20 bp, Artificial Sequence
  Description of Artificial Sequence: Synthetic oligonucleotide
  Target: LAMA2; (-) strand; PAM type: NRG; PAM sequence: GAG
atttcttttatcttgaagag

SEQ ID NO: 114758 - DNA, 20 bp, Artificial Sequence
  Description of Artificial Sequence: Synthetic oligonucleotide
  Target: LAMA2; (-) strand; PAM type: NRG; PAM sequence: AGG
tcatttcttttatcttgaag

SEQ ID NO: 114759 - DNA, 20 bp, Artificial Sequence
  Description of Artificial Sequence: Synthetic oligonucleotide
  Target: LAMA2; (-) strand; PAM type: NRG; PAM sequence: GAG
ttcatttcttttatcttgaa

SEQ ID NO: 114760 - DNA, 20 bp, Artificial Sequence
  Description of Artificial Sequence: Synthetic oligonucleotide
  Target: LAMA2; (-) strand; PAM type: NRG; PAM sequence: AAG
cattcatttcttttatcttg

SEQ ID NO: 114761 - DNA, 20 bp, Artificial Sequence
  Description of Artificial Sequence: Synthetic oligonucleotide
  Target: LAMA2; (-) strand; PAM type: NRG; PAM sequence: TGG
ttaagcactatcctgaaagc

SEQ ID NO: 114762 - DNA, 20 bp, Artificial Sequence
  Description of Artificial Sequence: Synthetic oligonucleotide
  Target: LAMA2; (-) strand; PAM type: NRG; PAM sequence: AAG
tattttaagcactatcctga

SEQ ID NO: 114763 - DNA, 20 bp, Artificial Sequence
  Description of Artificial Sequence: Synthetic oligonucleotide
  Target: LAMA2; (-) strand; PAM type: NRG; PAM sequence: AAG
ataggaatctgttttatttt

SEQ ID NO: 114764 - DNA, 20 bp, Artificial Sequence
  Description of Artificial Sequence: Synthetic oligonucleotide
  Target: LAMA2; (-) strand; PAM type: NRG; PAM sequence: AGG
cttattgtaattgttttaat

SEQ ID NO: 114765 - DNA, 20 bp, Artificial Sequence
  Description of Artificial Sequence: Synthetic oligonucleotide
  Target: LAMA2; (-) strand; PAM type: NRG; PAM sequence: TAG
tcttattgtaattgttttaa

SEQ ID NO: 114766 - DNA, 20 bp, Artificial Sequence
  Description of Artificial Sequence: Synthetic oligonucleotide
  Target: LAMA2; (-) strand; PAM type: NRG; PAM sequence: TAG
ttactttatactatactaca

SEQ ID NO: 114767 - DNA, 20 bp, Artificial Sequence
  Description of Artificial Sequence: Synthetic oligonucleotide
  Target: LAMA2; (-) strand; PAM type: NRG; PAM sequence: GAG
atattttataaagtagatat

SEQ ID NO: 114768 - DNA, 20 bp, Artificial Sequence
  Description of Artificial Sequence: Synthetic oligonucleotide
  Target: LAMA2; (-) strand; PAM type: NRG; PAM sequence: TAG
tactatgatattttataaag

SEQ ID NO: 114769 - DNA, 20 bp, Artificial Sequence
  Description of Artificial Sequence: Synthetic oligonucleotide
  Target: LAMA2; (-) strand; PAM type: NRG; PAM sequence: AAG
atatactatgatattttata

SEQ ID NO: 114770 - DNA, 20 bp, Artificial Sequence
  Description of Artificial Sequence: Synthetic oligonucleotide
  Target: LAMA2; (-) strand; PAM type: NRG; PAM sequence: TAG
acattggttcctccttcaga

SEQ ID NO: 114771 - DNA, 20 bp, Artificial Sequence
  Description of Artificial Sequence: Synthetic oligonucleotide
  Target: LAMA2; (-) strand; PAM type: NRG; PAM sequence: CAG
tttaacattggttcctcctt

SEQ ID NO: 114772 - DNA, 20 bp, Artificial Sequence
  Description of Artificial Sequence: Synthetic oligonucleotide
  Target: LAMA2; (-) strand; PAM type: NRG; PAM sequence: TGG
agacttatactatttaacat

SEQ ID NO: 114773 - DNA, 20 bp, Artificial Sequence
  Description of Artificial Sequence: Synthetic oligonucleotide
  Target: LAMA2; (-) strand; PAM type: NRG; PAM sequence: CAG
ctaaatctaattatgtctaa

SEQ ID NO: 114774 - DNA, 20 bp, Artificial Sequence
  Description of Artificial Sequence: Synthetic oligonucleotide
  Target: LAMA2; (-) strand; PAM type: NRG; PAM sequence: CAG
ataaaacttgtcaatttaac

SEQ ID NO: 114775 - DNA, 20 bp, Artificial Sequence
  Description of Artificial Sequence: Synthetic oligonucleotide
  Target: LAMA2; (-) strand; PAM type: NRG; PAM sequence: TAG
tctatgggtatcaaaaccgt

SEQ ID NO: 114776 - DNA, 20 bp, Artificial Sequence
  Description of Artificial Sequence: Synthetic oligonucleotide
  Target: LAMA2; (-) strand; PAM type: NRG; PAM sequence: GGG
ggaatcacaaataactctat

SEQ ID NO: 114777 - DNA, 20 bp, Artificial Sequence
  Description of Artificial Sequence: Synthetic oligonucleotide
  Target: LAMA2; (-) strand; PAM type: NRG; PAM sequence: TGG
aggaatcacaaataactcta

SEQ ID NO: 114778 - DNA, 20 bp, Artificial Sequence
  Description of Artificial Sequence: Synthetic oligonucleotide
  Target: LAMA2; (-) strand; PAM type: NRG; PAM sequence: AGG
atcaaacccatttagcagaa

SEQ ID NO: 114779 - DNA, 20 bp, Artificial Sequence
  Description of Artificial Sequence: Synthetic oligonucleotide
  Target: LAMA2; (-) strand; PAM type: NRG; PAM sequence: AAG
tatcaaacccatttagcaga

SEQ ID NO: 114780 - DNA, 20 bp, Artificial Sequence
  Description of Artificial Sequence: Synthetic oligonucleotide
  Target: LAMA2; (-) strand; PAM type: NRG; PAM sequence: CAG
gccatatcaaacccatttag

SEQ ID NO: 114781 - DNA, 20 bp, Artificial Sequence
  Description of Artificial Sequence: Synthetic oligonucleotide
  Target: LAMA2; (-) strand; PAM type: NRG; PAM sequence: TAG
tttgccatatcaaacccatt

SEQ ID NO: 114782 - DNA, 20 bp, Artificial Sequence
  Description of Artificial Sequence: Synthetic oligonucleotide
  Target: LAMA2; (-) strand; PAM type: NRG; PAM sequence: TGG
aaaattccttagctcatgga

SEQ ID NO: 114783 - DNA, 20 bp, Artificial Sequence
  Description of Artificial Sequence: Synthetic oligonucleotide
  Target: LAMA2; (-) strand; PAM type: NRG; PAM sequence: TGG
attaaaaattccttagctca

SEQ ID NO: 114784 - DNA, 20 bp, Artificial Sequence
  Description of Artificial Sequence: Synthetic oligonucleotide
  Target: LAMA2; (-) strand; PAM type: NRG; PAM sequence: TAG
ctactcaattaaaaattcct

SEQ ID NO: 114785 - DNA, 20 bp, Artificial Sequence
  Description of Artificial Sequence: Synthetic oligonucleotide
  Target: LAMA2; (-) strand; PAM type: NRG; PAM sequence: GGG
agtgctcaccatctgtcaaa

SEQ ID NO: 114786 - DNA, 20 bp, Artificial Sequence
  Description of Artificial Sequence: Synthetic oligonucleotide
  Target: LAMA2; (-) strand; PAM type: NRG; PAM sequence: AGG
aagtgctcaccatctgtcaa

SEQ ID NO: 114787 - DNA, 20 bp, Artificial Sequence
  Description of Artificial Sequence: Synthetic oligonucleotide
  Target: LAMA2; (-) strand; PAM type: NRG; PAM sequence: AAG
taagtgctcaccatctgtca

SEQ ID NO: 114788 - DNA, 20 bp, Artificial Sequence
  Description of Artificial Sequence: Synthetic oligonucleotide
  Target: LAMA2; (-) strand; PAM type: NRG; PAM sequence: AAG
aacattttgaggatctggat

SEQ ID NO: 114789 - DNA, 20 bp, Artificial Sequence
  Description of Artificial Sequence: Synthetic oligonucleotide
  Target: LAMA2; (-) strand; PAM type: NRG; PAM sequence: TGG
cacagaacattttgaggatc

SEQ ID NO: 114790 - DNA, 20 bp, Artificial Sequence
  Description of Artificial Sequence: Synthetic oligonucleotide
  Target: LAMA2; (-) strand; PAM type: NRG; PAM sequence: AGG
gtccaccacagaacattttg

SEQ ID NO: 114791 - DNA, 20 bp, Artificial Sequence
  Description of Artificial Sequence: Synthetic oligonucleotide
  Target: LAMA2; (-) strand; PAM type: NRG; PAM sequence: GAG
tgtccaccacagaacatttt

SEQ ID NO: 114792 - DNA, 20 bp, Artificial Sequence
  Description of Artificial Sequence: Synthetic oligonucleotide
  Target: LAMA2; (-) strand; PAM type: NRG; PAM sequence: CAG
atgtagttacgtgtccacca

SEQ ID NO: 114793 - DNA, 20 bp, Artificial Sequence
  Description of Artificial Sequence: Synthetic oligonucleotide
  Target: LAMA2; (-) strand; PAM type: NRG; PAM sequence: TAG
aatttactaaatcatgtatg

SEQ ID NO: 114794 - DNA, 20 bp, Artificial Sequence
  Description of Artificial Sequence: Synthetic oligonucleotide
  Target: LAMA2; (-) strand; PAM type: NRG; PAM sequence: CAG
gtcatctatggtggtagaga

SEQ ID NO: 114795 - DNA, 20 bp, Artificial Sequence
  Description of Artificial Sequence: Synthetic oligonucleotide
  Target: LAMA2; (-) strand; PAM type: NRG; PAM sequence: GAG
atgagtcatctatggtggta

SEQ ID NO: 114796 - DNA, 20 bp, Artificial Sequence
  Description of Artificial Sequence: Synthetic oligonucleotide
  Target: LAMA2; (-) strand; PAM type: NRG; PAM sequence: TAG
ccatgagtcatctatggtgg

SEQ ID NO: 114797 - DNA, 20 bp, Artificial Sequence
  Description of Artificial Sequence: Synthetic oligonucleotide
  Target: LAMA2; (-) strand; PAM type: NRG; PAM sequence: TGG
tctccatgagtcatctatgg

SEQ ID NO: 114798 - DNA, 20 bp, Artificial Sequence
  Description of Artificial Sequence: Synthetic oligonucleotide
  Target: LAMA2; (-) strand; PAM type: NRG; PAM sequence: TGG
agttctccatgagtcatcta

SEQ ID NO: 114799 - DNA, 20 bp, Artificial Sequence
  Description of Artificial Sequence: Synthetic oligonucleotide
  Target: LAMA2; (-) strand; PAM type: NRG; PAM sequence: GAG
gtgatggctcagttctccat

SEQ ID NO: 114800 - DNA, 20 bp, Artificial Sequence
  Description of Artificial Sequence: Synthetic oligonucleotide
  Target: LAMA2; (-) strand; PAM type: NRG; PAM sequence: CAG
cctgccacacagtgatggct

SEQ ID NO: 114801 - DNA, 20 bp, Artificial Sequence
  Description of Artificial Sequence: Synthetic oligonucleotide
  Target: LAMA2; (-) strand; PAM type: NRG; PAM sequence: TGG
gggcacctgccacacagtga

SEQ ID NO: 114802 - DNA, 20 bp, Artificial Sequence
  Description of Artificial Sequence: Synthetic oligonucleotide
  Target: LAMA2; (-) strand; PAM type: NRG; PAM sequence: CAG
gtatgggggcacctgccaca

SEQ ID NO: 114803 - DNA, 20 bp, Artificial Sequence
  Description of Artificial Sequence: Synthetic oligonucleotide
  Target: LAMA2; (-) strand; PAM type: NRG; PAM sequence: GGG
ccctttcttgtggagtatgg

SEQ ID NO: 114804 - DNA, 20 bp, Artificial Sequence
  Description of Artificial Sequence: Synthetic oligonucleotide
  Target: LAMA2; (-) strand; PAM type: NRG; PAM sequence: GGG
tccctttcttgtggagtatg

SEQ ID NO: 114805 - DNA, 20 bp, Artificial Sequence
  Description of Artificial Sequence: Synthetic oligonucleotide
  Target: LAMA2; (-) strand; PAM type: NRG; PAM sequence: GGG
ctccctttcttgtggagtat

SEQ ID NO: 114806 - DNA, 20 bp, Artificial Sequence
  Description of Artificial Sequence: Synthetic oligonucleotide
  Target: LAMA2; (-) strand; PAM type: NRG; PAM sequence: TGG
tctccctttcttgtggagta

SEQ ID NO: 114807 - DNA, 20 bp, Artificial Sequence
  Description of Artificial Sequence: Synthetic oligonucleotide
  Target: LAMA2; (-) strand; PAM type: NRG; PAM sequence: GAG
cgtgctctccctttcttgtg

SEQ ID NO: 114808 - DNA, 20 bp, Artificial Sequence
  Description of Artificial Sequence: Synthetic oligonucleotide
  Target: LAMA2; (-) strand; PAM type: NRG; PAM sequence: TGG
cacgtgctctccctttcttg

SEQ ID NO: 114809 - DNA, 20 bp, Artificial Sequence
  Description of Artificial Sequence: Synthetic oligonucleotide
  Target: LAMA2; (-) strand; PAM type: NRG; PAM sequence: GAG
gaatgcagtccttgtcccta

SEQ ID NO: 114810 - DNA, 20 bp, Artificial Sequence
  Description of Artificial Sequence: Synthetic oligonucleotide
  Target: LAMA2; (-) strand; PAM type: NRG; PAM sequence: TAG
ctgaatgcagtccttgtccc

SEQ ID NO: 114811 - DNA, 20 bp, Artificial Sequence
  Description of Artificial Sequence: Synthetic oligonucleotide
  Target: LAMA2; (-) strand; PAM type: NRG; PAM sequence: CAG
aaccccagggagcctgaatg

SEQ ID NO: 114812 - DNA, 20 bp, Artificial Sequence
  Description of Artificial Sequence: Synthetic oligonucleotide
  Target: LAMA2; (-) strand; PAM type: NRG; PAM sequence: GAG
atcccatcatgaaccccagg

SEQ ID NO: 114813 - DNA, 20 bp, Artificial Sequence
  Description of Artificial Sequence: Synthetic oligonucleotide
  Target: LAMA2; (-) strand; PAM type: NRG; PAM sequence: GGG
atatcccatcatgaacccca

SEQ ID NO: 114814 - DNA, 20 bp, Artificial Sequence
  Description of Artificial Sequence: Synthetic oligonucleotide
  Target: LAMA2; (-) strand; PAM type: NRG; PAM sequence: AGG
gatatcccatcatgaacccc

SEQ ID NO: 114815 - DNA, 20 bp, Artificial Sequence
  Description of Artificial Sequence: Synthetic oligonucleotide
  Target: LAMA2; (-) strand; PAM type: NRG; PAM sequence: CAG
tgatatcccatcatgaaccc

SEQ ID NO: 114816 - DNA, 20 bp, Artificial Sequence
  Description of Artificial Sequence: Synthetic oligonucleotide
  Target: LAMA2; (-) strand; PAM type: NRG; PAM sequence: TGG
tgttactatagcaaccagtg

SEQ ID NO: 114817 - DNA, 20 bp, Artificial Sequence
  Description of Artificial Sequence: Synthetic oligonucleotide
  Target: LAMA2; (-) strand; PAM type: NRG; PAM sequence: CAG
gctactgttactatagcaac

SEQ ID NO: 114818 - DNA, 20 bp, Artificial Sequence
  Description of Artificial Sequence: Synthetic oligonucleotide
  Target: LAMA2; (-) strand; PAM type: NRG; PAM sequence: TAG
tcttcttgctactgttacta

SEQ ID NO: 114819 - DNA, 20 bp, Artificial Sequence
  Description of Artificial Sequence: Synthetic oligonucleotide
  Target: LAMA2; (-) strand; PAM type: NRG; PAM sequence: AAG
gaagataatttttcatccac

SEQ ID NO: 114820 - DNA, 20 bp, Artificial Sequence
  Description of Artificial Sequence: Synthetic oligonucleotide
  Target: LAMA2; (-) strand; PAM type: NRG; PAM sequence: AAG
tcccacatttagaaagaagg

SEQ ID NO: 114821 - DNA, 20 bp, Artificial Sequence
  Description of Artificial Sequence: Synthetic oligonucleotide
  Target: LAMA2; (-) strand; PAM type: NRG; PAM sequence: AGG
gcctcccacatttagaaaga

SEQ ID NO: 114822 - DNA, 20 bp, Artificial Sequence
  Description of Artificial Sequence: Synthetic oligonucleotide
  Target: LAMA2; (-) strand; PAM type: NRG; PAM sequence: AAG
tgcctcccacatttagaaag

SEQ ID NO: 114823 - DNA, 20 bp, Artificial Sequence
  Description of Artificial Sequence: Synthetic oligonucleotide
  Target: LAMA2; (-) strand; PAM type: NRG; PAM sequence: AAG
acctgcctcccacatttaga

SEQ ID NO: 114824 - DNA, 20 bp, Artificial Sequence
  Description of Artificial Sequence: Synthetic oligonucleotide
  Target: LAMA2; (-) strand; PAM type: NRG; PAM sequence: TAG
tgtaacctgcctcccacatt

SEQ ID NO: 114825 - DNA, 20 bp, Artificial Sequence
  Description of Artificial Sequence: Synthetic oligonucleotide
  Target: LAMA2; (-) strand; PAM type: NRG; PAM sequence: TAG
tgttctctgagctggtagaa

SEQ ID NO: 114826 - DNA, 20 bp, Artificial Sequence
  Description of Artificial Sequence: Synthetic oligonucleotide
  Target: LAMA2; (-) strand; PAM type: NRG; PAM sequence: TAG
caatttgttctctgagctgg

SEQ ID NO: 114827 - DNA, 20 bp, Artificial Sequence
  Description of Artificial Sequence: Synthetic oligonucleotide
  Target: LAMA2; (-) strand; PAM type: NRG; PAM sequence: TGG
cttcaatttgttctctgagc

SEQ ID NO: 114828 - DNA, 20 bp, Artificial Sequence
  Description of Artificial Sequence: Synthetic oligonucleotide
  Target: LAMA2; (-) strand; PAM type: NRG; PAM sequence: GAG
tagacttcaatttgttctct

SEQ ID NO: 114829 - DNA, 20 bp, Artificial Sequence
  Description of Artificial Sequence: Synthetic oligonucleotide
  Target: LAMA2; (-) strand; PAM type: NRG; PAM sequence: TAG
cttgtggcattctgagtatt

SEQ ID NO: 114830 - DNA, 20 bp, Artificial Sequence
  Description of Artificial Sequence: Synthetic oligonucleotide
  Target: LAMA2; (-) strand; PAM type: NRG; PAM sequence: GAG
tcccaaccttgtggcattct

SEQ ID NO: 114831 - DNA, 20 bp, Artificial Sequence
  Description of Artificial Sequence: Synthetic oligonucleotide
  Target: LAMA2; (-) strand; PAM type: NRG; PAM sequence: TGG
aggcctgactcccaaccttg

SEQ ID NO: 114832 - DNA, 20 bp, Artificial Sequence
  Description of Artificial Sequence: Synthetic oligonucleotide
  Target: LAMA2; (-) strand; PAM type: NRG; PAM sequence: AGG
acagctagcttctgagaatc

SEQ ID NO: 114833 - DNA, 20 bp, Artificial Sequence
  Description of Artificial Sequence: Synthetic oligonucleotide
  Target: LAMA2; (-) strand; PAM type: NRG; PAM sequence: CAG
gacagctagcttctgagaat

SEQ ID NO: 114834 - DNA, 20 bp, Artificial Sequence
  Description of Artificial Sequence: Synthetic oligonucleotide
  Target: LAMA2; (-) strand; PAM type: NRG; PAM sequence: GAG
caagtggacagctagcttct

SEQ ID NO: 114835 - DNA, 20 bp, Artificial Sequence
  Description of Artificial Sequence: Synthetic oligonucleotide
  Target: LAMA2; (-) strand; PAM type: NRG; PAM sequence: TAG
tatattcacaagtggacagc

SEQ ID NO: 114836 - DNA, 20 bp, Artificial Sequence
  Description of Artificial Sequence: Synthetic oligonucleotide
  Target: LAMA2; (-) strand; PAM type: NRG; PAM sequence: CAG
cccttatattcacaagtgga

SEQ ID NO: 114837 - DNA, 20 bp, Artificial Sequence
  Description of Artificial Sequence: Synthetic oligonucleotide
  Target: LAMA2; (-) strand; PAM type: NRG; PAM sequence: TGG
ctctcccttatattcacaag

SEQ ID NO: 114838 - DNA, 20 bp, Artificial Sequence
  Description of Artificial Sequence: Synthetic oligonucleotide
  Target: LAMA2; (-) strand; PAM type: NRG; PAM sequence: AAG
tccctctcccttatattcac

SEQ ID NO: 114839 - DNA, 20 bp, Artificial Sequence
  Description of Artificial Sequence: Synthetic oligonucleotide
  Target: LAMA2; (-) strand; PAM type: NRG; PAM sequence: GGG
aaaacccatcaggagacaaa

SEQ ID NO: 114840 - DNA, 20 bp, Artificial Sequence
  Description of Artificial Sequence: Synthetic oligonucleotide
  Target: LAMA2; (-) strand; PAM type: NRG; PAM sequence: AGG
taaaacccatcaggagacaa

SEQ ID NO: 114841 - DNA, 20 bp, Artificial Sequence
  Description of Artificial Sequence: Synthetic oligonucleotide
  Target: LAMA2; (-) strand; PAM type: NRG; PAM sequence: AAG
ataaaacccatcaggagaca

SEQ ID NO: 114842 - DNA, 20 bp, Artificial Sequence
  Description of Artificial Sequence: Synthetic oligonucleotide
  Target: LAMA2; (-) strand; PAM type: NRG; PAM sequence: GAG
taacttataaaacccatcag

SEQ ID NO: 114843 - DNA, 20 bp, Artificial Sequence
  Description of Artificial Sequence: Synthetic oligonucleotide
  Target: LAMA2; (-) strand; PAM type: NRG; PAM sequence: AGG
tctaacttataaaacccatc

SEQ ID NO: 114844 - DNA, 20 bp, Artificial Sequence
  Description of Artificial Sequence: Synthetic oligonucleotide
  Target: LAMA2; (-) strand; PAM type: NRG; PAM sequence: CAG
ctctaacttataaaacccat

SEQ ID NO: 114845 - DNA, 20 bp, Artificial Sequence
  Description of Artificial Sequence: Synthetic oligonucleotide
  Target: LAMA2; (-) strand; PAM type: NRG; PAM sequence: TGG
agtaacagctgtgcttgcgt

SEQ ID NO: 114846 - DNA, 20 bp, Artificial Sequence
  Description of Artificial Sequence: Synthetic oligonucleotide
  Target: LAMA2; (-) strand; PAM type: NRG; PAM sequence: CAG
atttgtgatgctgaaagtaa

SEQ ID NO: 114847 - DNA, 20 bp, Artificial Sequence
  Description of Artificial Sequence: Synthetic oligonucleotide
  Target: LAMA2; (-) strand; PAM type: NRG; PAM sequence: AAG
aagcagatttgtgatgctga

SEQ ID NO: 114848 - DNA, 20 bp, Artificial Sequence
  Description of Artificial Sequence: Synthetic oligonucleotide
  Target: LAMA2; (-) strand; PAM type: NRG; PAM sequence: CAG
tatagcagttctctgcaaag

SEQ ID NO: 114849 - DNA, 20 bp, Artificial Sequence
  Description of Artificial Sequence: Synthetic oligonucleotide
  Target: LAMA2; (-) strand; PAM type: NRG; PAM sequence: AAG
taatatagcagttctctgca

SEQ ID NO: 114850 - DNA, 20 bp, Artificial Sequence
  Description of Artificial Sequence: Synthetic oligonucleotide
  Target: LAMA2; (-) strand; PAM type: NRG; PAM sequence: CAG
aagtggatatattaatatag

SEQ ID NO: 114851 - DNA, 20 bp, Artificial Sequence
  Description of Artificial Sequence: Synthetic oligonucleotide
  Target: LAMA2; (-) strand; PAM type: NRG; PAM sequence: TAG
ggaaagtggatatattaata

SEQ ID NO: 114852 - DNA, 20 bp, Artificial Sequence
  Description of Artificial Sequence: Synthetic oligonucleotide
  Target: LAMA2; (-) strand; PAM type: NRG; PAM sequence: TGG
ttgtgagatgatctggaaag

SEQ ID NO: 114853 - DNA, 20 bp, Artificial Sequence
  Description of Artificial Sequence: Synthetic oligonucleotide
  Target: LAMA2; (-) strand; PAM type: NRG; PAM sequence: AAG
tgcttgtgagatgatctgga

SEQ ID NO: 114854 - DNA, 20 bp, Artificial Sequence
  Description of Artificial Sequence: Synthetic oligonucleotide
  Target: LAMA2; (-) strand; PAM type: NRG; PAM sequence: TGG
tttttgcttgtgagatgatc

SEQ ID NO: 114855 - DNA, 20 bp, Artificial Sequence
  Description of Artificial Sequence: Synthetic oligonucleotide
  Target: LAMA2; (-) strand; PAM type: NRG; PAM sequence: GAG
catttaccatttttgcttgt

SEQ ID NO: 114856 - DNA, 20 bp, Artificial Sequence
  Description of Artificial Sequence: Synthetic oligonucleotide
  Target: LAMA2; (-) strand; PAM type: NRG; PAM sequence: TGG
caaacggttttgaaaacagc

SEQ ID NO: 114857 - DNA, 20 bp, Artificial Sequence
  Description of Artificial Sequence: Synthetic oligonucleotide
  Target: LAMA2; (-) strand; PAM type: NRG; PAM sequence: CAG
ttctcaaacggttttgaaaa

SEQ ID NO: 114858 - DNA, 20 bp, Artificial Sequence
  Description of Artificial Sequence: Synthetic oligonucleotide
  Target: LAMA2; (-) strand; PAM type: NRG; PAM sequence: CGG
taagactttattttctcaaa

SEQ ID NO: 114859 - DNA, 20 bp, Artificial Sequence
  Description of Artificial Sequence: Synthetic oligonucleotide
  Target: LAMA2; (-) strand; PAM type: NRG; PAM sequence: AAG
gagatcttacctgagaaatt

SEQ ID NO: 114860 - DNA, 20 bp, Artificial Sequence
  Description of Artificial Sequence: Synthetic oligonucleotide
  Target: LAMA2; (-) strand; PAM type: NRG; PAM sequence: GAG
tctgctctgagatcttacct

SEQ ID NO: 114861 - DNA, 20 bp, Artificial Sequence
  Description of Artificial Sequence: Synthetic oligonucleotide
  Target: LAMA2; (-) strand; PAM type: NRG; PAM sequence: GAG
accacaggttcgtctgctct

SEQ ID NO: 114862 - DNA, 20 bp, Artificial Sequence
  Description of Artificial Sequence: Synthetic oligonucleotide
  Target: LAMA2; (-) strand; PAM type: NRG; PAM sequence: AGG
agattccctggcagaaccac

SEQ ID NO: 114863 - DNA, 20 bp, Artificial Sequence
  Description of Artificial Sequence: Synthetic oligonucleotide
  Target: LAMA2; (-) strand; PAM type: NRG; PAM sequence: CAG
gagattccctggcagaacca

SEQ ID NO: 114864 - DNA, 20 bp, Artificial Sequence
  Description of Artificial Sequence: Synthetic oligonucleotide
  Target: LAMA2; (-) strand; PAM type: NRG; PAM sequence: CAG
tagctttagagattccctgg

SEQ ID NO: 114865 - DNA, 20 bp, Artificial Sequence
  Description of Artificial Sequence: Synthetic oligonucleotide
  Target: LAMA2; (-) strand; PAM type: NRG; PAM sequence: TGG
gcttagctttagagattccc

SEQ ID NO: 114866 - DNA, 20 bp, Artificial Sequence
  Description of Artificial Sequence: Synthetic oligonucleotide
  Target: LAMA2; (-) strand; PAM type: NRG; PAM sequence: GAG
tcatttatggcttagcttta

SEQ ID NO: 114867 - DNA, 20 bp, Artificial Sequence
  Description of Artificial Sequence: Synthetic oligonucleotide
  Target: LAMA2; (-) strand; PAM type: NRG; PAM sequence: TAG
tctcatttatggcttagctt

SEQ ID NO: 114868 - DNA, 20 bp, Artificial Sequence
  Description of Artificial Sequence: Synthetic oligonucleotide
  Target: LAMA2; (-) strand; PAM type: NRG; PAM sequence: TAG
cagaagtctcatttatggct

SEQ ID NO: 114869 - DNA, 20 bp, Artificial Sequence
  Description of Artificial Sequence: Synthetic oligonucleotide
  Target: LAMA2; (-) strand; PAM type: NRG; PAM sequence: TGG
ttaaacagaagtctcattta

SEQ ID NO: 114870 - DNA, 20 bp, Artificial Sequence
  Description of Artificial Sequence: Synthetic oligonucleotide
  Target: LAMA2; (-) strand; PAM type: NRG; PAM sequence: AAG
ggttattgaagattaaacag

SEQ ID NO: 114871 - DNA, 20 bp, Artificial Sequence
  Description of Artificial Sequence: Synthetic oligonucleotide
  Target: LAMA2; (-) strand; PAM type: NRG; PAM sequence: CAG
agtggttattgaagattaaa

SEQ ID NO: 114872 - DNA, 20 bp, Artificial Sequence
  Description of Artificial Sequence: Synthetic oligonucleotide
  Target: LAMA2; (-) strand; PAM type: NRG; PAM sequence: AAG
gcaacagcaagtggttattg

SEQ ID NO: 114873 - DNA, 20 bp, Artificial Sequence
  Description of Artificial Sequence: Synthetic oligonucleotide
  Target: LAMA2; (-) strand; PAM type: NRG; PAM sequence: TGG
aataggcctgcaacagcaag

SEQ ID NO: 114874 - DNA, 20 bp, Artificial Sequence
  Description of Artificial Sequence: Synthetic oligonucleotide
  Target: LAMA2; (-) strand; PAM type: NRG; PAM sequence: AAG
cataataggcctgcaacagc

SEQ ID NO: 114875 - DNA, 20 bp, Artificial Sequence
  Description of Artificial Sequence: Synthetic oligonucleotide
  Target: LAMA2; (-) strand; PAM type: NRG; PAM sequence: CAG
attgcataataggcctgcaa

SEQ ID NO: 114876 - DNA, 20 bp, Artificial Sequence
  Description of Artificial Sequence: Synthetic oligonucleotide
  Target: LAMA2; (-) strand; PAM type: NRG; PAM sequence: AGG
gttgaggagtattgcataat

SEQ ID NO: 114877 - DNA, 20 bp, Artificial Sequence
  Description of Artificial Sequence: Synthetic oligonucleotide
  Target: LAMA2; (-) strand; PAM type: NRG; PAM sequence: TAG
tgttgaggagtattgcataa

SEQ ID NO: 114878 - DNA, 20 bp, Artificial Sequence
  Description of Artificial Sequence: Synthetic oligonucleotide
  Target: LAMA2; (-) strand; PAM type: NRG; PAM sequence: GAG
tccagacggcccctgttgag

SEQ ID NO: 114879 - DNA, 20 bp, Artificial Sequence
  Description of Artificial Sequence: Synthetic oligonucleotide
  Target: LAMA2; (-) strand; PAM type: NRG; PAM sequence: AGG
cttccagacggcccctgttg

SEQ ID NO: 114880 - DNA, 20 bp, Artificial Sequence
  Description of Artificial Sequence: Synthetic oligonucleotide
  Target: LAMA2; (-) strand; PAM type: NRG; PAM sequence: GAG
acttccagacggcccctgtt

SEQ ID NO: 114881 - DNA, 20 bp, Artificial Sequence
  Description of Artificial Sequence: Synthetic oligonucleotide
  Target: LAMA2; (-) strand; PAM type: NRG; PAM sequence: CGG
tggagagatgcacttccaga

SEQ ID NO: 114882 - DNA, 20 bp, Artificial Sequence
  Description of Artificial Sequence: Synthetic oligonucleotide
  Target: LAMA2; (-) strand; PAM type: NRG; PAM sequence: CAG
cctgtggagagatgcacttc

SEQ ID NO: 114883 - DNA, 20 bp, Artificial Sequence
  Description of Artificial Sequence: Synthetic oligonucleotide
  Target: LAMA2; (-) strand; PAM type: NRG; PAM sequence: GAG
attgttcgtgcccctgtgga

SEQ ID NO: 114884 - DNA, 20 bp, Artificial Sequence
  Description of Artificial Sequence: Synthetic oligonucleotide
  Target: LAMA2; (-) strand; PAM type: NRG; PAM sequence: GAG
tcattgttcgtgcccctgtg

SEQ ID NO: 114885 - DNA, 20 bp, Artificial Sequence
  Description of Artificial Sequence: Synthetic oligonucleotide
  Target: LAMA2; (-) strand; PAM type: NRG; PAM sequence: TGG
cctcattgttcgtgcccctg

SEQ ID NO: 114886 - DNA, 20 bp, Artificial Sequence
  Description of Artificial Sequence: Synthetic oligonucleotide
  Target: LAMA2; (-) strand; PAM type: NRG; PAM sequence: TGG
tcatgaaacagattcggctc

SEQ ID NO: 114887 - DNA, 20 bp, Artificial Sequence
  Description of Artificial Sequence: Synthetic oligonucleotide
  Target: LAMA2; (-) strand; PAM type: NRG; PAM sequence: CGG
cttccatcatgaaacagatt

SEQ ID NO: 114888 - DNA, 20 bp, Artificial Sequence
  Description of Artificial Sequence: Synthetic oligonucleotide
  Target: LAMA2; (-) strand; PAM type: NRG; PAM sequence: CAG
tgttctcttccatcatgaaa

SEQ ID NO: 114889 - DNA, 20 bp, Artificial Sequence
  Description of Artificial Sequence: Synthetic oligonucleotide
  Target: LAMA2; (-) strand; PAM type: NRG; PAM sequence: CGG
tctagttcgctctacatgaa

SEQ ID NO: 114890 - DNA, 20 bp, Artificial Sequence
  Description of Artificial Sequence: Synthetic oligonucleotide
  Target: LAMA2; (-) strand; PAM type: NRG; PAM sequence: TAG
ttagtgctattgttaccctc

SEQ ID NO: 114891 - DNA, 20 bp, Artificial Sequence
  Description of Artificial Sequence: Synthetic oligonucleotide
  Target: LAMA2; (-) strand; PAM type: NRG; PAM sequence: TAG
agttacaataataaatattt

SEQ ID NO: 114892 - DNA, 20 bp, Artificial Sequence
  Description of Artificial Sequence: Synthetic oligonucleotide
  Target: LAMA2; (-) strand; PAM type: NRG; PAM sequence: GAG
ctagcaaaggaagttcacct

SEQ ID NO: 114893 - DNA, 20 bp, Artificial Sequence
  Description of Artificial Sequence: Synthetic oligonucleotide
  Target: LAMA2; (-) strand; PAM type: NRG; PAM sequence: AAG
gataccgatgctagcaaagg

SEQ ID NO: 114894 - DNA, 20 bp, Artificial Sequence
  Description of Artificial Sequence: Synthetic oligonucleotide
  Target: LAMA2; (-) strand; PAM type: NRG; PAM sequence: AGG
atagataccgatgctagcaa

SEQ ID NO: 114895 - DNA, 20 bp, Artificial Sequence
  Description of Artificial Sequence: Synthetic oligonucleotide
  Target: LAMA2; (-) strand; PAM type: NRG; PAM sequence: AAG
gatagataccgatgctagca

SEQ ID NO: 114896 - DNA, 20 bp, Artificial Sequence
  Description of Artificial Sequence: Synthetic oligonucleotide
  Target: LAMA2; (-) strand; PAM type: NRG; PAM sequence: TAG
atactgatagataccgatgc

SEQ ID NO: 114897 - DNA, 20 bp, Artificial Sequence
  Description of Artificial Sequence: Synthetic oligonucleotide
  Target: LAMA2; (-) strand; PAM type: NRG; PAM sequence: TAG
gaggttcaggcagatactga

SEQ ID NO: 114898 - DNA, 20 bp, Artificial Sequence
  Description of Artificial Sequence: Synthetic oligonucleotide
  Target: LAMA2; (-) strand; PAM type: NRG; PAM sequence: CAG
cacacacacagaggttcagg

SEQ ID NO: 114899 - DNA, 20 bp, Artificial Sequence
  Description of Artificial Sequence: Synthetic oligonucleotide
  Target: LAMA2; (-) strand; PAM type: NRG; PAM sequence: AGG
gtccacacacacagaggttc

SEQ ID NO: 114900 - DNA, 20 bp, Artificial Sequence
  Description of Artificial Sequence: Synthetic oligonucleotide
  Target: LAMA2; (-) strand; PAM type: NRG; PAM sequence: CAG
ggtccacacacacagaggtt

SEQ ID NO: 114901 - DNA, 20 bp, Artificial Sequence
  Description of Artificial Sequence: Synthetic oligonucleotide
  Target: LAMA2; (-) strand; PAM type: NRG; PAM sequence: AGG
tagtaggtccacacacacag

SEQ ID NO: 114902 - DNA, 20 bp, Artificial Sequence
  Description of Artificial Sequence: Synthetic oligonucleotide
  Target: LAMA2; (-) strand; PAM type: NRG; PAM sequence: GAG
atagtaggtccacacacaca

SEQ ID NO: 114903 - DNA, 20 bp, Artificial Sequence
  Description of Artificial Sequence: Synthetic oligonucleotide
  Target: LAMA2; (-) strand; PAM type: NRG; PAM sequence: CAG
gcatagtaggtccacacaca

SEQ ID NO: 114904 - DNA, 20 bp, Artificial Sequence
  Description of Artificial Sequence: Synthetic oligonucleotide
  Target: LAMA2; (-) strand; PAM type: NRG; PAM sequence: AGG
atccttttgcaatgcatagt

SEQ ID NO: 114905 - DNA, 20 bp, Artificial Sequence
  Description of Artificial Sequence: Synthetic oligonucleotide
  Target: LAMA2; (-) strand; PAM type: NRG; PAM sequence: TAG
tatccttttgcaatgcatag

SEQ ID NO: 114906 - DNA, 20 bp, Artificial Sequence
  Description of Artificial Sequence: Synthetic oligonucleotide
  Target: LAMA2; (-) strand; PAM type: NRG; PAM sequence: TAG
cggtatccttttgcaatgca

SEQ ID NO: 114907 - DNA, 20 bp, Artificial Sequence
  Description of Artificial Sequence: Synthetic oligonucleotide
  Target: LAMA2; (-) strand; PAM type: NRG; PAM sequence: CGG
aagaagagggaattaagcta

SEQ ID NO: 114908 - DNA, 20 bp, Artificial Sequence
  Description of Artificial Sequence: Synthetic oligonucleotide
  Target: LAMA2; (-) strand; PAM type: NRG; PAM sequence: AAG
aaagtaaagaagagggaatt

SEQ ID NO: 114909 - DNA, 20 bp, Artificial Sequence
  Description of Artificial Sequence: Synthetic oligonucleotide
  Target: LAMA2; (-) strand; PAM type: NRG; PAM sequence: GGG
agtatgaaaagtaaagaaga

SEQ ID NO: 114910 - DNA, 20 bp, Artificial Sequence
  Description of Artificial Sequence: Synthetic oligonucleotide
  Target: LAMA2; (-) strand; PAM type: NRG; PAM sequence: AGG
aagtatgaaaagtaaagaag

SEQ ID NO: 114911 - DNA, 20 bp, Artificial Sequence
  Description of Artificial Sequence: Synthetic oligonucleotide
  Target: LAMA2; (-) strand; PAM type: NRG; PAM sequence: GAG
gaagtatgaaaagtaaagaa

SEQ ID NO: 114912 - DNA, 20 bp, Artificial Sequence
  Description of Artificial Sequence: Synthetic oligonucleotide
  Target: LAMA2; (-) strand; PAM type: NRG; PAM sequence: AAG
ccgaagtatgaaaagtaaag

SEQ ID NO: 114913 - DNA, 20 bp, Artificial Sequence
  Description of Artificial Sequence: Synthetic oligonucleotide
  Target: LAMA2; (-) strand; PAM type: NRG; PAM sequence: AAG
ttcccgaagtatgaaaagta

SEQ ID NO: 114914 - DNA, 20 bp, Artificial Sequence
  Description of Artificial Sequence: Synthetic oligonucleotide
  Target: LAMA2; (-) strand; PAM type: NRG; PAM sequence: AAG
tgaggttcccgaagtatgaa

SEQ ID NO: 114915 - DNA, 20 bp, Artificial Sequence
  Description of Artificial Sequence: Synthetic oligonucleotide
  Target: LAMA2; (-) strand; PAM type: NRG; PAM sequence: AAG
tgaggcaaatgaggttcccg

SEQ ID NO: 114916 - DNA, 20 bp, Artificial Sequence
  Description of Artificial Sequence: Synthetic oligonucleotide
  Target: LAMA2; (-) strand; PAM type: NRG; PAM sequence: AGG
cctaagggctgaggcaaatg

SEQ ID NO: 114917 - DNA, 20 bp, Artificial Sequence
  Description of Artificial Sequence: Synthetic oligonucleotide
  Target: LAMA2; (-) strand; PAM type: NRG; PAM sequence: GAG
tcctaagggctgaggcaaat

SEQ ID NO: 114918 - DNA, 20 bp, Artificial Sequence
  Description of Artificial Sequence: Synthetic oligonucleotide
  Target: LAMA2; (-) strand; PAM type: NRG; PAM sequence: AGG
ggtagaactcctaagggctg

SEQ ID NO: 114919 - DNA, 20 bp, Artificial Sequence
  Description of Artificial Sequence: Synthetic oligonucleotide
  Target: LAMA2; (-) strand; PAM type: NRG; PAM sequence: GAG
gggtagaactcctaagggct

SEQ ID NO: 114920 - DNA, 20 bp, Artificial Sequence
  Description of Artificial Sequence: Synthetic oligonucleotide
  Target: LAMA2; (-) strand; PAM type: NRG; PAM sequence: GGG
gttaagggtagaactcctaa

SEQ ID NO: 114921 - DNA, 20 bp, Artificial Sequence
  Description of Artificial Sequence: Synthetic oligonucleotide
  Target: LAMA2; (-) strand; PAM type: NRG; PAM sequence: AGG
tgttaagggtagaactccta

SEQ ID NO: 114922 - DNA, 20 bp, Artificial Sequence
  Description of Artificial Sequence: Synthetic oligonucleotide
  Target: LAMA2; (-) strand; PAM type: NRG; PAM sequence: AAG
atgttaagggtagaactcct

SEQ ID NO: 114923 - DNA, 20 bp, Artificial Sequence
  Description of Artificial Sequence: Synthetic oligonucleotide
  Target: LAMA2; (-) strand; PAM type: NRG; PAM sequence: TAG
acgaataaaaatgttaaggg

SEQ ID NO: 114924 - DNA, 20 bp, Artificial Sequence
  Description of Artificial Sequence: Synthetic oligonucleotide
  Target: LAMA2; (-) strand; PAM type: NRG; PAM sequence: GGG
tgcacgaataaaaatgttaa

SEQ ID NO: 114925 - DNA, 20 bp, Artificial Sequence
  Description of Artificial Sequence: Synthetic oligonucleotide
  Target: LAMA2; (-) strand; PAM type: NRG; PAM sequence: AGG
ctgcacgaataaaaatgtta

SEQ ID NO: 114926 - DNA, 20 bp, Artificial Sequence
  Description of Artificial Sequence: Synthetic oligonucleotide
  Target: LAMA2; (-) strand; PAM type: NRG; PAM sequence: AAG
actgcacgaataaaaatgtt

SEQ ID NO: 114927 - DNA, 20 bp, Artificial Sequence
  Description of Artificial Sequence: Synthetic oligonucleotide
  Target: LAMA2; (-) strand; PAM type: NRG; PAM sequence: GAG
atttggtttttccaaaggtg

SEQ ID NO: 114928 - DNA, 20 bp, Artificial Sequence
  Description of Artificial Sequence: Synthetic oligonucleotide
  Target: LAMA2; (-) strand; PAM type: NRG; PAM sequence: TGG
gcatttggtttttccaaagg

SEQ ID NO: 114929 - DNA, 20 bp, Artificial Sequence
  Description of Artificial Sequence: Synthetic oligonucleotide
  Target: LAMA2; (-) strand; PAM type: NRG; PAM sequence: AGG
aatgcatttggtttttccaa

SEQ ID NO: 114930 - DNA, 20 bp, Artificial Sequence
  Description of Artificial Sequence: Synthetic oligonucleotide
  Target: LAMA2; (-) strand; PAM type: NRG; PAM sequence: AAG
aaatgcatttggtttttcca

SEQ ID NO: 114931 - DNA, 20 bp, Artificial Sequence
  Description of Artificial Sequence: Synthetic oligonucleotide
  Target: LAMA2; (-) strand; PAM type: NRG; PAM sequence: TGG
atagcttcagaaaatgcatt

SEQ ID NO: 114932 - DNA, 20 bp, Artificial Sequence
  Description of Artificial Sequence: Synthetic oligonucleotide
  Target: LAMA2; (-) strand; PAM type: NRG; PAM sequence: CAG
atttttcttatttatagctt

SEQ ID NO: 114933 - DNA, 20 bp, Artificial Sequence
  Description of Artificial Sequence: Synthetic oligonucleotide
  Target: LAMA2; (-) strand; PAM type: NRG; PAM sequence: TAG
ggagggatttttcttattta

SEQ ID NO: 114934 - DNA, 20 bp, Artificial Sequence
  Description of Artificial Sequence: Synthetic oligonucleotide
  Target: LAMA2; (-) strand; PAM type: NRG; PAM sequence: GGG
atttaagaggggcagaggga

SEQ ID NO: 114935 - DNA, 20 bp, Artificial Sequence
  Description of Artificial Sequence: Synthetic oligonucleotide
  Target: LAMA2; (-) strand; PAM type: NRG; PAM sequence: AGG
tatttaagaggggcagaggg

SEQ ID NO: 114936 - DNA, 20 bp, Artificial Sequence
  Description of Artificial Sequence: Synthetic oligonucleotide
  Target: LAMA2; (-) strand; PAM type: NRG; PAM sequence: GAG
atatttaagaggggcagagg

SEQ ID NO: 114937 - DNA, 20 bp, Artificial Sequence
  Description of Artificial Sequence: Synthetic oligonucleotide
  Target: LAMA2; (-) strand; PAM type: NRG; PAM sequence: GGG
taatatttaagaggggcaga

SEQ ID NO: 114938 - DNA, 20 bp, Artificial Sequence
  Description of Artificial Sequence: Synthetic oligonucleotide
  Target: LAMA2; (-) strand; PAM type: NRG; PAM sequence: AGG
gtaatatttaagaggggcag

SEQ ID NO: 114939 - DNA, 20 bp, Artificial Sequence
  Description of Artificial Sequence: Synthetic oligonucleotide
  Target: LAMA2; (-) strand; PAM type: NRG; PAM sequence: GAG
ggtaatatttaagaggggca

SEQ ID NO: 114940 - DNA, 20 bp, Artificial Sequence
  Description of Artificial Sequence: Synthetic oligonucleotide
  Target: LAMA2; (-) strand; PAM type: NRG; PAM sequence: CAG
gaggtaatatttaagagggg

SEQ ID NO: 114941 - DNA, 20 bp, Artificial Sequence
  Description of Artificial Sequence: Synthetic oligonucleotide
  Target: LAMA2; (-) strand; PAM type: NRG; PAM sequence: GGG
gaggaggtaatatttaagag

SEQ ID NO: 114942 - DNA, 20 bp, Artificial Sequence
  Description of Artificial Sequence: Synthetic oligonucleotide
  Target: LAMA2; (-) strand; PAM type: NRG; PAM sequence: GGG
tgaggaggtaatatttaaga

SEQ ID NO: 114943 - DNA, 20 bp, Artificial Sequence
  Description of Artificial Sequence: Synthetic oligonucleotide
  Target: LAMA2; (-) strand; PAM type: NRG; PAM sequence: AGG
ttgaggaggtaatatttaag

SEQ ID NO: 114944 - DNA, 20 bp, Artificial Sequence
  Description of Artificial Sequence: Synthetic oligonucleotide
  Target: LAMA2; (-) strand; PAM type: NRG; PAM sequence: GAG
tttgaggaggtaatatttaa

SEQ ID NO: 114945 - DNA, 20 bp, Artificial Sequence
  Description of Artificial Sequence: Synthetic oligonucleotide
  Target: LAMA2; (-) strand; PAM type: NRG; PAM sequence: AAG
tatttgaggaggtaatattt

SEQ ID NO: 114946 - DNA, 20 bp, Artificial Sequence
  Description of Artificial Sequence: Synthetic oligonucleotide
  Target: LAMA2; (-) strand; PAM type: NRG; PAM sequence: AGG
tgtgcataccttatttgagg

SEQ ID NO: 114947 - DNA, 20 bp, Artificial Sequence
  Description of Artificial Sequence: Synthetic oligonucleotide
  Target: LAMA2; (-) strand; PAM type: NRG; PAM sequence: GAG
gtgtgcataccttatttgag

SEQ ID NO: 114948 - DNA, 20 bp, Artificial Sequence
  Description of Artificial Sequence: Synthetic oligonucleotide
  Target: LAMA2; (-) strand; PAM type: NRG; PAM sequence: AGG
ctgtgtgcataccttatttg

SEQ ID NO: 114949 - DNA, 20 bp, Artificial Sequence
  Description of Artificial Sequence: Synthetic oligonucleotide
  Target: LAMA2; (-) strand; PAM type: NRG; PAM sequence: GAG
gctgtgtgcataccttattt

SEQ ID NO: 114950 - DNA, 20 bp, Artificial Sequence
  Description of Artificial Sequence: Synthetic oligonucleotide
  Target: LAMA2; (-) strand; PAM type: NRG; PAM sequence: GAG
ctccagtggagctgatttgt

SEQ ID NO: 114951 - DNA, 20 bp, Artificial Sequence
  Description of Artificial Sequence: Synthetic oligonucleotide
  Target: LAMA2; (-) strand; PAM type: NRG; PAM sequence: GAG
aaagcctgctggctccagtg

SEQ ID NO: 114952 - DNA, 20 bp, Artificial Sequence
  Description of Artificial Sequence: Synthetic oligonucleotide
  Target: LAMA2; (-) strand; PAM type: NRG; PAM sequence: TGG
ccaaagcctgctggctccag

SEQ ID NO: 114953 - DNA, 20 bp, Artificial Sequence
  Description of Artificial Sequence: Synthetic oligonucleotide
  Target: LAMA2; (-) strand; PAM type: NRG; PAM sequence: CAG
ccgccaaagcctgctggctc

SEQ ID NO: 114954 - DNA, 20 bp, Artificial Sequence
  Description of Artificial Sequence: Synthetic oligonucleotide
  Target: LAMA2; (-) strand; PAM type: NRG; PAM sequence: TGG
tagaaaccgccaaagcctgc

SEQ ID NO: 114955 - DNA, 20 bp, Artificial Sequence
  Description of Artificial Sequence: Synthetic oligonucleotide
  Target: LAMA2; (-) strand; PAM type: NRG; PAM sequence: AAG
gaatgagatagaaaccgcca

SEQ ID NO: 114956 - DNA, 20 bp, Artificial Sequence
  Description of Artificial Sequence: Synthetic oligonucleotide
  Target: LAMA2; (-) strand; PAM type: NRG; PAM sequence: TAG
gctttggaacctgaatgaga

SEQ ID NO: 114957 - DNA, 20 bp, Artificial Sequence
  Description of Artificial Sequence: Synthetic oligonucleotide
  Target: LAMA2; (-) strand; PAM type: NRG; PAM sequence: GAG
aactgctttggaacctgaat

SEQ ID NO: 114958 - DNA, 20 bp, Artificial Sequence
  Description of Artificial Sequence: Synthetic oligonucleotide
  Target: LAMA2; (-) strand; PAM type: NRG; PAM sequence: TGG
agcagctgccataactgctt

SEQ ID NO: 114959 - DNA, 20 bp, Artificial Sequence
  Description of Artificial Sequence: Synthetic oligonucleotide
  Target: LAMA2; (-) strand; PAM type: NRG; PAM sequence: CAG
ctgtatctgtgacagctaag

SEQ ID NO: 114960 - DNA, 20 bp, Artificial Sequence
  Description of Artificial Sequence: Synthetic oligonucleotide
  Target: LAMA2; (-) strand; PAM type: NRG; PAM sequence: AAG
actctgtatctgtgacagct

SEQ ID NO: 114961 - DNA, 20 bp, Artificial Sequence
  Description of Artificial Sequence: Synthetic oligonucleotide
  Target: LAMA2; (-) strand; PAM type: NRG; PAM sequence: CAG
gccacactctgtatctgtga

SEQ ID NO: 114962 - DNA, 20 bp, Artificial Sequence
  Description of Artificial Sequence: Synthetic oligonucleotide
  Target: LAMA2; (-) strand; PAM type: NRG; PAM sequence: CAG
aataggctcaataggtcctg

SEQ ID NO: 114963 - DNA, 20 bp, Artificial Sequence
  Description of Artificial Sequence: Synthetic oligonucleotide
  Target: LAMA2; (-) strand; PAM type: NRG; PAM sequence: AGG
atgcacttaataggctcaat

SEQ ID NO: 114964 - DNA, 20 bp, Artificial Sequence
  Description of Artificial Sequence: Synthetic oligonucleotide
  Target: LAMA2; (-) strand; PAM type: NRG; PAM sequence: TAG
tatgcacttaataggctcaa

SEQ ID NO: 114965 - DNA, 20 bp, Artificial Sequence
  Description of Artificial Sequence: Synthetic oligonucleotide
  Target: LAMA2; (-) strand; PAM type: NRG; PAM sequence: AGG
ggacaagatatgcacttaat

SEQ ID NO: 114966 - DNA, 20 bp, Artificial Sequence
  Description of Artificial Sequence: Synthetic oligonucleotide
  Target: LAMA2; (-) strand; PAM type: NRG; PAM sequence: TAG
gggacaagatatgcacttaa

SEQ ID NO: 114967 - DNA, 20 bp, Artificial Sequence
  Description of Artificial Sequence: Synthetic oligonucleotide
  Target: LAMA2; (-) strand; PAM type: NRG; PAM sequence: AAG
ttgggaagggggacagggac

SEQ ID NO: 114968 - DNA, 20 bp, Artificial Sequence
  Description of Artificial Sequence: Synthetic oligonucleotide
  Target: LAMA2; (-) strand; PAM type: NRG; PAM sequence: GGG
aaaccttgggaagggggaca

SEQ ID NO: 114969 - DNA, 20 bp, Artificial Sequence
  Description of Artificial Sequence: Synthetic oligonucleotide
  Target: LAMA2; (-) strand; PAM type: NRG; PAM sequence: AGG
caaaccttgggaagggggac

SEQ ID NO: 114970 - DNA, 20 bp, Artificial Sequence
  Description of Artificial Sequence: Synthetic oligonucleotide
  Target: LAMA2; (-) strand; PAM type: NRG; PAM sequence: CAG
gcaaaccttgggaaggggga

SEQ ID NO: 114971 - DNA, 20 bp, Artificial Sequence
  Description of Artificial Sequence: Synthetic oligonucleotide
  Target: LAMA2; (-) strand; PAM type: NRG; PAM sequence: GGG
ccctgcaaaccttgggaagg

SEQ ID NO: 114972 - DNA, 20 bp, Artificial Sequence
  Description of Artificial Sequence: Synthetic oligonucleotide
  Target: LAMA2; (-) strand; PAM type: NRG; PAM sequence: GGG
accctgcaaaccttgggaag

SEQ ID NO: 114973 - DNA, 20 bp, Artificial Sequence
  Description of Artificial Sequence: Synthetic oligonucleotide
  Target: LAMA2; (-) strand; PAM type: NRG; PAM sequence: GGG
gaccctgcaaaccttgggaa

SEQ ID NO: 114974 - DNA, 20 bp, Artificial Sequence
  Description of Artificial Sequence: Synthetic oligonucleotide
  Target: LAMA2; (-) strand; PAM type: NRG; PAM sequence: AGG
ggaccctgcaaaccttggga

SEQ ID NO: 114975 - DNA, 20 bp, Artificial Sequence
  Description of Artificial Sequence: Synthetic oligonucleotide
  Target: LAMA2; (-) strand; PAM type: NRG; PAM sequence: AAG
gggaccctgcaaaccttggg

SEQ ID NO: 114976 - DNA, 20 bp, Artificial Sequence
  Description of Artificial Sequence: Synthetic oligonucleotide
  Target: LAMA2; (-) strand; PAM type: NRG; PAM sequence: GGG
gcagggaccctgcaaacctt

SEQ ID NO: 114977 - DNA, 20 bp, Artificial Sequence
  Description of Artificial Sequence: Synthetic oligonucleotide
  Target: LAMA2; (-) strand; PAM type: NRG; PAM sequence: TGG
tgcagggaccctgcaaacct

SEQ ID NO: 114978 - DNA, 20 bp, Artificial Sequence
  Description of Artificial Sequence: Synthetic oligonucleotide
  Target: LAMA2; (-) strand; PAM type: NRG; PAM sequence: GGG
cctcagaaagccactctgca

SEQ ID NO: 114979 - DNA, 20 bp, Artificial Sequence
  Description of Artificial Sequence: Synthetic oligonucleotide
  Target: LAMA2; (-) strand; PAM type: NRG; PAM sequence: AGG
ccctcagaaagccactctgc

SEQ ID NO: 114980 - DNA, 20 bp, Artificial Sequence
  Description of Artificial Sequence: Synthetic oligonucleotide
  Target: LAMA2; (-) strand; PAM type: NRG; PAM sequence: CAG
tccctcagaaagccactctg

SEQ ID NO: 114981 - DNA, 20 bp, Artificial Sequence
  Description of Artificial Sequence: Synthetic oligonucleotide
  Target: LAMA2; (-) strand; PAM type: NRG; PAM sequence: AAG
cttgattctgttccctcaga

SEQ ID NO: 114982 - DNA, 20 bp, Artificial Sequence
  Description of Artificial Sequence: Synthetic oligonucleotide
  Target: LAMA2; (-) strand; PAM type: NRG; PAM sequence: CAG
ctcccttgattctgttccct

SEQ ID NO: 114983 - DNA, 20 bp, Artificial Sequence
  Description of Artificial Sequence: Synthetic oligonucleotide
  Target: LAMA2; (-) strand; PAM type: NRG; PAM sequence: CAG
ggtggccaggctcagggcag

SEQ ID NO: 114984 - DNA, 20 bp, Artificial Sequence
  Description of Artificial Sequence: Synthetic oligonucleotide
  Target: LAMA2; (-) strand; PAM type: NRG; PAM sequence: CAG
aaaggtggccaggctcaggg

SEQ ID NO: 114985 - DNA, 20 bp, Artificial Sequence
  Description of Artificial Sequence: Synthetic oligonucleotide
  Target: LAMA2; (-) strand; PAM type: NRG; PAM sequence: GGG
taaaaaggtggccaggctca

SEQ ID NO: 114986 - DNA, 20 bp, Artificial Sequence
  Description of Artificial Sequence: Synthetic oligonucleotide
  Target: LAMA2; (-) strand; PAM type: NRG; PAM sequence: AGG
gtaaaaaggtggccaggctc

SEQ ID NO: 114987 - DNA, 20 bp, Artificial Sequence
  Description of Artificial Sequence: Synthetic oligonucleotide
  Target: LAMA2; (-) strand; PAM type: NRG; PAM sequence: CAG
tgtaaaaaggtggccaggct

SEQ ID NO: 114988 - DNA, 20 bp, Artificial Sequence
  Description of Artificial Sequence: Synthetic oligonucleotide
  Target: LAMA2; (-) strand; PAM type: NRG; PAM sequence: AGG
agatttgtaaaaaggtggcc

SEQ ID NO: 114989 - DNA, 20 bp, Artificial Sequence
  Description of Artificial Sequence: Synthetic oligonucleotide
  Target: LAMA2; (-) strand; PAM type: NRG; PAM sequence: CAG
tagatttgtaaaaaggtggc

SEQ ID NO: 114990 - DNA, 20 bp, Artificial Sequence
  Description of Artificial Sequence: Synthetic oligonucleotide
  Target: LAMA2; (-) strand; PAM type: NRG; PAM sequence: TGG
ctggtagatttgtaaaaagg

SEQ ID NO: 114991 - DNA, 20 bp, Artificial Sequence
  Description of Artificial Sequence: Synthetic oligonucleotide
  Target: LAMA2; (-) strand; PAM type: NRG; PAM sequence: AGG
actctggtagatttgtaaaa

SEQ ID NO: 114992 - DNA, 20 bp, Artificial Sequence
  Description of Artificial Sequence: Synthetic oligonucleotide
  Target: LAMA2; (-) strand; PAM type: NRG; PAM sequence: AAG
cactctggtagatttgtaaa

SEQ ID NO: 114993 - DNA, 20 bp, Artificial Sequence
  Description of Artificial Sequence: Synthetic oligonucleotide
  Target: LAMA2; (-) strand; PAM type: NRG; PAM sequence: TAG
ggctggggcaagcactctgg

SEQ ID NO: 114994 - DNA, 20 bp, Artificial Sequence
  Description of Artificial Sequence: Synthetic oligonucleotide
  Target: LAMA2; (-) strand; PAM type: NRG; PAM sequence: TGG
cagggctggggcaagcactc

SEQ ID NO: 114995 - DNA, 20 bp, Artificial Sequence
  Description of Artificial Sequence: Synthetic oligonucleotide
  Target: LAMA2; (-) strand; PAM type: NRG; PAM sequence: AAG
ccctggcccagggctggggc

SEQ ID NO: 114996 - DNA, 20 bp, Artificial Sequence
  Description of Artificial Sequence: Synthetic oligonucleotide
  Target: LAMA2; (-) strand; PAM type: NRG; PAM sequence: GGG
aattccctggcccagggctg

SEQ ID NO: 114997 - DNA, 20 bp, Artificial Sequence
  Description of Artificial Sequence: Synthetic oligonucleotide
  Target: LAMA2; (-) strand; PAM type: NRG; PAM sequence: GGG
caattccctggcccagggct

SEQ ID NO: 114998 - DNA, 20 bp, Artificial Sequence
  Description of Artificial Sequence: Synthetic oligonucleotide
  Target: LAMA2; (-) strand; PAM type: NRG; PAM sequence: TGG
ccaattccctggcccagggc

SEQ ID NO: 114999 - DNA, 20 bp, Artificial Sequence
  Description of Artificial Sequence: Synthetic oligonucleotide
  Target: LAMA2; (-) strand; PAM type: NRG; PAM sequence: GGG
aaagccaattccctggccca

SEQ ID NO: 115000 - DNA, 20 bp, Artificial Sequence
  Description of Artificial Sequence: Synthetic oligonucleotide
  Target: LAMA2; (-) strand; PAM type: NRG; PAM sequence: AGG
taaagccaattccctggccc

SEQ ID NO: 115001 - DNA, 20 bp, Artificial Sequence
  Description of Artificial Sequence: Synthetic oligonucleotide
  Target: LAMA2; (-) strand; PAM type: NRG; PAM sequence: CAG
gtaaagccaattccctggcc

SEQ ID NO: 115002 - DNA, 20 bp, Artificial Sequence
  Description of Artificial Sequence: Synthetic oligonucleotide
  Target: LAMA2; (-) strand; PAM type: NRG; PAM sequence: TGG
catgagtaaagccaattccc

SEQ ID NO: 115003 - DNA, 20 bp, Artificial Sequence
  Description of Artificial Sequence: Synthetic oligonucleotide
  Target: LAMA2; (-) strand; PAM type: NRG; PAM sequence: AAG
catcagtttgtgcatgagta

SEQ ID NO: 115004 - DNA, 20 bp, Artificial Sequence
  Description of Artificial Sequence: Synthetic oligonucleotide
  Target: LAMA2; (-) strand; PAM type: NRG; PAM sequence: GAG
aaagtcatcagtttgtgcat

SEQ ID NO: 115005 - DNA, 20 bp, Artificial Sequence
  Description of Artificial Sequence: Synthetic oligonucleotide
  Target: LAMA2; (-) strand; PAM type: NRG; PAM sequence: CAG
agcattctaaagaaagtcat

SEQ ID NO: 115006 - DNA, 20 bp, Artificial Sequence
  Description of Artificial Sequence: Synthetic oligonucleotide
  Target: LAMA2; (-) strand; PAM type: NRG; PAM sequence: AAG
gtattgcagcattctaaaga

SEQ ID NO: 115007 - DNA, 20 bp, Artificial Sequence
  Description of Artificial Sequence: Synthetic oligonucleotide
  Target: LAMA2; (-) strand; PAM type: NRG; PAM sequence: AAG
taaagtattgcagcattcta

SEQ ID NO: 115008 - DNA, 20 bp, Artificial Sequence
  Description of Artificial Sequence: Synthetic oligonucleotide
  Target: LAMA2; (-) strand; PAM type: NRG; PAM sequence: CAG
aaagtaagtataaagtattg

SEQ ID NO: 115009 - DNA, 20 bp, Artificial Sequence
  Description of Artificial Sequence: Synthetic oligonucleotide
  Target: LAMA2; (-) strand; PAM type: NRG; PAM sequence: AAG
ttcctaataaagtaagtata

SEQ ID NO: 115010 - DNA, 20 bp, Artificial Sequence
  Description of Artificial Sequence: Synthetic oligonucleotide
  Target: LAMA2; (-) strand; PAM type: NRG; PAM sequence: AAG
gatgactttcctaataaagt

SEQ ID NO: 115011 - DNA, 20 bp, Artificial Sequence
  Description of Artificial Sequence: Synthetic oligonucleotide
  Target: LAMA2; (-) strand; PAM type: NRG; PAM sequence: AAG
tacagatgactttcctaata

SEQ ID NO: 115012 - DNA, 20 bp, Artificial Sequence
  Description of Artificial Sequence: Synthetic oligonucleotide
  Target: LAMA2; (-) strand; PAM type: NRG; PAM sequence: CAG
caatattttgatgaaaaata

SEQ ID NO: 115013 - DNA, 20 bp, Artificial Sequence
  Description of Artificial Sequence: Synthetic oligonucleotide
  Target: LAMA2; (-) strand; PAM type: NRG; PAM sequence: GAG
tctaaactaattatctctct

SEQ ID NO: 115014 - DNA, 20 bp, Artificial Sequence
  Description of Artificial Sequence: Synthetic oligonucleotide
  Target: LAMA2; (-) strand; PAM type: NRG; PAM sequence: GGG
tctgaacccctgaagtctct

SEQ ID NO: 115015 - DNA, 20 bp, Artificial Sequence
  Description of Artificial Sequence: Synthetic oligonucleotide
  Target: LAMA2; (-) strand; PAM type: NRG; PAM sequence: TGG
gtctgaacccctgaagtctc

SEQ ID NO: 115016 - DNA, 20 bp, Artificial Sequence
  Description of Artificial Sequence: Synthetic oligonucleotide
  Target: LAMA2; (-) strand; PAM type: NRG; PAM sequence: AAG
cttggaggtctgaacccctg

SEQ ID NO: 115017 - DNA, 20 bp, Artificial Sequence
  Description of Artificial Sequence: Synthetic oligonucleotide
  Target: LAMA2; (-) strand; PAM type: NRG; PAM sequence: AGG
taaatggattgctggcttgg

SEQ ID NO: 115018 - DNA, 20 bp, Artificial Sequence
  Description of Artificial Sequence: Synthetic oligonucleotide
  Target: LAMA2; (-) strand; PAM type: NRG; PAM sequence: GAG
ataaatggattgctggcttg

SEQ ID NO: 115019 - DNA, 20 bp, Artificial Sequence
  Description of Artificial Sequence: Synthetic oligonucleotide
  Target: LAMA2; (-) strand; PAM type: NRG; PAM sequence: TGG
tgataaatggattgctggct

SEQ ID NO: 115020 - DNA, 20 bp, Artificial Sequence
  Description of Artificial Sequence: Synthetic oligonucleotide
  Target: LAMA2; (-) strand; PAM type: NRG; PAM sequence: TGG
cagtctgataaatggattgc

SEQ ID NO: 115021 - DNA, 20 bp, Artificial Sequence
  Description of Artificial Sequence: Synthetic oligonucleotide
  Target: LAMA2; (-) strand; PAM type: NRG; PAM sequence: TGG
tatgtcttcagtctgataaa

SEQ ID NO: 115022 - DNA, 20 bp, Artificial Sequence
  Description of Artificial Sequence: Synthetic oligonucleotide
  Target: LAMA2; (-) strand; PAM type: NRG; PAM sequence: CAG
ccagttcttttctatgtctt

SEQ ID NO: 115023 - DNA, 20 bp, Artificial Sequence
  Description of Artificial Sequence: Synthetic oligonucleotide
  Target: LAMA2; (-) strand; PAM type: NRG; PAM sequence: CAG
gcctcatcaaattggatttc

SEQ ID NO: 115024 - DNA, 20 bp, Artificial Sequence
  Description of Artificial Sequence: Synthetic oligonucleotide
  Target: LAMA2; (-) strand; PAM type: NRG; PAM sequence: TGG
gttttgaggcctcatcaaat

SEQ ID NO: 115025 - DNA, 20 bp, Artificial Sequence
  Description of Artificial Sequence: Synthetic oligonucleotide
  Target: LAMA2; (-) strand; PAM type: NRG; PAM sequence: AGG
aaagtatcctctgtgttttg

SEQ ID NO: 115026 - DNA, 20 bp, Artificial Sequence
  Description of Artificial Sequence: Synthetic oligonucleotide
  Target: LAMA2; (-) strand; PAM type: NRG; PAM sequence: GAG
aaaagtatcctctgtgtttt

SEQ ID NO: 115027 - DNA, 20 bp, Artificial Sequence
  Description of Artificial Sequence: Synthetic oligonucleotide
  Target: LAMA2; (-) strand; PAM type: NRG; PAM sequence: AAG
ttcatactcgttgcatttaa

SEQ ID NO: 115028 - DNA, 20 bp, Artificial Sequence
  Description of Artificial Sequence: Synthetic oligonucleotide
  Target: LAMA2; (-) strand; PAM type: NRG; PAM sequence: TGG
actgcaggatagtattggct

SEQ ID NO: 115029 - DNA, 20 bp, Artificial Sequence
  Description of Artificial Sequence: Synthetic oligonucleotide
  Target: LAMA2; (-) strand; PAM type: NRG; PAM sequence: TGG
ctttcactgcaggatagtat

SEQ ID NO: 115030 - DNA, 20 bp, Artificial Sequence
  Description of Artificial Sequence: Synthetic oligonucleotide
  Target: LAMA2; (-) strand; PAM type: NRG; PAM sequence: TAG
gtaggtctttcactgcagga

SEQ ID NO: 115031 - DNA, 20 bp, Artificial Sequence
  Description of Artificial Sequence: Synthetic oligonucleotide
  Target: LAMA2; (-) strand; PAM type: NRG; PAM sequence: AGG
aaatgtaggtctttcactgc

SEQ ID NO: 115032 - DNA, 20 bp, Artificial Sequence
  Description of Artificial Sequence: Synthetic oligonucleotide
  Target: LAMA2; (-) strand; PAM type: NRG; PAM sequence: CAG
taaatgtaggtctttcactg

SEQ ID NO: 115033 - DNA, 20 bp, Artificial Sequence
  Description of Artificial Sequence: Synthetic oligonucleotide
  Target: LAMA2; (-) strand; PAM type: NRG; PAM sequence: AGG
agaggataattagtaaatgt

SEQ ID NO: 115034 - DNA, 20 bp, Artificial Sequence
  Description of Artificial Sequence: Synthetic oligonucleotide
  Target: LAMA2; (-) strand; PAM type: NRG; PAM sequence: TAG
aagaggataattagtaaatg

SEQ ID NO: 115035 - DNA, 20 bp, Artificial Sequence
  Description of Artificial Sequence: Synthetic oligonucleotide
  Target: LAMA2; (-) strand; PAM type: NRG; PAM sequence: TAG
gttttccccaagaggataat

SEQ ID NO: 115036 - DNA, 20 bp, Artificial Sequence
  Description of Artificial Sequence: Synthetic oligonucleotide
  Target: LAMA2; (-) strand; PAM type: NRG; PAM sequence: AGG
atctaaatgttttccccaag

SEQ ID NO: 115037 - DNA, 20 bp, Artificial Sequence
  Description of Artificial Sequence: Synthetic oligonucleotide
  Target: LAMA2; (-) strand; PAM type: NRG; PAM sequence: GAG
tatctaaatgttttccccaa

SEQ ID NO: 115038 - DNA, 20 bp, Artificial Sequence
  Description of Artificial Sequence: Synthetic oligonucleotide
  Target: LAMA2; (-) strand; PAM type: NRG; PAM sequence: AAG
cttatctaaatgttttcccc

SEQ ID NO: 115039 - DNA, 20 bp, Artificial Sequence
  Description of Artificial Sequence: Synthetic oligonucleotide
  Target: LAMA2; (-) strand; PAM type: NRG; PAM sequence: AAG
ttgttgtttacttagaaggt

SEQ ID NO: 115040 - DNA, 20 bp, Artificial Sequence
  Description of Artificial Sequence: Synthetic oligonucleotide
  Target: LAMA2; (-) strand; PAM type: NRG; PAM sequence: AGG
agctttgttgtttacttaga

SEQ ID NO: 115041 - DNA, 20 bp, Artificial Sequence
  Description of Artificial Sequence: Synthetic oligonucleotide
  Target: LAMA2; (-) strand; PAM type: NRG; PAM sequence: AAG
aagctttgttgtttacttag

SEQ ID NO: 115042 - DNA, 20 bp, Artificial Sequence
  Description of Artificial Sequence: Synthetic oligonucleotide
  Target: LAMA2; (-) strand; PAM type: NRG; PAM sequence: TAG
ggaaagctttgttgtttact

SEQ ID NO: 115043 - DNA, 20 bp, Artificial Sequence
  Description of Artificial Sequence: Synthetic oligonucleotide
  Target: LAMA2; (-) strand; PAM type: NRG; PAM sequence: AAG
ataataataaaaactgagga

SEQ ID NO: 115044 - DNA, 20 bp, Artificial Sequence
  Description of Artificial Sequence: Synthetic oligonucleotide
  Target: LAMA2; (-) strand; PAM type: NRG; PAM sequence: AGG
aataataataataaaaactg

SEQ ID NO: 115045 - DNA, 20 bp, Artificial Sequence
  Description of Artificial Sequence: Synthetic oligonucleotide
  Target: LAMA2; (-) strand; PAM type: NRG; PAM sequence: GAG
taataataataataaaaact

SEQ ID NO: 115046 - DNA, 20 bp, Artificial Sequence
  Description of Artificial Sequence: Synthetic oligonucleotide
  Target: LAMA2; (-) strand; PAM type: NRG; PAM sequence: CAG
ctttgtatcaattcatccta

SEQ ID NO: 115047 - DNA, 20 bp, Artificial Sequence
  Description of Artificial Sequence: Synthetic oligonucleotide
  Target: LAMA2; (-) strand; PAM type: NRG; PAM sequence: TAG
atggtttctaaacgtctcag

SEQ ID NO: 115048 - DNA, 20 bp, Artificial Sequence
  Description of Artificial Sequence: Synthetic oligonucleotide
  Target: LAMA2; (-) strand; PAM type: NRG; PAM sequence: CAG
atcatggtttctaaacgtct

SEQ ID NO: 115049 - DNA, 20 bp, Artificial Sequence
  Description of Artificial Sequence: Synthetic oligonucleotide
  Target: LAMA2; (-) strand; PAM type: NRG; PAM sequence: TGG
tccctcatttgtctcgatca

SEQ ID NO: 115050 - DNA, 20 bp, Artificial Sequence
  Description of Artificial Sequence: Synthetic oligonucleotide
  Target: LAMA2; (-) strand; PAM type: NRG; PAM sequence: CAG
gttagattagtaaaagttct

SEQ ID NO: 115051 - DNA, 20 bp, Artificial Sequence
  Description of Artificial Sequence: Synthetic oligonucleotide
  Target: LAMA2; (-) strand; PAM type: NRG; PAM sequence: AAG
tctggctgttagattagtaa

SEQ ID NO: 115052 - DNA, 20 bp, Artificial Sequence
  Description of Artificial Sequence: Synthetic oligonucleotide
  Target: LAMA2; (-) strand; PAM type: NRG; PAM sequence: TAG
acaatatctggctgttagat

SEQ ID NO: 115053 - DNA, 20 bp, Artificial Sequence
  Description of Artificial Sequence: Synthetic oligonucleotide
  Target: LAMA2; (-) strand; PAM type: NRG; PAM sequence: TAG
tgactacaatatctggctgt

SEQ ID NO: 115054 - DNA, 20 bp, Artificial Sequence
  Description of Artificial Sequence: Synthetic oligonucleotide
  Target: LAMA2; (-) strand; PAM type: NRG; PAM sequence: TGG
gagaccatgactacaatatc

SEQ ID NO: 115055 - DNA, 20 bp, Artificial Sequence
  Description of Artificial Sequence: Synthetic oligonucleotide
  Target: LAMA2; (-) strand; PAM type: NRG; PAM sequence: GAG
tcagtttgcatttctcctca

SEQ ID NO: 115056 - DNA, 20 bp, Artificial Sequence
  Description of Artificial Sequence: Synthetic oligonucleotide
  Target: LAMA2; (-) strand; PAM type: NRG; PAM sequence: CAG
attcagtttgcatttctcct

SEQ ID NO: 115057 - DNA, 20 bp, Artificial Sequence
  Description of Artificial Sequence: Synthetic oligonucleotide
  Target: LAMA2; (-) strand; PAM type: NRG; PAM sequence: CAG
aagattcaaatgagagcatt

SEQ ID NO: 115058 - DNA, 20 bp, Artificial Sequence
  Description of Artificial Sequence: Synthetic oligonucleotide
  Target: LAMA2; (-) strand; PAM type: NRG; PAM sequence: GAG
gcattctaagattcaaatga

SEQ ID NO: 115059 - DNA, 20 bp, Artificial Sequence
  Description of Artificial Sequence: Synthetic oligonucleotide
  Target: LAMA2; (-) strand; PAM type: NRG; PAM sequence: GAG
aagcattctaagattcaaat

SEQ ID NO: 115060 - DNA, 20 bp, Artificial Sequence
  Description of Artificial Sequence: Synthetic oligonucleotide
  Target: LAMA2; (-) strand; PAM type: NRG; PAM sequence: AAG
ccaggattctaaagcattct

SEQ ID NO: 115061 - DNA, 20 bp, Artificial Sequence
  Description of Artificial Sequence: Synthetic oligonucleotide
  Target: LAMA2; (-) strand; PAM type: NRG; PAM sequence: AAG
catgtgaaaccaggattcta

SEQ ID NO: 115062 - DNA, 20 bp, Artificial Sequence
  Description of Artificial Sequence: Synthetic oligonucleotide
  Target: LAMA2; (-) strand; PAM type: NRG; PAM sequence: AGG
tctagaagacatgtgaaacc

SEQ ID NO: 115063 - DNA, 20 bp, Artificial Sequence
  Description of Artificial Sequence: Synthetic oligonucleotide
  Target: LAMA2; (-) strand; PAM type: NRG; PAM sequence: CAG
atctagaagacatgtgaaac

SEQ ID NO: 115064 - DNA, 20 bp, Artificial Sequence
  Description of Artificial Sequence: Synthetic oligonucleotide
  Target: LAMA2; (-) strand; PAM type: NRG; PAM sequence: AAG
gggcctaacatctaatctag

SEQ ID NO: 115065 - DNA, 20 bp, Artificial Sequence
  Description of Artificial Sequence: Synthetic oligonucleotide
  Target: LAMA2; (-) strand; PAM type: NRG; PAM sequence: TAG
aaagggcctaacatctaatc

SEQ ID NO: 115066 - DNA, 20 bp, Artificial Sequence
  Description of Artificial Sequence: Synthetic oligonucleotide
  Target: LAMA2; (-) strand; PAM type: NRG; PAM sequence: GGG
aaggattaaagtttgtcaaa

SEQ ID NO: 115067 - DNA, 20 bp, Artificial Sequence
  Description of Artificial Sequence: Synthetic oligonucleotide
  Target: LAMA2; (-) strand; PAM type: NRG; PAM sequence: AGG
aaaggattaaagtttgtcaa

SEQ ID NO: 115068 - DNA, 20 bp, Artificial Sequence
  Description of Artificial Sequence: Synthetic oligonucleotide
  Target: LAMA2; (-) strand; PAM type: NRG; PAM sequence: AAG
aaaaggattaaagtttgtca

SEQ ID NO: 115069 - DNA, 20 bp, Artificial Sequence
  Description of Artificial Sequence: Synthetic oligonucleotide
  Target: LAMA2; (-) strand; PAM type: NRG; PAM sequence: AAG
ttccgcaatgaaaaggatta

SEQ ID NO: 115070 - DNA, 20 bp, Artificial Sequence
  Description of Artificial Sequence: Synthetic oligonucleotide
  Target: LAMA2; (-) strand; PAM type: NRG; PAM sequence: AGG
aagtcctttccgcaatgaaa

SEQ ID NO: 115071 - DNA, 20 bp, Artificial Sequence
  Description of Artificial Sequence: Synthetic oligonucleotide
  Target: LAMA2; (-) strand; PAM type: NRG; PAM sequence: AAG
aaagtcctttccgcaatgaa

SEQ ID NO: 115072 - DNA, 20 bp, Artificial Sequence
  Description of Artificial Sequence: Synthetic oligonucleotide
  Target: LAMA2; (-) strand; PAM type: NRG; PAM sequence: AAG
taaagtttaaatcttttaaa

SEQ ID NO: 115073 - DNA, 20 bp, Artificial Sequence
  Description of Artificial Sequence: Synthetic oligonucleotide
  Target: LAMA2; (-) strand; PAM type: NRG; PAM sequence: AAG
tgagccaccacgcccggcta

SEQ ID NO: 115074 - DNA, 20 bp, Artificial Sequence
  Description of Artificial Sequence: Synthetic oligonucleotide
  Target: LAMA2; (-) strand; PAM type: NRG; PAM sequence: CGG
caggtgtgagccaccacgcc

SEQ ID NO: 115075 - DNA, 20 bp, Artificial Sequence
  Description of Artificial Sequence: Synthetic oligonucleotide
  Target: LAMA2; (-) strand; PAM type: NRG; PAM sequence: GAG
agtgctgggattacaggtgt

SEQ ID NO: 115076 - DNA, 20 bp, Artificial Sequence
  Description of Artificial Sequence: Synthetic oligonucleotide
  Target: LAMA2; (-) strand; PAM type: NRG; PAM sequence: AGG
tcccaaagtgctgggattac

SEQ ID NO: 115077 - DNA, 20 bp, Artificial Sequence
  Description of Artificial Sequence: Synthetic oligonucleotide
  Target: LAMA2; (-) strand; PAM type: NRG; PAM sequence: CAG
ctcccaaagtgctgggatta

SEQ ID NO: 115078 - DNA, 20 bp, Artificial Sequence
  Description of Artificial Sequence: Synthetic oligonucleotide
  Target: LAMA2; (-) strand; PAM type: NRG; PAM sequence: GGG
ccttggcctcccaaagtgct

SEQ ID NO: 115079 - DNA, 20 bp, Artificial Sequence
  Description of Artificial Sequence: Synthetic oligonucleotide
  Target: LAMA2; (-) strand; PAM type: NRG; PAM sequence: TGG
gccttggcctcccaaagtgc

SEQ ID NO: 115080 - DNA, 20 bp, Artificial Sequence
  Description of Artificial Sequence: Synthetic oligonucleotide
  Target: LAMA2; (-) strand; PAM type: NRG; PAM sequence: AAG
ccacctgccttggcctccca

SEQ ID NO: 115081 - DNA, 20 bp, Artificial Sequence
  Description of Artificial Sequence: Synthetic oligonucleotide
  Target: LAMA2; (-) strand; PAM type: NRG; PAM sequence: TGG
acctcatgatccacctgcct

SEQ ID NO: 115082 - DNA, 20 bp, Artificial Sequence
  Description of Artificial Sequence: Synthetic oligonucleotide
  Target: LAMA2; (-) strand; PAM type: NRG; PAM sequence: TGG
tttcaccatattggccaggc

SEQ ID NO: 115083 - DNA, 20 bp, Artificial Sequence
  Description of Artificial Sequence: Synthetic oligonucleotide
  Target: LAMA2; (-) strand; PAM type: NRG; PAM sequence: AGG
ggggtttcaccatattggcc

SEQ ID NO: 115084 - DNA, 20 bp, Artificial Sequence
  Description of Artificial Sequence: Synthetic oligonucleotide
  Target: LAMA2; (-) strand; PAM type: NRG; PAM sequence: CAG
cggggtttcaccatattggc

SEQ ID NO: 115085 - DNA, 20 bp, Artificial Sequence
  Description of Artificial Sequence: Synthetic oligonucleotide
  Target: LAMA2; (-) strand; PAM type: NRG; PAM sequence: TGG
gagacggggtttcaccatat

SEQ ID NO: 115086 - DNA, 20 bp, Artificial Sequence
  Description of Artificial Sequence: Synthetic oligonucleotide
  Target: LAMA2; (-) strand; PAM type: NRG; PAM sequence: GGG
ttgcatttttagtagagacg

SEQ ID NO: 115087 - DNA, 20 bp, Artificial Sequence
  Description of Artificial Sequence: Synthetic oligonucleotide
  Target: LAMA2; (-) strand; PAM type: NRG; PAM sequence: GGG
tttgcatttttagtagagac

SEQ ID NO: 115088 - DNA, 20 bp, Artificial Sequence
  Description of Artificial Sequence: Synthetic oligonucleotide
  Target: LAMA2; (-) strand; PAM type: NRG; PAM sequence: CGG
ttttgcatttttagtagaga

SEQ ID NO: 115089 - DNA, 20 bp, Artificial Sequence
  Description of Artificial Sequence: Synthetic oligonucleotide
  Target: LAMA2; (-) strand; PAM type: NRG; PAM sequence: GAG
atgtttttgcatttttagta

SEQ ID NO: 115090 - DNA, 20 bp, Artificial Sequence
  Description of Artificial Sequence: Synthetic oligonucleotide
  Target: LAMA2; (-) strand; PAM type: NRG; PAM sequence: TAG
taatgtttttgcatttttag

SEQ ID NO: 115091 - DNA, 20 bp, Artificial Sequence
  Description of Artificial Sequence: Synthetic oligonucleotide
  Target: LAMA2; (-) strand; PAM type: NRG; PAM sequence: TAG
ggctaatgtttttgcatttt

SEQ ID NO: 115092 - DNA, 20 bp, Artificial Sequence
  Description of Artificial Sequence: Synthetic oligonucleotide
  Target: LAMA2; (-) strand; PAM type: NRG; PAM sequence: TGG
caggcgcctaccaccatgtc

SEQ ID NO: 115093 - DNA, 20 bp, Artificial Sequence
  Description of Artificial Sequence: Synthetic oligonucleotide
  Target: LAMA2; (-) strand; PAM type: NRG; PAM sequence: AGG
tccagagtagctgtgattac

SEQ ID NO: 115094 - DNA, 20 bp, Artificial Sequence
  Description of Artificial Sequence: Synthetic oligonucleotide
  Target: LAMA2; (-) strand; PAM type: NRG; PAM sequence: CAG
ctccagagtagctgtgatta

SEQ ID NO: 115095 - DNA, 20 bp, Artificial Sequence
  Description of Artificial Sequence: Synthetic oligonucleotide
  Target: LAMA2; (-) strand; PAM type: NRG; PAM sequence: TAG
tcctgcctcagcctccagag

SEQ ID NO: 115096 - DNA, 20 bp, Artificial Sequence
  Description of Artificial Sequence: Synthetic oligonucleotide
  Target: LAMA2; (-) strand; PAM type: NRG; PAM sequence: GAG
ttctcctgcctcagcctcca

SEQ ID NO: 115097 - DNA, 20 bp, Artificial Sequence
  Description of Artificial Sequence: Synthetic oligonucleotide
  Target: LAMA2; (-) strand; PAM type: NRG; PAM sequence: CAG
atttctcctgcctcagcctc

SEQ ID NO: 115098 - DNA, 20 bp, Artificial Sequence
  Description of Artificial Sequence: Synthetic oligonucleotide
  Target: LAMA2; (-) strand; PAM type: NRG; PAM sequence: CAG
tttaagcatttctcctgcct

SEQ ID NO: 115099 - DNA, 20 bp, Artificial Sequence
  Description of Artificial Sequence: Synthetic oligonucleotide
  Target: LAMA2; (-) strand; PAM type: NRG; PAM sequence: AAG
aacctctgtccccctggttt

SEQ ID NO: 115100 - DNA, 20 bp, Artificial Sequence
  Description of Artificial Sequence: Synthetic oligonucleotide
  Target: LAMA2; (-) strand; PAM type: NRG; PAM sequence: TGG
cactgaaacctctgtccccc

SEQ ID NO: 115101 - DNA, 20 bp, Artificial Sequence
  Description of Artificial Sequence: Synthetic oligonucleotide
  Target: LAMA2; (-) strand; PAM type: NRG; PAM sequence: CGG
ggagtgcagtggtgcgatct

SEQ ID NO: 115102 - DNA, 20 bp, Artificial Sequence
  Description of Artificial Sequence: Synthetic oligonucleotide
  Target: LAMA2; (-) strand; PAM type: NRG; PAM sequence: TGG
ttgcccaggctggagtgcag

SEQ ID NO: 115103 - DNA, 20 bp, Artificial Sequence
  Description of Artificial Sequence: Synthetic oligonucleotide
  Target: LAMA2; (-) strand; PAM type: NRG; PAM sequence: CAG
ctgttgcccaggctggagtg

SEQ ID NO: 115104 - DNA, 20 bp, Artificial Sequence
  Description of Artificial Sequence: Synthetic oligonucleotide
  Target: LAMA2; (-) strand; PAM type: NRG; PAM sequence: GAG
ttgctctgttgcccaggctg

SEQ ID NO: 115105 - DNA, 20 bp, Artificial Sequence
  Description of Artificial Sequence: Synthetic oligonucleotide
  Target: LAMA2; (-) strand; PAM type: NRG; PAM sequence: TGG
tcttgctctgttgcccaggc

SEQ ID NO: 115106 - DNA, 20 bp, Artificial Sequence
  Description of Artificial Sequence: Synthetic oligonucleotide
  Target: LAMA2; (-) strand; PAM type: NRG; PAM sequence: AGG
ggagtcttgctctgttgccc

SEQ ID NO: 115107 - DNA, 20 bp, Artificial Sequence
  Description of Artificial Sequence: Synthetic oligonucleotide
  Target: LAMA2; (-) strand; PAM type: NRG; PAM sequence: CAG
tggagtcttgctctgttgcc

SEQ ID NO: 115108 - DNA, 20 bp, Artificial Sequence
  Description of Artificial Sequence: Synthetic oligonucleotide
  Target: LAMA2; (-) strand; PAM type: NRG; PAM sequence: GAG
gttttgttttttccgagttg

SEQ ID NO: 115109 - DNA, 20 bp, Artificial Sequence
  Description of Artificial Sequence: Synthetic oligonucleotide
  Target: LAMA2; (-) strand; PAM type: NRG; PAM sequence: TGG
ttgttttgttttttccgagt

SEQ ID NO: 115110 - DNA, 20 bp, Artificial Sequence
  Description of Artificial Sequence: Synthetic oligonucleotide
  Target: LAMA2; (-) strand; PAM type: NRG; PAM sequence: GAG
tgttttgttttgttttttcc

SEQ ID NO: 115111 - DNA, 20 bp, Artificial Sequence
  Description of Artificial Sequence: Synthetic oligonucleotide
  Target: LAMA2; (-) strand; PAM type: NRG; PAM sequence: AAG
ttacttattgaaattcctta

SEQ ID NO: 115112 - DNA, 20 bp, Artificial Sequence
  Description of Artificial Sequence: Synthetic oligonucleotide
  Target: LAMA2; (-) strand; PAM type: NRG; PAM sequence: CAG
aaactaatttctcaaatctg

SEQ ID NO: 115113 - DNA, 20 bp, Artificial Sequence
  Description of Artificial Sequence: Synthetic oligonucleotide
  Target: LAMA2; (-) strand; PAM type: NRG; PAM sequence: CGG
taacacattttgagtgattt

SEQ ID NO: 115114 - DNA, 20 bp, Artificial Sequence
  Description of Artificial Sequence: Synthetic oligonucleotide
  Target: LAMA2; (-) strand; PAM type: NRG; PAM sequence: GAG
tcaacaaaataacacatttt

SEQ ID NO: 115115 - DNA, 20 bp, Artificial Sequence
  Description of Artificial Sequence: Synthetic oligonucleotide
  Target: LAMA2; (-) strand; PAM type: NRG; PAM sequence: CAG
tgtaatgcatttgggaattc

SEQ ID NO: 115116 - DNA, 20 bp, Artificial Sequence
  Description of Artificial Sequence: Synthetic oligonucleotide
  Target: LAMA2; (-) strand; PAM type: NRG; PAM sequence: GGG
tacaatagtgtaatgcattt

SEQ ID NO: 115117 - DNA, 20 bp, Artificial Sequence
  Description of Artificial Sequence: Synthetic oligonucleotide
  Target: LAMA2; (-) strand; PAM type: NRG; PAM sequence: TGG
gtacaatagtgtaatgcatt

SEQ ID NO: 115118 - DNA, 20 bp, Artificial Sequence
  Description of Artificial Sequence: Synthetic oligonucleotide
  Target: LAMA2; (-) strand; PAM type: NRG; PAM sequence: TAG
atagtggcatagtggtacaa

SEQ ID NO: 115119 - DNA, 20 bp, Artificial Sequence
  Description of Artificial Sequence: Synthetic oligonucleotide
  Target: LAMA2; (-) strand; PAM type: NRG; PAM sequence: TGG
aaaaggacatagtggcatag

SEQ ID NO: 115120 - DNA, 20 bp, Artificial Sequence
  Description of Artificial Sequence: Synthetic oligonucleotide
  Target: LAMA2; (-) strand; PAM type: NRG; PAM sequence: TAG
gttaaaaggacatagtggca

SEQ ID NO: 115121 - DNA, 20 bp, Artificial Sequence
  Description of Artificial Sequence: Synthetic oligonucleotide
  Target: LAMA2; (-) strand; PAM type: NRG; PAM sequence: TGG
cacctgttaaaaggacatag

SEQ ID NO: 115122 - DNA, 20 bp, Artificial Sequence
  Description of Artificial Sequence: Synthetic oligonucleotide
  Target: LAMA2; (-) strand; PAM type: NRG; PAM sequence: TAG
aagcacctgttaaaaggaca

SEQ ID NO: 115123 - DNA, 20 bp, Artificial Sequence
  Description of Artificial Sequence: Synthetic oligonucleotide
  Target: LAMA2; (-) strand; PAM type: NRG; PAM sequence: AGG
ttgaagaagcacctgttaaa

SEQ ID NO: 115124 - DNA, 20 bp, Artificial Sequence
  Description of Artificial Sequence: Synthetic oligonucleotide
  Target: LAMA2; (-) strand; PAM type: NRG; PAM sequence: AAG
cttgaagaagcacctgttaa

SEQ ID NO: 115125 - DNA, 20 bp, Artificial Sequence
  Description of Artificial Sequence: Synthetic oligonucleotide
  Target: LAMA2; (-) strand; PAM type: NRG; PAM sequence: AAG
ataaaatgcccttcttgaag

SEQ ID NO: 115126 - DNA, 20 bp, Artificial Sequence
  Description of Artificial Sequence: Synthetic oligonucleotide
  Target: LAMA2; (-) strand; PAM type: NRG; PAM sequence: AAG
ataataaaatgcccttcttg

SEQ ID NO: 115127 - DNA, 20 bp, Artificial Sequence
  Description of Artificial Sequence: Synthetic oligonucleotide
  Target: LAMA2; (-) strand; PAM type: NRG; PAM sequence: TGG
atggtcaacagctgtgaagt

SEQ ID NO: 115128 - DNA, 20 bp, Artificial Sequence
  Description of Artificial Sequence: Synthetic oligonucleotide
  Target: LAMA2; (-) strand; PAM type: NRG; PAM sequence: AAG
attgatggtcaacagctgtg

SEQ ID NO: 115129 - DNA, 20 bp, Artificial Sequence
  Description of Artificial Sequence: Synthetic oligonucleotide
  Target: LAMA2; (-) strand; PAM type: NRG; PAM sequence: CAG
aaggttggattgatggtcaa

SEQ ID NO: 115130 - DNA, 20 bp, Artificial Sequence
  Description of Artificial Sequence: Synthetic oligonucleotide
  Target: LAMA2; (-) strand; PAM type: NRG; PAM sequence: TGG
tcaaataaaggttggattga

SEQ ID NO: 115131 - DNA, 20 bp, Artificial Sequence
  Description of Artificial Sequence: Synthetic oligonucleotide
  Target: LAMA2; (-) strand; PAM type: NRG; PAM sequence: TGG
gagcttaatcaaataaaggt

SEQ ID NO: 115132 - DNA, 20 bp, Artificial Sequence
  Description of Artificial Sequence: Synthetic oligonucleotide
  Target: LAMA2; (-) strand; PAM type: NRG; PAM sequence: AGG
tactgagcttaatcaaataa

SEQ ID NO: 115133 - DNA, 20 bp, Artificial Sequence
  Description of Artificial Sequence: Synthetic oligonucleotide
  Target: LAMA2; (-) strand; PAM type: NRG; PAM sequence: AAG
atactgagcttaatcaaata

SEQ ID NO: 115134 - DNA, 20 bp, Artificial Sequence
  Description of Artificial Sequence: Synthetic oligonucleotide
  Target: LAMA2; (-) strand; PAM type: NRG; PAM sequence: GAG
ccagtgatgtactatatact

SEQ ID NO: 115135 - DNA, 20 bp, Artificial Sequence
  Description of Artificial Sequence: Synthetic oligonucleotide
  Target: LAMA2; (-) strand; PAM type: NRG; PAM sequence: CAG
ttaactaaatgactggtttc

SEQ ID NO: 115136 - DNA, 20 bp, Artificial Sequence
  Description of Artificial Sequence: Synthetic oligonucleotide
  Target: LAMA2; (-) strand; PAM type: NRG; PAM sequence: TGG
tggccaattaactaaatgac

SEQ ID NO: 115137 - DNA, 20 bp, Artificial Sequence
  Description of Artificial Sequence: Synthetic oligonucleotide
  Target: LAMA2; (-) strand; PAM type: NRG; PAM sequence: TGG
ggcaaaactgttcgtttata

SEQ ID NO: 115138 - DNA, 20 bp, Artificial Sequence
  Description of Artificial Sequence: Synthetic oligonucleotide
  Target: LAMA2; (-) strand; PAM type: NRG; PAM sequence: TGG
atcctgtaattaacaatgaa

SEQ ID NO: 115139 - DNA, 20 bp, Artificial Sequence
  Description of Artificial Sequence: Synthetic oligonucleotide
  Target: LAMA2; (-) strand; PAM type: NRG; PAM sequence: CAG
tactgttttggcacagagtt

SEQ ID NO: 115140 - DNA, 20 bp, Artificial Sequence
  Description of Artificial Sequence: Synthetic oligonucleotide
  Target: LAMA2; (-) strand; PAM type: NRG; PAM sequence: GAG
tgtattactgttttggcaca

SEQ ID NO: 115141 - DNA, 20 bp, Artificial Sequence
  Description of Artificial Sequence: Synthetic oligonucleotide
  Target: LAMA2; (-) strand; PAM type: NRG; PAM sequence: CAG
aatgtattactgttttggca

SEQ ID NO: 115142 - DNA, 20 bp, Artificial Sequence
  Description of Artificial Sequence: Synthetic oligonucleotide
  Target: LAMA2; (-) strand; PAM type: NRG; PAM sequence: TGG
tagcaaatgtattactgttt

SEQ ID NO: 115143 - DNA, 20 bp, Artificial Sequence
  Description of Artificial Sequence: Synthetic oligonucleotide
  Target: LAMA2; (-) strand; PAM type: NRG; PAM sequence: TAG
tgccgaatgagccattatgg

SEQ ID NO: 115144 - DNA, 20 bp, Artificial Sequence
  Description of Artificial Sequence: Synthetic oligonucleotide
  Target: LAMA2; (-) strand; PAM type: NRG; PAM sequence: TGG
gagtgccgaatgagccatta

SEQ ID NO: 115145 - DNA, 20 bp, Artificial Sequence
  Description of Artificial Sequence: Synthetic oligonucleotide
  Target: LAMA2; (-) strand; PAM type: NRG; PAM sequence: GAG
ttaaccttagagtgccgaat

SEQ ID NO: 115146 - DNA, 20 bp, Artificial Sequence
  Description of Artificial Sequence: Synthetic oligonucleotide
  Target: LAMA2; (-) strand; PAM type: NRG; PAM sequence: GAG
tagattgcattttaacctta

SEQ ID NO: 115147 - DNA, 20 bp, Artificial Sequence
  Description of Artificial Sequence: Synthetic oligonucleotide
  Target: LAMA2; (-) strand; PAM type: NRG; PAM sequence: TAG
agtagattgcattttaacct

SEQ ID NO: 115148 - DNA, 20 bp, Artificial Sequence
  Description of Artificial Sequence: Synthetic oligonucleotide
  Target: LAMA2; (-) strand; PAM type: NRG; PAM sequence: TAG
tgtggcacttgcttatagag

SEQ ID NO: 115149 - DNA, 20 bp, Artificial Sequence
  Description of Artificial Sequence: Synthetic oligonucleotide
  Target: LAMA2; (-) strand; PAM type: NRG; PAM sequence: GAG
taatgtggcacttgcttata

SEQ ID NO: 115150 - DNA, 20 bp, Artificial Sequence
  Description of Artificial Sequence: Synthetic oligonucleotide
  Target: LAMA2; (-) strand; PAM type: NRG; PAM sequence: TAG
tttaatgtggcacttgctta

SEQ ID NO: 115151 - DNA, 20 bp, Artificial Sequence
  Description of Artificial Sequence: Synthetic oligonucleotide
  Target: LAMA2; (-) strand; PAM type: NRG; PAM sequence: TGG
tctggtcaatcagtttaatg

SEQ ID NO: 115152 - DNA, 20 bp, Artificial Sequence
  Description of Artificial Sequence: Synthetic oligonucleotide
  Target: LAMA2; (-) strand; PAM type: NRG; PAM sequence: CAG
acttgcgatctctggtcaat

SEQ ID NO: 115153 - DNA, 20 bp, Artificial Sequence
  Description of Artificial Sequence: Synthetic oligonucleotide
  Target: LAMA2; (-) strand; PAM type: NRG; PAM sequence: TGG
tcatggtcacttgcgatctc

SEQ ID NO: 115154 - DNA, 20 bp, Artificial Sequence
  Description of Artificial Sequence: Synthetic oligonucleotide
  Target: LAMA2; (-) strand; PAM type: NRG; PAM sequence: TGG
ttttctgggtgaagttctca

SEQ ID NO: 115155 - DNA, 20 bp, Artificial Sequence
  Description of Artificial Sequence: Synthetic oligonucleotide
  Target: LAMA2; (-) strand; PAM type: NRG; PAM sequence: AAG
ttaaaaattttttctgggtg

SEQ ID NO: 115156 - DNA, 20 bp, Artificial Sequence
  Description of Artificial Sequence: Synthetic oligonucleotide
  Target: LAMA2; (-) strand; PAM type: NRG; PAM sequence: GGG
aagcattaaaaattttttct

SEQ ID NO: 115157 - DNA, 20 bp, Artificial Sequence
  Description of Artificial Sequence: Synthetic oligonucleotide
  Target: LAMA2; (-) strand; PAM type: NRG; PAM sequence: TGG
aaagcattaaaaattttttc

SEQ ID NO: 115158 - DNA, 20 bp, Artificial Sequence
  Description of Artificial Sequence: Synthetic oligonucleotide
  Target: LAMA2; (-) strand; PAM type: NRG; PAM sequence: AAG
tgccatagaataggcatata

SEQ ID NO: 115159 - DNA, 20 bp, Artificial Sequence
  Description of Artificial Sequence: Synthetic oligonucleotide
  Target: LAMA2; (-) strand; PAM type: NRG; PAM sequence: AGG
cacaaatcatgccatagaat

SEQ ID NO: 115160 - DNA, 20 bp, Artificial Sequence
  Description of Artificial Sequence: Synthetic oligonucleotide
  Target: LAMA2; (-) strand; PAM type: NRG; PAM sequence: TAG
acacaaatcatgccatagaa

SEQ ID NO: 115161 - DNA, 20 bp, Artificial Sequence
  Description of Artificial Sequence: Synthetic oligonucleotide
  Target: LAMA2; (-) strand; PAM type: NRG; PAM sequence: TAG
atgtgacacaaatcatgcca

SEQ ID NO: 115162 - DNA, 20 bp, Artificial Sequence
  Description of Artificial Sequence: Synthetic oligonucleotide
  Target: LAMA2; (-) strand; PAM type: NRG; PAM sequence: TAG
gaaaacaaatcatctttgtc

SEQ ID NO: 115163 - DNA, 20 bp, Artificial Sequence
  Description of Artificial Sequence: Synthetic oligonucleotide
  Target: LAMA2; (-) strand; PAM type: NRG; PAM sequence: CAG
ttacagatctcacatacatt

SEQ ID NO: 115164 - DNA, 20 bp, Artificial Sequence
  Description of Artificial Sequence: Synthetic oligonucleotide
  Target: LAMA2; (-) strand; PAM type: NRG; PAM sequence: CAG
gtgatgaaaggatgttatta

SEQ ID NO: 115165 - DNA, 20 bp, Artificial Sequence
  Description of Artificial Sequence: Synthetic oligonucleotide
  Target: LAMA2; (-) strand; PAM type: NRG; PAM sequence: AGG
attttctcatctgtgatgaa

SEQ ID NO: 115166 - DNA, 20 bp, Artificial Sequence
  Description of Artificial Sequence: Synthetic oligonucleotide
  Target: LAMA2; (-) strand; PAM type: NRG; PAM sequence: AAG
tattttctcatctgtgatga

SEQ ID NO: 115167 - DNA, 20 bp, Artificial Sequence
  Description of Artificial Sequence: Synthetic oligonucleotide
  Target: LAMA2; (-) strand; PAM type: NRG; PAM sequence: TAG
gtacatgattttgggcaggt

SEQ ID NO: 115168 - DNA, 20 bp, Artificial Sequence
  Description of Artificial Sequence: Synthetic oligonucleotide
  Target: LAMA2; (-) strand; PAM type: NRG; PAM sequence: AGG
tgtagtacatgattttgggc

SEQ ID NO: 115169 - DNA, 20 bp, Artificial Sequence
  Description of Artificial Sequence: Synthetic oligonucleotide
  Target: LAMA2; (-) strand; PAM type: NRG; PAM sequence: CAG
ttgtagtacatgattttggg

SEQ ID NO: 115170 - DNA, 20 bp, Artificial Sequence
  Description of Artificial Sequence: Synthetic oligonucleotide
  Target: LAMA2; (-) strand; PAM type: NRG; PAM sequence: GGG
tatttgtagtacatgatttt

SEQ ID NO: 115171 - DNA, 20 bp, Artificial Sequence
  Description of Artificial Sequence: Synthetic oligonucleotide
  Target: LAMA2; (-) strand; PAM type: NRG; PAM sequence: TGG
ttatttgtagtacatgattt

SEQ ID NO: 115172 - DNA, 20 bp, Artificial Sequence
  Description of Artificial Sequence: Synthetic oligonucleotide
  Target: LAMA2; (-) strand; PAM type: NRG; PAM sequence: TAG
atacctggtcctgttatttg

SEQ ID NO: 115173 - DNA, 20 bp, Artificial Sequence
  Description of Artificial Sequence: Synthetic oligonucleotide
  Target: LAMA2; (-) strand; PAM type: NRG; PAM sequence: TGG
atatcatctcatttaatacc

SEQ ID NO: 115174 - DNA, 20 bp, Artificial Sequence
  Description of Artificial Sequence: Synthetic oligonucleotide
  Target: LAMA2; (-) strand; PAM type: NRG; PAM sequence: AAG
gtgcatagatggaggtattt

SEQ ID NO: 115175 - DNA, 20 bp, Artificial Sequence
  Description of Artificial Sequence: Synthetic oligonucleotide
  Target: LAMA2; (-) strand; PAM type: NRG; PAM sequence: AGG
tattggctgtgcatagatgg

SEQ ID NO: 115176 - DNA, 20 bp, Artificial Sequence
  Description of Artificial Sequence: Synthetic oligonucleotide
  Target: LAMA2; (-) strand; PAM type: NRG; PAM sequence: GAG
ctattggctgtgcatagatg

SEQ ID NO: 115177 - DNA, 20 bp, Artificial Sequence
  Description of Artificial Sequence: Synthetic oligonucleotide
  Target: LAMA2; (-) strand; PAM type: NRG; PAM sequence: TGG
atctattggctgtgcataga

SEQ ID NO: 115178 - DNA, 20 bp, Artificial Sequence
  Description of Artificial Sequence: Synthetic oligonucleotide
  Target: LAMA2; (-) strand; PAM type: NRG; PAM sequence: TAG
aataatctattggctgtgca

SEQ ID NO: 115179 - DNA, 20 bp, Artificial Sequence
  Description of Artificial Sequence: Synthetic oligonucleotide
  Target: LAMA2; (-) strand; PAM type: NRG; PAM sequence: TGG
aaaatgtaagaataatctat

SEQ ID NO: 115180 - DNA, 20 bp, Artificial Sequence
  Description of Artificial Sequence: Synthetic oligonucleotide
  Target: LAMA2; (-) strand; PAM type: NRG; PAM sequence: AAG
ttatggtcacacaaaaatgt

SEQ ID NO: 115181 - DNA, 20 bp, Artificial Sequence
  Description of Artificial Sequence: Synthetic oligonucleotide
  Target: LAMA2; (-) strand; PAM type: NRG; PAM sequence: TGG
tttagtaatataaaccttta

SEQ ID NO: 115182 - DNA, 20 bp, Artificial Sequence
  Description of Artificial Sequence: Synthetic oligonucleotide
  Target: LAMA2; (-) strand; PAM type: NRG; PAM sequence: TAG
catacatcataatcaacatt

SEQ ID NO: 115183 - DNA, 20 bp, Artificial Sequence
  Description of Artificial Sequence: Synthetic oligonucleotide
  Target: LAMA2; (-) strand; PAM type: NRG; PAM sequence: GGG
ctgaaaatctgaaaagtgtt

SEQ ID NO: 115184 - DNA, 20 bp, Artificial Sequence
  Description of Artificial Sequence: Synthetic oligonucleotide
  Target: LAMA2; (-) strand; PAM type: NRG; PAM sequence: TGG
tctgaaaatctgaaaagtgt

SEQ ID NO: 115185 - DNA, 20 bp, Artificial Sequence
  Description of Artificial Sequence: Synthetic oligonucleotide
  Target: LAMA2; (-) strand; PAM type: NRG; PAM sequence: AAG
gcatagtctgaaaatctgaa

SEQ ID NO: 115186 - DNA, 20 bp, Artificial Sequence
  Description of Artificial Sequence: Synthetic oligonucleotide
  Target: LAMA2; (-) strand; PAM type: NRG; PAM sequence: TAG
gaaatgatgactgacatgca

SEQ ID NO: 115187 - DNA, 20 bp, Artificial Sequence
  Description of Artificial Sequence: Synthetic oligonucleotide
  Target: LAMA2; (-) strand; PAM type: NRG; PAM sequence: AAG
tttgtccaggattttaggaa

SEQ ID NO: 115188 - DNA, 20 bp, Artificial Sequence
  Description of Artificial Sequence: Synthetic oligonucleotide
  Target: LAMA2; (-) strand; PAM type: NRG; PAM sequence: AGG
atcattttgtccaggatttt

SEQ ID NO: 115189 - DNA, 20 bp, Artificial Sequence
  Description of Artificial Sequence: Synthetic oligonucleotide
  Target: LAMA2; (-) strand; PAM type: NRG; PAM sequence: TAG
tatcattttgtccaggattt

SEQ ID NO: 115190 - DNA, 20 bp, Artificial Sequence
  Description of Artificial Sequence: Synthetic oligonucleotide
  Target: LAMA2; (-) strand; PAM type: NRG; PAM sequence: AGG
ttaaagctatcattttgtcc

SEQ ID NO: 115191 - DNA, 20 bp, Artificial Sequence
  Description of Artificial Sequence: Synthetic oligonucleotide
  Target: LAMA2; (-) strand; PAM type: NRG; PAM sequence: CAG
attaaagctatcattttgtc

SEQ ID NO: 115192 - DNA, 20 bp, Artificial Sequence
  Description of Artificial Sequence: Synthetic oligonucleotide
  Target: LAMA2; (-) strand; PAM type: NRG; PAM sequence: AAG
tattttgtgaggcggtatta

SEQ ID NO: 115193 - DNA, 20 bp, Artificial Sequence
  Description of Artificial Sequence: Synthetic oligonucleotide
  Target: LAMA2; (-) strand; PAM type: NRG; PAM sequence: CGG
aatccaattattttgtgagg

SEQ ID NO: 115194 - DNA, 20 bp, Artificial Sequence
  Description of Artificial Sequence: Synthetic oligonucleotide
  Target: LAMA2; (-) strand; PAM type: NRG; PAM sequence: AGG
gaaaatccaattattttgtg

SEQ ID NO: 115195 - DNA, 20 bp, Artificial Sequence
  Description of Artificial Sequence: Synthetic oligonucleotide
  Target: LAMA2; (-) strand; PAM type: NRG; PAM sequence: GAG
tgaaaatccaattattttgt

SEQ ID NO: 115196 - DNA, 20 bp, Artificial Sequence
  Description of Artificial Sequence: Synthetic oligonucleotide
  Target: LAMA2; (-) strand; PAM type: NRG; PAM sequence: TGG
gagaagcttggcccccagtt

SEQ ID NO: 115197 - DNA, 20 bp, Artificial Sequence
  Description of Artificial Sequence: Synthetic oligonucleotide
  Target: LAMA2; (-) strand; PAM type: NRG; PAM sequence: CAG
ttcttgagaagcttggcccc

SEQ ID NO: 115198 - DNA, 20 bp, Artificial Sequence
  Description of Artificial Sequence: Synthetic oligonucleotide
  Target: LAMA2; (-) strand; PAM type: NRG; PAM sequence: TGG
aaggagcttcttgagaagct

SEQ ID NO: 115199 - DNA, 20 bp, Artificial Sequence
  Description of Artificial Sequence: Synthetic oligonucleotide
  Target: LAMA2; (-) strand; PAM type: NRG; PAM sequence: AAG
gggagaaggagcttcttgag

SEQ ID NO: 115200 - DNA, 20 bp, Artificial Sequence
  Description of Artificial Sequence: Synthetic oligonucleotide
  Target: LAMA2; (-) strand; PAM type: NRG; PAM sequence: GAG
caagggagaaggagcttctt

SEQ ID NO: 115201 - DNA, 20 bp, Artificial Sequence
  Description of Artificial Sequence: Synthetic oligonucleotide
  Target: LAMA2; (-) strand; PAM type: NRG; PAM sequence: GAG
ggcagaggacaagggagaag

SEQ ID NO: 115202 - DNA, 20 bp, Artificial Sequence
  Description of Artificial Sequence: Synthetic oligonucleotide
  Target: LAMA2; (-) strand; PAM type: NRG; PAM sequence: AGG
gaggcagaggacaagggaga

SEQ ID NO: 115203 - DNA, 20 bp, Artificial Sequence
  Description of Artificial Sequence: Synthetic oligonucleotide
  Target: LAMA2; (-) strand; PAM type: NRG; PAM sequence: AAG
agaggcagaggacaagggag

SEQ ID NO: 115204 - DNA, 20 bp, Artificial Sequence
  Description of Artificial Sequence: Synthetic oligonucleotide
  Target: LAMA2; (-) strand; PAM type: NRG; PAM sequence: GAG
aagagaggcagaggacaagg

SEQ ID NO: 115205 - DNA, 20 bp, Artificial Sequence
  Description of Artificial Sequence: Synthetic oligonucleotide
  Target: LAMA2; (-) strand; PAM type: NRG; PAM sequence: GGG
taaagagaggcagaggacaa

SEQ ID NO: 115206 - DNA, 20 bp, Artificial Sequence
  Description of Artificial Sequence: Synthetic oligonucleotide
  Target: LAMA2; (-) strand; PAM type: NRG; PAM sequence: AGG
gtaaagagaggcagaggaca

SEQ ID NO: 115207 - DNA, 20 bp, Artificial Sequence
  Description of Artificial Sequence: Synthetic oligonucleotide
  Target: LAMA2; (-) strand; PAM type: NRG; PAM sequence: AAG
agtaaagagaggcagaggac

SEQ ID NO: 115208 - DNA, 20 bp, Artificial Sequence
  Description of Artificial Sequence: Synthetic oligonucleotide
  Target: LAMA2; (-) strand; PAM type: NRG; PAM sequence: AGG
ggaggagtaaagagaggcag

SEQ ID NO: 115209 - DNA, 20 bp, Artificial Sequence
  Description of Artificial Sequence: Synthetic oligonucleotide
  Target: LAMA2; (-) strand; PAM type: NRG; PAM sequence: GAG
aggaggagtaaagagaggca

SEQ ID NO: 115210 - DNA, 20 bp, Artificial Sequence
  Description of Artificial Sequence: Synthetic oligonucleotide
  Target: LAMA2; (-) strand; PAM type: NRG; PAM sequence: CAG
ggaggaggagtaaagagagg

SEQ ID NO: 115211 - DNA, 20 bp, Artificial Sequence
  Description of Artificial Sequence: Synthetic oligonucleotide
  Target: LAMA2; (-) strand; PAM type: NRG; PAM sequence: AGG
gagggaggaggagtaaagag

SEQ ID NO: 115212 - DNA, 20 bp, Artificial Sequence
  Description of Artificial Sequence: Synthetic oligonucleotide
  Target: LAMA2; (-) strand; PAM type: NRG; PAM sequence: GAG
tgagggaggaggagtaaaga

SEQ ID NO: 115213 - DNA, 20 bp, Artificial Sequence
  Description of Artificial Sequence: Synthetic oligonucleotide
  Target: LAMA2; (-) strand; PAM type: NRG; PAM sequence: GAG
aatgagggaggaggagtaaa

SEQ ID NO: 115214 - DNA, 20 bp, Artificial Sequence
  Description of Artificial Sequence: Synthetic oligonucleotide
  Target: LAMA2; (-) strand; PAM type: NRG; PAM sequence: AAG
agaatgagggaggaggagta

SEQ ID NO: 115215 - DNA, 20 bp, Artificial Sequence
  Description of Artificial Sequence: Synthetic oligonucleotide
  Target: LAMA2; (-) strand; PAM type: NRG; PAM sequence: GAG
gagagagaatgagggaggag

SEQ ID NO: 115216 - DNA, 20 bp, Artificial Sequence
  Description of Artificial Sequence: Synthetic oligonucleotide
  Target: LAMA2; (-) strand; PAM type: NRG; PAM sequence: AGG
gggagagagaatgagggagg

SEQ ID NO: 115217 - DNA, 20 bp, Artificial Sequence
  Description of Artificial Sequence: Synthetic oligonucleotide
  Target: LAMA2; (-) strand; PAM type: NRG; PAM sequence: GAG
agggagagagaatgagggag

SEQ ID NO: 115218 - DNA, 20 bp, Artificial Sequence
  Description of Artificial Sequence: Synthetic oligonucleotide
  Target: LAMA2; (-) strand; PAM type: NRG; PAM sequence: AGG
gaagggagagagaatgaggg

SEQ ID NO: 115219 - DNA, 20 bp, Artificial Sequence
  Description of Artificial Sequence: Synthetic oligonucleotide
  Target: LAMA2; (-) strand; PAM type: NRG; PAM sequence: GAG
ggaagggagagagaatgagg

SEQ ID NO: 115220 - DNA, 20 bp, Artificial Sequence
  Description of Artificial Sequence: Synthetic oligonucleotide
  Target: LAMA2; (-) strand; PAM type: NRG; PAM sequence: GGG
gtggaagggagagagaatga

SEQ ID NO: 115221 - DNA, 20 bp, Artificial Sequence
  Description of Artificial Sequence: Synthetic oligonucleotide
  Target: LAMA2; (-) strand; PAM type: NRG; PAM sequence: AGG
ggtggaagggagagagaatg

SEQ ID NO: 115222 - DNA, 20 bp, Artificial Sequence
  Description of Artificial Sequence: Synthetic oligonucleotide
  Target: LAMA2; (-) strand; PAM type: NRG; PAM sequence: GAG
gggtggaagggagagagaat

SEQ ID NO: 115223 - DNA, 20 bp, Artificial Sequence
  Description of Artificial Sequence: Synthetic oligonucleotide
  Target: LAMA2; (-) strand; PAM type: NRG; PAM sequence: GAG
atgaaggggtggaagggaga

SEQ ID NO: 115224 - DNA, 20 bp, Artificial Sequence
  Description of Artificial Sequence: Synthetic oligonucleotide
  Target: LAMA2; (-) strand; PAM type: NRG; PAM sequence: GAG
agatgaaggggtggaaggga

SEQ ID NO: 115225 - DNA, 20 bp, Artificial Sequence
  Description of Artificial Sequence: Synthetic oligonucleotide
  Target: LAMA2; (-) strand; PAM type: NRG; PAM sequence: GAG
ccagatgaaggggtggaagg

SEQ ID NO: 115226 - DNA, 20 bp, Artificial Sequence
  Description of Artificial Sequence: Synthetic oligonucleotide
  Target: LAMA2; (-) strand; PAM type: NRG; PAM sequence: GGG
ttccagatgaaggggtggaa

SEQ ID NO: 115227 - DNA, 20 bp, Artificial Sequence
  Description of Artificial Sequence: Synthetic oligonucleotide
  Target: LAMA2; (-) strand; PAM type: NRG; PAM sequence: AGG
tttccagatgaaggggtgga

SEQ ID NO: 115228 - DNA, 20 bp, Artificial Sequence
  Description of Artificial Sequence: Synthetic oligonucleotide
  Target: LAMA2; (-) strand; PAM type: NRG; PAM sequence: AAG
ttttccagatgaaggggtgg

SEQ ID NO: 115229 - DNA, 20 bp, Artificial Sequence
  Description of Artificial Sequence: Synthetic oligonucleotide
  Target: LAMA2; (-) strand; PAM type: NRG; PAM sequence: TGG
gatttttccagatgaagggg

SEQ ID NO: 115230 - DNA, 20 bp, Artificial Sequence
  Description of Artificial Sequence: Synthetic oligonucleotide
  Target: LAMA2; (-) strand; PAM type: NRG; PAM sequence: GGG
ggagatttttccagatgaag

SEQ ID NO: 115231 - DNA, 20 bp, Artificial Sequence
  Description of Artificial Sequence: Synthetic oligonucleotide
  Target: LAMA2; (-) strand; PAM type: NRG; PAM sequence: GGG
gggagatttttccagatgaa

SEQ ID NO: 115232 - DNA, 20 bp, Artificial Sequence
  Description of Artificial Sequence: Synthetic oligonucleotide
  Target: LAMA2; (-) strand; PAM type: NRG; PAM sequence: AGG
agggagatttttccagatga

SEQ ID NO: 115233 - DNA, 20 bp, Artificial Sequence
  Description of Artificial Sequence: Synthetic oligonucleotide
  Target: LAMA2; (-) strand; PAM type: NRG; PAM sequence: AAG
aagggagatttttccagatg

SEQ ID NO: 115234 - DNA, 20 bp, Artificial Sequence
  Description of Artificial Sequence: Synthetic oligonucleotide
  Target: LAMA2; (-) strand; PAM type: NRG; PAM sequence: CAG
tgactaaagggagatttttc

SEQ ID NO: 115235 - DNA, 20 bp, Artificial Sequence
  Description of Artificial Sequence: Synthetic oligonucleotide
  Target: LAMA2; (-) strand; PAM type: NRG; PAM sequence: GAG
gataccaaagtgactaaagg

SEQ ID NO: 115236 - DNA, 20 bp, Artificial Sequence
  Description of Artificial Sequence: Synthetic oligonucleotide
  Target: LAMA2; (-) strand; PAM type: NRG; PAM sequence: GGG
tagataccaaagtgactaaa

SEQ ID NO: 115237 - DNA, 20 bp, Artificial Sequence
  Description of Artificial Sequence: Synthetic oligonucleotide
  Target: LAMA2; (-) strand; PAM type: NRG; PAM sequence: AGG
ttagataccaaagtgactaa

SEQ ID NO: 115238 - DNA, 20 bp, Artificial Sequence
  Description of Artificial Sequence: Synthetic oligonucleotide
  Target: LAMA2; (-) strand; PAM type: NRG; PAM sequence: AAG
attagataccaaagtgacta

SEQ ID NO: 115239 - DNA, 20 bp, Artificial Sequence
  Description of Artificial Sequence: Synthetic oligonucleotide
  Target: LAMA2; (-) strand; PAM type: NRG; PAM sequence: AAG
tgccaagaaattagatacca

SEQ ID NO: 115240 - DNA, 20 bp, Artificial Sequence
  Description of Artificial Sequence: Synthetic oligonucleotide
  Target: LAMA2; (-) strand; PAM type: NRG; PAM sequence: TAG
tcactggagtgccaagaaat

SEQ ID NO: 115241 - DNA, 20 bp, Artificial Sequence
  Description of Artificial Sequence: Synthetic oligonucleotide
  Target: LAMA2; (-) strand; PAM type: NRG; PAM sequence: AAG
gcagaggtcactggagtgcc

SEQ ID NO: 115242 - DNA, 20 bp, Artificial Sequence
  Description of Artificial Sequence: Synthetic oligonucleotide
  Target: LAMA2; (-) strand; PAM type: NRG; PAM sequence: GAG
ataggaggcagaggtcactg

SEQ ID NO: 115243 - DNA, 20 bp, Artificial Sequence
  Description of Artificial Sequence: Synthetic oligonucleotide
  Target: LAMA2; (-) strand; PAM type: NRG; PAM sequence: TGG
atataggaggcagaggtcac

SEQ ID NO: 115244 - DNA, 20 bp, Artificial Sequence
  Description of Artificial Sequence: Synthetic oligonucleotide
  Target: LAMA2; (-) strand; PAM type: NRG; PAM sequence: AGG
aaagcagatataggaggcag

SEQ ID NO: 115245 - DNA, 20 bp, Artificial Sequence
  Description of Artificial Sequence: Synthetic oligonucleotide
  Target: LAMA2; (-) strand; PAM type: NRG; PAM sequence: GAG
caaagcagatataggaggca

SEQ ID NO: 115246 - DNA, 20 bp, Artificial Sequence
  Description of Artificial Sequence: Synthetic oligonucleotide
  Target: LAMA2; (-) strand; PAM type: NRG; PAM sequence: CAG
gacaaagcagatataggagg

SEQ ID NO: 115247 - DNA, 20 bp, Artificial Sequence
  Description of Artificial Sequence: Synthetic oligonucleotide
  Target: LAMA2; (-) strand; PAM type: NRG; PAM sequence: AGG
gaggacaaagcagatatagg

SEQ ID NO: 115248 - DNA, 20 bp, Artificial Sequence
  Description of Artificial Sequence: Synthetic oligonucleotide
  Target: LAMA2; (-) strand; PAM type: NRG; PAM sequence: GAG
agaggacaaagcagatatag

SEQ ID NO: 115249 - DNA, 20 bp, Artificial Sequence
  Description of Artificial Sequence: Synthetic oligonucleotide
  Target: LAMA2; (-) strand; PAM type: NRG; PAM sequence: AGG
tcagaggacaaagcagatat

SEQ ID NO: 115250 - DNA, 20 bp, Artificial Sequence
  Description of Artificial Sequence: Synthetic oligonucleotide
  Target: LAMA2; (-) strand; PAM type: NRG; PAM sequence: TAG
atcagaggacaaagcagata

SEQ ID NO: 115251 - DNA, 20 bp, Artificial Sequence
  Description of Artificial Sequence: Synthetic oligonucleotide
  Target: LAMA2; (-) strand; PAM type: NRG; PAM sequence: CAG
agaaggatcagaggacaaag

SEQ ID NO: 115252 - DNA, 20 bp, Artificial Sequence
  Description of Artificial Sequence: Synthetic oligonucleotide
  Target: LAMA2; (-) strand; PAM type: NRG; PAM sequence: AAG
aggagaaggatcagaggaca

SEQ ID NO: 115253 - DNA, 20 bp, Artificial Sequence
  Description of Artificial Sequence: Synthetic oligonucleotide
  Target: LAMA2; (-) strand; PAM type: NRG; PAM sequence: AGG
gatgccaggagaaggatcag

SEQ ID NO: 115254 - DNA, 20 bp, Artificial Sequence
  Description of Artificial Sequence: Synthetic oligonucleotide
  Target: LAMA2; (-) strand; PAM type: NRG; PAM sequence: GAG
ggatgccaggagaaggatca

SEQ ID NO: 115255 - DNA, 20 bp, Artificial Sequence
  Description of Artificial Sequence: Synthetic oligonucleotide
  Target: LAMA2; (-) strand; PAM type: NRG; PAM sequence: CAG
gcggatgccaggagaaggat

SEQ ID NO: 115256 - DNA, 20 bp, Artificial Sequence
  Description of Artificial Sequence: Synthetic oligonucleotide
  Target: LAMA2; (-) strand; PAM type: NRG; PAM sequence: AGG
ccaaggcggatgccaggaga

SEQ ID NO: 115257 - DNA, 20 bp, Artificial Sequence
  Description of Artificial Sequence: Synthetic oligonucleotide
  Target: LAMA2; (-) strand; PAM type: NRG; PAM sequence: AAG
accaaggcggatgccaggag

SEQ ID NO: 115258 - DNA, 20 bp, Artificial Sequence
  Description of Artificial Sequence: Synthetic oligonucleotide
  Target: LAMA2; (-) strand; PAM type: NRG; PAM sequence: GAG
gccaccaaggcggatgccag

SEQ ID NO: 115259 - DNA, 20 bp, Artificial Sequence
  Description of Artificial Sequence: Synthetic oligonucleotide
  Target: LAMA2; (-) strand; PAM type: NRG; PAM sequence: AGG
tggccaccaaggcggatgcc

SEQ ID NO: 115260 - DNA, 20 bp, Artificial Sequence
  Description of Artificial Sequence: Synthetic oligonucleotide
  Target: LAMA2; (-) strand; PAM type: NRG; PAM sequence: CAG
ctggccaccaaggcggatgc

SEQ ID NO: 115261 - DNA, 20 bp, Artificial Sequence
  Description of Artificial Sequence: Synthetic oligonucleotide
  Target: LAMA2; (-) strand; PAM type: NRG; PAM sequence: CGG
agaactgctggccaccaagg

SEQ ID NO: 115262 - DNA, 20 bp, Artificial Sequence
  Description of Artificial Sequence: Synthetic oligonucleotide
  Target: LAMA2; (-) strand; PAM type: NRG; PAM sequence: AGG
gtaagaactgctggccacca

SEQ ID NO: 115263 - DNA, 20 bp, Artificial Sequence
  Description of Artificial Sequence: Synthetic oligonucleotide
  Target: LAMA2; (-) strand; PAM type: NRG; PAM sequence: AAG
agtaagaactgctggccacc

SEQ ID NO: 115264 - DNA, 20 bp, Artificial Sequence
  Description of Artificial Sequence: Synthetic oligonucleotide
  Target: LAMA2; (-) strand; PAM type: NRG; PAM sequence: TGG
ttttgtccagtaagaactgc

SEQ ID NO: 115265 - DNA, 20 bp, Artificial Sequence
  Description of Artificial Sequence: Synthetic oligonucleotide
  Target: LAMA2; (-) strand; PAM type: NRG; PAM sequence: AAG
gtttgatgtttttgtccagt

SEQ ID NO: 115266 - DNA, 20 bp, Artificial Sequence
  Description of Artificial Sequence: Synthetic oligonucleotide
  Target: LAMA2; (-) strand; PAM type: NRG; PAM sequence: CAG
tagggtttgatgtttttgtc

SEQ ID NO: 115267 - DNA, 20 bp, Artificial Sequence
  Description of Artificial Sequence: Synthetic oligonucleotide
  Target: LAMA2; (-) strand; PAM type: NRG; PAM sequence: GGG
gtaactacttcaggctctta

SEQ ID NO: 115268 - DNA, 20 bp, Artificial Sequence
  Description of Artificial Sequence: Synthetic oligonucleotide
  Target: LAMA2; (-) strand; PAM type: NRG; PAM sequence: AGG
agtaactacttcaggctctt

SEQ ID NO: 115269 - DNA, 20 bp, Artificial Sequence
  Description of Artificial Sequence: Synthetic oligonucleotide
  Target: LAMA2; (-) strand; PAM type: NRG; PAM sequence: TAG
aagtaactacttcaggctct

SEQ ID NO: 115270 - DNA, 20 bp, Artificial Sequence
  Description of Artificial Sequence: Synthetic oligonucleotide
  Target: LAMA2; (-) strand; PAM type: NRG; PAM sequence: AGG
tttgcttaagtaactacttc

SEQ ID NO: 115271 - DNA, 20 bp, Artificial Sequence
  Description of Artificial Sequence: Synthetic oligonucleotide
  Target: LAMA2; (-) strand; PAM type: NRG; PAM sequence: CAG
atttgcttaagtaactactt

SEQ ID NO: 115272 - DNA, 20 bp, Artificial Sequence
  Description of Artificial Sequence: Synthetic oligonucleotide
  Target: LAMA2; (-) strand; PAM type: NRG; PAM sequence: AAG
gttgcttgtcctatttgctt

SEQ ID NO: 115273 - DNA, 20 bp, Artificial Sequence
  Description of Artificial Sequence: Synthetic oligonucleotide
  Target: LAMA2; (-) strand; PAM type: NRG; PAM sequence: CAG
cccagaagaaaaactcagtt

SEQ ID NO: 115274 - DNA, 20 bp, Artificial Sequence
  Description of Artificial Sequence: Synthetic oligonucleotide
  Target: LAMA2; (-) strand; PAM type: NRG; PAM sequence: CAG
gctttcccagaagaaaaact

SEQ ID NO: 115275 - DNA, 20 bp, Artificial Sequence
  Description of Artificial Sequence: Synthetic oligonucleotide
  Target: LAMA2; (-) strand; PAM type: NRG; PAM sequence: AAG
tgtgaagaaagctttcccag

SEQ ID NO: 115276 - DNA, 20 bp, Artificial Sequence
  Description of Artificial Sequence: Synthetic oligonucleotide
  Target: LAMA2; (-) strand; PAM type: NRG; PAM sequence: CAG
ctgtgtgaagaaagctttcc

SEQ ID NO: 115277 - DNA, 20 bp, Artificial Sequence
  Description of Artificial Sequence: Synthetic oligonucleotide
  Target: LAMA2; (-) strand; PAM type: NRG; PAM sequence: AAG
tttctgtacctgtgtgaaga

SEQ ID NO: 115278 - DNA, 20 bp, Artificial Sequence
  Description of Artificial Sequence: Synthetic oligonucleotide
  Target: LAMA2; (-) strand; PAM type: NRG; PAM sequence: AAG
cctatttctgtacctgtgtg

SEQ ID NO: 115279 - DNA, 20 bp, Artificial Sequence
  Description of Artificial Sequence: Synthetic oligonucleotide
  Target: LAMA2; (-) strand; PAM type: NRG; PAM sequence: TAG
tcaccctacttcctgacctt

SEQ ID NO: 115280 - DNA, 20 bp, Artificial Sequence
  Description of Artificial Sequence: Synthetic oligonucleotide
  Target: LAMA2; (-) strand; PAM type: NRG; PAM sequence: TGG
ttaaaatctttatctcattc

SEQ ID NO: 115281 - DNA, 20 bp, Artificial Sequence
  Description of Artificial Sequence: Synthetic oligonucleotide
  Target: LAMA2; (-) strand; PAM type: NRG; PAM sequence: CAG
gaaagaaaatatttagggtt

SEQ ID NO: 115282 - DNA, 20 bp, Artificial Sequence
  Description of Artificial Sequence: Synthetic oligonucleotide
  Target: LAMA2; (-) strand; PAM type: NRG; PAM sequence: GGG
gttaagaaagaaaatattta

SEQ ID NO: 115283 - DNA, 20 bp, Artificial Sequence
  Description of Artificial Sequence: Synthetic oligonucleotide
  Target: LAMA2; (-) strand; PAM type: NRG; PAM sequence: AGG
tgttaagaaagaaaatattt

SEQ ID NO: 115284 - DNA, 20 bp, Artificial Sequence
  Description of Artificial Sequence: Synthetic oligonucleotide
  Target: LAMA2; (-) strand; PAM type: NRG; PAM sequence: TAG
atgttaagaaagaaaatatt

SEQ ID NO: 115285 - DNA, 20 bp, Artificial Sequence
  Description of Artificial Sequence: Synthetic oligonucleotide
  Target: LAMA2; (-) strand; PAM type: NRG; PAM sequence: AAG
acatactttggatgttaaga

SEQ ID NO: 115286 - DNA, 20 bp, Artificial Sequence
  Description of Artificial Sequence: Synthetic oligonucleotide
  Target: LAMA2; (-) strand; PAM type: NRG; PAM sequence: AAG
ttgaacatactttggatgtt

SEQ ID NO: 115287 - DNA, 20 bp, Artificial Sequence
  Description of Artificial Sequence: Synthetic oligonucleotide
  Target: LAMA2; (-) strand; PAM type: NRG; PAM sequence: TGG
ttttctgtttgaacatactt

SEQ ID NO: 115288 - DNA, 20 bp, Artificial Sequence
  Description of Artificial Sequence: Synthetic oligonucleotide
  Target: LAMA2; (-) strand; PAM type: NRG; PAM sequence: TAG
tttgtaatttacataataaa

SEQ ID NO: 115289 - DNA, 20 bp, Artificial Sequence
  Description of Artificial Sequence: Synthetic oligonucleotide
  Target: LAMA2; (-) strand; PAM type: NRG; PAM sequence: GAG
tacgtggaagaagatattaa

SEQ ID NO: 115290 - DNA, 20 bp, Artificial Sequence
  Description of Artificial Sequence: Synthetic oligonucleotide
  Target: LAMA2; (-) strand; PAM type: NRG; PAM sequence: AAG
catacgtggaagaagatatt

SEQ ID NO: 115291 - DNA, 20 bp, Artificial Sequence
  Description of Artificial Sequence: Synthetic oligonucleotide
  Target: LAMA2; (-) strand; PAM type: NRG; PAM sequence: AAG
ttggattgcatacgtggaag

SEQ ID NO: 115292 - DNA, 20 bp, Artificial Sequence
  Description of Artificial Sequence: Synthetic oligonucleotide
  Target: LAMA2; (-) strand; PAM type: NRG; PAM sequence: AAG
cagttggattgcatacgtgg

SEQ ID NO: 115293 - DNA, 20 bp, Artificial Sequence
  Description of Artificial Sequence: Synthetic oligonucleotide
  Target: LAMA2; (-) strand; PAM type: NRG; PAM sequence: TGG
tatcagttggattgcatacg

SEQ ID NO: 115294 - DNA, 20 bp, Artificial Sequence
  Description of Artificial Sequence: Synthetic oligonucleotide
  Target: LAMA2; (-) strand; PAM type: NRG; PAM sequence: TGG
ttttttaaaaccatatcagt

SEQ ID NO: 115295 - DNA, 20 bp, Artificial Sequence
  Description of Artificial Sequence: Synthetic oligonucleotide
  Target: LAMA2; (-) strand; PAM type: NRG; PAM sequence: CAG
gattttttttaaaaccatat

SEQ ID NO: 115296 - DNA, 20 bp, Artificial Sequence
  Description of Artificial Sequence: Synthetic oligonucleotide
  Target: LAMA2; (-) strand; PAM type: NRG; PAM sequence: AAG
tttgtttggaatgtgggttt

SEQ ID NO: 115297 - DNA, 20 bp, Artificial Sequence
  Description of Artificial Sequence: Synthetic oligonucleotide
  Target: LAMA2; (-) strand; PAM type: NRG; PAM sequence: GGG
ttcttatttgtttggaatgt

SEQ ID NO: 115298 - DNA, 20 bp, Artificial Sequence
  Description of Artificial Sequence: Synthetic oligonucleotide
  Target: LAMA2; (-) strand; PAM type: NRG; PAM sequence: TGG
tttcttatttgtttggaatg

SEQ ID NO: 115299 - DNA, 20 bp, Artificial Sequence
  Description of Artificial Sequence: Synthetic oligonucleotide
  Target: LAMA2; (-) strand; PAM type: NRG; PAM sequence: TGG
taccctatttcttatttgtt

SEQ ID NO: 115300 - DNA, 20 bp, Artificial Sequence
  Description of Artificial Sequence: Synthetic oligonucleotide
  Target: LAMA2; (-) strand; PAM type: NRG; PAM sequence: GAG
gtttcagtggctgattctta

SEQ ID NO: 115301 - DNA, 20 bp, Artificial Sequence
  Description of Artificial Sequence: Synthetic oligonucleotide
  Target: LAMA2; (-) strand; PAM type: NRG; PAM sequence: TAG
cagtttcagtggctgattct

SEQ ID NO: 115302 - DNA, 20 bp, Artificial Sequence
  Description of Artificial Sequence: Synthetic oligonucleotide
  Target: LAMA2; (-) strand; PAM type: NRG; PAM sequence: TGG
ttttttttttacagtttcag

SEQ ID NO: 115303 - DNA, 20 bp, Artificial Sequence
  Description of Artificial Sequence: Synthetic oligonucleotide
  Target: LAMA2; (-) strand; PAM type: NRG; PAM sequence: CAG
attttttttttttacagttt

SEQ ID NO: 115304 - DNA, 20 bp, Artificial Sequence
  Description of Artificial Sequence: Synthetic oligonucleotide
  Target: LAMA2; (-) strand; PAM type: NRG; PAM sequence: CAG
agctttatttttttttttta

SEQ ID NO: 115305 - DNA, 20 bp, Artificial Sequence
  Description of Artificial Sequence: Synthetic oligonucleotide
  Target: LAMA2; (-) strand; PAM type: NRG; PAM sequence: CAG
actttagtattgtaataggt

SEQ ID NO: 115306 - DNA, 20 bp, Artificial Sequence
  Description of Artificial Sequence: Synthetic oligonucleotide
  Target: LAMA2; (-) strand; PAM type: NRG; PAM sequence: AGG
tattactttagtattgtaat

SEQ ID NO: 115307 - DNA, 20 bp, Artificial Sequence
  Description of Artificial Sequence: Synthetic oligonucleotide
  Target: LAMA2; (-) strand; PAM type: NRG; PAM sequence: TAG
gtattactttagtattgtaa

SEQ ID NO: 115308 - DNA, 20 bp, Artificial Sequence
  Description of Artificial Sequence: Synthetic oligonucleotide
  Target: LAMA2; (-) strand; PAM type: NRG; PAM sequence: TAG
cattaaactttgtattactt

SEQ ID NO: 115309 - DNA, 20 bp, Artificial Sequence
  Description of Artificial Sequence: Synthetic oligonucleotide
  Target: LAMA2; (-) strand; PAM type: NRG; PAM sequence: AGG
gaggcctgctatgtgcaaaa

SEQ ID NO: 115310 - DNA, 20 bp, Artificial Sequence
  Description of Artificial Sequence: Synthetic oligonucleotide
  Target: LAMA2; (-) strand; PAM type: NRG; PAM sequence: AAG
tgaggcctgctatgtgcaaa

SEQ ID NO: 115311 - DNA, 20 bp, Artificial Sequence
  Description of Artificial Sequence: Synthetic oligonucleotide
  Target: LAMA2; (-) strand; PAM type: NRG; PAM sequence: AGG
tatttaacagctttttactg

SEQ ID NO: 115312 - DNA, 20 bp, Artificial Sequence
  Description of Artificial Sequence: Synthetic oligonucleotide
  Target: LAMA2; (-) strand; PAM type: NRG; PAM sequence: GAG
ttatttaacagctttttact

SEQ ID NO: 115313 - DNA, 20 bp, Artificial Sequence
  Description of Artificial Sequence: Synthetic oligonucleotide
  Target: LAMA2; (-) strand; PAM type: NRG; PAM sequence: CAG
tttaaaaagtatttatttaa

SEQ ID NO: 115314 - DNA, 20 bp, Artificial Sequence
  Description of Artificial Sequence: Synthetic oligonucleotide
  Target: LAMA2; (-) strand; PAM type: NRG; PAM sequence: AAG
gtgtgttttccatttttaaa

SEQ ID NO: 115315 - DNA, 20 bp, Artificial Sequence
  Description of Artificial Sequence: Synthetic oligonucleotide
  Target: LAMA2; (-) strand; PAM type: NRG; PAM sequence: TGG
caatatgtccattatgattc

SEQ ID NO: 115316 - DNA, 20 bp, Artificial Sequence
  Description of Artificial Sequence: Synthetic oligonucleotide
  Target: LAMA2; (-) strand; PAM type: NRG; PAM sequence: AGG
ttctttagtttttattgaga

SEQ ID NO: 115317 - DNA, 20 bp, Artificial Sequence
  Description of Artificial Sequence: Synthetic oligonucleotide
  Target: LAMA2; (-) strand; PAM type: NRG; PAM sequence: AAG
tttctttagtttttattgag

SEQ ID NO: 115318 - DNA, 20 bp, Artificial Sequence
  Description of Artificial Sequence: Synthetic oligonucleotide
  Target: LAMA2; (-) strand; PAM type: NRG; PAM sequence: GAG
tcatttctttagtttttatt

SEQ ID NO: 115319 - DNA, 20 bp, Artificial Sequence
  Description of Artificial Sequence: Synthetic oligonucleotide
  Target: LAMA2; (-) strand; PAM type: NRG; PAM sequence: TAG
tcaaatctagatcatttctt

SEQ ID NO: 115320 - DNA, 20 bp, Artificial Sequence
  Description of Artificial Sequence: Synthetic oligonucleotide
  Target: LAMA2; (-) strand; PAM type: NRG; PAM sequence: TAG
ccttttaggaacatcaaatc

SEQ ID NO: 115321 - DNA, 20 bp, Artificial Sequence
  Description of Artificial Sequence: Synthetic oligonucleotide
  Target: LAMA2; (-) strand; PAM type: NRG; PAM sequence: AGG
ctgctcctattttacctttt

SEQ ID NO: 115322 - DNA, 20 bp, Artificial Sequence
  Description of Artificial Sequence: Synthetic oligonucleotide
  Target: LAMA2; (-) strand; PAM type: NRG; PAM sequence: TAG
cctgctcctattttaccttt

SEQ ID NO: 115323 - DNA, 20 bp, Artificial Sequence
  Description of Artificial Sequence: Synthetic oligonucleotide
  Target: LAMA2; (-) strand; PAM type: NRG; PAM sequence: CAG
agggcattgctagaaaacta

SEQ ID NO: 115324 - DNA, 20 bp, Artificial Sequence
  Description of Artificial Sequence: Synthetic oligonucleotide
  Target: LAMA2; (-) strand; PAM type: NRG; PAM sequence: TAG
ttacttaaaaagggcattgc

SEQ ID NO: 115325 - DNA, 20 bp, Artificial Sequence
  Description of Artificial Sequence: Synthetic oligonucleotide
  Target: LAMA2; (-) strand; PAM type: NRG; PAM sequence: GGG
gaggctgtattacttaaaaa

SEQ ID NO: 115326 - DNA, 20 bp, Artificial Sequence
  Description of Artificial Sequence: Synthetic oligonucleotide
  Target: LAMA2; (-) strand; PAM type: NRG; PAM sequence: AGG
tgaggctgtattacttaaaa

SEQ ID NO: 115327 - DNA, 20 bp, Artificial Sequence
  Description of Artificial Sequence: Synthetic oligonucleotide
  Target: LAMA2; (-) strand; PAM type: NRG; PAM sequence: AAG
ctgaggctgtattacttaaa

SEQ ID NO: 115328 - DNA, 20 bp, Artificial Sequence
  Description of Artificial Sequence: Synthetic oligonucleotide
  Target: LAMA2; (-) strand; PAM type: NRG; PAM sequence: AGG
ttaattaagggattgccctg

SEQ ID NO: 115329 - DNA, 20 bp, Artificial Sequence
  Description of Artificial Sequence: Synthetic oligonucleotide
  Target: LAMA2; (-) strand; PAM type: NRG; PAM sequence: GAG
attaattaagggattgccct

SEQ ID NO: 115330 - DNA, 20 bp, Artificial Sequence
  Description of Artificial Sequence: Synthetic oligonucleotide
  Target: LAMA2; (-) strand; PAM type: NRG; PAM sequence: GGG
cagcggaaaatattaattaa

SEQ ID NO: 115331 - DNA, 20 bp, Artificial Sequence
  Description of Artificial Sequence: Synthetic oligonucleotide
  Target: LAMA2; (-) strand; PAM type: NRG; PAM sequence: AGG
acagcggaaaatattaatta

SEQ ID NO: 115332 - DNA, 20 bp, Artificial Sequence
  Description of Artificial Sequence: Synthetic oligonucleotide
  Target: LAMA2; (-) strand; PAM type: NRG; PAM sequence: AAG
aacagcggaaaatattaatt

SEQ ID NO: 115333 - DNA, 20 bp, Artificial Sequence
  Description of Artificial Sequence: Synthetic oligonucleotide
  Target: LAMA2; (-) strand; PAM type: NRG; PAM sequence: CGG
aaaatacctacttcaaacag

SEQ ID NO: 115334 - DNA, 20 bp, Artificial Sequence
  Description of Artificial Sequence: Synthetic oligonucleotide
  Target: LAMA2; (-) strand; PAM type: NRG; PAM sequence: CAG
ataaaaatacctacttcaaa

SEQ ID NO: 115335 - DNA, 20 bp, Artificial Sequence
  Description of Artificial Sequence: Synthetic oligonucleotide
  Target: LAMA2; (-) strand; PAM type: NRG; PAM sequence: GAG
tttcattcatttataagatg

SEQ ID NO: 115336 - DNA, 20 bp, Artificial Sequence
  Description of Artificial Sequence: Synthetic oligonucleotide
  Target: LAMA2; (-) strand; PAM type: NRG; PAM sequence: TGG
catttcattcatttataaga

SEQ ID NO: 115337 - DNA, 20 bp, Artificial Sequence
  Description of Artificial Sequence: Synthetic oligonucleotide
  Target: LAMA2; (-) strand; PAM type: NRG; PAM sequence: AAG
ggtccatttcattcatttat

SEQ ID NO: 115338 - DNA, 20 bp, Artificial Sequence
  Description of Artificial Sequence: Synthetic oligonucleotide
  Target: LAMA2; (-) strand; PAM type: NRG; PAM sequence: AGG
caagttatttaatcatgctc

SEQ ID NO: 115339 - DNA, 20 bp, Artificial Sequence
  Description of Artificial Sequence: Synthetic oligonucleotide
  Target: LAMA2; (-) strand; PAM type: NRG; PAM sequence: CAG
gcaagttatttaatcatgct

SEQ ID NO: 115340 - DNA, 20 bp, Artificial Sequence
  Description of Artificial Sequence: Synthetic oligonucleotide
  Target: LAMA2; (-) strand; PAM type: NRG; PAM sequence: AAG
ctagctgtgtgaccttgggc

SEQ ID NO: 115341 - DNA, 20 bp, Artificial Sequence
  Description of Artificial Sequence: Synthetic oligonucleotide
  Target: LAMA2; (-) strand; PAM type: NRG; PAM sequence: GGG
cttactagctgtgtgacctt

SEQ ID NO: 115342 - DNA, 20 bp, Artificial Sequence
  Description of Artificial Sequence: Synthetic oligonucleotide
  Target: LAMA2; (-) strand; PAM type: NRG; PAM sequence: TGG
gcttactagctgtgtgacct

SEQ ID NO: 115343 - DNA, 20 bp, Artificial Sequence
  Description of Artificial Sequence: Synthetic oligonucleotide
  Target: LAMA2; (-) strand; PAM type: NRG; PAM sequence: TAG
gtactagtgtggaagcttac

SEQ ID NO: 115344 - DNA, 20 bp, Artificial Sequence
  Description of Artificial Sequence: Synthetic oligonucleotide
  Target: LAMA2; (-) strand; PAM type: NRG; PAM sequence: AAG
ggaattaagtactagtgtgg

SEQ ID NO: 115345 - DNA, 20 bp, Artificial Sequence
  Description of Artificial Sequence: Synthetic oligonucleotide
  Target: LAMA2; (-) strand; PAM type: NRG; PAM sequence: TGG
actggaattaagtactagtg

SEQ ID NO: 115346 - DNA, 20 bp, Artificial Sequence
  Description of Artificial Sequence: Synthetic oligonucleotide
  Target: LAMA2; (-) strand; PAM type: NRG; PAM sequence: TAG
aacatactggaattaagtac

SEQ ID NO: 115347 - DNA, 20 bp, Artificial Sequence
  Description of Artificial Sequence: Synthetic oligonucleotide
  Target: LAMA2; (-) strand; PAM type: NRG; PAM sequence: AAG
aggaggaacatactggaatt

SEQ ID NO: 115348 - DNA, 20 bp, Artificial Sequence
  Description of Artificial Sequence: Synthetic oligonucleotide
  Target: LAMA2; (-) strand; PAM type: NRG; PAM sequence: TGG
ggctttcaggaggaacatac

SEQ ID NO: 115349 - DNA, 20 bp, Artificial Sequence
  Description of Artificial Sequence: Synthetic oligonucleotide
  Target: LAMA2; (-) strand; PAM type: NRG; PAM sequence: AGG
aatgagtgtgggctttcagg

SEQ ID NO: 115350 - DNA, 20 bp, Artificial Sequence
  Description of Artificial Sequence: Synthetic oligonucleotide
  Target: LAMA2; (-) strand; PAM type: NRG; PAM sequence: GAG
gaatgagtgtgggctttcag

SEQ ID NO: 115351 - DNA, 20 bp, Artificial Sequence
  Description of Artificial Sequence: Synthetic oligonucleotide
  Target: LAMA2; (-) strand; PAM type: NRG; PAM sequence: AGG
gagaatgagtgtgggctttc

SEQ ID NO: 115352 - DNA, 20 bp, Artificial Sequence
  Description of Artificial Sequence: Synthetic oligonucleotide
  Target: LAMA2; (-) strand; PAM type: NRG; PAM sequence: CAG
ggagaatgagtgtgggcttt

SEQ ID NO: 115353 - DNA, 20 bp, Artificial Sequence
  Description of Artificial Sequence: Synthetic oligonucleotide
  Target: LAMA2; (-) strand; PAM type: NRG; PAM sequence: GGG
tggtgatggagaatgagtgt

SEQ ID NO: 115354 - DNA, 20 bp, Artificial Sequence
  Description of Artificial Sequence: Synthetic oligonucleotide
  Target: LAMA2; (-) strand; PAM type: NRG; PAM sequence: TGG
gtggtgatggagaatgagtg

SEQ ID NO: 115355 - DNA, 20 bp, Artificial Sequence
  Description of Artificial Sequence: Synthetic oligonucleotide
  Target: LAMA2; (-) strand; PAM type: NRG; PAM sequence: GAG
acagggtggtgatggagaat

SEQ ID NO: 115356 - DNA, 20 bp, Artificial Sequence
  Description of Artificial Sequence: Synthetic oligonucleotide
  Target: LAMA2; (-) strand; PAM type: NRG; PAM sequence: GAG
caattcacagggtggtgatg

SEQ ID NO: 115357 - DNA, 20 bp, Artificial Sequence
  Description of Artificial Sequence: Synthetic oligonucleotide
  Target: LAMA2; (-) strand; PAM type: NRG; PAM sequence: TGG
accaattcacagggtggtga

SEQ ID NO: 115358 - DNA, 20 bp, Artificial Sequence
  Description of Artificial Sequence: Synthetic oligonucleotide
  Target: LAMA2; (-) strand; PAM type: NRG; PAM sequence: TGG
ttttaaaccaattcacaggg

SEQ ID NO: 115359 - DNA, 20 bp, Artificial Sequence
  Description of Artificial Sequence: Synthetic oligonucleotide
  Target: LAMA2; (-) strand; PAM type: NRG; PAM sequence: GGG
tttttttaaaccaattcaca

SEQ ID NO: 115360 - DNA, 20 bp, Artificial Sequence
  Description of Artificial Sequence: Synthetic oligonucleotide
  Target: LAMA2; (-) strand; PAM type: NRG; PAM sequence: AGG
ttttttttaaaccaattcac

SEQ ID NO: 115361 - DNA, 20 bp, Artificial Sequence
  Description of Artificial Sequence: Synthetic oligonucleotide
  Target: LAMA2; (-) strand; PAM type: NRG; PAM sequence: CAG
attttttttaaaccaattca

SEQ ID NO: 115362 - DNA, 20 bp, Artificial Sequence
  Description of Artificial Sequence: Synthetic oligonucleotide
  Target: LAMA2; (-) strand; PAM type: NRG; PAM sequence: TAG
ttctgccacaaggaccatca

SEQ ID NO: 115363 - DNA, 20 bp, Artificial Sequence
  Description of Artificial Sequence: Synthetic oligonucleotide
  Target: LAMA2; (-) strand; PAM type: NRG; PAM sequence: AGG
tgtagtgtggttctgccaca

SEQ ID NO: 115364 - DNA, 20 bp, Artificial Sequence
  Description of Artificial Sequence: Synthetic oligonucleotide
  Target: LAMA2; (-) strand; PAM type: NRG; PAM sequence: AAG
ctgtagtgtggttctgccac

SEQ ID NO: 115365 - DNA, 20 bp, Artificial Sequence
  Description of Artificial Sequence: Synthetic oligonucleotide
  Target: LAMA2; (-) strand; PAM type: NRG; PAM sequence: TGG
tgtagcctctctctgtagtg

SEQ ID NO: 115366 - DNA, 20 bp, Artificial Sequence
  Description of Artificial Sequence: Synthetic oligonucleotide
  Target: LAMA2; (-) strand; PAM type: NRG; PAM sequence: TAG
tctggtgtagcctctctctg

SEQ ID NO: 115367 - DNA, 20 bp, Artificial Sequence
  Description of Artificial Sequence: Synthetic oligonucleotide
  Target: LAMA2; (-) strand; PAM type: NRG; PAM sequence: TAG
aggccttcctctttctggtg

SEQ ID NO: 115368 - DNA, 20 bp, Artificial Sequence
  Description of Artificial Sequence: Synthetic oligonucleotide
  Target: LAMA2; (-) strand; PAM type: NRG; PAM sequence: TGG
gctagaggccttcctctttc

SEQ ID NO: 115369 - DNA, 20 bp, Artificial Sequence
  Description of Artificial Sequence: Synthetic oligonucleotide
  Target: LAMA2; (-) strand; PAM type: NRG; PAM sequence: AGG
ttagaattttaaaaagctag

SEQ ID NO: 115370 - DNA, 20 bp, Artificial Sequence
  Description of Artificial Sequence: Synthetic oligonucleotide
  Target: LAMA2; (-) strand; PAM type: NRG; PAM sequence: GAG
attagaattttaaaaagcta

SEQ ID NO: 115371 - DNA, 20 bp, Artificial Sequence
  Description of Artificial Sequence: Synthetic oligonucleotide
  Target: LAMA2; (-) strand; PAM type: NRG; PAM sequence: TAG
tgattagaattttaaaaagc

SEQ ID NO: 115372 - DNA, 20 bp, Artificial Sequence
  Description of Artificial Sequence: Synthetic oligonucleotide
  Target: LAMA2; (-) strand; PAM type: NRG; PAM sequence: AAG
ttcttgattagaattttaaa

SEQ ID NO: 115373 - DNA, 20 bp, Artificial Sequence
  Description of Artificial Sequence: Synthetic oligonucleotide
  Target: LAMA2; (-) strand; PAM type: NRG; PAM sequence: TAG
agtaaatctctgttcttgat

SEQ ID NO: 115374 - DNA, 20 bp, Artificial Sequence
  Description of Artificial Sequence: Synthetic oligonucleotide
  Target: LAMA2; (-) strand; PAM type: NRG; PAM sequence: GAG
tgttaaagattgtccaagga

SEQ ID NO: 115375 - DNA, 20 bp, Artificial Sequence
  Description of Artificial Sequence: Synthetic oligonucleotide
  Target: LAMA2; (-) strand; PAM type: NRG; PAM sequence: GAG
tctgttaaagattgtccaag

SEQ ID NO: 115376 - DNA, 20 bp, Artificial Sequence
  Description of Artificial Sequence: Synthetic oligonucleotide
  Target: LAMA2; (-) strand; PAM type: NRG; PAM sequence: AGG
cctctgttaaagattgtcca

SEQ ID NO: 115377 - DNA, 20 bp, Artificial Sequence
  Description of Artificial Sequence: Synthetic oligonucleotide
  Target: LAMA2; (-) strand; PAM type: NRG; PAM sequence: AAG
gcctctgttaaagattgtcc

SEQ ID NO: 115378 - DNA, 20 bp, Artificial Sequence
  Description of Artificial Sequence: Synthetic oligonucleotide
  Target: LAMA2; (-) strand; PAM type: NRG; PAM sequence: AAG
aaggatataagcctctgtta

SEQ ID NO: 115379 - DNA, 20 bp, Artificial Sequence
  Description of Artificial Sequence: Synthetic oligonucleotide
  Target: LAMA2; (-) strand; PAM type: NRG; PAM sequence: AAG
aaggttttaatgaaggatat

SEQ ID NO: 115380 - DNA, 20 bp, Artificial Sequence
  Description of Artificial Sequence: Synthetic oligonucleotide
  Target: LAMA2; (-) strand; PAM type: NRG; PAM sequence: AGG
ggcttctaaggttttaatga

SEQ ID NO: 115381 - DNA, 20 bp, Artificial Sequence
  Description of Artificial Sequence: Synthetic oligonucleotide
  Target: LAMA2; (-) strand; PAM type: NRG; PAM sequence: AAG
gggcttctaaggttttaatg

SEQ ID NO: 115382 - DNA, 20 bp, Artificial Sequence
  Description of Artificial Sequence: Synthetic oligonucleotide
  Target: LAMA2; (-) strand; PAM type: NRG; PAM sequence: AGG
atgatatcacagggcttcta

SEQ ID NO: 115383 - DNA, 20 bp, Artificial Sequence
  Description of Artificial Sequence: Synthetic oligonucleotide
  Target: LAMA2; (-) strand; PAM type: NRG; PAM sequence: AAG
catgatatcacagggcttct

SEQ ID NO: 115384 - DNA, 20 bp, Artificial Sequence
  Description of Artificial Sequence: Synthetic oligonucleotide
  Target: LAMA2; (-) strand; PAM type: NRG; PAM sequence: GGG
cttagcaacatgatatcaca

SEQ ID NO: 115385 - DNA, 20 bp, Artificial Sequence
  Description of Artificial Sequence: Synthetic oligonucleotide
  Target: LAMA2; (-) strand; PAM type: NRG; PAM sequence: AGG
tcttagcaacatgatatcac

SEQ ID NO: 115386 - DNA, 20 bp, Artificial Sequence
  Description of Artificial Sequence: Synthetic oligonucleotide
  Target: LAMA2; (-) strand; PAM type: NRG; PAM sequence: CAG
ttcttagcaacatgatatca

SEQ ID NO: 115387 - DNA, 20 bp, Artificial Sequence
  Description of Artificial Sequence: Synthetic oligonucleotide
  Target: LAMA2; (-) strand; PAM type: NRG; PAM sequence: TAG
agctgaaagcagcctcttct

SEQ ID NO: 115388 - DNA, 20 bp, Artificial Sequence
  Description of Artificial Sequence: Synthetic oligonucleotide
  Target: LAMA2; (-) strand; PAM type: NRG; PAM sequence: CAG
ttttcccctttagctgaaag

SEQ ID NO: 115389 - DNA, 20 bp, Artificial Sequence
  Description of Artificial Sequence: Synthetic oligonucleotide
  Target: LAMA2; (-) strand; PAM type: NRG; PAM sequence: AAG
tctttttcccctttagctga

SEQ ID NO: 115390 - DNA, 20 bp, Artificial Sequence
  Description of Artificial Sequence: Synthetic oligonucleotide
  Target: LAMA2; (-) strand; PAM type: NRG; PAM sequence: TAG
cctacactctttttcccctt

SEQ ID NO: 115391 - DNA, 20 bp, Artificial Sequence
  Description of Artificial Sequence: Synthetic oligonucleotide
  Target: LAMA2; (-) strand; PAM type: NRG; PAM sequence: AAG
ggtatgtgtgactcactgag

SEQ ID NO: 115392 - DNA, 20 bp, Artificial Sequence
  Description of Artificial Sequence: Synthetic oligonucleotide
  Target: LAMA2; (-) strand; PAM type: NRG; PAM sequence: GAG
ccgggtatgtgtgactcact

SEQ ID NO: 115393 - DNA, 20 bp, Artificial Sequence
  Description of Artificial Sequence: Synthetic oligonucleotide
  Target: LAMA2; (-) strand; PAM type: NRG; PAM sequence: GGG
tcagaaaaccactcacttcc

SEQ ID NO: 115394 - DNA, 20 bp, Artificial Sequence
  Description of Artificial Sequence: Synthetic oligonucleotide
  Target: LAMA2; (-) strand; PAM type: NRG; PAM sequence: CGG
ttcagaaaaccactcacttc

SEQ ID NO: 115395 - DNA, 20 bp, Artificial Sequence
  Description of Artificial Sequence: Synthetic oligonucleotide
  Target: LAMA2; (-) strand; PAM type: NRG; PAM sequence: CAG
gtttcctgagacgagaattt

SEQ ID NO: 115396 - DNA, 20 bp, Artificial Sequence
  Description of Artificial Sequence: Synthetic oligonucleotide
  Target: LAMA2; (-) strand; PAM type: NRG; PAM sequence: GAG
tgtcggtggtttcctgagac

SEQ ID NO: 115397 - DNA, 20 bp, Artificial Sequence
  Description of Artificial Sequence: Synthetic oligonucleotide
  Target: LAMA2; (-) strand; PAM type: NRG; PAM sequence: GAG
aagagtgtcggtggtttcct

SEQ ID NO: 115398 - DNA, 20 bp, Artificial Sequence
  Description of Artificial Sequence: Synthetic oligonucleotide
  Target: LAMA2; (-) strand; PAM type: NRG; PAM sequence: TGG
ttccttgctaagagtgtcgg

SEQ ID NO: 115399 - DNA, 20 bp, Artificial Sequence
  Description of Artificial Sequence: Synthetic oligonucleotide
  Target: LAMA2; (-) strand; PAM type: NRG; PAM sequence: CGG
agcttccttgctaagagtgt

SEQ ID NO: 115400 - DNA, 20 bp, Artificial Sequence
  Description of Artificial Sequence: Synthetic oligonucleotide
  Target: LAMA2; (-) strand; PAM type: NRG; PAM sequence: GAG
aggttcagcttccttgctaa

SEQ ID NO: 115401 - DNA, 20 bp, Artificial Sequence
  Description of Artificial Sequence: Synthetic oligonucleotide
  Target: LAMA2; (-) strand; PAM type: NRG; PAM sequence: AAG
ggaggttcagcttccttgct

SEQ ID NO: 115402 - DNA, 20 bp, Artificial Sequence
  Description of Artificial Sequence: Synthetic oligonucleotide
  Target: LAMA2; (-) strand; PAM type: NRG; PAM sequence: CAG
ttggcaaaacccaggaggtt

SEQ ID NO: 115403 - DNA, 20 bp, Artificial Sequence
  Description of Artificial Sequence: Synthetic oligonucleotide
  Target: LAMA2; (-) strand; PAM type: NRG; PAM sequence: AGG
atgtgttggcaaaacccagg

SEQ ID NO: 115404 - DNA, 20 bp, Artificial Sequence
  Description of Artificial Sequence: Synthetic oligonucleotide
  Target: LAMA2; (-) strand; PAM type: NRG; PAM sequence: GAG
aatgtgttggcaaaacccag

SEQ ID NO: 115405 - DNA, 20 bp, Artificial Sequence
  Description of Artificial Sequence: Synthetic oligonucleotide
  Target: LAMA2; (-) strand; PAM type: NRG; PAM sequence: AGG
aaaatgtgttggcaaaaccc

SEQ ID NO: 115406 - DNA, 20 bp, Artificial Sequence
  Description of Artificial Sequence: Synthetic oligonucleotide
  Target: LAMA2; (-) strand; PAM type: NRG; PAM sequence: CAG
aaaaatgtgttggcaaaacc

SEQ ID NO: 115407 - DNA, 20 bp, Artificial Sequence
  Description of Artificial Sequence: Synthetic oligonucleotide
  Target: LAMA2; (-) strand; PAM type: NRG; PAM sequence: TGG
caaactatggaaaaatgtgt

SEQ ID NO: 115408 - DNA, 20 bp, Artificial Sequence
  Description of Artificial Sequence: Synthetic oligonucleotide
  Target: LAMA2; (-) strand; PAM type: NRG; PAM sequence: TGG
tttctttctttaccaaacta

SEQ ID NO: 115409 - DNA, 20 bp, Artificial Sequence
  Description of Artificial Sequence: Synthetic oligonucleotide
  Target: LAMA2; (-) strand; PAM type: NRG; PAM sequence: AGG
ggggaaatgacatacttttg

SEQ ID NO: 115410 - DNA, 20 bp, Artificial Sequence
  Description of Artificial Sequence: Synthetic oligonucleotide
  Target: LAMA2; (-) strand; PAM type: NRG; PAM sequence: GAG
gggggaaatgacatactttt

SEQ ID NO: 115411 - DNA, 20 bp, Artificial Sequence
  Description of Artificial Sequence: Synthetic oligonucleotide
  Target: LAMA2; (-) strand; PAM type: NRG; PAM sequence: GGG
agtttcaaagagaaaatagg

SEQ ID NO: 115412 - DNA, 20 bp, Artificial Sequence
  Description of Artificial Sequence: Synthetic oligonucleotide
  Target: LAMA2; (-) strand; PAM type: NRG; PAM sequence: GGG
tagtttcaaagagaaaatag

SEQ ID NO: 115413 - DNA, 20 bp, Artificial Sequence
  Description of Artificial Sequence: Synthetic oligonucleotide
  Target: LAMA2; (-) strand; PAM type: NRG; PAM sequence: GGG
ttagtttcaaagagaaaata

SEQ ID NO: 115414 - DNA, 20 bp, Artificial Sequence
  Description of Artificial Sequence: Synthetic oligonucleotide
  Target: LAMA2; (-) strand; PAM type: NRG; PAM sequence: AGG
tttagtttcaaagagaaaat

SEQ ID NO: 115415 - DNA, 20 bp, Artificial Sequence
  Description of Artificial Sequence: Synthetic oligonucleotide
  Target: LAMA2; (-) strand; PAM type: NRG; PAM sequence: TAG
atttagtttcaaagagaaaa

SEQ ID NO: 115416 - DNA, 20 bp, Artificial Sequence
  Description of Artificial Sequence: Synthetic oligonucleotide
  Target: LAMA2; (-) strand; PAM type: NRG; PAM sequence: GAG
cggtaaaatttagtttcaaa

SEQ ID NO: 115417 - DNA, 20 bp, Artificial Sequence
  Description of Artificial Sequence: Synthetic oligonucleotide
  Target: LAMA2; (-) strand; PAM type: NRG; PAM sequence: AAG
accggtaaaatttagtttca

SEQ ID NO: 115418 - DNA, 20 bp, Artificial Sequence
  Description of Artificial Sequence: Synthetic oligonucleotide
  Target: LAMA2; (-) strand; PAM type: NRG; PAM sequence: TAG
aagaagggaccggtaaaatt

SEQ ID NO: 115419 - DNA, 20 bp, Artificial Sequence
  Description of Artificial Sequence: Synthetic oligonucleotide
  Target: LAMA2; (-) strand; PAM type: NRG; PAM sequence: CGG
taagggggtgaagaagggac

SEQ ID NO: 115420 - DNA, 20 bp, Artificial Sequence
  Description of Artificial Sequence: Synthetic oligonucleotide
  Target: LAMA2; (-) strand; PAM type: NRG; PAM sequence: GGG
actgttaagggggtgaagaa

SEQ ID NO: 115421 - DNA, 20 bp, Artificial Sequence
  Description of Artificial Sequence: Synthetic oligonucleotide
  Target: LAMA2; (-) strand; PAM type: NRG; PAM sequence: AGG
cactgttaagggggtgaaga

SEQ ID NO: 115422 - DNA, 20 bp, Artificial Sequence
  Description of Artificial Sequence: Synthetic oligonucleotide
  Target: LAMA2; (-) strand; PAM type: NRG; PAM sequence: AAG
tcactgttaagggggtgaag

SEQ ID NO: 115423 - DNA, 20 bp, Artificial Sequence
  Description of Artificial Sequence: Synthetic oligonucleotide
  Target: LAMA2; (-) strand; PAM type: NRG; PAM sequence: AAG
acgtcactgttaagggggtg

SEQ ID NO: 115424 - DNA, 20 bp, Artificial Sequence
  Description of Artificial Sequence: Synthetic oligonucleotide
  Target: LAMA2; (-) strand; PAM type: NRG; PAM sequence: GGG
caaaaacgtcactgttaagg

SEQ ID NO: 115425 - DNA, 20 bp, Artificial Sequence
  Description of Artificial Sequence: Synthetic oligonucleotide
  Target: LAMA2; (-) strand; PAM type: NRG; PAM sequence: GGG
tcaaaaacgtcactgttaag

SEQ ID NO: 115426 - DNA, 20 bp, Artificial Sequence
  Description of Artificial Sequence: Synthetic oligonucleotide
  Target: LAMA2; (-) strand; PAM type: NRG; PAM sequence: GGG
ctcaaaaacgtcactgttaa

SEQ ID NO: 115427 - DNA, 20 bp, Artificial Sequence
  Description of Artificial Sequence: Synthetic oligonucleotide
  Target: LAMA2; (-) strand; PAM type: NRG; PAM sequence: AGG
gctcaaaaacgtcactgtta

SEQ ID NO: 115428 - DNA, 20 bp, Artificial Sequence
  Description of Artificial Sequence: Synthetic oligonucleotide
  Target: LAMA2; (-) strand; PAM type: NRG; PAM sequence: AAG
ggctcaaaaacgtcactgtt

SEQ ID NO: 115429 - DNA, 20 bp, Artificial Sequence
  Description of Artificial Sequence: Synthetic oligonucleotide
  Target: LAMA2; (-) strand; PAM type: NRG; PAM sequence: TGG
acaaaaaatggatttcgctg

SEQ ID NO: 115430 - DNA, 20 bp, Artificial Sequence
  Description of Artificial Sequence: Synthetic oligonucleotide
  Target: LAMA2; (-) strand; PAM type: NRG; PAM sequence: TGG
taagagaaagggacaaaaaa

SEQ ID NO: 115431 - DNA, 20 bp, Artificial Sequence
  Description of Artificial Sequence: Synthetic oligonucleotide
  Target: LAMA2; (-) strand; PAM type: NRG; PAM sequence: GGG
taattcaaaagtaagagaaa

SEQ ID NO: 115432 - DNA, 20 bp, Artificial Sequence
  Description of Artificial Sequence: Synthetic oligonucleotide
  Target: LAMA2; (-) strand; PAM type: NRG; PAM sequence: AGG
ataattcaaaagtaagagaa

SEQ ID NO: 115433 - DNA, 20 bp, Artificial Sequence
  Description of Artificial Sequence: Synthetic oligonucleotide
  Target: LAMA2; (-) strand; PAM type: NRG; PAM sequence: AAG
gataattcaaaagtaagaga

SEQ ID NO: 115434 - DNA, 20 bp, Artificial Sequence
  Description of Artificial Sequence: Synthetic oligonucleotide
  Target: LAMA2; (-) strand; PAM type: NRG; PAM sequence: GAG
gtaagataattcaaaagtaa

SEQ ID NO: 115435 - DNA, 20 bp, Artificial Sequence
  Description of Artificial Sequence: Synthetic oligonucleotide
  Target: LAMA2; (-) strand; PAM type: NRG; PAM sequence: AAG
aagtaagataattcaaaagt

SEQ ID NO: 115436 - DNA, 20 bp, Artificial Sequence
  Description of Artificial Sequence: Synthetic oligonucleotide
  Target: LAMA2; (-) strand; PAM type: NRG; PAM sequence: AAG
ttacaagtaagataattcaa

SEQ ID NO: 115437 - DNA, 20 bp, Artificial Sequence
  Description of Artificial Sequence: Synthetic oligonucleotide
  Target: LAMA2; (-) strand; PAM type: NRG; PAM sequence: AAG
tgaattggcactttacaagt

SEQ ID NO: 115438 - DNA, 20 bp, Artificial Sequence
  Description of Artificial Sequence: Synthetic oligonucleotide
  Target: LAMA2; (-) strand; PAM type: NRG; PAM sequence: AAG
gctctgaattggcactttac

SEQ ID NO: 115439 - DNA, 20 bp, Artificial Sequence
  Description of Artificial Sequence: Synthetic oligonucleotide
  Target: LAMA2; (-) strand; PAM type: NRG; PAM sequence: TGG
agggtaaagatgctctgaat

SEQ ID NO: 115440 - DNA, 20 bp, Artificial Sequence
  Description of Artificial Sequence: Synthetic oligonucleotide
  Target: LAMA2; (-) strand; PAM type: NRG; PAM sequence: AAG
aaaaacaataagccagggta

SEQ ID NO: 115441 - DNA, 20 bp, Artificial Sequence
  Description of Artificial Sequence: Synthetic oligonucleotide
  Target: LAMA2; (-) strand; PAM type: NRG; PAM sequence: GGG
ctggaaaaaacaataagcca

SEQ ID NO: 115442 - DNA, 20 bp, Artificial Sequence
  Description of Artificial Sequence: Synthetic oligonucleotide
  Target: LAMA2; (-) strand; PAM type: NRG; PAM sequence: AGG
actggaaaaaacaataagcc

SEQ ID NO: 115443 - DNA, 20 bp, Artificial Sequence
  Description of Artificial Sequence: Synthetic oligonucleotide
  Target: LAMA2; (-) strand; PAM type: NRG; PAM sequence: CAG
aactggaaaaaacaataagc

SEQ ID NO: 115444 - DNA, 20 bp, Artificial Sequence
  Description of Artificial Sequence: Synthetic oligonucleotide
  Target: LAMA2; (-) strand; PAM type: NRG; PAM sequence: AAG
gtagaactggaaaaaacaat

SEQ ID NO: 115445 - DNA, 20 bp, Artificial Sequence
  Description of Artificial Sequence: Synthetic oligonucleotide
  Target: LAMA2; (-) strand; PAM type: NRG; PAM sequence: TGG
agtaaaaccacatgtagaac

SEQ ID NO: 115446 - DNA, 20 bp, Artificial Sequence
  Description of Artificial Sequence: Synthetic oligonucleotide
  Target: LAMA2; (-) strand; PAM type: NRG; PAM sequence: TAG
taaagaagtaaaaccacatg

SEQ ID NO: 115447 - DNA, 20 bp, Artificial Sequence
  Description of Artificial Sequence: Synthetic oligonucleotide
  Target: LAMA2; (-) strand; PAM type: NRG; PAM sequence: AAG
tcttacttgactttataaag

SEQ ID NO: 115448 - DNA, 20 bp, Artificial Sequence
  Description of Artificial Sequence: Synthetic oligonucleotide
  Target: LAMA2; (-) strand; PAM type: NRG; PAM sequence: AAG
ccctcttacttgactttata

SEQ ID NO: 115449 - DNA, 20 bp, Artificial Sequence
  Description of Artificial Sequence: Synthetic oligonucleotide
  Target: LAMA2; (-) strand; PAM type: NRG; PAM sequence: AAG
ggatggaaacctcagtccta

SEQ ID NO: 115450 - DNA, 20 bp, Artificial Sequence
  Description of Artificial Sequence: Synthetic oligonucleotide
  Target: LAMA2; (-) strand; PAM type: NRG; PAM sequence: CAG
gagtacttggatggaaacct

SEQ ID NO: 115451 - DNA, 20 bp, Artificial Sequence
  Description of Artificial Sequence: Synthetic oligonucleotide
  Target: LAMA2; (-) strand; PAM type: NRG; PAM sequence: TGG
agaaaaccggagtacttgga

SEQ ID NO: 115452 - DNA, 20 bp, Artificial Sequence
  Description of Artificial Sequence: Synthetic oligonucleotide
  Target: LAMA2; (-) strand; PAM type: NRG; PAM sequence: TGG
ggagagaaaaccggagtact

SEQ ID NO: 115453 - DNA, 20 bp, Artificial Sequence
  Description of Artificial Sequence: Synthetic oligonucleotide
  Target: LAMA2; (-) strand; PAM type: NRG; PAM sequence: GAG
catatctggagagaaaaccg

SEQ ID NO: 115454 - DNA, 20 bp, Artificial Sequence
  Description of Artificial Sequence: Synthetic oligonucleotide
  Target: LAMA2; (-) strand; PAM type: NRG; PAM sequence: CGG
ttcatatctggagagaaaac

SEQ ID NO: 115455 - DNA, 20 bp, Artificial Sequence
  Description of Artificial Sequence: Synthetic oligonucleotide
  Target: LAMA2; (-) strand; PAM type: NRG; PAM sequence: GAG
aaacttacttcatatctgga

SEQ ID NO: 115456 - DNA, 20 bp, Artificial Sequence
  Description of Artificial Sequence: Synthetic oligonucleotide
  Target: LAMA2; (-) strand; PAM type: NRG; PAM sequence: GAG
gaaaacttacttcatatctg

SEQ ID NO: 115457 - DNA, 20 bp, Artificial Sequence
  Description of Artificial Sequence: Synthetic oligonucleotide
  Target: LAMA2; (-) strand; PAM type: NRG; PAM sequence: TGG
ctgaaaacttacttcatatc

SEQ ID NO: 115458 - DNA, 20 bp, Artificial Sequence
  Description of Artificial Sequence: Synthetic oligonucleotide
  Target: LAMA2; (-) strand; PAM type: NRG; PAM sequence: TGG
actagcctggggatcatgaa

SEQ ID NO: 115459 - DNA, 20 bp, Artificial Sequence
  Description of Artificial Sequence: Synthetic oligonucleotide
  Target: LAMA2; (-) strand; PAM type: NRG; PAM sequence: GGG
aagcattagtcactagcctg

SEQ ID NO: 115460 - DNA, 20 bp, Artificial Sequence
  Description of Artificial Sequence: Synthetic oligonucleotide
  Target: LAMA2; (-) strand; PAM type: NRG; PAM sequence: GGG
taagcattagtcactagcct

SEQ ID NO: 115461 - DNA, 20 bp, Artificial Sequence
  Description of Artificial Sequence: Synthetic oligonucleotide
  Target: LAMA2; (-) strand; PAM type: NRG; PAM sequence: TGG
ataagcattagtcactagcc

SEQ ID NO: 115462 - DNA, 20 bp, Artificial Sequence
  Description of Artificial Sequence: Synthetic oligonucleotide
  Target: LAMA2; (-) strand; PAM type: NRG; PAM sequence: TAG
tagtcataagcattagtcac

SEQ ID NO: 115463 - DNA, 20 bp, Artificial Sequence
  Description of Artificial Sequence: Synthetic oligonucleotide
  Target: LAMA2; (-) strand; PAM type: NRG; PAM sequence: TAG
gtgctattagtcataagcat

SEQ ID NO: 115464 - DNA, 20 bp, Artificial Sequence
  Description of Artificial Sequence: Synthetic oligonucleotide
  Target: LAMA2; (-) strand; PAM type: NRG; PAM sequence: AAG
atcatggtgctattagtcat

SEQ ID NO: 115465 - DNA, 20 bp, Artificial Sequence
  Description of Artificial Sequence: Synthetic oligonucleotide
  Target: LAMA2; (-) strand; PAM type: NRG; PAM sequence: TAG
aacagtcatcatggtgctat

SEQ ID NO: 115466 - DNA, 20 bp, Artificial Sequence
  Description of Artificial Sequence: Synthetic oligonucleotide
  Target: LAMA2; (-) strand; PAM type: NRG; PAM sequence: TGG
ttcggtcttaacagtcatca

SEQ ID NO: 115467 - DNA, 20 bp, Artificial Sequence
  Description of Artificial Sequence: Synthetic oligonucleotide
  Target: LAMA2; (-) strand; PAM type: NRG; PAM sequence: CAG
gttttgagtttcggtcttaa

SEQ ID NO: 115468 - DNA, 20 bp, Artificial Sequence
  Description of Artificial Sequence: Synthetic oligonucleotide
  Target: LAMA2; (-) strand; PAM type: NRG; PAM sequence: CGG
cggaagcaagttttgagttt

SEQ ID NO: 115469 - DNA, 20 bp, Artificial Sequence
  Description of Artificial Sequence: Synthetic oligonucleotide
  Target: LAMA2; (-) strand; PAM type: NRG; PAM sequence: GAG
ttgttccggaagcaagtttt

SEQ ID NO: 115470 - DNA, 20 bp, Artificial Sequence
  Description of Artificial Sequence: Synthetic oligonucleotide
  Target: LAMA2; (-) strand; PAM type: NRG; PAM sequence: AAG
ttctcttttgttccggaagc

SEQ ID NO: 115471 - DNA, 20 bp, Artificial Sequence
  Description of Artificial Sequence: Synthetic oligonucleotide
  Target: LAMA2; (-) strand; PAM type: NRG; PAM sequence: AAG
cattttctcttttgttccgg

SEQ ID NO: 115472 - DNA, 20 bp, Artificial Sequence
  Description of Artificial Sequence: Synthetic oligonucleotide
  Target: LAMA2; (-) strand; PAM type: NRG; PAM sequence: CGG
aggcattttctcttttgttc

SEQ ID NO: 115473 - DNA, 20 bp, Artificial Sequence
  Description of Artificial Sequence: Synthetic oligonucleotide
  Target: LAMA2; (-) strand; PAM type: NRG; PAM sequence: AGG
gttctgatgaaaatgaccaa

SEQ ID NO: 115474 - DNA, 20 bp, Artificial Sequence
  Description of Artificial Sequence: Synthetic oligonucleotide
  Target: LAMA2; (-) strand; PAM type: NRG; PAM sequence: AAG
agttctgatgaaaatgacca

SEQ ID NO: 115475 - DNA, 20 bp, Artificial Sequence
  Description of Artificial Sequence: Synthetic oligonucleotide
  Target: LAMA2; (-) strand; PAM type: NRG; PAM sequence: GAG
aagaatcagaaggagacaaa

SEQ ID NO: 115476 - DNA, 20 bp, Artificial Sequence
  Description of Artificial Sequence: Synthetic oligonucleotide
  Target: LAMA2; (-) strand; PAM type: NRG; PAM sequence: AAG
ccaagaatcagaaggagaca

SEQ ID NO: 115477 - DNA, 20 bp, Artificial Sequence
  Description of Artificial Sequence: Synthetic oligonucleotide
  Target: LAMA2; (-) strand; PAM type: NRG; PAM sequence: GAG
cctgggccaagaatcagaag

SEQ ID NO: 115478 - DNA, 20 bp, Artificial Sequence
  Description of Artificial Sequence: Synthetic oligonucleotide
  Target: LAMA2; (-) strand; PAM type: NRG; PAM sequence: AGG
tccctgggccaagaatcaga

SEQ ID NO: 115479 - DNA, 20 bp, Artificial Sequence
  Description of Artificial Sequence: Synthetic oligonucleotide
  Target: LAMA2; (-) strand; PAM type: NRG; PAM sequence: AAG
atccctgggccaagaatcag

SEQ ID NO: 115480 - DNA, 20 bp, Artificial Sequence
  Description of Artificial Sequence: Synthetic oligonucleotide
  Target: LAMA2; (-) strand; PAM type: NRG; PAM sequence: CAG
tggatccctgggccaagaat

SEQ ID NO: 115481 - DNA, 20 bp, Artificial Sequence
  Description of Artificial Sequence: Synthetic oligonucleotide
  Target: LAMA2; (-) strand; PAM type: NRG; PAM sequence: AAG
aatccttggatccctgggcc

SEQ ID NO: 115482 - DNA, 20 bp, Artificial Sequence
  Description of Artificial Sequence: Synthetic oligonucleotide
  Target: LAMA2; (-) strand; PAM type: NRG; PAM sequence: GGG
acaacaatccttggatccct

SEQ ID NO: 115483 - DNA, 20 bp, Artificial Sequence
  Description of Artificial Sequence: Synthetic oligonucleotide
  Target: LAMA2; (-) strand; PAM type: NRG; PAM sequence: TGG
tacaacaatccttggatccc

SEQ ID NO: 115484 - DNA, 20 bp, Artificial Sequence
  Description of Artificial Sequence: Synthetic oligonucleotide
  Target: LAMA2; (-) strand; PAM type: NRG; PAM sequence: TGG
tacttatttacaacaatcct

SEQ ID NO: 115485 - DNA, 20 bp, Artificial Sequence
  Description of Artificial Sequence: Synthetic oligonucleotide
  Target: LAMA2; (-) strand; PAM type: NRG; PAM sequence: GAG
gaactcacacactgctaatt

SEQ ID NO: 115486 - DNA, 20 bp, Artificial Sequence
  Description of Artificial Sequence: Synthetic oligonucleotide
  Target: LAMA2; (-) strand; PAM type: NRG; PAM sequence: GAG
ttcctaatttgcttatgaga

SEQ ID NO: 115487 - DNA, 20 bp, Artificial Sequence
  Description of Artificial Sequence: Synthetic oligonucleotide
  Target: LAMA2; (-) strand; PAM type: NRG; PAM sequence: GAG
ttttcctaatttgcttatga

SEQ ID NO: 115488 - DNA, 20 bp, Artificial Sequence
  Description of Artificial Sequence: Synthetic oligonucleotide
  Target: LAMA2; (-) strand; PAM type: NRG; PAM sequence: GAG
aattttcctaatttgcttat

SEQ ID NO: 115489 - DNA, 20 bp, Artificial Sequence
  Description of Artificial Sequence: Synthetic oligonucleotide
  Target: LAMA2; (-) strand; PAM type: NRG; PAM sequence: TGG
cttgcaatgattttccttag

SEQ ID NO: 115490 - DNA, 20 bp, Artificial Sequence
  Description of Artificial Sequence: Synthetic oligonucleotide
  Target: LAMA2; (-) strand; PAM type: NRG; PAM sequence: TAG
ttccttgcaatgattttcct

SEQ ID NO: 115491 - DNA, 20 bp, Artificial Sequence
  Description of Artificial Sequence: Synthetic oligonucleotide
  Target: LAMA2; (-) strand; PAM type: NRG; PAM sequence: AGG
ttgaatagaagaggcaggca

SEQ ID NO: 115492 - DNA, 20 bp, Artificial Sequence
  Description of Artificial Sequence: Synthetic oligonucleotide
  Target: LAMA2; (-) strand; PAM type: NRG; PAM sequence: AAG
tttgaatagaagaggcaggc

SEQ ID NO: 115493 - DNA, 20 bp, Artificial Sequence
  Description of Artificial Sequence: Synthetic oligonucleotide
  Target: LAMA2; (-) strand; PAM type: NRG; PAM sequence: AGG
ggcttttgaatagaagaggc

SEQ ID NO: 115494 - DNA, 20 bp, Artificial Sequence
  Description of Artificial Sequence: Synthetic oligonucleotide
  Target: LAMA2; (-) strand; PAM type: NRG; PAM sequence: CAG
tggcttttgaatagaagagg

SEQ ID NO: 115495 - DNA, 20 bp, Artificial Sequence
  Description of Artificial Sequence: Synthetic oligonucleotide
  Target: LAMA2; (-) strand; PAM type: NRG; PAM sequence: AGG
tgatggcttttgaatagaag

SEQ ID NO: 115496 - DNA, 20 bp, Artificial Sequence
  Description of Artificial Sequence: Synthetic oligonucleotide
  Target: LAMA2; (-) strand; PAM type: NRG; PAM sequence: GAG
ctgatggcttttgaatagaa

SEQ ID NO: 115497 - DNA, 20 bp, Artificial Sequence
  Description of Artificial Sequence: Synthetic oligonucleotide
  Target: LAMA2; (-) strand; PAM type: NRG; PAM sequence: AAG
agctgatggcttttgaatag

SEQ ID NO: 115498 - DNA, 20 bp, Artificial Sequence
  Description of Artificial Sequence: Synthetic oligonucleotide
  Target: LAMA2; (-) strand; PAM type: NRG; PAM sequence: TAG
tgtagctgatggcttttgaa

SEQ ID NO: 115499 - DNA, 20 bp, Artificial Sequence
  Description of Artificial Sequence: Synthetic oligonucleotide
  Target: LAMA2; (-) strand; PAM type: NRG; PAM sequence: TGG
tttataaagaatgtagctga

SEQ ID NO: 115500 - DNA, 20 bp, Artificial Sequence
  Description of Artificial Sequence: Synthetic oligonucleotide
  Target: LAMA2; (-) strand; PAM type: NRG; PAM sequence: TAG
agcaccttttataaagaatg

SEQ ID NO: 115501 - DNA, 20 bp, Artificial Sequence
  Description of Artificial Sequence: Synthetic oligonucleotide
  Target: LAMA2; (-) strand; PAM type: NRG; PAM sequence: AAG
cacttaaagcaccttttata

SEQ ID NO: 115502 - DNA, 20 bp, Artificial Sequence
  Description of Artificial Sequence: Synthetic oligonucleotide
  Target: LAMA2; (-) strand; PAM type: NRG; PAM sequence: AAG
gaatcaacagcaaacactta

SEQ ID NO: 115503 - DNA, 20 bp, Artificial Sequence
  Description of Artificial Sequence: Synthetic oligonucleotide
  Target: LAMA2; (-) strand; PAM type: NRG; PAM sequence: CAG
gcttagattgcaggaatcaa

SEQ ID NO: 115504 - DNA, 20 bp, Artificial Sequence
  Description of Artificial Sequence: Synthetic oligonucleotide
  Target: LAMA2; (-) strand; PAM type: NRG; PAM sequence: AGG
ctcctgagagcttagattgc

SEQ ID NO: 115505 - DNA, 20 bp, Artificial Sequence
  Description of Artificial Sequence: Synthetic oligonucleotide
  Target: LAMA2; (-) strand; PAM type: NRG; PAM sequence: CAG
gctcctgagagcttagattg

SEQ ID NO: 115506 - DNA, 20 bp, Artificial Sequence
  Description of Artificial Sequence: Synthetic oligonucleotide
  Target: LAMA2; (-) strand; PAM type: NRG; PAM sequence: TAG
aaaccatgctcctgagagct

SEQ ID NO: 115507 - DNA, 20 bp, Artificial Sequence
  Description of Artificial Sequence: Synthetic oligonucleotide
  Target: LAMA2; (-) strand; PAM type: NRG; PAM sequence: GAG
ggaacaaaccatgctcctga

SEQ ID NO: 115508 - DNA, 20 bp, Artificial Sequence
  Description of Artificial Sequence: Synthetic oligonucleotide
  Target: LAMA2; (-) strand; PAM type: NRG; PAM sequence: GAG
agggaacaaaccatgctcct

SEQ ID NO: 115509 - DNA, 20 bp, Artificial Sequence
  Description of Artificial Sequence: Synthetic oligonucleotide
  Target: LAMA2; (-) strand; PAM type: NRG; PAM sequence: GGG
tggctattatcttcttgcta

SEQ ID NO: 115510 - DNA, 20 bp, Artificial Sequence
  Description of Artificial Sequence: Synthetic oligonucleotide
  Target: LAMA2; (-) strand; PAM type: NRG; PAM sequence: AGG
ctggctattatcttcttgct

SEQ ID NO: 115511 - DNA, 20 bp, Artificial Sequence
  Description of Artificial Sequence: Synthetic oligonucleotide
  Target: LAMA2; (-) strand; PAM type: NRG; PAM sequence: TAG
gctggctattatcttcttgc

SEQ ID NO: 115512 - DNA, 20 bp, Artificial Sequence
  Description of Artificial Sequence: Synthetic oligonucleotide
  Target: LAMA2; (-) strand; PAM type: NRG; PAM sequence: TGG
gggtcttccttgggttgtgc

SEQ ID NO: 115513 - DNA, 20 bp, Artificial Sequence
  Description of Artificial Sequence: Synthetic oligonucleotide
  Target: LAMA2; (-) strand; PAM type: NRG; PAM sequence: GGG
caaagcatggggtcttcctt

SEQ ID NO: 115514 - DNA, 20 bp, Artificial Sequence
  Description of Artificial Sequence: Synthetic oligonucleotide
  Target: LAMA2; (-) strand; PAM type: NRG; PAM sequence: TGG
gcaaagcatggggtcttcct

SEQ ID NO: 115515 - DNA, 20 bp, Artificial Sequence
  Description of Artificial Sequence: Synthetic oligonucleotide
  Target: LAMA2; (-) strand; PAM type: NRG; PAM sequence: GGG
ggcaggtttagcaaagcatg

SEQ ID NO: 115516 - DNA, 20 bp, Artificial Sequence
  Description of Artificial Sequence: Synthetic oligonucleotide
  Target: LAMA2; (-) strand; PAM type: NRG; PAM sequence: GGG
tggcaggtttagcaaagcat

SEQ ID NO: 115517 - DNA, 20 bp, Artificial Sequence
  Description of Artificial Sequence: Synthetic oligonucleotide
  Target: LAMA2; (-) strand; PAM type: NRG; PAM sequence: TGG
ttggcaggtttagcaaagca

SEQ ID NO: 115518 - DNA, 20 bp, Artificial Sequence
  Description of Artificial Sequence: Synthetic oligonucleotide
  Target: LAMA2; (-) strand; PAM type: NRG; PAM sequence: AAG
aagggttggcaggtttagca

SEQ ID NO: 115519 - DNA, 20 bp, Artificial Sequence
  Description of Artificial Sequence: Synthetic oligonucleotide
  Target: LAMA2; (-) strand; PAM type: NRG; PAM sequence: TAG
cgtataagggttggcaggtt

SEQ ID NO: 115520 - DNA, 20 bp, Artificial Sequence
  Description of Artificial Sequence: Synthetic oligonucleotide
  Target: LAMA2; (-) strand; PAM type: NRG; PAM sequence: AGG
ctaaccgtataagggttggc

SEQ ID NO: 115521 - DNA, 20 bp, Artificial Sequence
  Description of Artificial Sequence: Synthetic oligonucleotide
  Target: LAMA2; (-) strand; PAM type: NRG; PAM sequence: CAG
tctaaccgtataagggttgg

SEQ ID NO: 115522 - DNA, 20 bp, Artificial Sequence
  Description of Artificial Sequence: Synthetic oligonucleotide
  Target: LAMA2; (-) strand; PAM type: NRG; PAM sequence: TGG
atgtctaaccgtataagggt

SEQ ID NO: 115523 - DNA, 20 bp, Artificial Sequence
  Description of Artificial Sequence: Synthetic oligonucleotide
  Target: LAMA2; (-) strand; PAM type: NRG; PAM sequence: GGG
agtaatgtctaaccgtataa

SEQ ID NO: 115524 - DNA, 20 bp, Artificial Sequence
  Description of Artificial Sequence: Synthetic oligonucleotide
  Target: LAMA2; (-) strand; PAM type: NRG; PAM sequence: AGG
cagtaatgtctaaccgtata

SEQ ID NO: 115525 - DNA, 20 bp, Artificial Sequence
  Description of Artificial Sequence: Synthetic oligonucleotide
  Target: LAMA2; (-) strand; PAM type: NRG; PAM sequence: AAG
gcagtaatgtctaaccgtat

SEQ ID NO: 115526 - DNA, 20 bp, Artificial Sequence
  Description of Artificial Sequence: Synthetic oligonucleotide
  Target: LAMA2; (-) strand; PAM type: NRG; PAM sequence: CAG
actgaggcttctgcagtgtg

SEQ ID NO: 115527 - DNA, 20 bp, Artificial Sequence
  Description of Artificial Sequence: Synthetic oligonucleotide
  Target: LAMA2; (-) strand; PAM type: NRG; PAM sequence: CAG
tgtgagaactgaggcttctg

SEQ ID NO: 115528 - DNA, 20 bp, Artificial Sequence
  Description of Artificial Sequence: Synthetic oligonucleotide
  Target: LAMA2; (-) strand; PAM type: NRG; PAM sequence: AGG
acatgagcctgtgagaactg

SEQ ID NO: 115529 - DNA, 20 bp, Artificial Sequence
  Description of Artificial Sequence: Synthetic oligonucleotide
  Target: LAMA2; (-) strand; PAM type: NRG; PAM sequence: GAG
cacatgagcctgtgagaact

SEQ ID NO: 115530 - DNA, 20 bp, Artificial Sequence
  Description of Artificial Sequence: Synthetic oligonucleotide
  Target: LAMA2; (-) strand; PAM type: NRG; PAM sequence: GAG
agcccaacacatgagcctgt

SEQ ID NO: 115531 - DNA, 20 bp, Artificial Sequence
  Description of Artificial Sequence: Synthetic oligonucleotide
  Target: LAMA2; (-) strand; PAM type: NRG; PAM sequence: GAG
cgctgtgcagcccaacacat

SEQ ID NO: 115532 - DNA, 20 bp, Artificial Sequence
  Description of Artificial Sequence: Synthetic oligonucleotide
  Target: LAMA2; (-) strand; PAM type: NRG; PAM sequence: CAG
gagctgacaacagcgctgtg

SEQ ID NO: 115533 - DNA, 20 bp, Artificial Sequence
  Description of Artificial Sequence: Synthetic oligonucleotide
  Target: LAMA2; (-) strand; PAM type: NRG; PAM sequence: CAG
gcctcttgtagagctgacaa

SEQ ID NO: 115534 - DNA, 20 bp, Artificial Sequence
  Description of Artificial Sequence: Synthetic oligonucleotide
  Target: LAMA2; (-) strand; PAM type: NRG; PAM sequence: GAG
tgcaacattagcctcttgta

SEQ ID NO: 115535 - DNA, 20 bp, Artificial Sequence
  Description of Artificial Sequence: Synthetic oligonucleotide
  Target: LAMA2; (-) strand; PAM type: NRG; PAM sequence: TAG
actgcaacattagcctcttg

SEQ ID NO: 115536 - DNA, 20 bp, Artificial Sequence
  Description of Artificial Sequence: Synthetic oligonucleotide
  Target: LAMA2; (-) strand; PAM type: NRG; PAM sequence: TAG
gtcatggcgcactgcaacat

SEQ ID NO: 115537 - DNA, 20 bp, Artificial Sequence
  Description of Artificial Sequence: Synthetic oligonucleotide
  Target: LAMA2; (-) strand; PAM type: NRG; PAM sequence: TGG
agtttactgaaaccaggtca

SEQ ID NO: 115538 - DNA, 20 bp, Artificial Sequence
  Description of Artificial Sequence: Synthetic oligonucleotide
  Target: LAMA2; (-) strand; PAM type: NRG; PAM sequence: AGG
cctgaaagtttactgaaacc

SEQ ID NO: 115539 - DNA, 20 bp, Artificial Sequence
  Description of Artificial Sequence: Synthetic oligonucleotide
  Target: LAMA2; (-) strand; PAM type: NRG; PAM sequence: CAG
tcctgaaagtttactgaaac

SEQ ID NO: 115540 - DNA, 20 bp, Artificial Sequence
  Description of Artificial Sequence: Synthetic oligonucleotide
  Target: LAMA2; (-) strand; PAM type: NRG; PAM sequence: AAG
ccctcgttcactcttcctga

SEQ ID NO: 115541 - DNA, 20 bp, Artificial Sequence
  Description of Artificial Sequence: Synthetic oligonucleotide
  Target: LAMA2; (-) strand; PAM type: NRG; PAM sequence: AGG
actaagcaaacgctgttctc

SEQ ID NO: 115542 - DNA, 20 bp, Artificial Sequence
  Description of Artificial Sequence: Synthetic oligonucleotide
  Target: LAMA2; (-) strand; PAM type: NRG; PAM sequence: CAG
cactaagcaaacgctgttct

SEQ ID NO: 115543 - DNA, 20 bp, Artificial Sequence
  Description of Artificial Sequence: Synthetic oligonucleotide
  Target: LAMA2; (-) strand; PAM type: NRG; PAM sequence: AAG
atgcttaggaattctacact

SEQ ID NO: 115544 - DNA, 20 bp, Artificial Sequence
  Description of Artificial Sequence: Synthetic oligonucleotide
  Target: LAMA2; (-) strand; PAM type: NRG; PAM sequence: AGG
ggagccaaaattggatgctt

SEQ ID NO: 115545 - DNA, 20 bp, Artificial Sequence
  Description of Artificial Sequence: Synthetic oligonucleotide
  Target: LAMA2; (-) strand; PAM type: NRG; PAM sequence: TAG
gggagccaaaattggatgct

SEQ ID NO: 115546 - DNA, 20 bp, Artificial Sequence
  Description of Artificial Sequence: Synthetic oligonucleotide
  Target: LAMA2; (-) strand; PAM type: NRG; PAM sequence: TGG
gcttttaagggagccaaaat

SEQ ID NO: 115547 - DNA, 20 bp, Artificial Sequence
  Description of Artificial Sequence: Synthetic oligonucleotide
  Target: LAMA2; (-) strand; PAM type: NRG; PAM sequence: GAG
ctcaaccatagcttttaagg

SEQ ID NO: 115548 - DNA, 20 bp, Artificial Sequence
  Description of Artificial Sequence: Synthetic oligonucleotide
  Target: LAMA2; (-) strand; PAM type: NRG; PAM sequence: GGG
ctctcaaccatagcttttaa

SEQ ID NO: 115549 - DNA, 20 bp, Artificial Sequence
  Description of Artificial Sequence: Synthetic oligonucleotide
  Target: LAMA2; (-) strand; PAM type: NRG; PAM sequence: AGG
cctctcaaccatagctttta

SEQ ID NO: 115550 - DNA, 20 bp, Artificial Sequence
  Description of Artificial Sequence: Synthetic oligonucleotide
  Target: LAMA2; (-) strand; PAM type: NRG; PAM sequence: AAG
ccctctcaaccatagctttt

SEQ ID NO: 115551 - DNA, 20 bp, Artificial Sequence
  Description of Artificial Sequence: Synthetic oligonucleotide
  Target: LAMA2; (-) strand; PAM type: NRG; PAM sequence: TAG
cccttcacccctctcaacca

SEQ ID NO: 115552 - DNA, 20 bp, Artificial Sequence
  Description of Artificial Sequence: Synthetic oligonucleotide
  Target: LAMA2; (-) strand; PAM type: NRG; PAM sequence: TGG
cacatctgattcaatacagt

SEQ ID NO: 115553 - DNA, 20 bp, Artificial Sequence
  Description of Artificial Sequence: Synthetic oligonucleotide
  Target: LAMA2; (-) strand; PAM type: NRG; PAM sequence: CAG
aagtcacatctgattcaata

SEQ ID NO: 115554 - DNA, 20 bp, Artificial Sequence
  Description of Artificial Sequence: Synthetic oligonucleotide
  Target: LAMA2; (-) strand; PAM type: NRG; PAM sequence: AAG
tattaaaaataaacaagtat

SEQ ID NO: 115555 - DNA, 20 bp, Artificial Sequence
  Description of Artificial Sequence: Synthetic oligonucleotide
  Target: LAMA2; (-) strand; PAM type: NRG; PAM sequence: AAG
ataaaatattaaaaataaac

SEQ ID NO: 115556 - DNA, 20 bp, Artificial Sequence
  Description of Artificial Sequence: Synthetic oligonucleotide
  Target: LAMA2; (-) strand; PAM type: NRG; PAM sequence: AAG
tttcatccacttgaactgta

SEQ ID NO: 115557 - DNA, 20 bp, Artificial Sequence
  Description of Artificial Sequence: Synthetic oligonucleotide
  Target: LAMA2; (-) strand; PAM type: NRG; PAM sequence: AGG
cgataggctgttcaactgtc

SEQ ID NO: 115558 - DNA, 20 bp, Artificial Sequence
  Description of Artificial Sequence: Synthetic oligonucleotide
  Target: LAMA2; (-) strand; PAM type: NRG; PAM sequence: CAG
tcgataggctgttcaactgt

SEQ ID NO: 115559 - DNA, 20 bp, Artificial Sequence
  Description of Artificial Sequence: Synthetic oligonucleotide
  Target: LAMA2; (-) strand; PAM type: NRG; PAM sequence: AGG
aaaagctttttaacttcgat

SEQ ID NO: 115560 - DNA, 20 bp, Artificial Sequence
  Description of Artificial Sequence: Synthetic oligonucleotide
  Target: LAMA2; (-) strand; PAM type: NRG; PAM sequence: TAG
gaaaagctttttaacttcga

SEQ ID NO: 115561 - DNA, 20 bp, Artificial Sequence
  Description of Artificial Sequence: Synthetic oligonucleotide
  Target: LAMA2; (-) strand; PAM type: NRG; PAM sequence: AAG
ggtggagcacccccaacgaa

SEQ ID NO: 115562 - DNA, 20 bp, Artificial Sequence
  Description of Artificial Sequence: Synthetic oligonucleotide
  Target: LAMA2; (-) strand; PAM type: NRG; PAM sequence: GAG
ggaaggttgaaattcaggtg

SEQ ID NO: 115563 - DNA, 20 bp, Artificial Sequence
  Description of Artificial Sequence: Synthetic oligonucleotide
  Target: LAMA2; (-) strand; PAM type: NRG; PAM sequence: TGG
ggggaaggttgaaattcagg

SEQ ID NO: 115564 - DNA, 20 bp, Artificial Sequence
  Description of Artificial Sequence: Synthetic oligonucleotide
  Target: LAMA2; (-) strand; PAM type: NRG; PAM sequence: AGG
agtggggaaggttgaaattc

SEQ ID NO: 115565 - DNA, 20 bp, Artificial Sequence
  Description of Artificial Sequence: Synthetic oligonucleotide
  Target: LAMA2; (-) strand; PAM type: NRG; PAM sequence: CAG
gagtggggaaggttgaaatt

SEQ ID NO: 115566 - DNA, 20 bp, Artificial Sequence
  Description of Artificial Sequence: Synthetic oligonucleotide
  Target: LAMA2; (-) strand; PAM type: NRG; PAM sequence: AGG
ggaatatttctgagtgggga

SEQ ID NO: 115567 - DNA, 20 bp, Artificial Sequence
  Description of Artificial Sequence: Synthetic oligonucleotide
  Target: LAMA2; (-) strand; PAM type: NRG; PAM sequence: AAG
aggaatatttctgagtgggg

SEQ ID NO: 115568 - DNA, 20 bp, Artificial Sequence
  Description of Artificial Sequence: Synthetic oligonucleotide
  Target: LAMA2; (-) strand; PAM type: NRG; PAM sequence: GGG
aggaggaatatttctgagtg

SEQ ID NO: 115569 - DNA, 20 bp, Artificial Sequence
  Description of Artificial Sequence: Synthetic oligonucleotide
  Target: LAMA2; (-) strand; PAM type: NRG; PAM sequence: GGG
aaggaggaatatttctgagt

SEQ ID NO: 115570 - DNA, 20 bp, Artificial Sequence
  Description of Artificial Sequence: Synthetic oligonucleotide
  Target: LAMA2; (-) strand; PAM type: NRG; PAM sequence: TGG
aaaggaggaatatttctgag

SEQ ID NO: 115571 - DNA, 20 bp, Artificial Sequence
  Description of Artificial Sequence: Synthetic oligonucleotide
  Target: LAMA2; (-) strand; PAM type: NRG; PAM sequence: GAG
tcaaaaggaggaatatttct

SEQ ID NO: 115572 - DNA, 20 bp, Artificial Sequence
  Description of Artificial Sequence: Synthetic oligonucleotide
  Target: LAMA2; (-) strand; PAM type: NRG; PAM sequence: AGG
catatgcagccttcaaaagg

SEQ ID NO: 115573 - DNA, 20 bp, Artificial Sequence
  Description of Artificial Sequence: Synthetic oligonucleotide
  Target: LAMA2; (-) strand; PAM type: NRG; PAM sequence: GAG
ccatatgcagccttcaaaag

SEQ ID NO: 115574 - DNA, 20 bp, Artificial Sequence
  Description of Artificial Sequence: Synthetic oligonucleotide
  Target: LAMA2; (-) strand; PAM type: NRG; PAM sequence: AGG
ttccatatgcagccttcaaa

SEQ ID NO: 115575 - DNA, 20 bp, Artificial Sequence
  Description of Artificial Sequence: Synthetic oligonucleotide
  Target: LAMA2; (-) strand; PAM type: NRG; PAM sequence: AAG
attccatatgcagccttcaa

SEQ ID NO: 115576 - DNA, 20 bp, Artificial Sequence
  Description of Artificial Sequence: Synthetic oligonucleotide
  Target: LAMA2; (-) strand; PAM type: NRG; PAM sequence: CAG
taataacaagattccatatg

SEQ ID NO: 115577 - DNA, 20 bp, Artificial Sequence
  Description of Artificial Sequence: Synthetic oligonucleotide
  Target: LAMA2; (-) strand; PAM type: NRG; PAM sequence: AAG
acttacacagagttaataac

SEQ ID NO: 115578 - DNA, 20 bp, Artificial Sequence
  Description of Artificial Sequence: Synthetic oligonucleotide
  Target: LAMA2; (-) strand; PAM type: NRG; PAM sequence: GAG
tgaggagatccacttacaca

SEQ ID NO: 115579 - DNA, 20 bp, Artificial Sequence
  Description of Artificial Sequence: Synthetic oligonucleotide
  Target: LAMA2; (-) strand; PAM type: NRG; PAM sequence: CAG
aatgaggagatccacttaca

SEQ ID NO: 115580 - DNA, 20 bp, Artificial Sequence
  Description of Artificial Sequence: Synthetic oligonucleotide
  Target: LAMA2; (-) strand; PAM type: NRG; PAM sequence: GAG
aaattagtagtagtaatgag

SEQ ID NO: 115581 - DNA, 20 bp, Artificial Sequence
  Description of Artificial Sequence: Synthetic oligonucleotide
  Target: LAMA2; (-) strand; PAM type: NRG; PAM sequence: AGG
aaaaattagtagtagtaatg

SEQ ID NO: 115582 - DNA, 20 bp, Artificial Sequence
  Description of Artificial Sequence: Synthetic oligonucleotide
  Target: LAMA2; (-) strand; PAM type: NRG; PAM sequence: GAG
aaaaaattagtagtagtaat

SEQ ID NO: 115583 - DNA, 20 bp, Artificial Sequence
  Description of Artificial Sequence: Synthetic oligonucleotide
  Target: LAMA2; (-) strand; PAM type: NRG; PAM sequence: TAG
taaaaataaaaaattagtag

SEQ ID NO: 115584 - DNA, 20 bp, Artificial Sequence
  Description of Artificial Sequence: Synthetic oligonucleotide
  Target: LAMA2; (-) strand; PAM type: NRG; PAM sequence: TAG
aaataaaaataaaaaattag

SEQ ID NO: 115585 - DNA, 20 bp, Artificial Sequence
  Description of Artificial Sequence: Synthetic oligonucleotide
  Target: LAMA2; (-) strand; PAM type: NRG; PAM sequence: TAG
aagaaataaaaataaaaaat

SEQ ID NO: 115586 - DNA, 20 bp, Artificial Sequence
  Description of Artificial Sequence: Synthetic oligonucleotide
  Target: LAMA2; (-) strand; PAM type: NRG; PAM sequence: AAG
gcattgggacccctaatagc

SEQ ID NO: 115587 - DNA, 20 bp, Artificial Sequence
  Description of Artificial Sequence: Synthetic oligonucleotide
  Target: LAMA2; (-) strand; PAM type: NRG; PAM sequence: TAG
agatgcattgggacccctaa

SEQ ID NO: 115588 - DNA, 20 bp, Artificial Sequence
  Description of Artificial Sequence: Synthetic oligonucleotide
  Target: LAMA2; (-) strand; PAM type: NRG; PAM sequence: GGG
gtagacaatgtagatgcatt

SEQ ID NO: 115589 - DNA, 20 bp, Artificial Sequence
  Description of Artificial Sequence: Synthetic oligonucleotide
  Target: LAMA2; (-) strand; PAM type: NRG; PAM sequence: TGG
tgtagacaatgtagatgcat

SEQ ID NO: 115590 - DNA, 20 bp, Artificial Sequence
  Description of Artificial Sequence: Synthetic oligonucleotide
  Target: LAMA2; (-) strand; PAM type: NRG; PAM sequence: TAG
ctgcatagctgtagacaatg

SEQ ID NO: 115591 - DNA, 20 bp, Artificial Sequence
  Description of Artificial Sequence: Synthetic oligonucleotide
  Target: LAMA2; (-) strand; PAM type: NRG; PAM sequence: TAG
cctcctcccctgcatagctg

SEQ ID NO: 115592 - DNA, 20 bp, Artificial Sequence
  Description of Artificial Sequence: Synthetic oligonucleotide
  Target: LAMA2; (-) strand; PAM type: NRG; PAM sequence: TAG
tgtttccctcctcccctgca

SEQ ID NO: 115593 - DNA, 20 bp, Artificial Sequence
  Description of Artificial Sequence: Synthetic oligonucleotide
  Target: LAMA2; (-) strand; PAM type: NRG; PAM sequence: AAG
gcttttctcagtctaagttg

SEQ ID NO: 115594 - DNA, 20 bp, Artificial Sequence
  Description of Artificial Sequence: Synthetic oligonucleotide
  Target: LAMA2; (-) strand; PAM type: NRG; PAM sequence: AAG
tagtgtgcttttctcagtct

SEQ ID NO: 115595 - DNA, 20 bp, Artificial Sequence
  Description of Artificial Sequence: Synthetic oligonucleotide
  Target: LAMA2; (-) strand; PAM type: NRG; PAM sequence: CAG
gtccattagtgtgcttttct

SEQ ID NO: 115596 - DNA, 20 bp, Artificial Sequence
  Description of Artificial Sequence: Synthetic oligonucleotide
  Target: LAMA2; (-) strand; PAM type: NRG; PAM sequence: TAG
gcatgcctttttaagtccat

SEQ ID NO: 115597 - DNA, 20 bp, Artificial Sequence
  Description of Artificial Sequence: Synthetic oligonucleotide
  Target: LAMA2; (-) strand; PAM type: NRG; PAM sequence: AAG
caatccccgcatgccttttt

SEQ ID NO: 115598 - DNA, 20 bp, Artificial Sequence
  Description of Artificial Sequence: Synthetic oligonucleotide
  Target: LAMA2; (-) strand; PAM type: NRG; PAM sequence: AAG
ttttttgcttccttacaatt

SEQ ID NO: 115599 - DNA, 20 bp, Artificial Sequence
  Description of Artificial Sequence: Synthetic oligonucleotide
  Target: LAMA2; (-) strand; PAM type: NRG; PAM sequence: AAG
gctaatagaatgtaataaat

SEQ ID NO: 115600 - DNA, 20 bp, Artificial Sequence
  Description of Artificial Sequence: Synthetic oligonucleotide
  Target: LAMA2; (-) strand; PAM type: NRG; PAM sequence: TAG
tgcaaagtccatggggctaa

SEQ ID NO: 115601 - DNA, 20 bp, Artificial Sequence
  Description of Artificial Sequence: Synthetic oligonucleotide
  Target: LAMA2; (-) strand; PAM type: NRG; PAM sequence: GGG
caggccttgcaaagtccatg

SEQ ID NO: 115602 - DNA, 20 bp, Artificial Sequence
  Description of Artificial Sequence: Synthetic oligonucleotide
  Target: LAMA2; (-) strand; PAM type: NRG; PAM sequence: GGG
acaggccttgcaaagtccat

SEQ ID NO: 115603 - DNA, 20 bp, Artificial Sequence
  Description of Artificial Sequence: Synthetic oligonucleotide
  Target: LAMA2; (-) strand; PAM type: NRG; PAM sequence: TGG
cacaggccttgcaaagtcca

SEQ ID NO: 115604 - DNA, 20 bp, Artificial Sequence
  Description of Artificial Sequence: Synthetic oligonucleotide
  Target: LAMA2; (-) strand; PAM type: NRG; PAM sequence: AAG
tgaaggacacaggccttgca

SEQ ID NO: 115605 - DNA, 20 bp, Artificial Sequence
  Description of Artificial Sequence: Synthetic oligonucleotide
  Target: LAMA2; (-) strand; PAM type: NRG; PAM sequence: AGG
tcagcatttttgaaggacac

SEQ ID NO: 115606 - DNA, 20 bp, Artificial Sequence
  Description of Artificial Sequence: Synthetic oligonucleotide
  Target: LAMA2; (-) strand; PAM type: NRG; PAM sequence: CAG
gtcagcatttttgaaggaca

SEQ ID NO: 115607 - DNA, 20 bp, Artificial Sequence
  Description of Artificial Sequence: Synthetic oligonucleotide
  Target: LAMA2; (-) strand; PAM type: NRG; PAM sequence: AGG
accaatgtcagcatttttga

SEQ ID NO: 115608 - DNA, 20 bp, Artificial Sequence
  Description of Artificial Sequence: Synthetic oligonucleotide
  Target: LAMA2; (-) strand; PAM type: NRG; PAM sequence: AAG
gaccaatgtcagcatttttg

SEQ ID NO: 115609 - DNA, 20 bp, Artificial Sequence
  Description of Artificial Sequence: Synthetic oligonucleotide
  Target: LAMA2; (-) strand; PAM type: NRG; PAM sequence: CAG
atgggcacagcgaccaatgt

SEQ ID NO: 115610 - DNA, 20 bp, Artificial Sequence
  Description of Artificial Sequence: Synthetic oligonucleotide
  Target: LAMA2; (-) strand; PAM type: NRG; PAM sequence: CAG
cacggagtttctgatgggca

SEQ ID NO: 115611 - DNA, 20 bp, Artificial Sequence
  Description of Artificial Sequence: Synthetic oligonucleotide
  Target: LAMA2; (-) strand; PAM type: NRG; PAM sequence: GGG
atcttcacggagtttctgat

SEQ ID NO: 115612 - DNA, 20 bp, Artificial Sequence
  Description of Artificial Sequence: Synthetic oligonucleotide
  Target: LAMA2; (-) strand; PAM type: NRG; PAM sequence: TGG
catcttcacggagtttctga

SEQ ID NO: 115613 - DNA, 20 bp, Artificial Sequence
  Description of Artificial Sequence: Synthetic oligonucleotide
  Target: LAMA2; (-) strand; PAM type: NRG; PAM sequence: GAG
gctccatcttcatcttcacg

SEQ ID NO: 115614 - DNA, 20 bp, Artificial Sequence
  Description of Artificial Sequence: Synthetic oligonucleotide
  Target: LAMA2; (-) strand; PAM type: NRG; PAM sequence: CGG
ctgctccatcttcatcttca

SEQ ID NO: 115615 - DNA, 20 bp, Artificial Sequence
  Description of Artificial Sequence: Synthetic oligonucleotide
  Target: LAMA2; (-) strand; PAM type: NRG; PAM sequence: GAG
ctggataactatttcagctg

SEQ ID NO: 115616 - DNA, 20 bp, Artificial Sequence
  Description of Artificial Sequence: Synthetic oligonucleotide
  Target: LAMA2; (-) strand; PAM type: NRG; PAM sequence: TGG
ggctggataactatttcagc

SEQ ID NO: 115617 - DNA, 20 bp, Artificial Sequence
  Description of Artificial Sequence: Synthetic oligonucleotide
  Target: LAMA2; (-) strand; PAM type: NRG; PAM sequence: CAG
ctcaggctggataactattt

SEQ ID NO: 115618 - DNA, 20 bp, Artificial Sequence
  Description of Artificial Sequence: Synthetic oligonucleotide
  Target: LAMA2; (-) strand; PAM type: NRG; PAM sequence: TGG
gggtgggaactggctcaggc

SEQ ID NO: 115619 - DNA, 20 bp, Artificial Sequence
  Description of Artificial Sequence: Synthetic oligonucleotide
  Target: LAMA2; (-) strand; PAM type: NRG; PAM sequence: AGG
gctggggtgggaactggctc

SEQ ID NO: 115620 - DNA, 20 bp, Artificial Sequence
  Description of Artificial Sequence: Synthetic oligonucleotide
  Target: LAMA2; (-) strand; PAM type: NRG; PAM sequence: CAG
ggctggggtgggaactggct

SEQ ID NO: 115621 - DNA, 20 bp, Artificial Sequence
  Description of Artificial Sequence: Synthetic oligonucleotide
  Target: LAMA2; (-) strand; PAM type: NRG; PAM sequence: TGG
ggaaaggctggggtgggaac

SEQ ID NO: 115622 - DNA, 20 bp, Artificial Sequence
  Description of Artificial Sequence: Synthetic oligonucleotide
  Target: LAMA2; (-) strand; PAM type: NRG; PAM sequence: GGG
ggcgtaggaaaggctggggt

SEQ ID NO: 115623 - DNA, 20 bp, Artificial Sequence
  Description of Artificial Sequence: Synthetic oligonucleotide
  Target: LAMA2; (-) strand; PAM type: NRG; PAM sequence: TGG
gggcgtaggaaaggctgggg

SEQ ID NO: 115624 - DNA, 20 bp, Artificial Sequence
  Description of Artificial Sequence: Synthetic oligonucleotide
  Target: LAMA2; (-) strand; PAM type: NRG; PAM sequence: GGG
ggtgggcgtaggaaaggctg

SEQ ID NO: 115625 - DNA, 20 bp, Artificial Sequence
  Description of Artificial Sequence: Synthetic oligonucleotide
  Target: LAMA2; (-) strand; PAM type: NRG; PAM sequence: GGG
gggtgggcgtaggaaaggct

SEQ ID NO: 115626 - DNA, 20 bp, Artificial Sequence
  Description of Artificial Sequence: Synthetic oligonucleotide
  Target: LAMA2; (-) strand; PAM type: NRG; PAM sequence: TGG
ggggtgggcgtaggaaaggc

SEQ ID NO: 115627 - DNA, 20 bp, Artificial Sequence
  Description of Artificial Sequence: Synthetic oligonucleotide
  Target: LAMA2; (-) strand; PAM type: NRG; PAM sequence: AGG
aactggggtgggcgtaggaa

SEQ ID NO: 115628 - DNA, 20 bp, Artificial Sequence
  Description of Artificial Sequence: Synthetic oligonucleotide
  Target: LAMA2; (-) strand; PAM type: NRG; PAM sequence: AAG
gaactggggtgggcgtagga

SEQ ID NO: 115629 - DNA, 20 bp, Artificial Sequence
  Description of Artificial Sequence: Synthetic oligonucleotide
  Target: LAMA2; (-) strand; PAM type: NRG; PAM sequence: AGG
gtcagaactggggtgggcgt

SEQ ID NO: 115630 - DNA, 20 bp, Artificial Sequence
  Description of Artificial Sequence: Synthetic oligonucleotide
  Target: LAMA2; (-) strand; PAM type: NRG; PAM sequence: TAG
tgtcagaactggggtgggcg

SEQ ID NO: 115631 - DNA, 20 bp, Artificial Sequence
  Description of Artificial Sequence: Synthetic oligonucleotide
  Target: LAMA2; (-) strand; PAM type: NRG; PAM sequence: GGG
acatgtgtcagaactggggt

SEQ ID NO: 115632 - DNA, 20 bp, Artificial Sequence
  Description of Artificial Sequence: Synthetic oligonucleotide
  Target: LAMA2; (-) strand; PAM type: NRG; PAM sequence: TGG
tacatgtgtcagaactgggg

SEQ ID NO: 115633 - DNA, 20 bp, Artificial Sequence
  Description of Artificial Sequence: Synthetic oligonucleotide
  Target: LAMA2; (-) strand; PAM type: NRG; PAM sequence: GGG
acttacatgtgtcagaactg

SEQ ID NO: 115634 - DNA, 20 bp, Artificial Sequence
  Description of Artificial Sequence: Synthetic oligonucleotide
  Target: LAMA2; (-) strand; PAM type: NRG; PAM sequence: GGG
cacttacatgtgtcagaact

SEQ ID NO: 115635 - DNA, 20 bp, Artificial Sequence
  Description of Artificial Sequence: Synthetic oligonucleotide
  Target: LAMA2; (-) strand; PAM type: NRG; PAM sequence: TGG
acacttacatgtgtcagaac

SEQ ID NO: 115636 - DNA, 20 bp, Artificial Sequence
  Description of Artificial Sequence: Synthetic oligonucleotide
  Target: LAMA2; (-) strand; PAM type: NRG; PAM sequence: CAG
atataaacacttacatgtgt

SEQ ID NO: 115637 - DNA, 20 bp, Artificial Sequence
  Description of Artificial Sequence: Synthetic oligonucleotide
  Target: LAMA2; (-) strand; PAM type: NRG; PAM sequence: GGG
gtaaaaattagaaagcaatg

SEQ ID NO: 115638 - DNA, 20 bp, Artificial Sequence
  Description of Artificial Sequence: Synthetic oligonucleotide
  Target: LAMA2; (-) strand; PAM type: NRG; PAM sequence: GGG
ggtaaaaattagaaagcaat

SEQ ID NO: 115639 - DNA, 20 bp, Artificial Sequence
  Description of Artificial Sequence: Synthetic oligonucleotide
  Target: LAMA2; (-) strand; PAM type: NRG; PAM sequence: TGG
gggtaaaaattagaaagcaa

SEQ ID NO: 115640 - DNA, 20 bp, Artificial Sequence
  Description of Artificial Sequence: Synthetic oligonucleotide
  Target: LAMA2; (-) strand; PAM type: NRG; PAM sequence: AAG
aatactgggtaaaaattaga

SEQ ID NO: 115641 - DNA, 20 bp, Artificial Sequence
  Description of Artificial Sequence: Synthetic oligonucleotide
  Target: LAMA2; (-) strand; PAM type: NRG; PAM sequence: TAG
tcagaatactgggtaaaaat

SEQ ID NO: 115642 - DNA, 20 bp, Artificial Sequence
  Description of Artificial Sequence: Synthetic oligonucleotide
  Target: LAMA2; (-) strand; PAM type: NRG; PAM sequence: GGG
ctgaaatgactcagaatact

SEQ ID NO: 115643 - DNA, 20 bp, Artificial Sequence
  Description of Artificial Sequence: Synthetic oligonucleotide
  Target: LAMA2; (-) strand; PAM type: NRG; PAM sequence: TGG
tctgaaatgactcagaatac

SEQ ID NO: 115644 - DNA, 20 bp, Artificial Sequence
  Description of Artificial Sequence: Synthetic oligonucleotide
  Target: LAMA2; (-) strand; PAM type: NRG; PAM sequence: CAG
atcttccttctgaaatgact

SEQ ID NO: 115645 - DNA, 20 bp, Artificial Sequence
  Description of Artificial Sequence: Synthetic oligonucleotide
  Target: LAMA2; (-) strand; PAM type: NRG; PAM sequence: TAG
attctaatatcagagtgtac

SEQ ID NO: 115646 - DNA, 20 bp, Artificial Sequence
  Description of Artificial Sequence: Synthetic oligonucleotide
  Target: LAMA2; (-) strand; PAM type: NRG; PAM sequence: GAG
ttctttcaattctaatatca

SEQ ID NO: 115647 - DNA, 20 bp, Artificial Sequence
  Description of Artificial Sequence: Synthetic oligonucleotide
  Target: LAMA2; (-) strand; PAM type: NRG; PAM sequence: CAG
atttctttcaattctaatat

SEQ ID NO: 115648 - DNA, 20 bp, Artificial Sequence
  Description of Artificial Sequence: Synthetic oligonucleotide
  Target: LAMA2; (-) strand; PAM type: NRG; PAM sequence: AGG
atgtaagaataggtttagat

SEQ ID NO: 115649 - DNA, 20 bp, Artificial Sequence
  Description of Artificial Sequence: Synthetic oligonucleotide
  Target: LAMA2; (-) strand; PAM type: NRG; PAM sequence: TAG
gatgtaagaataggtttaga

SEQ ID NO: 115650 - DNA, 20 bp, Artificial Sequence
  Description of Artificial Sequence: Synthetic oligonucleotide
  Target: LAMA2; (-) strand; PAM type: NRG; PAM sequence: TAG
tgaagatgtaagaataggtt

SEQ ID NO: 115651 - DNA, 20 bp, Artificial Sequence
  Description of Artificial Sequence: Synthetic oligonucleotide
  Target: LAMA2; (-) strand; PAM type: NRG; PAM sequence: AGG
ttcaatgaagatgtaagaat

SEQ ID NO: 115652 - DNA, 20 bp, Artificial Sequence
  Description of Artificial Sequence: Synthetic oligonucleotide
  Target: LAMA2; (-) strand; PAM type: NRG; PAM sequence: TAG
attcaatgaagatgtaagaa

SEQ ID NO: 115653 - DNA, 20 bp, Artificial Sequence
  Description of Artificial Sequence: Synthetic oligonucleotide
  Target: LAMA2; (-) strand; PAM type: NRG; PAM sequence: AAG
aagtcattcaatgaagatgt

SEQ ID NO: 115654 - DNA, 20 bp, Artificial Sequence
  Description of Artificial Sequence: Synthetic oligonucleotide
  Target: LAMA2; (-) strand; PAM type: NRG; PAM sequence: AAG
tataggtaagtcattcaatg

SEQ ID NO: 115655 - DNA, 20 bp, Artificial Sequence
  Description of Artificial Sequence: Synthetic oligonucleotide
  Target: LAMA2; (-) strand; PAM type: NRG; PAM sequence: AAG
ttgaagatggaaatataggt

SEQ ID NO: 115656 - DNA, 20 bp, Artificial Sequence
  Description of Artificial Sequence: Synthetic oligonucleotide
  Target: LAMA2; (-) strand; PAM type: NRG; PAM sequence: AGG
aaaattgaagatggaaatat

SEQ ID NO: 115657 - DNA, 20 bp, Artificial Sequence
  Description of Artificial Sequence: Synthetic oligonucleotide
  Target: LAMA2; (-) strand; PAM type: NRG; PAM sequence: TAG
caaaattgaagatggaaata

SEQ ID NO: 115658 - DNA, 20 bp, Artificial Sequence
  Description of Artificial Sequence: Synthetic oligonucleotide
  Target: LAMA2; (-) strand; PAM type: NRG; PAM sequence: TGG
tttgtaaacaaaattgaaga

SEQ ID NO: 115659 - DNA, 20 bp, Artificial Sequence
  Description of Artificial Sequence: Synthetic oligonucleotide
  Target: LAMA2; (-) strand; PAM type: NRG; PAM sequence: AAG
ctgttttgtaaacaaaattg

SEQ ID NO: 115660 - DNA, 20 bp, Artificial Sequence
  Description of Artificial Sequence: Synthetic oligonucleotide
  Target: LAMA2; (-) strand; PAM type: NRG; PAM sequence: TGG
gtgtcttttattcatgattc

SEQ ID NO: 115661 - DNA, 20 bp, Artificial Sequence
  Description of Artificial Sequence: Synthetic oligonucleotide
  Target: LAMA2; (-) strand; PAM type: NRG; PAM sequence: AAG
tgcctctgtcatggtattat

SEQ ID NO: 115662 - DNA, 20 bp, Artificial Sequence
  Description of Artificial Sequence: Synthetic oligonucleotide
  Target: LAMA2; (-) strand; PAM type: NRG; PAM sequence: TGG
caacatggttgcctctgtca

SEQ ID NO: 115663 - DNA, 20 bp, Artificial Sequence
  Description of Artificial Sequence: Synthetic oligonucleotide
  Target: LAMA2; (-) strand; PAM type: NRG; PAM sequence: TGG
aaagggcctggaaaccaaca

SEQ ID NO: 115664 - DNA, 20 bp, Artificial Sequence
  Description of Artificial Sequence: Synthetic oligonucleotide
  Target: LAMA2; (-) strand; PAM type: NRG; PAM sequence: TGG
actatgcagataaaagggcc

SEQ ID NO: 115665 - DNA, 20 bp, Artificial Sequence
  Description of Artificial Sequence: Synthetic oligonucleotide
  Target: LAMA2; (-) strand; PAM type: NRG; PAM sequence: GGG
catctactatgcagataaaa

SEQ ID NO: 115666 - DNA, 20 bp, Artificial Sequence
  Description of Artificial Sequence: Synthetic oligonucleotide
  Target: LAMA2; (-) strand; PAM type: NRG; PAM sequence: AGG
acatctactatgcagataaa

SEQ ID NO: 115667 - DNA, 20 bp, Artificial Sequence
  Description of Artificial Sequence: Synthetic oligonucleotide
  Target: LAMA2; (-) strand; PAM type: NRG; PAM sequence: AAG
gacatctactatgcagataa

SEQ ID NO: 115668 - DNA, 20 bp, Artificial Sequence
  Description of Artificial Sequence: Synthetic oligonucleotide
  Target: LAMA2; (-) strand; PAM type: NRG; PAM sequence: CAG
aaggtaggacatctactatg

SEQ ID NO: 115669 - DNA, 20 bp, Artificial Sequence
  Description of Artificial Sequence: Synthetic oligonucleotide
  Target: LAMA2; (-) strand; PAM type: NRG; PAM sequence: AGG
caccaaattgtatacaaggt

SEQ ID NO: 115670 - DNA, 20 bp, Artificial Sequence
  Description of Artificial Sequence: Synthetic oligonucleotide
  Target: LAMA2; (-) strand; PAM type: NRG; PAM sequence: TAG
acaccaaattgtatacaagg

SEQ ID NO: 115671 - DNA, 20 bp, Artificial Sequence
  Description of Artificial Sequence: Synthetic oligonucleotide
  Target: LAMA2; (-) strand; PAM type: NRG; PAM sequence: AGG
aggacaccaaattgtataca

SEQ ID NO: 115672 - DNA, 20 bp, Artificial Sequence
  Description of Artificial Sequence: Synthetic oligonucleotide
  Target: LAMA2; (-) strand; PAM type: NRG; PAM sequence: AAG
caggacaccaaattgtatac

SEQ ID NO: 115673 - DNA, 20 bp, Artificial Sequence
  Description of Artificial Sequence: Synthetic oligonucleotide
  Target: LAMA2; (-) strand; PAM type: NRG; PAM sequence: AGG
tattactagtttctaaaaac

SEQ ID NO: 115674 - DNA, 20 bp, Artificial Sequence
  Description of Artificial Sequence: Synthetic oligonucleotide
  Target: LAMA2; (-) strand; PAM type: NRG; PAM sequence: CAG
gtattactagtttctaaaaa

SEQ ID NO: 115675 - DNA, 20 bp, Artificial Sequence
  Description of Artificial Sequence: Synthetic oligonucleotide
  Target: LAMA2; (-) strand; PAM type: NRG; PAM sequence: TAG
cagttttagtggtgtattac

SEQ ID NO: 115676 - DNA, 20 bp, Artificial Sequence
  Description of Artificial Sequence: Synthetic oligonucleotide
  Target: LAMA2; (-) strand; PAM type: NRG; PAM sequence: TGG
tggcctagaaacagttttag

SEQ ID NO: 115677 - DNA, 20 bp, Artificial Sequence
  Description of Artificial Sequence: Synthetic oligonucleotide
  Target: LAMA2; (-) strand; PAM type: NRG; PAM sequence: TAG
gcctggcctagaaacagttt

SEQ ID NO: 115678 - DNA, 20 bp, Artificial Sequence
  Description of Artificial Sequence: Synthetic oligonucleotide
  Target: LAMA2; (-) strand; PAM type: NRG; PAM sequence: CAG
caccgcgcctggcctagaaa

SEQ ID NO: 115679 - DNA, 20 bp, Artificial Sequence
  Description of Artificial Sequence: Synthetic oligonucleotide
  Target: LAMA2; (-) strand; PAM type: NRG; PAM sequence: TAG
gtgagccaccgcgcctggcc

SEQ ID NO: 115680 - DNA, 20 bp, Artificial Sequence
  Description of Artificial Sequence: Synthetic oligonucleotide
  Target: LAMA2; (-) strand; PAM type: NRG; PAM sequence: TGG
caggcgtgagccaccgcgcc

SEQ ID NO: 115681 - DNA, 20 bp, Artificial Sequence
  Description of Artificial Sequence: Synthetic oligonucleotide
  Target: LAMA2; (-) strand; PAM type: NRG; PAM sequence: GAG
agtgctaggattacaggcgt

SEQ ID NO: 115682 - DNA, 20 bp, Artificial Sequence
  Description of Artificial Sequence: Synthetic oligonucleotide
  Target: LAMA2; (-) strand; PAM type: NRG; PAM sequence: AGG
tcccaaagtgctaggattac

SEQ ID NO: 115683 - DNA, 20 bp, Artificial Sequence
  Description of Artificial Sequence: Synthetic oligonucleotide
  Target: LAMA2; (-) strand; PAM type: NRG; PAM sequence: CAG
ctcccaaagtgctaggatta

SEQ ID NO: 115684 - DNA, 20 bp, Artificial Sequence
  Description of Artificial Sequence: Synthetic oligonucleotide
  Target: LAMA2; (-) strand; PAM type: NRG; PAM sequence: AGG
ccttggcctcccaaagtgct

SEQ ID NO: 115685 - DNA, 20 bp, Artificial Sequence
  Description of Artificial Sequence: Synthetic oligonucleotide
  Target: LAMA2; (-) strand; PAM type: NRG; PAM sequence: TAG
gccttggcctcccaaagtgc

SEQ ID NO: 115686 - DNA, 20 bp, Artificial Sequence
  Description of Artificial Sequence: Synthetic oligonucleotide
  Target: LAMA2; (-) strand; PAM type: NRG; PAM sequence: AAG
ctgcctgccttggcctccca

SEQ ID NO: 115687 - DNA, 20 bp, Artificial Sequence
  Description of Artificial Sequence: Synthetic oligonucleotide
  Target: LAMA2; (-) strand; PAM type: NRG; PAM sequence: TGG
ctcaggcaatctgcctgcct

SEQ ID NO: 115688 - DNA, 20 bp, Artificial Sequence
  Description of Artificial Sequence: Synthetic oligonucleotide
  Target: LAMA2; (-) strand; PAM type: NRG; PAM sequence: AGG
ggtctcgaactcctgagctc

SEQ ID NO: 115689 - DNA, 20 bp, Artificial Sequence
  Description of Artificial Sequence: Synthetic oligonucleotide
  Target: LAMA2; (-) strand; PAM type: NRG; PAM sequence: CAG
tggtctcgaactcctgagct

SEQ ID NO: 115690 - DNA, 20 bp, Artificial Sequence
  Description of Artificial Sequence: Synthetic oligonucleotide
  Target: LAMA2; (-) strand; PAM type: NRG; PAM sequence: GAG
caggctggtctcgaactcct

SEQ ID NO: 115691 - DNA, 20 bp, Artificial Sequence
  Description of Artificial Sequence: Synthetic oligonucleotide
  Target: LAMA2; (-) strand; PAM type: NRG; PAM sequence: TGG
ttcaccgtggttgcccaggc

SEQ ID NO: 115692 - DNA, 20 bp, Artificial Sequence
  Description of Artificial Sequence: Synthetic oligonucleotide
  Target: LAMA2; (-) strand; PAM type: NRG; PAM sequence: AGG
gggtttcaccgtggttgccc

SEQ ID NO: 115693 - DNA, 20 bp, Artificial Sequence
  Description of Artificial Sequence: Synthetic oligonucleotide
  Target: LAMA2; (-) strand; PAM type: NRG; PAM sequence: CAG
ggggtttcaccgtggttgcc

SEQ ID NO: 115694 - DNA, 20 bp, Artificial Sequence
  Description of Artificial Sequence: Synthetic oligonucleotide
  Target: LAMA2; (-) strand; PAM type: NRG; PAM sequence: TGG
gaagagacggggtttcaccg

SEQ ID NO: 115695 - DNA, 20 bp, Artificial Sequence
  Description of Artificial Sequence: Synthetic oligonucleotide
  Target: LAMA2; (-) strand; PAM type: NRG; PAM sequence: GGG
tttgtattttagaagagacg

SEQ ID NO: 115696 - DNA, 20 bp, Artificial Sequence
  Description of Artificial Sequence: Synthetic oligonucleotide
  Target: LAMA2; (-) strand; PAM type: NRG; PAM sequence: GGG
ttttgtattttagaagagac

SEQ ID NO: 115697 - DNA, 20 bp, Artificial Sequence
  Description of Artificial Sequence: Synthetic oligonucleotide
  Target: LAMA2; (-) strand; PAM type: NRG; PAM sequence: CGG
tttttgtattttagaagaga

SEQ ID NO: 115698 - DNA, 20 bp, Artificial Sequence
  Description of Artificial Sequence: Synthetic oligonucleotide
  Target: LAMA2; (-) strand; PAM type: NRG; PAM sequence: GAG
tatttttttgtattttagaa

SEQ ID NO: 115699 - DNA, 20 bp, Artificial Sequence
  Description of Artificial Sequence: Synthetic oligonucleotide
  Target: LAMA2; (-) strand; PAM type: NRG; PAM sequence: AAG
gctatttttttgtattttag

SEQ ID NO: 115700 - DNA, 20 bp, Artificial Sequence
  Description of Artificial Sequence: Synthetic oligonucleotide
  Target: LAMA2; (-) strand; PAM type: NRG; PAM sequence: TAG
caggctatttttttgtattt

SEQ ID NO: 115701 - DNA, 20 bp, Artificial Sequence
  Description of Artificial Sequence: Synthetic oligonucleotide
  Target: LAMA2; (-) strand; PAM type: NRG; PAM sequence: AGG
caggtgcacaccgccatgcc

SEQ ID NO: 115702 - DNA, 20 bp, Artificial Sequence
  Description of Artificial Sequence: Synthetic oligonucleotide
  Target: LAMA2; (-) strand; PAM type: NRG; PAM sequence: CAG
acaggtgcacaccgccatgc

SEQ ID NO: 115703 - DNA, 20 bp, Artificial Sequence
  Description of Artificial Sequence: Synthetic oligonucleotide
  Target: LAMA2; (-) strand; PAM type: NRG; PAM sequence: AGG
tactgagtagctgggactac

SEQ ID NO: 115704 - DNA, 20 bp, Artificial Sequence
  Description of Artificial Sequence: Synthetic oligonucleotide
  Target: LAMA2; (-) strand; PAM type: NRG; PAM sequence: CAG
ctactgagtagctgggacta

SEQ ID NO: 115705 - DNA, 20 bp, Artificial Sequence
  Description of Artificial Sequence: Synthetic oligonucleotide
  Target: LAMA2; (-) strand; PAM type: NRG; PAM sequence: GGG
cctcagcctactgagtagct

SEQ ID NO: 115706 - DNA, 20 bp, Artificial Sequence
  Description of Artificial Sequence: Synthetic oligonucleotide
  Target: LAMA2; (-) strand; PAM type: NRG; PAM sequence: TGG
gcctcagcctactgagtagc

SEQ ID NO: 115707 - DNA, 20 bp, Artificial Sequence
  Description of Artificial Sequence: Synthetic oligonucleotide
  Target: LAMA2; (-) strand; PAM type: NRG; PAM sequence: TAG
tcctgcctcagcctactgag

SEQ ID NO: 115708 - DNA, 20 bp, Artificial Sequence
  Description of Artificial Sequence: Synthetic oligonucleotide
  Target: LAMA2; (-) strand; PAM type: NRG; PAM sequence: GAG
ttctcctgcctcagcctact

SEQ ID NO: 115709 - DNA, 20 bp, Artificial Sequence
  Description of Artificial Sequence: Synthetic oligonucleotide
  Target: LAMA2; (-) strand; PAM type: NRG; PAM sequence: CAG
ttcaagcgattctcctgcct

SEQ ID NO: 115710 - DNA, 20 bp, Artificial Sequence
  Description of Artificial Sequence: Synthetic oligonucleotide
  Target: LAMA2; (-) strand; PAM type: NRG; PAM sequence: AAG
aacctccgcctcctgggttc

SEQ ID NO: 115711 - DNA, 20 bp, Artificial Sequence
  Description of Artificial Sequence: Synthetic oligonucleotide
  Target: LAMA2; (-) strand; PAM type: NRG; PAM sequence: GGG
cactgcaacctccgcctcct

SEQ ID NO: 115712 - DNA, 20 bp, Artificial Sequence
  Description of Artificial Sequence: Synthetic oligonucleotide
  Target: LAMA2; (-) strand; PAM type: NRG; PAM sequence: TGG
tcactgcaacctccgcctcc

SEQ ID NO: 115713 - DNA, 20 bp, Artificial Sequence
  Description of Artificial Sequence: Synthetic oligonucleotide
  Target: LAMA2; (-) strand; PAM type: NRG; PAM sequence: CGG
ggagtacagtggcgtgatct

SEQ ID NO: 115714 - DNA, 20 bp, Artificial Sequence
  Description of Artificial Sequence: Synthetic oligonucleotide
  Target: LAMA2; (-) strand; PAM type: NRG; PAM sequence: TGG
ttgcccaggctggagtacag

SEQ ID NO: 115715 - DNA, 20 bp, Artificial Sequence
  Description of Artificial Sequence: Synthetic oligonucleotide
  Target: LAMA2; (-) strand; PAM type: NRG; PAM sequence: CAG
ctgttgcccaggctggagta

SEQ ID NO: 115716 - DNA, 20 bp, Artificial Sequence
  Description of Artificial Sequence: Synthetic oligonucleotide
  Target: LAMA2; (-) strand; PAM type: NRG; PAM sequence: GAG
tcgctctgttgcccaggctg

SEQ ID NO: 115717 - DNA, 20 bp, Artificial Sequence
  Description of Artificial Sequence: Synthetic oligonucleotide
  Target: LAMA2; (-) strand; PAM type: NRG; PAM sequence: TGG
tctcgctctgttgcccaggc

SEQ ID NO: 115718 - DNA, 20 bp, Artificial Sequence
  Description of Artificial Sequence: Synthetic oligonucleotide
  Target: LAMA2; (-) strand; PAM type: NRG; PAM sequence: AGG
ggagtctcgctctgttgccc

SEQ ID NO: 115719 - DNA, 20 bp, Artificial Sequence
  Description of Artificial Sequence: Synthetic oligonucleotide
  Target: LAMA2; (-) strand; PAM type: NRG; PAM sequence: CAG
tggagtctcgctctgttgcc

SEQ ID NO: 115720 - DNA, 20 bp, Artificial Sequence
  Description of Artificial Sequence: Synthetic oligonucleotide
  Target: LAMA2; (-) strand; PAM type: NRG; PAM sequence: GAG
atttttattttttggagatg

SEQ ID NO: 115721 - DNA, 20 bp, Artificial Sequence
  Description of Artificial Sequence: Synthetic oligonucleotide
  Target: LAMA2; (-) strand; PAM type: NRG; PAM sequence: TGG
ttatttttattttttggaga

SEQ ID NO: 115722 - DNA, 20 bp, Artificial Sequence
  Description of Artificial Sequence: Synthetic oligonucleotide
  Target: LAMA2; (-) strand; PAM type: NRG; PAM sequence: GAG
ttatttatttttattttttg

SEQ ID NO: 115723 - DNA, 20 bp, Artificial Sequence
  Description of Artificial Sequence: Synthetic oligonucleotide
  Target: LAMA2; (-) strand; PAM type: NRG; PAM sequence: TGG
atttatttatttttattttt

SEQ ID NO: 115724 - DNA, 20 bp, Artificial Sequence
  Description of Artificial Sequence: Synthetic oligonucleotide
  Target: LAMA2; (-) strand; PAM type: NRG; PAM sequence: CAG
atttatatgatgtttagata

SEQ ID NO: 115725 - DNA, 20 bp, Artificial Sequence
  Description of Artificial Sequence: Synthetic oligonucleotide
  Target: LAMA2; (-) strand; PAM type: NRG; PAM sequence: TAG
atacacatttatatgatgtt

SEQ ID NO: 115726 - DNA, 20 bp, Artificial Sequence
  Description of Artificial Sequence: Synthetic oligonucleotide
  Target: LAMA2; (-) strand; PAM type: NRG; PAM sequence: TAG
tacttaacataaaatcatat

SEQ ID NO: 115727 - DNA, 20 bp, Artificial Sequence
  Description of Artificial Sequence: Synthetic oligonucleotide
  Target: LAMA2; (-) strand; PAM type: NRG; PAM sequence: TAG
tgacctccaatactataaaa

SEQ ID NO: 115728 - DNA, 20 bp, Artificial Sequence
  Description of Artificial Sequence: Synthetic oligonucleotide
  Target: LAMA2; (-) strand; PAM type: NRG; PAM sequence: AGG
ttgagcccatgctctaatca

SEQ ID NO: 115729 - DNA, 20 bp, Artificial Sequence
  Description of Artificial Sequence: Synthetic oligonucleotide
  Target: LAMA2; (-) strand; PAM type: NRG; PAM sequence: AAG
cttgagcccatgctctaatc

SEQ ID NO: 115730 - DNA, 20 bp, Artificial Sequence
  Description of Artificial Sequence: Synthetic oligonucleotide
  Target: LAMA2; (-) strand; PAM type: NRG; PAM sequence: GAG
gaataccagcagtctgactt

SEQ ID NO: 115731 - DNA, 20 bp, Artificial Sequence
  Description of Artificial Sequence: Synthetic oligonucleotide
  Target: LAMA2; (-) strand; PAM type: NRG; PAM sequence: CAG
tgctgggatttgaataccag

SEQ ID NO: 115732 - DNA, 20 bp, Artificial Sequence
  Description of Artificial Sequence: Synthetic oligonucleotide
  Target: LAMA2; (-) strand; PAM type: NRG; PAM sequence: CAG
cagtgctgggatttgaatac

SEQ ID NO: 115733 - DNA, 20 bp, Artificial Sequence
  Description of Artificial Sequence: Synthetic oligonucleotide
  Target: LAMA2; (-) strand; PAM type: NRG; PAM sequence: GGG
agatggtcggttacagtgct

SEQ ID NO: 115734 - DNA, 20 bp, Artificial Sequence
  Description of Artificial Sequence: Synthetic oligonucleotide
  Target: LAMA2; (-) strand; PAM type: NRG; PAM sequence: TGG
cagatggtcggttacagtgc

SEQ ID NO: 115735 - DNA, 20 bp, Artificial Sequence
  Description of Artificial Sequence: Synthetic oligonucleotide
  Target: LAMA2; (-) strand; PAM type: NRG; PAM sequence: CAG
ttcacacagatggtcggtta

SEQ ID NO: 115736 - DNA, 20 bp, Artificial Sequence
  Description of Artificial Sequence: Synthetic oligonucleotide
  Target: LAMA2; (-) strand; PAM type: NRG; PAM sequence: CGG
cccaaattcacacagatggt

SEQ ID NO: 115737 - DNA, 20 bp, Artificial Sequence
  Description of Artificial Sequence: Synthetic oligonucleotide
  Target: LAMA2; (-) strand; PAM type: NRG; PAM sequence: TGG
ctttcccaaattcacacaga

SEQ ID NO: 115738 - DNA, 20 bp, Artificial Sequence
  Description of Artificial Sequence: Synthetic oligonucleotide
  Target: LAMA2; (-) strand; PAM type: NRG; PAM sequence: CAG
gtagctttcccaaattcaca

SEQ ID NO: 115739 - DNA, 20 bp, Artificial Sequence
  Description of Artificial Sequence: Synthetic oligonucleotide
  Target: LAMA2; (-) strand; PAM type: NRG; PAM sequence: TAG
tgagaaatagattggacagg

SEQ ID NO: 115740 - DNA, 20 bp, Artificial Sequence
  Description of Artificial Sequence: Synthetic oligonucleotide
  Target: LAMA2; (-) strand; PAM type: NRG; PAM sequence: AGG
aactgagaaatagattggac

SEQ ID NO: 115741 - DNA, 20 bp, Artificial Sequence
  Description of Artificial Sequence: Synthetic oligonucleotide
  Target: LAMA2; (-) strand; PAM type: NRG; PAM sequence: CAG
aaactgagaaatagattgga

SEQ ID NO: 115742 - DNA, 20 bp, Artificial Sequence
  Description of Artificial Sequence: Synthetic oligonucleotide
  Target: LAMA2; (-) strand; PAM type: NRG; PAM sequence: TGG
tgggaaactgagaaatagat

SEQ ID NO: 115743 - DNA, 20 bp, Artificial Sequence
  Description of Artificial Sequence: Synthetic oligonucleotide
  Target: LAMA2; (-) strand; PAM type: NRG; PAM sequence: TAG
ttggatgggaaactgagaaa

SEQ ID NO: 115744 - DNA, 20 bp, Artificial Sequence
  Description of Artificial Sequence: Synthetic oligonucleotide
  Target: LAMA2; (-) strand; PAM type: NRG; PAM sequence: GAG
tagtacttggatgggaaact

SEQ ID NO: 115745 - DNA, 20 bp, Artificial Sequence
  Description of Artificial Sequence: Synthetic oligonucleotide
  Target: LAMA2; (-) strand; PAM type: NRG; PAM sequence: GGG
ggcccggttagtacttggat

SEQ ID NO: 115746 - DNA, 20 bp, Artificial Sequence
  Description of Artificial Sequence: Synthetic oligonucleotide
  Target: LAMA2; (-) strand; PAM type: NRG; PAM sequence: TGG
gggcccggttagtacttgga

SEQ ID NO: 115747 - DNA, 20 bp, Artificial Sequence
  Description of Artificial Sequence: Synthetic oligonucleotide
  Target: LAMA2; (-) strand; PAM type: NRG; PAM sequence: TGG
ggttgggcccggttagtact

SEQ ID NO: 115748 - DNA, 20 bp, Artificial Sequence
  Description of Artificial Sequence: Synthetic oligonucleotide
  Target: LAMA2; (-) strand; PAM type: NRG; PAM sequence: TAG
taagcagggttgggcccggt

SEQ ID NO: 115749 - DNA, 20 bp, Artificial Sequence
  Description of Artificial Sequence: Synthetic oligonucleotide
  Target: LAMA2; (-) strand; PAM type: NRG; PAM sequence: CGG
aagctaagcagggttgggcc

SEQ ID NO: 115750 - DNA, 20 bp, Artificial Sequence
  Description of Artificial Sequence: Synthetic oligonucleotide
  Target: LAMA2; (-) strand; PAM type: NRG; PAM sequence: GGG
ctcaaaagctaagcagggtt

SEQ ID NO: 115751 - DNA, 20 bp, Artificial Sequence
  Description of Artificial Sequence: Synthetic oligonucleotide
  Target: LAMA2; (-) strand; PAM type: NRG; PAM sequence: TGG
tctcaaaagctaagcagggt

SEQ ID NO: 115752 - DNA, 20 bp, Artificial Sequence
  Description of Artificial Sequence: Synthetic oligonucleotide
  Target: LAMA2; (-) strand; PAM type: NRG; PAM sequence: GGG
ctgatctcaaaagctaagca

SEQ ID NO: 115753 - DNA, 20 bp, Artificial Sequence
  Description of Artificial Sequence: Synthetic oligonucleotide
  Target: LAMA2; (-) strand; PAM type: NRG; PAM sequence: AGG
tctgatctcaaaagctaagc

SEQ ID NO: 115754 - DNA, 20 bp, Artificial Sequence
  Description of Artificial Sequence: Synthetic oligonucleotide
  Target: LAMA2; (-) strand; PAM type: NRG; PAM sequence: CAG
ttctgatctcaaaagctaag

SEQ ID NO: 115755 - DNA, 20 bp, Artificial Sequence
  Description of Artificial Sequence: Synthetic oligonucleotide
  Target: LAMA2; (-) strand; PAM type: NRG; PAM sequence: AAG
cttttctgatctcaaaagct

SEQ ID NO: 115756 - DNA, 20 bp, Artificial Sequence
  Description of Artificial Sequence: Synthetic oligonucleotide
  Target: LAMA2; (-) strand; PAM type: NRG; PAM sequence: AAG
ccgatcttttctgatctcaa

SEQ ID NO: 115757 - DNA, 20 bp, Artificial Sequence
  Description of Artificial Sequence: Synthetic oligonucleotide
  Target: LAMA2; (-) strand; PAM type: NRG; PAM sequence: AAG
ctatggccaaatcaccctga

SEQ ID NO: 115758 - DNA, 20 bp, Artificial Sequence
  Description of Artificial Sequence: Synthetic oligonucleotide
  Target: LAMA2; (-) strand; PAM type: NRG; PAM sequence: TGG
gaggaaacagaaatagtcta

SEQ ID NO: 115759 - DNA, 20 bp, Artificial Sequence
  Description of Artificial Sequence: Synthetic oligonucleotide
  Target: LAMA2; (-) strand; PAM type: NRG; PAM sequence: TAG
gacagatgaggaaacagaaa

SEQ ID NO: 115760 - DNA, 20 bp, Artificial Sequence
  Description of Artificial Sequence: Synthetic oligonucleotide
  Target: LAMA2; (-) strand; PAM type: NRG; PAM sequence: CAG
tcatttgacagatgaggaaa

SEQ ID NO: 115761 - DNA, 20 bp, Artificial Sequence
  Description of Artificial Sequence: Synthetic oligonucleotide
  Target: LAMA2; (-) strand; PAM type: NRG; PAM sequence: AGG
atatcctcatttgacagatg

SEQ ID NO: 115762 - DNA, 20 bp, Artificial Sequence
  Description of Artificial Sequence: Synthetic oligonucleotide
  Target: LAMA2; (-) strand; PAM type: NRG; PAM sequence: GAG
aatatcctcatttgacagat

SEQ ID NO: 115763 - DNA, 20 bp, Artificial Sequence
  Description of Artificial Sequence: Synthetic oligonucleotide
  Target: LAMA2; (-) strand; PAM type: NRG; PAM sequence: CAG
ctgttaatatcctcatttga

SEQ ID NO: 115764 - DNA, 20 bp, Artificial Sequence
  Description of Artificial Sequence: Synthetic oligonucleotide
  Target: LAMA2; (-) strand; PAM type: NRG; PAM sequence: AAG
tcttttaaaactctgataca

SEQ ID NO: 115765 - DNA, 20 bp, Artificial Sequence
  Description of Artificial Sequence: Synthetic oligonucleotide
  Target: LAMA2; (-) strand; PAM type: NRG; PAM sequence: GAG
attaaacgttcagtatatgt

SEQ ID NO: 115766 - DNA, 20 bp, Artificial Sequence
  Description of Artificial Sequence: Synthetic oligonucleotide
  Target: LAMA2; (-) strand; PAM type: NRG; PAM sequence: CAG
tatgccatttattaaacgtt

SEQ ID NO: 115767 - DNA, 20 bp, Artificial Sequence
  Description of Artificial Sequence: Synthetic oligonucleotide
  Target: LAMA2; (-) strand; PAM type: NRG; PAM sequence: TAG
tcattattatcattactaca

SEQ ID NO: 115768 - DNA, 20 bp, Artificial Sequence
  Description of Artificial Sequence: Synthetic oligonucleotide
  Target: LAMA2; (-) strand; PAM type: NRG; PAM sequence: AAG
gtttagccctgggctggtga

SEQ ID NO: 115769 - DNA, 20 bp, Artificial Sequence
  Description of Artificial Sequence: Synthetic oligonucleotide
  Target: LAMA2; (-) strand; PAM type: NRG; PAM sequence: TGG
aaaattgtttagccctgggc

SEQ ID NO: 115770 - DNA, 20 bp, Artificial Sequence
  Description of Artificial Sequence: Synthetic oligonucleotide
  Target: LAMA2; (-) strand; PAM type: NRG; PAM sequence: GGG
aatgaaaattgtttagccct

SEQ ID NO: 115771 - DNA, 20 bp, Artificial Sequence
  Description of Artificial Sequence: Synthetic oligonucleotide
  Target: LAMA2; (-) strand; PAM type: NRG; PAM sequence: TGG
gaatgaaaattgtttagccc

SEQ ID NO: 115772 - DNA, 20 bp, Artificial Sequence
  Description of Artificial Sequence: Synthetic oligonucleotide
  Target: LAMA2; (-) strand; PAM type: NRG; PAM sequence: TAG
aatattgaatgaaaattgtt

SEQ ID NO: 115773 - DNA, 20 bp, Artificial Sequence
  Description of Artificial Sequence: Synthetic oligonucleotide
  Target: LAMA2; (-) strand; PAM type: NRG; PAM sequence: GAG
atattttacagagccgttat

SEQ ID NO: 115774 - DNA, 20 bp, Artificial Sequence
  Description of Artificial Sequence: Synthetic oligonucleotide
  Target: LAMA2; (-) strand; PAM type: NRG; PAM sequence: GAG
tagaaagactatattttaca

SEQ ID NO: 115775 - DNA, 20 bp, Artificial Sequence
  Description of Artificial Sequence: Synthetic oligonucleotide
  Target: LAMA2; (-) strand; PAM type: NRG; PAM sequence: CAG
agtagaaagactatatttta

SEQ ID NO: 115776 - DNA, 20 bp, Artificial Sequence
  Description of Artificial Sequence: Synthetic oligonucleotide
  Target: LAMA2; (-) strand; PAM type: NRG; PAM sequence: AAG
ttaactcgactaaaagtaga

SEQ ID NO: 115777 - DNA, 20 bp, Artificial Sequence
  Description of Artificial Sequence: Synthetic oligonucleotide
  Target: LAMA2; (-) strand; PAM type: NRG; PAM sequence: TAG
cttattaactcgactaaaag

SEQ ID NO: 115778 - DNA, 20 bp, Artificial Sequence
  Description of Artificial Sequence: Synthetic oligonucleotide
  Target: LAMA2; (-) strand; PAM type: NRG; PAM sequence: AAG
attcttattaactcgactaa

SEQ ID NO: 115779 - DNA, 20 bp, Artificial Sequence
  Description of Artificial Sequence: Synthetic oligonucleotide
  Target: LAMA2; (-) strand; PAM type: NRG; PAM sequence: TAG
agtgggttggttgcttaaga

SEQ ID NO: 115780 - DNA, 20 bp, Artificial Sequence
  Description of Artificial Sequence: Synthetic oligonucleotide
  Target: LAMA2; (-) strand; PAM type: NRG; PAM sequence: AAG
tgtgagtgggttggttgctt

SEQ ID NO: 115781 - DNA, 20 bp, Artificial Sequence
  Description of Artificial Sequence: Synthetic oligonucleotide
  Target: LAMA2; (-) strand; PAM type: NRG; PAM sequence: TGG
tactagtggtgtgagtgggt

SEQ ID NO: 115782 - DNA, 20 bp, Artificial Sequence
  Description of Artificial Sequence: Synthetic oligonucleotide
  Target: LAMA2; (-) strand; PAM type: NRG; PAM sequence: GGG
cttttactagtggtgtgagt

SEQ ID NO: 115783 - DNA, 20 bp, Artificial Sequence
  Description of Artificial Sequence: Synthetic oligonucleotide
  Target: LAMA2; (-) strand; PAM type: NRG; PAM sequence: TGG
ccttttactagtggtgtgag

SEQ ID NO: 115784 - DNA, 20 bp, Artificial Sequence
  Description of Artificial Sequence: Synthetic oligonucleotide
  Target: LAMA2; (-) strand; PAM type: NRG; PAM sequence: GAG
ctgccttttactagtggtgt

SEQ ID NO: 115785 - DNA, 20 bp, Artificial Sequence
  Description of Artificial Sequence: Synthetic oligonucleotide
  Target: LAMA2; (-) strand; PAM type: NRG; PAM sequence: TGG
cttactctgccttttactag

SEQ ID NO: 115786 - DNA, 20 bp, Artificial Sequence
  Description of Artificial Sequence: Synthetic oligonucleotide
  Target: LAMA2; (-) strand; PAM type: NRG; PAM sequence: TAG
attcttactctgccttttac

SEQ ID NO: 115787 - DNA, 20 bp, Artificial Sequence
  Description of Artificial Sequence: Synthetic oligonucleotide
  Target: LAMA2; (-) strand; PAM type: NRG; PAM sequence: TAG
gactttggagtctgactcgc

SEQ ID NO: 115788 - DNA, 20 bp, Artificial Sequence
  Description of Artificial Sequence: Synthetic oligonucleotide
  Target: LAMA2; (-) strand; PAM type: NRG; PAM sequence: GAG
agataaggagtcagactttg

SEQ ID NO: 115789 - DNA, 20 bp, Artificial Sequence
  Description of Artificial Sequence: Synthetic oligonucleotide
  Target: LAMA2; (-) strand; PAM type: NRG; PAM sequence: TGG
agagataaggagtcagactt

SEQ ID NO: 115790 - DNA, 20 bp, Artificial Sequence
  Description of Artificial Sequence: Synthetic oligonucleotide
  Target: LAMA2; (-) strand; PAM type: NRG; PAM sequence: CAG
gtgttccagagataaggagt

SEQ ID NO: 115791 - DNA, 20 bp, Artificial Sequence
  Description of Artificial Sequence: Synthetic oligonucleotide
  Target: LAMA2; (-) strand; PAM type: NRG; PAM sequence: GAG
cagagtgttccagagataag

SEQ ID NO: 115792 - DNA, 20 bp, Artificial Sequence
  Description of Artificial Sequence: Synthetic oligonucleotide
  Target: LAMA2; (-) strand; PAM type: NRG; PAM sequence: AGG
ggcagagtgttccagagata

SEQ ID NO: 115793 - DNA, 20 bp, Artificial Sequence
  Description of Artificial Sequence: Synthetic oligonucleotide
  Target: LAMA2; (-) strand; PAM type: NRG; PAM sequence: AAG
aggcagagtgttccagagat

SEQ ID NO: 115794 - DNA, 20 bp, Artificial Sequence
  Description of Artificial Sequence: Synthetic oligonucleotide
  Target: LAMA2; (-) strand; PAM type: NRG; PAM sequence: GAG
tggaaaggcagagtgttcca

SEQ ID NO: 115795 - DNA, 20 bp, Artificial Sequence
  Description of Artificial Sequence: Synthetic oligonucleotide
  Target: LAMA2; (-) strand; PAM type: NRG; PAM sequence: CAG
attggaaaggcagagtgttc

SEQ ID NO: 115796 - DNA, 20 bp, Artificial Sequence
  Description of Artificial Sequence: Synthetic oligonucleotide
  Target: LAMA2; (-) strand; PAM type: NRG; PAM sequence: GAG
tagaataaattggaaaggca

SEQ ID NO: 115797 - DNA, 20 bp, Artificial Sequence
  Description of Artificial Sequence: Synthetic oligonucleotide
  Target: LAMA2; (-) strand; PAM type: NRG; PAM sequence: CAG
agtagaataaattggaaagg

SEQ ID NO: 115798 - DNA, 20 bp, Artificial Sequence
  Description of Artificial Sequence: Synthetic oligonucleotide
  Target: LAMA2; (-) strand; PAM type: NRG; PAM sequence: AGG
aaaagtagaataaattggaa

SEQ ID NO: 115799 - DNA, 20 bp, Artificial Sequence
  Description of Artificial Sequence: Synthetic oligonucleotide
  Target: LAMA2; (-) strand; PAM type: NRG; PAM sequence: AAG
taaaagtagaataaattgga

SEQ ID NO: 115800 - DNA, 20 bp, Artificial Sequence
  Description of Artificial Sequence: Synthetic oligonucleotide
  Target: LAMA2; (-) strand; PAM type: NRG; PAM sequence: TGG
ctattaaaagtagaataaat

SEQ ID NO: 115801 - DNA, 20 bp, Artificial Sequence
  Description of Artificial Sequence: Synthetic oligonucleotide
  Target: LAMA2; (-) strand; PAM type: NRG; PAM sequence: TAG
ctaccatggtctattaaaag

SEQ ID NO: 115802 - DNA, 20 bp, Artificial Sequence
  Description of Artificial Sequence: Synthetic oligonucleotide
  Target: LAMA2; (-) strand; PAM type: NRG; PAM sequence: AAG
agcctaccatggtctattaa

SEQ ID NO: 115803 - DNA, 20 bp, Artificial Sequence
  Description of Artificial Sequence: Synthetic oligonucleotide
  Target: LAMA2; (-) strand; PAM type: NRG; PAM sequence: TGG
acactctcaatagcctacca

SEQ ID NO: 115804 - DNA, 20 bp, Artificial Sequence
  Description of Artificial Sequence: Synthetic oligonucleotide
  Target: LAMA2; (-) strand; PAM type: NRG; PAM sequence: TAG
aaaactggaaacactctcaa

SEQ ID NO: 115805 - DNA, 20 bp, Artificial Sequence
  Description of Artificial Sequence: Synthetic oligonucleotide
  Target: LAMA2; (-) strand; PAM type: NRG; PAM sequence: TGG
agtttctaatagtgaaaaac

SEQ ID NO: 115806 - DNA, 20 bp, Artificial Sequence
  Description of Artificial Sequence: Synthetic oligonucleotide
  Target: LAMA2; (-) strand; PAM type: NRG; PAM sequence: TAG
catcagagtatagtttctaa

SEQ ID NO: 115807 - DNA, 20 bp, Artificial Sequence
  Description of Artificial Sequence: Synthetic oligonucleotide
  Target: LAMA2; (-) strand; PAM type: NRG; PAM sequence: TAG
tagaggagctcatcagagta

SEQ ID NO: 115808 - DNA, 20 bp, Artificial Sequence
  Description of Artificial Sequence: Synthetic oligonucleotide
  Target: LAMA2; (-) strand; PAM type: NRG; PAM sequence: GAG
atgcatagaggagctcatca

SEQ ID NO: 115809 - DNA, 20 bp, Artificial Sequence
  Description of Artificial Sequence: Synthetic oligonucleotide
  Target: LAMA2; (-) strand; PAM type: NRG; PAM sequence: CAG
tgatgcatagaggagctcat

SEQ ID NO: 115810 - DNA, 20 bp, Artificial Sequence
  Description of Artificial Sequence: Synthetic oligonucleotide
  Target: LAMA2; (-) strand; PAM type: NRG; PAM sequence: GAG
aaaaagcttgatgcatagag

SEQ ID NO: 115811 - DNA, 20 bp, Artificial Sequence
  Description of Artificial Sequence: Synthetic oligonucleotide
  Target: LAMA2; (-) strand; PAM type: NRG; PAM sequence: AGG
tgaaaaagcttgatgcatag

SEQ ID NO: 115812 - DNA, 20 bp, Artificial Sequence
  Description of Artificial Sequence: Synthetic oligonucleotide
  Target: LAMA2; (-) strand; PAM type: NRG; PAM sequence: GAG
atgaaaaagcttgatgcata

SEQ ID NO: 115813 - DNA, 20 bp, Artificial Sequence
  Description of Artificial Sequence: Synthetic oligonucleotide
  Target: LAMA2; (-) strand; PAM type: NRG; PAM sequence: TAG
taatgaaaaagcttgatgca

SEQ ID NO: 115814 - DNA, 20 bp, Artificial Sequence
  Description of Artificial Sequence: Synthetic oligonucleotide
  Target: LAMA2; (-) strand; PAM type: NRG; PAM sequence: AAG
aataactggaaataatgaaa

SEQ ID NO: 115815 - DNA, 20 bp, Artificial Sequence
  Description of Artificial Sequence: Synthetic oligonucleotide
  Target: LAMA2; (-) strand; PAM type: NRG; PAM sequence: TGG
ttatctattttaagaataac

SEQ ID NO: 115816 - DNA, 20 bp, Artificial Sequence
  Description of Artificial Sequence: Synthetic oligonucleotide
  Target: LAMA2; (-) strand; PAM type: NRG; PAM sequence: AAG
cctaactacttatctatttt

SEQ ID NO: 115817 - DNA, 20 bp, Artificial Sequence
  Description of Artificial Sequence: Synthetic oligonucleotide
  Target: LAMA2; (-) strand; PAM type: NRG; PAM sequence: TGG
ccttagacatattcatcttt

SEQ ID NO: 115818 - DNA, 20 bp, Artificial Sequence
  Description of Artificial Sequence: Synthetic oligonucleotide
  Target: LAMA2; (-) strand; PAM type: NRG; PAM sequence: TAG
ggtatgtgtattgaaaacct

SEQ ID NO: 115819 - DNA, 20 bp, Artificial Sequence
  Description of Artificial Sequence: Synthetic oligonucleotide
  Target: LAMA2; (-) strand; PAM type: NRG; PAM sequence: AGG
gcctgtggaagaaacaattc

SEQ ID NO: 115820 - DNA, 20 bp, Artificial Sequence
  Description of Artificial Sequence: Synthetic oligonucleotide
  Target: LAMA2; (-) strand; PAM type: NRG; PAM sequence: CAG
agcctgtggaagaaacaatt

SEQ ID NO: 115821 - DNA, 20 bp, Artificial Sequence
  Description of Artificial Sequence: Synthetic oligonucleotide
  Target: LAMA2; (-) strand; PAM type: NRG; PAM sequence: AAG
taaattggcatagcctgtgg

SEQ ID NO: 115822 - DNA, 20 bp, Artificial Sequence
  Description of Artificial Sequence: Synthetic oligonucleotide
  Target: LAMA2; (-) strand; PAM type: NRG; PAM sequence: TGG
atgtaaattggcatagcctg

SEQ ID NO: 115823 - DNA, 20 bp, Artificial Sequence
  Description of Artificial Sequence: Synthetic oligonucleotide
  Target: LAMA2; (-) strand; PAM type: NRG; PAM sequence: TAG
gataagaatgtaaattggca

SEQ ID NO: 115824 - DNA, 20 bp, Artificial Sequence
  Description of Artificial Sequence: Synthetic oligonucleotide
  Target: LAMA2; (-) strand; PAM type: NRG; PAM sequence: TGG
ttggtgataagaatgtaaat

SEQ ID NO: 115825 - DNA, 20 bp, Artificial Sequence
  Description of Artificial Sequence: Synthetic oligonucleotide
  Target: LAMA2; (-) strand; PAM type: NRG; PAM sequence: AAG
atctttgttgtattggtgat

SEQ ID NO: 115826 - DNA, 20 bp, Artificial Sequence
  Description of Artificial Sequence: Synthetic oligonucleotide
  Target: LAMA2; (-) strand; PAM type: NRG; PAM sequence: TGG
tgtgaccatctttgttgtat

SEQ ID NO: 115827 - DNA, 20 bp, Artificial Sequence
  Description of Artificial Sequence: Synthetic oligonucleotide
  Target: LAMA2; (-) strand; PAM type: NRG; PAM sequence: TAG
cacatgagctgtaaagagtg

SEQ ID NO: 115828 - DNA, 20 bp, Artificial Sequence
  Description of Artificial Sequence: Synthetic oligonucleotide
  Target: LAMA2; (-) strand; PAM type: NRG; PAM sequence: GAG
cacaacacatgagctgtaaa

SEQ ID NO: 115829 - DNA, 20 bp, Artificial Sequence
  Description of Artificial Sequence: Synthetic oligonucleotide
  Target: LAMA2; (-) strand; PAM type: NRG; PAM sequence: AAG
accacaacacatgagctgta

SEQ ID NO: 115830 - DNA, 20 bp, Artificial Sequence
  Description of Artificial Sequence: Synthetic oligonucleotide
  Target: LAMA2; (-) strand; PAM type: NRG; PAM sequence: GAG
ggaatataaccacaacacat

SEQ ID NO: 115831 - DNA, 20 bp, Artificial Sequence
  Description of Artificial Sequence: Synthetic oligonucleotide
  Target: LAMA2; (-) strand; PAM type: NRG; PAM sequence: TGG
ttgcccacccattactggta

SEQ ID NO: 115832 - DNA, 20 bp, Artificial Sequence
  Description of Artificial Sequence: Synthetic oligonucleotide
  Target: LAMA2; (-) strand; PAM type: NRG; PAM sequence: TGG
caacattgcccacccattac

SEQ ID NO: 115833 - DNA, 20 bp, Artificial Sequence
  Description of Artificial Sequence: Synthetic oligonucleotide
  Target: LAMA2; (-) strand; PAM type: NRG; PAM sequence: AAG
agttttcaagatctgcactc

SEQ ID NO: 115834 - DNA, 20 bp, Artificial Sequence
  Description of Artificial Sequence: Synthetic oligonucleotide
  Target: LAMA2; (-) strand; PAM type: NRG; PAM sequence: AAG
tgagatattcaagagttttc

SEQ ID NO: 115835 - DNA, 20 bp, Artificial Sequence
  Description of Artificial Sequence: Synthetic oligonucleotide
  Target: LAMA2; (-) strand; PAM type: NRG; PAM sequence: GAG
gaagagaatgagatattcaa

SEQ ID NO: 115836 - DNA, 20 bp, Artificial Sequence
  Description of Artificial Sequence: Synthetic oligonucleotide
  Target: LAMA2; (-) strand; PAM type: NRG; PAM sequence: AAG
aggaagagaatgagatattc

SEQ ID NO: 115837 - DNA, 20 bp, Artificial Sequence
  Description of Artificial Sequence: Synthetic oligonucleotide
  Target: LAMA2; (-) strand; PAM type: NRG; PAM sequence: GAG
tggacactaaggaagagaat

SEQ ID NO: 115838 - DNA, 20 bp, Artificial Sequence
  Description of Artificial Sequence: Synthetic oligonucleotide
  Target: LAMA2; (-) strand; PAM type: NRG; PAM sequence: GAG
ccatcgtggacactaaggaa

SEQ ID NO: 115839 - DNA, 20 bp, Artificial Sequence
  Description of Artificial Sequence: Synthetic oligonucleotide
  Target: LAMA2; (-) strand; PAM type: NRG; PAM sequence: AAG
ttccatcgtggacactaagg

SEQ ID NO: 115840 - DNA, 20 bp, Artificial Sequence
  Description of Artificial Sequence: Synthetic oligonucleotide
  Target: LAMA2; (-) strand; PAM type: NRG; PAM sequence: AGG
caattccatcgtggacacta

SEQ ID NO: 115841 - DNA, 20 bp, Artificial Sequence
  Description of Artificial Sequence: Synthetic oligonucleotide
  Target: LAMA2; (-) strand; PAM type: NRG; PAM sequence: AAG
ccaattccatcgtggacact

SEQ ID NO: 115842 - DNA, 20 bp, Artificial Sequence
  Description of Artificial Sequence: Synthetic oligonucleotide
  Target: LAMA2; (-) strand; PAM type: NRG; PAM sequence: TGG
ttgctcaaccaattccatcg

SEQ ID NO: 115843 - DNA, 20 bp, Artificial Sequence
  Description of Artificial Sequence: Synthetic oligonucleotide
  Target: LAMA2; (-) strand; PAM type: NRG; PAM sequence: GAG
ataactatttctagtgcaag

SEQ ID NO: 115844 - DNA, 20 bp, Artificial Sequence
  Description of Artificial Sequence: Synthetic oligonucleotide
  Target: LAMA2; (-) strand; PAM type: NRG; PAM sequence: AGG
gaataactatttctagtgca

SEQ ID NO: 115845 - DNA, 20 bp, Artificial Sequence
  Description of Artificial Sequence: Synthetic oligonucleotide
  Target: LAMA2; (-) strand; PAM type: NRG; PAM sequence: AAG
tgaataactatttctagtgc

SEQ ID NO: 115846 - DNA, 20 bp, Artificial Sequence
  Description of Artificial Sequence: Synthetic oligonucleotide
  Target: LAMA2; (-) strand; PAM type: NRG; PAM sequence: TAG
tctcattgaataactatttc

SEQ ID NO: 115847 - DNA, 20 bp, Artificial Sequence
  Description of Artificial Sequence: Synthetic oligonucleotide
  Target: LAMA2; (-) strand; PAM type: NRG; PAM sequence: TGG
tttcttgaatgatggttatc

SEQ ID NO: 115848 - DNA, 20 bp, Artificial Sequence
  Description of Artificial Sequence: Synthetic oligonucleotide
  Target: LAMA2; (-) strand; PAM type: NRG; PAM sequence: TGG
taaccagttttcttgaatga

SEQ ID NO: 115849 - DNA, 20 bp, Artificial Sequence
  Description of Artificial Sequence: Synthetic oligonucleotide
  Target: LAMA2; (-) strand; PAM type: NRG; PAM sequence: CAG
ggatgcttggagtaaataac

SEQ ID NO: 115850 - DNA, 20 bp, Artificial Sequence
  Description of Artificial Sequence: Synthetic oligonucleotide
  Target: LAMA2; (-) strand; PAM type: NRG; PAM sequence: GAG
aaaggatgaaaggatgcttg

SEQ ID NO: 115851 - DNA, 20 bp, Artificial Sequence
  Description of Artificial Sequence: Synthetic oligonucleotide
  Target: LAMA2; (-) strand; PAM type: NRG; PAM sequence: TGG
acaaaggatgaaaggatgct

SEQ ID NO: 115852 - DNA, 20 bp, Artificial Sequence
  Description of Artificial Sequence: Synthetic oligonucleotide
  Target: LAMA2; (-) strand; PAM type: NRG; PAM sequence: AGG
tctattttacaaaggatgaa

SEQ ID NO: 115853 - DNA, 20 bp, Artificial Sequence
  Description of Artificial Sequence: Synthetic oligonucleotide
  Target: LAMA2; (-) strand; PAM type: NRG; PAM sequence: AAG
ctctattttacaaaggatga

SEQ ID NO: 115854 - DNA, 20 bp, Artificial Sequence
  Description of Artificial Sequence: Synthetic oligonucleotide
  Target: LAMA2; (-) strand; PAM type: NRG; PAM sequence: AGG
gaaatatctctattttacaa

SEQ ID NO: 115855 - DNA, 20 bp, Artificial Sequence
  Description of Artificial Sequence: Synthetic oligonucleotide
  Target: LAMA2; (-) strand; PAM type: NRG; PAM sequence: AAG
tgaaatatctctattttaca

SEQ ID NO: 115856 - DNA, 20 bp, Artificial Sequence
  Description of Artificial Sequence: Synthetic oligonucleotide
  Target: LAMA2; (-) strand; PAM type: NRG; PAM sequence: TAG
actctatgttgtaggcaaga

SEQ ID NO: 115857 - DNA, 20 bp, Artificial Sequence
  Description of Artificial Sequence: Synthetic oligonucleotide
  Target: LAMA2; (-) strand; PAM type: NRG; PAM sequence: AAG
cataactctatgttgtaggc

SEQ ID NO: 115858 - DNA, 20 bp, Artificial Sequence
  Description of Artificial Sequence: Synthetic oligonucleotide
  Target: LAMA2; (-) strand; PAM type: NRG; PAM sequence: AGG
ttttcataactctatgttgt

SEQ ID NO: 115859 - DNA, 20 bp, Artificial Sequence
  Description of Artificial Sequence: Synthetic oligonucleotide
  Target: LAMA2; (-) strand; PAM type: NRG; PAM sequence: TAG
tttttcataactctatgttg

SEQ ID NO: 115860 - DNA, 20 bp, Artificial Sequence
  Description of Artificial Sequence: Synthetic oligonucleotide
  Target: LAMA2; (-) strand; PAM type: NRG; PAM sequence: CAG
ggtatgctttttccagtttt

SEQ ID NO: 115861 - DNA, 20 bp, Artificial Sequence
  Description of Artificial Sequence: Synthetic oligonucleotide
  Target: LAMA2; (-) strand; PAM type: NRG; PAM sequence: CAG
ctatgtgggtatgctttttc

SEQ ID NO: 115862 - DNA, 20 bp, Artificial Sequence
  Description of Artificial Sequence: Synthetic oligonucleotide
  Target: LAMA2; (-) strand; PAM type: NRG; PAM sequence: GGG
attcctcagagtgtctatgt

SEQ ID NO: 115863 - DNA, 20 bp, Artificial Sequence
  Description of Artificial Sequence: Synthetic oligonucleotide
  Target: LAMA2; (-) strand; PAM type: NRG; PAM sequence: TGG
gattcctcagagtgtctatg

SEQ ID NO: 115864 - DNA, 20 bp, Artificial Sequence
  Description of Artificial Sequence: Synthetic oligonucleotide
  Target: LAMA2; (-) strand; PAM type: NRG; PAM sequence: GAG
ctaaatgcagggattcctca

SEQ ID NO: 115865 - DNA, 20 bp, Artificial Sequence
  Description of Artificial Sequence: Synthetic oligonucleotide
  Target: LAMA2; (-) strand; PAM type: NRG; PAM sequence: CAG
cactaaatgcagggattcct

SEQ ID NO: 115866 - DNA, 20 bp, Artificial Sequence
  Description of Artificial Sequence: Synthetic oligonucleotide
  Target: LAMA2; (-) strand; PAM type: NRG; PAM sequence: GGG
gtagttattcactaaatgca

SEQ ID NO: 115867 - DNA, 20 bp, Artificial Sequence
  Description of Artificial Sequence: Synthetic oligonucleotide
  Target: LAMA2; (-) strand; PAM type: NRG; PAM sequence: AGG
agtagttattcactaaatgc

SEQ ID NO: 115868 - DNA, 20 bp, Artificial Sequence
  Description of Artificial Sequence: Synthetic oligonucleotide
  Target: LAMA2; (-) strand; PAM type: NRG; PAM sequence: CAG
tagtagttattcactaaatg

SEQ ID NO: 115869 - DNA, 20 bp, Artificial Sequence
  Description of Artificial Sequence: Synthetic oligonucleotide
  Target: LAMA2; (-) strand; PAM type: NRG; PAM sequence: TAG
gcagagtactggacacatag

SEQ ID NO: 115870 - DNA, 20 bp, Artificial Sequence
  Description of Artificial Sequence: Synthetic oligonucleotide
  Target: LAMA2; (-) strand; PAM type: NRG; PAM sequence: TAG
ctggcagagtactggacaca

SEQ ID NO: 115871 - DNA, 20 bp, Artificial Sequence
  Description of Artificial Sequence: Synthetic oligonucleotide
  Target: LAMA2; (-) strand; PAM type: NRG; PAM sequence: TGG
tgaaatgcctggcagagtac

SEQ ID NO: 115872 - DNA, 20 bp, Artificial Sequence
  Description of Artificial Sequence: Synthetic oligonucleotide
  Target: LAMA2; (-) strand; PAM type: NRG; PAM sequence: GAG
cagatatgaaatgcctggca

SEQ ID NO: 115873 - DNA, 20 bp, Artificial Sequence
  Description of Artificial Sequence: Synthetic oligonucleotide
  Target: LAMA2; (-) strand; PAM type: NRG; PAM sequence: CAG
aacagatatgaaatgcctgg

SEQ ID NO: 115874 - DNA, 20 bp, Artificial Sequence
  Description of Artificial Sequence: Synthetic oligonucleotide
  Target: LAMA2; (-) strand; PAM type: NRG; PAM sequence: TGG
aataacagatatgaaatgcc

SEQ ID NO: 115875 - DNA, 20 bp, Artificial Sequence
  Description of Artificial Sequence: Synthetic oligonucleotide
  Target: LAMA2; (-) strand; PAM type: NRG; PAM sequence: CAG
gtgggaataaaatgaaataa

SEQ ID NO: 115876 - DNA, 20 bp, Artificial Sequence
  Description of Artificial Sequence: Synthetic oligonucleotide
  Target: LAMA2; (-) strand; PAM type: NRG; PAM sequence: GGG
tgtaaataaaacaatagggt

SEQ ID NO: 115877 - DNA, 20 bp, Artificial Sequence
  Description of Artificial Sequence: Synthetic oligonucleotide
  Target: LAMA2; (-) strand; PAM type: NRG; PAM sequence: TGG
atgtaaataaaacaataggg

SEQ ID NO: 115878 - DNA, 20 bp, Artificial Sequence
  Description of Artificial Sequence: Synthetic oligonucleotide
  Target: LAMA2; (-) strand; PAM type: NRG; PAM sequence: GGG
taaatgtaaataaaacaata

SEQ ID NO: 115879 - DNA, 20 bp, Artificial Sequence
  Description of Artificial Sequence: Synthetic oligonucleotide
  Target: LAMA2; (-) strand; PAM type: NRG; PAM sequence: AGG
ataaatgtaaataaaacaat

SEQ ID NO: 115880 - DNA, 20 bp, Artificial Sequence
  Description of Artificial Sequence: Synthetic oligonucleotide
  Target: LAMA2; (-) strand; PAM type: NRG; PAM sequence: TAG
aataaatgtaaataaaacaa

SEQ ID NO: 115881 - DNA, 20 bp, Artificial Sequence
  Description of Artificial Sequence: Synthetic oligonucleotide
  Target: LAMA2; (-) strand; PAM type: NRG; PAM sequence: TGG
tttgtgaaatataatacttc

SEQ ID NO: 115882 - DNA, 20 bp, Artificial Sequence
  Description of Artificial Sequence: Synthetic oligonucleotide
  Target: LAMA2; (-) strand; PAM type: NRG; PAM sequence: AGG
cttgctagctgtgtgatctt

SEQ ID NO: 115883 - DNA, 20 bp, Artificial Sequence
  Description of Artificial Sequence: Synthetic oligonucleotide
  Target: LAMA2; (-) strand; PAM type: NRG; PAM sequence: TAG
acttgctagctgtgtgatct

SEQ ID NO: 115884 - DNA, 20 bp, Artificial Sequence
  Description of Artificial Sequence: Synthetic oligonucleotide
  Target: LAMA2; (-) strand; PAM type: NRG; PAM sequence: TAG
actgacagctttccacttgc

SEQ ID NO: 115885 - DNA, 20 bp, Artificial Sequence
  Description of Artificial Sequence: Synthetic oligonucleotide
  Target: LAMA2; (-) strand; PAM type: NRG; PAM sequence: CAG
aactaaccccccatgactga

SEQ ID NO: 115886 - DNA, 20 bp, Artificial Sequence
  Description of Artificial Sequence: Synthetic oligonucleotide
  Target: LAMA2; (-) strand; PAM type: NRG; PAM sequence: TGG
tttaggatgaaatcaactcc

SEQ ID NO: 115887 - DNA, 20 bp, Artificial Sequence
  Description of Artificial Sequence: Synthetic oligonucleotide
  Target: LAMA2; (-) strand; PAM type: NRG; PAM sequence: AGG
gcagatctcaggaatgcttt

SEQ ID NO: 115888 - DNA, 20 bp, Artificial Sequence
  Description of Artificial Sequence: Synthetic oligonucleotide
  Target: LAMA2; (-) strand; PAM type: NRG; PAM sequence: TAG
ggcagatctcaggaatgctt

SEQ ID NO: 115889 - DNA, 20 bp, Artificial Sequence
  Description of Artificial Sequence: Synthetic oligonucleotide
  Target: LAMA2; (-) strand; PAM type: NRG; PAM sequence: AGG
aaatccatgtggcagatctc

SEQ ID NO: 115890 - DNA, 20 bp, Artificial Sequence
  Description of Artificial Sequence: Synthetic oligonucleotide
  Target: LAMA2; (-) strand; PAM type: NRG; PAM sequence: CAG
gaaatccatgtggcagatct

SEQ ID NO: 115891 - DNA, 20 bp, Artificial Sequence
  Description of Artificial Sequence: Synthetic oligonucleotide
  Target: LAMA2; (-) strand; PAM type: NRG; PAM sequence: CAG
acattctgaaatccatgtgg

SEQ ID NO: 115892 - DNA, 20 bp, Artificial Sequence
  Description of Artificial Sequence: Synthetic oligonucleotide
  Target: LAMA2; (-) strand; PAM type: NRG; PAM sequence: TGG
gaaacattctgaaatccatg

SEQ ID NO: 115893 - DNA, 20 bp, Artificial Sequence
  Description of Artificial Sequence: Synthetic oligonucleotide
  Target: LAMA2; (-) strand; PAM type: NRG; PAM sequence: AGG
gctgaattatgaaagagctg

SEQ ID NO: 115894 - DNA, 20 bp, Artificial Sequence
  Description of Artificial Sequence: Synthetic oligonucleotide
  Target: LAMA2; (-) strand; PAM type: NRG; PAM sequence: GAG
ggctgaattatgaaagagct

SEQ ID NO: 115895 - DNA, 20 bp, Artificial Sequence
  Description of Artificial Sequence: Synthetic oligonucleotide
  Target: LAMA2; (-) strand; PAM type: NRG; PAM sequence: GAG
cctgtggctgaattatgaaa

SEQ ID NO: 115896 - DNA, 20 bp, Artificial Sequence
  Description of Artificial Sequence: Synthetic oligonucleotide
  Target: LAMA2; (-) strand; PAM type: NRG; PAM sequence: AAG
aacctgtggctgaattatga

SEQ ID NO: 115897 - DNA, 20 bp, Artificial Sequence
  Description of Artificial Sequence: Synthetic oligonucleotide
  Target: LAMA2; (-) strand; PAM type: NRG; PAM sequence: TGG
ctaagcaaagatctaacctg

SEQ ID NO: 115898 - DNA, 20 bp, Artificial Sequence
  Description of Artificial Sequence: Synthetic oligonucleotide
  Target: LAMA2; (-) strand; PAM type: NRG; PAM sequence: AAG
aaccttacctttgctaagca

SEQ ID NO: 115899 - DNA, 20 bp, Artificial Sequence
  Description of Artificial Sequence: Synthetic oligonucleotide
  Target: LAMA2; (-) strand; PAM type: NRG; PAM sequence: AAG
tcattaaccttacctttgct

SEQ ID NO: 115900 - DNA, 20 bp, Artificial Sequence
  Description of Artificial Sequence: Synthetic oligonucleotide
  Target: LAMA2; (-) strand; PAM type: NRG; PAM sequence: AGG
ggtatatgagggtgaagagg

SEQ ID NO: 115901 - DNA, 20 bp, Artificial Sequence
  Description of Artificial Sequence: Synthetic oligonucleotide
  Target: LAMA2; (-) strand; PAM type: NRG; PAM sequence: GAG
aggtatatgagggtgaagag

SEQ ID NO: 115902 - DNA, 20 bp, Artificial Sequence
  Description of Artificial Sequence: Synthetic oligonucleotide
  Target: LAMA2; (-) strand; PAM type: NRG; PAM sequence: AGG
tcaggtatatgagggtgaag

SEQ ID NO: 115903 - DNA, 20 bp, Artificial Sequence
  Description of Artificial Sequence: Synthetic oligonucleotide
  Target: LAMA2; (-) strand; PAM type: NRG; PAM sequence: GAG
ttcaggtatatgagggtgaa

SEQ ID NO: 115904 - DNA, 20 bp, Artificial Sequence
  Description of Artificial Sequence: Synthetic oligonucleotide
  Target: LAMA2; (-) strand; PAM type: NRG; PAM sequence: AAG
ttttcaggtatatgagggtg

SEQ ID NO: 115905 - DNA, 20 bp, Artificial Sequence
  Description of Artificial Sequence: Synthetic oligonucleotide
  Target: LAMA2; (-) strand; PAM type: NRG; PAM sequence: GGG
catgattttcaggtatatga

SEQ ID NO: 115906 - DNA, 20 bp, Artificial Sequence
  Description of Artificial Sequence: Synthetic oligonucleotide
  Target: LAMA2; (-) strand; PAM type: NRG; PAM sequence: AGG
acatgattttcaggtatatg

SEQ ID NO: 115907 - DNA, 20 bp, Artificial Sequence
  Description of Artificial Sequence: Synthetic oligonucleotide
  Target: LAMA2; (-) strand; PAM type: NRG; PAM sequence: GAG
cacatgattttcaggtatat

SEQ ID NO: 115908 - DNA, 20 bp, Artificial Sequence
  Description of Artificial Sequence: Synthetic oligonucleotide
  Target: LAMA2; (-) strand; PAM type: NRG; PAM sequence: AGG
ctgagaaacacatgattttc

SEQ ID NO: 115909 - DNA, 20 bp, Artificial Sequence
  Description of Artificial Sequence: Synthetic oligonucleotide
  Target: LAMA2; (-) strand; PAM type: NRG; PAM sequence: CAG
tctgagaaacacatgatttt

SEQ ID NO: 115910 - DNA, 20 bp, Artificial Sequence
  Description of Artificial Sequence: Synthetic oligonucleotide
  Target: LAMA2; (-) strand; PAM type: NRG; PAM sequence: GAG
gaaaacatgtttatgagtct

SEQ ID NO: 115911 - DNA, 20 bp, Artificial Sequence
  Description of Artificial Sequence: Synthetic oligonucleotide
  Target: LAMA2; (-) strand; PAM type: NRG; PAM sequence: GAG
tcaactgaaaacatgtttat

SEQ ID NO: 115912 - DNA, 20 bp, Artificial Sequence
  Description of Artificial Sequence: Synthetic oligonucleotide
  Target: LAMA2; (-) strand; PAM type: NRG; PAM sequence: AAG
attaggatccaaggtcaaaa

SEQ ID NO: 115913 - DNA, 20 bp, Artificial Sequence
  Description of Artificial Sequence: Synthetic oligonucleotide
  Target: LAMA2; (-) strand; PAM type: NRG; PAM sequence: AGG
taagtggacattaggatcca

SEQ ID NO: 115914 - DNA, 20 bp, Artificial Sequence
  Description of Artificial Sequence: Synthetic oligonucleotide
  Target: LAMA2; (-) strand; PAM type: NRG; PAM sequence: AAG
ataagtggacattaggatcc

SEQ ID NO: 115915 - DNA, 20 bp, Artificial Sequence
  Description of Artificial Sequence: Synthetic oligonucleotide
  Target: LAMA2; (-) strand; PAM type: NRG; PAM sequence: AGG
catttttataagtggacatt

SEQ ID NO: 115916 - DNA, 20 bp, Artificial Sequence
  Description of Artificial Sequence: Synthetic oligonucleotide
  Target: LAMA2; (-) strand; PAM type: NRG; PAM sequence: TAG
acatttttataagtggacat

SEQ ID NO: 115917 - DNA, 20 bp, Artificial Sequence
  Description of Artificial Sequence: Synthetic oligonucleotide
  Target: LAMA2; (-) strand; PAM type: NRG; PAM sequence: TGG
cctagaaacatttttataag

SEQ ID NO: 115918 - DNA, 20 bp, Artificial Sequence
  Description of Artificial Sequence: Synthetic oligonucleotide
  Target: LAMA2; (-) strand; PAM type: NRG; PAM sequence: AAG
tctcctagaaacatttttat

SEQ ID NO: 115919 - DNA, 20 bp, Artificial Sequence
  Description of Artificial Sequence: Synthetic oligonucleotide
  Target: LAMA2; (-) strand; PAM type: NRG; PAM sequence: TAG
gaaattaggctgttttctcc

SEQ ID NO: 115920 - DNA, 20 bp, Artificial Sequence
  Description of Artificial Sequence: Synthetic oligonucleotide
  Target: LAMA2; (-) strand; PAM type: NRG; PAM sequence: AGG
aagttagtcatttagaaatt

SEQ ID NO: 115921 - DNA, 20 bp, Artificial Sequence
  Description of Artificial Sequence: Synthetic oligonucleotide
  Target: LAMA2; (-) strand; PAM type: NRG; PAM sequence: TAG
taagttagtcatttagaaat

SEQ ID NO: 115922 - DNA, 20 bp, Artificial Sequence
  Description of Artificial Sequence: Synthetic oligonucleotide
  Target: LAMA2; (-) strand; PAM type: NRG; PAM sequence: TAG
ataattttaagttagtcatt

SEQ ID NO: 115923 - DNA, 20 bp, Artificial Sequence
  Description of Artificial Sequence: Synthetic oligonucleotide
  Target: LAMA2; (-) strand; PAM type: NRG; PAM sequence: TAG
tttagtttataattttaagt

SEQ ID NO: 115924 - DNA, 20 bp, Artificial Sequence
  Description of Artificial Sequence: Synthetic oligonucleotide
  Target: LAMA2; (-) strand; PAM type: NRG; PAM sequence: AAG
caattttagtttataatttt

SEQ ID NO: 115925 - DNA, 20 bp, Artificial Sequence
  Description of Artificial Sequence: Synthetic oligonucleotide
  Target: LAMA2; (-) strand; PAM type: NRG; PAM sequence: TAG
tttagggctcttgccaattt

SEQ ID NO: 115926 - DNA, 20 bp, Artificial Sequence
  Description of Artificial Sequence: Synthetic oligonucleotide
  Target: LAMA2; (-) strand; PAM type: NRG; PAM sequence: GGG
attggaccagatgatcttta

SEQ ID NO: 115927 - DNA, 20 bp, Artificial Sequence
  Description of Artificial Sequence: Synthetic oligonucleotide
  Target: LAMA2; (-) strand; PAM type: NRG; PAM sequence: AGG
gattggaccagatgatcttt

SEQ ID NO: 115928 - DNA, 20 bp, Artificial Sequence
  Description of Artificial Sequence: Synthetic oligonucleotide
  Target: LAMA2; (-) strand; PAM type: NRG; PAM sequence: TAG
tgattggaccagatgatctt

SEQ ID NO: 115929 - DNA, 20 bp, Artificial Sequence
  Description of Artificial Sequence: Synthetic oligonucleotide
  Target: LAMA2; (-) strand; PAM type: NRG; PAM sequence: CAG
cattaagatggtgattggac

SEQ ID NO: 115930 - DNA, 20 bp, Artificial Sequence
  Description of Artificial Sequence: Synthetic oligonucleotide
  Target: LAMA2; (-) strand; PAM type: NRG; PAM sequence: TGG
ccatgcattaagatggtgat

SEQ ID NO: 115931 - DNA, 20 bp, Artificial Sequence
  Description of Artificial Sequence: Synthetic oligonucleotide
  Target: LAMA2; (-) strand; PAM type: NRG; PAM sequence: TGG
aaggaacccatgcattaaga

SEQ ID NO: 115932 - DNA, 20 bp, Artificial Sequence
  Description of Artificial Sequence: Synthetic oligonucleotide
  Target: LAMA2; (-) strand; PAM type: NRG; PAM sequence: AAG
gtaaaaggaacccatgcatt

SEQ ID NO: 115933 - DNA, 20 bp, Artificial Sequence
  Description of Artificial Sequence: Synthetic oligonucleotide
  Target: LAMA2; (-) strand; PAM type: NRG; PAM sequence: AGG
ggctgtaagtatcatgtaaa

SEQ ID NO: 115934 - DNA, 20 bp, Artificial Sequence
  Description of Artificial Sequence: Synthetic oligonucleotide
  Target: LAMA2; (-) strand; PAM type: NRG; PAM sequence: AAG
aggctgtaagtatcatgtaa

SEQ ID NO: 115935 - DNA, 20 bp, Artificial Sequence
  Description of Artificial Sequence: Synthetic oligonucleotide
  Target: LAMA2; (-) strand; PAM type: NRG; PAM sequence: AAG
aatgttcaagcaaaggctgt

SEQ ID NO: 115936 - DNA, 20 bp, Artificial Sequence
  Description of Artificial Sequence: Synthetic oligonucleotide
  Target: LAMA2; (-) strand; PAM type: NRG; PAM sequence: AGG
tcaatgaaatgttcaagcaa

SEQ ID NO: 115937 - DNA, 20 bp, Artificial Sequence
  Description of Artificial Sequence: Synthetic oligonucleotide
  Target: LAMA2; (-) strand; PAM type: NRG; PAM sequence: AAG
gtcaatgaaatgttcaagca

SEQ ID NO: 115938 - DNA, 20 bp, Artificial Sequence
  Description of Artificial Sequence: Synthetic oligonucleotide
  Target: LAMA2; (-) strand; PAM type: NRG; PAM sequence: AAG
atcttgtcaatgaaatgttc

SEQ ID NO: 115939 - DNA, 20 bp, Artificial Sequence
  Description of Artificial Sequence: Synthetic oligonucleotide
  Target: LAMA2; (-) strand; PAM type: NRG; PAM sequence: TGG
agcctgccttgtcataacac

SEQ ID NO: 115940 - DNA, 20 bp, Artificial Sequence
  Description of Artificial Sequence: Synthetic oligonucleotide
  Target: LAMA2; (-) strand; PAM type: NRG; PAM sequence: GAG
cgatggctttctaacaactc

SEQ ID NO: 115941 - DNA, 20 bp, Artificial Sequence
  Description of Artificial Sequence: Synthetic oligonucleotide
  Target: LAMA2; (-) strand; PAM type: NRG; PAM sequence: TGG
ttttaacttaatgtaaccga

SEQ ID NO: 115942 - DNA, 20 bp, Artificial Sequence
  Description of Artificial Sequence: Synthetic oligonucleotide
  Target: LAMA2; (-) strand; PAM type: NRG; PAM sequence: CAG
acatagaagttttagggact

SEQ ID NO: 115943 - DNA, 20 bp, Artificial Sequence
  Description of Artificial Sequence: Synthetic oligonucleotide
  Target: LAMA2; (-) strand; PAM type: NRG; PAM sequence: GGG
atcattacatagaagtttta

SEQ ID NO: 115944 - DNA, 20 bp, Artificial Sequence
  Description of Artificial Sequence: Synthetic oligonucleotide
  Target: LAMA2; (-) strand; PAM type: NRG; PAM sequence: AGG
aatcattacatagaagtttt

SEQ ID NO: 115945 - DNA, 20 bp, Artificial Sequence
  Description of Artificial Sequence: Synthetic oligonucleotide
  Target: LAMA2; (-) strand; PAM type: NRG; PAM sequence: TAG
caatcattacatagaagttt

SEQ ID NO: 115946 - DNA, 20 bp, Artificial Sequence
  Description of Artificial Sequence: Synthetic oligonucleotide
  Target: LAMA2; (-) strand; PAM type: NRG; PAM sequence: AAG
gaaatacaatcattacatag

SEQ ID NO: 115947 - DNA, 20 bp, Artificial Sequence
  Description of Artificial Sequence: Synthetic oligonucleotide
  Target: LAMA2; (-) strand; PAM type: NRG; PAM sequence: TAG
atagaaatacaatcattaca

SEQ ID NO: 115948 - DNA, 20 bp, Artificial Sequence
  Description of Artificial Sequence: Synthetic oligonucleotide
  Target: LAMA2; (-) strand; PAM type: NRG; PAM sequence: TAG
aaatgtaatgtgtttgccta

SEQ ID NO: 115949 - DNA, 20 bp, Artificial Sequence
  Description of Artificial Sequence: Synthetic oligonucleotide
  Target: LAMA2; (-) strand; PAM type: NRG; PAM sequence: AGG
attgaagggatgttagacag

SEQ ID NO: 115950 - DNA, 20 bp, Artificial Sequence
  Description of Artificial Sequence: Synthetic oligonucleotide
  Target: LAMA2; (-) strand; PAM type: NRG; PAM sequence: GAG
tattgaagggatgttagaca

SEQ ID NO: 115951 - DNA, 20 bp, Artificial Sequence
  Description of Artificial Sequence: Synthetic oligonucleotide
  Target: LAMA2; (-) strand; PAM type: NRG; PAM sequence: CAG
attattgaagggatgttaga

SEQ ID NO: 115952 - DNA, 20 bp, Artificial Sequence
  Description of Artificial Sequence: Synthetic oligonucleotide
  Target: LAMA2; (-) strand; PAM type: NRG; PAM sequence: TAG
tcaaattattgaagggatgt

SEQ ID NO: 115953 - DNA, 20 bp, Artificial Sequence
  Description of Artificial Sequence: Synthetic oligonucleotide
  Target: LAMA2; (-) strand; PAM type: NRG; PAM sequence: GGG
gctattttcaaattattgaa

SEQ ID NO: 115954 - DNA, 20 bp, Artificial Sequence
  Description of Artificial Sequence: Synthetic oligonucleotide
  Target: LAMA2; (-) strand; PAM type: NRG; PAM sequence: AGG
agctattttcaaattattga

SEQ ID NO: 115955 - DNA, 20 bp, Artificial Sequence
  Description of Artificial Sequence: Synthetic oligonucleotide
  Target: LAMA2; (-) strand; PAM type: NRG; PAM sequence: AAG
tagctattttcaaattattg

SEQ ID NO: 115956 - DNA, 20 bp, Artificial Sequence
  Description of Artificial Sequence: Synthetic oligonucleotide
  Target: LAMA2; (-) strand; PAM type: NRG; PAM sequence: TAG
gcctagggaaggagaagact

SEQ ID NO: 115957 - DNA, 20 bp, Artificial Sequence
  Description of Artificial Sequence: Synthetic oligonucleotide
  Target: LAMA2; (-) strand; PAM type: NRG; PAM sequence: AAG
tggttagcctagggaaggag

SEQ ID NO: 115958 - DNA, 20 bp, Artificial Sequence
  Description of Artificial Sequence: Synthetic oligonucleotide
  Target: LAMA2; (-) strand; PAM type: NRG; PAM sequence: GAG
aaatggttagcctagggaag

SEQ ID NO: 115959 - DNA, 20 bp, Artificial Sequence
  Description of Artificial Sequence: Synthetic oligonucleotide
  Target: LAMA2; (-) strand; PAM type: NRG; PAM sequence: AGG
ggaaatggttagcctaggga

SEQ ID NO: 115960 - DNA, 20 bp, Artificial Sequence
  Description of Artificial Sequence: Synthetic oligonucleotide
  Target: LAMA2; (-) strand; PAM type: NRG; PAM sequence: AAG
gggaaatggttagcctaggg

SEQ ID NO: 115961 - DNA, 20 bp, Artificial Sequence
  Description of Artificial Sequence: Synthetic oligonucleotide
  Target: LAMA2; (-) strand; PAM type: NRG; PAM sequence: GGG
ctagggaaatggttagccta

SEQ ID NO: 115962 - DNA, 20 bp, Artificial Sequence
  Description of Artificial Sequence: Synthetic oligonucleotide
  Target: LAMA2; (-) strand; PAM type: NRG; PAM sequence: AGG
gctagggaaatggttagcct

SEQ ID NO: 115963 - DNA, 20 bp, Artificial Sequence
  Description of Artificial Sequence: Synthetic oligonucleotide
  Target: LAMA2; (-) strand; PAM type: NRG; PAM sequence: TAG
agctagggaaatggttagcc

SEQ ID NO: 115964 - DNA, 20 bp, Artificial Sequence
  Description of Artificial Sequence: Synthetic oligonucleotide
  Target: LAMA2; (-) strand; PAM type: NRG; PAM sequence: TAG
acctaagctagggaaatggt

SEQ ID NO: 115965 - DNA, 20 bp, Artificial Sequence
  Description of Artificial Sequence: Synthetic oligonucleotide
  Target: LAMA2; (-) strand; PAM type: NRG; PAM sequence: TGG
gaatacctaagctagggaaa

SEQ ID NO: 115966 - DNA, 20 bp, Artificial Sequence
  Description of Artificial Sequence: Synthetic oligonucleotide
  Target: LAMA2; (-) strand; PAM type: NRG; PAM sequence: GGG
tacaaagaatacctaagcta

SEQ ID NO: 115967 - DNA, 20 bp, Artificial Sequence
  Description of Artificial Sequence: Synthetic oligonucleotide
  Target: LAMA2; (-) strand; PAM type: NRG; PAM sequence: AGG
atacaaagaatacctaagct

SEQ ID NO: 115968 - DNA, 20 bp, Artificial Sequence
  Description of Artificial Sequence: Synthetic oligonucleotide
  Target: LAMA2; (-) strand; PAM type: NRG; PAM sequence: TAG
aatacaaagaatacctaagc

SEQ ID NO: 115969 - DNA, 20 bp, Artificial Sequence
  Description of Artificial Sequence: Synthetic oligonucleotide
  Target: LAMA2; (-) strand; PAM type: NRG; PAM sequence: AAG
agataatacaaagaatacct

SEQ ID NO: 115970 - DNA, 20 bp, Artificial Sequence
  Description of Artificial Sequence: Synthetic oligonucleotide
  Target: LAMA2; (-) strand; PAM type: NRG; PAM sequence: AAG
attagaaatgagataataca

SEQ ID NO: 115971 - DNA, 20 bp, Artificial Sequence
  Description of Artificial Sequence: Synthetic oligonucleotide
  Target: LAMA2; (-) strand; PAM type: NRG; PAM sequence: GAG
aggggatagtaattagaaat

SEQ ID NO: 115972 - DNA, 20 bp, Artificial Sequence
  Description of Artificial Sequence: Synthetic oligonucleotide
  Target: LAMA2; (-) strand; PAM type: NRG; PAM sequence: TAG
atcatggaggggatagtaat

SEQ ID NO: 115973 - DNA, 20 bp, Artificial Sequence
  Description of Artificial Sequence: Synthetic oligonucleotide
  Target: LAMA2; (-) strand; PAM type: NRG; PAM sequence: TAG
aatactgatcatggagggga

SEQ ID NO: 115974 - DNA, 20 bp, Artificial Sequence
  Description of Artificial Sequence: Synthetic oligonucleotide
  Target: LAMA2; (-) strand; PAM type: NRG; PAM sequence: GGG
taagaatactgatcatggag

SEQ ID NO: 115975 - DNA, 20 bp, Artificial Sequence
  Description of Artificial Sequence: Synthetic oligonucleotide
  Target: LAMA2; (-) strand; PAM type: NRG; PAM sequence: GGG
ttaagaatactgatcatgga

SEQ ID NO: 115976 - DNA, 20 bp, Artificial Sequence
  Description of Artificial Sequence: Synthetic oligonucleotide
  Target: LAMA2; (-) strand; PAM type: NRG; PAM sequence: AGG
tttaagaatactgatcatgg

SEQ ID NO: 115977 - DNA, 20 bp, Artificial Sequence
  Description of Artificial Sequence: Synthetic oligonucleotide
  Target: LAMA2; (-) strand; PAM type: NRG; PAM sequence: GAG
atttaagaatactgatcatg

SEQ ID NO: 115978 - DNA, 20 bp, Artificial Sequence
  Description of Artificial Sequence: Synthetic oligonucleotide
  Target: LAMA2; (-) strand; PAM type: NRG; PAM sequence: TGG
aaatttaagaatactgatca

SEQ ID NO: 115979 - DNA, 20 bp, Artificial Sequence
  Description of Artificial Sequence: Synthetic oligonucleotide
  Target: LAMA2; (-) strand; PAM type: NRG; PAM sequence: AAG
gaagggaatatttcaaattt

SEQ ID NO: 115980 - DNA, 20 bp, Artificial Sequence
  Description of Artificial Sequence: Synthetic oligonucleotide
  Target: LAMA2; (-) strand; PAM type: NRG; PAM sequence: GGG
agtaggtgccatattatgaa

SEQ ID NO: 115981 - DNA, 20 bp, Artificial Sequence
  Description of Artificial Sequence: Synthetic oligonucleotide
  Target: LAMA2; (-) strand; PAM type: NRG; PAM sequence: AGG
cagtaggtgccatattatga

SEQ ID NO: 115982 - DNA, 20 bp, Artificial Sequence
  Description of Artificial Sequence: Synthetic oligonucleotide
  Target: LAMA2; (-) strand; PAM type: NRG; PAM sequence: AAG
gcagtaggtgccatattatg

SEQ ID NO: 115983 - DNA, 20 bp, Artificial Sequence
  Description of Artificial Sequence: Synthetic oligonucleotide
  Target: LAMA2; (-) strand; PAM type: NRG; PAM sequence: AGG
gtgacttccttttgagcagt

SEQ ID NO: 115984 - DNA, 20 bp, Artificial Sequence
  Description of Artificial Sequence: Synthetic oligonucleotide
  Target: LAMA2; (-) strand; PAM type: NRG; PAM sequence: TAG
ggtgacttccttttgagcag

SEQ ID NO: 115985 - DNA, 20 bp, Artificial Sequence
  Description of Artificial Sequence: Synthetic oligonucleotide
  Target: LAMA2; (-) strand; PAM type: NRG; PAM sequence: CAG
gctggtgacttccttttgag

SEQ ID NO: 115986 - DNA, 20 bp, Artificial Sequence
  Description of Artificial Sequence: Synthetic oligonucleotide
  Target: LAMA2; (-) strand; PAM type: NRG; PAM sequence: GAG
tgagctggtgacttcctttt

SEQ ID NO: 115987 - DNA, 20 bp, Artificial Sequence
  Description of Artificial Sequence: Synthetic oligonucleotide
  Target: LAMA2; (-) strand; PAM type: NRG; PAM sequence: TGG
ggtcacactgtcccctgagc

SEQ ID NO: 115988 - DNA, 20 bp, Artificial Sequence
  Description of Artificial Sequence: Synthetic oligonucleotide
  Target: LAMA2; (-) strand; PAM type: NRG; PAM sequence: GAG
gaggggtcacactgtcccct

SEQ ID NO: 115989 - DNA, 20 bp, Artificial Sequence
  Description of Artificial Sequence: Synthetic oligonucleotide
  Target: LAMA2; (-) strand; PAM type: NRG; PAM sequence: GGG
gtaacaattaagggagggag

SEQ ID NO: 115990 - DNA, 20 bp, Artificial Sequence
  Description of Artificial Sequence: Synthetic oligonucleotide
  Target: LAMA2; (-) strand; PAM type: NRG; PAM sequence: GGG
ggtaacaattaagggaggga

SEQ ID NO: 115991 - DNA, 20 bp, Artificial Sequence
  Description of Artificial Sequence: Synthetic oligonucleotide
  Target: LAMA2; (-) strand; PAM type: NRG; PAM sequence: AGG
tggtaacaattaagggaggg

SEQ ID NO: 115992 - DNA, 20 bp, Artificial Sequence
  Description of Artificial Sequence: Synthetic oligonucleotide
  Target: LAMA2; (-) strand; PAM type: NRG; PAM sequence: GAG
atggtaacaattaagggagg

SEQ ID NO: 115993 - DNA, 20 bp, Artificial Sequence
  Description of Artificial Sequence: Synthetic oligonucleotide
  Target: LAMA2; (-) strand; PAM type: NRG; PAM sequence: GGG
atatggtaacaattaaggga

SEQ ID NO: 115994 - DNA, 20 bp, Artificial Sequence
  Description of Artificial Sequence: Synthetic oligonucleotide
  Target: LAMA2; (-) strand; PAM type: NRG; PAM sequence: AGG
aatatggtaacaattaaggg

SEQ ID NO: 115995 - DNA, 20 bp, Artificial Sequence
  Description of Artificial Sequence: Synthetic oligonucleotide
  Target: LAMA2; (-) strand; PAM type: NRG; PAM sequence: GAG
aaatatggtaacaattaagg

SEQ ID NO: 115996 - DNA, 20 bp, Artificial Sequence
  Description of Artificial Sequence: Synthetic oligonucleotide
  Target: LAMA2; (-) strand; PAM type: NRG; PAM sequence: GGG
agaaatatggtaacaattaa

SEQ ID NO: 115997 - DNA, 20 bp, Artificial Sequence
  Description of Artificial Sequence: Synthetic oligonucleotide
  Target: LAMA2; (-) strand; PAM type: NRG; PAM sequence: AGG
tagaaatatggtaacaatta

SEQ ID NO: 115998 - DNA, 20 bp, Artificial Sequence
  Description of Artificial Sequence: Synthetic oligonucleotide
  Target: LAMA2; (-) strand; PAM type: NRG; PAM sequence: AAG
atagaaatatggtaacaatt

SEQ ID NO: 115999 - DNA, 20 bp, Artificial Sequence
  Description of Artificial Sequence: Synthetic oligonucleotide
  Target: LAMA2; (-) strand; PAM type: NRG; PAM sequence: TGG
taggtgcattaatagaaata

SEQ ID NO: 116000 - DNA, 20 bp, Artificial Sequence
  Description of Artificial Sequence: Synthetic oligonucleotide
  Target: LAMA2; (-) strand; PAM type: NRG; PAM sequence: TAG
aacattcttaggtgcattaa

SEQ ID NO: 116001 - DNA, 20 bp, Artificial Sequence
  Description of Artificial Sequence: Synthetic oligonucleotide
  Target: LAMA2; (-) strand; PAM type: NRG; PAM sequence: AGG
aaaaacattaaaacattctt

SEQ ID NO: 116002 - DNA, 20 bp, Artificial Sequence
  Description of Artificial Sequence: Synthetic oligonucleotide
  Target: LAMA2; (-) strand; PAM type: NRG; PAM sequence: TAG
taaaaacattaaaacattct

SEQ ID NO: 116003 - DNA, 20 bp, Artificial Sequence
  Description of Artificial Sequence: Synthetic oligonucleotide
  Target: LAMA2; (-) strand; PAM type: NRG; PAM sequence: TAG
ggtacccgatttggaattag

SEQ ID NO: 116004 - DNA, 20 bp, Artificial Sequence
  Description of Artificial Sequence: Synthetic oligonucleotide
  Target: LAMA2; (-) strand; PAM type: NRG; PAM sequence: TAG
tatggtacccgatttggaat

SEQ ID NO: 116005 - DNA, 20 bp, Artificial Sequence
  Description of Artificial Sequence: Synthetic oligonucleotide
  Target: LAMA2; (-) strand; PAM type: NRG; PAM sequence: TGG
attgaatatggtacccgatt

SEQ ID NO: 116006 - DNA, 20 bp, Artificial Sequence
  Description of Artificial Sequence: Synthetic oligonucleotide
  Target: LAMA2; (-) strand; PAM type: NRG; PAM sequence: TGG
aggttctgcttgattgaata

SEQ ID NO: 116007 - DNA, 20 bp, Artificial Sequence
  Description of Artificial Sequence: Synthetic oligonucleotide
  Target: LAMA2; (-) strand; PAM type: NRG; PAM sequence: AGG
ggtagagaagaaggtccatg

SEQ ID NO: 116008 - DNA, 20 bp, Artificial Sequence
  Description of Artificial Sequence: Synthetic oligonucleotide
  Target: LAMA2; (-) strand; PAM type: NRG; PAM sequence: GAG
tggtagagaagaaggtccat

SEQ ID NO: 116009 - DNA, 20 bp, Artificial Sequence
  Description of Artificial Sequence: Synthetic oligonucleotide
  Target: LAMA2; (-) strand; PAM type: NRG; PAM sequence: AGG
tgttctagtggtagagaaga

SEQ ID NO: 116010 - DNA, 20 bp, Artificial Sequence
  Description of Artificial Sequence: Synthetic oligonucleotide
  Target: LAMA2; (-) strand; PAM type: NRG; PAM sequence: AAG
atgttctagtggtagagaag

SEQ ID NO: 116011 - DNA, 20 bp, Artificial Sequence
  Description of Artificial Sequence: Synthetic oligonucleotide
  Target: LAMA2; (-) strand; PAM type: NRG; PAM sequence: AAG
aggatgttctagtggtagag

SEQ ID NO: 116012 - DNA, 20 bp, Artificial Sequence
  Description of Artificial Sequence: Synthetic oligonucleotide
  Target: LAMA2; (-) strand; PAM type: NRG; PAM sequence: GAG
tggaggatgttctagtggta

SEQ ID NO: 116013 - DNA, 20 bp, Artificial Sequence
  Description of Artificial Sequence: Synthetic oligonucleotide
  Target: LAMA2; (-) strand; PAM type: NRG; PAM sequence: TAG
cctggaggatgttctagtgg

SEQ ID NO: 116014 - DNA, 20 bp, Artificial Sequence
  Description of Artificial Sequence: Synthetic oligonucleotide
  Target: LAMA2; (-) strand; PAM type: NRG; PAM sequence: TGG
ctgcctggaggatgttctag

SEQ ID NO: 116015 - DNA, 20 bp, Artificial Sequence
  Description of Artificial Sequence: Synthetic oligonucleotide
  Target: LAMA2; (-) strand; PAM type: NRG; PAM sequence: TAG
gacctgcctggaggatgttc

SEQ ID NO: 116016 - DNA, 20 bp, Artificial Sequence
  Description of Artificial Sequence: Synthetic oligonucleotide
  Target: LAMA2; (-) strand; PAM type: NRG; PAM sequence: AGG
aggctgagagacctgcctgg

SEQ ID NO: 116017 - DNA, 20 bp, Artificial Sequence
  Description of Artificial Sequence: Synthetic oligonucleotide
  Target: LAMA2; (-) strand; PAM type: NRG; PAM sequence: GAG
caggctgagagacctgcctg

SEQ ID NO: 116018 - DNA, 20 bp, Artificial Sequence
  Description of Artificial Sequence: Synthetic oligonucleotide
  Target: LAMA2; (-) strand; PAM type: NRG; PAM sequence: TGG
cacaggctgagagacctgcc

SEQ ID NO: 116019 - DNA, 20 bp, Artificial Sequence
  Description of Artificial Sequence: Synthetic oligonucleotide
  Target: LAMA2; (-) strand; PAM type: NRG; PAM sequence: GAG
tccaaaccagcacaggctga

SEQ ID NO: 116020 - DNA, 20 bp, Artificial Sequence
  Description of Artificial Sequence: Synthetic oligonucleotide
  Target: LAMA2; (-) strand; PAM type: NRG; PAM sequence: GAG
aatccaaaccagcacaggct

SEQ ID NO: 116021 - DNA, 20 bp, Artificial Sequence
  Description of Artificial Sequence: Synthetic oligonucleotide
  Target: LAMA2; (-) strand; PAM type: NRG; PAM sequence: AGG
ctaaaaatccaaaccagcac

SEQ ID NO: 116022 - DNA, 20 bp, Artificial Sequence
  Description of Artificial Sequence: Synthetic oligonucleotide
  Target: LAMA2; (-) strand; PAM type: NRG; PAM sequence: CAG
cctaaaaatccaaaccagca

SEQ ID NO: 116023 - DNA, 20 bp, Artificial Sequence
  Description of Artificial Sequence: Synthetic oligonucleotide
  Target: LAMA2; (-) strand; PAM type: NRG; PAM sequence: CAG
ttatccctaaaaatccaaac

SEQ ID NO: 116024 - DNA, 20 bp, Artificial Sequence
  Description of Artificial Sequence: Synthetic oligonucleotide
  Target: LAMA2; (-) strand; PAM type: NRG; PAM sequence: GGG
gtgatccatggaggctggca

SEQ ID NO: 116025 - DNA, 20 bp, Artificial Sequence
  Description of Artificial Sequence: Synthetic oligonucleotide
  Target: LAMA2; (-) strand; PAM type: NRG; PAM sequence: AGG
ggtgatccatggaggctggc

SEQ ID NO: 116026 - DNA, 20 bp, Artificial Sequence
  Description of Artificial Sequence: Synthetic oligonucleotide
  Target: LAMA2; (-) strand; PAM type: NRG; PAM sequence: CAG
aggtgatccatggaggctgg

SEQ ID NO: 116027 - DNA, 20 bp, Artificial Sequence
  Description of Artificial Sequence: Synthetic oligonucleotide
  Target: LAMA2; (-) strand; PAM type: NRG; PAM sequence: TGG
gtaaggtgatccatggaggc

SEQ ID NO: 116028 - DNA, 20 bp, Artificial Sequence
  Description of Artificial Sequence: Synthetic oligonucleotide
  Target: LAMA2; (-) strand; PAM type: NRG; PAM sequence: AGG
aaaagtaaggtgatccatgg

SEQ ID NO: 116029 - DNA, 20 bp, Artificial Sequence
  Description of Artificial Sequence: Synthetic oligonucleotide
  Target: LAMA2; (-) strand; PAM type: NRG; PAM sequence: GAG
gaaaagtaaggtgatccatg

SEQ ID NO: 116030 - DNA, 20 bp, Artificial Sequence
  Description of Artificial Sequence: Synthetic oligonucleotide
  Target: LAMA2; (-) strand; PAM type: NRG; PAM sequence: TGG
tagaaaagtaaggtgatcca

SEQ ID NO: 116031 - DNA, 20 bp, Artificial Sequence
  Description of Artificial Sequence: Synthetic oligonucleotide
  Target: LAMA2; (-) strand; PAM type: NRG; PAM sequence: AGG
tgtaagtacttagaaaagta

SEQ ID NO: 116032 - DNA, 20 bp, Artificial Sequence
  Description of Artificial Sequence: Synthetic oligonucleotide
  Target: LAMA2; (-) strand; PAM type: NRG; PAM sequence: AAG
gtgtaagtacttagaaaagt

SEQ ID NO: 116033 - DNA, 20 bp, Artificial Sequence
  Description of Artificial Sequence: Synthetic oligonucleotide
  Target: LAMA2; (-) strand; PAM type: NRG; PAM sequence: AAG
gtttgtgtaagtacttagaa

SEQ ID NO: 116034 - DNA, 20 bp, Artificial Sequence
  Description of Artificial Sequence: Synthetic oligonucleotide
  Target: LAMA2; (-) strand; PAM type: NRG; PAM sequence: TAG
atgcagtttgtgtaagtact

SEQ ID NO: 116035 - DNA, 20 bp, Artificial Sequence
  Description of Artificial Sequence: Synthetic oligonucleotide
  Target: LAMA2; (-) strand; PAM type: NRG; PAM sequence: AAG
ctataaaatgcagtttgtgt

SEQ ID NO: 116036 - DNA, 20 bp, Artificial Sequence
  Description of Artificial Sequence: Synthetic oligonucleotide
  Target: LAMA2; (-) strand; PAM type: NRG; PAM sequence: CAG
ttgagaggccctataaaatg

SEQ ID NO: 116037 - DNA, 20 bp, Artificial Sequence
  Description of Artificial Sequence: Synthetic oligonucleotide
  Target: LAMA2; (-) strand; PAM type: NRG; PAM sequence: AGG
cacagaaaaatgtgcttgag

SEQ ID NO: 116038 - DNA, 20 bp, Artificial Sequence
  Description of Artificial Sequence: Synthetic oligonucleotide
  Target: LAMA2; (-) strand; PAM type: NRG; PAM sequence: GAG
ccacagaaaaatgtgcttga

SEQ ID NO: 116039 - DNA, 20 bp, Artificial Sequence
  Description of Artificial Sequence: Synthetic oligonucleotide
  Target: LAMA2; (-) strand; PAM type: NRG; PAM sequence: GAG
taccacagaaaaatgtgctt

SEQ ID NO: 116040 - DNA, 20 bp, Artificial Sequence
  Description of Artificial Sequence: Synthetic oligonucleotide
  Target: LAMA2; (-) strand; PAM type: NRG; PAM sequence: CAG
agtgtgatctctaaatacca

SEQ ID NO: 116041 - DNA, 20 bp, Artificial Sequence
  Description of Artificial Sequence: Synthetic oligonucleotide
  Target: LAMA2; (-) strand; PAM type: NRG; PAM sequence: AAG
tattttgagaaaaaaggaaa

SEQ ID NO: 116042 - DNA, 20 bp, Artificial Sequence
  Description of Artificial Sequence: Synthetic oligonucleotide
  Target: LAMA2; (-) strand; PAM type: NRG; PAM sequence: AGG
tatctttattttgagaaaaa

SEQ ID NO: 116043 - DNA, 20 bp, Artificial Sequence
  Description of Artificial Sequence: Synthetic oligonucleotide
  Target: LAMA2; (-) strand; PAM type: NRG; PAM sequence: AAG
gtatctttattttgagaaaa

SEQ ID NO: 116044 - DNA, 20 bp, Artificial Sequence
  Description of Artificial Sequence: Synthetic oligonucleotide
  Target: LAMA2; (-) strand; PAM type: NRG; PAM sequence: GAG
tgggcaagtatctttatttt

SEQ ID NO: 116045 - DNA, 20 bp, Artificial Sequence
  Description of Artificial Sequence: Synthetic oligonucleotide
  Target: LAMA2; (-) strand; PAM type: NRG; PAM sequence: AAG
atctccattcccagatgggc

SEQ ID NO: 116046 - DNA, 20 bp, Artificial Sequence
  Description of Artificial Sequence: Synthetic oligonucleotide
  Target: LAMA2; (-) strand; PAM type: NRG; PAM sequence: GGG
aaaaatctccattcccagat

SEQ ID NO: 116047 - DNA, 20 bp, Artificial Sequence
  Description of Artificial Sequence: Synthetic oligonucleotide
  Target: LAMA2; (-) strand; PAM type: NRG; PAM sequence: TGG
taaaaatctccattcccaga

SEQ ID NO: 116048 - DNA, 20 bp, Artificial Sequence
  Description of Artificial Sequence: Synthetic oligonucleotide
  Target: LAMA2; (-) strand; PAM type: NRG; PAM sequence: CAG
tgagtaaaaatctccattcc

SEQ ID NO: 116049 - DNA, 20 bp, Artificial Sequence
  Description of Artificial Sequence: Synthetic oligonucleotide
  Target: LAMA2; (-) strand; PAM type: NRG; PAM sequence: GAG
aaaaaaaaagaaccttaaat

SEQ ID NO: 116050 - DNA, 20 bp, Artificial Sequence
  Description of Artificial Sequence: Synthetic oligonucleotide
  Target: LAMA2; (-) strand; PAM type: NRG; PAM sequence: AAG
agaaggttataaaaaaaaaa

SEQ ID NO: 116051 - DNA, 20 bp, Artificial Sequence
  Description of Artificial Sequence: Synthetic oligonucleotide
  Target: LAMA2; (-) strand; PAM type: NRG; PAM sequence: AGG
gaaatcgaaattagaacaga

SEQ ID NO: 116052 - DNA, 20 bp, Artificial Sequence
  Description of Artificial Sequence: Synthetic oligonucleotide
  Target: LAMA2; (-) strand; PAM type: NRG; PAM sequence: AAG
ggaaatcgaaattagaacag

SEQ ID NO: 116053 - DNA, 20 bp, Artificial Sequence
  Description of Artificial Sequence: Synthetic oligonucleotide
  Target: LAMA2; (-) strand; PAM type: NRG; PAM sequence: CAG
aatggaaatcgaaattagaa

SEQ ID NO: 116054 - DNA, 20 bp, Artificial Sequence
  Description of Artificial Sequence: Synthetic oligonucleotide
  Target: LAMA2; (-) strand; PAM type: NRG; PAM sequence: TAG
gaggaaatggaaatcgaaat

SEQ ID NO: 116055 - DNA, 20 bp, Artificial Sequence
  Description of Artificial Sequence: Synthetic oligonucleotide
  Target: LAMA2; (-) strand; PAM type: NRG; PAM sequence: TGG
catacactgctgagaggaaa

SEQ ID NO: 116056 - DNA, 20 bp, Artificial Sequence
  Description of Artificial Sequence: Synthetic oligonucleotide
  Target: LAMA2; (-) strand; PAM type: NRG; PAM sequence: AGG
ttaaaacatacactgctgag

SEQ ID NO: 116057 - DNA, 20 bp, Artificial Sequence
  Description of Artificial Sequence: Synthetic oligonucleotide
  Target: LAMA2; (-) strand; PAM type: NRG; PAM sequence: GAG
gttaaaacatacactgctga

SEQ ID NO: 116058 - DNA, 20 bp, Artificial Sequence
  Description of Artificial Sequence: Synthetic oligonucleotide
  Target: LAMA2; (-) strand; PAM type: NRG; PAM sequence: GAG
aagttaaaacatacactgct

SEQ ID NO: 116059 - DNA, 20 bp, Artificial Sequence
  Description of Artificial Sequence: Synthetic oligonucleotide
  Target: LAMA2; (-) strand; PAM type: NRG; PAM sequence: AAG
ggaatgctctgttttcggaa

SEQ ID NO: 116060 - DNA, 20 bp, Artificial Sequence
  Description of Artificial Sequence: Synthetic oligonucleotide
  Target: LAMA2; (-) strand; PAM type: NRG; PAM sequence: CGG
taagtggaatgctctgtttt

SEQ ID NO: 116061 - DNA, 20 bp, Artificial Sequence
  Description of Artificial Sequence: Synthetic oligonucleotide
  Target: LAMA2; (-) strand; PAM type: NRG; PAM sequence: TGG
cttctgtctcatctactaag

SEQ ID NO: 116062 - DNA, 20 bp, Artificial Sequence
  Description of Artificial Sequence: Synthetic oligonucleotide
  Target: LAMA2; (-) strand; PAM type: NRG; PAM sequence: AAG
ttgcttctgtctcatctact

SEQ ID NO: 116063 - DNA, 20 bp, Artificial Sequence
  Description of Artificial Sequence: Synthetic oligonucleotide
  Target: LAMA2; (-) strand; PAM type: NRG; PAM sequence: TGG
tctttctaaaccaaccaatt

SEQ ID NO: 116064 - DNA, 20 bp, Artificial Sequence
  Description of Artificial Sequence: Synthetic oligonucleotide
  Target: LAMA2; (-) strand; PAM type: NRG; PAM sequence: TAG
ggaatctttagggtgtcttc

SEQ ID NO: 116065 - DNA, 20 bp, Artificial Sequence
  Description of Artificial Sequence: Synthetic oligonucleotide
  Target: LAMA2; (-) strand; PAM type: NRG; PAM sequence: GGG
gttaagagttggaatcttta

SEQ ID NO: 116066 - DNA, 20 bp, Artificial Sequence
  Description of Artificial Sequence: Synthetic oligonucleotide
  Target: LAMA2; (-) strand; PAM type: NRG; PAM sequence: AGG
agttaagagttggaatcttt

SEQ ID NO: 116067 - DNA, 20 bp, Artificial Sequence
  Description of Artificial Sequence: Synthetic oligonucleotide
  Target: LAMA2; (-) strand; PAM type: NRG; PAM sequence: TAG
aagttaagagttggaatctt

SEQ ID NO: 116068 - DNA, 20 bp, Artificial Sequence
  Description of Artificial Sequence: Synthetic oligonucleotide
  Target: LAMA2; (-) strand; PAM type: NRG; PAM sequence: TGG
ctcatgtgcaagttaagagt

SEQ ID NO: 116069 - DNA, 20 bp, Artificial Sequence
  Description of Artificial Sequence: Synthetic oligonucleotide
  Target: LAMA2; (-) strand; PAM type: NRG; PAM sequence: GAG
tttcctcatgtgcaagttaa

SEQ ID NO: 116070 - DNA, 20 bp, Artificial Sequence
  Description of Artificial Sequence: Synthetic oligonucleotide
  Target: LAMA2; (-) strand; PAM type: NRG; PAM sequence: AAG
tctttcctcatgtgcaagtt

SEQ ID NO: 116071 - DNA, 20 bp, Artificial Sequence
  Description of Artificial Sequence: Synthetic oligonucleotide
  Target: LAMA2; (-) strand; PAM type: NRG; PAM sequence: AAG
ggctttctttcctcatgtgc

SEQ ID NO: 116072 - DNA, 20 bp, Artificial Sequence
  Description of Artificial Sequence: Synthetic oligonucleotide
  Target: LAMA2; (-) strand; PAM type: NRG; PAM sequence: GGG
gggccatgctgtaagtttga

SEQ ID NO: 116073 - DNA, 20 bp, Artificial Sequence
  Description of Artificial Sequence: Synthetic oligonucleotide
  Target: LAMA2; (-) strand; PAM type: NRG; PAM sequence: AGG
tgggccatgctgtaagtttg

SEQ ID NO: 116074 - DNA, 20 bp, Artificial Sequence
  Description of Artificial Sequence: Synthetic oligonucleotide
  Target: LAMA2; (-) strand; PAM type: NRG; PAM sequence: GAG
ctgggccatgctgtaagttt

SEQ ID NO: 116075 - DNA, 20 bp, Artificial Sequence
  Description of Artificial Sequence: Synthetic oligonucleotide
  Target: LAMA2; (-) strand; PAM type: NRG; PAM sequence: AAG
aaccccctgggccatgctgt

SEQ ID NO: 116076 - DNA, 20 bp, Artificial Sequence
  Description of Artificial Sequence: Synthetic oligonucleotide
  Target: LAMA2; (-) strand; PAM type: NRG; PAM sequence: GGG
gctcatgtgtgtaaccccct

SEQ ID NO: 116077 - DNA, 20 bp, Artificial Sequence
  Description of Artificial Sequence: Synthetic oligonucleotide
  Target: LAMA2; (-) strand; PAM type: NRG; PAM sequence: TGG
cgctcatgtgtgtaaccccc

SEQ ID NO: 116078 - DNA, 20 bp, Artificial Sequence
  Description of Artificial Sequence: Synthetic oligonucleotide
  Target: LAMA2; (-) strand; PAM type: NRG; PAM sequence: TAG
gaatttagatatctgggttt

SEQ ID NO: 116079 - DNA, 20 bp, Artificial Sequence
  Description of Artificial Sequence: Synthetic oligonucleotide
  Target: LAMA2; (-) strand; PAM type: NRG; PAM sequence: GGG
cagttggaatttagatatct

SEQ ID NO: 116080 - DNA, 20 bp, Artificial Sequence
  Description of Artificial Sequence: Synthetic oligonucleotide
  Target: LAMA2; (-) strand; PAM type: NRG; PAM sequence: TGG
gcagttggaatttagatatc

SEQ ID NO: 116081 - DNA, 20 bp, Artificial Sequence
  Description of Artificial Sequence: Synthetic oligonucleotide
  Target: LAMA2; (-) strand; PAM type: NRG; PAM sequence: TAG
gtgaaatagcagttggaatt

SEQ ID NO: 116082 - DNA, 20 bp, Artificial Sequence
  Description of Artificial Sequence: Synthetic oligonucleotide
  Target: LAMA2; (-) strand; PAM type: NRG; PAM sequence: TGG
aaagaaggtgaaatagcagt

SEQ ID NO: 116083 - DNA, 20 bp, Artificial Sequence
  Description of Artificial Sequence: Synthetic oligonucleotide
  Target: LAMA2; (-) strand; PAM type: NRG; PAM sequence: CAG
acaaaaagaaggtgaaatag

SEQ ID NO: 116084 - DNA, 20 bp, Artificial Sequence
  Description of Artificial Sequence: Synthetic oligonucleotide
  Target: LAMA2; (-) strand; PAM type: NRG; PAM sequence: TAG
caaacaaaaagaaggtgaaa

SEQ ID NO: 116085 - DNA, 20 bp, Artificial Sequence
  Description of Artificial Sequence: Synthetic oligonucleotide
  Target: LAMA2; (-) strand; PAM type: NRG; PAM sequence: AGG
caaacaaacaaacaaaaaga

SEQ ID NO: 116086 - DNA, 20 bp, Artificial Sequence
  Description of Artificial Sequence: Synthetic oligonucleotide
  Target: LAMA2; (-) strand; PAM type: NRG; PAM sequence: AAG
acaaacaaacaaacaaaaag

SEQ ID NO: 116087 - DNA, 20 bp, Artificial Sequence
  Description of Artificial Sequence: Synthetic oligonucleotide
  Target: LAMA2; (-) strand; PAM type: NRG; PAM sequence: AAG
caaacaaacaaacaaacaaa

SEQ ID NO: 116088 - DNA, 20 bp, Artificial Sequence
  Description of Artificial Sequence: Synthetic oligonucleotide
  Target: LAMA2; (-) strand; PAM type: NRG; PAM sequence: CAG
tgaaactccatctcaaaaaa

SEQ ID NO: 116089 - DNA, 20 bp, Artificial Sequence
  Description of Artificial Sequence: Synthetic oligonucleotide
  Target: LAMA2; (-) strand; PAM type: NRG; PAM sequence: GAG
cactccagcctgggtagcaa

SEQ ID NO: 116090 - DNA, 20 bp, Artificial Sequence
  Description of Artificial Sequence: Synthetic oligonucleotide
  Target: LAMA2; (-) strand; PAM type: NRG; PAM sequence: AAG
tacactccagcctgggtagc

SEQ ID NO: 116091 - DNA, 20 bp, Artificial Sequence
  Description of Artificial Sequence: Synthetic oligonucleotide
  Target: LAMA2; (-) strand; PAM type: NRG; PAM sequence: TAG
acattacactccagcctggg

SEQ ID NO: 116092 - DNA, 20 bp, Artificial Sequence
  Description of Artificial Sequence: Synthetic oligonucleotide
  Target: LAMA2; (-) strand; PAM type: NRG; PAM sequence: GGG
gtgacattacactccagcct

SEQ ID NO: 116093 - DNA, 20 bp, Artificial Sequence
  Description of Artificial Sequence: Synthetic oligonucleotide
  Target: LAMA2; (-) strand; PAM type: NRG; PAM sequence: TGG
tgtgacattacactccagcc

SEQ ID NO: 116094 - DNA, 20 bp, Artificial Sequence
  Description of Artificial Sequence: Synthetic oligonucleotide
  Target: LAMA2; (-) strand; PAM type: NRG; PAM sequence: CAG
gagattgtgacattacactc

SEQ ID NO: 116095 - DNA, 20 bp, Artificial Sequence
  Description of Artificial Sequence: Synthetic oligonucleotide
  Target: LAMA2; (-) strand; PAM type: NRG; PAM sequence: GAG
ggtggaggttgcagtgagac

SEQ ID NO: 116096 - DNA, 20 bp, Artificial Sequence
  Description of Artificial Sequence: Synthetic oligonucleotide
  Target: LAMA2; (-) strand; PAM type: NRG; PAM sequence: GAG
caggaggtggaggttgcagt

SEQ ID NO: 116097 - DNA, 20 bp, Artificial Sequence
  Description of Artificial Sequence: Synthetic oligonucleotide
  Target: LAMA2; (-) strand; PAM type: NRG; PAM sequence: CAG
aacccaggaggtggaggttg

SEQ ID NO: 116098 - DNA, 20 bp, Artificial Sequence
  Description of Artificial Sequence: Synthetic oligonucleotide
  Target: LAMA2; (-) strand; PAM type: NRG; PAM sequence: AGG
tgcttgaacccaggaggtgg

SEQ ID NO: 116099 - DNA, 20 bp, Artificial Sequence
  Description of Artificial Sequence: Synthetic oligonucleotide
  Target: LAMA2; (-) strand; PAM type: NRG; PAM sequence: GAG
ttgcttgaacccaggaggtg

SEQ ID NO: 116100 - DNA, 20 bp, Artificial Sequence
  Description of Artificial Sequence: Synthetic oligonucleotide
  Target: LAMA2; (-) strand; PAM type: NRG; PAM sequence: TGG
aattgcttgaacccaggagg

SEQ ID NO: 116101 - DNA, 20 bp, Artificial Sequence
  Description of Artificial Sequence: Synthetic oligonucleotide
  Target: LAMA2; (-) strand; PAM type: NRG; PAM sequence: AGG
gagaattgcttgaacccagg

SEQ ID NO: 116102 - DNA, 20 bp, Artificial Sequence
  Description of Artificial Sequence: Synthetic oligonucleotide
  Target: LAMA2; (-) strand; PAM type: NRG; PAM sequence: GAG
ggagaattgcttgaacccag

SEQ ID NO: 116103 - DNA, 20 bp, Artificial Sequence
  Description of Artificial Sequence: Synthetic oligonucleotide
  Target: LAMA2; (-) strand; PAM type: NRG; PAM sequence: AGG
caggagaattgcttgaaccc

SEQ ID NO: 116104 - DNA, 20 bp, Artificial Sequence
  Description of Artificial Sequence: Synthetic oligonucleotide
  Target: LAMA2; (-) strand; PAM type: NRG; PAM sequence: CAG
gcaggagaattgcttgaacc

SEQ ID NO: 116105 - DNA, 20 bp, Artificial Sequence
  Description of Artificial Sequence: Synthetic oligonucleotide
  Target: LAMA2; (-) strand; PAM type: NRG; PAM sequence: GAG
tactcgggaggctgaagcag

SEQ ID NO: 116106 - DNA, 20 bp, Artificial Sequence
  Description of Artificial Sequence: Synthetic oligonucleotide
  Target: LAMA2; (-) strand; PAM type: NRG; PAM sequence: AGG
gctactcgggaggctgaagc

SEQ ID NO: 116107 - DNA, 20 bp, Artificial Sequence
  Description of Artificial Sequence: Synthetic oligonucleotide
  Target: LAMA2; (-) strand; PAM type: NRG; PAM sequence: CAG
agctactcgggaggctgaag

SEQ ID NO: 116108 - DNA, 20 bp, Artificial Sequence
  Description of Artificial Sequence: Synthetic oligonucleotide
  Target: LAMA2; (-) strand; PAM type: NRG; PAM sequence: AAG
cccagctactcgggaggctg

SEQ ID NO: 116109 - DNA, 20 bp, Artificial Sequence
  Description of Artificial Sequence: Synthetic oligonucleotide
  Target: LAMA2; (-) strand; PAM type: NRG; PAM sequence: AGG
cgtaatcccagctactcggg

SEQ ID NO: 116110 - DNA, 20 bp, Artificial Sequence
  Description of Artificial Sequence: Synthetic oligonucleotide
  Target: LAMA2; (-) strand; PAM type: NRG; PAM sequence: GAG
ccgtaatcccagctactcgg

SEQ ID NO: 116111 - DNA, 20 bp, Artificial Sequence
  Description of Artificial Sequence: Synthetic oligonucleotide
  Target: LAMA2; (-) strand; PAM type: NRG; PAM sequence: GGG
gcccgtaatcccagctactc

SEQ ID NO: 116112 - DNA, 20 bp, Artificial Sequence
  Description of Artificial Sequence: Synthetic oligonucleotide
  Target: LAMA2; (-) strand; PAM type: NRG; PAM sequence: CGG
tgcccgtaatcccagctact

SEQ ID NO: 116113 - DNA, 20 bp, Artificial Sequence
  Description of Artificial Sequence: Synthetic oligonucleotide
  Target: LAMA2; (-) strand; PAM type: NRG; PAM sequence: CAG
gtggtgcatgcccgtaatcc

SEQ ID NO: 116114 - DNA, 20 bp, Artificial Sequence
  Description of Artificial Sequence: Synthetic oligonucleotide
  Target: LAMA2; (-) strand; PAM type: NRG; PAM sequence: TGG
acaaaattagccaagagtgg

SEQ ID NO: 116115 - DNA, 20 bp, Artificial Sequence
  Description of Artificial Sequence: Synthetic oligonucleotide
  Target: LAMA2; (-) strand; PAM type: NRG; PAM sequence: TGG
aatacaaaattagccaagag

SEQ ID NO: 116116 - DNA, 20 bp, Artificial Sequence
  Description of Artificial Sequence: Synthetic oligonucleotide
  Target: LAMA2; (-) strand; PAM type: NRG; PAM sequence: GAG
aaaaatacaaaattagccaa

SEQ ID NO: 116117 - DNA, 20 bp, Artificial Sequence
  Description of Artificial Sequence: Synthetic oligonucleotide
  Target: LAMA2; (-) strand; PAM type: NRG; PAM sequence: AAG
ctaaaaatacaaaattagcc

SEQ ID NO: 116118 - DNA, 20 bp, Artificial Sequence
  Description of Artificial Sequence: Synthetic oligonucleotide
  Target: LAMA2; (-) strand; PAM type: NRG; PAM sequence: TAG
ctctactaaaaatacaaaat

SEQ ID NO: 116119 - DNA, 20 bp, Artificial Sequence
  Description of Artificial Sequence: Synthetic oligonucleotide
  Target: LAMA2; (-) strand; PAM type: NRG; PAM sequence: GAG
agaccagcctgaccaacatg

SEQ ID NO: 116120 - DNA, 20 bp, Artificial Sequence
  Description of Artificial Sequence: Synthetic oligonucleotide
  Target: LAMA2; (-) strand; PAM type: NRG; PAM sequence: TGG
cgagaccagcctgaccaaca

SEQ ID NO: 116121 - DNA, 20 bp, Artificial Sequence
  Description of Artificial Sequence: Synthetic oligonucleotide
  Target: LAMA2; (-) strand; PAM type: NRG; PAM sequence: CAG
tgaagttggcagttcgagac

SEQ ID NO: 116122 - DNA, 20 bp, Artificial Sequence
  Description of Artificial Sequence: Synthetic oligonucleotide
  Target: LAMA2; (-) strand; PAM type: NRG; PAM sequence: GAG
ccacctgaagttggcagttc

SEQ ID NO: 116123 - DNA, 20 bp, Artificial Sequence
  Description of Artificial Sequence: Synthetic oligonucleotide
  Target: LAMA2; (-) strand; PAM type: NRG; PAM sequence: CAG
ggcagaccacctgaagttgg

SEQ ID NO: 116124 - DNA, 20 bp, Artificial Sequence
  Description of Artificial Sequence: Synthetic oligonucleotide
  Target: LAMA2; (-) strand; PAM type: NRG; PAM sequence: TGG
gtgggcagaccacctgaagt

SEQ ID NO: 116125 - DNA, 20 bp, Artificial Sequence
  Description of Artificial Sequence: Synthetic oligonucleotide
  Target: LAMA2; (-) strand; PAM type: NRG; PAM sequence: AAG
tgaggtgggcagaccacctg

SEQ ID NO: 116126 - DNA, 20 bp, Artificial Sequence
  Description of Artificial Sequence: Synthetic oligonucleotide
  Target: LAMA2; (-) strand; PAM type: NRG; PAM sequence: CAG
ctttgggaggctgaggtggg

SEQ ID NO: 116127 - DNA, 20 bp, Artificial Sequence
  Description of Artificial Sequence: Synthetic oligonucleotide
  Target: LAMA2; (-) strand; PAM type: NRG; PAM sequence: GGG
gcactttgggaggctgaggt

SEQ ID NO: 116128 - DNA, 20 bp, Artificial Sequence
  Description of Artificial Sequence: Synthetic oligonucleotide
  Target: LAMA2; (-) strand; PAM type: NRG; PAM sequence: TGG
agcactttgggaggctgagg

SEQ ID NO: 116129 - DNA, 20 bp, Artificial Sequence
  Description of Artificial Sequence: Synthetic oligonucleotide
  Target: LAMA2; (-) strand; PAM type: NRG; PAM sequence: AGG
cccagcactttgggaggctg

SEQ ID NO: 116130 - DNA, 20 bp, Artificial Sequence
  Description of Artificial Sequence: Synthetic oligonucleotide
  Target: LAMA2; (-) strand; PAM type: NRG; PAM sequence: GAG
tcccagcactttgggaggct

SEQ ID NO: 116131 - DNA, 20 bp, Artificial Sequence
  Description of Artificial Sequence: Synthetic oligonucleotide
  Target: LAMA2; (-) strand; PAM type: NRG; PAM sequence: AGG
tgtaatcccagcactttggg

SEQ ID NO: 116132 - DNA, 20 bp, Artificial Sequence
  Description of Artificial Sequence: Synthetic oligonucleotide
  Target: LAMA2; (-) strand; PAM type: NRG; PAM sequence: GAG
ctgtaatcccagcactttgg

SEQ ID NO: 116133 - DNA, 20 bp, Artificial Sequence
  Description of Artificial Sequence: Synthetic oligonucleotide
  Target: LAMA2; (-) strand; PAM type: NRG; PAM sequence: GGG
gcctgtaatcccagcacttt

SEQ ID NO: 116134 - DNA, 20 bp, Artificial Sequence
  Description of Artificial Sequence: Synthetic oligonucleotide
  Target: LAMA2; (-) strand; PAM type: NRG; PAM sequence: TGG
tgcctgtaatcccagcactt

SEQ ID NO: 116135 - DNA, 20 bp, Artificial Sequence
  Description of Artificial Sequence: Synthetic oligonucleotide
  Target: LAMA2; (-) strand; PAM type: NRG; PAM sequence: CAG
gtgtctcatgcctgtaatcc

SEQ ID NO: 116136 - DNA, 20 bp, Artificial Sequence
  Description of Artificial Sequence: Synthetic oligonucleotide
  Target: LAMA2; (-) strand; PAM type: NRG; PAM sequence: CAG
aaggggaaataggccgggcg

SEQ ID NO: 116137 - DNA, 20 bp, Artificial Sequence
  Description of Artificial Sequence: Synthetic oligonucleotide
  Target: LAMA2; (-) strand; PAM type: NRG; PAM sequence: GGG
aaaagaaggggaaataggcc

SEQ ID NO: 116138 - DNA, 20 bp, Artificial Sequence
  Description of Artificial Sequence: Synthetic oligonucleotide
  Target: LAMA2; (-) strand; PAM type: NRG; PAM sequence: CGG
caaaagaaggggaaataggc

SEQ ID NO: 116139 - DNA, 20 bp, Artificial Sequence
  Description of Artificial Sequence: Synthetic oligonucleotide
  Target: LAMA2; (-) strand; PAM type: NRG; PAM sequence: AGG
tgtgcaaaagaaggggaaat

SEQ ID NO: 116140 - DNA, 20 bp, Artificial Sequence
  Description of Artificial Sequence: Synthetic oligonucleotide
  Target: LAMA2; (-) strand; PAM type: NRG; PAM sequence: TAG
atgtgcaaaagaaggggaaa

SEQ ID NO: 116141 - DNA, 20 bp, Artificial Sequence
  Description of Artificial Sequence: Synthetic oligonucleotide
  Target: LAMA2; (-) strand; PAM type: NRG; PAM sequence: GGG
attataatgtgcaaaagaag

SEQ ID NO: 116142 - DNA, 20 bp, Artificial Sequence
  Description of Artificial Sequence: Synthetic oligonucleotide
  Target: LAMA2; (-) strand; PAM type: NRG; PAM sequence: GGG
aattataatgtgcaaaagaa

SEQ ID NO: 116143 - DNA, 20 bp, Artificial Sequence
  Description of Artificial Sequence: Synthetic oligonucleotide
  Target: LAMA2; (-) strand; PAM type: NRG; PAM sequence: AGG
taattataatgtgcaaaaga

SEQ ID NO: 116144 - DNA, 20 bp, Artificial Sequence
  Description of Artificial Sequence: Synthetic oligonucleotide
  Target: LAMA2; (-) strand; PAM type: NRG; PAM sequence: AAG
ctaattataatgtgcaaaag

SEQ ID NO: 116145 - DNA, 20 bp, Artificial Sequence
  Description of Artificial Sequence: Synthetic oligonucleotide
  Target: LAMA2; (-) strand; PAM type: NRG; PAM sequence: AAG
taactaattataatgtgcaa

SEQ ID NO: 116146 - DNA, 20 bp, Artificial Sequence
  Description of Artificial Sequence: Synthetic oligonucleotide
  Target: LAMA2; (-) strand; PAM type: NRG; PAM sequence: CAG
aaaatctaattctgaccaca

SEQ ID NO: 116147 - DNA, 20 bp, Artificial Sequence
  Description of Artificial Sequence: Synthetic oligonucleotide
  Target: LAMA2; (-) strand; PAM type: NRG; PAM sequence: AAG
atacaattaatagagatgga

SEQ ID NO: 116148 - DNA, 20 bp, Artificial Sequence
  Description of Artificial Sequence: Synthetic oligonucleotide
  Target: LAMA2; (-) strand; PAM type: NRG; PAM sequence: TGG
tataatacaattaatagaga

SEQ ID NO: 116149 - DNA, 20 bp, Artificial Sequence
  Description of Artificial Sequence: Synthetic oligonucleotide
  Target: LAMA2; (-) strand; PAM type: NRG; PAM sequence: GAG
aaaatataatacaattaata

SEQ ID NO: 116150 - DNA, 20 bp, Artificial Sequence
  Description of Artificial Sequence: Synthetic oligonucleotide
  Target: LAMA2; (-) strand; PAM type: NRG; PAM sequence: TAG
ctaaaatataatacaattaa

SEQ ID NO: 116151 - DNA, 20 bp, Artificial Sequence
  Description of Artificial Sequence: Synthetic oligonucleotide
  Target: LAMA2; (-) strand; PAM type: NRG; PAM sequence: TGG
attaaaacagaagatatgtg

SEQ ID NO: 116152 - DNA, 20 bp, Artificial Sequence
  Description of Artificial Sequence: Synthetic oligonucleotide
  Target: LAMA2; (-) strand; PAM type: NRG; PAM sequence: AAG
aaggaaacaaattaaaacag

SEQ ID NO: 116153 - DNA, 20 bp, Artificial Sequence
  Description of Artificial Sequence: Synthetic oligonucleotide
  Target: LAMA2; (-) strand; PAM type: NRG; PAM sequence: CAG
agaaaggaaacaaattaaaa

SEQ ID NO: 116154 - DNA, 20 bp, Artificial Sequence
  Description of Artificial Sequence: Synthetic oligonucleotide
  Target: LAMA2; (-) strand; PAM type: NRG; PAM sequence: AGG
acacaaaaagaacataagaa

SEQ ID NO: 116155 - DNA, 20 bp, Artificial Sequence
  Description of Artificial Sequence: Synthetic oligonucleotide
  Target: LAMA2; (-) strand; PAM type: NRG; PAM sequence: AAG
cacacaaaaagaacataaga

SEQ ID NO: 116156 - DNA, 20 bp, Artificial Sequence
  Description of Artificial Sequence: Synthetic oligonucleotide
  Target: LAMA2; (-) strand; PAM type: NRG; PAM sequence: AAG
tacacacacaaaaagaacat

SEQ ID NO: 116157 - DNA, 20 bp, Artificial Sequence
  Description of Artificial Sequence: Synthetic oligonucleotide
  Target: LAMA2; (-) strand; PAM type: NRG; PAM sequence: AAG
tttccccctacacacacaaa

SEQ ID NO: 116158 - DNA, 20 bp, Artificial Sequence
  Description of Artificial Sequence: Synthetic oligonucleotide
  Target: LAMA2; (-) strand; PAM type: NRG; PAM sequence: AAG
ttttagtaacctttaaaaag

SEQ ID NO: 116159 - DNA, 20 bp, Artificial Sequence
  Description of Artificial Sequence: Synthetic oligonucleotide
  Target: LAMA2; (-) strand; PAM type: NRG; PAM sequence: AAG
aacttttagtaacctttaaa

SEQ ID NO: 116160 - DNA, 20 bp, Artificial Sequence
  Description of Artificial Sequence: Synthetic oligonucleotide
  Target: LAMA2; (-) strand; PAM type: NRG; PAM sequence: TAG
actgtaaaacttttaacttt

SEQ ID NO: 116161 - DNA, 20 bp, Artificial Sequence
  Description of Artificial Sequence: Synthetic oligonucleotide
  Target: LAMA2; (-) strand; PAM type: NRG; PAM sequence: AGG
tattcatctttgcacttagt

SEQ ID NO: 116162 - DNA, 20 bp, Artificial Sequence
  Description of Artificial Sequence: Synthetic oligonucleotide
  Target: LAMA2; (-) strand; PAM type: NRG; PAM sequence: TAG
gtattcatctttgcacttag

SEQ ID NO: 116163 - DNA, 20 bp, Artificial Sequence
  Description of Artificial Sequence: Synthetic oligonucleotide
  Target: LAMA2; (-) strand; PAM type: NRG; PAM sequence: TAG
atcgtattcatctttgcact

SEQ ID NO: 116164 - DNA, 20 bp, Artificial Sequence
  Description of Artificial Sequence: Synthetic oligonucleotide
  Target: LAMA2; (-) strand; PAM type: NRG; PAM sequence: TAG
tctccctctttttctctgac

SEQ ID NO: 116165 - DNA, 20 bp, Artificial Sequence
  Description of Artificial Sequence: Synthetic oligonucleotide
  Target: LAMA2; (-) strand; PAM type: NRG; PAM sequence: AAG
tgggagggctatggcagaaa

SEQ ID NO: 116166 - DNA, 20 bp, Artificial Sequence
  Description of Artificial Sequence: Synthetic oligonucleotide
  Target: LAMA2; (-) strand; PAM type: NRG; PAM sequence: CAG
taaaagtgggagggctatgg

SEQ ID NO: 116167 - DNA, 20 bp, Artificial Sequence
  Description of Artificial Sequence: Synthetic oligonucleotide
  Target: LAMA2; (-) strand; PAM type: NRG; PAM sequence: TGG
gaataaaagtgggagggcta

SEQ ID NO: 116168 - DNA, 20 bp, Artificial Sequence
  Description of Artificial Sequence: Synthetic oligonucleotide
  Target: LAMA2; (-) strand; PAM type: NRG; PAM sequence: GGG
ttcatggaataaaagtggga

SEQ ID NO: 116169 - DNA, 20 bp, Artificial Sequence
  Description of Artificial Sequence: Synthetic oligonucleotide
  Target: LAMA2; (-) strand; PAM type: NRG; PAM sequence: AGG
attcatggaataaaagtggg

SEQ ID NO: 116170 - DNA, 20 bp, Artificial Sequence
  Description of Artificial Sequence: Synthetic oligonucleotide
  Target: LAMA2; (-) strand; PAM type: NRG; PAM sequence: GAG
aattcatggaataaaagtgg

SEQ ID NO: 116171 - DNA, 20 bp, Artificial Sequence
  Description of Artificial Sequence: Synthetic oligonucleotide
  Target: LAMA2; (-) strand; PAM type: NRG; PAM sequence: GGG
agaattcatggaataaaagt

SEQ ID NO: 116172 - DNA, 20 bp, Artificial Sequence
  Description of Artificial Sequence: Synthetic oligonucleotide
  Target: LAMA2; (-) strand; PAM type: NRG; PAM sequence: TGG
cagaattcatggaataaaag

SEQ ID NO: 116173 - DNA, 20 bp, Artificial Sequence
  Description of Artificial Sequence: Synthetic oligonucleotide
  Target: LAMA2; (-) strand; PAM type: NRG; PAM sequence: AAG
tgccagaattcatggaataa

SEQ ID NO: 116174 - DNA, 20 bp, Artificial Sequence
  Description of Artificial Sequence: Synthetic oligonucleotide
  Target: LAMA2; (-) strand; PAM type: NRG; PAM sequence: TGG
aagtaacctgccagaattca

SEQ ID NO: 116175 - DNA, 20 bp, Artificial Sequence
  Description of Artificial Sequence: Synthetic oligonucleotide
  Target: LAMA2; (-) strand; PAM type: NRG; PAM sequence: CAG
agaagggacaagtaacctgc

SEQ ID NO: 116176 - DNA, 20 bp, Artificial Sequence
  Description of Artificial Sequence: Synthetic oligonucleotide
  Target: LAMA2; (-) strand; PAM type: NRG; PAM sequence: AAG
attttacatttagaagggac

SEQ ID NO: 116177 - DNA, 20 bp, Artificial Sequence
  Description of Artificial Sequence: Synthetic oligonucleotide
  Target: LAMA2; (-) strand; PAM type: NRG; PAM sequence: GGG
taattattttacatttagaa

SEQ ID NO: 116178 - DNA, 20 bp, Artificial Sequence
  Description of Artificial Sequence: Synthetic oligonucleotide
  Target: LAMA2; (-) strand; PAM type: NRG; PAM sequence: AGG
ttaattattttacatttaga

SEQ ID NO: 116179 - DNA, 20 bp, Artificial Sequence
  Description of Artificial Sequence: Synthetic oligonucleotide
  Target: LAMA2; (-) strand; PAM type: NRG; PAM sequence: AAG
attaattattttacatttag

SEQ ID NO: 116180 - DNA, 20 bp, Artificial Sequence
  Description of Artificial Sequence: Synthetic oligonucleotide
  Target: LAMA2; (-) strand; PAM type: NRG; PAM sequence: TAG
tccattaattattttacatt

SEQ ID NO: 116181 - DNA, 20 bp, Artificial Sequence
  Description of Artificial Sequence: Synthetic oligonucleotide
  Target: LAMA2; (-) strand; PAM type: NRG; PAM sequence: AAG
ataatagtaatcctagaagg

SEQ ID NO: 116182 - DNA, 20 bp, Artificial Sequence
  Description of Artificial Sequence: Synthetic oligonucleotide
  Target: LAMA2; (-) strand; PAM type: NRG; PAM sequence: AGG
ctcataatagtaatcctaga

SEQ ID NO: 116183 - DNA, 20 bp, Artificial Sequence
  Description of Artificial Sequence: Synthetic oligonucleotide
  Target: LAMA2; (-) strand; PAM type: NRG; PAM sequence: AAG
cctcataatagtaatcctag

SEQ ID NO: 116184 - DNA, 20 bp, Artificial Sequence
  Description of Artificial Sequence: Synthetic oligonucleotide
  Target: LAMA2; (-) strand; PAM type: NRG; PAM sequence: TAG
ttccctcataatagtaatcc

SEQ ID NO: 116185 - DNA, 20 bp, Artificial Sequence
  Description of Artificial Sequence: Synthetic oligonucleotide
  Target: LAMA2; (-) strand; PAM type: NRG; PAM sequence: TAG
tataacttattccctcataa

SEQ ID NO: 116186 - DNA, 20 bp, Artificial Sequence
  Description of Artificial Sequence: Synthetic oligonucleotide
  Target: LAMA2; (-) strand; PAM type: NRG; PAM sequence: AGG
tttgagccaagcatggtgct

SEQ ID NO: 116187 - DNA, 20 bp, Artificial Sequence
  Description of Artificial Sequence: Synthetic oligonucleotide
  Target: LAMA2; (-) strand; PAM type: NRG; PAM sequence: TAG
ctttgagccaagcatggtgc

SEQ ID NO: 116188 - DNA, 20 bp, Artificial Sequence
  Description of Artificial Sequence: Synthetic oligonucleotide
  Target: LAMA2; (-) strand; PAM type: NRG; PAM sequence: TGG
atgttactttgagccaagca

SEQ ID NO: 116189 - DNA, 20 bp, Artificial Sequence
  Description of Artificial Sequence: Synthetic oligonucleotide
  Target: LAMA2; (-) strand; PAM type: NRG; PAM sequence: AAG
atggaatgttactttgagcc

SEQ ID NO: 116190 - DNA, 20 bp, Artificial Sequence
  Description of Artificial Sequence: Synthetic oligonucleotide
  Target: LAMA2; (-) strand; PAM type: NRG; PAM sequence: GAG
gagagatggaatgttacttt

SEQ ID NO: 116191 - DNA, 20 bp, Artificial Sequence
  Description of Artificial Sequence: Synthetic oligonucleotide
  Target: LAMA2; (-) strand; PAM type: NRG; PAM sequence: TGG
caaaagaataaatagagaga

SEQ ID NO: 116192 - DNA, 20 bp, Artificial Sequence
  Description of Artificial Sequence: Synthetic oligonucleotide
  Target: LAMA2; (-) strand; PAM type: NRG; PAM sequence: GAG
ctaacaaaagaataaataga

SEQ ID NO: 116193 - DNA, 20 bp, Artificial Sequence
  Description of Artificial Sequence: Synthetic oligonucleotide
  Target: LAMA2; (-) strand; PAM type: NRG; PAM sequence: GAG
aactaacaaaagaataaata

SEQ ID NO: 116194 - DNA, 20 bp, Artificial Sequence
  Description of Artificial Sequence: Synthetic oligonucleotide
  Target: LAMA2; (-) strand; PAM type: NRG; PAM sequence: TAG
taaactaacaaaagaataaa

SEQ ID NO: 116195 - DNA, 20 bp, Artificial Sequence
  Description of Artificial Sequence: Synthetic oligonucleotide
  Target: LAMA2; (-) strand; PAM type: NRG; PAM sequence: AAG
agttaaagttaaactaacaa

SEQ ID NO: 116196 - DNA, 20 bp, Artificial Sequence
  Description of Artificial Sequence: Synthetic oligonucleotide
  Target: LAMA2; (-) strand; PAM type: NRG; PAM sequence: AAG
ttaaagaaacacagaagtta

SEQ ID NO: 116197 - DNA, 20 bp, Artificial Sequence
  Description of Artificial Sequence: Synthetic oligonucleotide
  Target: LAMA2; (-) strand; PAM type: NRG; PAM sequence: AAG
attaagttaaagaaacacag

SEQ ID NO: 116198 - DNA, 20 bp, Artificial Sequence
  Description of Artificial Sequence: Synthetic oligonucleotide
  Target: LAMA2; (-) strand; PAM type: NRG; PAM sequence: CAG
ataattaagttaaagaaaca

SEQ ID NO: 116199 - DNA, 20 bp, Artificial Sequence
  Description of Artificial Sequence: Synthetic oligonucleotide
  Target: LAMA2; (-) strand; PAM type: NRG; PAM sequence: AAG
taactagaataattaagtta

SEQ ID NO: 116200 - DNA, 20 bp, Artificial Sequence
  Description of Artificial Sequence: Synthetic oligonucleotide
  Target: LAMA2; (-) strand; PAM type: NRG; PAM sequence: AAG
ttaaactaactagaataatt

SEQ ID NO: 116201 - DNA, 20 bp, Artificial Sequence
  Description of Artificial Sequence: Synthetic oligonucleotide
  Target: LAMA2; (-) strand; PAM type: NRG; PAM sequence: TAG
atgtgaaaagttaaactaac

SEQ ID NO: 116202 - DNA, 20 bp, Artificial Sequence
  Description of Artificial Sequence: Synthetic oligonucleotide
  Target: LAMA2; (-) strand; PAM type: NRG; PAM sequence: AAG
acccaccctaaaaatgtgaa

SEQ ID NO: 116203 - DNA, 20 bp, Artificial Sequence
  Description of Artificial Sequence: Synthetic oligonucleotide
  Target: LAMA2; (-) strand; PAM type: NRG; PAM sequence: CAG
tcaccacatccctttttttc

SEQ ID NO: 116204 - DNA, 20 bp, Artificial Sequence
  Description of Artificial Sequence: Synthetic oligonucleotide
  Target: LAMA2; (-) strand; PAM type: NRG; PAM sequence: TGG
atcaaaccaataaaagggtt

SEQ ID NO: 116205 - DNA, 20 bp, Artificial Sequence
  Description of Artificial Sequence: Synthetic oligonucleotide
  Target: LAMA2; (-) strand; PAM type: NRG; PAM sequence: GGG
tacatatcaaaccaataaaa

SEQ ID NO: 116206 - DNA, 20 bp, Artificial Sequence
  Description of Artificial Sequence: Synthetic oligonucleotide
  Target: LAMA2; (-) strand; PAM type: NRG; PAM sequence: AGG
ttacatatcaaaccaataaa

SEQ ID NO: 116207 - DNA, 20 bp, Artificial Sequence
  Description of Artificial Sequence: Synthetic oligonucleotide
  Target: LAMA2; (-) strand; PAM type: NRG; PAM sequence: AAG
attacatatcaaaccaataa

SEQ ID NO: 116208 - DNA, 20 bp, Artificial Sequence
  Description of Artificial Sequence: Synthetic oligonucleotide
  Target: LAMA2; (-) strand; PAM type: NRG; PAM sequence: AGG
gtgagaagtgaaaattatag

SEQ ID NO: 116209 - DNA, 20 bp, Artificial Sequence
  Description of Artificial Sequence: Synthetic oligonucleotide
  Target: LAMA2; (-) strand; PAM type: NRG; PAM sequence: GAG
ggtgagaagtgaaaattata

SEQ ID NO: 116210 - DNA, 20 bp, Artificial Sequence
  Description of Artificial Sequence: Synthetic oligonucleotide
  Target: LAMA2; (-) strand; PAM type: NRG; PAM sequence: TAG
atggtgagaagtgaaaatta

SEQ ID NO: 116211 - DNA, 20 bp, Artificial Sequence
  Description of Artificial Sequence: Synthetic oligonucleotide
  Target: LAMA2; (-) strand; PAM type: NRG; PAM sequence: AAG
caaaaatggaaaatggtgag

SEQ ID NO: 116212 - DNA, 20 bp, Artificial Sequence
  Description of Artificial Sequence: Synthetic oligonucleotide
  Target: LAMA2; (-) strand; PAM type: NRG; PAM sequence: GAG
atacaaaaatggaaaatggt

SEQ ID NO: 116213 - DNA, 20 bp, Artificial Sequence
  Description of Artificial Sequence: Synthetic oligonucleotide
  Target: LAMA2; (-) strand; PAM type: NRG; PAM sequence: TGG
tctgatacaaaaatggaaaa

SEQ ID NO: 116214 - DNA, 20 bp, Artificial Sequence
  Description of Artificial Sequence: Synthetic oligonucleotide
  Target: LAMA2; (-) strand; PAM type: NRG; PAM sequence: TGG
tctaaattctgatacaaaaa

SEQ ID NO: 116215 - DNA, 20 bp, Artificial Sequence
  Description of Artificial Sequence: Synthetic oligonucleotide
  Target: LAMA2; (-) strand; PAM type: NRG; PAM sequence: AAG
agagcaagaaaaaaaaaata

SEQ ID NO: 116216 - DNA, 20 bp, Artificial Sequence
  Description of Artificial Sequence: Synthetic oligonucleotide
  Target: LAMA2; (-) strand; PAM type: NRG; PAM sequence: AAG
accagcctgggtgacagagc

SEQ ID NO: 116217 - DNA, 20 bp, Artificial Sequence
  Description of Artificial Sequence: Synthetic oligonucleotide
  Target: LAMA2; (-) strand; PAM type: NRG; PAM sequence: GAG
gcacaccagcctgggtgaca

SEQ ID NO: 116218 - DNA, 20 bp, Artificial Sequence
  Description of Artificial Sequence: Synthetic oligonucleotide
  Target: LAMA2; (-) strand; PAM type: NRG; PAM sequence: CAG
ctgcacaccagcctgggtga

SEQ ID NO: 116219 - DNA, 20 bp, Artificial Sequence
  Description of Artificial Sequence: Synthetic oligonucleotide
  Target: LAMA2; (-) strand; PAM type: NRG; PAM sequence: GGG
gcgccactgcacaccagcct

SEQ ID NO: 116220 - DNA, 20 bp, Artificial Sequence
  Description of Artificial Sequence: Synthetic oligonucleotide
  Target: LAMA2; (-) strand; PAM type: NRG; PAM sequence: TGG
tgcgccactgcacaccagcc

SEQ ID NO: 116221 - DNA, 20 bp, Artificial Sequence
  Description of Artificial Sequence: Synthetic oligonucleotide
  Target: LAMA2; (-) strand; PAM type: NRG; PAM sequence: CAG
atgattgcgccactgcacac

SEQ ID NO: 116222 - DNA, 20 bp, Artificial Sequence
  Description of Artificial Sequence: Synthetic oligonucleotide
  Target: LAMA2; (-) strand; PAM type: NRG; PAM sequence: AAG
tgggaggttaaggctgcagt

SEQ ID NO: 116223 - DNA, 20 bp, Artificial Sequence
  Description of Artificial Sequence: Synthetic oligonucleotide
  Target: LAMA2; (-) strand; PAM type: NRG; PAM sequence: CAG
agcctgggaggttaaggctg

SEQ ID NO: 116224 - DNA, 20 bp, Artificial Sequence
  Description of Artificial Sequence: Synthetic oligonucleotide
  Target: LAMA2; (-) strand; PAM type: NRG; PAM sequence: AGG
cgcctgagcctgggaggtta

SEQ ID NO: 116225 - DNA, 20 bp, Artificial Sequence
  Description of Artificial Sequence: Synthetic oligonucleotide
  Target: LAMA2; (-) strand; PAM type: NRG; PAM sequence: AAG
tcgcctgagcctgggaggtt

SEQ ID NO: 116226 - DNA, 20 bp, Artificial Sequence
  Description of Artificial Sequence: Synthetic oligonucleotide
  Target: LAMA2; (-) strand; PAM type: NRG; PAM sequence: AGG
gaggatcgcctgagcctggg

SEQ ID NO: 116227 - DNA, 20 bp, Artificial Sequence
  Description of Artificial Sequence: Synthetic oligonucleotide
  Target: LAMA2; (-) strand; PAM type: NRG; PAM sequence: GAG
tgaggatcgcctgagcctgg

SEQ ID NO: 116228 - DNA, 20 bp, Artificial Sequence
  Description of Artificial Sequence: Synthetic oligonucleotide
  Target: LAMA2; (-) strand; PAM type: NRG; PAM sequence: GGG
catgaggatcgcctgagcct

SEQ ID NO: 116229 - DNA, 20 bp, Artificial Sequence
  Description of Artificial Sequence: Synthetic oligonucleotide
  Target: LAMA2; (-) strand; PAM type: NRG; PAM sequence: TGG
gcatgaggatcgcctgagcc

SEQ ID NO: 116230 - DNA, 20 bp, Artificial Sequence
  Description of Artificial Sequence: Synthetic oligonucleotide
  Target: LAMA2; (-) strand; PAM type: NRG; PAM sequence: GAG
ctgaggcatgaggatcgcct

SEQ ID NO: 116231 - DNA, 20 bp, Artificial Sequence
  Description of Artificial Sequence: Synthetic oligonucleotide
  Target: LAMA2; (-) strand; PAM type: NRG; PAM sequence: AGG
actcaggaggctgaggcatg

SEQ ID NO: 116232 - DNA, 20 bp, Artificial Sequence
  Description of Artificial Sequence: Synthetic oligonucleotide
  Target: LAMA2; (-) strand; PAM type: NRG; PAM sequence: GAG
tactcaggaggctgaggcat

SEQ ID NO: 116233 - DNA, 20 bp, Artificial Sequence
  Description of Artificial Sequence: Synthetic oligonucleotide
  Target: LAMA2; (-) strand; PAM type: NRG; PAM sequence: AGG
cccagctactcaggaggctg

SEQ ID NO: 116234 - DNA, 20 bp, Artificial Sequence
  Description of Artificial Sequence: Synthetic oligonucleotide
  Target: LAMA2; (-) strand; PAM type: NRG; PAM sequence: GAG
tcccagctactcaggaggct

SEQ ID NO: 116235 - DNA, 20 bp, Artificial Sequence
  Description of Artificial Sequence: Synthetic oligonucleotide
  Target: LAMA2; (-) strand; PAM type: NRG; PAM sequence: AGG
tgcagtcccagctactcagg

SEQ ID NO: 116236 - DNA, 20 bp, Artificial Sequence
  Description of Artificial Sequence: Synthetic oligonucleotide
  Target: LAMA2; (-) strand; PAM type: NRG; PAM sequence: GAG
ctgcagtcccagctactcag

SEQ ID NO: 116237 - DNA, 20 bp, Artificial Sequence
  Description of Artificial Sequence: Synthetic oligonucleotide
  Target: LAMA2; (-) strand; PAM type: NRG; PAM sequence: AGG
acctgcagtcccagctactc

SEQ ID NO: 116238 - DNA, 20 bp, Artificial Sequence
  Description of Artificial Sequence: Synthetic oligonucleotide
  Target: LAMA2; (-) strand; PAM type: NRG; PAM sequence: CAG
cacctgcagtcccagctact

SEQ ID NO: 116239 - DNA, 20 bp, Artificial Sequence
  Description of Artificial Sequence: Synthetic oligonucleotide
  Target: LAMA2; (-) strand; PAM type: NRG; PAM sequence: CAG
gtggaatgcacctgcagtcc

SEQ ID NO: 116240 - DNA, 20 bp, Artificial Sequence
  Description of Artificial Sequence: Synthetic oligonucleotide
  Target: LAMA2; (-) strand; PAM type: NRG; PAM sequence: CAG
ggcatggtggaatgcacctg

SEQ ID NO: 116241 - DNA, 20 bp, Artificial Sequence
  Description of Artificial Sequence: Synthetic oligonucleotide
  Target: LAMA2; (-) strand; PAM type: NRG; PAM sequence: TGG
caaaaattagccgggcatgg

SEQ ID NO: 116242 - DNA, 20 bp, Artificial Sequence
  Description of Artificial Sequence: Synthetic oligonucleotide
  Target: LAMA2; (-) strand; PAM type: NRG; PAM sequence: TGG
atacaaaaattagccgggca

SEQ ID NO: 116243 - DNA, 20 bp, Artificial Sequence
  Description of Artificial Sequence: Synthetic oligonucleotide
  Target: LAMA2; (-) strand; PAM type: NRG; PAM sequence: GGG
taaaaatacaaaaattagcc

SEQ ID NO: 116244 - DNA, 20 bp, Artificial Sequence
  Description of Artificial Sequence: Synthetic oligonucleotide
  Target: LAMA2; (-) strand; PAM type: NRG; PAM sequence: CGG
ttaaaaatacaaaaattagc

SEQ ID NO: 116245 - DNA, 20 bp, Artificial Sequence
  Description of Artificial Sequence: Synthetic oligonucleotide
  Target: LAMA2; (-) strand; PAM type: NRG; PAM sequence: TAG
tctattaaaaatacaaaaat

SEQ ID NO: 116246 - DNA, 20 bp, Artificial Sequence
  Description of Artificial Sequence: Synthetic oligonucleotide
  Target: LAMA2; (-) strand; PAM type: NRG; PAM sequence: TGG
cgagaccagcctggccaaca

SEQ ID NO: 116247 - DNA, 20 bp, Artificial Sequence
  Description of Artificial Sequence: Synthetic oligonucleotide
  Target: LAMA2; (-) strand; PAM type: NRG; PAM sequence: TGG
ccaagagttcgagaccagcc

SEQ ID NO: 116248 - DNA, 20 bp, Artificial Sequence
  Description of Artificial Sequence: Synthetic oligonucleotide
  Target: LAMA2; (-) strand; PAM type: NRG; PAM sequence: CAG
acttcccaagagttcgagac

SEQ ID NO: 116249 - DNA, 20 bp, Artificial Sequence
  Description of Artificial Sequence: Synthetic oligonucleotide
  Target: LAMA2; (-) strand; PAM type: NRG; PAM sequence: GAG
ggatcacttcccaagagttc

SEQ ID NO: 116250 - DNA, 20 bp, Artificial Sequence
  Description of Artificial Sequence: Synthetic oligonucleotide
  Target: LAMA2; (-) strand; PAM type: NRG; PAM sequence: GAG
gcaggtggatcacttcccaa

SEQ ID NO: 116251 - DNA, 20 bp, Artificial Sequence
  Description of Artificial Sequence: Synthetic oligonucleotide
  Target: LAMA2; (-) strand; PAM type: NRG; PAM sequence: AAG
aggcaggtggatcacttccc

SEQ ID NO: 116252 - DNA, 20 bp, Artificial Sequence
  Description of Artificial Sequence: Synthetic oligonucleotide
  Target: LAMA2; (-) strand; PAM type: NRG; PAM sequence: TGG
ctttggcaggctgaggcagg

SEQ ID NO: 116253 - DNA, 20 bp, Artificial Sequence
  Description of Artificial Sequence: Synthetic oligonucleotide
  Target: LAMA2; (-) strand; PAM type: NRG; PAM sequence: AGG
acactttggcaggctgaggc

SEQ ID NO: 116254 - DNA, 20 bp, Artificial Sequence
  Description of Artificial Sequence: Synthetic oligonucleotide
  Target: LAMA2; (-) strand; PAM type: NRG; PAM sequence: CAG
aacactttggcaggctgagg

SEQ ID NO: 116255 - DNA, 20 bp, Artificial Sequence
  Description of Artificial Sequence: Synthetic oligonucleotide
  Target: LAMA2; (-) strand; PAM type: NRG; PAM sequence: AGG
ctcaacactttggcaggctg

SEQ ID NO: 116256 - DNA, 20 bp, Artificial Sequence
  Description of Artificial Sequence: Synthetic oligonucleotide
  Target: LAMA2; (-) strand; PAM type: NRG; PAM sequence: GAG
tctcaacactttggcaggct

SEQ ID NO: 116257 - DNA, 20 bp, Artificial Sequence
  Description of Artificial Sequence: Synthetic oligonucleotide
  Target: LAMA2; (-) strand; PAM type: NRG; PAM sequence: AGG
tgtaatctcaacactttggc

SEQ ID NO: 116258 - DNA, 20 bp, Artificial Sequence
  Description of Artificial Sequence: Synthetic oligonucleotide
  Target: LAMA2; (-) strand; PAM type: NRG; PAM sequence: CAG
ctgtaatctcaacactttgg

SEQ ID NO: 116259 - DNA, 20 bp, Artificial Sequence
  Description of Artificial Sequence: Synthetic oligonucleotide
  Target: LAMA2; (-) strand; PAM type: NRG; PAM sequence: TGG
tgcctgtaatctcaacactt

SEQ ID NO: 116260 - DNA, 20 bp, Artificial Sequence
  Description of Artificial Sequence: Synthetic oligonucleotide
  Target: LAMA2; (-) strand; PAM type: NRG; PAM sequence: TGG
aaattctgggccaggcgtgg

SEQ ID NO: 116261 - DNA, 20 bp, Artificial Sequence
  Description of Artificial Sequence: Synthetic oligonucleotide
  Target: LAMA2; (-) strand; PAM type: NRG; PAM sequence: TGG
gctaaattctgggccaggcg

SEQ ID NO: 116262 - DNA, 20 bp, Artificial Sequence
  Description of Artificial Sequence: Synthetic oligonucleotide
  Target: LAMA2; (-) strand; PAM type: NRG; PAM sequence: AGG
aaaaagctaaattctgggcc

SEQ ID NO: 116263 - DNA, 20 bp, Artificial Sequence
  Description of Artificial Sequence: Synthetic oligonucleotide
  Target: LAMA2; (-) strand; PAM type: NRG; PAM sequence: CAG
taaaaagctaaattctgggc

SEQ ID NO: 116264 - DNA, 20 bp, Artificial Sequence
  Description of Artificial Sequence: Synthetic oligonucleotide
  Target: LAMA2; (-) strand; PAM type: NRG; PAM sequence: GGG
ctcttaaaaagctaaattct

SEQ ID NO: 116265 - DNA, 20 bp, Artificial Sequence
  Description of Artificial Sequence: Synthetic oligonucleotide
  Target: LAMA2; (-) strand; PAM type: NRG; PAM sequence: TGG
actcttaaaaagctaaattc

SEQ ID NO: 116266 - DNA, 20 bp, Artificial Sequence
  Description of Artificial Sequence: Synthetic oligonucleotide
  Target: LAMA2; (-) strand; PAM type: NRG; PAM sequence: AAG
cttaaataacaactcttaaa

SEQ ID NO: 116267 - DNA, 20 bp, Artificial Sequence
  Description of Artificial Sequence: Synthetic oligonucleotide
  Target: LAMA2; (-) strand; PAM type: NRG; PAM sequence: TAG
aggagttaacttttaagtct

SEQ ID NO: 116268 - DNA, 20 bp, Artificial Sequence
  Description of Artificial Sequence: Synthetic oligonucleotide
  Target: LAMA2; (-) strand; PAM type: NRG; PAM sequence: AAG
cacttcaggagttaactttt

SEQ ID NO: 116269 - DNA, 20 bp, Artificial Sequence
  Description of Artificial Sequence: Synthetic oligonucleotide
  Target: LAMA2; (-) strand; PAM type: NRG; PAM sequence: GAG
ataggcagttctcacttcag

SEQ ID NO: 116270 - DNA, 20 bp, Artificial Sequence
  Description of Artificial Sequence: Synthetic oligonucleotide
  Target: LAMA2; (-) strand; PAM type: NRG; PAM sequence: AGG
aaataggcagttctcacttc

SEQ ID NO: 116271 - DNA, 20 bp, Artificial Sequence
  Description of Artificial Sequence: Synthetic oligonucleotide
  Target: LAMA2; (-) strand; PAM type: NRG; PAM sequence: CAG
taaataggcagttctcactt

SEQ ID NO: 116272 - DNA, 20 bp, Artificial Sequence
  Description of Artificial Sequence: Synthetic oligonucleotide
  Target: LAMA2; (-) strand; PAM type: NRG; PAM sequence: CAG
atatggagctcataaatagg

SEQ ID NO: 116273 - DNA, 20 bp, Artificial Sequence
  Description of Artificial Sequence: Synthetic oligonucleotide
  Target: LAMA2; (-) strand; PAM type: NRG; PAM sequence: AGG
caaatatggagctcataaat

SEQ ID NO: 116274 - DNA, 20 bp, Artificial Sequence
  Description of Artificial Sequence: Synthetic oligonucleotide
  Target: LAMA2; (-) strand; PAM type: NRG; PAM sequence: TAG
acaaatatggagctcataaa

SEQ ID NO: 116275 - DNA, 20 bp, Artificial Sequence
  Description of Artificial Sequence: Synthetic oligonucleotide
  Target: LAMA2; (-) strand; PAM type: NRG; PAM sequence: GAG
actgtgctagcacaaatatg

SEQ ID NO: 116276 - DNA, 20 bp, Artificial Sequence
  Description of Artificial Sequence: Synthetic oligonucleotide
  Target: LAMA2; (-) strand; PAM type: NRG; PAM sequence: TGG
caactgtgctagcacaaata

SEQ ID NO: 116277 - DNA, 20 bp, Artificial Sequence
  Description of Artificial Sequence: Synthetic oligonucleotide
  Target: LAMA2; (-) strand; PAM type: NRG; PAM sequence: TAG
atcttttctgtcaactgtgc

SEQ ID NO: 116278 - DNA, 20 bp, Artificial Sequence
  Description of Artificial Sequence: Synthetic oligonucleotide
  Target: LAMA2; (-) strand; PAM type: NRG; PAM sequence: TAG
aaaaagaagggcactgagaa

SEQ ID NO: 116279 - DNA, 20 bp, Artificial Sequence
  Description of Artificial Sequence: Synthetic oligonucleotide
  Target: LAMA2; (-) strand; PAM type: NRG; PAM sequence: GAG
agaagaaaaagaagggcact

SEQ ID NO: 116280 - DNA, 20 bp, Artificial Sequence
  Description of Artificial Sequence: Synthetic oligonucleotide
  Target: LAMA2; (-) strand; PAM type: NRG; PAM sequence: GGG
ggtgtaaagaagaaaaagaa

SEQ ID NO: 116281 - DNA, 20 bp, Artificial Sequence
  Description of Artificial Sequence: Synthetic oligonucleotide
  Target: LAMA2; (-) strand; PAM type: NRG; PAM sequence: AGG
gggtgtaaagaagaaaaaga

SEQ ID NO: 116282 - DNA, 20 bp, Artificial Sequence
  Description of Artificial Sequence: Synthetic oligonucleotide
  Target: LAMA2; (-) strand; PAM type: NRG; PAM sequence: AAG
tgggtgtaaagaagaaaaag

SEQ ID NO: 116283 - DNA, 20 bp, Artificial Sequence
  Description of Artificial Sequence: Synthetic oligonucleotide
  Target: LAMA2; (-) strand; PAM type: NRG; PAM sequence: AAG
tgatgggtgtaaagaagaaa

SEQ ID NO: 116284 - DNA, 20 bp, Artificial Sequence
  Description of Artificial Sequence: Synthetic oligonucleotide
  Target: LAMA2; (-) strand; PAM type: NRG; PAM sequence: AAG
tgggtgtgatgggtgtaaag

SEQ ID NO: 116285 - DNA, 20 bp, Artificial Sequence
  Description of Artificial Sequence: Synthetic oligonucleotide
  Target: LAMA2; (-) strand; PAM type: NRG; PAM sequence: AAG
gattgggtgtgatgggtgta

SEQ ID NO: 116286 - DNA, 20 bp, Artificial Sequence
  Description of Artificial Sequence: Synthetic oligonucleotide
  Target: LAMA2; (-) strand; PAM type: NRG; PAM sequence: GGG
ctggcaggattgggtgtgat

SEQ ID NO: 116287 - DNA, 20 bp, Artificial Sequence
  Description of Artificial Sequence: Synthetic oligonucleotide
  Target: LAMA2; (-) strand; PAM type: NRG; PAM sequence: TGG
gctggcaggattgggtgtga

SEQ ID NO: 116288 - DNA, 20 bp, Artificial Sequence
  Description of Artificial Sequence: Synthetic oligonucleotide
  Target: LAMA2; (-) strand; PAM type: NRG; PAM sequence: GGG
tgtaagttgctggcaggatt

SEQ ID NO: 116289 - DNA, 20 bp, Artificial Sequence
  Description of Artificial Sequence: Synthetic oligonucleotide
  Target: LAMA2; (-) strand; PAM type: NRG; PAM sequence: TGG
ctgtaagttgctggcaggat

SEQ ID NO: 116290 - DNA, 20 bp, Artificial Sequence
  Description of Artificial Sequence: Synthetic oligonucleotide
  Target: LAMA2; (-) strand; PAM type: NRG; PAM sequence: AGG
tcatgctgtaagttgctggc

SEQ ID NO: 116291 - DNA, 20 bp, Artificial Sequence
  Description of Artificial Sequence: Synthetic oligonucleotide
  Target: LAMA2; (-) strand; PAM type: NRG; PAM sequence: CAG
ctcatgctgtaagttgctgg

SEQ ID NO: 116292 - DNA, 20 bp, Artificial Sequence
  Description of Artificial Sequence: Synthetic oligonucleotide
  Target: LAMA2; (-) strand; PAM type: NRG; PAM sequence: TGG
gtcctcatgctgtaagttgc

SEQ ID NO: 116293 - DNA, 20 bp, Artificial Sequence
  Description of Artificial Sequence: Synthetic oligonucleotide
  Target: LAMA2; (-) strand; PAM type: NRG; PAM sequence: AAG
gaatgttgtcctcatgctgt

SEQ ID NO: 116294 - DNA, 20 bp, Artificial Sequence
  Description of Artificial Sequence: Synthetic oligonucleotide
  Target: LAMA2; (-) strand; PAM type: NRG; PAM sequence: TAG
ccttacattgccctgtagta

SEQ ID NO: 116295 - DNA, 20 bp, Artificial Sequence
  Description of Artificial Sequence: Synthetic oligonucleotide
  Target: LAMA2; (-) strand; PAM type: NRG; PAM sequence: TAG
gacacccttacattgccctg

SEQ ID NO: 116296 - DNA, 20 bp, Artificial Sequence
  Description of Artificial Sequence: Synthetic oligonucleotide
  Target: LAMA2; (-) strand; PAM type: NRG; PAM sequence: AAG
tcacaaggcagggctttctc

SEQ ID NO: 116297 - DNA, 20 bp, Artificial Sequence
  Description of Artificial Sequence: Synthetic oligonucleotide
  Target: LAMA2; (-) strand; PAM type: NRG; PAM sequence: GGG
ataatccatttcacaaggca

SEQ ID NO: 116298 - DNA, 20 bp, Artificial Sequence
  Description of Artificial Sequence: Synthetic oligonucleotide
  Target: LAMA2; (-) strand; PAM type: NRG; PAM sequence: AGG
cataatccatttcacaaggc

SEQ ID NO: 116299 - DNA, 20 bp, Artificial Sequence
  Description of Artificial Sequence: Synthetic oligonucleotide
  Target: LAMA2; (-) strand; PAM type: NRG; PAM sequence: CAG
acataatccatttcacaagg

SEQ ID NO: 116300 - DNA, 20 bp, Artificial Sequence
  Description of Artificial Sequence: Synthetic oligonucleotide
  Target: LAMA2; (-) strand; PAM type: NRG; PAM sequence: AGG
ttgacataatccatttcaca

SEQ ID NO: 116301 - DNA, 20 bp, Artificial Sequence
  Description of Artificial Sequence: Synthetic oligonucleotide
  Target: LAMA2; (-) strand; PAM type: NRG; PAM sequence: AAG
attgacataatccatttcac

SEQ ID NO: 116302 - DNA, 20 bp, Artificial Sequence
  Description of Artificial Sequence: Synthetic oligonucleotide
  Target: LAMA2; (-) strand; PAM type: NRG; PAM sequence: AAG
gttcaacatgaattaatcat

SEQ ID NO: 116303 - DNA, 20 bp, Artificial Sequence
  Description of Artificial Sequence: Synthetic oligonucleotide
  Target: LAMA2; (-) strand; PAM type: NRG; PAM sequence: TAG
gcatgaaatgctctttaatc

SEQ ID NO: 116304 - DNA, 20 bp, Artificial Sequence
  Description of Artificial Sequence: Synthetic oligonucleotide
  Target: LAMA2; (-) strand; PAM type: NRG; PAM sequence: GAG
aagctaccataatatcaaat

SEQ ID NO: 116305 - DNA, 20 bp, Artificial Sequence
  Description of Artificial Sequence: Synthetic oligonucleotide
  Target: LAMA2; (-) strand; PAM type: NRG; PAM sequence: AAG
gagaagtataaagagaagac

SEQ ID NO: 116306 - DNA, 20 bp, Artificial Sequence
  Description of Artificial Sequence: Synthetic oligonucleotide
  Target: LAMA2; (-) strand; PAM type: NRG; PAM sequence: AAG
taagagagaagtataaagag

SEQ ID NO: 116307 - DNA, 20 bp, Artificial Sequence
  Description of Artificial Sequence: Synthetic oligonucleotide
  Target: LAMA2; (-) strand; PAM type: NRG; PAM sequence: GAG
gaataagagagaagtataaa

SEQ ID NO: 116308 - DNA, 20 bp, Artificial Sequence
  Description of Artificial Sequence: Synthetic oligonucleotide
  Target: LAMA2; (-) strand; PAM type: NRG; PAM sequence: AAG
aagaataagagagaagtata

SEQ ID NO: 116309 - DNA, 20 bp, Artificial Sequence
  Description of Artificial Sequence: Synthetic oligonucleotide
  Target: LAMA2; (-) strand; PAM type: NRG; PAM sequence: AAG
tgggctaaagaataagagag

SEQ ID NO: 116310 - DNA, 20 bp, Artificial Sequence
  Description of Artificial Sequence: Synthetic oligonucleotide
  Target: LAMA2; (-) strand; PAM type: NRG; PAM sequence: GAG
cgatgggctaaagaataaga

SEQ ID NO: 116311 - DNA, 20 bp, Artificial Sequence
  Description of Artificial Sequence: Synthetic oligonucleotide
  Target: LAMA2; (-) strand; PAM type: NRG; PAM sequence: GAG
ctcgatgggctaaagaataa

SEQ ID NO: 116312 - DNA, 20 bp, Artificial Sequence
  Description of Artificial Sequence: Synthetic oligonucleotide
  Target: LAMA2; (-) strand; PAM type: NRG; PAM sequence: AAG
ctctcgatgggctaaagaat

SEQ ID NO: 116313 - DNA, 20 bp, Artificial Sequence
  Description of Artificial Sequence: Synthetic oligonucleotide
  Target: LAMA2; (-) strand; PAM type: NRG; PAM sequence: AAG
ctctagctctcgatgggcta

SEQ ID NO: 116314 - DNA, 20 bp, Artificial Sequence
  Description of Artificial Sequence: Synthetic oligonucleotide
  Target: LAMA2; (-) strand; PAM type: NRG; PAM sequence: GGG
tgttttctctagctctcgat

SEQ ID NO: 116315 - DNA, 20 bp, Artificial Sequence
  Description of Artificial Sequence: Synthetic oligonucleotide
  Target: LAMA2; (-) strand; PAM type: NRG; PAM sequence: TGG
atgttttctctagctctcga

SEQ ID NO: 116316 - DNA, 20 bp, Artificial Sequence
  Description of Artificial Sequence: Synthetic oligonucleotide
  Target: LAMA2; (-) strand; PAM type: NRG; PAM sequence: TAG
acatgtagaaatgttttctc

SEQ ID NO: 116317 - DNA, 20 bp, Artificial Sequence
  Description of Artificial Sequence: Synthetic oligonucleotide
  Target: LAMA2; (-) strand; PAM type: NRG; PAM sequence: TAG
atatccacaaatagaacatg

SEQ ID NO: 116318 - DNA, 20 bp, Artificial Sequence
  Description of Artificial Sequence: Synthetic oligonucleotide
  Target: LAMA2; (-) strand; PAM type: NRG; PAM sequence: TAG
ccatgaaaaatatccacaaa

SEQ ID NO: 116319 - DNA, 20 bp, Artificial Sequence
  Description of Artificial Sequence: Synthetic oligonucleotide
  Target: LAMA2; (-) strand; PAM type: NRG; PAM sequence: CAG
tttctgtaatacttgaagtt

SEQ ID NO: 116320 - DNA, 20 bp, Artificial Sequence
  Description of Artificial Sequence: Synthetic oligonucleotide
  Target: LAMA2; (-) strand; PAM type: NRG; PAM sequence: AAG
acaaatttctgtaatacttg

SEQ ID NO: 116321 - DNA, 20 bp, Artificial Sequence
  Description of Artificial Sequence: Synthetic oligonucleotide
  Target: LAMA2; (-) strand; PAM type: NRG; PAM sequence: GAG
aaacagtgcacatacttgca

SEQ ID NO: 116322 - DNA, 20 bp, Artificial Sequence
  Description of Artificial Sequence: Synthetic oligonucleotide
  Target: LAMA2; (-) strand; PAM type: NRG; PAM sequence: CAG
ctaaacagtgcacatacttg

SEQ ID NO: 116323 - DNA, 20 bp, Artificial Sequence
  Description of Artificial Sequence: Synthetic oligonucleotide
  Target: LAMA2; (-) strand; PAM type: NRG; PAM sequence: CAG
ttaaaaagacttggtctaaa

SEQ ID NO: 116324 - DNA, 20 bp, Artificial Sequence
  Description of Artificial Sequence: Synthetic oligonucleotide
  Target: LAMA2; (-) strand; PAM type: NRG; PAM sequence: TGG
ctatccttgttaaaaagact

SEQ ID NO: 116325 - DNA, 20 bp, Artificial Sequence
  Description of Artificial Sequence: Synthetic oligonucleotide
  Target: LAMA2; (-) strand; PAM type: NRG; PAM sequence: AAG
cacaggctatccttgttaaa

SEQ ID NO: 116326 - DNA, 20 bp, Artificial Sequence
  Description of Artificial Sequence: Synthetic oligonucleotide
  Target: LAMA2; (-) strand; PAM type: NRG; PAM sequence: AGG
cattatctacaaatccacac

SEQ ID NO: 116327 - DNA, 20 bp, Artificial Sequence
  Description of Artificial Sequence: Synthetic oligonucleotide
  Target: LAMA2; (-) strand; PAM type: NRG; PAM sequence: CAG
tcattatctacaaatccaca

SEQ ID NO: 116328 - DNA, 20 bp, Artificial Sequence
  Description of Artificial Sequence: Synthetic oligonucleotide
  Target: LAMA2; (-) strand; PAM type: NRG; PAM sequence: CAG
ttcaagtaaaagaatgcagc

SEQ ID NO: 116329 - DNA, 20 bp, Artificial Sequence
  Description of Artificial Sequence: Synthetic oligonucleotide
  Target: LAMA2; (-) strand; PAM type: NRG; PAM sequence: CAG
aaaattcaagtaaaagaatg

SEQ ID NO: 116330 - DNA, 20 bp, Artificial Sequence
  Description of Artificial Sequence: Synthetic oligonucleotide
  Target: LAMA2; (-) strand; PAM type: NRG; PAM sequence: AAG
cttcaataaaattcaagtaa

SEQ ID NO: 116331 - DNA, 20 bp, Artificial Sequence
  Description of Artificial Sequence: Synthetic oligonucleotide
  Target: LAMA2; (-) strand; PAM type: NRG; PAM sequence: AAG
tgaactcttcaataaaattc

SEQ ID NO: 116332 - DNA, 20 bp, Artificial Sequence
  Description of Artificial Sequence: Synthetic oligonucleotide
  Target: LAMA2; (-) strand; PAM type: NRG; PAM sequence: CGG
attttaaactgtgaggttta

SEQ ID NO: 116333 - DNA, 20 bp, Artificial Sequence
  Description of Artificial Sequence: Synthetic oligonucleotide
  Target: LAMA2; (-) strand; PAM type: NRG; PAM sequence: AGG
ttttcacattttaaactgtg

SEQ ID NO: 116334 - DNA, 20 bp, Artificial Sequence
  Description of Artificial Sequence: Synthetic oligonucleotide
  Target: LAMA2; (-) strand; PAM type: NRG; PAM sequence: GAG
gttttcacattttaaactgt

SEQ ID NO: 116335 - DNA, 20 bp, Artificial Sequence
  Description of Artificial Sequence: Synthetic oligonucleotide
  Target: LAMA2; (-) strand; PAM type: NRG; PAM sequence: TAG
gctacttgtattgtttttct

SEQ ID NO: 116336 - DNA, 20 bp, Artificial Sequence
  Description of Artificial Sequence: Synthetic oligonucleotide
  Target: LAMA2; (-) strand; PAM type: NRG; PAM sequence: TGG
atcagtacaggaattctcca

SEQ ID NO: 116337 - DNA, 20 bp, Artificial Sequence
  Description of Artificial Sequence: Synthetic oligonucleotide
  Target: LAMA2; (-) strand; PAM type: NRG; PAM sequence: AGG
caaagagagctcatcagtac

SEQ ID NO: 116338 - DNA, 20 bp, Artificial Sequence
  Description of Artificial Sequence: Synthetic oligonucleotide
  Target: LAMA2; (-) strand; PAM type: NRG; PAM sequence: CAG
ccaaagagagctcatcagta

SEQ ID NO: 116339 - DNA, 20 bp, Artificial Sequence
  Description of Artificial Sequence: Synthetic oligonucleotide
  Target: LAMA2; (-) strand; PAM type: NRG; PAM sequence: CAG
aaatcccaaagagagctcat

SEQ ID NO: 116340 - DNA, 20 bp, Artificial Sequence
  Description of Artificial Sequence: Synthetic oligonucleotide
  Target: LAMA2; (-) strand; PAM type: NRG; PAM sequence: GAG
ttttccccaaatcccaaaga

SEQ ID NO: 116341 - DNA, 20 bp, Artificial Sequence
  Description of Artificial Sequence: Synthetic oligonucleotide
  Target: LAMA2; (-) strand; PAM type: NRG; PAM sequence: GAG
tcttttccccaaatcccaaa

SEQ ID NO: 116342 - DNA, 20 bp, Artificial Sequence
  Description of Artificial Sequence: Synthetic oligonucleotide
  Target: LAMA2; (-) strand; PAM type: NRG; PAM sequence: AAG
cttcttttccccaaatccca

SEQ ID NO: 116343 - DNA, 20 bp, Artificial Sequence
  Description of Artificial Sequence: Synthetic oligonucleotide
  Target: LAMA2; (-) strand; PAM type: NRG; PAM sequence: GGG
gtgtagcactaaagctgcta

SEQ ID NO: 116344 - DNA, 20 bp, Artificial Sequence
  Description of Artificial Sequence: Synthetic oligonucleotide
  Target: LAMA2; (-) strand; PAM type: NRG; PAM sequence: AGG
ggtgtagcactaaagctgct

SEQ ID NO: 116345 - DNA, 20 bp, Artificial Sequence
  Description of Artificial Sequence: Synthetic oligonucleotide
  Target: LAMA2; (-) strand; PAM type: NRG; PAM sequence: TAG
aggtgtagcactaaagctgc

SEQ ID NO: 116346 - DNA, 20 bp, Artificial Sequence
  Description of Artificial Sequence: Synthetic oligonucleotide
  Target: LAMA2; (-) strand; PAM type: NRG; PAM sequence: AAG
gtcttaaaggtgtagcacta

SEQ ID NO: 116347 - DNA, 20 bp, Artificial Sequence
  Description of Artificial Sequence: Synthetic oligonucleotide
  Target: LAMA2; (-) strand; PAM type: NRG; PAM sequence: TAG
gtacttaggtcttaaaggtg

SEQ ID NO: 116348 - DNA, 20 bp, Artificial Sequence
  Description of Artificial Sequence: Synthetic oligonucleotide
  Target: LAMA2; (-) strand; PAM type: NRG; PAM sequence: AGG
tgactgtacttaggtcttaa

SEQ ID NO: 116349 - DNA, 20 bp, Artificial Sequence
  Description of Artificial Sequence: Synthetic oligonucleotide
  Target: LAMA2; (-) strand; PAM type: NRG; PAM sequence: AAG
ttgactgtacttaggtctta

SEQ ID NO: 116350 - DNA, 20 bp, Artificial Sequence
  Description of Artificial Sequence: Synthetic oligonucleotide
  Target: LAMA2; (-) strand; PAM type: NRG; PAM sequence: AGG
ctttggccttgactgtactt

SEQ ID NO: 116351 - DNA, 20 bp, Artificial Sequence
  Description of Artificial Sequence: Synthetic oligonucleotide
  Target: LAMA2; (-) strand; PAM type: NRG; PAM sequence: TAG
cctttggccttgactgtact

SEQ ID NO: 116352 - DNA, 20 bp, Artificial Sequence
  Description of Artificial Sequence: Synthetic oligonucleotide
  Target: LAMA2; (-) strand; PAM type: NRG; PAM sequence: TGG
tatccaatcagtttatcctt

SEQ ID NO: 116353 - DNA, 20 bp, Artificial Sequence
  Description of Artificial Sequence: Synthetic oligonucleotide
  Target: LAMA2; (-) strand; PAM type: NRG; PAM sequence: CAG
aatacatatcagtatccaat

SEQ ID NO: 116354 - DNA, 20 bp, Artificial Sequence
  Description of Artificial Sequence: Synthetic oligonucleotide
  Target: LAMA2; (-) strand; PAM type: NRG; PAM sequence: CAG
ttttctctttaaatacatat

SEQ ID NO: 116355 - DNA, 20 bp, Artificial Sequence
  Description of Artificial Sequence: Synthetic oligonucleotide
  Target: LAMA2; (-) strand; PAM type: NRG; PAM sequence: TGG
aacaaggattccttgataag

SEQ ID NO: 116356 - DNA, 20 bp, Artificial Sequence
  Description of Artificial Sequence: Synthetic oligonucleotide
  Target: LAMA2; (-) strand; PAM type: NRG; PAM sequence: AAG
ctaaacaaggattccttgat

SEQ ID NO: 116357 - DNA, 20 bp, Artificial Sequence
  Description of Artificial Sequence: Synthetic oligonucleotide
  Target: LAMA2; (-) strand; PAM type: NRG; PAM sequence: AGG
tatacattaatgtctaaaca

SEQ ID NO: 116358 - DNA, 20 bp, Artificial Sequence
  Description of Artificial Sequence: Synthetic oligonucleotide
  Target: LAMA2; (-) strand; PAM type: NRG; PAM sequence: AAG
ttatacattaatgtctaaac

SEQ ID NO: 116359 - DNA, 20 bp, Artificial Sequence
  Description of Artificial Sequence: Synthetic oligonucleotide
  Target: LAMA2; (-) strand; PAM type: NRG; PAM sequence: CAG
tggtgggtcttgggcattta

SEQ ID NO: 116360 - DNA, 20 bp, Artificial Sequence
  Description of Artificial Sequence: Synthetic oligonucleotide
  Target: LAMA2; (-) strand; PAM type: NRG; PAM sequence: GGG
aagctcttttggtgggtctt

SEQ ID NO: 116361 - DNA, 20 bp, Artificial Sequence
  Description of Artificial Sequence: Synthetic oligonucleotide
  Target: LAMA2; (-) strand; PAM type: NRG; PAM sequence: TGG
taagctcttttggtgggtct

SEQ ID NO: 116362 - DNA, 20 bp, Artificial Sequence
  Description of Artificial Sequence: Synthetic oligonucleotide
  Target: LAMA2; (-) strand; PAM type: NRG; PAM sequence: GGG
tgcacttaagctcttttggt

SEQ ID NO: 116363 - DNA, 20 bp, Artificial Sequence
  Description of Artificial Sequence: Synthetic oligonucleotide
  Target: LAMA2; (-) strand; PAM type: NRG; PAM sequence: TGG
ctgcacttaagctcttttgg

SEQ ID NO: 116364 - DNA, 20 bp, Artificial Sequence
  Description of Artificial Sequence: Synthetic oligonucleotide
  Target: LAMA2; (-) strand; PAM type: NRG; PAM sequence: TGG
acactgcacttaagctcttt

SEQ ID NO: 116365 - DNA, 20 bp, Artificial Sequence
  Description of Artificial Sequence: Synthetic oligonucleotide
  Target: LAMA2; (-) strand; PAM type: NRG; PAM sequence: AAG
ttattgttaacactgcactt

SEQ ID NO: 116366 - DNA, 20 bp, Artificial Sequence
  Description of Artificial Sequence: Synthetic oligonucleotide
  Target: LAMA2; (-) strand; PAM type: NRG; PAM sequence: GAG
ccctactcaagatgtttatt

SEQ ID NO: 116367 - DNA, 20 bp, Artificial Sequence
  Description of Artificial Sequence: Synthetic oligonucleotide
  Target: LAMA2; (-) strand; PAM type: NRG; PAM sequence: AAG
aaaatataaaagccctactc

SEQ ID NO: 116368 - DNA, 20 bp, Artificial Sequence
  Description of Artificial Sequence: Synthetic oligonucleotide
  Target: LAMA2; (-) strand; PAM type: NRG; PAM sequence: AAG
aatcttcttctaaaatataa

SEQ ID NO: 116369 - DNA, 20 bp, Artificial Sequence
  Description of Artificial Sequence: Synthetic oligonucleotide
  Target: LAMA2; (-) strand; PAM type: NRG; PAM sequence: TAG
taagtggaagatacttttta

SEQ ID NO: 116370 - DNA, 20 bp, Artificial Sequence
  Description of Artificial Sequence: Synthetic oligonucleotide
  Target: LAMA2; (-) strand; PAM type: NRG; PAM sequence: AAG
ctttatggatgaataagtgg

SEQ ID NO: 116371 - DNA, 20 bp, Artificial Sequence
  Description of Artificial Sequence: Synthetic oligonucleotide
  Target: LAMA2; (-) strand; PAM type: NRG; PAM sequence: TGG
tttctttatggatgaataag

SEQ ID NO: 116372 - DNA, 20 bp, Artificial Sequence
  Description of Artificial Sequence: Synthetic oligonucleotide
  Target: LAMA2; (-) strand; PAM type: NRG; PAM sequence: AAG
gattttctttatggatgaat

SEQ ID NO: 116373 - DNA, 20 bp, Artificial Sequence
  Description of Artificial Sequence: Synthetic oligonucleotide
  Target: LAMA2; (-) strand; PAM type: NRG; PAM sequence: TGG
atttgtcatgattttcttta

SEQ ID NO: 116374 - DNA, 20 bp, Artificial Sequence
  Description of Artificial Sequence: Synthetic oligonucleotide
  Target: LAMA2; (-) strand; PAM type: NRG; PAM sequence: TGG
atgtgggctaaaatcacatc

SEQ ID NO: 116375 - DNA, 20 bp, Artificial Sequence
  Description of Artificial Sequence: Synthetic oligonucleotide
  Target: LAMA2; (-) strand; PAM type: NRG; PAM sequence: GGG
ttaatttctctaataaatgt

SEQ ID NO: 116376 - DNA, 20 bp, Artificial Sequence
  Description of Artificial Sequence: Synthetic oligonucleotide
  Target: LAMA2; (-) strand; PAM type: NRG; PAM sequence: TGG
attaatttctctaataaatg

SEQ ID NO: 116377 - DNA, 20 bp, Artificial Sequence
  Description of Artificial Sequence: Synthetic oligonucleotide
  Target: LAMA2; (-) strand; PAM type: NRG; PAM sequence: GAG
gcataattttcttctttcat

SEQ ID NO: 116378 - DNA, 20 bp, Artificial Sequence
  Description of Artificial Sequence: Synthetic oligonucleotide
  Target: LAMA2; (-) strand; PAM type: NRG; PAM sequence: TAG
caccaaacaatgaatcatca

SEQ ID NO: 116379 - DNA, 20 bp, Artificial Sequence
  Description of Artificial Sequence: Synthetic oligonucleotide
  Target: LAMA2; (-) strand; PAM type: NRG; PAM sequence: AAG
actggcatctttgttcttga

SEQ ID NO: 116380 - DNA, 20 bp, Artificial Sequence
  Description of Artificial Sequence: Synthetic oligonucleotide
  Target: LAMA2; (-) strand; PAM type: NRG; PAM sequence: TGG
tatattacatttatcaaaac

SEQ ID NO: 116381 - DNA, 20 bp, Artificial Sequence
  Description of Artificial Sequence: Synthetic oligonucleotide
  Target: LAMA2; (-) strand; PAM type: NRG; PAM sequence: GAG
aatttcctgggtcctgagca

SEQ ID NO: 116382 - DNA, 20 bp, Artificial Sequence
  Description of Artificial Sequence: Synthetic oligonucleotide
  Target: LAMA2; (-) strand; PAM type: NRG; PAM sequence: CAG
tgaatttcctgggtcctgag

SEQ ID NO: 116383 - DNA, 20 bp, Artificial Sequence
  Description of Artificial Sequence: Synthetic oligonucleotide
  Target: LAMA2; (-) strand; PAM type: NRG; PAM sequence: GAG
tcttgaatttcctgggtcct

SEQ ID NO: 116384 - DNA, 20 bp, Artificial Sequence
  Description of Artificial Sequence: Synthetic oligonucleotide
  Target: LAMA2; (-) strand; PAM type: NRG; PAM sequence: GGG
aagcatctcttgaatttcct

SEQ ID NO: 116385 - DNA, 20 bp, Artificial Sequence
  Description of Artificial Sequence: Synthetic oligonucleotide
  Target: LAMA2; (-) strand; PAM type: NRG; PAM sequence: TGG
taagcatctcttgaatttcc

SEQ ID NO: 116386 - DNA, 20 bp, Artificial Sequence
  Description of Artificial Sequence: Synthetic oligonucleotide
  Target: LAMA2; (-) strand; PAM type: NRG; PAM sequence: AAG
agtgcgtatgattcgttgat

SEQ ID NO: 116387 - DNA, 20 bp, Artificial Sequence
  Description of Artificial Sequence: Synthetic oligonucleotide
  Target: LAMA2; (-) strand; PAM type: NRG; PAM sequence: GAG
aaatgagttcttagattcag

SEQ ID NO: 116388 - DNA, 20 bp, Artificial Sequence
  Description of Artificial Sequence: Synthetic oligonucleotide
  Target: LAMA2; (-) strand; PAM type: NRG; PAM sequence: AGG
ggaaatgagttcttagattc

SEQ ID NO: 116389 - DNA, 20 bp, Artificial Sequence
  Description of Artificial Sequence: Synthetic oligonucleotide
  Target: LAMA2; (-) strand; PAM type: NRG; PAM sequence: CAG
tggaaatgagttcttagatt

SEQ ID NO: 116390 - DNA, 20 bp, Artificial Sequence
  Description of Artificial Sequence: Synthetic oligonucleotide
  Target: LAMA2; (-) strand; PAM type: NRG; PAM sequence: TAG
gacatttggaaatgagttct

SEQ ID NO: 116391 - DNA, 20 bp, Artificial Sequence
  Description of Artificial Sequence: Synthetic oligonucleotide
  Target: LAMA2; (-) strand; PAM type: NRG; PAM sequence: GAG
ggtggctgacatttggaaat

SEQ ID NO: 116392 - DNA, 20 bp, Artificial Sequence
  Description of Artificial Sequence: Synthetic oligonucleotide
  Target: LAMA2; (-) strand; PAM type: NRG; PAM sequence: TGG
gcagattggtggctgacatt

SEQ ID NO: 116393 - DNA, 20 bp, Artificial Sequence
  Description of Artificial Sequence: Synthetic oligonucleotide
  Target: LAMA2; (-) strand; PAM type: NRG; PAM sequence: TGG
tctaactaactgcagattgg

SEQ ID NO: 116394 - DNA, 20 bp, Artificial Sequence
  Description of Artificial Sequence: Synthetic oligonucleotide
  Target: LAMA2; (-) strand; PAM type: NRG; PAM sequence: TGG
ttttctaactaactgcagat

SEQ ID NO: 116395 - DNA, 20 bp, Artificial Sequence
  Description of Artificial Sequence: Synthetic oligonucleotide
  Target: LAMA2; (-) strand; PAM type: NRG; PAM sequence: CAG
tggtcttttctaactaactg

SEQ ID NO: 116396 - DNA, 20 bp, Artificial Sequence
  Description of Artificial Sequence: Synthetic oligonucleotide
  Target: LAMA2; (-) strand; PAM type: NRG; PAM sequence: TGG
ttcaggtcagaataaagcaa

SEQ ID NO: 116397 - DNA, 20 bp, Artificial Sequence
  Description of Artificial Sequence: Synthetic oligonucleotide
  Target: LAMA2; (-) strand; PAM type: NRG; PAM sequence: AAG
tttaacttcaggtcagaata

SEQ ID NO: 116398 - DNA, 20 bp, Artificial Sequence
  Description of Artificial Sequence: Synthetic oligonucleotide
  Target: LAMA2; (-) strand; PAM type: NRG; PAM sequence: CAG
tcactcatttaacttcaggt

SEQ ID NO: 116399 - DNA, 20 bp, Artificial Sequence
  Description of Artificial Sequence: Synthetic oligonucleotide
  Target: LAMA2; (-) strand; PAM type: NRG; PAM sequence: AGG
actgtcactcatttaacttc

SEQ ID NO: 116400 - DNA, 20 bp, Artificial Sequence
  Description of Artificial Sequence: Synthetic oligonucleotide
  Target: LAMA2; (-) strand; PAM type: NRG; PAM sequence: CAG
cactgtcactcatttaactt

SEQ ID NO: 116401 - DNA, 20 bp, Artificial Sequence
  Description of Artificial Sequence: Synthetic oligonucleotide
  Target: LAMA2; (-) strand; PAM type: NRG; PAM sequence: GGG
agtgcaccaaattggtaacg

SEQ ID NO: 116402 - DNA, 20 bp, Artificial Sequence
  Description of Artificial Sequence: Synthetic oligonucleotide
  Target: LAMA2; (-) strand; PAM type: NRG; PAM sequence: GGG
tagtgcaccaaattggtaac

SEQ ID NO: 116403 - DNA, 20 bp, Artificial Sequence
  Description of Artificial Sequence: Synthetic oligonucleotide
  Target: LAMA2; (-) strand; PAM type: NRG; PAM sequence: CGG
atagtgcaccaaattggtaa

SEQ ID NO: 116404 - DNA, 20 bp, Artificial Sequence
  Description of Artificial Sequence: Synthetic oligonucleotide
  Target: LAMA2; (-) strand; PAM type: NRG; PAM sequence: TGG
aagtagatagtgcaccaaat

SEQ ID NO: 116405 - DNA, 20 bp, Artificial Sequence
  Description of Artificial Sequence: Synthetic oligonucleotide
  Target: LAMA2; (-) strand; PAM type: NRG; PAM sequence: TAG
gccttgtttagggaagtaga

SEQ ID NO: 116406 - DNA, 20 bp, Artificial Sequence
  Description of Artificial Sequence: Synthetic oligonucleotide
  Target: LAMA2; (-) strand; PAM type: NRG; PAM sequence: TAG
caaagccttgtttagggaag

SEQ ID NO: 116407 - DNA, 20 bp, Artificial Sequence
  Description of Artificial Sequence: Synthetic oligonucleotide
  Target: LAMA2; (-) strand; PAM type: NRG; PAM sequence: AAG
tcccaaagccttgtttaggg

SEQ ID NO: 116408 - DNA, 20 bp, Artificial Sequence
  Description of Artificial Sequence: Synthetic oligonucleotide
  Target: LAMA2; (-) strand; PAM type: NRG; PAM sequence: GGG
tgctcccaaagccttgttta

SEQ ID NO: 116409 - DNA, 20 bp, Artificial Sequence
  Description of Artificial Sequence: Synthetic oligonucleotide
  Target: LAMA2; (-) strand; PAM type: NRG; PAM sequence: AGG
atgctcccaaagccttgttt

SEQ ID NO: 116410 - DNA, 20 bp, Artificial Sequence
  Description of Artificial Sequence: Synthetic oligonucleotide
  Target: LAMA2; (-) strand; PAM type: NRG; PAM sequence: TAG
catgctcccaaagccttgtt

SEQ ID NO: 116411 - DNA, 20 bp, Artificial Sequence
  Description of Artificial Sequence: Synthetic oligonucleotide
  Target: LAMA2; (-) strand; PAM type: NRG; PAM sequence: AAG
tggaggaagccatgctccca

SEQ ID NO: 116412 - DNA, 20 bp, Artificial Sequence
  Description of Artificial Sequence: Synthetic oligonucleotide
  Target: LAMA2; (-) strand; PAM type: NRG; PAM sequence: AAG
gttgggaataattatggagg

SEQ ID NO: 116413 - DNA, 20 bp, Artificial Sequence
  Description of Artificial Sequence: Synthetic oligonucleotide
  Target: LAMA2; (-) strand; PAM type: NRG; PAM sequence: AGG
gtggttgggaataattatgg

SEQ ID NO: 116414 - DNA, 20 bp, Artificial Sequence
  Description of Artificial Sequence: Synthetic oligonucleotide
  Target: LAMA2; (-) strand; PAM type: NRG; PAM sequence: GAG
tgtggttgggaataattatg

SEQ ID NO: 116415 - DNA, 20 bp, Artificial Sequence
  Description of Artificial Sequence: Synthetic oligonucleotide
  Target: LAMA2; (-) strand; PAM type: NRG; PAM sequence: TGG
gatgtggttgggaataatta

SEQ ID NO: 116416 - DNA, 20 bp, Artificial Sequence
  Description of Artificial Sequence: Synthetic oligonucleotide
  Target: LAMA2; (-) strand; PAM type: NRG; PAM sequence: GGG
attagagcagtgatgtggtt

SEQ ID NO: 116417 - DNA, 20 bp, Artificial Sequence
  Description of Artificial Sequence: Synthetic oligonucleotide
  Target: LAMA2; (-) strand; PAM type: NRG; PAM sequence: TGG
gattagagcagtgatgtggt

SEQ ID NO: 116418 - DNA, 20 bp, Artificial Sequence
  Description of Artificial Sequence: Synthetic oligonucleotide
  Target: LAMA2; (-) strand; PAM type: NRG; PAM sequence: TGG
tgttgattagagcagtgatg

SEQ ID NO: 116419 - DNA, 20 bp, Artificial Sequence
  Description of Artificial Sequence: Synthetic oligonucleotide
  Target: LAMA2; (-) strand; PAM type: NRG; PAM sequence: CAG
ggtgcacctgttgattagag

SEQ ID NO: 116420 - DNA, 20 bp, Artificial Sequence
  Description of Artificial Sequence: Synthetic oligonucleotide
  Target: LAMA2; (-) strand; PAM type: NRG; PAM sequence: GAG
ggtggtgcacctgttgatta

SEQ ID NO: 116421 - DNA, 20 bp, Artificial Sequence
  Description of Artificial Sequence: Synthetic oligonucleotide
  Target: LAMA2; (-) strand; PAM type: NRG; PAM sequence: TAG
gtggtggtgcacctgttgat

SEQ ID NO: 116422 - DNA, 20 bp, Artificial Sequence
  Description of Artificial Sequence: Synthetic oligonucleotide
  Target: LAMA2; (-) strand; PAM type: NRG; PAM sequence: TGG
gggtggggagtctcgcgtgg

SEQ ID NO: 116423 - DNA, 20 bp, Artificial Sequence
  Description of Artificial Sequence: Synthetic oligonucleotide
  Target: LAMA2; (-) strand; PAM type: NRG; PAM sequence: TGG
cttgggtggggagtctcgcg

SEQ ID NO: 116424 - DNA, 20 bp, Artificial Sequence
  Description of Artificial Sequence: Synthetic oligonucleotide
  Target: LAMA2; (-) strand; PAM type: NRG; PAM sequence: GAG
gcagacaggacttgggtggg

SEQ ID NO: 116425 - DNA, 20 bp, Artificial Sequence
  Description of Artificial Sequence: Synthetic oligonucleotide
  Target: LAMA2; (-) strand; PAM type: NRG; PAM sequence: GGG
aggcagacaggacttgggtg

SEQ ID NO: 116426 - DNA, 20 bp, Artificial Sequence
  Description of Artificial Sequence: Synthetic oligonucleotide
  Target: LAMA2; (-) strand; PAM type: NRG; PAM sequence: GGG
taggcagacaggacttgggt

SEQ ID NO: 116427 - DNA, 20 bp, Artificial Sequence
  Description of Artificial Sequence: Synthetic oligonucleotide
  Target: LAMA2; (-) strand; PAM type: NRG; PAM sequence: TGG
gtaggcagacaggacttggg

SEQ ID NO: 116428 - DNA, 20 bp, Artificial Sequence
  Description of Artificial Sequence: Synthetic oligonucleotide
  Target: LAMA2; (-) strand; PAM type: NRG; PAM sequence: GGG
gttgtaggcagacaggactt

SEQ ID NO: 116429 - DNA, 20 bp, Artificial Sequence
  Description of Artificial Sequence: Synthetic oligonucleotide
  Target: LAMA2; (-) strand; PAM type: NRG; PAM sequence: TGG
agttgtaggcagacaggact

SEQ ID NO: 116430 - DNA, 20 bp, Artificial Sequence
  Description of Artificial Sequence: Synthetic oligonucleotide
  Target: LAMA2; (-) strand; PAM type: NRG; PAM sequence: AGG
gttacaagttgtaggcagac

SEQ ID NO: 116431 - DNA, 20 bp, Artificial Sequence
  Description of Artificial Sequence: Synthetic oligonucleotide
  Target: LAMA2; (-) strand; PAM type: NRG; PAM sequence: CAG
ggttacaagttgtaggcaga

SEQ ID NO: 116432 - DNA, 20 bp, Artificial Sequence
  Description of Artificial Sequence: Synthetic oligonucleotide
  Target: LAMA2; (-) strand; PAM type: NRG; PAM sequence: CAG
ggcaggttacaagttgtagg

SEQ ID NO: 116433 - DNA, 20 bp, Artificial Sequence
  Description of Artificial Sequence: Synthetic oligonucleotide
  Target: LAMA2; (-) strand; PAM type: NRG; PAM sequence: AGG
cttggcaggttacaagttgt

SEQ ID NO: 116434 - DNA, 20 bp, Artificial Sequence
  Description of Artificial Sequence: Synthetic oligonucleotide
  Target: LAMA2; (-) strand; PAM type: NRG; PAM sequence: TAG
gcttggcaggttacaagttg

SEQ ID NO: 116435 - DNA, 20 bp, Artificial Sequence
  Description of Artificial Sequence: Synthetic oligonucleotide
  Target: LAMA2; (-) strand; PAM type: NRG; PAM sequence: AAG
gcctttgcttggcaggttac

SEQ ID NO: 116436 - DNA, 20 bp, Artificial Sequence
  Description of Artificial Sequence: Synthetic oligonucleotide
  Target: LAMA2; (-) strand; PAM type: NRG; PAM sequence: AGG
ttcatttgcctttgcttggc

SEQ ID NO: 116437 - DNA, 20 bp, Artificial Sequence
  Description of Artificial Sequence: Synthetic oligonucleotide
  Target: LAMA2; (-) strand; PAM type: NRG; PAM sequence: CAG
tttcatttgcctttgcttgg

SEQ ID NO: 116438 - DNA, 20 bp, Artificial Sequence
  Description of Artificial Sequence: Synthetic oligonucleotide
  Target: LAMA2; (-) strand; PAM type: NRG; PAM sequence: TGG
gtttttcatttgcctttgct

SEQ ID NO: 116439 - DNA, 20 bp, Artificial Sequence
  Description of Artificial Sequence: Synthetic oligonucleotide
  Target: LAMA2; (-) strand; PAM type: NRG; PAM sequence: CAG
aatgggatatgaaaggagga

SEQ ID NO: 116440 - DNA, 20 bp, Artificial Sequence
  Description of Artificial Sequence: Synthetic oligonucleotide
  Target: LAMA2; (-) strand; PAM type: NRG; PAM sequence: AGG
ggaaaatgggatatgaaagg

SEQ ID NO: 116441 - DNA, 20 bp, Artificial Sequence
  Description of Artificial Sequence: Synthetic oligonucleotide
  Target: LAMA2; (-) strand; PAM type: NRG; PAM sequence: GAG
gggaaaatgggatatgaaag

SEQ ID NO: 116442 - DNA, 20 bp, Artificial Sequence
  Description of Artificial Sequence: Synthetic oligonucleotide
  Target: LAMA2; (-) strand; PAM type: NRG; PAM sequence: AGG
tggggaaaatgggatatgaa

SEQ ID NO: 116443 - DNA, 20 bp, Artificial Sequence
  Description of Artificial Sequence: Synthetic oligonucleotide
  Target: LAMA2; (-) strand; PAM type: NRG; PAM sequence: AAG
atggggaaaatgggatatga

SEQ ID NO: 116444 - DNA, 20 bp, Artificial Sequence
  Description of Artificial Sequence: Synthetic oligonucleotide
  Target: LAMA2; (-) strand; PAM type: NRG; PAM sequence: GGG
aaatagataatggggaaaat

SEQ ID NO: 116445 - DNA, 20 bp, Artificial Sequence
  Description of Artificial Sequence: Synthetic oligonucleotide
  Target: LAMA2; (-) strand; PAM type: NRG; PAM sequence: TGG
gaaatagataatggggaaaa

SEQ ID NO: 116446 - DNA, 20 bp, Artificial Sequence
  Description of Artificial Sequence: Synthetic oligonucleotide
  Target: LAMA2; (-) strand; PAM type: NRG; PAM sequence: GGG
agtactagaaatagataatg

SEQ ID NO: 116447 - DNA, 20 bp, Artificial Sequence
  Description of Artificial Sequence: Synthetic oligonucleotide
  Target: LAMA2; (-) strand; PAM type: NRG; PAM sequence: GGG
aagtactagaaatagataat

SEQ ID NO: 116448 - DNA, 20 bp, Artificial Sequence
  Description of Artificial Sequence: Synthetic oligonucleotide
  Target: LAMA2; (-) strand; PAM type: NRG; PAM sequence: TGG
aaagtactagaaatagataa

SEQ ID NO: 116449 - DNA, 20 bp, Artificial Sequence
  Description of Artificial Sequence: Synthetic oligonucleotide
  Target: LAMA2; (-) strand; PAM type: NRG; PAM sequence: TAG
actttttaaagtactagaaa

SEQ ID NO: 116450 - DNA, 20 bp, Artificial Sequence
  Description of Artificial Sequence: Synthetic oligonucleotide
  Target: LAMA2; (-) strand; PAM type: NRG; PAM sequence: TAG
gtggggactttttaaagtac

SEQ ID NO: 116451 - DNA, 20 bp, Artificial Sequence
  Description of Artificial Sequence: Synthetic oligonucleotide
  Target: LAMA2; (-) strand; PAM type: NRG; PAM sequence: AAG
caccttgtggggacttttta

SEQ ID NO: 116452 - DNA, 20 bp, Artificial Sequence
  Description of Artificial Sequence: Synthetic oligonucleotide
  Target: LAMA2; (-) strand; PAM type: NRG; PAM sequence: GGG
tacaattctgccaccttgtg

SEQ ID NO: 116453 - DNA, 20 bp, Artificial Sequence
  Description of Artificial Sequence: Synthetic oligonucleotide
  Target: LAMA2; (-) strand; PAM type: NRG; PAM sequence: GGG
ttacaattctgccaccttgt

SEQ ID NO: 116454 - DNA, 20 bp, Artificial Sequence
  Description of Artificial Sequence: Synthetic oligonucleotide
  Target: LAMA2; (-) strand; PAM type: NRG; PAM sequence: TGG
gttacaattctgccaccttg

SEQ ID NO: 116455 - DNA, 20 bp, Artificial Sequence
  Description of Artificial Sequence: Synthetic oligonucleotide
  Target: LAMA2; (-) strand; PAM type: NRG; PAM sequence: AGG
aaaattcacagtctcagtag

SEQ ID NO: 116456 - DNA, 20 bp, Artificial Sequence
  Description of Artificial Sequence: Synthetic oligonucleotide
  Target: LAMA2; (-) strand; PAM type: NRG; PAM sequence: GAG
aaaaattcacagtctcagta

SEQ ID NO: 116457 - DNA, 20 bp, Artificial Sequence
  Description of Artificial Sequence: Synthetic oligonucleotide
  Target: LAMA2; (-) strand; PAM type: NRG; PAM sequence: TAG
aaaaaaattcacagtctcag

SEQ ID NO: 116458 - DNA, 20 bp, Artificial Sequence
  Description of Artificial Sequence: Synthetic oligonucleotide
  Target: LAMA2; (-) strand; PAM type: NRG; PAM sequence: CAG
aaaaaaaaaattcacagtct

SEQ ID NO: 116459 - DNA, 20 bp, Artificial Sequence
  Description of Artificial Sequence: Synthetic oligonucleotide
  Target: LAMA2; (-) strand; PAM type: NRG; PAM sequence: CAG
ataataaaaaaaaaaattca

SEQ ID NO: 116460 - DNA, 20 bp, Artificial Sequence
  Description of Artificial Sequence: Synthetic oligonucleotide
  Target: LAMA2; (-) strand; PAM type: NRG; PAM sequence: TGG
atgctttacctgtgttgttt

SEQ ID NO: 116461 - DNA, 20 bp, Artificial Sequence
  Description of Artificial Sequence: Synthetic oligonucleotide
  Target: LAMA2; (-) strand; PAM type: NRG; PAM sequence: TGG
tgaaggcgtcctcatctcta

SEQ ID NO: 116462 - DNA, 20 bp, Artificial Sequence
  Description of Artificial Sequence: Synthetic oligonucleotide
  Target: LAMA2; (-) strand; PAM type: NRG; PAM sequence: AGG
ctaagctagtgtatacttga

SEQ ID NO: 116463 - DNA, 20 bp, Artificial Sequence
  Description of Artificial Sequence: Synthetic oligonucleotide
  Target: LAMA2; (-) strand; PAM type: NRG; PAM sequence: AAG
tctaagctagtgtatacttg

SEQ ID NO: 116464 - DNA, 20 bp, Artificial Sequence
  Description of Artificial Sequence: Synthetic oligonucleotide
  Target: LAMA2; (-) strand; PAM type: NRG; PAM sequence: TAG
tgaatcatccttttctaagc

SEQ ID NO: 116465 - DNA, 20 bp, Artificial Sequence
  Description of Artificial Sequence: Synthetic oligonucleotide
  Target: LAMA2; (-) strand; PAM type: NRG; PAM sequence: AAG
aagatgaatcatccttttct

SEQ ID NO: 116466 - DNA, 20 bp, Artificial Sequence
  Description of Artificial Sequence: Synthetic oligonucleotide
  Target: LAMA2; (-) strand; PAM type: NRG; PAM sequence: AAG
ttttaaagaatggtcattgc

SEQ ID NO: 116467 - DNA, 20 bp, Artificial Sequence
  Description of Artificial Sequence: Synthetic oligonucleotide
  Target: LAMA2; (-) strand; PAM type: NRG; PAM sequence: TGG
tttaaggaacttttaaagaa

SEQ ID NO: 116468 - DNA, 20 bp, Artificial Sequence
  Description of Artificial Sequence: Synthetic oligonucleotide
  Target: LAMA2; (-) strand; PAM type: NRG; PAM sequence: AAG
gtaattttaaggaactttta

SEQ ID NO: 116469 - DNA, 20 bp, Artificial Sequence
  Description of Artificial Sequence: Synthetic oligonucleotide
  Target: LAMA2; (-) strand; PAM type: NRG; PAM sequence: AGG
gatctaatgaggtaatttta

SEQ ID NO: 116470 - DNA, 20 bp, Artificial Sequence
  Description of Artificial Sequence: Synthetic oligonucleotide
  Target: LAMA2; (-) strand; PAM type: NRG; PAM sequence: AAG
agatctaatgaggtaatttt

SEQ ID NO: 116471 - DNA, 20 bp, Artificial Sequence
  Description of Artificial Sequence: Synthetic oligonucleotide
  Target: LAMA2; (-) strand; PAM type: NRG; PAM sequence: AGG
gtaagagaaaagatctaatg

SEQ ID NO: 116472 - DNA, 20 bp, Artificial Sequence
  Description of Artificial Sequence: Synthetic oligonucleotide
  Target: LAMA2; (-) strand; PAM type: NRG; PAM sequence: GAG
ggtaagagaaaagatctaat

SEQ ID NO: 116473 - DNA, 20 bp, Artificial Sequence
  Description of Artificial Sequence: Synthetic oligonucleotide
  Target: LAMA2; (-) strand; PAM type: NRG; PAM sequence: AAG
aagaaaaaagggtaagagaa

SEQ ID NO: 116474 - DNA, 20 bp, Artificial Sequence
  Description of Artificial Sequence: Synthetic oligonucleotide
  Target: LAMA2; (-) strand; PAM type: NRG; PAM sequence: GAG
aagctaagaaaaaagggtaa

SEQ ID NO: 116475 - DNA, 20 bp, Artificial Sequence
  Description of Artificial Sequence: Synthetic oligonucleotide
  Target: LAMA2; (-) strand; PAM type: NRG; PAM sequence: AAG
ctaagctaagaaaaaagggt

SEQ ID NO: 116476 - DNA, 20 bp, Artificial Sequence
  Description of Artificial Sequence: Synthetic oligonucleotide
  Target: LAMA2; (-) strand; PAM type: NRG; PAM sequence: GGG
aaatctaagctaagaaaaaa

SEQ ID NO: 116477 - DNA, 20 bp, Artificial Sequence
  Description of Artificial Sequence: Synthetic oligonucleotide
  Target: LAMA2; (-) strand; PAM type: NRG; PAM sequence: AGG
gaaatctaagctaagaaaaa

SEQ ID NO: 116478 - DNA, 20 bp, Artificial Sequence
  Description of Artificial Sequence: Synthetic oligonucleotide
  Target: LAMA2; (-) strand; PAM type: NRG; PAM sequence: AAG
tgaaatctaagctaagaaaa

SEQ ID NO: 116479 - DNA, 20 bp, Artificial Sequence
  Description of Artificial Sequence: Synthetic oligonucleotide
  Target: LAMA2; (-) strand; PAM type: NRG; PAM sequence: AAG
ttgccactgaaatctaagct

SEQ ID NO: 116480 - DNA, 20 bp, Artificial Sequence
  Description of Artificial Sequence: Synthetic oligonucleotide
  Target: LAMA2; (-) strand; PAM type: NRG; PAM sequence: AAG
tctgcttgccactgaaatct

SEQ ID NO: 116481 - DNA, 20 bp, Artificial Sequence
  Description of Artificial Sequence: Synthetic oligonucleotide
  Target: LAMA2; (-) strand; PAM type: NRG; PAM sequence: AGG
ataaaatgatcttgtcacta

SEQ ID NO: 116482 - DNA, 20 bp, Artificial Sequence
  Description of Artificial Sequence: Synthetic oligonucleotide
  Target: LAMA2; (-) strand; PAM type: NRG; PAM sequence: AAG
aataaaatgatcttgtcact

SEQ ID NO: 116483 - DNA, 20 bp, Artificial Sequence
  Description of Artificial Sequence: Synthetic oligonucleotide
  Target: LAMA2; (-) strand; PAM type: NRG; PAM sequence: CAG
aaactgccctgtgctttgct

SEQ ID NO: 116484 - DNA, 20 bp, Artificial Sequence
  Description of Artificial Sequence: Synthetic oligonucleotide
  Target: LAMA2; (-) strand; PAM type: NRG; PAM sequence: TAG
ggggaacaagtgagatggaa

SEQ ID NO: 116485 - DNA, 20 bp, Artificial Sequence
  Description of Artificial Sequence: Synthetic oligonucleotide
  Target: LAMA2; (-) strand; PAM type: NRG; PAM sequence: TGG
taaagggggaacaagtgaga

SEQ ID NO: 116486 - DNA, 20 bp, Artificial Sequence
  Description of Artificial Sequence: Synthetic oligonucleotide
  Target: LAMA2; (-) strand; PAM type: NRG; PAM sequence: GAG
attttaaagggggaacaagt

SEQ ID NO: 116487 - DNA, 20 bp, Artificial Sequence
  Description of Artificial Sequence: Synthetic oligonucleotide
  Target: LAMA2; (-) strand; PAM type: NRG; PAM sequence: AAG
tagcattttaaagggggaac

SEQ ID NO: 116488 - DNA, 20 bp, Artificial Sequence
  Description of Artificial Sequence: Synthetic oligonucleotide
  Target: LAMA2; (-) strand; PAM type: NRG; PAM sequence: GGG
tccttctagcattttaaagg

SEQ ID NO: 116489 - DNA, 20 bp, Artificial Sequence
  Description of Artificial Sequence: Synthetic oligonucleotide
  Target: LAMA2; (-) strand; PAM type: NRG; PAM sequence: GGG
ttccttctagcattttaaag

SEQ ID NO: 116490 - DNA, 20 bp, Artificial Sequence
  Description of Artificial Sequence: Synthetic oligonucleotide
  Target: LAMA2; (-) strand; PAM type: NRG; PAM sequence: GGG
tttccttctagcattttaaa

SEQ ID NO: 116491 - DNA, 20 bp, Artificial Sequence
  Description of Artificial Sequence: Synthetic oligonucleotide
  Target: LAMA2; (-) strand; PAM type: NRG; PAM sequence: AGG
ttttccttctagcattttaa

SEQ ID NO: 116492 - DNA, 20 bp, Artificial Sequence
  Description of Artificial Sequence: Synthetic oligonucleotide
  Target: LAMA2; (-) strand; PAM type: NRG; PAM sequence: AAG
tttttccttctagcatttta

SEQ ID NO: 116493 - DNA, 20 bp, Artificial Sequence
  Description of Artificial Sequence: Synthetic oligonucleotide
  Target: LAMA2; (-) strand; PAM type: NRG; PAM sequence: TAG
tcaagcttcttttttccttc

SEQ ID NO: 116494 - DNA, 20 bp, Artificial Sequence
  Description of Artificial Sequence: Synthetic oligonucleotide
  Target: LAMA2; (-) strand; PAM type: NRG; PAM sequence: AAG
agctgctcatccagctgctc

SEQ ID NO: 116495 - DNA, 20 bp, Artificial Sequence
  Description of Artificial Sequence: Synthetic oligonucleotide
  Target: LAMA2; (-) strand; PAM type: NRG; PAM sequence: CAG
agtgggtggagctgctcatc

SEQ ID NO: 116496 - DNA, 20 bp, Artificial Sequence
  Description of Artificial Sequence: Synthetic oligonucleotide
  Target: LAMA2; (-) strand; PAM type: NRG; PAM sequence: GAG
ctcatgtcccacagtgggtg

SEQ ID NO: 116497 - DNA, 20 bp, Artificial Sequence
  Description of Artificial Sequence: Synthetic oligonucleotide
  Target: LAMA2; (-) strand; PAM type: NRG; PAM sequence: TGG
gcctcatgtcccacagtggg

SEQ ID NO: 116498 - DNA, 20 bp, Artificial Sequence
  Description of Artificial Sequence: Synthetic oligonucleotide
  Target: LAMA2; (-) strand; PAM type: NRG; PAM sequence: GGG
tctgcctcatgtcccacagt

SEQ ID NO: 116499 - DNA, 20 bp, Artificial Sequence
  Description of Artificial Sequence: Synthetic oligonucleotide
  Target: LAMA2; (-) strand; PAM type: NRG; PAM sequence: TGG
ttctgcctcatgtcccacag

SEQ ID NO: 116500 - DNA, 20 bp, Artificial Sequence
  Description of Artificial Sequence: Synthetic oligonucleotide
  Target: LAMA2; (-) strand; PAM type: NRG; PAM sequence: CAG
tccttctgcctcatgtccca

SEQ ID NO: 116501 - DNA, 20 bp, Artificial Sequence
  Description of Artificial Sequence: Synthetic oligonucleotide
  Target: LAMA2; (-) strand; PAM type: NRG; PAM sequence: CGG
caccagtttattgctttgcc

SEQ ID NO: 116502 - DNA, 20 bp, Artificial Sequence
  Description of Artificial Sequence: Synthetic oligonucleotide
  Target: LAMA2; (-) strand; PAM type: NRG; PAM sequence: CAG
tgatgtgttcagggcagcac

SEQ ID NO: 116503 - DNA, 20 bp, Artificial Sequence
  Description of Artificial Sequence: Synthetic oligonucleotide
  Target: LAMA2; (-) strand; PAM type: NRG; PAM sequence: CAG
aaaacatgatgtgttcaggg

SEQ ID NO: 116504 - DNA, 20 bp, Artificial Sequence
  Description of Artificial Sequence: Synthetic oligonucleotide
  Target: LAMA2; (-) strand; PAM type: NRG; PAM sequence: GGG
aaaaaaacatgatgtgttca

SEQ ID NO: 116505 - DNA, 20 bp, Artificial Sequence
  Description of Artificial Sequence: Synthetic oligonucleotide
  Target: LAMA2; (-) strand; PAM type: NRG; PAM sequence: AGG
aaaaaaaacatgatgtgttc

SEQ ID NO: 116506 - DNA, 20 bp, Artificial Sequence
  Description of Artificial Sequence: Synthetic oligonucleotide
  Target: LAMA2; (-) strand; PAM type: NRG; PAM sequence: CAG
gaaaaaaaacatgatgtgtt

SEQ ID NO: 116507 - DNA, 20 bp, Artificial Sequence
  Description of Artificial Sequence: Synthetic oligonucleotide
  Target: LAMA2; (-) strand; PAM type: NRG; PAM sequence: AAG
gagcaagaacctgtctcaaa

SEQ ID NO: 116508 - DNA, 20 bp, Artificial Sequence
  Description of Artificial Sequence: Synthetic oligonucleotide
  Target: LAMA2; (-) strand; PAM type: NRG; PAM sequence: AAG
tccaacctggacagtagagc

SEQ ID NO: 116509 - DNA, 20 bp, Artificial Sequence
  Description of Artificial Sequence: Synthetic oligonucleotide
  Target: LAMA2; (-) strand; PAM type: NRG; PAM sequence: GAG
gcactccaacctggacagta

SEQ ID NO: 116510 - DNA, 20 bp, Artificial Sequence
  Description of Artificial Sequence: Synthetic oligonucleotide
  Target: LAMA2; (-) strand; PAM type: NRG; PAM sequence: TAG
ctgcactccaacctggacag

SEQ ID NO: 116511 - DNA, 20 bp, Artificial Sequence
  Description of Artificial Sequence: Synthetic oligonucleotide
  Target: LAMA2; (-) strand; PAM type: NRG; PAM sequence: CAG
tcactgcactccaacctgga

SEQ ID NO: 116512 - DNA, 20 bp, Artificial Sequence
  Description of Artificial Sequence: Synthetic oligonucleotide
  Target: LAMA2; (-) strand; PAM type: NRG; PAM sequence: TGG
tgcatcactgcactccaacc

SEQ ID NO: 116513 - DNA, 20 bp, Artificial Sequence
  Description of Artificial Sequence: Synthetic oligonucleotide
  Target: LAMA2; (-) strand; PAM type: NRG; PAM sequence: GAG
taggagttcaaggttagagt

SEQ ID NO: 116514 - DNA, 20 bp, Artificial Sequence
  Description of Artificial Sequence: Synthetic oligonucleotide
  Target: LAMA2; (-) strand; PAM type: NRG; PAM sequence: GAG
agcctaggagttcaaggtta

SEQ ID NO: 116515 - DNA, 20 bp, Artificial Sequence
  Description of Artificial Sequence: Synthetic oligonucleotide
  Target: LAMA2; (-) strand; PAM type: NRG; PAM sequence: TAG
tgagcctaggagttcaaggt

SEQ ID NO: 116516 - DNA, 20 bp, Artificial Sequence
  Description of Artificial Sequence: Synthetic oligonucleotide
  Target: LAMA2; (-) strand; PAM type: NRG; PAM sequence: AGG
cacttgagcctaggagttca

SEQ ID NO: 116517 - DNA, 20 bp, Artificial Sequence
  Description of Artificial Sequence: Synthetic oligonucleotide
  Target: LAMA2; (-) strand; PAM type: NRG; PAM sequence: AAG
tcacttgagcctaggagttc

SEQ ID NO: 116518 - DNA, 20 bp, Artificial Sequence
  Description of Artificial Sequence: Synthetic oligonucleotide
  Target: LAMA2; (-) strand; PAM type: NRG; PAM sequence: GAG
ggagaatcacttgagcctag

SEQ ID NO: 116519 - DNA, 20 bp, Artificial Sequence
  Description of Artificial Sequence: Synthetic oligonucleotide
  Target: LAMA2; (-) strand; PAM type: NRG; PAM sequence: AGG
caggagaatcacttgagcct

SEQ ID NO: 116520 - DNA, 20 bp, Artificial Sequence
  Description of Artificial Sequence: Synthetic oligonucleotide
  Target: LAMA2; (-) strand; PAM type: NRG; PAM sequence: TAG
gcaggagaatcacttgagcc

SEQ ID NO: 116521 - DNA, 20 bp, Artificial Sequence
  Description of Artificial Sequence: Synthetic oligonucleotide
  Target: LAMA2; (-) strand; PAM type: NRG; PAM sequence: GAG
ccaaggcaggagaatcactt

SEQ ID NO: 116522 - DNA, 20 bp, Artificial Sequence
  Description of Artificial Sequence: Synthetic oligonucleotide
  Target: LAMA2; (-) strand; PAM type: NRG; PAM sequence: GAG
tactcgggaggccaaggcag

SEQ ID NO: 116523 - DNA, 20 bp, Artificial Sequence
  Description of Artificial Sequence: Synthetic oligonucleotide
  Target: LAMA2; (-) strand; PAM type: NRG; PAM sequence: AGG
gctactcgggaggccaaggc

SEQ ID NO: 116524 - DNA, 20 bp, Artificial Sequence
  Description of Artificial Sequence: Synthetic oligonucleotide
  Target: LAMA2; (-) strand; PAM type: NRG; PAM sequence: CAG
agctactcgggaggccaagg

SEQ ID NO: 116525 - DNA, 20 bp, Artificial Sequence
  Description of Artificial Sequence: Synthetic oligonucleotide
  Target: LAMA2; (-) strand; PAM type: NRG; PAM sequence: AGG
cccagctactcgggaggcca

SEQ ID NO: 116526 - DNA, 20 bp, Artificial Sequence
  Description of Artificial Sequence: Synthetic oligonucleotide
  Target: LAMA2; (-) strand; PAM type: NRG; PAM sequence: AAG
ccccagctactcgggaggcc

SEQ ID NO: 116527 - DNA, 20 bp, Artificial Sequence
  Description of Artificial Sequence: Synthetic oligonucleotide
  Target: LAMA2; (-) strand; PAM type: NRG; PAM sequence: AGG
gaaagccccagctactcggg

SEQ ID NO: 116528 - DNA, 20 bp, Artificial Sequence
  Description of Artificial Sequence: Synthetic oligonucleotide
  Target: LAMA2; (-) strand; PAM type: NRG; PAM sequence: GAG
tgaaagccccagctactcgg

SEQ ID NO: 116529 - DNA, 20 bp, Artificial Sequence
  Description of Artificial Sequence: Synthetic oligonucleotide
  Target: LAMA2; (-) strand; PAM type: NRG; PAM sequence: GGG
gctgaaagccccagctactc

SEQ ID NO: 116530 - DNA, 20 bp, Artificial Sequence
  Description of Artificial Sequence: Synthetic oligonucleotide
  Target: LAMA2; (-) strand; PAM type: NRG; PAM sequence: CGG
tgctgaaagccccagctact

SEQ ID NO: 116531 - DNA, 20 bp, Artificial Sequence
  Description of Artificial Sequence: Synthetic oligonucleotide
  Target: LAMA2; (-) strand; PAM type: NRG; PAM sequence: CAG
ttgttgcatgctgaaagccc

SEQ ID NO: 116532 - DNA, 20 bp, Artificial Sequence
  Description of Artificial Sequence: Synthetic oligonucleotide
  Target: LAMA2; (-) strand; PAM type: NRG; PAM sequence: AAG
ggcatgttgttgcatgctga

SEQ ID NO: 116533 - DNA, 20 bp, Artificial Sequence
  Description of Artificial Sequence: Synthetic oligonucleotide
  Target: LAMA2; (-) strand; PAM type: NRG; PAM sequence: GGG
aaaaaaataaaaaattagct

SEQ ID NO: 116534 - DNA, 20 bp, Artificial Sequence
  Description of Artificial Sequence: Synthetic oligonucleotide
  Target: LAMA2; (-) strand; PAM type: NRG; PAM sequence: TGG
taaaaaaataaaaaattagc

SEQ ID NO: 116535 - DNA, 20 bp, Artificial Sequence
  Description of Artificial Sequence: Synthetic oligonucleotide
  Target: LAMA2; (-) strand; PAM type: NRG; PAM sequence: TAG
aaattaaaaaaataaaaaat

SEQ ID NO: 116536 - DNA, 20 bp, Artificial Sequence
  Description of Artificial Sequence: Synthetic oligonucleotide
  Target: LAMA2; (-) strand; PAM type: NRG; PAM sequence: AAG
gcccccctctgtctctccaa

SEQ ID NO: 116537 - DNA, 20 bp, Artificial Sequence
  Description of Artificial Sequence: Synthetic oligonucleotide
  Target: LAMA2; (-) strand; PAM type: NRG; PAM sequence: AGG
ccagcctgggcaacaaagtg

SEQ ID NO: 116538 - DNA, 20 bp, Artificial Sequence
  Description of Artificial Sequence: Synthetic oligonucleotide
  Target: LAMA2; (-) strand; PAM type: NRG; PAM sequence: GAG
accagcctgggcaacaaagt

SEQ ID NO: 116539 - DNA, 20 bp, Artificial Sequence
  Description of Artificial Sequence: Synthetic oligonucleotide
  Target: LAMA2; (-) strand; PAM type: NRG; PAM sequence: AAG
tgagaccagcctgggcaaca

SEQ ID NO: 116540 - DNA, 20 bp, Artificial Sequence
  Description of Artificial Sequence: Synthetic oligonucleotide
  Target: LAMA2; (-) strand; PAM type: NRG; PAM sequence: GGG
tagtagtttgagaccagcct

SEQ ID NO: 116541 - DNA, 20 bp, Artificial Sequence
  Description of Artificial Sequence: Synthetic oligonucleotide
  Target: LAMA2; (-) strand; PAM type: NRG; PAM sequence: TGG
ctagtagtttgagaccagcc

SEQ ID NO: 116542 - DNA, 20 bp, Artificial Sequence
  Description of Artificial Sequence: Synthetic oligonucleotide
  Target: LAMA2; (-) strand; PAM type: NRG; PAM sequence: CAG
tgaggctagtagtttgagac

SEQ ID NO: 116543 - DNA, 20 bp, Artificial Sequence
  Description of Artificial Sequence: Synthetic oligonucleotide
  Target: LAMA2; (-) strand; PAM type: NRG; PAM sequence: GAG
tcgcttgaggctagtagttt

SEQ ID NO: 116544 - DNA, 20 bp, Artificial Sequence
  Description of Artificial Sequence: Synthetic oligonucleotide
  Target: LAMA2; (-) strand; PAM type: NRG; PAM sequence: TAG
ggaagatcgcttgaggctag

SEQ ID NO: 116545 - DNA, 20 bp, Artificial Sequence
  Description of Artificial Sequence: Synthetic oligonucleotide
  Target: LAMA2; (-) strand; PAM type: NRG; PAM sequence: TAG
gcaggaagatcgcttgaggc

SEQ ID NO: 116546 - DNA, 20 bp, Artificial Sequence
  Description of Artificial Sequence: Synthetic oligonucleotide
  Target: LAMA2; (-) strand; PAM type: NRG; PAM sequence: AGG
cgaggcaggaagatcgcttg

SEQ ID NO: 116547 - DNA, 20 bp, Artificial Sequence
  Description of Artificial Sequence: Synthetic oligonucleotide
  Target: LAMA2; (-) strand; PAM type: NRG; PAM sequence: GAG
ccgaggcaggaagatcgctt

SEQ ID NO: 116548 - DNA, 20 bp, Artificial Sequence
  Description of Artificial Sequence: Synthetic oligonucleotide
  Target: LAMA2; (-) strand; PAM type: NRG; PAM sequence: AAG
atttggaaagccgaggcagg

SEQ ID NO: 116549 - DNA, 20 bp, Artificial Sequence
  Description of Artificial Sequence: Synthetic oligonucleotide
  Target: LAMA2; (-) strand; PAM type: NRG; PAM sequence: AGG
agcatttggaaagccgaggc

SEQ ID NO: 116550 - DNA, 20 bp, Artificial Sequence
  Description of Artificial Sequence: Synthetic oligonucleotide
  Target: LAMA2; (-) strand; PAM type: NRG; PAM sequence: CAG
cagcatttggaaagccgagg

SEQ ID NO: 116551 - DNA, 20 bp, Artificial Sequence
  Description of Artificial Sequence: Synthetic oligonucleotide
  Target: LAMA2; (-) strand; PAM type: NRG; PAM sequence: AGG
tcccagcatttggaaagccg

SEQ ID NO: 116552 - DNA, 20 bp, Artificial Sequence
  Description of Artificial Sequence: Synthetic oligonucleotide
  Target: LAMA2; (-) strand; PAM type: NRG; PAM sequence: GAG
atcccagcatttggaaagcc

SEQ ID NO: 116553 - DNA, 20 bp, Artificial Sequence
  Description of Artificial Sequence: Synthetic oligonucleotide
  Target: LAMA2; (-) strand; PAM type: NRG; PAM sequence: AAG
ttttaatcccagcatttgga

SEQ ID NO: 116554 - DNA, 20 bp, Artificial Sequence
  Description of Artificial Sequence: Synthetic oligonucleotide
  Target: LAMA2; (-) strand; PAM type: NRG; PAM sequence: TGG
atgtttttaatcccagcatt

SEQ ID NO: 116555 - DNA, 20 bp, Artificial Sequence
  Description of Artificial Sequence: Synthetic oligonucleotide
  Target: LAMA2; (-) strand; PAM type: NRG; PAM sequence: CAG
gtggctcatgtttttaatcc

SEQ ID NO: 116556 - DNA, 20 bp, Artificial Sequence
  Description of Artificial Sequence: Synthetic oligonucleotide
  Target: LAMA2; (-) strand; PAM type: NRG; PAM sequence: TGG
ggtgtaagggatgggcgtgg

SEQ ID NO: 116557 - DNA, 20 bp, Artificial Sequence
  Description of Artificial Sequence: Synthetic oligonucleotide
  Target: LAMA2; (-) strand; PAM type: NRG; PAM sequence: TGG
atgggtgtaagggatgggcg

SEQ ID NO: 116558 - DNA, 20 bp, Artificial Sequence
  Description of Artificial Sequence: Synthetic oligonucleotide
  Target: LAMA2; (-) strand; PAM type: NRG; PAM sequence: GGG
gtctgatgggtgtaagggat

SEQ ID NO: 116559 - DNA, 20 bp, Artificial Sequence
  Description of Artificial Sequence: Synthetic oligonucleotide
  Target: LAMA2; (-) strand; PAM type: NRG; PAM sequence: TGG
agtctgatgggtgtaaggga

SEQ ID NO: 116560 - DNA, 20 bp, Artificial Sequence
  Description of Artificial Sequence: Synthetic oligonucleotide
  Target: LAMA2; (-) strand; PAM type: NRG; PAM sequence: GGG
accaagtctgatgggtgtaa

SEQ ID NO: 116561 - DNA, 20 bp, Artificial Sequence
  Description of Artificial Sequence: Synthetic oligonucleotide
  Target: LAMA2; (-) strand; PAM type: NRG; PAM sequence: AGG
aaccaagtctgatgggtgta

SEQ ID NO: 116562 - DNA, 20 bp, Artificial Sequence
  Description of Artificial Sequence: Synthetic oligonucleotide
  Target: LAMA2; (-) strand; PAM type: NRG; PAM sequence: AAG
aaaccaagtctgatgggtgt

SEQ ID NO: 116563 - DNA, 20 bp, Artificial Sequence
  Description of Artificial Sequence: Synthetic oligonucleotide
  Target: LAMA2; (-) strand; PAM type: NRG; PAM sequence: GGG
aaactgaaaccaagtctgat

SEQ ID NO: 116564 - DNA, 20 bp, Artificial Sequence
  Description of Artificial Sequence: Synthetic oligonucleotide
  Target: LAMA2; (-) strand; PAM type: NRG; PAM sequence: TGG
taaactgaaaccaagtctga

SEQ ID NO: 116565 - DNA, 20 bp, Artificial Sequence
  Description of Artificial Sequence: Synthetic oligonucleotide
  Target: LAMA2; (-) strand; PAM type: NRG; PAM sequence: AAG
tccttgggtaaactgaaacc

SEQ ID NO: 116566 - DNA, 20 bp, Artificial Sequence
  Description of Artificial Sequence: Synthetic oligonucleotide
  Target: LAMA2; (-) strand; PAM type: NRG; PAM sequence: GGG
tccttgcatcacttttcctt

SEQ ID NO: 116567 - DNA, 20 bp, Artificial Sequence
  Description of Artificial Sequence: Synthetic oligonucleotide
  Target: LAMA2; (-) strand; PAM type: NRG; PAM sequence: TGG
ttccttgcatcacttttcct

SEQ ID NO: 116568 - DNA, 20 bp, Artificial Sequence
  Description of Artificial Sequence: Synthetic oligonucleotide
  Target: LAMA2; (-) strand; PAM type: NRG; PAM sequence: GGG
ctcccccttgcttggttaaa

SEQ ID NO: 116569 - DNA, 20 bp, Artificial Sequence
  Description of Artificial Sequence: Synthetic oligonucleotide
  Target: LAMA2; (-) strand; PAM type: NRG; PAM sequence: AGG
cctcccccttgcttggttaa

SEQ ID NO: 116570 - DNA, 20 bp, Artificial Sequence
  Description of Artificial Sequence: Synthetic oligonucleotide
  Target: LAMA2; (-) strand; PAM type: NRG; PAM sequence: AAG
acctcccccttgcttggtta

SEQ ID NO: 116571 - DNA, 20 bp, Artificial Sequence
  Description of Artificial Sequence: Synthetic oligonucleotide
  Target: LAMA2; (-) strand; PAM type: NRG; PAM sequence: TGG
atctcgacctcccccttgct

SEQ ID NO: 116572 - DNA, 20 bp, Artificial Sequence
  Description of Artificial Sequence: Synthetic oligonucleotide
  Target: LAMA2; (-) strand; PAM type: NRG; PAM sequence: TAG
ttccccaccctctaatttgg

SEQ ID NO: 116573 - DNA, 20 bp, Artificial Sequence
  Description of Artificial Sequence: Synthetic oligonucleotide
  Target: LAMA2; (-) strand; PAM type: NRG; PAM sequence: TGG
aaattccccaccctctaatt

SEQ ID NO: 116574 - DNA, 20 bp, Artificial Sequence
  Description of Artificial Sequence: Synthetic oligonucleotide
  Target: LAMA2; (-) strand; PAM type: NRG; PAM sequence: GGG
atgtaccttaggatttaaat

SEQ ID NO: 116575 - DNA, 20 bp, Artificial Sequence
  Description of Artificial Sequence: Synthetic oligonucleotide
  Target: LAMA2; (-) strand; PAM type: NRG; PAM sequence: TGG
tatgtaccttaggatttaaa

SEQ ID NO: 116576 - DNA, 20 bp, Artificial Sequence
  Description of Artificial Sequence: Synthetic oligonucleotide
  Target: LAMA2; (-) strand; PAM type: NRG; PAM sequence: AGG
tttttaaaaatatgtacctt

SEQ ID NO: 116577 - DNA, 20 bp, Artificial Sequence
  Description of Artificial Sequence: Synthetic oligonucleotide
  Target: LAMA2; (-) strand; PAM type: NRG; PAM sequence: TAG
gtttttaaaaatatgtacct

SEQ ID NO: 116578 - DNA, 20 bp, Artificial Sequence
  Description of Artificial Sequence: Synthetic oligonucleotide
  Target: LAMA2; (-) strand; PAM type: NRG; PAM sequence: GGG
tgagaagtgctggtgtaaga

SEQ ID NO: 116579 - DNA, 20 bp, Artificial Sequence
  Description of Artificial Sequence: Synthetic oligonucleotide
  Target: LAMA2; (-) strand; PAM type: NRG; PAM sequence: AGG
ctgagaagtgctggtgtaag

SEQ ID NO: 116580 - DNA, 20 bp, Artificial Sequence
  Description of Artificial Sequence: Synthetic oligonucleotide
  Target: LAMA2; (-) strand; PAM type: NRG; PAM sequence: GAG
actgagaagtgctggtgtaa

SEQ ID NO: 116581 - DNA, 20 bp, Artificial Sequence
  Description of Artificial Sequence: Synthetic oligonucleotide
  Target: LAMA2; (-) strand; PAM type: NRG; PAM sequence: AAG
ggactgagaagtgctggtgt

SEQ ID NO: 116582 - DNA, 20 bp, Artificial Sequence
  Description of Artificial Sequence: Synthetic oligonucleotide
  Target: LAMA2; (-) strand; PAM type: NRG; PAM sequence: TGG
ggaaaaggactgagaagtgc

SEQ ID NO: 116583 - DNA, 20 bp, Artificial Sequence
  Description of Artificial Sequence: Synthetic oligonucleotide
  Target: LAMA2; (-) strand; PAM type: NRG; PAM sequence: AAG
gcagttggaaaaggactgag

SEQ ID NO: 116584 - DNA, 20 bp, Artificial Sequence
  Description of Artificial Sequence: Synthetic oligonucleotide
  Target: LAMA2; (-) strand; PAM type: NRG; PAM sequence: GAG
ctggcagttggaaaaggact

SEQ ID NO: 116585 - DNA, 20 bp, Artificial Sequence
  Description of Artificial Sequence: Synthetic oligonucleotide
  Target: LAMA2; (-) strand; PAM type: NRG; PAM sequence: AGG
attaaactggcagttggaaa

SEQ ID NO: 116586 - DNA, 20 bp, Artificial Sequence
  Description of Artificial Sequence: Synthetic oligonucleotide
  Target: LAMA2; (-) strand; PAM type: NRG; PAM sequence: AAG
tattaaactggcagttggaa

SEQ ID NO: 116587 - DNA, 20 bp, Artificial Sequence
  Description of Artificial Sequence: Synthetic oligonucleotide
  Target: LAMA2; (-) strand; PAM type: NRG; PAM sequence: TGG
tcctttattaaactggcagt

SEQ ID NO: 116588 - DNA, 20 bp, Artificial Sequence
  Description of Artificial Sequence: Synthetic oligonucleotide
  Target: LAMA2; (-) strand; PAM type: NRG; PAM sequence: CAG
accttcctttattaaactgg

SEQ ID NO: 116589 - DNA, 20 bp, Artificial Sequence
  Description of Artificial Sequence: Synthetic oligonucleotide
  Target: LAMA2; (-) strand; PAM type: NRG; PAM sequence: TGG
atcaccttcctttattaaac

SEQ ID NO: 116590 - DNA, 20 bp, Artificial Sequence
  Description of Artificial Sequence: Synthetic oligonucleotide
  Target: LAMA2; (-) strand; PAM type: NRG; PAM sequence: TGG
atcattgatttgcaacagga

SEQ ID NO: 116591 - DNA, 20 bp, Artificial Sequence
  Description of Artificial Sequence: Synthetic oligonucleotide
  Target: LAMA2; (-) strand; PAM type: NRG; PAM sequence: AGG
atcaatcattgatttgcaac

SEQ ID NO: 116592 - DNA, 20 bp, Artificial Sequence
  Description of Artificial Sequence: Synthetic oligonucleotide
  Target: LAMA2; (-) strand; PAM type: NRG; PAM sequence: CAG
tatcaatcattgatttgcaa

SEQ ID NO: 116593 - DNA, 20 bp, Artificial Sequence
  Description of Artificial Sequence: Synthetic oligonucleotide
  Target: LAMA2; (-) strand; PAM type: NRG; PAM sequence: AGG
tttgtttttaaggacatcca

SEQ ID NO: 116594 - DNA, 20 bp, Artificial Sequence
  Description of Artificial Sequence: Synthetic oligonucleotide
  Target: LAMA2; (-) strand; PAM type: NRG; PAM sequence: AAG
ctttgtttttaaggacatcc

SEQ ID NO: 116595 - DNA, 20 bp, Artificial Sequence
  Description of Artificial Sequence: Synthetic oligonucleotide
  Target: LAMA2; (-) strand; PAM type: NRG; PAM sequence: AGG
tgtatagtcctttgttttta

SEQ ID NO: 116596 - DNA, 20 bp, Artificial Sequence
  Description of Artificial Sequence: Synthetic oligonucleotide
  Target: LAMA2; (-) strand; PAM type: NRG; PAM sequence: AAG
gtgtatagtcctttgttttt

SEQ ID NO: 116597 - DNA, 20 bp, Artificial Sequence
  Description of Artificial Sequence: Synthetic oligonucleotide
  Target: LAMA2; (-) strand; PAM type: NRG; PAM sequence: TAG
tttaaagccattatggtgta

SEQ ID NO: 116598 - DNA, 20 bp, Artificial Sequence
  Description of Artificial Sequence: Synthetic oligonucleotide
  Target: LAMA2; (-) strand; PAM type: NRG; PAM sequence: TGG
ctcaaagtttaaagccatta

SEQ ID NO: 116599 - DNA, 20 bp, Artificial Sequence
  Description of Artificial Sequence: Synthetic oligonucleotide
  Target: LAMA2; (-) strand; PAM type: NRG; PAM sequence: AAG
acatgtaacctcaaagttta

SEQ ID NO: 116600 - DNA, 20 bp, Artificial Sequence
  Description of Artificial Sequence: Synthetic oligonucleotide
  Target: LAMA2; (-) strand; PAM type: NRG; PAM sequence: AAG
cactctaacatgtaacctca

SEQ ID NO: 116601 - DNA, 20 bp, Artificial Sequence
  Description of Artificial Sequence: Synthetic oligonucleotide
  Target: LAMA2; (-) strand; PAM type: NRG; PAM sequence: GAG
tgagccaatgttatggaaaa

SEQ ID NO: 116602 - DNA, 20 bp, Artificial Sequence
  Description of Artificial Sequence: Synthetic oligonucleotide
  Target: LAMA2; (-) strand; PAM type: NRG; PAM sequence: AAG
gatgagccaatgttatggaa

SEQ ID NO: 116603 - DNA, 20 bp, Artificial Sequence
  Description of Artificial Sequence: Synthetic oligonucleotide
  Target: LAMA2; (-) strand; PAM type: NRG; PAM sequence: TGG
tctcagatgagccaatgtta

SEQ ID NO: 116604 - DNA, 20 bp, Artificial Sequence
  Description of Artificial Sequence: Synthetic oligonucleotide
  Target: LAMA2; (-) strand; PAM type: NRG; PAM sequence: GAG
ataaaacggtattctcagat

SEQ ID NO: 116605 - DNA, 20 bp, Artificial Sequence
  Description of Artificial Sequence: Synthetic oligonucleotide
  Target: LAMA2; (-) strand; PAM type: NRG; PAM sequence: CAG
gcttaataaaacggtattct

SEQ ID NO: 116606 - DNA, 20 bp, Artificial Sequence
  Description of Artificial Sequence: Synthetic oligonucleotide
  Target: LAMA2; (-) strand; PAM type: NRG; PAM sequence: CGG
agaagcagtgcttaataaaa

SEQ ID NO: 116607 - DNA, 20 bp, Artificial Sequence
  Description of Artificial Sequence: Synthetic oligonucleotide
  Target: LAMA2; (-) strand; PAM type: NRG; PAM sequence: CAG
cctcaagaagcaggcagaag

SEQ ID NO: 116608 - DNA, 20 bp, Artificial Sequence
  Description of Artificial Sequence: Synthetic oligonucleotide
  Target: LAMA2; (-) strand; PAM type: NRG; PAM sequence: AAG
agccctcaagaagcaggcag

SEQ ID NO: 116609 - DNA, 20 bp, Artificial Sequence
  Description of Artificial Sequence: Synthetic oligonucleotide
  Target: LAMA2; (-) strand; PAM type: NRG; PAM sequence: CAG
ggcagccctcaagaagcagg

SEQ ID NO: 116610 - DNA, 20 bp, Artificial Sequence
  Description of Artificial Sequence: Synthetic oligonucleotide
  Target: LAMA2; (-) strand; PAM type: NRG; PAM sequence: AGG
acgggcagccctcaagaagc

SEQ ID NO: 116611 - DNA, 20 bp, Artificial Sequence
  Description of Artificial Sequence: Synthetic oligonucleotide
  Target: LAMA2; (-) strand; PAM type: NRG; PAM sequence: CAG
aacgggcagccctcaagaag

SEQ ID NO: 116612 - DNA, 20 bp, Artificial Sequence
  Description of Artificial Sequence: Synthetic oligonucleotide
  Target: LAMA2; (-) strand; PAM type: NRG; PAM sequence: AAG
tgcaacgggcagccctcaag

SEQ ID NO: 116613 - DNA, 20 bp, Artificial Sequence
  Description of Artificial Sequence: Synthetic oligonucleotide
  Target: LAMA2; (-) strand; PAM type: NRG; PAM sequence: AAG
ttctgcaacgggcagccctc

SEQ ID NO: 116614 - DNA, 20 bp, Artificial Sequence
  Description of Artificial Sequence: Synthetic oligonucleotide
  Target: LAMA2; (-) strand; PAM type: NRG; PAM sequence: CAG
tcctccgtttctgcaacggg

SEQ ID NO: 116615 - DNA, 20 bp, Artificial Sequence
  Description of Artificial Sequence: Synthetic oligonucleotide
  Target: LAMA2; (-) strand; PAM type: NRG; PAM sequence: GGG
agatcctccgtttctgcaac

SEQ ID NO: 116616 - DNA, 20 bp, Artificial Sequence
  Description of Artificial Sequence: Synthetic oligonucleotide
  Target: LAMA2; (-) strand; PAM type: NRG; PAM sequence: CGG
tagatcctccgtttctgcaa

SEQ ID NO: 116617 - DNA, 20 bp, Artificial Sequence
  Description of Artificial Sequence: Synthetic oligonucleotide
  Target: LAMA2; (-) strand; PAM type: NRG; PAM sequence: TAG
aagaagaacacctcctggat

SEQ ID NO: 116618 - DNA, 20 bp, Artificial Sequence
  Description of Artificial Sequence: Synthetic oligonucleotide
  Target: LAMA2; (-) strand; PAM type: NRG; PAM sequence: TGG
ttaggaagaagaacacctcc

SEQ ID NO: 116619 - DNA, 20 bp, Artificial Sequence
  Description of Artificial Sequence: Synthetic oligonucleotide
  Target: LAMA2; (-) strand; PAM type: NRG; PAM sequence: AAG
tccacttgaaatttaggaag

SEQ ID NO: 116620 - DNA, 20 bp, Artificial Sequence
  Description of Artificial Sequence: Synthetic oligonucleotide
  Target: LAMA2; (-) strand; PAM type: NRG; PAM sequence: AAG
acatccacttgaaatttagg

SEQ ID NO: 116621 - DNA, 20 bp, Artificial Sequence
  Description of Artificial Sequence: Synthetic oligonucleotide
  Target: LAMA2; (-) strand; PAM type: NRG; PAM sequence: AGG
gttacatccacttgaaattt

SEQ ID NO: 116622 - DNA, 20 bp, Artificial Sequence
  Description of Artificial Sequence: Synthetic oligonucleotide
  Target: LAMA2; (-) strand; PAM type: NRG; PAM sequence: TAG
ggttacatccacttgaaatt

SEQ ID NO: 116623 - DNA, 20 bp, Artificial Sequence
  Description of Artificial Sequence: Synthetic oligonucleotide
  Target: LAMA2; (-) strand; PAM type: NRG; PAM sequence: AGG
gttcttttaagaatcattac

SEQ ID NO: 116624 - DNA, 20 bp, Artificial Sequence
  Description of Artificial Sequence: Synthetic oligonucleotide
  Target: LAMA2; (-) strand; PAM type: NRG; PAM sequence: CAG
agttcttttaagaatcatta

SEQ ID NO: 116625 - DNA, 20 bp, Artificial Sequence
  Description of Artificial Sequence: Synthetic oligonucleotide
  Target: LAMA2; (-) strand; PAM type: NRG; PAM sequence: AAG
gactttgtcaaagttctttt

SEQ ID NO: 116626 - DNA, 20 bp, Artificial Sequence
  Description of Artificial Sequence: Synthetic oligonucleotide
  Target: LAMA2; (-) strand; PAM type: NRG; PAM sequence: AAG
aaaggacagggactttgtca

SEQ ID NO: 116627 - DNA, 20 bp, Artificial Sequence
  Description of Artificial Sequence: Synthetic oligonucleotide
  Target: LAMA2; (-) strand; PAM type: NRG; PAM sequence: GGG
cctttgaccagaaaaggaca

SEQ ID NO: 116628 - DNA, 20 bp, Artificial Sequence
  Description of Artificial Sequence: Synthetic oligonucleotide
  Target: LAMA2; (-) strand; PAM type: NRG; PAM sequence: AGG
acctttgaccagaaaaggac

SEQ ID NO: 116629 - DNA, 20 bp, Artificial Sequence
  Description of Artificial Sequence: Synthetic oligonucleotide
  Target: LAMA2; (-) strand; PAM type: NRG; PAM sequence: CAG
aacctttgaccagaaaagga

SEQ ID NO: 116630 - DNA, 20 bp, Artificial Sequence
  Description of Artificial Sequence: Synthetic oligonucleotide
  Target: LAMA2; (-) strand; PAM type: NRG; PAM sequence: AGG
aaaaaacctttgaccagaaa

SEQ ID NO: 116631 - DNA, 20 bp, Artificial Sequence
  Description of Artificial Sequence: Synthetic oligonucleotide
  Target: LAMA2; (-) strand; PAM type: NRG; PAM sequence: AAG
aaaaaaacctttgaccagaa

SEQ ID NO: 116632 - DNA, 20 bp, Artificial Sequence
  Description of Artificial Sequence: Synthetic oligonucleotide
  Target: LAMA2; (-) strand; PAM type: NRG; PAM sequence: CAG
tttagaaaaaaacctttgac

SEQ ID NO: 116633 - DNA, 20 bp, Artificial Sequence
  Description of Artificial Sequence: Synthetic oligonucleotide
  Target: LAMA2; (-) strand; PAM type: NRG; PAM sequence: TAG
aggcactggtcaagccattt

SEQ ID NO: 116634 - DNA, 20 bp, Artificial Sequence
  Description of Artificial Sequence: Synthetic oligonucleotide
  Target: LAMA2; (-) strand; PAM type: NRG; PAM sequence: AAG
agatggacaaggcactggtc

SEQ ID NO: 116635 - DNA, 20 bp, Artificial Sequence
  Description of Artificial Sequence: Synthetic oligonucleotide
  Target: LAMA2; (-) strand; PAM type: NRG; PAM sequence: TGG
tttctagatggacaaggcac

SEQ ID NO: 116636 - DNA, 20 bp, Artificial Sequence
  Description of Artificial Sequence: Synthetic oligonucleotide
  Target: LAMA2; (-) strand; PAM type: NRG; PAM sequence: AGG
tgagattttctagatggaca

SEQ ID NO: 116637 - DNA, 20 bp, Artificial Sequence
  Description of Artificial Sequence: Synthetic oligonucleotide
  Target: LAMA2; (-) strand; PAM type: NRG; PAM sequence: AAG
atgagattttctagatggac

SEQ ID NO: 116638 - DNA, 20 bp, Artificial Sequence
  Description of Artificial Sequence: Synthetic oligonucleotide
  Target: LAMA2; (-) strand; PAM type: NRG; PAM sequence: TGG
atactatgagattttctaga

SEQ ID NO: 116639 - DNA, 20 bp, Artificial Sequence
  Description of Artificial Sequence: Synthetic oligonucleotide
  Target: LAMA2; (-) strand; PAM type: NRG; PAM sequence: TAG
ttgtatactatgagattttc

SEQ ID NO: 116640 - DNA, 20 bp, Artificial Sequence
  Description of Artificial Sequence: Synthetic oligonucleotide
  Target: LAMA2; (-) strand; PAM type: NRG; PAM sequence: GAG
gttgtttcgttgtatactat

SEQ ID NO: 116641 - DNA, 20 bp, Artificial Sequence
  Description of Artificial Sequence: Synthetic oligonucleotide
  Target: LAMA2; (-) strand; PAM type: NRG; PAM sequence: TGG
tgagctaagcagcagttttt

SEQ ID NO: 116642 - DNA, 20 bp, Artificial Sequence
  Description of Artificial Sequence: Synthetic oligonucleotide
  Target: LAMA2; (-) strand; PAM type: NRG; PAM sequence: CAG
actggtcctgagctaagcag

SEQ ID NO: 116643 - DNA, 20 bp, Artificial Sequence
  Description of Artificial Sequence: Synthetic oligonucleotide
  Target: LAMA2; (-) strand; PAM type: NRG; PAM sequence: CAG
aaaactggtcctgagctaag

SEQ ID NO: 116644 - DNA, 20 bp, Artificial Sequence
  Description of Artificial Sequence: Synthetic oligonucleotide
  Target: LAMA2; (-) strand; PAM type: NRG; PAM sequence: AAG
tccaaaactggtcctgagct

SEQ ID NO: 116645 - DNA, 20 bp, Artificial Sequence
  Description of Artificial Sequence: Synthetic oligonucleotide
  Target: LAMA2; (-) strand; PAM type: NRG; PAM sequence: GAG
gtgtatccaaaactggtcct

SEQ ID NO: 116646 - DNA, 20 bp, Artificial Sequence
  Description of Artificial Sequence: Synthetic oligonucleotide
  Target: LAMA2; (-) strand; PAM type: NRG; PAM sequence: TGG
tggacaggtgtatccaaaac

SEQ ID NO: 116647 - DNA, 20 bp, Artificial Sequence
  Description of Artificial Sequence: Synthetic oligonucleotide
  Target: LAMA2; (-) strand; PAM type: NRG; PAM sequence: AGG
ggattgctggtagactggac

SEQ ID NO: 116648 - DNA, 20 bp, Artificial Sequence
  Description of Artificial Sequence: Synthetic oligonucleotide
  Target: LAMA2; (-) strand; PAM type: NRG; PAM sequence: CAG
tggattgctggtagactgga

SEQ ID NO: 116649 - DNA, 20 bp, Artificial Sequence
  Description of Artificial Sequence: Synthetic oligonucleotide
  Target: LAMA2; (-) strand; PAM type: NRG; PAM sequence: TGG
cttttggattgctggtagac

SEQ ID NO: 116650 - DNA, 20 bp, Artificial Sequence
  Description of Artificial Sequence: Synthetic oligonucleotide
  Target: LAMA2; (-) strand; PAM type: NRG; PAM sequence: TAG
gggaacttttggattgctgg

SEQ ID NO: 116651 - DNA, 20 bp, Artificial Sequence
  Description of Artificial Sequence: Synthetic oligonucleotide
  Target: LAMA2; (-) strand; PAM type: NRG; PAM sequence: TGG
atggggaacttttggattgc

SEQ ID NO: 116652 - DNA, 20 bp, Artificial Sequence
  Description of Artificial Sequence: Synthetic oligonucleotide
  Target: LAMA2; (-) strand; PAM type: NRG; PAM sequence: TGG
tgtatgttatggggaacttt

SEQ ID NO: 116653 - DNA, 20 bp, Artificial Sequence
  Description of Artificial Sequence: Synthetic oligonucleotide
  Target: LAMA2; (-) strand; PAM type: NRG; PAM sequence: GGG
ggtagcagctgtatgttatg

SEQ ID NO: 116654 - DNA, 20 bp, Artificial Sequence
  Description of Artificial Sequence: Synthetic oligonucleotide
  Target: LAMA2; (-) strand; PAM type: NRG; PAM sequence: GGG
cggtagcagctgtatgttat

SEQ ID NO: 116655 - DNA, 20 bp, Artificial Sequence
  Description of Artificial Sequence: Synthetic oligonucleotide
  Target: LAMA2; (-) strand; PAM type: NRG; PAM sequence: TGG
ccggtagcagctgtatgtta

SEQ ID NO: 116656 - DNA, 20 bp, Artificial Sequence
  Description of Artificial Sequence: Synthetic oligonucleotide
  Target: LAMA2; (-) strand; PAM type: NRG; PAM sequence: CAG
cagttgtacactcccggtag

SEQ ID NO: 116657 - DNA, 20 bp, Artificial Sequence
  Description of Artificial Sequence: Synthetic oligonucleotide
  Target: LAMA2; (-) strand; PAM type: NRG; PAM sequence: TAG
tggcagttgtacactcccgg

SEQ ID NO: 116658 - DNA, 20 bp, Artificial Sequence
  Description of Artificial Sequence: Synthetic oligonucleotide
  Target: LAMA2; (-) strand; PAM type: NRG; PAM sequence: CGG
aggtggcagttgtacactcc

SEQ ID NO: 116659 - DNA, 20 bp, Artificial Sequence
  Description of Artificial Sequence: Synthetic oligonucleotide
  Target: LAMA2; (-) strand; PAM type: NRG; PAM sequence: CAG
ttaaaaaattttcaaggtgg

SEQ ID NO: 116660 - DNA, 20 bp, Artificial Sequence
  Description of Artificial Sequence: Synthetic oligonucleotide
  Target: LAMA2; (-) strand; PAM type: NRG; PAM sequence: TGG
aatttaaaaaattttcaagg

SEQ ID NO: 116661 - DNA, 20 bp, Artificial Sequence
  Description of Artificial Sequence: Synthetic oligonucleotide
  Target: LAMA2; (-) strand; PAM type: NRG; PAM sequence: AGG
taaaatttaaaaaattttca

SEQ ID NO: 116662 - DNA, 20 bp, Artificial Sequence
  Description of Artificial Sequence: Synthetic oligonucleotide
  Target: LAMA2; (-) strand; PAM type: NRG; PAM sequence: AAG
ttaaaatttaaaaaattttc

SEQ ID NO: 116663 - DNA, 20 bp, Artificial Sequence
  Description of Artificial Sequence: Synthetic oligonucleotide
  Target: LAMA2; (-) strand; PAM type: NRG; PAM sequence: CAG
tgtccatattattgcggtta

SEQ ID NO: 116664 - DNA, 20 bp, Artificial Sequence
  Description of Artificial Sequence: Synthetic oligonucleotide
  Target: LAMA2; (-) strand; PAM type: NRG; PAM sequence: CGG
gggttatgtccatattattg

SEQ ID NO: 116665 - DNA, 20 bp, Artificial Sequence
  Description of Artificial Sequence: Synthetic oligonucleotide
  Target: LAMA2; (-) strand; PAM type: NRG; PAM sequence: GGG
cttaaaagagaaccaccagt

SEQ ID NO: 116666 - DNA, 20 bp, Artificial Sequence
  Description of Artificial Sequence: Synthetic oligonucleotide
  Target: LAMA2; (-) strand; PAM type: NRG; PAM sequence: TGG
gcttaaaagagaaccaccag

SEQ ID NO: 116667 - DNA, 20 bp, Artificial Sequence
  Description of Artificial Sequence: Synthetic oligonucleotide
  Target: LAMA2; (-) strand; PAM type: NRG; PAM sequence: CAG
gtagcttaaaagagaaccac

SEQ ID NO: 116668 - DNA, 20 bp, Artificial Sequence
  Description of Artificial Sequence: Synthetic oligonucleotide
  Target: LAMA2; (-) strand; PAM type: NRG; PAM sequence: GAG
caattacatgtagcttaaaa

SEQ ID NO: 116669 - DNA, 20 bp, Artificial Sequence
  Description of Artificial Sequence: Synthetic oligonucleotide
  Target: LAMA2; (-) strand; PAM type: NRG; PAM sequence: AAG
aacaattacatgtagcttaa

SEQ ID NO: 116670 - DNA, 20 bp, Artificial Sequence
  Description of Artificial Sequence: Synthetic oligonucleotide
  Target: LAMA2; (-) strand; PAM type: NRG; PAM sequence: TAG
aattaggaaacaattacatg

SEQ ID NO: 116671 - DNA, 20 bp, Artificial Sequence
  Description of Artificial Sequence: Synthetic oligonucleotide
  Target: LAMA2; (-) strand; PAM type: NRG; PAM sequence: AGG
tggatggatgctgaggaatt

SEQ ID NO: 116672 - DNA, 20 bp, Artificial Sequence
  Description of Artificial Sequence: Synthetic oligonucleotide
  Target: LAMA2; (-) strand; PAM type: NRG; PAM sequence: TAG
gtggatggatgctgaggaat

SEQ ID NO: 116673 - DNA, 20 bp, Artificial Sequence
  Description of Artificial Sequence: Synthetic oligonucleotide
  Target: LAMA2; (-) strand; PAM type: NRG; PAM sequence: AGG
agaaaggtggatggatgctg

SEQ ID NO: 116674 - DNA, 20 bp, Artificial Sequence
  Description of Artificial Sequence: Synthetic oligonucleotide
  Target: LAMA2; (-) strand; PAM type: NRG; PAM sequence: GAG
aagaaaggtggatggatgct

SEQ ID NO: 116675 - DNA, 20 bp, Artificial Sequence
  Description of Artificial Sequence: Synthetic oligonucleotide
  Target: LAMA2; (-) strand; PAM type: NRG; PAM sequence: TGG
gagggattaagaaaggtgga

SEQ ID NO: 116676 - DNA, 20 bp, Artificial Sequence
  Description of Artificial Sequence: Synthetic oligonucleotide
  Target: LAMA2; (-) strand; PAM type: NRG; PAM sequence: TGG
aattgagggattaagaaagg

SEQ ID NO: 116677 - DNA, 20 bp, Artificial Sequence
  Description of Artificial Sequence: Synthetic oligonucleotide
  Target: LAMA2; (-) strand; PAM type: NRG; PAM sequence: AGG
gaaaattgagggattaagaa

SEQ ID NO: 116678 - DNA, 20 bp, Artificial Sequence
  Description of Artificial Sequence: Synthetic oligonucleotide
  Target: LAMA2; (-) strand; PAM type: NRG; PAM sequence: AAG
tgaaaattgagggattaaga

SEQ ID NO: 116679 - DNA, 20 bp, Artificial Sequence
  Description of Artificial Sequence: Synthetic oligonucleotide
  Target: LAMA2; (-) strand; PAM type: NRG; PAM sequence: AAG
gctctgaaaattgagggatt

SEQ ID NO: 116680 - DNA, 20 bp, Artificial Sequence
  Description of Artificial Sequence: Synthetic oligonucleotide
  Target: LAMA2; (-) strand; PAM type: NRG; PAM sequence: GGG
ccctcagctctgaaaattga

SEQ ID NO: 116681 - DNA, 20 bp, Artificial Sequence
  Description of Artificial Sequence: Synthetic oligonucleotide
  Target: LAMA2; (-) strand; PAM type: NRG; PAM sequence: AGG
accctcagctctgaaaattg

SEQ ID NO: 116682 - DNA, 20 bp, Artificial Sequence
  Description of Artificial Sequence: Synthetic oligonucleotide
  Target: LAMA2; (-) strand; PAM type: NRG; PAM sequence: GAG
caccctcagctctgaaaatt

SEQ ID NO: 116683 - DNA, 20 bp, Artificial Sequence
  Description of Artificial Sequence: Synthetic oligonucleotide
  Target: LAMA2; (-) strand; PAM type: NRG; PAM sequence: CAG
ctgaaacatctttacaccct

SEQ ID NO: 116684 - DNA, 20 bp, Artificial Sequence
  Description of Artificial Sequence: Synthetic oligonucleotide
  Target: LAMA2; (-) strand; PAM type: NRG; PAM sequence: CAG
tgctgtgagtccactggggg

SEQ ID NO: 116685 - DNA, 20 bp, Artificial Sequence
  Description of Artificial Sequence: Synthetic oligonucleotide
  Target: LAMA2; (-) strand; PAM type: NRG; PAM sequence: GGG
atctgctgtgagtccactgg

SEQ ID NO: 116686 - DNA, 20 bp, Artificial Sequence
  Description of Artificial Sequence: Synthetic oligonucleotide
  Target: LAMA2; (-) strand; PAM type: NRG; PAM sequence: GGG
tatctgctgtgagtccactg

SEQ ID NO: 116687 - DNA, 20 bp, Artificial Sequence
  Description of Artificial Sequence: Synthetic oligonucleotide
  Target: LAMA2; (-) strand; PAM type: NRG; PAM sequence: GGG
ctatctgctgtgagtccact

SEQ ID NO: 116688 - DNA, 20 bp, Artificial Sequence
  Description of Artificial Sequence: Synthetic oligonucleotide
  Target: LAMA2; (-) strand; PAM type: NRG; PAM sequence: TGG
cctatctgctgtgagtccac

SEQ ID NO: 116689 - DNA, 20 bp, Artificial Sequence
  Description of Artificial Sequence: Synthetic oligonucleotide
  Target: LAMA2; (-) strand; PAM type: NRG; PAM sequence: GAG
aagataatcctatctgctgt

SEQ ID NO: 116690 - DNA, 20 bp, Artificial Sequence
  Description of Artificial Sequence: Synthetic oligonucleotide
  Target: LAMA2; (-) strand; PAM type: NRG; PAM sequence: AAG
agtcttcctcagaaatcact

SEQ ID NO: 116691 - DNA, 20 bp, Artificial Sequence
  Description of Artificial Sequence: Synthetic oligonucleotide
  Target: LAMA2; (-) strand; PAM type: NRG; PAM sequence: CAG
acgcagcttgcagtcttcct

SEQ ID NO: 116692 - DNA, 20 bp, Artificial Sequence
  Description of Artificial Sequence: Synthetic oligonucleotide
  Target: LAMA2; (-) strand; PAM type: NRG; PAM sequence: CAG
cgataaacacacgcagcttg

SEQ ID NO: 116693 - DNA, 20 bp, Artificial Sequence
  Description of Artificial Sequence: Synthetic oligonucleotide
  Target: LAMA2; (-) strand; PAM type: NRG; PAM sequence: CAG
accgtctcgataaacacacg

SEQ ID NO: 116694 - DNA, 20 bp, Artificial Sequence
  Description of Artificial Sequence: Synthetic oligonucleotide
  Target: LAMA2; (-) strand; PAM type: NRG; PAM sequence: AGG
tcacgatatttcccggacag

SEQ ID NO: 116695 - DNA, 20 bp, Artificial Sequence
  Description of Artificial Sequence: Synthetic oligonucleotide
  Target: LAMA2; (-) strand; PAM type: NRG; PAM sequence: GAG
ctcacgatatttcccggaca

SEQ ID NO: 116696 - DNA, 20 bp, Artificial Sequence
  Description of Artificial Sequence: Synthetic oligonucleotide
  Target: LAMA2; (-) strand; PAM type: NRG; PAM sequence: CAG
ctctcacgatatttcccgga

SEQ ID NO: 116697 - DNA, 20 bp, Artificial Sequence
  Description of Artificial Sequence: Synthetic oligonucleotide
  Target: LAMA2; (-) strand; PAM type: NRG; PAM sequence: CGG
cagcctctcacgatatttcc

SEQ ID NO: 116698 - DNA, 20 bp, Artificial Sequence
  Description of Artificial Sequence: Synthetic oligonucleotide
  Target: LAMA2; (-) strand; PAM type: NRG; PAM sequence: CAG
atagaattgggatcttttat

SEQ ID NO: 116699 - DNA, 20 bp, Artificial Sequence
  Description of Artificial Sequence: Synthetic oligonucleotide
  Target: LAMA2; (-) strand; PAM type: NRG; PAM sequence: GGG
atacttctattaatagaatt

SEQ ID NO: 116700 - DNA, 20 bp, Artificial Sequence
  Description of Artificial Sequence: Synthetic oligonucleotide
  Target: LAMA2; (-) strand; PAM type: NRG; PAM sequence: TGG
aatacttctattaatagaat

SEQ ID NO: 116701 - DNA, 20 bp, Artificial Sequence
  Description of Artificial Sequence: Synthetic oligonucleotide
  Target: LAMA2; (-) strand; PAM type: NRG; PAM sequence: TAG
gtcatgaatacttctattaa

SEQ ID NO: 116702 - DNA, 20 bp, Artificial Sequence
  Description of Artificial Sequence: Synthetic oligonucleotide
  Target: LAMA2; (-) strand; PAM type: NRG; PAM sequence: CAG
gcctctgtagcttaagatct

SEQ ID NO: 116703 - DNA, 20 bp, Artificial Sequence
  Description of Artificial Sequence: Synthetic oligonucleotide
  Target: LAMA2; (-) strand; PAM type: NRG; PAM sequence: AAG
tggaaaggcctctgtagctt

SEQ ID NO: 116704 - DNA, 20 bp, Artificial Sequence
  Description of Artificial Sequence: Synthetic oligonucleotide
  Target: LAMA2; (-) strand; PAM type: NRG; PAM sequence: TAG
cccgaatggaaaggcctctg

SEQ ID NO: 116705 - DNA, 20 bp, Artificial Sequence
  Description of Artificial Sequence: Synthetic oligonucleotide
  Target: LAMA2; (-) strand; PAM type: NRG; PAM sequence: AGG
caaaaagagcccgaatggaa

SEQ ID NO: 116706 - DNA, 20 bp, Artificial Sequence
  Description of Artificial Sequence: Synthetic oligonucleotide
  Target: LAMA2; (-) strand; PAM type: NRG; PAM sequence: AAG
gcaaaaagagcccgaatgga

SEQ ID NO: 116707 - DNA, 20 bp, Artificial Sequence
  Description of Artificial Sequence: Synthetic oligonucleotide
  Target: LAMA2; (-) strand; PAM type: NRG; PAM sequence: TGG
gcctgcaaaaagagcccgaa

SEQ ID NO: 116708 - DNA, 20 bp, Artificial Sequence
  Description of Artificial Sequence: Synthetic oligonucleotide
  Target: LAMA2; (-) strand; PAM type: NRG; PAM sequence: GAG
tattacgctgcctgcaaaaa

SEQ ID NO: 116709 - DNA, 20 bp, Artificial Sequence
  Description of Artificial Sequence: Synthetic oligonucleotide
  Target: LAMA2; (-) strand; PAM type: NRG; PAM sequence: AAG
cttattacgctgcctgcaaa

SEQ ID NO: 116710 - DNA, 20 bp, Artificial Sequence
  Description of Artificial Sequence: Synthetic oligonucleotide
  Target: LAMA2; (-) strand; PAM type: NRG; PAM sequence: TGG
cctcttttagaggcagcatg

SEQ ID NO: 116711 - DNA, 20 bp, Artificial Sequence
  Description of Artificial Sequence: Synthetic oligonucleotide
  Target: LAMA2; (-) strand; PAM type: NRG; PAM sequence: CAG
tgaatggcctcttttagagg

SEQ ID NO: 116712 - DNA, 20 bp, Artificial Sequence
  Description of Artificial Sequence: Synthetic oligonucleotide
  Target: LAMA2; (-) strand; PAM type: NRG; PAM sequence: AGG
agctgaatggcctcttttag

SEQ ID NO: 116713 - DNA, 20 bp, Artificial Sequence
  Description of Artificial Sequence: Synthetic oligonucleotide
  Target: LAMA2; (-) strand; PAM type: NRG; PAM sequence: GAG
cagctgaatggcctctttta

SEQ ID NO: 116714 - DNA, 20 bp, Artificial Sequence
  Description of Artificial Sequence: Synthetic oligonucleotide
  Target: LAMA2; (-) strand; PAM type: NRG; PAM sequence: TAG
cacagctgaatggcctcttt

SEQ ID NO: 116715 - DNA, 20 bp, Artificial Sequence
  Description of Artificial Sequence: Synthetic oligonucleotide
  Target: LAMA2; (-) strand; PAM type: NRG; PAM sequence: TGG
tattcattcgcacagctgaa

SEQ ID NO: 116716 - DNA, 20 bp, Artificial Sequence
  Description of Artificial Sequence: Synthetic oligonucleotide
  Target: LAMA2; (-) strand; PAM type: NRG; PAM sequence: CAG
gaaaatgctattcattcgca

SEQ ID NO: 116717 - DNA, 20 bp, Artificial Sequence
  Description of Artificial Sequence: Synthetic oligonucleotide
  Target: LAMA2; (-) strand; PAM type: NRG; PAM sequence: AGG
caaaaccccgtgggtaggac

SEQ ID NO: 116718 - DNA, 20 bp, Artificial Sequence
  Description of Artificial Sequence: Synthetic oligonucleotide
  Target: LAMA2; (-) strand; PAM type: NRG; PAM sequence: CAG
gcaaaaccccgtgggtagga

SEQ ID NO: 116719 - DNA, 20 bp, Artificial Sequence
  Description of Artificial Sequence: Synthetic oligonucleotide
  Target: LAMA2; (-) strand; PAM type: NRG; PAM sequence: AGG
ctatgcaaaaccccgtgggt

SEQ ID NO: 116720 - DNA, 20 bp, Artificial Sequence
  Description of Artificial Sequence: Synthetic oligonucleotide
  Target: LAMA2; (-) strand; PAM type: NRG; PAM sequence: TAG
gctatgcaaaaccccgtggg

SEQ ID NO: 116721 - DNA, 20 bp, Artificial Sequence
  Description of Artificial Sequence: Synthetic oligonucleotide
  Target: LAMA2; (-) strand; PAM type: NRG; PAM sequence: GGG
acagctatgcaaaaccccgt

SEQ ID NO: 116722 - DNA, 20 bp, Artificial Sequence
  Description of Artificial Sequence: Synthetic oligonucleotide
  Target: LAMA2; (-) strand; PAM type: NRG; PAM sequence: TGG
cacagctatgcaaaaccccg

SEQ ID NO: 116723 - DNA, 20 bp, Artificial Sequence
  Description of Artificial Sequence: Synthetic oligonucleotide
  Target: LAMA2; (-) strand; PAM type: NRG; PAM sequence: CAG
gactgtggccgaaattcaca

SEQ ID NO: 116724 - DNA, 20 bp, Artificial Sequence
  Description of Artificial Sequence: Synthetic oligonucleotide
  Target: LAMA2; (-) strand; PAM type: NRG; PAM sequence: TGG
cagttataaagagcagactg

SEQ ID NO: 116725 - DNA, 20 bp, Artificial Sequence
  Description of Artificial Sequence: Synthetic oligonucleotide
  Target: LAMA2; (-) strand; PAM type: NRG; PAM sequence: CAG
agatggtcagttataaagag

SEQ ID NO: 116726 - DNA, 20 bp, Artificial Sequence
  Description of Artificial Sequence: Synthetic oligonucleotide
  Target: LAMA2; (-) strand; PAM type: NRG; PAM sequence: GAG
aggagatggtcagttataaa

SEQ ID NO: 116727 - DNA, 20 bp, Artificial Sequence
  Description of Artificial Sequence: Synthetic oligonucleotide
  Target: LAMA2; (-) strand; PAM type: NRG; PAM sequence: AAG
ccaggagatggtcagttata

SEQ ID NO: 116728 - DNA, 20 bp, Artificial Sequence
  Description of Artificial Sequence: Synthetic oligonucleotide
  Target: LAMA2; (-) strand; PAM type: NRG; PAM sequence: CAG
cttgcttcccaggagatggt

SEQ ID NO: 116729 - DNA, 20 bp, Artificial Sequence
  Description of Artificial Sequence: Synthetic oligonucleotide
  Target: LAMA2; (-) strand; PAM type: NRG; PAM sequence: TGG
ccttcttgcttcccaggaga

SEQ ID NO: 116730 - DNA, 20 bp, Artificial Sequence
  Description of Artificial Sequence: Synthetic oligonucleotide
  Target: LAMA2; (-) strand; PAM type: NRG; PAM sequence: GAG
tttcccttcttgcttcccag

SEQ ID NO: 116731 - DNA, 20 bp, Artificial Sequence
  Description of Artificial Sequence: Synthetic oligonucleotide
  Target: LAMA2; (-) strand; PAM type: NRG; PAM sequence: AGG
tatttcccttcttgcttccc

SEQ ID NO: 116732 - DNA, 20 bp, Artificial Sequence
  Description of Artificial Sequence: Synthetic oligonucleotide
  Target: LAMA2; (-) strand; PAM type: NRG; PAM sequence: CAG
gtatttcccttcttgcttcc

SEQ ID NO: 116733 - DNA, 20 bp, Artificial Sequence
  Description of Artificial Sequence: Synthetic oligonucleotide
  Target: LAMA2; (-) strand; PAM type: NRG; PAM sequence: AAG
cgtaaaattggtcttcatgg

SEQ ID NO: 116734 - DNA, 20 bp, Artificial Sequence
  Description of Artificial Sequence: Synthetic oligonucleotide
  Target: LAMA2; (-) strand; PAM type: NRG; PAM sequence: TGG
tgccgtaaaattggtcttca

SEQ ID NO: 116735 - DNA, 20 bp, Artificial Sequence
  Description of Artificial Sequence: Synthetic oligonucleotide
  Target: LAMA2; (-) strand; PAM type: NRG; PAM sequence: TGG
gttttgaaatgccgtaaaat

SEQ ID NO: 116736 - DNA, 20 bp, Artificial Sequence
  Description of Artificial Sequence: Synthetic oligonucleotide
  Target: LAMA2; (-) strand; PAM type: NRG; PAM sequence: AAG
cacagcaggtaaaaggctta

SEQ ID NO: 116737 - DNA, 20 bp, Artificial Sequence
  Description of Artificial Sequence: Synthetic oligonucleotide
  Target: LAMA2; (-) strand; PAM type: NRG; PAM sequence: AGG
actctgccacagcaggtaaa

SEQ ID NO: 116738 - DNA, 20 bp, Artificial Sequence
  Description of Artificial Sequence: Synthetic oligonucleotide
  Target: LAMA2; (-) strand; PAM type: NRG; PAM sequence: AAG
cactctgccacagcaggtaa

SEQ ID NO: 116739 - DNA, 20 bp, Artificial Sequence
  Description of Artificial Sequence: Synthetic oligonucleotide
  Target: LAMA2; (-) strand; PAM type: NRG; PAM sequence: AGG
acgaagcactctgccacagc

SEQ ID NO: 116740 - DNA, 20 bp, Artificial Sequence
  Description of Artificial Sequence: Synthetic oligonucleotide
  Target: LAMA2; (-) strand; PAM type: NRG; PAM sequence: CAG
aacgaagcactctgccacag

SEQ ID NO: 116741 - DNA, 20 bp, Artificial Sequence
  Description of Artificial Sequence: Synthetic oligonucleotide
  Target: LAMA2; (-) strand; PAM type: NRG; PAM sequence: CAG
tcaaacgaagcactctgcca

SEQ ID NO: 116742 - DNA, 20 bp, Artificial Sequence
  Description of Artificial Sequence: Synthetic oligonucleotide
  Target: LAMA2; (-) strand; PAM type: NRG; PAM sequence: AAG
ctcttgatcttagtcaaacg

SEQ ID NO: 116743 - DNA, 20 bp, Artificial Sequence
  Description of Artificial Sequence: Synthetic oligonucleotide
  Target: LAMA2; (-) strand; PAM type: NRG; PAM sequence: TAG
gttctcttttctcttgatct

SEQ ID NO: 116744 - DNA, 20 bp, Artificial Sequence
  Description of Artificial Sequence: Synthetic oligonucleotide
  Target: LAMA2; (-) strand; PAM type: NRG; PAM sequence: AAG
aatttttacttgatgaggaa

SEQ ID NO: 116745 - DNA, 20 bp, Artificial Sequence
  Description of Artificial Sequence: Synthetic oligonucleotide
  Target: LAMA2; (-) strand; PAM type: NRG; PAM sequence: AGG
caggaaatttttacttgatg

SEQ ID NO: 116746 - DNA, 20 bp, Artificial Sequence
  Description of Artificial Sequence: Synthetic oligonucleotide
  Target: LAMA2; (-) strand; PAM type: NRG; PAM sequence: GAG
acaggaaatttttacttgat

SEQ ID NO: 116747 - DNA, 20 bp, Artificial Sequence
  Description of Artificial Sequence: Synthetic oligonucleotide
  Target: LAMA2; (-) strand; PAM type: NRG; PAM sequence: AGG
gagatgactcatcagcacac

SEQ ID NO: 116748 - DNA, 20 bp, Artificial Sequence
  Description of Artificial Sequence: Synthetic oligonucleotide
  Target: LAMA2; (-) strand; PAM type: NRG; PAM sequence: CAG
agagatgactcatcagcaca

SEQ ID NO: 116749 - DNA, 20 bp, Artificial Sequence
  Description of Artificial Sequence: Synthetic oligonucleotide
  Target: LAMA2; (-) strand; PAM type: NRG; PAM sequence: CAG
gtacctcagagatgactcat

SEQ ID NO: 116750 - DNA, 20 bp, Artificial Sequence
  Description of Artificial Sequence: Synthetic oligonucleotide
  Target: LAMA2; (-) strand; PAM type: NRG; PAM sequence: GAG
ttcccaaagagtgtacctca

SEQ ID NO: 116751 - DNA, 20 bp, Artificial Sequence
  Description of Artificial Sequence: Synthetic oligonucleotide
  Target: LAMA2; (-) strand; PAM type: NRG; PAM sequence: CAG
tcttcccaaagagtgtacct

SEQ ID NO: 116752 - DNA, 20 bp, Artificial Sequence
  Description of Artificial Sequence: Synthetic oligonucleotide
  Target: LAMA2; (-) strand; PAM type: NRG; PAM sequence: GAG
tgcacagtgttcttcccaaa

SEQ ID NO: 116753 - DNA, 20 bp, Artificial Sequence
  Description of Artificial Sequence: Synthetic oligonucleotide
  Target: LAMA2; (-) strand; PAM type: NRG; PAM sequence: AAG
gatgcacagtgttcttccca

SEQ ID NO: 116754 - DNA, 20 bp, Artificial Sequence
  Description of Artificial Sequence: Synthetic oligonucleotide
  Target: LAMA2; (-) strand; PAM type: NRG; PAM sequence: CAG
caaggcaggcttttgatgca

SEQ ID NO: 116755 - DNA, 20 bp, Artificial Sequence
  Description of Artificial Sequence: Synthetic oligonucleotide
  Target: LAMA2; (-) strand; PAM type: NRG; PAM sequence: AGG
gttctcaagcagcccaaggc

SEQ ID NO: 116756 - DNA, 20 bp, Artificial Sequence
  Description of Artificial Sequence: Synthetic oligonucleotide
  Target: LAMA2; (-) strand; PAM type: NRG; PAM sequence: CAG
ggttctcaagcagcccaagg

SEQ ID NO: 116757 - DNA, 20 bp, Artificial Sequence
  Description of Artificial Sequence: Synthetic oligonucleotide
  Target: LAMA2; (-) strand; PAM type: NRG; PAM sequence: AGG
agaggttctcaagcagccca

SEQ ID NO: 116758 - DNA, 20 bp, Artificial Sequence
  Description of Artificial Sequence: Synthetic oligonucleotide
  Target: LAMA2; (-) strand; PAM type: NRG; PAM sequence: AAG
cagaggttctcaagcagccc

SEQ ID NO: 116759 - DNA, 20 bp, Artificial Sequence
  Description of Artificial Sequence: Synthetic oligonucleotide
  Target: LAMA2; (-) strand; PAM type: NRG; PAM sequence: CAG
actcagcagaggttctcaag

SEQ ID NO: 116760 - DNA, 20 bp, Artificial Sequence
  Description of Artificial Sequence: Synthetic oligonucleotide
  Target: LAMA2; (-) strand; PAM type: NRG; PAM sequence: AAG
ctgactcagcagaggttctc

SEQ ID NO: 116761 - DNA, 20 bp, Artificial Sequence
  Description of Artificial Sequence: Synthetic oligonucleotide
  Target: LAMA2; (-) strand; PAM type: NRG; PAM sequence: AGG
agtgagtgctgactcagcag

SEQ ID NO: 116762 - DNA, 20 bp, Artificial Sequence
  Description of Artificial Sequence: Synthetic oligonucleotide
  Target: LAMA2; (-) strand; PAM type: NRG; PAM sequence: GAG
cagtgagtgctgactcagca

SEQ ID NO: 116763 - DNA, 20 bp, Artificial Sequence
  Description of Artificial Sequence: Synthetic oligonucleotide
  Target: LAMA2; (-) strand; PAM type: NRG; PAM sequence: CAG
cccagtgagtgctgactcag

SEQ ID NO: 116764 - DNA, 20 bp, Artificial Sequence
  Description of Artificial Sequence: Synthetic oligonucleotide
  Target: LAMA2; (-) strand; PAM type: NRG; PAM sequence: CAG
tgccccagtgagtgctgact

SEQ ID NO: 116765 - DNA, 20 bp, Artificial Sequence
  Description of Artificial Sequence: Synthetic oligonucleotide
  Target: LAMA2; (-) strand; PAM type: NRG; PAM sequence: GAG
ggctgggccgctgccccagt

SEQ ID NO: 116766 - DNA, 20 bp, Artificial Sequence
  Description of Artificial Sequence: Synthetic oligonucleotide
  Target: LAMA2; (-) strand; PAM type: NRG; PAM sequence: CAG
ctctggctgggccgctgccc

SEQ ID NO: 116767 - DNA, 20 bp, Artificial Sequence
  Description of Artificial Sequence: Synthetic oligonucleotide
  Target: LAMA2; (-) strand; PAM type: NRG; PAM sequence: GGG
tgcacttaatagctctggct

SEQ ID NO: 116768 - DNA, 20 bp, Artificial Sequence
  Description of Artificial Sequence: Synthetic oligonucleotide
  Target: LAMA2; (-) strand; PAM type: NRG; PAM sequence: TGG
ctgcacttaatagctctggc

SEQ ID NO: 116769 - DNA, 20 bp, Artificial Sequence
  Description of Artificial Sequence: Synthetic oligonucleotide
  Target: LAMA2; (-) strand; PAM type: NRG; PAM sequence: TGG
agatctgcacttaatagctc

SEQ ID NO: 116770 - DNA, 20 bp, Artificial Sequence
  Description of Artificial Sequence: Synthetic oligonucleotide
  Target: LAMA2; (-) strand; PAM type: NRG; PAM sequence: TAG
tttttaagatctgcacttaa

SEQ ID NO: 116771 - DNA, 20 bp, Artificial Sequence
  Description of Artificial Sequence: Synthetic oligonucleotide
  Target: LAMA2; (-) strand; PAM type: NRG; PAM sequence: AAG
tcaccaacacatctgttttt

SEQ ID NO: 116772 - DNA, 20 bp, Artificial Sequence
  Description of Artificial Sequence: Synthetic oligonucleotide
  Target: LAMA2; (-) strand; PAM type: NRG; PAM sequence: GAG
tcttagaacatgcagtacat

SEQ ID NO: 116773 - DNA, 20 bp, Artificial Sequence
  Description of Artificial Sequence: Synthetic oligonucleotide
  Target: LAMA2; (-) strand; PAM type: NRG; PAM sequence: CAG
atgacatctcttagaacatg

SEQ ID NO: 116774 - DNA, 20 bp, Artificial Sequence
  Description of Artificial Sequence: Synthetic oligonucleotide
  Target: LAMA2; (-) strand; PAM type: NRG; PAM sequence: TAG
aggctgcttatgacatctct

SEQ ID NO: 116775 - DNA, 20 bp, Artificial Sequence
  Description of Artificial Sequence: Synthetic oligonucleotide
  Target: LAMA2; (-) strand; PAM type: NRG; PAM sequence: AGG
cacaagataggtcgatatac

SEQ ID NO: 116776 - DNA, 20 bp, Artificial Sequence
  Description of Artificial Sequence: Synthetic oligonucleotide
  Target: LAMA2; (-) strand; PAM type: NRG; PAM sequence: CAG
tcacaagataggtcgatata

SEQ ID NO: 116777 - DNA, 20 bp, Artificial Sequence
  Description of Artificial Sequence: Synthetic oligonucleotide
  Target: LAMA2; (-) strand; PAM type: NRG; PAM sequence: AGG
gttctctattttcacaagat

SEQ ID NO: 116778 - DNA, 20 bp, Artificial Sequence
  Description of Artificial Sequence: Synthetic oligonucleotide
  Target: LAMA2; (-) strand; PAM type: NRG; PAM sequence: TAG
tgttctctattttcacaaga

SEQ ID NO: 116779 - DNA, 20 bp, Artificial Sequence
  Description of Artificial Sequence: Synthetic oligonucleotide
  Target: LAMA2; (-) strand; PAM type: NRG; PAM sequence: AAG
tccctgttctctattttcac

SEQ ID NO: 116780 - DNA, 20 bp, Artificial Sequence
  Description of Artificial Sequence: Synthetic oligonucleotide
  Target: LAMA2; (-) strand; PAM type: NRG; PAM sequence: AAG
caaggctccttaaattacca

SEQ ID NO: 116781 - DNA, 20 bp, Artificial Sequence
  Description of Artificial Sequence: Synthetic oligonucleotide
  Target: LAMA2; (-) strand; PAM type: NRG; PAM sequence: AGG
cacagctccataaataatca

SEQ ID NO: 116782 - DNA, 20 bp, Artificial Sequence
  Description of Artificial Sequence: Synthetic oligonucleotide
  Target: LAMA2; (-) strand; PAM type: NRG; PAM sequence: AAG
acacagctccataaataatc

SEQ ID NO: 116783 - DNA, 20 bp, Artificial Sequence
  Description of Artificial Sequence: Synthetic oligonucleotide
  Target: LAMA2; (-) strand; PAM type: NRG; PAM sequence: CAG
catttggctaccataacaca

SEQ ID NO: 116784 - DNA, 20 bp, Artificial Sequence
  Description of Artificial Sequence: Synthetic oligonucleotide
  Target: LAMA2; (-) strand; PAM type: NRG; PAM sequence: TGG
ctggctgagtagatcacatt

SEQ ID NO: 116785 - DNA, 20 bp, Artificial Sequence
  Description of Artificial Sequence: Synthetic oligonucleotide
  Target: LAMA2; (-) strand; PAM type: NRG; PAM sequence: TAG
atacagcagtcctggctgag

SEQ ID NO: 116786 - DNA, 20 bp, Artificial Sequence
  Description of Artificial Sequence: Synthetic oligonucleotide
  Target: LAMA2; (-) strand; PAM type: NRG; PAM sequence: GAG
agcatacagcagtcctggct

SEQ ID NO: 116787 - DNA, 20 bp, Artificial Sequence
  Description of Artificial Sequence: Synthetic oligonucleotide
  Target: LAMA2; (-) strand; PAM type: NRG; PAM sequence: TGG
tgcaaagcatacagcagtcc

SEQ ID NO: 116788 - DNA, 20 bp, Artificial Sequence
  Description of Artificial Sequence: Synthetic oligonucleotide
  Target: LAMA2; (-) strand; PAM type: NRG; PAM sequence: CAG
gggccttgcaaagcatacag

SEQ ID NO: 116789 - DNA, 20 bp, Artificial Sequence
  Description of Artificial Sequence: Synthetic oligonucleotide
  Target: LAMA2; (-) strand; PAM type: NRG; PAM sequence: CAG
actgggccttgcaaagcata

SEQ ID NO: 116790 - DNA, 20 bp, Artificial Sequence
  Description of Artificial Sequence: Synthetic oligonucleotide
  Target: LAMA2; (-) strand; PAM type: NRG; PAM sequence: AAG
attttgcactgggccttgca

SEQ ID NO: 116791 - DNA, 20 bp, Artificial Sequence
  Description of Artificial Sequence: Synthetic oligonucleotide
  Target: LAMA2; (-) strand; PAM type: NRG; PAM sequence: GGG
tgcattttccattttgcact

SEQ ID NO: 116792 - DNA, 20 bp, Artificial Sequence
  Description of Artificial Sequence: Synthetic oligonucleotide
  Target: LAMA2; (-) strand; PAM type: NRG; PAM sequence: TGG
ctgcattttccattttgcac

SEQ ID NO: 116793 - DNA, 20 bp, Artificial Sequence
  Description of Artificial Sequence: Synthetic oligonucleotide
  Target: LAMA2; (-) strand; PAM type: NRG; PAM sequence: GGG
cttaataatttttcagtgag

SEQ ID NO: 116794 - DNA, 20 bp, Artificial Sequence
  Description of Artificial Sequence: Synthetic oligonucleotide
  Target: LAMA2; (-) strand; PAM type: NRG; PAM sequence: GGG
tcttaataatttttcagtga

SEQ ID NO: 116795 - DNA, 20 bp, Artificial Sequence
  Description of Artificial Sequence: Synthetic oligonucleotide
  Target: LAMA2; (-) strand; PAM type: NRG; PAM sequence: AGG
ttcttaataatttttcagtg

SEQ ID NO: 116796 - DNA, 20 bp, Artificial Sequence
  Description of Artificial Sequence: Synthetic oligonucleotide
  Target: LAMA2; (-) strand; PAM type: NRG; PAM sequence: GAG
attcttaataatttttcagt

SEQ ID NO: 116797 - DNA, 20 bp, Artificial Sequence
  Description of Artificial Sequence: Synthetic oligonucleotide
  Target: LAMA2; (-) strand; PAM type: NRG; PAM sequence: CAG
tgaaattcttaataattttt

SEQ ID NO: 116798 - DNA, 20 bp, Artificial Sequence
  Description of Artificial Sequence: Synthetic oligonucleotide
  Target: LAMA2; (-) strand; PAM type: NRG; PAM sequence: TGG
tgcggggctgtgcagtcaca

SEQ ID NO: 116799 - DNA, 20 bp, Artificial Sequence
  Description of Artificial Sequence: Synthetic oligonucleotide
  Target: LAMA2; (-) strand; PAM type: NRG; PAM sequence: CAG
gagctaggtgcggggctgtg

SEQ ID NO: 116800 - DNA, 20 bp, Artificial Sequence
  Description of Artificial Sequence: Synthetic oligonucleotide
  Target: LAMA2; (-) strand; PAM type: NRG; PAM sequence: GGG
gagggggagagctaggtgcg

SEQ ID NO: 116801 - DNA, 20 bp, Artificial Sequence
  Description of Artificial Sequence: Synthetic oligonucleotide
  Target: LAMA2; (-) strand; PAM type: NRG; PAM sequence: GGG
tgagggggagagctaggtgc

SEQ ID NO: 116802 - DNA, 20 bp, Artificial Sequence
  Description of Artificial Sequence: Synthetic oligonucleotide
  Target: LAMA2; (-) strand; PAM type: NRG; PAM sequence: CGG
ctgagggggagagctaggtg

SEQ ID NO: 116803 - DNA, 20 bp, Artificial Sequence
  Description of Artificial Sequence: Synthetic oligonucleotide
  Target: LAMA2; (-) strand; PAM type: NRG; PAM sequence: AGG
gggtgctgagggggagagct

SEQ ID NO: 116804 - DNA, 20 bp, Artificial Sequence
  Description of Artificial Sequence: Synthetic oligonucleotide
  Target: LAMA2; (-) strand; PAM type: NRG; PAM sequence: TAG
agggtgctgagggggagagc

SEQ ID NO: 116805 - DNA, 20 bp, Artificial Sequence
  Description of Artificial Sequence: Synthetic oligonucleotide
  Target: LAMA2; (-) strand; PAM type: NRG; PAM sequence: GAG
tcctagggtgctgaggggga

SEQ ID NO: 116806 - DNA, 20 bp, Artificial Sequence
  Description of Artificial Sequence: Synthetic oligonucleotide
  Target: LAMA2; (-) strand; PAM type: NRG; PAM sequence: GAG
cttcctagggtgctgagggg

SEQ ID NO: 116807 - DNA, 20 bp, Artificial Sequence
  Description of Artificial Sequence: Synthetic oligonucleotide
  Target: LAMA2; (-) strand; PAM type: NRG; PAM sequence: GGG
agcttcctagggtgctgagg

SEQ ID NO: 116808 - DNA, 20 bp, Artificial Sequence
  Description of Artificial Sequence: Synthetic oligonucleotide
  Target: LAMA2; (-) strand; PAM type: NRG; PAM sequence: GGG
cagcttcctagggtgctgag

SEQ ID NO: 116809 - DNA, 20 bp, Artificial Sequence
  Description of Artificial Sequence: Synthetic oligonucleotide
  Target: LAMA2; (-) strand; PAM type: NRG; PAM sequence: GGG
tcagcttcctagggtgctga

SEQ ID NO: 116810 - DNA, 20 bp, Artificial Sequence
  Description of Artificial Sequence: Synthetic oligonucleotide
  Target: LAMA2; (-) strand; PAM type: NRG; PAM sequence: AGG
atcagcttcctagggtgctg

SEQ ID NO: 116811 - DNA, 20 bp, Artificial Sequence
  Description of Artificial Sequence: Synthetic oligonucleotide
  Target: LAMA2; (-) strand; PAM type: NRG; PAM sequence: GAG
gatcagcttcctagggtgct

SEQ ID NO: 116812 - DNA, 20 bp, Artificial Sequence
  Description of Artificial Sequence: Synthetic oligonucleotide
  Target: LAMA2; (-) strand; PAM type: NRG; PAM sequence: GGG
gttcaaagatcagcttccta

SEQ ID NO: 116813 - DNA, 20 bp, Artificial Sequence
  Description of Artificial Sequence: Synthetic oligonucleotide
  Target: LAMA2; (-) strand; PAM type: NRG; PAM sequence: AGG
tgttcaaagatcagcttcct

SEQ ID NO: 116814 - DNA, 20 bp, Artificial Sequence
  Description of Artificial Sequence: Synthetic oligonucleotide
  Target: LAMA2; (-) strand; PAM type: NRG; PAM sequence: TAG
ctgttcaaagatcagcttcc

SEQ ID NO: 116815 - DNA, 20 bp, Artificial Sequence
  Description of Artificial Sequence: Synthetic oligonucleotide
  Target: LAMA2; (-) strand; PAM type: NRG; PAM sequence: CAG
aactgccactgttcaaagat

SEQ ID NO: 116816 - DNA, 20 bp, Artificial Sequence
  Description of Artificial Sequence: Synthetic oligonucleotide
  Target: LAMA2; (-) strand; PAM type: NRG; PAM sequence: AAG
atttcaactgccactgttca

SEQ ID NO: 116817 - DNA, 20 bp, Artificial Sequence
  Description of Artificial Sequence: Synthetic oligonucleotide
  Target: LAMA2; (-) strand; PAM type: NRG; PAM sequence: CAG
ttgccagttgctaggcaacc

SEQ ID NO: 116818 - DNA, 20 bp, Artificial Sequence
  Description of Artificial Sequence: Synthetic oligonucleotide
  Target: LAMA2; (-) strand; PAM type: NRG; PAM sequence: AGG
tcaggcccttgccagttgct

SEQ ID NO: 116819 - DNA, 20 bp, Artificial Sequence
  Description of Artificial Sequence: Synthetic oligonucleotide
  Target: LAMA2; (-) strand; PAM type: NRG; PAM sequence: TAG
ttcaggcccttgccagttgc

SEQ ID NO: 116820 - DNA, 20 bp, Artificial Sequence
  Description of Artificial Sequence: Synthetic oligonucleotide
  Target: LAMA2; (-) strand; PAM type: NRG; PAM sequence: CAG
cagcccattcaggcccttgc

SEQ ID NO: 116821 - DNA, 20 bp, Artificial Sequence
  Description of Artificial Sequence: Synthetic oligonucleotide
  Target: LAMA2; (-) strand; PAM type: NRG; PAM sequence: AGG
acctgcacgtcagcccattc

SEQ ID NO: 116822 - DNA, 20 bp, Artificial Sequence
  Description of Artificial Sequence: Synthetic oligonucleotide
  Target: LAMA2; (-) strand; PAM type: NRG; PAM sequence: CAG
aacctgcacgtcagcccatt

SEQ ID NO: 116823 - DNA, 20 bp, Artificial Sequence
  Description of Artificial Sequence: Synthetic oligonucleotide
  Target: LAMA2; (-) strand; PAM type: NRG; PAM sequence: CAG
gtgtatctaaacctgcacgt

SEQ ID NO: 116824 - DNA, 20 bp, Artificial Sequence
  Description of Artificial Sequence: Synthetic oligonucleotide
  Target: LAMA2; (-) strand; PAM type: NRG; PAM sequence: TGG
atgaatgtagactttcaaga

SEQ ID NO: 116825 - DNA, 20 bp, Artificial Sequence
  Description of Artificial Sequence: Synthetic oligonucleotide
  Target: LAMA2; (-) strand; PAM type: NRG; PAM sequence: AAG
ttccatgaatgtagactttc

SEQ ID NO: 116826 - DNA, 20 bp, Artificial Sequence
  Description of Artificial Sequence: Synthetic oligonucleotide
  Target: LAMA2; (-) strand; PAM type: NRG; PAM sequence: TAG
ctagaaggtttccatgaatg

SEQ ID NO: 116827 - DNA, 20 bp, Artificial Sequence
  Description of Artificial Sequence: Synthetic oligonucleotide
  Target: LAMA2; (-) strand; PAM type: NRG; PAM sequence: AGG
aaaattatcagtccactaga

SEQ ID NO: 116828 - DNA, 20 bp, Artificial Sequence
  Description of Artificial Sequence: Synthetic oligonucleotide
  Target: LAMA2; (-) strand; PAM type: NRG; PAM sequence: AAG
gaaaattatcagtccactag

SEQ ID NO: 116829 - DNA, 20 bp, Artificial Sequence
  Description of Artificial Sequence: Synthetic oligonucleotide
  Target: LAMA2; (-) strand; PAM type: NRG; PAM sequence: TAG
cttgaaaattatcagtccac

SEQ ID NO: 116830 - DNA, 20 bp, Artificial Sequence
  Description of Artificial Sequence: Synthetic oligonucleotide
  Target: LAMA2; (-) strand; PAM type: NRG; PAM sequence: CAG
tactttttcttgaaaattat

SEQ ID NO: 116831 - DNA, 20 bp, Artificial Sequence
  Description of Artificial Sequence: Synthetic oligonucleotide
  Target: LAMA2; (-) strand; PAM type: NRG; PAM sequence: TAG
agccacttgggttataagag

SEQ ID NO: 116832 - DNA, 20 bp, Artificial Sequence
  Description of Artificial Sequence: Synthetic oligonucleotide
  Target: LAMA2; (-) strand; PAM type: NRG; PAM sequence: GAG
gctagccacttgggttataa

SEQ ID NO: 116833 - DNA, 20 bp, Artificial Sequence
  Description of Artificial Sequence: Synthetic oligonucleotide
  Target: LAMA2; (-) strand; PAM type: NRG; PAM sequence: AAG
aagctagccacttgggttat

SEQ ID NO: 116834 - DNA, 20 bp, Artificial Sequence
  Description of Artificial Sequence: Synthetic oligonucleotide
  Target: LAMA2; (-) strand; PAM type: NRG; PAM sequence: GGG
aaatgacaagctagccactt

SEQ ID NO: 116835 - DNA, 20 bp, Artificial Sequence
  Description of Artificial Sequence: Synthetic oligonucleotide
  Target: LAMA2; (-) strand; PAM type: NRG; PAM sequence: TGG
aaaatgacaagctagccact

SEQ ID NO: 116836 - DNA, 20 bp, Artificial Sequence
  Description of Artificial Sequence: Synthetic oligonucleotide
  Target: LAMA2; (-) strand; PAM type: NRG; PAM sequence: TAG
gaacagggaaaatgacaagc

SEQ ID NO: 116837 - DNA, 20 bp, Artificial Sequence
  Description of Artificial Sequence: Synthetic oligonucleotide
  Target: LAMA2; (-) strand; PAM type: NRG; PAM sequence: AAG
gatcgaacagggaaaatgac

SEQ ID NO: 116838 - DNA, 20 bp, Artificial Sequence
  Description of Artificial Sequence: Synthetic oligonucleotide
  Target: LAMA2; (-) strand; PAM type: NRG; PAM sequence: GGG
tattcttagaagatcgaaca

SEQ ID NO: 116839 - DNA, 20 bp, Artificial Sequence
  Description of Artificial Sequence: Synthetic oligonucleotide
  Target: LAMA2; (-) strand; PAM type: NRG; PAM sequence: AGG
ctattcttagaagatcgaac

SEQ ID NO: 116840 - DNA, 20 bp, Artificial Sequence
  Description of Artificial Sequence: Synthetic oligonucleotide
  Target: LAMA2; (-) strand; PAM type: NRG; PAM sequence: CAG
tctattcttagaagatcgaa

SEQ ID NO: 116841 - DNA, 20 bp, Artificial Sequence
  Description of Artificial Sequence: Synthetic oligonucleotide
  Target: LAMA2; (-) strand; PAM type: NRG; PAM sequence: AAG
atgaagagctctattcttag

SEQ ID NO: 116842 - DNA, 20 bp, Artificial Sequence
  Description of Artificial Sequence: Synthetic oligonucleotide
  Target: LAMA2; (-) strand; PAM type: NRG; PAM sequence: TAG
catatgaagagctctattct

SEQ ID NO: 116843 - DNA, 20 bp, Artificial Sequence
  Description of Artificial Sequence: Synthetic oligonucleotide
  Target: LAMA2; (-) strand; PAM type: NRG; PAM sequence: GAG
atttttccttcacatatgaa

SEQ ID NO: 116844 - DNA, 20 bp, Artificial Sequence
  Description of Artificial Sequence: Synthetic oligonucleotide
  Target: LAMA2; (-) strand; PAM type: NRG; PAM sequence: AAG
tcatttttccttcacatatg

SEQ ID NO: 116845 - DNA, 20 bp, Artificial Sequence
  Description of Artificial Sequence: Synthetic oligonucleotide
  Target: LAMA2; (-) strand; PAM type: NRG; PAM sequence: TGG
atgtatatttctgagaaaac

SEQ ID NO: 116846 - DNA, 20 bp, Artificial Sequence
  Description of Artificial Sequence: Synthetic oligonucleotide
  Target: LAMA2; (-) strand; PAM type: NRG; PAM sequence: GAG
aaaaatttatgtatatttct

SEQ ID NO: 116847 - DNA, 20 bp, Artificial Sequence
  Description of Artificial Sequence: Synthetic oligonucleotide
  Target: LAMA2; (-) strand; PAM type: NRG; PAM sequence: TAG
catatttattgattaactca

SEQ ID NO: 116848 - DNA, 20 bp, Artificial Sequence
  Description of Artificial Sequence: Synthetic oligonucleotide
  Target: LAMA2; (-) strand; PAM type: NRG; PAM sequence: CAG
aatggctaaaggaatgtgct

SEQ ID NO: 116849 - DNA, 20 bp, Artificial Sequence
  Description of Artificial Sequence: Synthetic oligonucleotide
  Target: LAMA2; (-) strand; PAM type: NRG; PAM sequence: AGG
tcacaccctggaatggctaa

SEQ ID NO: 116850 - DNA, 20 bp, Artificial Sequence
  Description of Artificial Sequence: Synthetic oligonucleotide
  Target: LAMA2; (-) strand; PAM type: NRG; PAM sequence: AAG
atcacaccctggaatggcta

SEQ ID NO: 116851 - DNA, 20 bp, Artificial Sequence
  Description of Artificial Sequence: Synthetic oligonucleotide
  Target: LAMA2; (-) strand; PAM type: NRG; PAM sequence: TGG
tctcatatcacaccctggaa

SEQ ID NO: 116852 - DNA, 20 bp, Artificial Sequence
  Description of Artificial Sequence: Synthetic oligonucleotide
  Target: LAMA2; (-) strand; PAM type: NRG; PAM sequence: TGG
agttttctcatatcacaccc

SEQ ID NO: 116853 - DNA, 20 bp, Artificial Sequence
  Description of Artificial Sequence: Synthetic oligonucleotide
  Target: LAMA2; (-) strand; PAM type: NRG; PAM sequence: CAG
agtgctcagtgcgtgtgaat

SEQ ID NO: 116854 - DNA, 20 bp, Artificial Sequence
  Description of Artificial Sequence: Synthetic oligonucleotide
  Target: LAMA2; (-) strand; PAM type: NRG; PAM sequence: CAG
agtacttattattgagtgct

SEQ ID NO: 116855 - DNA, 20 bp, Artificial Sequence
  Description of Artificial Sequence: Synthetic oligonucleotide
  Target: LAMA2; (-) strand; PAM type: NRG; PAM sequence: GAG
catagtaagtacttattatt

SEQ ID NO: 116856 - DNA, 20 bp, Artificial Sequence
  Description of Artificial Sequence: Synthetic oligonucleotide
  Target: LAMA2; (-) strand; PAM type: NRG; PAM sequence: AAG
tctgtagtctactgcatagt

SEQ ID NO: 116857 - DNA, 20 bp, Artificial Sequence
  Description of Artificial Sequence: Synthetic oligonucleotide
  Target: LAMA2; (-) strand; PAM type: NRG; PAM sequence: TAG
catctctgtagtctactgca

SEQ ID NO: 116858 - DNA, 20 bp, Artificial Sequence
  Description of Artificial Sequence: Synthetic oligonucleotide
  Target: LAMA2; (-) strand; PAM type: NRG; PAM sequence: TAG
aactacattattcatctctg

SEQ ID NO: 116859 - DNA, 20 bp, Artificial Sequence
  Description of Artificial Sequence: Synthetic oligonucleotide
  Target: LAMA2; (-) strand; PAM type: NRG; PAM sequence: AAG
acatattagcgtaattcttt

SEQ ID NO: 116860 - DNA, 20 bp, Artificial Sequence
  Description of Artificial Sequence: Synthetic oligonucleotide
  Target: LAMA2; (-) strand; PAM type: NRG; PAM sequence: TAG
tctaattgtttcttacatat

SEQ ID NO: 116861 - DNA, 20 bp, Artificial Sequence
  Description of Artificial Sequence: Synthetic oligonucleotide
  Target: LAMA2; (-) strand; PAM type: NRG; PAM sequence: AGG
ttatggactgttctttaaaa

SEQ ID NO: 116862 - DNA, 20 bp, Artificial Sequence
  Description of Artificial Sequence: Synthetic oligonucleotide
  Target: LAMA2; (-) strand; PAM type: NRG; PAM sequence: AAG
attatggactgttctttaaa

SEQ ID NO: 116863 - DNA, 20 bp, Artificial Sequence
  Description of Artificial Sequence: Synthetic oligonucleotide
  Target: LAMA2; (-) strand; PAM type: NRG; PAM sequence: TGG
gagagaaaaacaggagatta

SEQ ID NO: 116864 - DNA, 20 bp, Artificial Sequence
  Description of Artificial Sequence: Synthetic oligonucleotide
  Target: LAMA2; (-) strand; PAM type: NRG; PAM sequence: GAG
tacccaggagagaaaaacag

SEQ ID NO: 116865 - DNA, 20 bp, Artificial Sequence
  Description of Artificial Sequence: Synthetic oligonucleotide
  Target: LAMA2; (-) strand; PAM type: NRG; PAM sequence: AGG
aatacccaggagagaaaaac

SEQ ID NO: 116866 - DNA, 20 bp, Artificial Sequence
  Description of Artificial Sequence: Synthetic oligonucleotide
  Target: LAMA2; (-) strand; PAM type: NRG; PAM sequence: CAG
aaatacccaggagagaaaaa

SEQ ID NO: 116867 - DNA, 20 bp, Artificial Sequence
  Description of Artificial Sequence: Synthetic oligonucleotide
  Target: LAMA2; (-) strand; PAM type: NRG; PAM sequence: GAG
accctgtaaaatacccagga

SEQ ID NO: 116868 - DNA, 20 bp, Artificial Sequence
  Description of Artificial Sequence: Synthetic oligonucleotide
  Target: LAMA2; (-) strand; PAM type: NRG; PAM sequence: GAG
ggaccctgtaaaatacccag

SEQ ID NO: 116869 - DNA, 20 bp, Artificial Sequence
  Description of Artificial Sequence: Synthetic oligonucleotide
  Target: LAMA2; (-) strand; PAM type: NRG; PAM sequence: AGG
aaggaccctgtaaaataccc

SEQ ID NO: 116870 - DNA, 20 bp, Artificial Sequence
  Description of Artificial Sequence: Synthetic oligonucleotide
  Target: LAMA2; (-) strand; PAM type: NRG; PAM sequence: CAG
caaggaccctgtaaaatacc

SEQ ID NO: 116871 - DNA, 20 bp, Artificial Sequence
  Description of Artificial Sequence: Synthetic oligonucleotide
  Target: LAMA2; (-) strand; PAM type: NRG; PAM sequence: AGG
ggttctgattctgcagcaca

SEQ ID NO: 116872 - DNA, 20 bp, Artificial Sequence
  Description of Artificial Sequence: Synthetic oligonucleotide
  Target: LAMA2; (-) strand; PAM type: NRG; PAM sequence: AAG
tggttctgattctgcagcac

SEQ ID NO: 116873 - DNA, 20 bp, Artificial Sequence
  Description of Artificial Sequence: Synthetic oligonucleotide
  Target: LAMA2; (-) strand; PAM type: NRG; PAM sequence: CAG
aagagctggttctgattctg

SEQ ID NO: 116874 - DNA, 20 bp, Artificial Sequence
  Description of Artificial Sequence: Synthetic oligonucleotide
  Target: LAMA2; (-) strand; PAM type: NRG; PAM sequence: TGG
ttgctccctatcaaaagagc

SEQ ID NO: 116875 - DNA, 20 bp, Artificial Sequence
  Description of Artificial Sequence: Synthetic oligonucleotide
  Target: LAMA2; (-) strand; PAM type: NRG; PAM sequence: GAG
ctgcttgctccctatcaaaa

SEQ ID NO: 116876 - DNA, 20 bp, Artificial Sequence
  Description of Artificial Sequence: Synthetic oligonucleotide
  Target: LAMA2; (-) strand; PAM type: NRG; PAM sequence: AAG
aactgcttgctccctatcaa

SEQ ID NO: 116877 - DNA, 20 bp, Artificial Sequence
  Description of Artificial Sequence: Synthetic oligonucleotide
  Target: LAMA2; (-) strand; PAM type: NRG; PAM sequence: AAG
gcaatgtgactgtttcttga

SEQ ID NO: 116878 - DNA, 20 bp, Artificial Sequence
  Description of Artificial Sequence: Synthetic oligonucleotide
  Target: LAMA2; (-) strand; PAM type: NRG; PAM sequence: TGG
tacataccggtttttaactt

SEQ ID NO: 116879 - DNA, 20 bp, Artificial Sequence
  Description of Artificial Sequence: Synthetic oligonucleotide
  Target: LAMA2; (-) strand; PAM type: NRG; PAM sequence: CGG
tgtctcaggatgatacatac

SEQ ID NO: 116880 - DNA, 20 bp, Artificial Sequence
  Description of Artificial Sequence: Synthetic oligonucleotide
  Target: LAMA2; (-) strand; PAM type: NRG; PAM sequence: AGG
cggttctttcccagtgtctc

SEQ ID NO: 116881 - DNA, 20 bp, Artificial Sequence
  Description of Artificial Sequence: Synthetic oligonucleotide
  Target: LAMA2; (-) strand; PAM type: NRG; PAM sequence: CAG
tcggttctttcccagtgtct

SEQ ID NO: 116882 - DNA, 20 bp, Artificial Sequence
  Description of Artificial Sequence: Synthetic oligonucleotide
  Target: LAMA2; (-) strand; PAM type: NRG; PAM sequence: CAG
ttcatttatcggttctttcc

SEQ ID NO: 116883 - DNA, 20 bp, Artificial Sequence
  Description of Artificial Sequence: Synthetic oligonucleotide
  Target: LAMA2; (-) strand; PAM type: NRG; PAM sequence: CGG
atactcagttcttcatttat

SEQ ID NO: 116884 - DNA, 20 bp, Artificial Sequence
  Description of Artificial Sequence: Synthetic oligonucleotide
  Target: LAMA2; (-) strand; PAM type: NRG; PAM sequence: CAG
cttgattaaacacaaatact

SEQ ID NO: 116885 - DNA, 20 bp, Artificial Sequence
  Description of Artificial Sequence: Synthetic oligonucleotide
  Target: LAMA2; (-) strand; PAM type: NRG; PAM sequence: TAG
tcattaattaataagtgtag

SEQ ID NO: 116886 - DNA, 20 bp, Artificial Sequence
  Description of Artificial Sequence: Synthetic oligonucleotide
  Target: LAMA2; (-) strand; PAM type: NRG; PAM sequence: TAG
acttcattaattaataagtg

SEQ ID NO: 116887 - DNA, 20 bp, Artificial Sequence
  Description of Artificial Sequence: Synthetic oligonucleotide
  Target: LAMA2; (-) strand; PAM type: NRG; PAM sequence: AAG
agctaacttcattaattaat

SEQ ID NO: 116888 - DNA, 20 bp, Artificial Sequence
  Description of Artificial Sequence: Synthetic oligonucleotide
  Target: LAMA2; (-) strand; PAM type: NRG; PAM sequence: AAG
gtactcagtgaataaaagaa

SEQ ID NO: 116889 - DNA, 20 bp, Artificial Sequence
  Description of Artificial Sequence: Synthetic oligonucleotide
  Target: LAMA2; (-) strand; PAM type: NRG; PAM sequence: AAG
ctattgtactcagtgaataa

SEQ ID NO: 116890 - DNA, 20 bp, Artificial Sequence
  Description of Artificial Sequence: Synthetic oligonucleotide
  Target: LAMA2; (-) strand; PAM type: NRG; PAM sequence: CAG
attctattctctattgtact

SEQ ID NO: 116891 - DNA, 20 bp, Artificial Sequence
  Description of Artificial Sequence: Synthetic oligonucleotide
  Target: LAMA2; (-) strand; PAM type: NRG; PAM sequence: CAG
taaattgggctcctcaggct

SEQ ID NO: 116892 - DNA, 20 bp, Artificial Sequence
  Description of Artificial Sequence: Synthetic oligonucleotide
  Target: LAMA2; (-) strand; PAM type: NRG; PAM sequence: AGG
tttcctaaattgggctcctc

SEQ ID NO: 116893 - DNA, 20 bp, Artificial Sequence
  Description of Artificial Sequence: Synthetic oligonucleotide
  Target: LAMA2; (-) strand; PAM type: NRG; PAM sequence: CAG
atttcctaaattgggctcct

SEQ ID NO: 116894 - DNA, 20 bp, Artificial Sequence
  Description of Artificial Sequence: Synthetic oligonucleotide
  Target: LAMA2; (-) strand; PAM type: NRG; PAM sequence: GGG
ggctactgatttcctaaatt

SEQ ID NO: 116895 - DNA, 20 bp, Artificial Sequence
  Description of Artificial Sequence: Synthetic oligonucleotide
  Target: LAMA2; (-) strand; PAM type: NRG; PAM sequence: TGG
aggctactgatttcctaaat

SEQ ID NO: 116896 - DNA, 20 bp, Artificial Sequence
  Description of Artificial Sequence: Synthetic oligonucleotide
  Target: LAMA2; (-) strand; PAM type: NRG; PAM sequence: AGG
tcagagatgaggactttatc

SEQ ID NO: 116897 - DNA, 20 bp, Artificial Sequence
  Description of Artificial Sequence: Synthetic oligonucleotide
  Target: LAMA2; (-) strand; PAM type: NRG; PAM sequence: CAG
ctcagagatgaggactttat

SEQ ID NO: 116898 - DNA, 20 bp, Artificial Sequence
  Description of Artificial Sequence: Synthetic oligonucleotide
  Target: LAMA2; (-) strand; PAM type: NRG; PAM sequence: AGG
gtaaaaccttctcagagatg

SEQ ID NO: 116899 - DNA, 20 bp, Artificial Sequence
  Description of Artificial Sequence: Synthetic oligonucleotide
  Target: LAMA2; (-) strand; PAM type: NRG; PAM sequence: GAG
agtaaaaccttctcagagat

SEQ ID NO: 116900 - DNA, 20 bp, Artificial Sequence
  Description of Artificial Sequence: Synthetic oligonucleotide
  Target: LAMA2; (-) strand; PAM type: NRG; PAM sequence: GAG
aggagagtaaaaccttctca

SEQ ID NO: 116901 - DNA, 20 bp, Artificial Sequence
  Description of Artificial Sequence: Synthetic oligonucleotide
  Target: LAMA2; (-) strand; PAM type: NRG; PAM sequence: CAG
aaaggagagtaaaaccttct

SEQ ID NO: 116902 - DNA, 20 bp, Artificial Sequence
  Description of Artificial Sequence: Synthetic oligonucleotide
  Target: LAMA2; (-) strand; PAM type: NRG; PAM sequence: GAG
ggctgcattttcataaagga

SEQ ID NO: 116903 - DNA, 20 bp, Artificial Sequence
  Description of Artificial Sequence: Synthetic oligonucleotide
  Target: LAMA2; (-) strand; PAM type: NRG; PAM sequence: GAG
gtggctgcattttcataaag

SEQ ID NO: 116904 - DNA, 20 bp, Artificial Sequence
  Description of Artificial Sequence: Synthetic oligonucleotide
  Target: LAMA2; (-) strand; PAM type: NRG; PAM sequence: AGG
tcgtggctgcattttcataa

SEQ ID NO: 116905 - DNA, 20 bp, Artificial Sequence
  Description of Artificial Sequence: Synthetic oligonucleotide
  Target: LAMA2; (-) strand; PAM type: NRG; PAM sequence: AAG
atcgtggctgcattttcata

SEQ ID NO: 116906 - DNA, 20 bp, Artificial Sequence
  Description of Artificial Sequence: Synthetic oligonucleotide
  Target: LAMA2; (-) strand; PAM type: NRG; PAM sequence: TGG
aatagagcggtatcagatcg

SEQ ID NO: 116907 - DNA, 20 bp, Artificial Sequence
  Description of Artificial Sequence: Synthetic oligonucleotide
  Target: LAMA2; (-) strand; PAM type: NRG; PAM sequence: CAG
atgctaaaatagagcggtat

SEQ ID NO: 116908 - DNA, 20 bp, Artificial Sequence
  Description of Artificial Sequence: Synthetic oligonucleotide
  Target: LAMA2; (-) strand; PAM type: NRG; PAM sequence: CGG
attctcatgctaaaatagag

SEQ ID NO: 116909 - DNA, 20 bp, Artificial Sequence
  Description of Artificial Sequence: Synthetic oligonucleotide
  Target: LAMA2; (-) strand; PAM type: NRG; PAM sequence: GAG
agcattctcatgctaaaata

SEQ ID NO: 116910 - DNA, 20 bp, Artificial Sequence
  Description of Artificial Sequence: Synthetic oligonucleotide
  Target: LAMA2; (-) strand; PAM type: NRG; PAM sequence: TAG
acagcattctcatgctaaaa

SEQ ID NO: 116911 - DNA, 20 bp, Artificial Sequence
  Description of Artificial Sequence: Synthetic oligonucleotide
  Target: LAMA2; (-) strand; PAM type: NRG; PAM sequence: CAG
aaagtcaaacagaaaaataa

SEQ ID NO: 116912 - DNA, 20 bp, Artificial Sequence
  Description of Artificial Sequence: Synthetic oligonucleotide
  Target: LAMA2; (-) strand; PAM type: NRG; PAM sequence: CAG
caaaagcatgcaaagtcaaa

SEQ ID NO: 116913 - DNA, 20 bp, Artificial Sequence
  Description of Artificial Sequence: Synthetic oligonucleotide
  Target: LAMA2; (-) strand; PAM type: NRG; PAM sequence: AAG
ctgtgaaacaaaagcatgca

SEQ ID NO: 116914 - DNA, 20 bp, Artificial Sequence
  Description of Artificial Sequence: Synthetic oligonucleotide
  Target: LAMA2; (-) strand; PAM type: NRG; PAM sequence: AAG
attgtgagactgtgaaacaa

SEQ ID NO: 116915 - DNA, 20 bp, Artificial Sequence
  Description of Artificial Sequence: Synthetic oligonucleotide
  Target: LAMA2; (-) strand; PAM type: NRG; PAM sequence: GAG
cttacttccaactcaattgt

SEQ ID NO: 116916 - DNA, 20 bp, Artificial Sequence
  Description of Artificial Sequence: Synthetic oligonucleotide
  Target: LAMA2; (-) strand; PAM type: NRG; PAM sequence: CGG
aagcaagccggattcagctt

SEQ ID NO: 116917 - DNA, 20 bp, Artificial Sequence
  Description of Artificial Sequence: Synthetic oligonucleotide
  Target: LAMA2; (-) strand; PAM type: NRG; PAM sequence: CAG
gtaaaaaagcaagccggatt

SEQ ID NO: 116918 - DNA, 20 bp, Artificial Sequence
  Description of Artificial Sequence: Synthetic oligonucleotide
  Target: LAMA2; (-) strand; PAM type: NRG; PAM sequence: CGG
agccatgtaaaaaagcaagc

SEQ ID NO: 116919 - DNA, 20 bp, Artificial Sequence
  Description of Artificial Sequence: Synthetic oligonucleotide
  Target: LAMA2; (-) strand; PAM type: NRG; PAM sequence: AAG
tgcgagccatgtaaaaaagc

SEQ ID NO: 116920 - DNA, 20 bp, Artificial Sequence
  Description of Artificial Sequence: Synthetic oligonucleotide
  Target: LAMA2; (-) strand; PAM type: NRG; PAM sequence: AAG
ttgatgcgagccatgtaaaa

SEQ ID NO: 116921 - DNA, 20 bp, Artificial Sequence
  Description of Artificial Sequence: Synthetic oligonucleotide
  Target: LAMA2; (-) strand; PAM type: NRG; PAM sequence: GAG
aaaatcagcatgattgatgc

SEQ ID NO: 116922 - DNA, 20 bp, Artificial Sequence
  Description of Artificial Sequence: Synthetic oligonucleotide
  Target: LAMA2; (-) strand; PAM type: NRG; PAM sequence: CAG
cagctgaactgttgcaaaat

SEQ ID NO: 116923 - DNA, 20 bp, Artificial Sequence
  Description of Artificial Sequence: Synthetic oligonucleotide
  Target: LAMA2; (-) strand; PAM type: NRG; PAM sequence: CAG
aagtagggcaatccatttct

SEQ ID NO: 116924 - DNA, 20 bp, Artificial Sequence
  Description of Artificial Sequence: Synthetic oligonucleotide
  Target: LAMA2; (-) strand; PAM type: NRG; PAM sequence: GGG
cccaagtcatagctgaagta

SEQ ID NO: 116925 - DNA, 20 bp, Artificial Sequence
  Description of Artificial Sequence: Synthetic oligonucleotide
  Target: LAMA2; (-) strand; PAM type: NRG; PAM sequence: AGG
ccccaagtcatagctgaagt

SEQ ID NO: 116926 - DNA, 20 bp, Artificial Sequence
  Description of Artificial Sequence: Synthetic oligonucleotide
  Target: LAMA2; (-) strand; PAM type: NRG; PAM sequence: TAG
tccccaagtcatagctgaag

SEQ ID NO: 116927 - DNA, 20 bp, Artificial Sequence
  Description of Artificial Sequence: Synthetic oligonucleotide
  Target: LAMA2; (-) strand; PAM type: NRG; PAM sequence: AAG
cactccccaagtcatagctg

SEQ ID NO: 116928 - DNA, 20 bp, Artificial Sequence
  Description of Artificial Sequence: Synthetic oligonucleotide
  Target: LAMA2; (-) strand; PAM type: NRG; PAM sequence: TAG
tgtccccactccccaagtca

SEQ ID NO: 116929 - DNA, 20 bp, Artificial Sequence
  Description of Artificial Sequence: Synthetic oligonucleotide
  Target: LAMA2; (-) strand; PAM type: NRG; PAM sequence: AAG
tgtgggtgtccccactcccc

SEQ ID NO: 116930 - DNA, 20 bp, Artificial Sequence
  Description of Artificial Sequence: Synthetic oligonucleotide
  Target: LAMA2; (-) strand; PAM type: NRG; PAM sequence: GGG
tttggtggggatcatggtgt

SEQ ID NO: 116931 - DNA, 20 bp, Artificial Sequence
  Description of Artificial Sequence: Synthetic oligonucleotide
  Target: LAMA2; (-) strand; PAM type: NRG; PAM sequence: TGG
ttttggtggggatcatggtg

SEQ ID NO: 116932 - DNA, 20 bp, Artificial Sequence
  Description of Artificial Sequence: Synthetic oligonucleotide
  Target: LAMA2; (-) strand; PAM type: NRG; PAM sequence: TGG
attgattttggtggggatca

SEQ ID NO: 116933 - DNA, 20 bp, Artificial Sequence
  Description of Artificial Sequence: Synthetic oligonucleotide
  Target: LAMA2; (-) strand; PAM type: NRG; PAM sequence: GGG
ggccatcattgattttggtg

SEQ ID NO: 116934 - DNA, 20 bp, Artificial Sequence
  Description of Artificial Sequence: Synthetic oligonucleotide
  Target: LAMA2; (-) strand; PAM type: NRG; PAM sequence: GGG
tggccatcattgattttggt

SEQ ID NO: 116935 - DNA, 20 bp, Artificial Sequence
  Description of Artificial Sequence: Synthetic oligonucleotide
  Target: LAMA2; (-) strand; PAM type: NRG; PAM sequence: TGG
ctggccatcattgattttgg

SEQ ID NO: 116936 - DNA, 20 bp, Artificial Sequence
  Description of Artificial Sequence: Synthetic oligonucleotide
  Target: LAMA2; (-) strand; PAM type: NRG; PAM sequence: TGG
ccactggccatcattgattt

SEQ ID NO: 116937 - DNA, 20 bp, Artificial Sequence
  Description of Artificial Sequence: Synthetic oligonucleotide
  Target: LAMA2; (-) strand; PAM type: NRG; PAM sequence: TGG
ggactattaccttgtgccac

SEQ ID NO: 116938 - DNA, 20 bp, Artificial Sequence
  Description of Artificial Sequence: Synthetic oligonucleotide
  Target: LAMA2; (-) strand; PAM type: NRG; PAM sequence: GGG
agggtactgccaatatccag

SEQ ID NO: 116939 - DNA, 20 bp, Artificial Sequence
  Description of Artificial Sequence: Synthetic oligonucleotide
  Target: LAMA2; (-) strand; PAM type: NRG; PAM sequence: GGG
tagggtactgccaatatcca

SEQ ID NO: 116940 - DNA, 20 bp, Artificial Sequence
  Description of Artificial Sequence: Synthetic oligonucleotide
  Target: LAMA2; (-) strand; PAM type: NRG; PAM sequence: AGG
ttagggtactgccaatatcc

SEQ ID NO: 116941 - DNA, 20 bp, Artificial Sequence
  Description of Artificial Sequence: Synthetic oligonucleotide
  Target: LAMA2; (-) strand; PAM type: NRG; PAM sequence: CAG
cttagggtactgccaatatc

SEQ ID NO: 116942 - DNA, 20 bp, Artificial Sequence
  Description of Artificial Sequence: Synthetic oligonucleotide
  Target: LAMA2; (-) strand; PAM type: NRG; PAM sequence: GGG
gccactcagtaattccctta

SEQ ID NO: 116943 - DNA, 20 bp, Artificial Sequence
  Description of Artificial Sequence: Synthetic oligonucleotide
  Target: LAMA2; (-) strand; PAM type: NRG; PAM sequence: AGG
tgccactcagtaattccctt

SEQ ID NO: 116944 - DNA, 20 bp, Artificial Sequence
  Description of Artificial Sequence: Synthetic oligonucleotide
  Target: LAMA2; (-) strand; PAM type: NRG; PAM sequence: TAG
ctgccactcagtaattccct

SEQ ID NO: 116945 - DNA, 20 bp, Artificial Sequence
  Description of Artificial Sequence: Synthetic oligonucleotide
  Target: LAMA2; (-) strand; PAM type: NRG; PAM sequence: CAG
gaatgctgatggctgccact

SEQ ID NO: 116946 - DNA, 20 bp, Artificial Sequence
  Description of Artificial Sequence: Synthetic oligonucleotide
  Target: LAMA2; (-) strand; PAM type: NRG; PAM sequence: TGG
tggcaccaggagaatgctga

SEQ ID NO: 116947 - DNA, 20 bp, Artificial Sequence
  Description of Artificial Sequence: Synthetic oligonucleotide
  Target: LAMA2; (-) strand; PAM type: NRG; PAM sequence: GAG
gcaaaatatactggcaccag

SEQ ID NO: 116948 - DNA, 20 bp, Artificial Sequence
  Description of Artificial Sequence: Synthetic oligonucleotide
  Target: LAMA2; (-) strand; PAM type: NRG; PAM sequence: AGG
tggcaaaatatactggcacc

SEQ ID NO: 116949 - DNA, 20 bp, Artificial Sequence
  Description of Artificial Sequence: Synthetic oligonucleotide
  Target: LAMA2; (-) strand; PAM type: NRG; PAM sequence: CAG
ctggcaaaatatactggcac

SEQ ID NO: 116950 - DNA, 20 bp, Artificial Sequence
  Description of Artificial Sequence: Synthetic oligonucleotide
  Target: LAMA2; (-) strand; PAM type: NRG; PAM sequence: TGG
tctgccctggcaaaatatac

SEQ ID NO: 116951 - DNA, 20 bp, Artificial Sequence
  Description of Artificial Sequence: Synthetic oligonucleotide
  Target: LAMA2; (-) strand; PAM type: NRG; PAM sequence: TGG
gccagagtcagtgtctgccc

SEQ ID NO: 116952 - DNA, 20 bp, Artificial Sequence
  Description of Artificial Sequence: Synthetic oligonucleotide
  Target: LAMA2; (-) strand; PAM type: NRG; PAM sequence: CAG
tttttagcttctgccagagt

SEQ ID NO: 116953 - DNA, 20 bp, Artificial Sequence
  Description of Artificial Sequence: Synthetic oligonucleotide
  Target: LAMA2; (-) strand; PAM type: NRG; PAM sequence: GAG
tttatttttagcttctgcca

SEQ ID NO: 116954 - DNA, 20 bp, Artificial Sequence
  Description of Artificial Sequence: Synthetic oligonucleotide
  Target: LAMA2; (-) strand; PAM type: NRG; PAM sequence: CAG
attttatttttagcttctgc

SEQ ID NO: 116955 - DNA, 20 bp, Artificial Sequence
  Description of Artificial Sequence: Synthetic oligonucleotide
  Target: LAMA2; (-) strand; PAM type: NRG; PAM sequence: TAG
tatggcacttattttatttt

SEQ ID NO: 116956 - DNA, 20 bp, Artificial Sequence
  Description of Artificial Sequence: Synthetic oligonucleotide
  Target: LAMA2; (-) strand; PAM type: NRG; PAM sequence: TGG
aagattgtggtagttgtata

SEQ ID NO: 116957 - DNA, 20 bp, Artificial Sequence
  Description of Artificial Sequence: Synthetic oligonucleotide
  Target: LAMA2; (-) strand; PAM type: NRG; PAM sequence: TAG
cacattttccaagattgtgg

SEQ ID NO: 116958 - DNA, 20 bp, Artificial Sequence
  Description of Artificial Sequence: Synthetic oligonucleotide
  Target: LAMA2; (-) strand; PAM type: NRG; PAM sequence: TGG
gagcacattttccaagattg

SEQ ID NO: 116959 - DNA, 20 bp, Artificial Sequence
  Description of Artificial Sequence: Synthetic oligonucleotide
  Target: LAMA2; (-) strand; PAM type: NRG; PAM sequence: AAG
caggtctgagcacattttcc

SEQ ID NO: 116960 - DNA, 20 bp, Artificial Sequence
  Description of Artificial Sequence: Synthetic oligonucleotide
  Target: LAMA2; (-) strand; PAM type: NRG; PAM sequence: GAG
atgcaaacctacacaggtct

SEQ ID NO: 116961 - DNA, 20 bp, Artificial Sequence
  Description of Artificial Sequence: Synthetic oligonucleotide
  Target: LAMA2; (-) strand; PAM type: NRG; PAM sequence: AGG
ggtcaaatgcaaacctacac

SEQ ID NO: 116962 - DNA, 20 bp, Artificial Sequence
  Description of Artificial Sequence: Synthetic oligonucleotide
  Target: LAMA2; (-) strand; PAM type: NRG; PAM sequence: CAG
tggtcaaatgcaaacctaca

SEQ ID NO: 116963 - DNA, 20 bp, Artificial Sequence
  Description of Artificial Sequence: Synthetic oligonucleotide
  Target: LAMA2; (-) strand; PAM type: NRG; PAM sequence: TGG
accatgatgaggcatgccag

SEQ ID NO: 116964 - DNA, 20 bp, Artificial Sequence
  Description of Artificial Sequence: Synthetic oligonucleotide
  Target: LAMA2; (-) strand; PAM type: NRG; PAM sequence: CAG
ggaaccatgatgaggcatgc

SEQ ID NO: 116965 - DNA, 20 bp, Artificial Sequence
  Description of Artificial Sequence: Synthetic oligonucleotide
  Target: LAMA2; (-) strand; PAM type: NRG; PAM sequence: AGG
gcagtgatggaaccatgatg

SEQ ID NO: 116966 - DNA, 20 bp, Artificial Sequence
  Description of Artificial Sequence: Synthetic oligonucleotide
  Target: LAMA2; (-) strand; PAM type: NRG; PAM sequence: GAG
agcagtgatggaaccatgat

SEQ ID NO: 116967 - DNA, 20 bp, Artificial Sequence
  Description of Artificial Sequence: Synthetic oligonucleotide
  Target: LAMA2; (-) strand; PAM type: NRG; PAM sequence: TGG
ccacagccatatagcagtga

SEQ ID NO: 116968 - DNA, 20 bp, Artificial Sequence
  Description of Artificial Sequence: Synthetic oligonucleotide
  Target: LAMA2; (-) strand; PAM type: NRG; PAM sequence: CAG
tgaaaaccacagccatatag

SEQ ID NO: 116969 - DNA, 20 bp, Artificial Sequence
  Description of Artificial Sequence: Synthetic oligonucleotide
  Target: LAMA2; (-) strand; PAM type: NRG; PAM sequence: TAG
gtttgaaaaccacagccata

SEQ ID NO: 116970 - DNA, 20 bp, Artificial Sequence
  Description of Artificial Sequence: Synthetic oligonucleotide
  Target: LAMA2; (-) strand; PAM type: NRG; PAM sequence: CAG
gggtagatgtttgaaaacca

SEQ ID NO: 116971 - DNA, 20 bp, Artificial Sequence
  Description of Artificial Sequence: Synthetic oligonucleotide
  Target: LAMA2; (-) strand; PAM type: NRG; PAM sequence: TAG
acctggcctcagtttatggg

SEQ ID NO: 116972 - DNA, 20 bp, Artificial Sequence
  Description of Artificial Sequence: Synthetic oligonucleotide
  Target: LAMA2; (-) strand; PAM type: NRG; PAM sequence: GGG
gccacctggcctcagtttat

SEQ ID NO: 116973 - DNA, 20 bp, Artificial Sequence
  Description of Artificial Sequence: Synthetic oligonucleotide
  Target: LAMA2; (-) strand; PAM type: NRG; PAM sequence: TGG
agccacctggcctcagttta

SEQ ID NO: 116974 - DNA, 20 bp, Artificial Sequence
  Description of Artificial Sequence: Synthetic oligonucleotide
  Target: LAMA2; (-) strand; PAM type: NRG; PAM sequence: CAG
tgtcttcagccacctggcct

SEQ ID NO: 116975 - DNA, 20 bp, Artificial Sequence
  Description of Artificial Sequence: Synthetic oligonucleotide
  Target: LAMA2; (-) strand; PAM type: NRG; PAM sequence: TGG
tggaaatgtcttcagccacc

SEQ ID NO: 116976 - DNA, 20 bp, Artificial Sequence
  Description of Artificial Sequence: Synthetic oligonucleotide
  Target: LAMA2; (-) strand; PAM type: NRG; PAM sequence: CAG
tagagcagtggaaatgtctt

SEQ ID NO: 116977 - DNA, 20 bp, Artificial Sequence
  Description of Artificial Sequence: Synthetic oligonucleotide
  Target: LAMA2; (-) strand; PAM type: NRG; PAM sequence: TGG
acgtttctcacttagagcag

SEQ ID NO: 116978 - DNA, 20 bp, Artificial Sequence
  Description of Artificial Sequence: Synthetic oligonucleotide
  Target: LAMA2; (-) strand; PAM type: NRG; PAM sequence: CAG
tctacgtttctcacttagag

SEQ ID NO: 116979 - DNA, 20 bp, Artificial Sequence
  Description of Artificial Sequence: Synthetic oligonucleotide
  Target: LAMA2; (-) strand; PAM type: NRG; PAM sequence: GAG
tgttctacgtttctcactta

SEQ ID NO: 116980 - DNA, 20 bp, Artificial Sequence
  Description of Artificial Sequence: Synthetic oligonucleotide
  Target: LAMA2; (-) strand; PAM type: NRG; PAM sequence: TAG
tctgttctacgtttctcact

SEQ ID NO: 116981 - DNA, 20 bp, Artificial Sequence
  Description of Artificial Sequence: Synthetic oligonucleotide
  Target: LAMA2; (-) strand; PAM type: NRG; PAM sequence: TGG
attgaatacatcgagcttga

SEQ ID NO: 116982 - DNA, 20 bp, Artificial Sequence
  Description of Artificial Sequence: Synthetic oligonucleotide
  Target: LAMA2; (-) strand; PAM type: NRG; PAM sequence: GAG
tccttaaaattgaatacatc

SEQ ID NO: 116983 - DNA, 20 bp, Artificial Sequence
  Description of Artificial Sequence: Synthetic oligonucleotide
  Target: LAMA2; (-) strand; PAM type: NRG; PAM sequence: CAG
aaaatgctataatataatct

SEQ ID NO: 116984 - DNA, 20 bp, Artificial Sequence
  Description of Artificial Sequence: Synthetic oligonucleotide
  Target: LAMA2; (-) strand; PAM type: NRG; PAM sequence: TAG
ttcataatagaaaggccttt

SEQ ID NO: 116985 - DNA, 20 bp, Artificial Sequence
  Description of Artificial Sequence: Synthetic oligonucleotide
  Target: LAMA2; (-) strand; PAM type: NRG; PAM sequence: AGG
aatactatttcataatagaa

SEQ ID NO: 116986 - DNA, 20 bp, Artificial Sequence
  Description of Artificial Sequence: Synthetic oligonucleotide
  Target: LAMA2; (-) strand; PAM type: NRG; PAM sequence: AAG
aaatactatttcataataga

SEQ ID NO: 116987 - DNA, 20 bp, Artificial Sequence
  Description of Artificial Sequence: Synthetic oligonucleotide
  Target: LAMA2; (-) strand; PAM type: NRG; PAM sequence: TAG
tggcaaatactatttcataa

SEQ ID NO: 116988 - DNA, 20 bp, Artificial Sequence
  Description of Artificial Sequence: Synthetic oligonucleotide
  Target: LAMA2; (-) strand; PAM type: NRG; PAM sequence: TGG
gtgttgccaacttttgcttt

SEQ ID NO: 116989 - DNA, 20 bp, Artificial Sequence
  Description of Artificial Sequence: Synthetic oligonucleotide
  Target: LAMA2; (-) strand; PAM type: NRG; PAM sequence: TAG
gggagtcttgggacccattt

SEQ ID NO: 116990 - DNA, 20 bp, Artificial Sequence
  Description of Artificial Sequence: Synthetic oligonucleotide
  Target: LAMA2; (-) strand; PAM type: NRG; PAM sequence: GGG
gtggttaggtggggagtctt

SEQ ID NO: 116991 - DNA, 20 bp, Artificial Sequence
  Description of Artificial Sequence: Synthetic oligonucleotide
  Target: LAMA2; (-) strand; PAM type: NRG; PAM sequence: TGG
tgtggttaggtggggagtct

SEQ ID NO: 116992 - DNA, 20 bp, Artificial Sequence
  Description of Artificial Sequence: Synthetic oligonucleotide
  Target: LAMA2; (-) strand; PAM type: NRG; PAM sequence: GAG
ccactgtgtggttaggtggg

SEQ ID NO: 116993 - DNA, 20 bp, Artificial Sequence
  Description of Artificial Sequence: Synthetic oligonucleotide
  Target: LAMA2; (-) strand; PAM type: NRG; PAM sequence: GGG
gaccactgtgtggttaggtg

SEQ ID NO: 116994 - DNA, 20 bp, Artificial Sequence
  Description of Artificial Sequence: Synthetic oligonucleotide
  Target: LAMA2; (-) strand; PAM type: NRG; PAM sequence: GGG
agaccactgtgtggttaggt

SEQ ID NO: 116995 - DNA, 20 bp, Artificial Sequence
  Description of Artificial Sequence: Synthetic oligonucleotide
  Target: LAMA2; (-) strand; PAM type: NRG; PAM sequence: TGG
cagaccactgtgtggttagg

SEQ ID NO: 116996 - DNA, 20 bp, Artificial Sequence
  Description of Artificial Sequence: Synthetic oligonucleotide
  Target: LAMA2; (-) strand; PAM type: NRG; PAM sequence: AGG
tcacagaccactgtgtggtt

SEQ ID NO: 116997 - DNA, 20 bp, Artificial Sequence
  Description of Artificial Sequence: Synthetic oligonucleotide
  Target: LAMA2; (-) strand; PAM type: NRG; PAM sequence: TAG
ttcacagaccactgtgtggt

SEQ ID NO: 116998 - DNA, 20 bp, Artificial Sequence
  Description of Artificial Sequence: Synthetic oligonucleotide
  Target: LAMA2; (-) strand; PAM type: NRG; PAM sequence: TGG
ggttttcacagaccactgtg

SEQ ID NO: 116999 - DNA, 20 bp, Artificial Sequence
  Description of Artificial Sequence: Synthetic oligonucleotide
  Target: LAMA2; (-) strand; PAM type: NRG; PAM sequence: CAG
tcctggattcctggttttca

SEQ ID NO: 117000 - DNA, 20 bp, Artificial Sequence
  Description of Artificial Sequence: Synthetic oligonucleotide
  Target: LAMA2; (-) strand; PAM type: NRG; PAM sequence: TGG
accagagattcctggattcc

SEQ ID NO: 117001 - DNA, 20 bp, Artificial Sequence
  Description of Artificial Sequence: Synthetic oligonucleotide
  Target: LAMA2; (-) strand; PAM type: NRG; PAM sequence: TGG
cacgatcaaccagagattcc

SEQ ID NO: 117002 - DNA, 20 bp, Artificial Sequence
  Description of Artificial Sequence: Synthetic oligonucleotide
  Target: LAMA2; (-) strand; PAM type: NRG; PAM sequence: GAG
cctttaaacacgatcaacca

SEQ ID NO: 117003 - DNA, 20 bp, Artificial Sequence
  Description of Artificial Sequence: Synthetic oligonucleotide
  Target: LAMA2; (-) strand; PAM type: NRG; PAM sequence: CAG
gccctttaaacacgatcaac

SEQ ID NO: 117004 - DNA, 20 bp, Artificial Sequence
  Description of Artificial Sequence: Synthetic oligonucleotide
  Target: LAMA2; (-) strand; PAM type: NRG; PAM sequence: GAG
tcagtagaaatgatacctta

SEQ ID NO: 117005 - DNA, 20 bp, Artificial Sequence
  Description of Artificial Sequence: Synthetic oligonucleotide
  Target: LAMA2; (-) strand; PAM type: NRG; PAM sequence: TAG
tgtcagtagaaatgatacct

SEQ ID NO: 117006 - DNA, 20 bp, Artificial Sequence
  Description of Artificial Sequence: Synthetic oligonucleotide
  Target: LAMA2; (-) strand; PAM type: NRG; PAM sequence: TAG
ttgttccaaataactgtcag

SEQ ID NO: 117007 - DNA, 20 bp, Artificial Sequence
  Description of Artificial Sequence: Synthetic oligonucleotide
  Target: LAMA2; (-) strand; PAM type: NRG; PAM sequence: CAG
aagttgttccaaataactgt

SEQ ID NO: 117008 - DNA, 20 bp, Artificial Sequence
  Description of Artificial Sequence: Synthetic oligonucleotide
  Target: LAMA2; (-) strand; PAM type: NRG; PAM sequence: AAG
gtgtaaggccaacgttttta

SEQ ID NO: 117009 - DNA, 20 bp, Artificial Sequence
  Description of Artificial Sequence: Synthetic oligonucleotide
  Target: LAMA2; (-) strand; PAM type: NRG; PAM sequence: AGG
agtaccagtttctgggtgta

SEQ ID NO: 117010 - DNA, 20 bp, Artificial Sequence
  Description of Artificial Sequence: Synthetic oligonucleotide
  Target: LAMA2; (-) strand; PAM type: NRG; PAM sequence: AAG
tagtaccagtttctgggtgt

SEQ ID NO: 117011 - DNA, 20 bp, Artificial Sequence
  Description of Artificial Sequence: Synthetic oligonucleotide
  Target: LAMA2; (-) strand; PAM type: NRG; PAM sequence: GGG
ccataatagtaccagtttct

SEQ ID NO: 117012 - DNA, 20 bp, Artificial Sequence
  Description of Artificial Sequence: Synthetic oligonucleotide
  Target: LAMA2; (-) strand; PAM type: NRG; PAM sequence: TGG
cccataatagtaccagtttc

SEQ ID NO: 117013 - DNA, 20 bp, Artificial Sequence
  Description of Artificial Sequence: Synthetic oligonucleotide
  Target: LAMA2; (-) strand; PAM type: NRG; PAM sequence: CAG
ttctgtgcccataatagtac

SEQ ID NO: 117014 - DNA, 20 bp, Artificial Sequence
  Description of Artificial Sequence: Synthetic oligonucleotide
  Target: LAMA2; (-) strand; PAM type: NRG; PAM sequence: TAG
tgagccttctgtgcccataa

SEQ ID NO: 117015 - DNA, 20 bp, Artificial Sequence
  Description of Artificial Sequence: Synthetic oligonucleotide
  Target: LAMA2; (-) strand; PAM type: NRG; PAM sequence: GAG
aggacagtaagctggcaaat

SEQ ID NO: 117016 - DNA, 20 bp, Artificial Sequence
  Description of Artificial Sequence: Synthetic oligonucleotide
  Target: LAMA2; (-) strand; PAM type: NRG; PAM sequence: TGG
tgccaaagaggacagtaagc

SEQ ID NO: 117017 - DNA, 20 bp, Artificial Sequence
  Description of Artificial Sequence: Synthetic oligonucleotide
  Target: LAMA2; (-) strand; PAM type: NRG; PAM sequence: AAG
gtcatgccaaagaggacagt

SEQ ID NO: 117018 - DNA, 20 bp, Artificial Sequence
  Description of Artificial Sequence: Synthetic oligonucleotide
  Target: LAMA2; (-) strand; PAM type: NRG; PAM sequence: CAG
tgcagtcatgccaaagagga

SEQ ID NO: 117019 - DNA, 20 bp, Artificial Sequence
  Description of Artificial Sequence: Synthetic oligonucleotide
  Target: LAMA2; (-) strand; PAM type: NRG; PAM sequence: AGG
tatttgcagtcatgccaaag

SEQ ID NO: 117020 - DNA, 20 bp, Artificial Sequence
  Description of Artificial Sequence: Synthetic oligonucleotide
  Target: LAMA2; (-) strand; PAM type: NRG; PAM sequence: GAG
ctatttgcagtcatgccaaa

SEQ ID NO: 117021 - DNA, 20 bp, Artificial Sequence
  Description of Artificial Sequence: Synthetic oligonucleotide
  Target: LAMA2; (-) strand; PAM type: NRG; PAM sequence: AAG
atctatttgcagtcatgcca

SEQ ID NO: 117022 - DNA, 20 bp, Artificial Sequence
  Description of Artificial Sequence: Synthetic oligonucleotide
  Target: LAMA2; (-) strand; PAM type: NRG; PAM sequence: CAG
ggcagtatattatctatttg

SEQ ID NO: 117023 - DNA, 20 bp, Artificial Sequence
  Description of Artificial Sequence: Synthetic oligonucleotide
  Target: LAMA2; (-) strand; PAM type: NRG; PAM sequence: CAG
gagattttgttttaatcagg

SEQ ID NO: 117024 - DNA, 20 bp, Artificial Sequence
  Description of Artificial Sequence: Synthetic oligonucleotide
  Target: LAMA2; (-) strand; PAM type: NRG; PAM sequence: AGG
gttgagattttgttttaatc

SEQ ID NO: 117025 - DNA, 20 bp, Artificial Sequence
  Description of Artificial Sequence: Synthetic oligonucleotide
  Target: LAMA2; (-) strand; PAM type: NRG; PAM sequence: CAG
tgttgagattttgttttaat

SEQ ID NO: 117026 - DNA, 20 bp, Artificial Sequence
  Description of Artificial Sequence: Synthetic oligonucleotide
  Target: LAMA2; (-) strand; PAM type: NRG; PAM sequence: GAG
caggtgcagagacaaatgtt

SEQ ID NO: 117027 - DNA, 20 bp, Artificial Sequence
  Description of Artificial Sequence: Synthetic oligonucleotide
  Target: LAMA2; (-) strand; PAM type: NRG; PAM sequence: GAG
aataggctatcgcaggtgca

SEQ ID NO: 117028 - DNA, 20 bp, Artificial Sequence
  Description of Artificial Sequence: Synthetic oligonucleotide
  Target: LAMA2; (-) strand; PAM type: NRG; PAM sequence: CAG
ttaataggctatcgcaggtg

SEQ ID NO: 117029 - DNA, 20 bp, Artificial Sequence
  Description of Artificial Sequence: Synthetic oligonucleotide
  Target: LAMA2; (-) strand; PAM type: NRG; PAM sequence: AGG
ttgctttaataggctatcgc

SEQ ID NO: 117030 - DNA, 20 bp, Artificial Sequence
  Description of Artificial Sequence: Synthetic oligonucleotide
  Target: LAMA2; (-) strand; PAM type: NRG; PAM sequence: CAG
tttgctttaataggctatcg

SEQ ID NO: 117031 - DNA, 20 bp, Artificial Sequence
  Description of Artificial Sequence: Synthetic oligonucleotide
  Target: LAMA2; (-) strand; PAM type: NRG; PAM sequence: AGG
tagggaagctttgctttaat

SEQ ID NO: 117032 - DNA, 20 bp, Artificial Sequence
  Description of Artificial Sequence: Synthetic oligonucleotide
  Target: LAMA2; (-) strand; PAM type: NRG; PAM sequence: TAG
ctagggaagctttgctttaa

SEQ ID NO: 117033 - DNA, 20 bp, Artificial Sequence
  Description of Artificial Sequence: Synthetic oligonucleotide
  Target: LAMA2; (-) strand; PAM type: NRG; PAM sequence: AAG
ttttattggtctacctaggg

SEQ ID NO: 117034 - DNA, 20 bp, Artificial Sequence
  Description of Artificial Sequence: Synthetic oligonucleotide
  Target: LAMA2; (-) strand; PAM type: NRG; PAM sequence: GGG
aaattttattggtctaccta

SEQ ID NO: 117035 - DNA, 20 bp, Artificial Sequence
  Description of Artificial Sequence: Synthetic oligonucleotide
  Target: LAMA2; (-) strand; PAM type: NRG; PAM sequence: AGG
aaaattttattggtctacct

SEQ ID NO: 117036 - DNA, 20 bp, Artificial Sequence
  Description of Artificial Sequence: Synthetic oligonucleotide
  Target: LAMA2; (-) strand; PAM type: NRG; PAM sequence: TAG
aaaaattttattggtctacc

SEQ ID NO: 117037 - DNA, 20 bp, Artificial Sequence
  Description of Artificial Sequence: Synthetic oligonucleotide
  Target: LAMA2; (-) strand; PAM type: NRG; PAM sequence: TGG
ctgaaaattaaaaattttat

SEQ ID NO: 117038 - DNA, 20 bp, Artificial Sequence
  Description of Artificial Sequence: Synthetic oligonucleotide
  Target: LAMA2; (-) strand; PAM type: NRG; PAM sequence: AAG
ttctagaatatgacaagtca

SEQ ID NO: 117039 - DNA, 20 bp, Artificial Sequence
  Description of Artificial Sequence: Synthetic oligonucleotide
  Target: LAMA2; (-) strand; PAM type: NRG; PAM sequence: AAG
ttggctttctagaatatgac

SEQ ID NO: 117040 - DNA, 20 bp, Artificial Sequence
  Description of Artificial Sequence: Synthetic oligonucleotide
  Target: LAMA2; (-) strand; PAM type: NRG; PAM sequence: TAG
tttaaggttctttggctttc

SEQ ID NO: 117041 - DNA, 20 bp, Artificial Sequence
  Description of Artificial Sequence: Synthetic oligonucleotide
  Target: LAMA2; (-) strand; PAM type: NRG; PAM sequence: TGG
tcgcgttttttaaggttctt

SEQ ID NO: 117042 - DNA, 20 bp, Artificial Sequence
  Description of Artificial Sequence: Synthetic oligonucleotide
  Target: LAMA2; (-) strand; PAM type: NRG; PAM sequence: AGG
ggttggcttcgcgtttttta

SEQ ID NO: 117043 - DNA, 20 bp, Artificial Sequence
  Description of Artificial Sequence: Synthetic oligonucleotide
  Target: LAMA2; (-) strand; PAM type: NRG; PAM sequence: AAG
tggttggcttcgcgtttttt

SEQ ID NO: 117044 - DNA, 20 bp, Artificial Sequence
  Description of Artificial Sequence: Synthetic oligonucleotide
  Target: LAMA2; (-) strand; PAM type: NRG; PAM sequence: TGG
ttccatgataacaaattggt

SEQ ID NO: 117045 - DNA, 20 bp, Artificial Sequence
  Description of Artificial Sequence: Synthetic oligonucleotide
  Target: LAMA2; (-) strand; PAM type: NRG; PAM sequence: TGG
ttatttccatgataacaaat

SEQ ID NO: 117046 - DNA, 20 bp, Artificial Sequence
  Description of Artificial Sequence: Synthetic oligonucleotide
  Target: LAMA2; (-) strand; PAM type: NRG; PAM sequence: AAG
ataagctcccagcaaaaatg

SEQ ID NO: 117047 - DNA, 20 bp, Artificial Sequence
  Description of Artificial Sequence: Synthetic oligonucleotide
  Target: LAMA2; (-) strand; PAM type: NRG; PAM sequence: CAG
atttgctagtcataagctcc

SEQ ID NO: 117048 - DNA, 20 bp, Artificial Sequence
  Description of Artificial Sequence: Synthetic oligonucleotide
  Target: LAMA2; (-) strand; PAM type: NRG; PAM sequence: AAG
gatctgtatttgctagtcat

SEQ ID NO: 117049 - DNA, 20 bp, Artificial Sequence
  Description of Artificial Sequence: Synthetic oligonucleotide
  Target: LAMA2; (-) strand; PAM type: NRG; PAM sequence: TAG
tcatttggatctgtatttgc

SEQ ID NO: 117050 - DNA, 20 bp, Artificial Sequence
  Description of Artificial Sequence: Synthetic oligonucleotide
  Target: LAMA2; (-) strand; PAM type: NRG; PAM sequence: TGG
ttaatgagagctccttcatt

SEQ ID NO: 117051 - DNA, 20 bp, Artificial Sequence
  Description of Artificial Sequence: Synthetic oligonucleotide
  Target: LAMA2; (-) strand; PAM type: NRG; PAM sequence: GAG
gatggaagaactcttaatga

SEQ ID NO: 117052 - DNA, 20 bp, Artificial Sequence
  Description of Artificial Sequence: Synthetic oligonucleotide
  Target: LAMA2; (-) strand; PAM type: NRG; PAM sequence: GAG
gagatggaagaactcttaat

SEQ ID NO: 117053 - DNA, 20 bp, Artificial Sequence
  Description of Artificial Sequence: Synthetic oligonucleotide
  Target: LAMA2; (-) strand; PAM type: NRG; PAM sequence: AAG
attctattagctagagatgg

SEQ ID NO: 117054 - DNA, 20 bp, Artificial Sequence
  Description of Artificial Sequence: Synthetic oligonucleotide
  Target: LAMA2; (-) strand; PAM type: NRG; PAM sequence: TGG
attattctattagctagaga

SEQ ID NO: 117055 - DNA, 20 bp, Artificial Sequence
  Description of Artificial Sequence: Synthetic oligonucleotide
  Target: LAMA2; (-) strand; PAM type: NRG; PAM sequence: GAG
atttattattctattagcta

SEQ ID NO: 117056 - DNA, 20 bp, Artificial Sequence
  Description of Artificial Sequence: Synthetic oligonucleotide
  Target: LAMA2; (-) strand; PAM type: NRG; PAM sequence: TAG
atatttattattctattagc

SEQ ID NO: 117057 - DNA, 20 bp, Artificial Sequence
  Description of Artificial Sequence: Synthetic oligonucleotide
  Target: LAMA2; (-) strand; PAM type: NRG; PAM sequence: TAG
tgtcatatttattattctat

SEQ ID NO: 117058 - DNA, 20 bp, Artificial Sequence
  Description of Artificial Sequence: Synthetic oligonucleotide
  Target: LAMA2; (-) strand; PAM type: NRG; PAM sequence: TGG
tcttaatcccagcctcattg

SEQ ID NO: 117059 - DNA, 20 bp, Artificial Sequence
  Description of Artificial Sequence: Synthetic oligonucleotide
  Target: LAMA2; (-) strand; PAM type: NRG; PAM sequence: CAG
taagttccctttcttaatcc

SEQ ID NO: 117060 - DNA, 20 bp, Artificial Sequence
  Description of Artificial Sequence: Synthetic oligonucleotide
  Target: LAMA2; (-) strand; PAM type: NRG; PAM sequence: AAG
tttgactaattatagtattt

SEQ ID NO: 117061 - DNA, 20 bp, Artificial Sequence
  Description of Artificial Sequence: Synthetic oligonucleotide
  Target: LAMA2; (-) strand; PAM type: NRG; PAM sequence: TAG
gttattaatttgactaatta

SEQ ID NO: 117062 - DNA, 20 bp, Artificial Sequence
  Description of Artificial Sequence: Synthetic oligonucleotide
  Target: LAMA2; (-) strand; PAM type: NRG; PAM sequence: AAG
catatctattctggtttggg

SEQ ID NO: 117063 - DNA, 20 bp, Artificial Sequence
  Description of Artificial Sequence: Synthetic oligonucleotide
  Target: LAMA2; (-) strand; PAM type: NRG; PAM sequence: GGG
acacatatctattctggttt

SEQ ID NO: 117064 - DNA, 20 bp, Artificial Sequence
  Description of Artificial Sequence: Synthetic oligonucleotide
  Target: LAMA2; (-) strand; PAM type: NRG; PAM sequence: TGG
tacacatatctattctggtt

SEQ ID NO: 117065 - DNA, 20 bp, Artificial Sequence
  Description of Artificial Sequence: Synthetic oligonucleotide
  Target: LAMA2; (-) strand; PAM type: NRG; PAM sequence: TGG
cattttacacatatctattc

SEQ ID NO: 117066 - DNA, 20 bp, Artificial Sequence
  Description of Artificial Sequence: Synthetic oligonucleotide
  Target: LAMA2; (-) strand; PAM type: NRG; PAM sequence: GAG
atgagtctgggtcaggatta

SEQ ID NO: 117067 - DNA, 20 bp, Artificial Sequence
  Description of Artificial Sequence: Synthetic oligonucleotide
  Target: LAMA2; (-) strand; PAM type: NRG; PAM sequence: TAG
aaatgagtctgggtcaggat

SEQ ID NO: 117068 - DNA, 20 bp, Artificial Sequence
  Description of Artificial Sequence: Synthetic oligonucleotide
  Target: LAMA2; (-) strand; PAM type: NRG; PAM sequence: AGG
tttaaaaatgagtctgggtc

SEQ ID NO: 117069 - DNA, 20 bp, Artificial Sequence
  Description of Artificial Sequence: Synthetic oligonucleotide
  Target: LAMA2; (-) strand; PAM type: NRG; PAM sequence: CAG
gtttaaaaatgagtctgggt

SEQ ID NO: 117070 - DNA, 20 bp, Artificial Sequence
  Description of Artificial Sequence: Synthetic oligonucleotide
  Target: LAMA2; (-) strand; PAM type: NRG; PAM sequence: GGG
gatggtttaaaaatgagtct

SEQ ID NO: 117071 - DNA, 20 bp, Artificial Sequence
  Description of Artificial Sequence: Synthetic oligonucleotide
  Target: LAMA2; (-) strand; PAM type: NRG; PAM sequence: TGG
tgatggtttaaaaatgagtc

SEQ ID NO: 117072 - DNA, 20 bp, Artificial Sequence
  Description of Artificial Sequence: Synthetic oligonucleotide
  Target: LAMA2; (-) strand; PAM type: NRG; PAM sequence: GAG
taccatgatggtttaaaaat

SEQ ID NO: 117073 - DNA, 20 bp, Artificial Sequence
  Description of Artificial Sequence: Synthetic oligonucleotide
  Target: LAMA2; (-) strand; PAM type: NRG; PAM sequence: TGG
gaaatgctaaagtaccatga

SEQ ID NO: 117074 - DNA, 20 bp, Artificial Sequence
  Description of Artificial Sequence: Synthetic oligonucleotide
  Target: LAMA2; (-) strand; PAM type: NRG; PAM sequence: AAG
tgaaagcctgtgaaatgcta

SEQ ID NO: 117075 - DNA, 20 bp, Artificial Sequence
  Description of Artificial Sequence: Synthetic oligonucleotide
  Target: LAMA2; (-) strand; PAM type: NRG; PAM sequence: AAG
atttaggtaaaggagcatga

SEQ ID NO: 117076 - DNA, 20 bp, Artificial Sequence
  Description of Artificial Sequence: Synthetic oligonucleotide
  Target: LAMA2; (-) strand; PAM type: NRG; PAM sequence: GAG
gagtctgaatttaggtaaag

SEQ ID NO: 117077 - DNA, 20 bp, Artificial Sequence
  Description of Artificial Sequence: Synthetic oligonucleotide
  Target: LAMA2; (-) strand; PAM type: NRG; PAM sequence: AGG
ttgagtctgaatttaggtaa

SEQ ID NO: 117078 - DNA, 20 bp, Artificial Sequence
  Description of Artificial Sequence: Synthetic oligonucleotide
  Target: LAMA2; (-) strand; PAM type: NRG; PAM sequence: AAG
cttgagtctgaatttaggta

SEQ ID NO: 117079 - DNA, 20 bp, Artificial Sequence
  Description of Artificial Sequence: Synthetic oligonucleotide
  Target: LAMA2; (-) strand; PAM type: NRG; PAM sequence: AGG
aaaaccttgagtctgaattt

SEQ ID NO: 117080 - DNA, 20 bp, Artificial Sequence
  Description of Artificial Sequence: Synthetic oligonucleotide
  Target: LAMA2; (-) strand; PAM type: NRG; PAM sequence: TAG
aaaaaccttgagtctgaatt

SEQ ID NO: 117081 - DNA, 20 bp, Artificial Sequence
  Description of Artificial Sequence: Synthetic oligonucleotide
  Target: LAMA2; (-) strand; PAM type: NRG; PAM sequence: GAG
ggctggagtataaaaacctt

SEQ ID NO: 117082 - DNA, 20 bp, Artificial Sequence
  Description of Artificial Sequence: Synthetic oligonucleotide
  Target: LAMA2; (-) strand; PAM type: NRG; PAM sequence: GAG
aggggtgtaaagactggctg

SEQ ID NO: 117083 - DNA, 20 bp, Artificial Sequence
  Description of Artificial Sequence: Synthetic oligonucleotide
  Target: LAMA2; (-) strand; PAM type: NRG; PAM sequence: TGG
taaggggtgtaaagactggc

SEQ ID NO: 117084 - DNA, 20 bp, Artificial Sequence
  Description of Artificial Sequence: Synthetic oligonucleotide
  Target: LAMA2; (-) strand; PAM type: NRG; PAM sequence: TGG
gaaataaggggtgtaaagac

SEQ ID NO: 117085 - DNA, 20 bp, Artificial Sequence
  Description of Artificial Sequence: Synthetic oligonucleotide
  Target: LAMA2; (-) strand; PAM type: NRG; PAM sequence: AAG
agaatgaaataaggggtgta

SEQ ID NO: 117086 - DNA, 20 bp, Artificial Sequence
  Description of Artificial Sequence: Synthetic oligonucleotide
  Target: LAMA2; (-) strand; PAM type: NRG; PAM sequence: GGG
ctgagacagaatgaaataag

SEQ ID NO: 117087 - DNA, 20 bp, Artificial Sequence
  Description of Artificial Sequence: Synthetic oligonucleotide
  Target: LAMA2; (-) strand; PAM type: NRG; PAM sequence: GGG
tctgagacagaatgaaataa

SEQ ID NO: 117088 - DNA, 20 bp, Artificial Sequence
  Description of Artificial Sequence: Synthetic oligonucleotide
  Target: LAMA2; (-) strand; PAM type: NRG; PAM sequence: AGG
ttctgagacagaatgaaata

SEQ ID NO: 117089 - DNA, 20 bp, Artificial Sequence
  Description of Artificial Sequence: Synthetic oligonucleotide
  Target: LAMA2; (-) strand; PAM type: NRG; PAM sequence: AAG
cttctgagacagaatgaaat

SEQ ID NO: 117090 - DNA, 20 bp, Artificial Sequence
  Description of Artificial Sequence: Synthetic oligonucleotide
  Target: LAMA2; (-) strand; PAM type: NRG; PAM sequence: CAG
gagtgaattatcttctgaga

SEQ ID NO: 117091 - DNA, 20 bp, Artificial Sequence
  Description of Artificial Sequence: Synthetic oligonucleotide
  Target: LAMA2; (-) strand; PAM type: NRG; PAM sequence: GAG
ggtggagtgaattatcttct

SEQ ID NO: 117092 - DNA, 20 bp, Artificial Sequence
  Description of Artificial Sequence: Synthetic oligonucleotide
  Target: LAMA2; (-) strand; PAM type: NRG; PAM sequence: GAG
ggctgaaatttagggcggtg

SEQ ID NO: 117093 - DNA, 20 bp, Artificial Sequence
  Description of Artificial Sequence: Synthetic oligonucleotide
  Target: LAMA2; (-) strand; PAM type: NRG; PAM sequence: TGG
gaggctgaaatttagggcgg

SEQ ID NO: 117094 - DNA, 20 bp, Artificial Sequence
  Description of Artificial Sequence: Synthetic oligonucleotide
  Target: LAMA2; (-) strand; PAM type: NRG; PAM sequence: CGG
actgaggctgaaatttaggg

SEQ ID NO: 117095 - DNA, 20 bp, Artificial Sequence
  Description of Artificial Sequence: Synthetic oligonucleotide
  Target: LAMA2; (-) strand; PAM type: NRG; PAM sequence: GGG
gtgactgaggctgaaattta

SEQ ID NO: 117096 - DNA, 20 bp, Artificial Sequence
  Description of Artificial Sequence: Synthetic oligonucleotide
  Target: LAMA2; (-) strand; PAM type: NRG; PAM sequence: AGG
agtgactgaggctgaaattt

SEQ ID NO: 117097 - DNA, 20 bp, Artificial Sequence
  Description of Artificial Sequence: Synthetic oligonucleotide
  Target: LAMA2; (-) strand; PAM type: NRG; PAM sequence: TAG
aagtgactgaggctgaaatt

SEQ ID NO: 117098 - DNA, 20 bp, Artificial Sequence
  Description of Artificial Sequence: Synthetic oligonucleotide
  Target: LAMA2; (-) strand; PAM type: NRG; PAM sequence: AGG
gtaagatagagaagtgactg

SEQ ID NO: 117099 - DNA, 20 bp, Artificial Sequence
  Description of Artificial Sequence: Synthetic oligonucleotide
  Target: LAMA2; (-) strand; PAM type: NRG; PAM sequence: GAG
agtaagatagagaagtgact

SEQ ID NO: 117100 - DNA, 20 bp, Artificial Sequence
  Description of Artificial Sequence: Synthetic oligonucleotide
  Target: LAMA2; (-) strand; PAM type: NRG; PAM sequence: AAG
agtgggggagtaagatagag

SEQ ID NO: 117101 - DNA, 20 bp, Artificial Sequence
  Description of Artificial Sequence: Synthetic oligonucleotide
  Target: LAMA2; (-) strand; PAM type: NRG; PAM sequence: GAG
caaagtgggggagtaagata

SEQ ID NO: 117102 - DNA, 20 bp, Artificial Sequence
  Description of Artificial Sequence: Synthetic oligonucleotide
  Target: LAMA2; (-) strand; PAM type: NRG; PAM sequence: TAG
tacaaagtgggggagtaaga

SEQ ID NO: 117103 - DNA, 20 bp, Artificial Sequence
  Description of Artificial Sequence: Synthetic oligonucleotide
  Target: LAMA2; (-) strand; PAM type: NRG; PAM sequence: AAG
tgagtacaaagtgggggagt

SEQ ID NO: 117104 - DNA, 20 bp, Artificial Sequence
  Description of Artificial Sequence: Synthetic oligonucleotide
  Target: LAMA2; (-) strand; PAM type: NRG; PAM sequence: GAG
ctgatgagtacaaagtgggg

SEQ ID NO: 117105 - DNA, 20 bp, Artificial Sequence
  Description of Artificial Sequence: Synthetic oligonucleotide
  Target: LAMA2; (-) strand; PAM type: NRG; PAM sequence: GGG
acctgatgagtacaaagtgg

SEQ ID NO: 117106 - DNA, 20 bp, Artificial Sequence
  Description of Artificial Sequence: Synthetic oligonucleotide
  Target: LAMA2; (-) strand; PAM type: NRG; PAM sequence: GGG
aacctgatgagtacaaagtg

SEQ ID NO: 117107 - DNA, 20 bp, Artificial Sequence
  Description of Artificial Sequence: Synthetic oligonucleotide
  Target: LAMA2; (-) strand; PAM type: NRG; PAM sequence: GGG
gaacctgatgagtacaaagt

SEQ ID NO: 117108 - DNA, 20 bp, Artificial Sequence
  Description of Artificial Sequence: Synthetic oligonucleotide
  Target: LAMA2; (-) strand; PAM type: NRG; PAM sequence: TGG
agaacctgatgagtacaaag

SEQ ID NO: 117109 - DNA, 20 bp, Artificial Sequence
  Description of Artificial Sequence: Synthetic oligonucleotide
  Target: LAMA2; (-) strand; PAM type: NRG; PAM sequence: AAG
tgcagaacctgatgagtaca

SEQ ID NO: 117110 - DNA, 20 bp, Artificial Sequence
  Description of Artificial Sequence: Synthetic oligonucleotide
  Target: LAMA2; (-) strand; PAM type: NRG; PAM sequence: GAG
tactttctgcagaacctgat

SEQ ID NO: 117111 - DNA, 20 bp, Artificial Sequence
  Description of Artificial Sequence: Synthetic oligonucleotide
  Target: LAMA2; (-) strand; PAM type: NRG; PAM sequence: CAG
ataagctgcactactttctg

SEQ ID NO: 117112 - DNA, 20 bp, Artificial Sequence
  Description of Artificial Sequence: Synthetic oligonucleotide
  Target: LAMA2; (-) strand; PAM type: NRG; PAM sequence: AAG
aaagaaagagtggcacaaat

SEQ ID NO: 117113 - DNA, 20 bp, Artificial Sequence
  Description of Artificial Sequence: Synthetic oligonucleotide
  Target: LAMA2; (-) strand; PAM type: NRG; PAM sequence: TGG
gtgcagaattaaagaaagag

SEQ ID NO: 117114 - DNA, 20 bp, Artificial Sequence
  Description of Artificial Sequence: Synthetic oligonucleotide
  Target: LAMA2; (-) strand; PAM type: NRG; PAM sequence: GAG
cttgtgcagaattaaagaaa

SEQ ID NO: 117115 - DNA, 20 bp, Artificial Sequence
  Description of Artificial Sequence: Synthetic oligonucleotide
  Target: LAMA2; (-) strand; PAM type: NRG; PAM sequence: AAG
ttcttgtgcagaattaaaga

SEQ ID NO: 117116 - DNA, 20 bp, Artificial Sequence
  Description of Artificial Sequence: Synthetic oligonucleotide
  Target: LAMA2; (-) strand; PAM type: NRG; PAM sequence: AAG
gcccttcttgtgcagaatta

SEQ ID NO: 117117 - DNA, 20 bp, Artificial Sequence
  Description of Artificial Sequence: Synthetic oligonucleotide
  Target: LAMA2; (-) strand; PAM type: NRG; PAM sequence: CAG
cctaacaggcccttcttgtg

SEQ ID NO: 117118 - DNA, 20 bp, Artificial Sequence
  Description of Artificial Sequence: Synthetic oligonucleotide
  Target: LAMA2; (-) strand; PAM type: NRG; PAM sequence: AGG
gctacatccctttgcctaac

SEQ ID NO: 117119 - DNA, 20 bp, Artificial Sequence
  Description of Artificial Sequence: Synthetic oligonucleotide
  Target: LAMA2; (-) strand; PAM type: NRG; PAM sequence: CAG
cgctacatccctttgcctaa

SEQ ID NO: 117120 - DNA, 20 bp, Artificial Sequence
  Description of Artificial Sequence: Synthetic oligonucleotide
  Target: LAMA2; (-) strand; PAM type: NRG; PAM sequence: CAG
ctgggctcccaacacaattt

SEQ ID NO: 117121 - DNA, 20 bp, Artificial Sequence
  Description of Artificial Sequence: Synthetic oligonucleotide
  Target: LAMA2; (-) strand; PAM type: NRG; PAM sequence: GGG
tttgattgagcaaagagcct

SEQ ID NO: 117122 - DNA, 20 bp, Artificial Sequence
  Description of Artificial Sequence: Synthetic oligonucleotide
  Target: LAMA2; (-) strand; PAM type: NRG; PAM sequence: TGG
gtttgattgagcaaagagcc

SEQ ID NO: 117123 - DNA, 20 bp, Artificial Sequence
  Description of Artificial Sequence: Synthetic oligonucleotide
  Target: LAMA2; (-) strand; PAM type: NRG; PAM sequence: GAG
cattagtttgattgagcaaa

SEQ ID NO: 117124 - DNA, 20 bp, Artificial Sequence
  Description of Artificial Sequence: Synthetic oligonucleotide
  Target: LAMA2; (-) strand; PAM type: NRG; PAM sequence: AAG
tgcattagtttgattgagca

SEQ ID NO: 117125 - DNA, 20 bp, Artificial Sequence
  Description of Artificial Sequence: Synthetic oligonucleotide
  Target: LAMA2; (-) strand; PAM type: NRG; PAM sequence: GAG
aaaagtgcattagtttgatt

SEQ ID NO: 117126 - DNA, 20 bp, Artificial Sequence
  Description of Artificial Sequence: Synthetic oligonucleotide
  Target: LAMA2; (-) strand; PAM type: NRG; PAM sequence: TAG
gcacagttttaaaagtgcat

SEQ ID NO: 117127 - DNA, 20 bp, Artificial Sequence
  Description of Artificial Sequence: Synthetic oligonucleotide
  Target: LAMA2; (-) strand; PAM type: NRG; PAM sequence: AAG
aaattcatgcacagttttaa

SEQ ID NO: 117128 - DNA, 20 bp, Artificial Sequence
  Description of Artificial Sequence: Synthetic oligonucleotide
  Target: LAMA2; (-) strand; PAM type: NRG; PAM sequence: CAG
tgggtagcaaaattcatgca

SEQ ID NO: 117129 - DNA, 20 bp, Artificial Sequence
  Description of Artificial Sequence: Synthetic oligonucleotide
  Target: LAMA2; (-) strand; PAM type: NRG; PAM sequence: TAG
actttcataaattaagtggg

SEQ ID NO: 117130 - DNA, 20 bp, Artificial Sequence
  Description of Artificial Sequence: Synthetic oligonucleotide
  Target: LAMA2; (-) strand; PAM type: NRG; PAM sequence: GGG
agcactttcataaattaagt

SEQ ID NO: 117131 - DNA, 20 bp, Artificial Sequence
  Description of Artificial Sequence: Synthetic oligonucleotide
  Target: LAMA2; (-) strand; PAM type: NRG; PAM sequence: TGG
tagcactttcataaattaag

SEQ ID NO: 117132 - DNA, 20 bp, Artificial Sequence
  Description of Artificial Sequence: Synthetic oligonucleotide
  Target: LAMA2; (-) strand; PAM type: NRG; PAM sequence: AAG
taatagcactttcataaatt

SEQ ID NO: 117133 - DNA, 20 bp, Artificial Sequence
  Description of Artificial Sequence: Synthetic oligonucleotide
  Target: LAMA2; (-) strand; PAM type: NRG; PAM sequence: TAG
taaggaaccctgcagactaa

SEQ ID NO: 117134 - DNA, 20 bp, Artificial Sequence
  Description of Artificial Sequence: Synthetic oligonucleotide
  Target: LAMA2; (-) strand; PAM type: NRG; PAM sequence: CAG
gaatgttgtaaggaaccctg

SEQ ID NO: 117135 - DNA, 20 bp, Artificial Sequence
  Description of Artificial Sequence: Synthetic oligonucleotide
  Target: LAMA2; (-) strand; PAM type: NRG; PAM sequence: AGG
ggagagggaggaatgttgta

SEQ ID NO: 117136 - DNA, 20 bp, Artificial Sequence
  Description of Artificial Sequence: Synthetic oligonucleotide
  Target: LAMA2; (-) strand; PAM type: NRG; PAM sequence: AAG
tggagagggaggaatgttgt

SEQ ID NO: 117137 - DNA, 20 bp, Artificial Sequence
  Description of Artificial Sequence: Synthetic oligonucleotide
  Target: LAMA2; (-) strand; PAM type: NRG; PAM sequence: AGG
gtggatatgtgtggagaggg

SEQ ID NO: 117138 - DNA, 20 bp, Artificial Sequence
  Description of Artificial Sequence: Synthetic oligonucleotide
  Target: LAMA2; (-) strand; PAM type: NRG; PAM sequence: GAG
tgtggatatgtgtggagagg

SEQ ID NO: 117139 - DNA, 20 bp, Artificial Sequence
  Description of Artificial Sequence: Synthetic oligonucleotide
  Target: LAMA2; (-) strand; PAM type: NRG; PAM sequence: GGG
aatgtggatatgtgtggaga

SEQ ID NO: 117140 - DNA, 20 bp, Artificial Sequence
  Description of Artificial Sequence: Synthetic oligonucleotide
  Target: LAMA2; (-) strand; PAM type: NRG; PAM sequence: AGG
aaatgtggatatgtgtggag

SEQ ID NO: 117141 - DNA, 20 bp, Artificial Sequence
  Description of Artificial Sequence: Synthetic oligonucleotide
  Target: LAMA2; (-) strand; PAM type: NRG; PAM sequence: GAG
caaatgtggatatgtgtgga

SEQ ID NO: 117142 - DNA, 20 bp, Artificial Sequence
  Description of Artificial Sequence: Synthetic oligonucleotide
  Target: LAMA2; (-) strand; PAM type: NRG; PAM sequence: GAG
gccaaatgtggatatgtgtg

SEQ ID NO: 117143 - DNA, 20 bp, Artificial Sequence
  Description of Artificial Sequence: Synthetic oligonucleotide
  Target: LAMA2; (-) strand; PAM type: NRG; PAM sequence: TGG
ttgccaaatgtggatatgtg

SEQ ID NO: 117144 - DNA, 20 bp, Artificial Sequence
  Description of Artificial Sequence: Synthetic oligonucleotide
  Target: LAMA2; (-) strand; PAM type: NRG; PAM sequence: TGG
cctcggtagattgccaaatg

SEQ ID NO: 117145 - DNA, 20 bp, Artificial Sequence
  Description of Artificial Sequence: Synthetic oligonucleotide
  Target: LAMA2; (-) strand; PAM type: NRG; PAM sequence: TAG
ttaggtcgaagtctcctcgg

SEQ ID NO: 117146 - DNA, 20 bp, Artificial Sequence
  Description of Artificial Sequence: Synthetic oligonucleotide
  Target: LAMA2; (-) strand; PAM type: NRG; PAM sequence: CGG
gttttaggtcgaagtctcct

SEQ ID NO: 117147 - DNA, 20 bp, Artificial Sequence
  Description of Artificial Sequence: Synthetic oligonucleotide
  Target: LAMA2; (-) strand; PAM type: NRG; PAM sequence: AAG
cctgggtcagttttaggtcg

SEQ ID NO: 117148 - DNA, 20 bp, Artificial Sequence
  Description of Artificial Sequence: Synthetic oligonucleotide
  Target: LAMA2; (-) strand; PAM type: NRG; PAM sequence: AGG
aattttcctgggtcagtttt

SEQ ID NO: 117149 - DNA, 20 bp, Artificial Sequence
  Description of Artificial Sequence: Synthetic oligonucleotide
  Target: LAMA2; (-) strand; PAM type: NRG; PAM sequence: TAG
aaattttcctgggtcagttt

SEQ ID NO: 117150 - DNA, 20 bp, Artificial Sequence
  Description of Artificial Sequence: Synthetic oligonucleotide
  Target: LAMA2; (-) strand; PAM type: NRG; PAM sequence: CAG
aataccaaattttcctgggt

SEQ ID NO: 117151 - DNA, 20 bp, Artificial Sequence
  Description of Artificial Sequence: Synthetic oligonucleotide
  Target: LAMA2; (-) strand; PAM type: NRG; PAM sequence: GGG
aaagaataccaaattttcct

SEQ ID NO: 117152 - DNA, 20 bp, Artificial Sequence
  Description of Artificial Sequence: Synthetic oligonucleotide
  Target: LAMA2; (-) strand; PAM type: NRG; PAM sequence: TGG
aaaagaataccaaattttcc

SEQ ID NO: 117153 - DNA, 20 bp, Artificial Sequence
  Description of Artificial Sequence: Synthetic oligonucleotide
  Target: LAMA2; (-) strand; PAM type: NRG; PAM sequence: AAG
tccatgactactatcaccaa

SEQ ID NO: 117154 - DNA, 20 bp, Artificial Sequence
  Description of Artificial Sequence: Synthetic oligonucleotide
  Target: LAMA2; (-) strand; PAM type: NRG; PAM sequence: CAG
ggaaagttaaacccatttta

SEQ ID NO: 117155 - DNA, 20 bp, Artificial Sequence
  Description of Artificial Sequence: Synthetic oligonucleotide
  Target: LAMA2; (-) strand; PAM type: NRG; PAM sequence: AAG
taagcccattatatatggga

SEQ ID NO: 117156 - DNA, 20 bp, Artificial Sequence
  Description of Artificial Sequence: Synthetic oligonucleotide
  Target: LAMA2; (-) strand; PAM type: NRG; PAM sequence: GGG
gcgctaagcccattatatat

SEQ ID NO: 117157 - DNA, 20 bp, Artificial Sequence
  Description of Artificial Sequence: Synthetic oligonucleotide
  Target: LAMA2; (-) strand; PAM type: NRG; PAM sequence: TGG
tgcgctaagcccattatata

SEQ ID NO: 117158 - DNA, 20 bp, Artificial Sequence
  Description of Artificial Sequence: Synthetic oligonucleotide
  Target: LAMA2; (-) strand; PAM type: NRG; PAM sequence: AAG
cacagtgcttagtatgcgct

SEQ ID NO: 117159 - DNA, 20 bp, Artificial Sequence
  Description of Artificial Sequence: Synthetic oligonucleotide
  Target: LAMA2; (-) strand; PAM type: NRG; PAM sequence: TAG
gaaacaatgtacacagtgct

SEQ ID NO: 117160 - DNA, 20 bp, Artificial Sequence
  Description of Artificial Sequence: Synthetic oligonucleotide
  Target: LAMA2; (-) strand; PAM type: NRG; PAM sequence: CAG
aaaaattgaaacaatgtaca

SEQ ID NO: 117161 - DNA, 20 bp, Artificial Sequence
  Description of Artificial Sequence: Synthetic oligonucleotide
  Target: LAMA2; (-) strand; PAM type: NRG; PAM sequence: AAG
aggactctaacgatgttacc

SEQ ID NO: 117162 - DNA, 20 bp, Artificial Sequence
  Description of Artificial Sequence: Synthetic oligonucleotide
  Target: LAMA2; (-) strand; PAM type: NRG; PAM sequence: AGG
tatgcagagtataagacata

SEQ ID NO: 117163 - DNA, 20 bp, Artificial Sequence
  Description of Artificial Sequence: Synthetic oligonucleotide
  Target: LAMA2; (-) strand; PAM type: NRG; PAM sequence: AAG
atatgcagagtataagacat

SEQ ID NO: 117164 - DNA, 20 bp, Artificial Sequence
  Description of Artificial Sequence: Synthetic oligonucleotide
  Target: LAMA2; (-) strand; PAM type: NRG; PAM sequence: AAG
atttcacatatgcagagtat

SEQ ID NO: 117165 - DNA, 20 bp, Artificial Sequence
  Description of Artificial Sequence: Synthetic oligonucleotide
  Target: LAMA2; (-) strand; PAM type: NRG; PAM sequence: GAG
gaacaaatttcacatatgca

SEQ ID NO: 117166 - DNA, 20 bp, Artificial Sequence
  Description of Artificial Sequence: Synthetic oligonucleotide
  Target: LAMA2; (-) strand; PAM type: NRG; PAM sequence: CAG
ctgaacaaatttcacatatg

SEQ ID NO: 117167 - DNA, 20 bp, Artificial Sequence
  Description of Artificial Sequence: Synthetic oligonucleotide
  Target: LAMA2; (-) strand; PAM type: NRG; PAM sequence: GAG
ttaatctacaaaaaagaaag

SEQ ID NO: 117168 - DNA, 20 bp, Artificial Sequence
  Description of Artificial Sequence: Synthetic oligonucleotide
  Target: LAMA2; (-) strand; PAM type: NRG; PAM sequence: AGG
tcttaatctacaaaaaagaa

SEQ ID NO: 117169 - DNA, 20 bp, Artificial Sequence
  Description of Artificial Sequence: Synthetic oligonucleotide
  Target: LAMA2; (-) strand; PAM type: NRG; PAM sequence: AAG
atcttaatctacaaaaaaga

SEQ ID NO: 117170 - DNA, 20 bp, Artificial Sequence
  Description of Artificial Sequence: Synthetic oligonucleotide
  Target: LAMA2; (-) strand; PAM type: NRG; PAM sequence: AAG
cattatcttaatctacaaaa

SEQ ID NO: 117171 - DNA, 20 bp, Artificial Sequence
  Description of Artificial Sequence: Synthetic oligonucleotide
  Target: LAMA2; (-) strand; PAM type: NRG; PAM sequence: AAG
ttggaagccccatctacata

SEQ ID NO: 117172 - DNA, 20 bp, Artificial Sequence
  Description of Artificial Sequence: Synthetic oligonucleotide
  Target: LAMA2; (-) strand; PAM type: NRG; PAM sequence: AAG
gggactgatggttctgttgg

SEQ ID NO: 117173 - DNA, 20 bp, Artificial Sequence
  Description of Artificial Sequence: Synthetic oligonucleotide
  Target: LAMA2; (-) strand; PAM type: NRG; PAM sequence: TGG
tttgggactgatggttctgt

SEQ ID NO: 117174 - DNA, 20 bp, Artificial Sequence
  Description of Artificial Sequence: Synthetic oligonucleotide
  Target: LAMA2; (-) strand; PAM type: NRG; PAM sequence: TGG
gtcggcttttttgggactga

SEQ ID NO: 117175 - DNA, 20 bp, Artificial Sequence
  Description of Artificial Sequence: Synthetic oligonucleotide
  Target: LAMA2; (-) strand; PAM type: NRG; PAM sequence: GGG
tccaggatgtcggctttttt

SEQ ID NO: 117176 - DNA, 20 bp, Artificial Sequence
  Description of Artificial Sequence: Synthetic oligonucleotide
  Target: LAMA2; (-) strand; PAM type: NRG; PAM sequence: TGG
atccaggatgtcggcttttt

SEQ ID NO: 117177 - DNA, 20 bp, Artificial Sequence
  Description of Artificial Sequence: Synthetic oligonucleotide
  Target: LAMA2; (-) strand; PAM type: NRG; PAM sequence: CGG
tcccacgacatccaggatgt

SEQ ID NO: 117178 - DNA, 20 bp, Artificial Sequence
  Description of Artificial Sequence: Synthetic oligonucleotide
  Target: LAMA2; (-) strand; PAM type: NRG; PAM sequence: AGG
acagcattcccacgacatcc

SEQ ID NO: 117179 - DNA, 20 bp, Artificial Sequence
  Description of Artificial Sequence: Synthetic oligonucleotide
  Target: LAMA2; (-) strand; PAM type: NRG; PAM sequence: CAG
tacagcattcccacgacatc

SEQ ID NO: 117180 - DNA, 20 bp, Artificial Sequence
  Description of Artificial Sequence: Synthetic oligonucleotide
  Target: LAMA2; (-) strand; PAM type: NRG; PAM sequence: CAG
atgggtaacccaccaacata

SEQ ID NO: 117181 - DNA, 20 bp, Artificial Sequence
  Description of Artificial Sequence: Synthetic oligonucleotide
  Target: LAMA2; (-) strand; PAM type: NRG; PAM sequence: GGG
cttcgggtagtgtagttgat

SEQ ID NO: 117182 - DNA, 20 bp, Artificial Sequence
  Description of Artificial Sequence: Synthetic oligonucleotide
  Target: LAMA2; (-) strand; PAM type: NRG; PAM sequence: TGG
tcttcgggtagtgtagttga

SEQ ID NO: 117183 - DNA, 20 bp, Artificial Sequence
  Description of Artificial Sequence: Synthetic oligonucleotide
  Target: LAMA2; (-) strand; PAM type: NRG; PAM sequence: TAG
gaccaattcttcgggtagtg

SEQ ID NO: 117184 - DNA, 20 bp, Artificial Sequence
  Description of Artificial Sequence: Synthetic oligonucleotide
  Target: LAMA2; (-) strand; PAM type: NRG; PAM sequence: TAG
tactggaccaattcttcggg

SEQ ID NO: 117185 - DNA, 20 bp, Artificial Sequence
  Description of Artificial Sequence: Synthetic oligonucleotide
  Target: LAMA2; (-) strand; PAM type: NRG; PAM sequence: GGG
atttactggaccaattcttc

SEQ ID NO: 117186 - DNA, 20 bp, Artificial Sequence
  Description of Artificial Sequence: Synthetic oligonucleotide
  Target: LAMA2; (-) strand; PAM type: NRG; PAM sequence: CGG
tatttactggaccaattctt

SEQ ID NO: 117187 - DNA, 20 bp, Artificial Sequence
  Description of Artificial Sequence: Synthetic oligonucleotide
  Target: LAMA2; (-) strand; PAM type: NRG; PAM sequence: TGG
agaagaaatcagatatttac

SEQ ID NO: 117188 - DNA, 20 bp, Artificial Sequence
  Description of Artificial Sequence: Synthetic oligonucleotide
  Target: LAMA2; (-) strand; PAM type: NRG; PAM sequence: CAG
ttaagtaataaagaagaaat

SEQ ID NO: 117189 - DNA, 20 bp, Artificial Sequence
  Description of Artificial Sequence: Synthetic oligonucleotide
  Target: LAMA2; (-) strand; PAM type: NRG; PAM sequence: AAG
catatatttaagtaataaag

SEQ ID NO: 117190 - DNA, 20 bp, Artificial Sequence
  Description of Artificial Sequence: Synthetic oligonucleotide
  Target: LAMA2; (-) strand; PAM type: NRG; PAM sequence: AAG
agccatatatttaagtaata

SEQ ID NO: 117191 - DNA, 20 bp, Artificial Sequence
  Description of Artificial Sequence: Synthetic oligonucleotide
  Target: LAMA2; (-) strand; PAM type: NRG; PAM sequence: AAG
aatgaatcagccatatattt

SEQ ID NO: 117192 - DNA, 20 bp, Artificial Sequence
  Description of Artificial Sequence: Synthetic oligonucleotide
  Target: LAMA2; (-) strand; PAM type: NRG; PAM sequence: CAG
aaatatatcaataaatgaat

SEQ ID NO: 117193 - DNA, 20 bp, Artificial Sequence
  Description of Artificial Sequence: Synthetic oligonucleotide
  Target: LAMA2; (-) strand; PAM type: NRG; PAM sequence: AAG
atgggcccatgtgacctaat

SEQ ID NO: 117194 - DNA, 20 bp, Artificial Sequence
  Description of Artificial Sequence: Synthetic oligonucleotide
  Target: LAMA2; (-) strand; PAM type: NRG; PAM sequence: GGG
attcacctatcagttttcat

SEQ ID NO: 117195 - DNA, 20 bp, Artificial Sequence
  Description of Artificial Sequence: Synthetic oligonucleotide
  Target: LAMA2; (-) strand; PAM type: NRG; PAM sequence: TGG
tattcacctatcagttttca

SEQ ID NO: 117196 - DNA, 20 bp, Artificial Sequence
  Description of Artificial Sequence: Synthetic oligonucleotide
  Target: LAMA2; (-) strand; PAM type: NRG; PAM sequence: CAG
atgacttcctattcacctat

SEQ ID NO: 117197 - DNA, 20 bp, Artificial Sequence
  Description of Artificial Sequence: Synthetic oligonucleotide
  Target: LAMA2; (-) strand; PAM type: NRG; PAM sequence: AAG
ccttctgtcccttatcagaa

SEQ ID NO: 117198 - DNA, 20 bp, Artificial Sequence
  Description of Artificial Sequence: Synthetic oligonucleotide
  Target: LAMA2; (-) strand; PAM type: NRG; PAM sequence: CAG
caaacccttctgtcccttat

SEQ ID NO: 117199 - DNA, 20 bp, Artificial Sequence
  Description of Artificial Sequence: Synthetic oligonucleotide
  Target: LAMA2; (-) strand; PAM type: NRG; PAM sequence: GAG
tccagcctgggcgacagagc

SEQ ID NO: 117200 - DNA, 20 bp, Artificial Sequence
  Description of Artificial Sequence: Synthetic oligonucleotide
  Target: LAMA2; (-) strand; PAM type: NRG; PAM sequence: GAG
gcactccagcctgggcgaca

SEQ ID NO: 117201 - DNA, 20 bp, Artificial Sequence
  Description of Artificial Sequence: Synthetic oligonucleotide
  Target: LAMA2; (-) strand; PAM type: NRG; PAM sequence: CAG
ctgcactccagcctgggcga

SEQ ID NO: 117202 - DNA, 20 bp, Artificial Sequence
  Description of Artificial Sequence: Synthetic oligonucleotide
  Target: LAMA2; (-) strand; PAM type: NRG; PAM sequence: GGG
gcaccactgcactccagcct

SEQ ID NO: 117203 - DNA, 20 bp, Artificial Sequence
  Description of Artificial Sequence: Synthetic oligonucleotide
  Target: LAMA2; (-) strand; PAM type: NRG; PAM sequence: TGG
cgcaccactgcactccagcc

SEQ ID NO: 117204 - DNA, 20 bp, Artificial Sequence
  Description of Artificial Sequence: Synthetic oligonucleotide
  Target: LAMA2; (-) strand; PAM type: NRG; PAM sequence: CAG
aagatcgcaccactgcactc

SEQ ID NO: 117205 - DNA, 20 bp, Artificial Sequence
  Description of Artificial Sequence: Synthetic oligonucleotide
  Target: LAMA2; (-) strand; PAM type: NRG; PAM sequence: AAG
gggagagcttgcagtgagcc

SEQ ID NO: 117206 - DNA, 20 bp, Artificial Sequence
  Description of Artificial Sequence: Synthetic oligonucleotide
  Target: LAMA2; (-) strand; PAM type: NRG; PAM sequence: GAG
cgggagggagagcttgcagt

SEQ ID NO: 117207 - DNA, 20 bp, Artificial Sequence
  Description of Artificial Sequence: Synthetic oligonucleotide
  Target: LAMA2; (-) strand; PAM type: NRG; PAM sequence: CAG
aacccgggagggagagcttg

SEQ ID NO: 117208 - DNA, 20 bp, Artificial Sequence
  Description of Artificial Sequence: Synthetic oligonucleotide
  Target: LAMA2; (-) strand; PAM type: NRG; PAM sequence: GAG
tggcgtgaacccgggaggga

SEQ ID NO: 117209 - DNA, 20 bp, Artificial Sequence
  Description of Artificial Sequence: Synthetic oligonucleotide
  Target: LAMA2; (-) strand; PAM type: NRG; PAM sequence: GAG
aatggcgtgaacccgggagg

SEQ ID NO: 117210 - DNA, 20 bp, Artificial Sequence
  Description of Artificial Sequence: Synthetic oligonucleotide
  Target: LAMA2; (-) strand; PAM type: NRG; PAM sequence: GGG
agaatggcgtgaacccggga

SEQ ID NO: 117211 - DNA, 20 bp, Artificial Sequence
  Description of Artificial Sequence: Synthetic oligonucleotide
  Target: LAMA2; (-) strand; PAM type: NRG; PAM sequence: AGG
gagaatggcgtgaacccggg

SEQ ID NO: 117212 - DNA, 20 bp, Artificial Sequence
  Description of Artificial Sequence: Synthetic oligonucleotide
  Target: LAMA2; (-) strand; PAM type: NRG; PAM sequence: GAG
ggagaatggcgtgaacccgg

SEQ ID NO: 117213 - DNA, 20 bp, Artificial Sequence
  Description of Artificial Sequence: Synthetic oligonucleotide
  Target: LAMA2; (-) strand; PAM type: NRG; PAM sequence: GGG
caggagaatggcgtgaaccc

SEQ ID NO: 117214 - DNA, 20 bp, Artificial Sequence
  Description of Artificial Sequence: Synthetic oligonucleotide
  Target: LAMA2; (-) strand; PAM type: NRG; PAM sequence: CGG
gcaggagaatggcgtgaacc

SEQ ID NO: 117215 - DNA, 20 bp, Artificial Sequence
  Description of Artificial Sequence: Synthetic oligonucleotide
  Target: LAMA2; (-) strand; PAM type: NRG; PAM sequence: TGG
gggaggctgaggcaggagaa

SEQ ID NO: 117216 - DNA, 20 bp, Artificial Sequence
  Description of Artificial Sequence: Synthetic oligonucleotide
  Target: LAMA2; (-) strand; PAM type: NRG; PAM sequence: GAG
tactagggaggctgaggcag

SEQ ID NO: 117217 - DNA, 20 bp, Artificial Sequence
  Description of Artificial Sequence: Synthetic oligonucleotide
  Target: LAMA2; (-) strand; PAM type: NRG; PAM sequence: AGG
gctactagggaggctgaggc

SEQ ID NO: 117218 - DNA, 20 bp, Artificial Sequence
  Description of Artificial Sequence: Synthetic oligonucleotide
  Target: LAMA2; (-) strand; PAM type: NRG; PAM sequence: CAG
agctactagggaggctgagg

SEQ ID NO: 117219 - DNA, 20 bp, Artificial Sequence
  Description of Artificial Sequence: Synthetic oligonucleotide
  Target: LAMA2; (-) strand; PAM type: NRG; PAM sequence: AGG
cccagctactagggaggctg

SEQ ID NO: 117220 - DNA, 20 bp, Artificial Sequence
  Description of Artificial Sequence: Synthetic oligonucleotide
  Target: LAMA2; (-) strand; PAM type: NRG; PAM sequence: GAG
tcccagctactagggaggct

SEQ ID NO: 117221 - DNA, 20 bp, Artificial Sequence
  Description of Artificial Sequence: Synthetic oligonucleotide
  Target: LAMA2; (-) strand; PAM type: NRG; PAM sequence: AGG
tgtagtcccagctactaggg

SEQ ID NO: 117222 - DNA, 20 bp, Artificial Sequence
  Description of Artificial Sequence: Synthetic oligonucleotide
  Target: LAMA2; (-) strand; PAM type: NRG; PAM sequence: GAG
ctgtagtcccagctactagg

SEQ ID NO: 117223 - DNA, 20 bp, Artificial Sequence
  Description of Artificial Sequence: Synthetic oligonucleotide
  Target: LAMA2; (-) strand; PAM type: NRG; PAM sequence: GGG
acctgtagtcccagctacta

SEQ ID NO: 117224 - DNA, 20 bp, Artificial Sequence
  Description of Artificial Sequence: Synthetic oligonucleotide
  Target: LAMA2; (-) strand; PAM type: NRG; PAM sequence: AGG
cacctgtagtcccagctact

SEQ ID NO: 117225 - DNA, 20 bp, Artificial Sequence
  Description of Artificial Sequence: Synthetic oligonucleotide
  Target: LAMA2; (-) strand; PAM type: NRG; PAM sequence: TAG
gcacctgtagtcccagctac

SEQ ID NO: 117226 - DNA, 20 bp, Artificial Sequence
  Description of Artificial Sequence: Synthetic oligonucleotide
  Target: LAMA2; (-) strand; PAM type: NRG; PAM sequence: CAG
gtggtaggcacctgtagtcc

SEQ ID NO: 117227 - DNA, 20 bp, Artificial Sequence
  Description of Artificial Sequence: Synthetic oligonucleotide
  Target: LAMA2; (-) strand; PAM type: NRG; PAM sequence: TAG
ggcgtggtggtaggcacctg

SEQ ID NO: 117228 - DNA, 20 bp, Artificial Sequence
  Description of Artificial Sequence: Synthetic oligonucleotide
  Target: LAMA2; (-) strand; PAM type: NRG; PAM sequence: AGG
aattagccaggcgtggtggt

SEQ ID NO: 117229 - DNA, 20 bp, Artificial Sequence
  Description of Artificial Sequence: Synthetic oligonucleotide
  Target: LAMA2; (-) strand; PAM type: NRG; PAM sequence: TAG
aaattagccaggcgtggtgg

SEQ ID NO: 117230 - DNA, 20 bp, Artificial Sequence
  Description of Artificial Sequence: Synthetic oligonucleotide
  Target: LAMA2; (-) strand; PAM type: NRG; PAM sequence: TGG
aaaaaattagccaggcgtgg

SEQ ID NO: 117231 - DNA, 20 bp, Artificial Sequence
  Description of Artificial Sequence: Synthetic oligonucleotide
  Target: LAMA2; (-) strand; PAM type: NRG; PAM sequence: TGG
tacaaaaaattagccaggcg

SEQ ID NO: 117232 - DNA, 20 bp, Artificial Sequence
  Description of Artificial Sequence: Synthetic oligonucleotide
  Target: LAMA2; (-) strand; PAM type: NRG; PAM sequence: AGG
aaaagtacaaaaaattagcc

SEQ ID NO: 117233 - DNA, 20 bp, Artificial Sequence
  Description of Artificial Sequence: Synthetic oligonucleotide
  Target: LAMA2; (-) strand; PAM type: NRG; PAM sequence: CAG
taaaagtacaaaaaattagc

SEQ ID NO: 117234 - DNA, 20 bp, Artificial Sequence
  Description of Artificial Sequence: Synthetic oligonucleotide
  Target: LAMA2; (-) strand; PAM type: NRG; PAM sequence: TAG
ctattaaaagtacaaaaaat

SEQ ID NO: 117235 - DNA, 20 bp, Artificial Sequence
  Description of Artificial Sequence: Synthetic oligonucleotide
  Target: LAMA2; (-) strand; PAM type: NRG; PAM sequence: AAG
gtacaccccgtctctattaa

SEQ ID NO: 117236 - DNA, 20 bp, Artificial Sequence
  Description of Artificial Sequence: Synthetic oligonucleotide
  Target: LAMA2; (-) strand; PAM type: NRG; PAM sequence: AAG
aaaccccccgtctctattaa

SEQ ID NO: 117237 - DNA, 20 bp, Artificial Sequence
  Description of Artificial Sequence: Synthetic oligonucleotide
  Target: LAMA2; (-) strand; PAM type: NRG; PAM sequence: CAG
tgagaccatcctggctaaca

SEQ ID NO: 117238 - DNA, 20 bp, Artificial Sequence
  Description of Artificial Sequence: Synthetic oligonucleotide
  Target: LAMA2; (-) strand; PAM type: NRG; PAM sequence: TGG
tcaggagattgagaccatcc

SEQ ID NO: 117239 - DNA, 20 bp, Artificial Sequence
  Description of Artificial Sequence: Synthetic oligonucleotide
  Target: LAMA2; (-) strand; PAM type: NRG; PAM sequence: GAG
gatcatgaggtcaggagatt

SEQ ID NO: 117240 - DNA, 20 bp, Artificial Sequence
  Description of Artificial Sequence: Synthetic oligonucleotide
  Target: LAMA2; (-) strand; PAM type: NRG; PAM sequence: GAG
caggcggatcatgaggtcag

SEQ ID NO: 117241 - DNA, 20 bp, Artificial Sequence
  Description of Artificial Sequence: Synthetic oligonucleotide
  Target: LAMA2; (-) strand; PAM type: NRG; PAM sequence: AGG
ggcaggcggatcatgaggtc

SEQ ID NO: 117242 - DNA, 20 bp, Artificial Sequence
  Description of Artificial Sequence: Synthetic oligonucleotide
  Target: LAMA2; (-) strand; PAM type: NRG; PAM sequence: CAG
aggcaggcggatcatgaggt

SEQ ID NO: 117243 - DNA, 20 bp, Artificial Sequence
  Description of Artificial Sequence: Synthetic oligonucleotide
  Target: LAMA2; (-) strand; PAM type: NRG; PAM sequence: AGG
gccgaggcaggcggatcatg

SEQ ID NO: 117244 - DNA, 20 bp, Artificial Sequence
  Description of Artificial Sequence: Synthetic oligonucleotide
  Target: LAMA2; (-) strand; PAM type: NRG; PAM sequence: GAG
ggccgaggcaggcggatcat

SEQ ID NO: 117245 - DNA, 20 bp, Artificial Sequence
  Description of Artificial Sequence: Synthetic oligonucleotide
  Target: LAMA2; (-) strand; PAM type: NRG; PAM sequence: CGG
ctttgggaggccgaggcagg

SEQ ID NO: 117246 - DNA, 20 bp, Artificial Sequence
  Description of Artificial Sequence: Synthetic oligonucleotide
  Target: LAMA2; (-) strand; PAM type: NRG; PAM sequence: AGG
gcactttgggaggccgaggc

SEQ ID NO: 117247 - DNA, 20 bp, Artificial Sequence
  Description of Artificial Sequence: Synthetic oligonucleotide
  Target: LAMA2; (-) strand; PAM type: NRG; PAM sequence: CAG
agcactttgggaggccgagg

SEQ ID NO: 117248 - DNA, 20 bp, Artificial Sequence
  Description of Artificial Sequence: Synthetic oligonucleotide
  Target: LAMA2; (-) strand; PAM type: NRG; PAM sequence: AGG
cccagcactttgggaggccg

SEQ ID NO: 117249 - DNA, 20 bp, Artificial Sequence
  Description of Artificial Sequence: Synthetic oligonucleotide
  Target: LAMA2; (-) strand; PAM type: NRG; PAM sequence: GAG
tcccagcactttgggaggcc

SEQ ID NO: 117250 - DNA, 20 bp, Artificial Sequence
  Description of Artificial Sequence: Synthetic oligonucleotide
  Target: LAMA2; (-) strand; PAM type: NRG; PAM sequence: AGG
tgtaatcccagcactttggg

SEQ ID NO: 117251 - DNA, 20 bp, Artificial Sequence
  Description of Artificial Sequence: Synthetic oligonucleotide
  Target: LAMA2; (-) strand; PAM type: NRG; PAM sequence: GAG
ctgtaatcccagcactttgg

SEQ ID NO: 117252 - DNA, 20 bp, Artificial Sequence
  Description of Artificial Sequence: Synthetic oligonucleotide
  Target: LAMA2; (-) strand; PAM type: NRG; PAM sequence: GGG
gcctgtaatcccagcacttt

SEQ ID NO: 117253 - DNA, 20 bp, Artificial Sequence
  Description of Artificial Sequence: Synthetic oligonucleotide
  Target: LAMA2; (-) strand; PAM type: NRG; PAM sequence: TGG
ggcctgtaatcccagcactt

SEQ ID NO: 117254 - DNA, 20 bp, Artificial Sequence
  Description of Artificial Sequence: Synthetic oligonucleotide
  Target: LAMA2; (-) strand; PAM type: NRG; PAM sequence: CAG
gtggctcaggcctgtaatcc

SEQ ID NO: 117255 - DNA, 20 bp, Artificial Sequence
  Description of Artificial Sequence: Synthetic oligonucleotide
  Target: LAMA2; (-) strand; PAM type: NRG; PAM sequence: AGG
tcagctgggcgaggtggctc

SEQ ID NO: 117256 - DNA, 20 bp, Artificial Sequence
  Description of Artificial Sequence: Synthetic oligonucleotide
  Target: LAMA2; (-) strand; PAM type: NRG; PAM sequence: CAG
gtcagctgggcgaggtggct

SEQ ID NO: 117257 - DNA, 20 bp, Artificial Sequence
  Description of Artificial Sequence: Synthetic oligonucleotide
  Target: LAMA2; (-) strand; PAM type: NRG; PAM sequence: TGG
cttctgtcagctgggcgagg

SEQ ID NO: 117258 - DNA, 20 bp, Artificial Sequence
  Description of Artificial Sequence: Synthetic oligonucleotide
  Target: LAMA2; (-) strand; PAM type: NRG; PAM sequence: AGG
aaccttctgtcagctgggcg

SEQ ID NO: 117259 - DNA, 20 bp, Artificial Sequence
  Description of Artificial Sequence: Synthetic oligonucleotide
  Target: LAMA2; (-) strand; PAM type: NRG; PAM sequence: GAG
aaaccttctgtcagctgggc

SEQ ID NO: 117260 - DNA, 20 bp, Artificial Sequence
  Description of Artificial Sequence: Synthetic oligonucleotide
  Target: LAMA2; (-) strand; PAM type: NRG; PAM sequence: GGG
taaaaaaccttctgtcagct

SEQ ID NO: 117261 - DNA, 20 bp, Artificial Sequence
  Description of Artificial Sequence: Synthetic oligonucleotide
  Target: LAMA2; (-) strand; PAM type: NRG; PAM sequence: TGG
ctaaaaaaccttctgtcagc

SEQ ID NO: 117262 - DNA, 20 bp, Artificial Sequence
  Description of Artificial Sequence: Synthetic oligonucleotide
  Target: LAMA2; (-) strand; PAM type: NRG; PAM sequence: CAG
ctatctaaaaaaccttctgt

SEQ ID NO: 117263 - DNA, 20 bp, Artificial Sequence
  Description of Artificial Sequence: Synthetic oligonucleotide
  Target: LAMA2; (-) strand; PAM type: NRG; PAM sequence: TGG
gttccccactcagtgttccg

SEQ ID NO: 117264 - DNA, 20 bp, Artificial Sequence
  Description of Artificial Sequence: Synthetic oligonucleotide
  Target: LAMA2; (-) strand; PAM type: NRG; PAM sequence: CAG
ttggctccaggttccccact

SEQ ID NO: 117265 - DNA, 20 bp, Artificial Sequence
  Description of Artificial Sequence: Synthetic oligonucleotide
  Target: LAMA2; (-) strand; PAM type: NRG; PAM sequence: AGG
aaccaagacagtttggctcc

SEQ ID NO: 117266 - DNA, 20 bp, Artificial Sequence
  Description of Artificial Sequence: Synthetic oligonucleotide
  Target: LAMA2; (-) strand; PAM type: NRG; PAM sequence: CAG
aaaccaagacagtttggctc

SEQ ID NO: 117267 - DNA, 20 bp, Artificial Sequence
  Description of Artificial Sequence: Synthetic oligonucleotide
  Target: LAMA2; (-) strand; PAM type: NRG; PAM sequence: TGG
gtattcaaaccaagacagtt

SEQ ID NO: 117268 - DNA, 20 bp, Artificial Sequence
  Description of Artificial Sequence: Synthetic oligonucleotide
  Target: LAMA2; (-) strand; PAM type: NRG; PAM sequence: CAG
aataggtattcaaaccaaga

SEQ ID NO: 117269 - DNA, 20 bp, Artificial Sequence
  Description of Artificial Sequence: Synthetic oligonucleotide
  Target: LAMA2; (-) strand; PAM type: NRG; PAM sequence: AAG
gttaaataggtattcaaacc

SEQ ID NO: 117270 - DNA, 20 bp, Artificial Sequence
  Description of Artificial Sequence: Synthetic oligonucleotide
  Target: LAMA2; (-) strand; PAM type: NRG; PAM sequence: AGG
cagctagtcaatagttaaat

SEQ ID NO: 117271 - DNA, 20 bp, Artificial Sequence
  Description of Artificial Sequence: Synthetic oligonucleotide
  Target: LAMA2; (-) strand; PAM type: NRG; PAM sequence: TAG
acagctagtcaatagttaaa

SEQ ID NO: 117272 - DNA, 20 bp, Artificial Sequence
  Description of Artificial Sequence: Synthetic oligonucleotide
  Target: LAMA2; (-) strand; PAM type: NRG; PAM sequence: TAG
caaaacacacagctagtcaa

SEQ ID NO: 117273 - DNA, 20 bp, Artificial Sequence
  Description of Artificial Sequence: Synthetic oligonucleotide
  Target: LAMA2; (-) strand; PAM type: NRG; PAM sequence: TAG
cttgctccaaaacacacagc

SEQ ID NO: 117274 - DNA, 20 bp, Artificial Sequence
  Description of Artificial Sequence: Synthetic oligonucleotide
  Target: LAMA2; (-) strand; PAM type: NRG; PAM sequence: CAG
ttaacttgctccaaaacaca

SEQ ID NO: 117275 - DNA, 20 bp, Artificial Sequence
  Description of Artificial Sequence: Synthetic oligonucleotide
  Target: LAMA2; (-) strand; PAM type: NRG; PAM sequence: AAG
aagagaaatctttgttaaaa

SEQ ID NO: 117276 - DNA, 20 bp, Artificial Sequence
  Description of Artificial Sequence: Synthetic oligonucleotide
  Target: LAMA2; (-) strand; PAM type: NRG; PAM sequence: GAG
cattaccctgttttgcaaaa

SEQ ID NO: 117277 - DNA, 20 bp, Artificial Sequence
  Description of Artificial Sequence: Synthetic oligonucleotide
  Target: LAMA2; (-) strand; PAM type: NRG; PAM sequence: AAG
atcattaccctgttttgcaa

SEQ ID NO: 117278 - DNA, 20 bp, Artificial Sequence
  Description of Artificial Sequence: Synthetic oligonucleotide
  Target: LAMA2; (-) strand; PAM type: NRG; PAM sequence: TAG
tttatgcaatcctttttgtt

SEQ ID NO: 117279 - DNA, 20 bp, Artificial Sequence
  Description of Artificial Sequence: Synthetic oligonucleotide
  Target: LAMA2; (-) strand; PAM type: NRG; PAM sequence: GAG
agtgctgggattacaggtgt

SEQ ID NO: 117280 - DNA, 20 bp, Artificial Sequence
  Description of Artificial Sequence: Synthetic oligonucleotide
  Target: LAMA2; (-) strand; PAM type: NRG; PAM sequence: AGG
tcccaaagtgctgggattac

SEQ ID NO: 117281 - DNA, 20 bp, Artificial Sequence
  Description of Artificial Sequence: Synthetic oligonucleotide
  Target: LAMA2; (-) strand; PAM type: NRG; PAM sequence: CAG
ctcccaaagtgctgggatta

SEQ ID NO: 117282 - DNA, 20 bp, Artificial Sequence
  Description of Artificial Sequence: Synthetic oligonucleotide
  Target: LAMA2; (-) strand; PAM type: NRG; PAM sequence: GGG
ccttggcctcccaaagtgct

SEQ ID NO: 117283 - DNA, 20 bp, Artificial Sequence
  Description of Artificial Sequence: Synthetic oligonucleotide
  Target: LAMA2; (-) strand; PAM type: NRG; PAM sequence: TGG
gccttggcctcccaaagtgc

SEQ ID NO: 117284 - DNA, 20 bp, Artificial Sequence
  Description of Artificial Sequence: Synthetic oligonucleotide
  Target: LAMA2; (-) strand; PAM type: NRG; PAM sequence: AAG
ctgcctgccttggcctccca

SEQ ID NO: 117285 - DNA, 20 bp, Artificial Sequence
  Description of Artificial Sequence: Synthetic oligonucleotide
  Target: LAMA2; (-) strand; PAM type: NRG; PAM sequence: TGG
ctcaagtgatctgcctgcct

SEQ ID NO: 117286 - DNA, 20 bp, Artificial Sequence
  Description of Artificial Sequence: Synthetic oligonucleotide
  Target: LAMA2; (-) strand; PAM type: NRG; PAM sequence: AAG
catcttgaactcctggtctc

SEQ ID NO: 117287 - DNA, 20 bp, Artificial Sequence
  Description of Artificial Sequence: Synthetic oligonucleotide
  Target: LAMA2; (-) strand; PAM type: NRG; PAM sequence: TGG
ccaggctcatcttgaactcc

SEQ ID NO: 117288 - DNA, 20 bp, Artificial Sequence
  Description of Artificial Sequence: Synthetic oligonucleotide
  Target: LAMA2; (-) strand; PAM type: NRG; PAM sequence: AGG
agggttttgctatgatggcc

SEQ ID NO: 117289 - DNA, 20 bp, Artificial Sequence
  Description of Artificial Sequence: Synthetic oligonucleotide
  Target: LAMA2; (-) strand; PAM type: NRG; PAM sequence: CAG
cagggttttgctatgatggc

SEQ ID NO: 117290 - DNA, 20 bp, Artificial Sequence
  Description of Artificial Sequence: Synthetic oligonucleotide
  Target: LAMA2; (-) strand; PAM type: NRG; PAM sequence: TGG
gagacagggttttgctatga

SEQ ID NO: 117291 - DNA, 20 bp, Artificial Sequence
  Description of Artificial Sequence: Synthetic oligonucleotide
  Target: LAMA2; (-) strand; PAM type: NRG; PAM sequence: GGG
tttgtatttttgtagagaca

SEQ ID NO: 117292 - DNA, 20 bp, Artificial Sequence
  Description of Artificial Sequence: Synthetic oligonucleotide
  Target: LAMA2; (-) strand; PAM type: NRG; PAM sequence: AGG
ttttgtatttttgtagagac

SEQ ID NO: 117293 - DNA, 20 bp, Artificial Sequence
  Description of Artificial Sequence: Synthetic oligonucleotide
  Target: LAMA2; (-) strand; PAM type: NRG; PAM sequence: CAG
tttttgtatttttgtagaga

SEQ ID NO: 117294 - DNA, 20 bp, Artificial Sequence
  Description of Artificial Sequence: Synthetic oligonucleotide
  Target: LAMA2; (-) strand; PAM type: NRG; PAM sequence: GAG
taactttttgtatttttgta

SEQ ID NO: 117295 - DNA, 20 bp, Artificial Sequence
  Description of Artificial Sequence: Synthetic oligonucleotide
  Target: LAMA2; (-) strand; PAM type: NRG; PAM sequence: TAG
gctaactttttgtatttttg

SEQ ID NO: 117296 - DNA, 20 bp, Artificial Sequence
  Description of Artificial Sequence: Synthetic oligonucleotide
  Target: LAMA2; (-) strand; PAM type: NRG; PAM sequence: TGG
cagacacacaccaccacacc

SEQ ID NO: 117297 - DNA, 20 bp, Artificial Sequence
  Description of Artificial Sequence: Synthetic oligonucleotide
  Target: LAMA2; (-) strand; PAM type: NRG; PAM sequence: CAG
ctccaaagtagctgggacta

SEQ ID NO: 117298 - DNA, 20 bp, Artificial Sequence
  Description of Artificial Sequence: Synthetic oligonucleotide
  Target: LAMA2; (-) strand; PAM type: NRG; PAM sequence: GGG
cctcagcctccaaagtagct

SEQ ID NO: 117299 - DNA, 20 bp, Artificial Sequence
  Description of Artificial Sequence: Synthetic oligonucleotide
  Target: LAMA2; (-) strand; PAM type: NRG; PAM sequence: TGG
gcctcagcctccaaagtagc

SEQ ID NO: 117300 - DNA, 20 bp, Artificial Sequence
  Description of Artificial Sequence: Synthetic oligonucleotide
  Target: LAMA2; (-) strand; PAM type: NRG; PAM sequence: TAG
tcttgcctcagcctccaaag

SEQ ID NO: 117301 - DNA, 20 bp, Artificial Sequence
  Description of Artificial Sequence: Synthetic oligonucleotide
  Target: LAMA2; (-) strand; PAM type: NRG; PAM sequence: AAG
ttctcttgcctcagcctcca

SEQ ID NO: 117302 - DNA, 20 bp, Artificial Sequence
  Description of Artificial Sequence: Synthetic oligonucleotide
  Target: LAMA2; (-) strand; PAM type: NRG; PAM sequence: CAG
ttcaagtgattctcttgcct

SEQ ID NO: 117303 - DNA, 20 bp, Artificial Sequence
  Description of Artificial Sequence: Synthetic oligonucleotide
  Target: LAMA2; (-) strand; PAM type: NRG; PAM sequence: AAG
aacctctgaccctcgggttc

SEQ ID NO: 117304 - DNA, 20 bp, Artificial Sequence
  Description of Artificial Sequence: Synthetic oligonucleotide
  Target: LAMA2; (-) strand; PAM type: NRG; PAM sequence: GGG
cactgcaacctctgaccctc

SEQ ID NO: 117305 - DNA, 20 bp, Artificial Sequence
  Description of Artificial Sequence: Synthetic oligonucleotide
  Target: LAMA2; (-) strand; PAM type: NRG; PAM sequence: CGG
tcactgcaacctctgaccct

SEQ ID NO: 117306 - DNA, 20 bp, Artificial Sequence
  Description of Artificial Sequence: Synthetic oligonucleotide
  Target: LAMA2; (-) strand; PAM type: NRG; PAM sequence: CAG
ggaatgcagtggtgctatta

SEQ ID NO: 117307 - DNA, 20 bp, Artificial Sequence
  Description of Artificial Sequence: Synthetic oligonucleotide
  Target: LAMA2; (-) strand; PAM type: NRG; PAM sequence: TGG
ttgcccaggctggaatgcag

SEQ ID NO: 117308 - DNA, 20 bp, Artificial Sequence
  Description of Artificial Sequence: Synthetic oligonucleotide
  Target: LAMA2; (-) strand; PAM type: NRG; PAM sequence: CAG
ctgttgcccaggctggaatg

SEQ ID NO: 117309 - DNA, 20 bp, Artificial Sequence
  Description of Artificial Sequence: Synthetic oligonucleotide
  Target: LAMA2; (-) strand; PAM type: NRG; PAM sequence: TGG
tctcgctctgttgcccaggc

SEQ ID NO: 117310 - DNA, 20 bp, Artificial Sequence
  Description of Artificial Sequence: Synthetic oligonucleotide
  Target: LAMA2; (-) strand; PAM type: NRG; PAM sequence: AGG
agggtctcgctctgttgccc

SEQ ID NO: 117311 - DNA, 20 bp, Artificial Sequence
  Description of Artificial Sequence: Synthetic oligonucleotide
  Target: LAMA2; (-) strand; PAM type: NRG; PAM sequence: CAG
cagggtctcgctctgttgcc

SEQ ID NO: 117312 - DNA, 20 bp, Artificial Sequence
  Description of Artificial Sequence: Synthetic oligonucleotide
  Target: LAMA2; (-) strand; PAM type: NRG; PAM sequence: GGG
ttatttatttttttgagaca

SEQ ID NO: 117313 - DNA, 20 bp, Artificial Sequence
  Description of Artificial Sequence: Synthetic oligonucleotide
  Target: LAMA2; (-) strand; PAM type: NRG; PAM sequence: AGG
tttatttatttttttgagac

SEQ ID NO: 117314 - DNA, 20 bp, Artificial Sequence
  Description of Artificial Sequence: Synthetic oligonucleotide
  Target: LAMA2; (-) strand; PAM type: NRG; PAM sequence: CAG
atttatttatttttttgaga

SEQ ID NO: 117315 - DNA, 20 bp, Artificial Sequence
  Description of Artificial Sequence: Synthetic oligonucleotide
  Target: LAMA2; (-) strand; PAM type: NRG; PAM sequence: GAG
atttatttatttattttttt

SEQ ID NO: 117316 - DNA, 20 bp, Artificial Sequence
  Description of Artificial Sequence: Synthetic oligonucleotide
  Target: LAMA2; (-) strand; PAM type: NRG; PAM sequence: CAG
ataccatcattttcatcttt

SEQ ID NO: 117317 - DNA, 20 bp, Artificial Sequence
  Description of Artificial Sequence: Synthetic oligonucleotide
  Target: LAMA2; (-) strand; PAM type: NRG; PAM sequence: TGG
ttaaattctgaatccaaaat

SEQ ID NO: 117318 - DNA, 20 bp, Artificial Sequence
  Description of Artificial Sequence: Synthetic oligonucleotide
  Target: LAMA2; (-) strand; PAM type: NRG; PAM sequence: GGG
attgatttacaaaactgtga

SEQ ID NO: 117319 - DNA, 20 bp, Artificial Sequence
  Description of Artificial Sequence: Synthetic oligonucleotide
  Target: LAMA2; (-) strand; PAM type: NRG; PAM sequence: AGG
tattgatttacaaaactgtg

SEQ ID NO: 117320 - DNA, 20 bp, Artificial Sequence
  Description of Artificial Sequence: Synthetic oligonucleotide
  Target: LAMA2; (-) strand; PAM type: NRG; PAM sequence: GAG
atattgatttacaaaactgt

SEQ ID NO: 117321 - DNA, 20 bp, Artificial Sequence
  Description of Artificial Sequence: Synthetic oligonucleotide
  Target: LAMA2; (-) strand; PAM type: NRG; PAM sequence: CGG
ccaaagcaaactaggataca

SEQ ID NO: 117322 - DNA, 20 bp, Artificial Sequence
  Description of Artificial Sequence: Synthetic oligonucleotide
  Target: LAMA2; (-) strand; PAM type: NRG; PAM sequence: AGG
aacactttccaaagcaaact

SEQ ID NO: 117323 - DNA, 20 bp, Artificial Sequence
  Description of Artificial Sequence: Synthetic oligonucleotide
  Target: LAMA2; (-) strand; PAM type: NRG; PAM sequence: TAG
taacactttccaaagcaaac

SEQ ID NO: 117324 - DNA, 20 bp, Artificial Sequence
  Description of Artificial Sequence: Synthetic oligonucleotide
  Target: LAMA2; (-) strand; PAM type: NRG; PAM sequence: AAG
tctcagagtaacactttcca

SEQ ID NO: 117325 - DNA, 20 bp, Artificial Sequence
  Description of Artificial Sequence: Synthetic oligonucleotide
  Target: LAMA2; (-) strand; PAM type: NRG; PAM sequence: GAG
aatcccccgtgcttctctca

SEQ ID NO: 117326 - DNA, 20 bp, Artificial Sequence
  Description of Artificial Sequence: Synthetic oligonucleotide
  Target: LAMA2; (-) strand; PAM type: NRG; PAM sequence: CAG
tcaatcccccgtgcttctct

SEQ ID NO: 117327 - DNA, 20 bp, Artificial Sequence
  Description of Artificial Sequence: Synthetic oligonucleotide
  Target: LAMA2; (-) strand; PAM type: NRG; PAM sequence: AAG
gtatctagtgtgttctctaa

SEQ ID NO: 117328 - DNA, 20 bp, Artificial Sequence
  Description of Artificial Sequence: Synthetic oligonucleotide
  Target: LAMA2; (-) strand; PAM type: NRG; PAM sequence: TAG
aaatgtatcacatttgtatc

SEQ ID NO: 117329 - DNA, 20 bp, Artificial Sequence
  Description of Artificial Sequence: Synthetic oligonucleotide
  Target: LAMA2; (-) strand; PAM type: NRG; PAM sequence: TAG
catgtgttctaatttgagta

SEQ ID NO: 117330 - DNA, 20 bp, Artificial Sequence
  Description of Artificial Sequence: Synthetic oligonucleotide
  Target: LAMA2; (-) strand; PAM type: NRG; PAM sequence: GAG
attatcatgtgttctaattt

SEQ ID NO: 117331 - DNA, 20 bp, Artificial Sequence
  Description of Artificial Sequence: Synthetic oligonucleotide
  Target: LAMA2; (-) strand; PAM type: NRG; PAM sequence: GGG
ctgagaattacaactataat

SEQ ID NO: 117332 - DNA, 20 bp, Artificial Sequence
  Description of Artificial Sequence: Synthetic oligonucleotide
  Target: LAMA2; (-) strand; PAM type: NRG; PAM sequence: TGG
actgagaattacaactataa

SEQ ID NO: 117333 - DNA, 20 bp, Artificial Sequence
  Description of Artificial Sequence: Synthetic oligonucleotide
  Target: LAMA2; (-) strand; PAM type: NRG; PAM sequence: GAG
cacaagagaagccaaatact

SEQ ID NO: 117334 - DNA, 20 bp, Artificial Sequence
  Description of Artificial Sequence: Synthetic oligonucleotide
  Target: LAMA2; (-) strand; PAM type: NRG; PAM sequence: AAG
atactgatcatccacaagag

SEQ ID NO: 117335 - DNA, 20 bp, Artificial Sequence
  Description of Artificial Sequence: Synthetic oligonucleotide
  Target: LAMA2; (-) strand; PAM type: NRG; PAM sequence: GAG
gtaatactgatcatccacaa

SEQ ID NO: 117336 - DNA, 20 bp, Artificial Sequence
  Description of Artificial Sequence: Synthetic oligonucleotide
  Target: LAMA2; (-) strand; PAM type: NRG; PAM sequence: AAG
aagtaatactgatcatccac

SEQ ID NO: 117337 - DNA, 20 bp, Artificial Sequence
  Description of Artificial Sequence: Synthetic oligonucleotide
  Target: LAMA2; (-) strand; PAM type: NRG; PAM sequence: AAG
atccaatacctatgaaagaa

SEQ ID NO: 117338 - DNA, 20 bp, Artificial Sequence
  Description of Artificial Sequence: Synthetic oligonucleotide
  Target: LAMA2; (-) strand; PAM type: NRG; PAM sequence: AAG
agcatatccaatacctatga

SEQ ID NO: 117339 - DNA, 20 bp, Artificial Sequence
  Description of Artificial Sequence: Synthetic oligonucleotide
  Target: LAMA2; (-) strand; PAM type: NRG; PAM sequence: AAG
tagtttttgatagacctaaa

SEQ ID NO: 117340 - DNA, 20 bp, Artificial Sequence
  Description of Artificial Sequence: Synthetic oligonucleotide
  Target: LAMA2; (-) strand; PAM type: NRG; PAM sequence: TAG
tcagagactttagtttttga

SEQ ID NO: 117341 - DNA, 20 bp, Artificial Sequence
  Description of Artificial Sequence: Synthetic oligonucleotide
  Target: LAMA2; (-) strand; PAM type: NRG; PAM sequence: TAG
cagtgtcacttcagagactt

SEQ ID NO: 117342 - DNA, 20 bp, Artificial Sequence
  Description of Artificial Sequence: Synthetic oligonucleotide
  Target: LAMA2; (-) strand; PAM type: NRG; PAM sequence: GAG
cttgtaccagtgtcacttca

SEQ ID NO: 117343 - DNA, 20 bp, Artificial Sequence
  Description of Artificial Sequence: Synthetic oligonucleotide
  Target: LAMA2; (-) strand; PAM type: NRG; PAM sequence: CAG
tgcttgtaccagtgtcactt

SEQ ID NO: 117344 - DNA, 20 bp, Artificial Sequence
  Description of Artificial Sequence: Synthetic oligonucleotide
  Target: LAMA2; (-) strand; PAM type: NRG; PAM sequence: CAG
ttcaagtgaattgcttgtac

SEQ ID NO: 117345 - DNA, 20 bp, Artificial Sequence
  Description of Artificial Sequence: Synthetic oligonucleotide
  Target: LAMA2; (-) strand; PAM type: NRG; PAM sequence: AAG
ttatctgtttttagaaattc

SEQ ID NO: 117346 - DNA, 20 bp, Artificial Sequence
  Description of Artificial Sequence: Synthetic oligonucleotide
  Target: LAMA2; (-) strand; PAM type: NRG; PAM sequence: TAG
cattatattttatctgtttt

SEQ ID NO: 117347 - DNA, 20 bp, Artificial Sequence
  Description of Artificial Sequence: Synthetic oligonucleotide
  Target: LAMA2; (-) strand; PAM type: NRG; PAM sequence: TGG
gaagtaactcaatcacactc

SEQ ID NO: 117348 - DNA, 20 bp, Artificial Sequence
  Description of Artificial Sequence: Synthetic oligonucleotide
  Target: LAMA2; (-) strand; PAM type: NRG; PAM sequence: AAG
tgggggttcaaggaatttag

SEQ ID NO: 117349 - DNA, 20 bp, Artificial Sequence
  Description of Artificial Sequence: Synthetic oligonucleotide
  Target: LAMA2; (-) strand; PAM type: NRG; PAM sequence: TAG
cattgggggttcaaggaatt

SEQ ID NO: 117350 - DNA, 20 bp, Artificial Sequence
  Description of Artificial Sequence: Synthetic oligonucleotide
  Target: LAMA2; (-) strand; PAM type: NRG; PAM sequence: AGG
catgaaacattgggggttca

SEQ ID NO: 117351 - DNA, 20 bp, Artificial Sequence
  Description of Artificial Sequence: Synthetic oligonucleotide
  Target: LAMA2; (-) strand; PAM type: NRG; PAM sequence: AAG
gcatgaaacattgggggttc

SEQ ID NO: 117352 - DNA, 20 bp, Artificial Sequence
  Description of Artificial Sequence: Synthetic oligonucleotide
  Target: LAMA2; (-) strand; PAM type: NRG; PAM sequence: GGG
aagtttgcatgaaacattgg

SEQ ID NO: 117353 - DNA, 20 bp, Artificial Sequence
  Description of Artificial Sequence: Synthetic oligonucleotide
  Target: LAMA2; (-) strand; PAM type: NRG; PAM sequence: GGG
aaagtttgcatgaaacattg

SEQ ID NO: 117354 - DNA, 20 bp, Artificial Sequence
  Description of Artificial Sequence: Synthetic oligonucleotide
  Target: LAMA2; (-) strand; PAM type: NRG; PAM sequence: GGG
gaaagtttgcatgaaacatt

SEQ ID NO: 117355 - DNA, 20 bp, Artificial Sequence
  Description of Artificial Sequence: Synthetic oligonucleotide
  Target: LAMA2; (-) strand; PAM type: NRG; PAM sequence: TGG
tgaaagtttgcatgaaacat

SEQ ID NO: 117356 - DNA, 20 bp, Artificial Sequence
  Description of Artificial Sequence: Synthetic oligonucleotide
  Target: LAMA2; (-) strand; PAM type: NRG; PAM sequence: AAG
caaatatgcataaaacttga

SEQ ID NO: 117357 - DNA, 20 bp, Artificial Sequence
  Description of Artificial Sequence: Synthetic oligonucleotide
  Target: LAMA2; (-) strand; PAM type: NRG; PAM sequence: AAG
aaagcagcagaccctcccct

SEQ ID NO: 117358 - DNA, 20 bp, Artificial Sequence
  Description of Artificial Sequence: Synthetic oligonucleotide
  Target: LAMA2; (-) strand; PAM type: NRG; PAM sequence: CAG
tgaatatctaatgaaagcag

SEQ ID NO: 117359 - DNA, 20 bp, Artificial Sequence
  Description of Artificial Sequence: Synthetic oligonucleotide
  Target: LAMA2; (-) strand; PAM type: NRG; PAM sequence: CAG
ttttgaatatctaatgaaag

SEQ ID NO: 117360 - DNA, 20 bp, Artificial Sequence
  Description of Artificial Sequence: Synthetic oligonucleotide
  Target: LAMA2; (-) strand; PAM type: NRG; PAM sequence: AAG
tccttttgaatatctaatga

SEQ ID NO: 117361 - DNA, 20 bp, Artificial Sequence
  Description of Artificial Sequence: Synthetic oligonucleotide
  Target: LAMA2; (-) strand; PAM type: NRG; PAM sequence: CAG
aaaggtaattaggtttggtt

SEQ ID NO: 117362 - DNA, 20 bp, Artificial Sequence
  Description of Artificial Sequence: Synthetic oligonucleotide
  Target: LAMA2; (-) strand; PAM type: NRG; PAM sequence: TGG
tttgaaaaggtaattaggtt

SEQ ID NO: 117363 - DNA, 20 bp, Artificial Sequence
  Description of Artificial Sequence: Synthetic oligonucleotide
  Target: LAMA2; (-) strand; PAM type: NRG; PAM sequence: AGG
ttctatttgaaaaggtaatt

SEQ ID NO: 117364 - DNA, 20 bp, Artificial Sequence
  Description of Artificial Sequence: Synthetic oligonucleotide
  Target: LAMA2; (-) strand; PAM type: NRG; PAM sequence: TAG
tttctatttgaaaaggtaat

SEQ ID NO: 117365 - DNA, 20 bp, Artificial Sequence
  Description of Artificial Sequence: Synthetic oligonucleotide
  Target: LAMA2; (-) strand; PAM type: NRG; PAM sequence: AGG
tgttcaatttctatttgaaa

SEQ ID NO: 117366 - DNA, 20 bp, Artificial Sequence
  Description of Artificial Sequence: Synthetic oligonucleotide
  Target: LAMA2; (-) strand; PAM type: NRG; PAM sequence: AAG
atgttcaatttctatttgaa

SEQ ID NO: 117367 - DNA, 20 bp, Artificial Sequence
  Description of Artificial Sequence: Synthetic oligonucleotide
  Target: LAMA2; (-) strand; PAM type: NRG; PAM sequence: TAG
actatatacccattttgtca

SEQ ID NO: 117368 - DNA, 20 bp, Artificial Sequence
  Description of Artificial Sequence: Synthetic oligonucleotide
  Target: LAMA2; (-) strand; PAM type: NRG; PAM sequence: TAG
tgattttatgtttctattaa

SEQ ID NO: 117369 - DNA, 20 bp, Artificial Sequence
  Description of Artificial Sequence: Synthetic oligonucleotide
  Target: LAMA2; (-) strand; PAM type: NRG; PAM sequence: TGG
ttggtatcataagttttaat

SEQ ID NO: 117370 - DNA, 20 bp, Artificial Sequence
  Description of Artificial Sequence: Synthetic oligonucleotide
  Target: LAMA2; (-) strand; PAM type: NRG; PAM sequence: AAG
gggccccatgttggtatcat

SEQ ID NO: 117371 - DNA, 20 bp, Artificial Sequence
  Description of Artificial Sequence: Synthetic oligonucleotide
  Target: LAMA2; (-) strand; PAM type: NRG; PAM sequence: TGG
cagagctatgggccccatgt

SEQ ID NO: 117372 - DNA, 20 bp, Artificial Sequence
  Description of Artificial Sequence: Synthetic oligonucleotide
  Target: LAMA2; (-) strand; PAM type: NRG; PAM sequence: GGG
cattggtttgacagagctat

SEQ ID NO: 117373 - DNA, 20 bp, Artificial Sequence
  Description of Artificial Sequence: Synthetic oligonucleotide
  Target: LAMA2; (-) strand; PAM type: NRG; PAM sequence: TGG
ccattggtttgacagagcta

SEQ ID NO: 117374 - DNA, 20 bp, Artificial Sequence
  Description of Artificial Sequence: Synthetic oligonucleotide
  Target: LAMA2; (-) strand; PAM type: NRG; PAM sequence: GAG
atgtctccattggtttgaca

SEQ ID NO: 117375 - DNA, 20 bp, Artificial Sequence
  Description of Artificial Sequence: Synthetic oligonucleotide
  Target: LAMA2; (-) strand; PAM type: NRG; PAM sequence: CAG
ctatgtctccattggtttga

SEQ ID NO: 117376 - DNA, 20 bp, Artificial Sequence
  Description of Artificial Sequence: Synthetic oligonucleotide
  Target: LAMA2; (-) strand; PAM type: NRG; PAM sequence: TGG
actgcacactatgtctccat

SEQ ID NO: 117377 - DNA, 20 bp, Artificial Sequence
  Description of Artificial Sequence: Synthetic oligonucleotide
  Target: LAMA2; (-) strand; PAM type: NRG; PAM sequence: TAG
ctggaatatgactgttctca

SEQ ID NO: 117378 - DNA, 20 bp, Artificial Sequence
  Description of Artificial Sequence: Synthetic oligonucleotide
  Target: LAMA2; (-) strand; PAM type: NRG; PAM sequence: TGG
caacttggatgtgtctatcc

SEQ ID NO: 117379 - DNA, 20 bp, Artificial Sequence
  Description of Artificial Sequence: Synthetic oligonucleotide
  Target: LAMA2; (-) strand; PAM type: NRG; PAM sequence: TGG
ctgtgttgtgcttctcaact

SEQ ID NO: 117380 - DNA, 20 bp, Artificial Sequence
  Description of Artificial Sequence: Synthetic oligonucleotide
  Target: LAMA2; (-) strand; PAM type: NRG; PAM sequence: CAG
caggcctcctggcatggatg

SEQ ID NO: 117381 - DNA, 20 bp, Artificial Sequence
  Description of Artificial Sequence: Synthetic oligonucleotide
  Target: LAMA2; (-) strand; PAM type: NRG; PAM sequence: TGG
taccaccaggcctcctggca

SEQ ID NO: 117382 - DNA, 20 bp, Artificial Sequence
  Description of Artificial Sequence: Synthetic oligonucleotide
  Target: LAMA2; (-) strand; PAM type: NRG; PAM sequence: TGG
tctgttaccaccaggcctcc

SEQ ID NO: 117383 - DNA, 20 bp, Artificial Sequence
  Description of Artificial Sequence: Synthetic oligonucleotide
  Target: LAMA2; (-) strand; PAM type: NRG; PAM sequence: AGG
ctgggttctctgttaccacc

SEQ ID NO: 117384 - DNA, 20 bp, Artificial Sequence
  Description of Artificial Sequence: Synthetic oligonucleotide
  Target: LAMA2; (-) strand; PAM type: NRG; PAM sequence: CAG
cctgggttctctgttaccac

SEQ ID NO: 117385 - DNA, 20 bp, Artificial Sequence
  Description of Artificial Sequence: Synthetic oligonucleotide
  Target: LAMA2; (-) strand; PAM type: NRG; PAM sequence: GGG
gatatcccccaaagctgcct

SEQ ID NO: 117386 - DNA, 20 bp, Artificial Sequence
  Description of Artificial Sequence: Synthetic oligonucleotide
  Target: LAMA2; (-) strand; PAM type: NRG; PAM sequence: TGG
ggatatcccccaaagctgcc

SEQ ID NO: 117387 - DNA, 20 bp, Artificial Sequence
  Description of Artificial Sequence: Synthetic oligonucleotide
  Target: LAMA2; (-) strand; PAM type: NRG; PAM sequence: AAG
ttaggatgggatatccccca

SEQ ID NO: 117388 - DNA, 20 bp, Artificial Sequence
  Description of Artificial Sequence: Synthetic oligonucleotide
  Target: LAMA2; (-) strand; PAM type: NRG; PAM sequence: GGG
ttatccagttgtcttaggat

SEQ ID NO: 117389 - DNA, 20 bp, Artificial Sequence
  Description of Artificial Sequence: Synthetic oligonucleotide
  Target: LAMA2; (-) strand; PAM type: NRG; PAM sequence: TGG
gttatccagttgtcttagga

SEQ ID NO: 117390 - DNA, 20 bp, Artificial Sequence
  Description of Artificial Sequence: Synthetic oligonucleotide
  Target: LAMA2; (-) strand; PAM type: NRG; PAM sequence: AGG
tgtagttatccagttgtctt

SEQ ID NO: 117391 - DNA, 20 bp, Artificial Sequence
  Description of Artificial Sequence: Synthetic oligonucleotide
  Target: LAMA2; (-) strand; PAM type: NRG; PAM sequence: TAG
gtgtagttatccagttgtct

SEQ ID NO: 117392 - DNA, 20 bp, Artificial Sequence
  Description of Artificial Sequence: Synthetic oligonucleotide
  Target: LAMA2; (-) strand; PAM type: NRG; PAM sequence: CAG
gctctatgtgtgtagttatc

SEQ ID NO: 117393 - DNA, 20 bp, Artificial Sequence
  Description of Artificial Sequence: Synthetic oligonucleotide
  Target: LAMA2; (-) strand; PAM type: NRG; PAM sequence: TAG
tgcagggtgctctatgtgtg

SEQ ID NO: 117394 - DNA, 20 bp, Artificial Sequence
  Description of Artificial Sequence: Synthetic oligonucleotide
  Target: LAMA2; (-) strand; PAM type: NRG; PAM sequence: GGG
gtagaatacagtcatttgca

SEQ ID NO: 117395 - DNA, 20 bp, Artificial Sequence
  Description of Artificial Sequence: Synthetic oligonucleotide
  Target: LAMA2; (-) strand; PAM type: NRG; PAM sequence: AGG
tgtagaatacagtcatttgc

SEQ ID NO: 117396 - DNA, 20 bp, Artificial Sequence
  Description of Artificial Sequence: Synthetic oligonucleotide
  Target: LAMA2; (-) strand; PAM type: NRG; PAM sequence: CAG
atgtagaatacagtcatttg

SEQ ID NO: 117397 - DNA, 20 bp, Artificial Sequence
  Description of Artificial Sequence: Synthetic oligonucleotide
  Target: LAMA2; (-) strand; PAM type: NRG; PAM sequence: CAG
ctttgcctttatgtagaata

SEQ ID NO: 117398 - DNA, 20 bp, Artificial Sequence
  Description of Artificial Sequence: Synthetic oligonucleotide
  Target: LAMA2; (-) strand; PAM type: NRG; PAM sequence: TAG
agcagaactttgcctttatg

SEQ ID NO: 117399 - DNA, 20 bp, Artificial Sequence
  Description of Artificial Sequence: Synthetic oligonucleotide
  Target: LAMA2; (-) strand; PAM type: NRG; PAM sequence: CAG
aaacaaatgtcaggttttag

SEQ ID NO: 117400 - DNA, 20 bp, Artificial Sequence
  Description of Artificial Sequence: Synthetic oligonucleotide
  Target: LAMA2; (-) strand; PAM type: NRG; PAM sequence: TAG
aagaaacaaatgtcaggttt

SEQ ID NO: 117401 - DNA, 20 bp, Artificial Sequence
  Description of Artificial Sequence: Synthetic oligonucleotide
  Target: LAMA2; (-) strand; PAM type: NRG; PAM sequence: AGG
gatcagaagaaacaaatgtc

SEQ ID NO: 117402 - DNA, 20 bp, Artificial Sequence
  Description of Artificial Sequence: Synthetic oligonucleotide
  Target: LAMA2; (-) strand; PAM type: NRG; PAM sequence: CAG
agatcagaagaaacaaatgt

SEQ ID NO: 117403 - DNA, 20 bp, Artificial Sequence
  Description of Artificial Sequence: Synthetic oligonucleotide
  Target: LAMA2; (-) strand; PAM type: NRG; PAM sequence: AAG
cacctaaacattcagatcag

SEQ ID NO: 117404 - DNA, 20 bp, Artificial Sequence
  Description of Artificial Sequence: Synthetic oligonucleotide
  Target: LAMA2; (-) strand; PAM type: NRG; PAM sequence: CAG
ggtcacctaaacattcagat

SEQ ID NO: 117405 - DNA, 20 bp, Artificial Sequence
  Description of Artificial Sequence: Synthetic oligonucleotide
  Target: LAMA2; (-) strand; PAM type: NRG; PAM sequence: CAG
ctataggtcacctaaacatt

SEQ ID NO: 117406 - DNA, 20 bp, Artificial Sequence
  Description of Artificial Sequence: Synthetic oligonucleotide
  Target: LAMA2; (-) strand; PAM type: NRG; PAM sequence: AGG
gacgcagccatcaatgctat

SEQ ID NO: 117407 - DNA, 20 bp, Artificial Sequence
  Description of Artificial Sequence: Synthetic oligonucleotide
  Target: LAMA2; (-) strand; PAM type: NRG; PAM sequence: TAG
tgacgcagccatcaatgcta

SEQ ID NO: 117408 - DNA, 20 bp, Artificial Sequence
  Description of Artificial Sequence: Synthetic oligonucleotide
  Target: LAMA2; (-) strand; PAM type: NRG; PAM sequence: CAG
ccatgtggagattcctgacg

SEQ ID NO: 117409 - DNA, 20 bp, Artificial Sequence
  Description of Artificial Sequence: Synthetic oligonucleotide
  Target: LAMA2; (-) strand; PAM type: NRG; PAM sequence: GAG
gcaggggcctctgccatgtg

SEQ ID NO: 117410 - DNA, 20 bp, Artificial Sequence
  Description of Artificial Sequence: Synthetic oligonucleotide
  Target: LAMA2; (-) strand; PAM type: NRG; PAM sequence: TGG
cggcaggggcctctgccatg

SEQ ID NO: 117411 - DNA, 20 bp, Artificial Sequence
  Description of Artificial Sequence: Synthetic oligonucleotide
  Target: LAMA2; (-) strand; PAM type: NRG; PAM sequence: GGG
gggttgttccagatcggcag

SEQ ID NO: 117412 - DNA, 20 bp, Artificial Sequence
  Description of Artificial Sequence: Synthetic oligonucleotide
  Target: LAMA2; (-) strand; PAM type: NRG; PAM sequence: GGG
tgggttgttccagatcggca

SEQ ID NO: 117413 - DNA, 20 bp, Artificial Sequence
  Description of Artificial Sequence: Synthetic oligonucleotide
  Target: LAMA2; (-) strand; PAM type: NRG; PAM sequence: AGG
gtgggttgttccagatcggc

SEQ ID NO: 117414 - DNA, 20 bp, Artificial Sequence
  Description of Artificial Sequence: Synthetic oligonucleotide
  Target: LAMA2; (-) strand; PAM type: NRG; PAM sequence: CAG
ggtgggttgttccagatcgg

SEQ ID NO: 117415 - DNA, 20 bp, Artificial Sequence
  Description of Artificial Sequence: Synthetic oligonucleotide
  Target: LAMA2; (-) strand; PAM type: NRG; PAM sequence: CGG
ggaggtgggttgttccagat

SEQ ID NO: 117416 - DNA, 20 bp, Artificial Sequence
  Description of Artificial Sequence: Synthetic oligonucleotide
  Target: LAMA2; (-) strand; PAM type: NRG; PAM sequence: CAG
aagctggaggtgggttgttc

SEQ ID NO: 117417 - DNA, 20 bp, Artificial Sequence
  Description of Artificial Sequence: Synthetic oligonucleotide
  Target: LAMA2; (-) strand; PAM type: NRG; PAM sequence: GGG
ccaacatggaagctggaggt

SEQ ID NO: 117418 - DNA, 20 bp, Artificial Sequence
  Description of Artificial Sequence: Synthetic oligonucleotide
  Target: LAMA2; (-) strand; PAM type: NRG; PAM sequence: TGG
cccaacatggaagctggagg

SEQ ID NO: 117419 - DNA, 20 bp, Artificial Sequence
  Description of Artificial Sequence: Synthetic oligonucleotide
  Target: LAMA2; (-) strand; PAM type: NRG; PAM sequence: AGG
tgtcccaacatggaagctgg

SEQ ID NO: 117420 - DNA, 20 bp, Artificial Sequence
  Description of Artificial Sequence: Synthetic oligonucleotide
  Target: LAMA2; (-) strand; PAM type: NRG; PAM sequence: GAG
atgtcccaacatggaagctg

SEQ ID NO: 117421 - DNA, 20 bp, Artificial Sequence
  Description of Artificial Sequence: Synthetic oligonucleotide
  Target: LAMA2; (-) strand; PAM type: NRG; PAM sequence: TGG
acatgtcccaacatggaagc

SEQ ID NO: 117422 - DNA, 20 bp, Artificial Sequence
  Description of Artificial Sequence: Synthetic oligonucleotide
  Target: LAMA2; (-) strand; PAM type: NRG; PAM sequence: AAG
caaaacatgtcccaacatgg

SEQ ID NO: 117423 - DNA, 20 bp, Artificial Sequence
  Description of Artificial Sequence: Synthetic oligonucleotide
  Target: LAMA2; (-) strand; PAM type: NRG; PAM sequence: TGG
ttgcaaaacatgtcccaaca

SEQ ID NO: 117424 - DNA, 20 bp, Artificial Sequence
  Description of Artificial Sequence: Synthetic oligonucleotide
  Target: LAMA2; (-) strand; PAM type: NRG; PAM sequence: GAG
gtcaaaatatgttcccctct

SEQ ID NO: 117425 - DNA, 20 bp, Artificial Sequence
  Description of Artificial Sequence: Synthetic oligonucleotide
  Target: LAMA2; (-) strand; PAM type: NRG; PAM sequence: CGG
cttacctgctttggcaaaac

SEQ ID NO: 117426 - DNA, 20 bp, Artificial Sequence
  Description of Artificial Sequence: Synthetic oligonucleotide
  Target: LAMA2; (-) strand; PAM type: NRG; PAM sequence: TGG
tgaaagagccttacctgctt

SEQ ID NO: 117427 - DNA, 20 bp, Artificial Sequence
  Description of Artificial Sequence: Synthetic oligonucleotide
  Target: LAMA2; (-) strand; PAM type: NRG; PAM sequence: GAG
tcaacaggaaggaaatgaaa

SEQ ID NO: 117428 - DNA, 20 bp, Artificial Sequence
  Description of Artificial Sequence: Synthetic oligonucleotide
  Target: LAMA2; (-) strand; PAM type: NRG; PAM sequence: AAG
aatcaacaggaaggaaatga

SEQ ID NO: 117429 - DNA, 20 bp, Artificial Sequence
  Description of Artificial Sequence: Synthetic oligonucleotide
  Target: LAMA2; (-) strand; PAM type: NRG; PAM sequence: AGG
ctagttaataatcaacagga

SEQ ID NO: 117430 - DNA, 20 bp, Artificial Sequence
  Description of Artificial Sequence: Synthetic oligonucleotide
  Target: LAMA2; (-) strand; PAM type: NRG; PAM sequence: AAG
tctagttaataatcaacagg

SEQ ID NO: 117431 - DNA, 20 bp, Artificial Sequence
  Description of Artificial Sequence: Synthetic oligonucleotide
  Target: LAMA2; (-) strand; PAM type: NRG; PAM sequence: AGG
gtatctagttaataatcaac

SEQ ID NO: 117432 - DNA, 20 bp, Artificial Sequence
  Description of Artificial Sequence: Synthetic oligonucleotide
  Target: LAMA2; (-) strand; PAM type: NRG; PAM sequence: CAG
tgtatctagttaataatcaa

SEQ ID NO: 117433 - DNA, 20 bp, Artificial Sequence
  Description of Artificial Sequence: Synthetic oligonucleotide
  Target: LAMA2; (-) strand; PAM type: NRG; PAM sequence: TAG
aagaagttagtatttgtatc

SEQ ID NO: 117434 - DNA, 20 bp, Artificial Sequence
  Description of Artificial Sequence: Synthetic oligonucleotide
  Target: LAMA2; (-) strand; PAM type: NRG; PAM sequence: TAG
atttggtactagcaagaagt

SEQ ID NO: 117435 - DNA, 20 bp, Artificial Sequence
  Description of Artificial Sequence: Synthetic oligonucleotide
  Target: LAMA2; (-) strand; PAM type: NRG; PAM sequence: AAG
tattatttggtactagcaag

SEQ ID NO: 117436 - DNA, 20 bp, Artificial Sequence
  Description of Artificial Sequence: Synthetic oligonucleotide
  Target: LAMA2; (-) strand; PAM type: NRG; PAM sequence: AAG
ttttattatttggtactagc

SEQ ID NO: 117437 - DNA, 20 bp, Artificial Sequence
  Description of Artificial Sequence: Synthetic oligonucleotide
  Target: LAMA2; (-) strand; PAM type: NRG; PAM sequence: TAG
gaacttttattatttggtac

SEQ ID NO: 117438 - DNA, 20 bp, Artificial Sequence
  Description of Artificial Sequence: Synthetic oligonucleotide
  Target: LAMA2; (-) strand; PAM type: NRG; PAM sequence: TGG
ctctaggaacttttattatt

SEQ ID NO: 117439 - DNA, 20 bp, Artificial Sequence
  Description of Artificial Sequence: Synthetic oligonucleotide
  Target: LAMA2; (-) strand; PAM type: NRG; PAM sequence: AGG
ggatactagtttaggactct

SEQ ID NO: 117440 - DNA, 20 bp, Artificial Sequence
  Description of Artificial Sequence: Synthetic oligonucleotide
  Target: LAMA2; (-) strand; PAM type: NRG; PAM sequence: TAG
aggatactagtttaggactc

SEQ ID NO: 117441 - DNA, 20 bp, Artificial Sequence
  Description of Artificial Sequence: Synthetic oligonucleotide
  Target: LAMA2; (-) strand; PAM type: NRG; PAM sequence: AGG
taaataaaggatactagttt

SEQ ID NO: 117442 - DNA, 20 bp, Artificial Sequence
  Description of Artificial Sequence: Synthetic oligonucleotide
  Target: LAMA2; (-) strand; PAM type: NRG; PAM sequence: TAG
ttaaataaaggatactagtt

SEQ ID NO: 117443 - DNA, 20 bp, Artificial Sequence
  Description of Artificial Sequence: Synthetic oligonucleotide
  Target: LAMA2; (-) strand; PAM type: NRG; PAM sequence: TAG
ttggcttaaataaaggatac

SEQ ID NO: 117444 - DNA, 20 bp, Artificial Sequence
  Description of Artificial Sequence: Synthetic oligonucleotide
  Target: LAMA2; (-) strand; PAM type: NRG; PAM sequence: AGG
tttctttttggcttaaataa

SEQ ID NO: 117445 - DNA, 20 bp, Artificial Sequence
  Description of Artificial Sequence: Synthetic oligonucleotide
  Target: LAMA2; (-) strand; PAM type: NRG; PAM sequence: AAG
gtttctttttggcttaaata

SEQ ID NO: 117446 - DNA, 20 bp, Artificial Sequence
  Description of Artificial Sequence: Synthetic oligonucleotide
  Target: LAMA2; (-) strand; PAM type: NRG; PAM sequence: TGG
tacttccataagtttctttt

SEQ ID NO: 117447 - DNA, 20 bp, Artificial Sequence
  Description of Artificial Sequence: Synthetic oligonucleotide
  Target: LAMA2; (-) strand; PAM type: NRG; PAM sequence: AAG
atttttgaaattacttccat

SEQ ID NO: 117448 - DNA, 20 bp, Artificial Sequence
  Description of Artificial Sequence: Synthetic oligonucleotide
  Target: LAMA2; (-) strand; PAM type: NRG; PAM sequence: AGG
cagatacatgaatttttaag

SEQ ID NO: 117449 - DNA, 20 bp, Artificial Sequence
  Description of Artificial Sequence: Synthetic oligonucleotide
  Target: LAMA2; (-) strand; PAM type: NRG; PAM sequence: GAG
tcagatacatgaatttttaa

SEQ ID NO: 117450 - DNA, 20 bp, Artificial Sequence
  Description of Artificial Sequence: Synthetic oligonucleotide
  Target: LAMA2; (-) strand; PAM type: NRG; PAM sequence: AAG
gatcagatacatgaattttt

SEQ ID NO: 117451 - DNA, 20 bp, Artificial Sequence
  Description of Artificial Sequence: Synthetic oligonucleotide
  Target: LAMA2; (-) strand; PAM type: NRG; PAM sequence: CAG
ctattaattcttatcaggat

SEQ ID NO: 117452 - DNA, 20 bp, Artificial Sequence
  Description of Artificial Sequence: Synthetic oligonucleotide
  Target: LAMA2; (-) strand; PAM type: NRG; PAM sequence: AGG
ttcttctattaattcttatc

SEQ ID NO: 117453 - DNA, 20 bp, Artificial Sequence
  Description of Artificial Sequence: Synthetic oligonucleotide
  Target: LAMA2; (-) strand; PAM type: NRG; PAM sequence: CAG
tttcttctattaattcttat

SEQ ID NO: 117454 - DNA, 20 bp, Artificial Sequence
  Description of Artificial Sequence: Synthetic oligonucleotide
  Target: LAMA2; (-) strand; PAM type: NRG; PAM sequence: TAG
gatggaataaattctctaaa

SEQ ID NO: 117455 - DNA, 20 bp, Artificial Sequence
  Description of Artificial Sequence: Synthetic oligonucleotide
  Target: LAMA2; (-) strand; PAM type: NRG; PAM sequence: TGG
ttaacctccagtgaaggaga

SEQ ID NO: 117456 - DNA, 20 bp, Artificial Sequence
  Description of Artificial Sequence: Synthetic oligonucleotide
  Target: LAMA2; (-) strand; PAM type: NRG; PAM sequence: GAG
gttcttaacctccagtgaag

SEQ ID NO: 117457 - DNA, 20 bp, Artificial Sequence
  Description of Artificial Sequence: Synthetic oligonucleotide
  Target: LAMA2; (-) strand; PAM type: NRG; PAM sequence: AGG
ctgttcttaacctccagtga

SEQ ID NO: 117458 - DNA, 20 bp, Artificial Sequence
  Description of Artificial Sequence: Synthetic oligonucleotide
  Target: LAMA2; (-) strand; PAM type: NRG; PAM sequence: AAG
gctgttcttaacctccagtg

SEQ ID NO: 117459 - DNA, 20 bp, Artificial Sequence
  Description of Artificial Sequence: Synthetic oligonucleotide
  Target: LAMA2; (-) strand; PAM type: NRG; PAM sequence: CAG
attttgctgttcttaacctc

SEQ ID NO: 117460 - DNA, 20 bp, Artificial Sequence
  Description of Artificial Sequence: Synthetic oligonucleotide
  Target: LAMA2; (-) strand; PAM type: NRG; PAM sequence: GAG
acaacatagtataaacatat

SEQ ID NO: 117461 - DNA, 20 bp, Artificial Sequence
  Description of Artificial Sequence: Synthetic oligonucleotide
  Target: LAMA2; (-) strand; PAM type: NRG; PAM sequence: TAG
tggaaggtagaaaaacaaca

SEQ ID NO: 117462 - DNA, 20 bp, Artificial Sequence
  Description of Artificial Sequence: Synthetic oligonucleotide
  Target: LAMA2; (-) strand; PAM type: NRG; PAM sequence: TAG
catctccagaaactggaagg

SEQ ID NO: 117463 - DNA, 20 bp, Artificial Sequence
  Description of Artificial Sequence: Synthetic oligonucleotide
  Target: LAMA2; (-) strand; PAM type: NRG; PAM sequence: AGG
tctcatctccagaaactgga

SEQ ID NO: 117464 - DNA, 20 bp, Artificial Sequence
  Description of Artificial Sequence: Synthetic oligonucleotide
  Target: LAMA2; (-) strand; PAM type: NRG; PAM sequence: AAG
atctcatctccagaaactgg

SEQ ID NO: 117465 - DNA, 20 bp, Artificial Sequence
  Description of Artificial Sequence: Synthetic oligonucleotide
  Target: LAMA2; (-) strand; PAM type: NRG; PAM sequence: TGG
catatctcatctccagaaac

SEQ ID NO: 117466 - DNA, 20 bp, Artificial Sequence
  Description of Artificial Sequence: Synthetic oligonucleotide
  Target: LAMA2; (-) strand; PAM type: NRG; PAM sequence: CAG
aaaaaatcatatctcatctc

SEQ ID NO: 117467 - DNA, 20 bp, Artificial Sequence
  Description of Artificial Sequence: Synthetic oligonucleotide
  Target: LAMA2; (-) strand; PAM type: NRG; PAM sequence: AAG
tacagccttgcagggaattg

SEQ ID NO: 117468 - DNA, 20 bp, Artificial Sequence
  Description of Artificial Sequence: Synthetic oligonucleotide
  Target: LAMA2; (-) strand; PAM type: NRG; PAM sequence: GGG
ttatgaaatacagccttgca

SEQ ID NO: 117469 - DNA, 20 bp, Artificial Sequence
  Description of Artificial Sequence: Synthetic oligonucleotide
  Target: LAMA2; (-) strand; PAM type: NRG; PAM sequence: AGG
attatgaaatacagccttgc

SEQ ID NO: 117470 - DNA, 20 bp, Artificial Sequence
  Description of Artificial Sequence: Synthetic oligonucleotide
  Target: LAMA2; (-) strand; PAM type: NRG; PAM sequence: CAG
gattatgaaatacagccttg

SEQ ID NO: 117471 - DNA, 20 bp, Artificial Sequence
  Description of Artificial Sequence: Synthetic oligonucleotide
  Target: LAMA2; (-) strand; PAM type: NRG; PAM sequence: CAG
ggggaggagattatgaaata

SEQ ID NO: 117472 - DNA, 20 bp, Artificial Sequence
  Description of Artificial Sequence: Synthetic oligonucleotide
  Target: LAMA2; (-) strand; PAM type: NRG; PAM sequence: GAG
gggtgtgtgttgatggggag

SEQ ID NO: 117473 - DNA, 20 bp, Artificial Sequence
  Description of Artificial Sequence: Synthetic oligonucleotide
  Target: LAMA2; (-) strand; PAM type: NRG; PAM sequence: AGG
atgggtgtgtgttgatgggg

SEQ ID NO: 117474 - DNA, 20 bp, Artificial Sequence
  Description of Artificial Sequence: Synthetic oligonucleotide
  Target: LAMA2; (-) strand; PAM type: NRG; PAM sequence: GAG
tatgggtgtgtgttgatggg

SEQ ID NO: 117475 - DNA, 20 bp, Artificial Sequence
  Description of Artificial Sequence: Synthetic oligonucleotide
  Target: LAMA2; (-) strand; PAM type: NRG; PAM sequence: GGG
tgtatgggtgtgtgttgatg

SEQ ID NO: 117476 - DNA, 20 bp, Artificial Sequence
  Description of Artificial Sequence: Synthetic oligonucleotide
  Target: LAMA2; (-) strand; PAM type: NRG; PAM sequence: GGG
gtgtatgggtgtgtgttgat

SEQ ID NO: 117477 - DNA, 20 bp, Artificial Sequence
  Description of Artificial Sequence: Synthetic oligonucleotide
  Target: LAMA2; (-) strand; PAM type: NRG; PAM sequence: TGG
tgtgtatgggtgtgtgttga

SEQ ID NO: 117478 - DNA, 20 bp, Artificial Sequence
  Description of Artificial Sequence: Synthetic oligonucleotide
  Target: LAMA2; (-) strand; PAM type: NRG; PAM sequence: GGG
tgggtgtgcattgtgtgtat

SEQ ID NO: 117479 - DNA, 20 bp, Artificial Sequence
  Description of Artificial Sequence: Synthetic oligonucleotide
  Target: LAMA2; (-) strand; PAM type: NRG; PAM sequence: TGG
atgggtgtgcattgtgtgta

SEQ ID NO: 117480 - DNA, 20 bp, Artificial Sequence
  Description of Artificial Sequence: Synthetic oligonucleotide
  Target: LAMA2; (-) strand; PAM type: NRG; PAM sequence: GGG
tatcaacaagaaacagacat

SEQ ID NO: 117481 - DNA, 20 bp, Artificial Sequence
  Description of Artificial Sequence: Synthetic oligonucleotide
  Target: LAMA2; (-) strand; PAM type: NRG; PAM sequence: TGG
ctatcaacaagaaacagaca

SEQ ID NO: 117482 - DNA, 20 bp, Artificial Sequence
  Description of Artificial Sequence: Synthetic oligonucleotide
  Target: LAMA2; (-) strand; PAM type: NRG; PAM sequence: CAG
ttgtcactatcaacaagaaa

SEQ ID NO: 117483 - DNA, 20 bp, Artificial Sequence
  Description of Artificial Sequence: Synthetic oligonucleotide
  Target: LAMA2; (-) strand; PAM type: NRG; PAM sequence: AAG
cagtcattgtcactatcaac

SEQ ID NO: 117484 - DNA, 20 bp, Artificial Sequence
  Description of Artificial Sequence: Synthetic oligonucleotide
  Target: LAMA2; (-) strand; PAM type: NRG; PAM sequence: CAG
gagaaagccaggaaagatgc

SEQ ID NO: 117485 - DNA, 20 bp, Artificial Sequence
  Description of Artificial Sequence: Synthetic oligonucleotide
  Target: LAMA2; (-) strand; PAM type: NRG; PAM sequence: AAG
cggagtggagaaagccagga

SEQ ID NO: 117486 - DNA, 20 bp, Artificial Sequence
  Description of Artificial Sequence: Synthetic oligonucleotide
  Target: LAMA2; (-) strand; PAM type: NRG; PAM sequence: AGG
gaaacggagtggagaaagcc

SEQ ID NO: 117487 - DNA, 20 bp, Artificial Sequence
  Description of Artificial Sequence: Synthetic oligonucleotide
  Target: LAMA2; (-) strand; PAM type: NRG; PAM sequence: CAG
agaaacggagtggagaaagc

SEQ ID NO: 117488 - DNA, 20 bp, Artificial Sequence
  Description of Artificial Sequence: Synthetic oligonucleotide
  Target: LAMA2; (-) strand; PAM type: NRG; PAM sequence: AAG
cattagaaacggagtggaga

SEQ ID NO: 117489 - DNA, 20 bp, Artificial Sequence
  Description of Artificial Sequence: Synthetic oligonucleotide
  Target: LAMA2; (-) strand; PAM type: NRG; PAM sequence: GAG
tgttcattagaaacggagtg

SEQ ID NO: 117490 - DNA, 20 bp, Artificial Sequence
  Description of Artificial Sequence: Synthetic oligonucleotide
  Target: LAMA2; (-) strand; PAM type: NRG; PAM sequence: TGG
aatgttcattagaaacggag

SEQ ID NO: 117491 - DNA, 20 bp, Artificial Sequence
  Description of Artificial Sequence: Synthetic oligonucleotide
  Target: LAMA2; (-) strand; PAM type: NRG; PAM sequence: GAG
ggaaatgttcattagaaacg

SEQ ID NO: 117492 - DNA, 20 bp, Artificial Sequence
  Description of Artificial Sequence: Synthetic oligonucleotide
  Target: LAMA2; (-) strand; PAM type: NRG; PAM sequence: CGG
ctggaaatgttcattagaaa

SEQ ID NO: 117493 - DNA, 20 bp, Artificial Sequence
  Description of Artificial Sequence: Synthetic oligonucleotide
  Target: LAMA2; (-) strand; PAM type: NRG; PAM sequence: TAG
accatactggaaatgttcat

SEQ ID NO: 117494 - DNA, 20 bp, Artificial Sequence
  Description of Artificial Sequence: Synthetic oligonucleotide
  Target: LAMA2; (-) strand; PAM type: NRG; PAM sequence: TGG
ccagtgatataaaaccatac

SEQ ID NO: 117495 - DNA, 20 bp, Artificial Sequence
  Description of Artificial Sequence: Synthetic oligonucleotide
  Target: LAMA2; (-) strand; PAM type: NRG; PAM sequence: CAG
cctaactgtaccttcatgac

SEQ ID NO: 117496 - DNA, 20 bp, Artificial Sequence
  Description of Artificial Sequence: Synthetic oligonucleotide
  Target: LAMA2; (-) strand; PAM type: NRG; PAM sequence: AGG
attaaaaaattattatgtag

SEQ ID NO: 117497 - DNA, 20 bp, Artificial Sequence
  Description of Artificial Sequence: Synthetic oligonucleotide
  Target: LAMA2; (-) strand; PAM type: NRG; PAM sequence: GAG
gattaaaaaattattatgta

SEQ ID NO: 117498 - DNA, 20 bp, Artificial Sequence
  Description of Artificial Sequence: Synthetic oligonucleotide
  Target: LAMA2; (-) strand; PAM type: NRG; PAM sequence: TAG
aggattaaaaaattattatg

SEQ ID NO: 117499 - DNA, 20 bp, Artificial Sequence
  Description of Artificial Sequence: Synthetic oligonucleotide
  Target: LAMA2; (-) strand; PAM type: NRG; PAM sequence: AGG
ccacaaaaattaaaaattaa

SEQ ID NO: 117500 - DNA, 20 bp, Artificial Sequence
  Description of Artificial Sequence: Synthetic oligonucleotide
  Target: LAMA2; (-) strand; PAM type: NRG; PAM sequence: AAG
cccacaaaaattaaaaatta

SEQ ID NO: 117501 - DNA, 20 bp, Artificial Sequence
  Description of Artificial Sequence: Synthetic oligonucleotide
  Target: LAMA2; (-) strand; PAM type: NRG; PAM sequence: AGG
tgcctacatcaaaatatctc

SEQ ID NO: 117502 - DNA, 20 bp, Artificial Sequence
  Description of Artificial Sequence: Synthetic oligonucleotide
  Target: LAMA2; (-) strand; PAM type: NRG; PAM sequence: CAG
atgcctacatcaaaatatct

SEQ ID NO: 117503 - DNA, 20 bp, Artificial Sequence
  Description of Artificial Sequence: Synthetic oligonucleotide
  Target: LAMA2; (-) strand; PAM type: NRG; PAM sequence: TGG
aggatacatgtttgaggtga

SEQ ID NO: 117504 - DNA, 20 bp, Artificial Sequence
  Description of Artificial Sequence: Synthetic oligonucleotide
  Target: LAMA2; (-) strand; PAM type: NRG; PAM sequence: AGG
acataaaggatacatgtttg

SEQ ID NO: 117505 - DNA, 20 bp, Artificial Sequence
  Description of Artificial Sequence: Synthetic oligonucleotide
  Target: LAMA2; (-) strand; PAM type: NRG; PAM sequence: GAG
aacataaaggatacatgttt

SEQ ID NO: 117506 - DNA, 20 bp, Artificial Sequence
  Description of Artificial Sequence: Synthetic oligonucleotide
  Target: LAMA2; (-) strand; PAM type: NRG; PAM sequence: AGG
tcagattgtttgaaacataa

SEQ ID NO: 117507 - DNA, 20 bp, Artificial Sequence
  Description of Artificial Sequence: Synthetic oligonucleotide
  Target: LAMA2; (-) strand; PAM type: NRG; PAM sequence: AAG
atcagattgtttgaaacata

SEQ ID NO: 117508 - DNA, 20 bp, Artificial Sequence
  Description of Artificial Sequence: Synthetic oligonucleotide
  Target: LAMA2; (-) strand; PAM type: NRG; PAM sequence: CAG
aataactaaaagagtataat

SEQ ID NO: 117509 - DNA, 20 bp, Artificial Sequence
  Description of Artificial Sequence: Synthetic oligonucleotide
  Target: LAMA2; (-) strand; PAM type: NRG; PAM sequence: GAG
acatttaaaaataactaaaa

SEQ ID NO: 117510 - DNA, 20 bp, Artificial Sequence
  Description of Artificial Sequence: Synthetic oligonucleotide
  Target: LAMA2; (-) strand; PAM type: NRG; PAM sequence: AAG
gtacatttaaaaataactaa

SEQ ID NO: 117511 - DNA, 20 bp, Artificial Sequence
  Description of Artificial Sequence: Synthetic oligonucleotide
  Target: LAMA2; (-) strand; PAM type: NRG; PAM sequence: CAG
tgctagcacaagggtaacta

SEQ ID NO: 117512 - DNA, 20 bp, Artificial Sequence
  Description of Artificial Sequence: Synthetic oligonucleotide
  Target: LAMA2; (-) strand; PAM type: NRG; PAM sequence: GGG
tttagtatttgctagcacaa

SEQ ID NO: 117513 - DNA, 20 bp, Artificial Sequence
  Description of Artificial Sequence: Synthetic oligonucleotide
  Target: LAMA2; (-) strand; PAM type: NRG; PAM sequence: AGG
atttagtatttgctagcaca

SEQ ID NO: 117514 - DNA, 20 bp, Artificial Sequence
  Description of Artificial Sequence: Synthetic oligonucleotide
  Target: LAMA2; (-) strand; PAM type: NRG; PAM sequence: AAG
gatttagtatttgctagcac

SEQ ID NO: 117515 - DNA, 20 bp, Artificial Sequence
  Description of Artificial Sequence: Synthetic oligonucleotide
  Target: LAMA2; (-) strand; PAM type: NRG; PAM sequence: TAG
gaataagatttagtatttgc

SEQ ID NO: 117516 - DNA, 20 bp, Artificial Sequence
  Description of Artificial Sequence: Synthetic oligonucleotide
  Target: LAMA2; (-) strand; PAM type: NRG; PAM sequence: TAG
aaaatagtttgaataagatt

SEQ ID NO: 117517 - DNA, 20 bp, Artificial Sequence
  Description of Artificial Sequence: Synthetic oligonucleotide
  Target: LAMA2; (-) strand; PAM type: NRG; PAM sequence: AAG
gatacaaaaatagtttgaat

SEQ ID NO: 117518 - DNA, 20 bp, Artificial Sequence
  Description of Artificial Sequence: Synthetic oligonucleotide
  Target: LAMA2; (-) strand; PAM type: NRG; PAM sequence: TAG
gatggttaatgatacaaaaa

SEQ ID NO: 117519 - DNA, 20 bp, Artificial Sequence
  Description of Artificial Sequence: Synthetic oligonucleotide
  Target: LAMA2; (-) strand; PAM type: NRG; PAM sequence: TGG
gtggcagggaggagtaggga

SEQ ID NO: 117520 - DNA, 20 bp, Artificial Sequence
  Description of Artificial Sequence: Synthetic oligonucleotide
  Target: LAMA2; (-) strand; PAM type: NRG; PAM sequence: GGG
gttagtggcagggaggagta

SEQ ID NO: 117521 - DNA, 20 bp, Artificial Sequence
  Description of Artificial Sequence: Synthetic oligonucleotide
  Target: LAMA2; (-) strand; PAM type: NRG; PAM sequence: AGG
ggttagtggcagggaggagt

SEQ ID NO: 117522 - DNA, 20 bp, Artificial Sequence
  Description of Artificial Sequence: Synthetic oligonucleotide
  Target: LAMA2; (-) strand; PAM type: NRG; PAM sequence: TAG
aggttagtggcagggaggag

SEQ ID NO: 117523 - DNA, 20 bp, Artificial Sequence
  Description of Artificial Sequence: Synthetic oligonucleotide
  Target: LAMA2; (-) strand; PAM type: NRG; PAM sequence: GAG
ggaaggttagtggcagggag

SEQ ID NO: 117524 - DNA, 20 bp, Artificial Sequence
  Description of Artificial Sequence: Synthetic oligonucleotide
  Target: LAMA2; (-) strand; PAM type: NRG; PAM sequence: AGG
tgggaaggttagtggcaggg

SEQ ID NO: 117525 - DNA, 20 bp, Artificial Sequence
  Description of Artificial Sequence: Synthetic oligonucleotide
  Target: LAMA2; (-) strand; PAM type: NRG; PAM sequence: GAG
ttgggaaggttagtggcagg

SEQ ID NO: 117526 - DNA, 20 bp, Artificial Sequence
  Description of Artificial Sequence: Synthetic oligonucleotide
  Target: LAMA2; (-) strand; PAM type: NRG; PAM sequence: GGG
ggttgggaaggttagtggca

SEQ ID NO: 117527 - DNA, 20 bp, Artificial Sequence
  Description of Artificial Sequence: Synthetic oligonucleotide
  Target: LAMA2; (-) strand; PAM type: NRG; PAM sequence: AGG
aggttgggaaggttagtggc

SEQ ID NO: 117528 - DNA, 20 bp, Artificial Sequence
  Description of Artificial Sequence: Synthetic oligonucleotide
  Target: LAMA2; (-) strand; PAM type: NRG; PAM sequence: CAG
gaggttgggaaggttagtgg

SEQ ID NO: 117529 - DNA, 20 bp, Artificial Sequence
  Description of Artificial Sequence: Synthetic oligonucleotide
  Target: LAMA2; (-) strand; PAM type: NRG; PAM sequence: TGG
ccagaggttgggaaggttag

SEQ ID NO: 117530 - DNA, 20 bp, Artificial Sequence
  Description of Artificial Sequence: Synthetic oligonucleotide
  Target: LAMA2; (-) strand; PAM type: NRG; PAM sequence: TAG
ttaccagaggttgggaaggt

SEQ ID NO: 117531 - DNA, 20 bp, Artificial Sequence
  Description of Artificial Sequence: Synthetic oligonucleotide
  Target: LAMA2; (-) strand; PAM type: NRG; PAM sequence: AGG
atagttaccagaggttggga

SEQ ID NO: 117532 - DNA, 20 bp, Artificial Sequence
  Description of Artificial Sequence: Synthetic oligonucleotide
  Target: LAMA2; (-) strand; PAM type: NRG; PAM sequence: AAG
gatagttaccagaggttggg

SEQ ID NO: 117533 - DNA, 20 bp, Artificial Sequence
  Description of Artificial Sequence: Synthetic oligonucleotide
  Target: LAMA2; (-) strand; PAM type: NRG; PAM sequence: GGG
aaggatagttaccagaggtt

SEQ ID NO: 117534 - DNA, 20 bp, Artificial Sequence
  Description of Artificial Sequence: Synthetic oligonucleotide
  Target: LAMA2; (-) strand; PAM type: NRG; PAM sequence: TGG
gaaggatagttaccagaggt

SEQ ID NO: 117535 - DNA, 20 bp, Artificial Sequence
  Description of Artificial Sequence: Synthetic oligonucleotide
  Target: LAMA2; (-) strand; PAM type: NRG; PAM sequence: AGG
agtagaaggatagttaccag

SEQ ID NO: 117536 - DNA, 20 bp, Artificial Sequence
  Description of Artificial Sequence: Synthetic oligonucleotide
  Target: LAMA2; (-) strand; PAM type: NRG; PAM sequence: GAG
aagtagaaggatagttacca

SEQ ID NO: 117537 - DNA, 20 bp, Artificial Sequence
  Description of Artificial Sequence: Synthetic oligonucleotide
  Target: LAMA2; (-) strand; PAM type: NRG; PAM sequence: CAG
gaaagtagaaggatagttac

SEQ ID NO: 117538 - DNA, 20 bp, Artificial Sequence
  Description of Artificial Sequence: Synthetic oligonucleotide
  Target: LAMA2; (-) strand; PAM type: NRG; PAM sequence: TAG
atagatagaaagtagaagga

SEQ ID NO: 117539 - DNA, 20 bp, Artificial Sequence
  Description of Artificial Sequence: Synthetic oligonucleotide
  Target: LAMA2; (-) strand; PAM type: NRG; PAM sequence: AGG
ggagatagatagaaagtaga

SEQ ID NO: 117540 - DNA, 20 bp, Artificial Sequence
  Description of Artificial Sequence: Synthetic oligonucleotide
  Target: LAMA2; (-) strand; PAM type: NRG; PAM sequence: AAG
tggagatagatagaaagtag

SEQ ID NO: 117541 - DNA, 20 bp, Artificial Sequence
  Description of Artificial Sequence: Synthetic oligonucleotide
  Target: LAMA2; (-) strand; PAM type: NRG; PAM sequence: TAG
tcatggagatagatagaaag

SEQ ID NO: 117542 - DNA, 20 bp, Artificial Sequence
  Description of Artificial Sequence: Synthetic oligonucleotide
  Target: LAMA2; (-) strand; PAM type: NRG; PAM sequence: AAG
aactcatggagatagataga

SEQ ID NO: 117543 - DNA, 20 bp, Artificial Sequence
  Description of Artificial Sequence: Synthetic oligonucleotide
  Target: LAMA2; (-) strand; PAM type: NRG; PAM sequence: TAG
attcaactcatggagataga

SEQ ID NO: 117544 - DNA, 20 bp, Artificial Sequence
  Description of Artificial Sequence: Synthetic oligonucleotide
  Target: LAMA2; (-) strand; PAM type: NRG; PAM sequence: TAG
agcaattcaactcatggaga

SEQ ID NO: 117545 - DNA, 20 bp, Artificial Sequence
  Description of Artificial Sequence: Synthetic oligonucleotide
  Target: LAMA2; (-) strand; PAM type: NRG; PAM sequence: GAG
ttaaagcaattcaactcatg

SEQ ID NO: 117546 - DNA, 20 bp, Artificial Sequence
  Description of Artificial Sequence: Synthetic oligonucleotide
  Target: LAMA2; (-) strand; PAM type: NRG; PAM sequence: TGG
aattaaagcaattcaactca

SEQ ID NO: 117547 - DNA, 20 bp, Artificial Sequence
  Description of Artificial Sequence: Synthetic oligonucleotide
  Target: LAMA2; (-) strand; PAM type: NRG; PAM sequence: AAG
tctgtgggagctaaaaatta

SEQ ID NO: 117548 - DNA, 20 bp, Artificial Sequence
  Description of Artificial Sequence: Synthetic oligonucleotide
  Target: LAMA2; (-) strand; PAM type: NRG; PAM sequence: GAG
atgttctcacttatctgtgg

SEQ ID NO: 117549 - DNA, 20 bp, Artificial Sequence
  Description of Artificial Sequence: Synthetic oligonucleotide
  Target: LAMA2; (-) strand; PAM type: NRG; PAM sequence: GGG
acatgttctcacttatctgt

SEQ ID NO: 117550 - DNA, 20 bp, Artificial Sequence
  Description of Artificial Sequence: Synthetic oligonucleotide
  Target: LAMA2; (-) strand; PAM type: NRG; PAM sequence: TGG
cacatgttctcacttatctg

SEQ ID NO: 117551 - DNA, 20 bp, Artificial Sequence
  Description of Artificial Sequence: Synthetic oligonucleotide
  Target: LAMA2; (-) strand; PAM type: NRG; PAM sequence: AGG
gaaataagccaggcacacaa

SEQ ID NO: 117552 - DNA, 20 bp, Artificial Sequence
  Description of Artificial Sequence: Synthetic oligonucleotide
  Target: LAMA2; (-) strand; PAM type: NRG; PAM sequence: AAG
tgaaataagccaggcacaca

SEQ ID NO: 117553 - DNA, 20 bp, Artificial Sequence
  Description of Artificial Sequence: Synthetic oligonucleotide
  Target: LAMA2; (-) strand; PAM type: NRG; PAM sequence: AGG
tatgttaagtgaaataagcc

SEQ ID NO: 117554 - DNA, 20 bp, Artificial Sequence
  Description of Artificial Sequence: Synthetic oligonucleotide
  Target: LAMA2; (-) strand; PAM type: NRG; PAM sequence: CAG
ttatgttaagtgaaataagc

SEQ ID NO: 117555 - DNA, 20 bp, Artificial Sequence
  Description of Artificial Sequence: Synthetic oligonucleotide
  Target: LAMA2; (-) strand; PAM type: NRG; PAM sequence: AAG
gtcattatgttaagtgaaat

SEQ ID NO: 117556 - DNA, 20 bp, Artificial Sequence
  Description of Artificial Sequence: Synthetic oligonucleotide
  Target: LAMA2; (-) strand; PAM type: NRG; PAM sequence: AAG
gttcttgaggtcattatgtt

SEQ ID NO: 117557 - DNA, 20 bp, Artificial Sequence
  Description of Artificial Sequence: Synthetic oligonucleotide
  Target: LAMA2; (-) strand; PAM type: NRG; PAM sequence: AGG
aacaacatgggtggttcttg

SEQ ID NO: 117558 - DNA, 20 bp, Artificial Sequence
  Description of Artificial Sequence: Synthetic oligonucleotide
  Target: LAMA2; (-) strand; PAM type: NRG; PAM sequence: GAG
caacaacatgggtggttctt

SEQ ID NO: 117559 - DNA, 20 bp, Artificial Sequence
  Description of Artificial Sequence: Synthetic oligonucleotide
  Target: LAMA2; (-) strand; PAM type: NRG; PAM sequence: TGG
atcatctgcaacaacatggg

SEQ ID NO: 117560 - DNA, 20 bp, Artificial Sequence
  Description of Artificial Sequence: Synthetic oligonucleotide
  Target: LAMA2; (-) strand; PAM type: NRG; PAM sequence: GGG
cctatcatctgcaacaacat

SEQ ID NO: 117561 - DNA, 20 bp, Artificial Sequence
  Description of Artificial Sequence: Synthetic oligonucleotide
  Target: LAMA2; (-) strand; PAM type: NRG; PAM sequence: TGG
tcctatcatctgcaacaaca

SEQ ID NO: 117562 - DNA, 20 bp, Artificial Sequence
  Description of Artificial Sequence: Synthetic oligonucleotide
  Target: LAMA2; (-) strand; PAM type: NRG; PAM sequence: GAG
aataagccataaaaaagaat

SEQ ID NO: 117563 - DNA, 20 bp, Artificial Sequence
  Description of Artificial Sequence: Synthetic oligonucleotide
  Target: LAMA2; (-) strand; PAM type: NRG; PAM sequence: AAG
gatatgaataagccataaaa

SEQ ID NO: 117564 - DNA, 20 bp, Artificial Sequence
  Description of Artificial Sequence: Synthetic oligonucleotide
  Target: LAMA2; (-) strand; PAM type: NRG; PAM sequence: AAG
tatacatactggatatgaat

SEQ ID NO: 117565 - DNA, 20 bp, Artificial Sequence
  Description of Artificial Sequence: Synthetic oligonucleotide
  Target: LAMA2; (-) strand; PAM type: NRG; PAM sequence: TGG
agtgtggtacatatacatac

SEQ ID NO: 117566 - DNA, 20 bp, Artificial Sequence
  Description of Artificial Sequence: Synthetic oligonucleotide
  Target: LAMA2; (-) strand; PAM type: NRG; PAM sequence: TGG
atgaacggataaagaaagtg

SEQ ID NO: 117567 - DNA, 20 bp, Artificial Sequence
  Description of Artificial Sequence: Synthetic oligonucleotide
  Target: LAMA2; (-) strand; PAM type: NRG; PAM sequence: AAG
agcagatgaacggataaaga

SEQ ID NO: 117568 - DNA, 20 bp, Artificial Sequence
  Description of Artificial Sequence: Synthetic oligonucleotide
  Target: LAMA2; (-) strand; PAM type: NRG; PAM sequence: AAG
catcagcagatgaacggata

SEQ ID NO: 117569 - DNA, 20 bp, Artificial Sequence
  Description of Artificial Sequence: Synthetic oligonucleotide
  Target: LAMA2; (-) strand; PAM type: NRG; PAM sequence: CGG
agtgtccatcagcagatgaa

SEQ ID NO: 117570 - DNA, 20 bp, Artificial Sequence
  Description of Artificial Sequence: Synthetic oligonucleotide
  Target: LAMA2; (-) strand; PAM type: NRG; PAM sequence: CAG
gccacctaagtgtccatcag

SEQ ID NO: 117571 - DNA, 20 bp, Artificial Sequence
  Description of Artificial Sequence: Synthetic oligonucleotide
  Target: LAMA2; (-) strand; PAM type: NRG; PAM sequence: CAG
gaagccacctaagtgtccat

SEQ ID NO: 117572 - DNA, 20 bp, Artificial Sequence
  Description of Artificial Sequence: Synthetic oligonucleotide
  Target: LAMA2; (-) strand; PAM type: NRG; PAM sequence: AAG
aatagatttggaagccacct

SEQ ID NO: 117573 - DNA, 20 bp, Artificial Sequence
  Description of Artificial Sequence: Synthetic oligonucleotide
  Target: LAMA2; (-) strand; PAM type: NRG; PAM sequence: AAG
actagttacaatagatttgg

SEQ ID NO: 117574 - DNA, 20 bp, Artificial Sequence
  Description of Artificial Sequence: Synthetic oligonucleotide
  Target: LAMA2; (-) strand; PAM type: NRG; PAM sequence: TGG
agcactagttacaatagatt

SEQ ID NO: 117575 - DNA, 20 bp, Artificial Sequence
  Description of Artificial Sequence: Synthetic oligonucleotide
  Target: LAMA2; (-) strand; PAM type: NRG; PAM sequence: TAG
tattgcagcactagttacaa

SEQ ID NO: 117576 - DNA, 20 bp, Artificial Sequence
  Description of Artificial Sequence: Synthetic oligonucleotide
  Target: LAMA2; (-) strand; PAM type: NRG; PAM sequence: TAG
tcccacgtttattgcagcac

SEQ ID NO: 117577 - DNA, 20 bp, Artificial Sequence
  Description of Artificial Sequence: Synthetic oligonucleotide
  Target: LAMA2; (-) strand; PAM type: NRG; PAM sequence: CAG
ctgcactcccacgtttattg

SEQ ID NO: 117578 - DNA, 20 bp, Artificial Sequence
  Description of Artificial Sequence: Synthetic oligonucleotide
  Target: LAMA2; (-) strand; PAM type: NRG; PAM sequence: GAG
atacccaaaagaatattgaa

SEQ ID NO: 117579 - DNA, 20 bp, Artificial Sequence
  Description of Artificial Sequence: Synthetic oligonucleotide
  Target: LAMA2; (-) strand; PAM type: NRG; PAM sequence: AAG
atatacccaaaagaatattg

SEQ ID NO: 117580 - DNA, 20 bp, Artificial Sequence
  Description of Artificial Sequence: Synthetic oligonucleotide
  Target: LAMA2; (-) strand; PAM type: NRG; PAM sequence: AAG
actcttagatatatacccaa

SEQ ID NO: 117581 - DNA, 20 bp, Artificial Sequence
  Description of Artificial Sequence: Synthetic oligonucleotide
  Target: LAMA2; (-) strand; PAM type: NRG; PAM sequence: TAG
tgatccatcaattccactct

SEQ ID NO: 117582 - DNA, 20 bp, Artificial Sequence
  Description of Artificial Sequence: Synthetic oligonucleotide
  Target: LAMA2; (-) strand; PAM type: NRG; PAM sequence: GAG
tcctcaaaacaccaaaaata

SEQ ID NO: 117583 - DNA, 20 bp, Artificial Sequence
  Description of Artificial Sequence: Synthetic oligonucleotide
  Target: LAMA2; (-) strand; PAM type: NRG; PAM sequence: TAG
gttcctcaaaacaccaaaaa

SEQ ID NO: 117584 - DNA, 20 bp, Artificial Sequence
  Description of Artificial Sequence: Synthetic oligonucleotide
  Target: LAMA2; (-) strand; PAM type: NRG; PAM sequence: AGG
tgctatgcagaacagtttgg

SEQ ID NO: 117585 - DNA, 20 bp, Artificial Sequence
  Description of Artificial Sequence: Synthetic oligonucleotide
  Target: LAMA2; (-) strand; PAM type: NRG; PAM sequence: GAG
ctgctatgcagaacagtttg

SEQ ID NO: 117586 - DNA, 20 bp, Artificial Sequence
  Description of Artificial Sequence: Synthetic oligonucleotide
  Target: LAMA2; (-) strand; PAM type: NRG; PAM sequence: TGG
aactgctatgcagaacagtt

SEQ ID NO: 117587 - DNA, 20 bp, Artificial Sequence
  Description of Artificial Sequence: Synthetic oligonucleotide
  Target: LAMA2; (-) strand; PAM type: NRG; PAM sequence: CAG
agtgcaactgctatgcagaa

SEQ ID NO: 117588 - DNA, 20 bp, Artificial Sequence
  Description of Artificial Sequence: Synthetic oligonucleotide
  Target: LAMA2; (-) strand; PAM type: NRG; PAM sequence: CAG
aaactagtgcaactgctatg

SEQ ID NO: 117589 - DNA, 20 bp, Artificial Sequence
  Description of Artificial Sequence: Synthetic oligonucleotide
  Target: LAMA2; (-) strand; PAM type: NRG; PAM sequence: TAG
ctgttggtgggaacgtaaac

SEQ ID NO: 117590 - DNA, 20 bp, Artificial Sequence
  Description of Artificial Sequence: Synthetic oligonucleotide
  Target: LAMA2; (-) strand; PAM type: NRG; PAM sequence: GGG
aacccttgtacactgttggt

SEQ ID NO: 117591 - DNA, 20 bp, Artificial Sequence
  Description of Artificial Sequence: Synthetic oligonucleotide
  Target: LAMA2; (-) strand; PAM type: NRG; PAM sequence: TGG
gaacccttgtacactgttgg

SEQ ID NO: 117592 - DNA, 20 bp, Artificial Sequence
  Description of Artificial Sequence: Synthetic oligonucleotide
  Target: LAMA2; (-) strand; PAM type: NRG; PAM sequence: TGG
agagaacccttgtacactgt

SEQ ID NO: 117593 - DNA, 20 bp, Artificial Sequence
  Description of Artificial Sequence: Synthetic oligonucleotide
  Target: LAMA2; (-) strand; PAM type: NRG; PAM sequence: GAG
tgacgaggatgtggagaaaa

SEQ ID NO: 117594 - DNA, 20 bp, Artificial Sequence
  Description of Artificial Sequence: Synthetic oligonucleotide
  Target: LAMA2; (-) strand; PAM type: NRG; PAM sequence: AAG
gctgacgaggatgtggagaa

SEQ ID NO: 117595 - DNA, 20 bp, Artificial Sequence
  Description of Artificial Sequence: Synthetic oligonucleotide
  Target: LAMA2; (-) strand; PAM type: NRG; PAM sequence: GAG
caaatgctgacgaggatgtg

SEQ ID NO: 117596 - DNA, 20 bp, Artificial Sequence
  Description of Artificial Sequence: Synthetic oligonucleotide
  Target: LAMA2; (-) strand; PAM type: NRG; PAM sequence: TGG
aacaaatgctgacgaggatg

SEQ ID NO: 117597 - DNA, 20 bp, Artificial Sequence
  Description of Artificial Sequence: Synthetic oligonucleotide
  Target: LAMA2; (-) strand; PAM type: NRG; PAM sequence: AGG
ggcaataacaaatgctgacg

SEQ ID NO: 117598 - DNA, 20 bp, Artificial Sequence
  Description of Artificial Sequence: Synthetic oligonucleotide
  Target: LAMA2; (-) strand; PAM type: NRG; PAM sequence: GAG
aggcaataacaaatgctgac

SEQ ID NO: 117599 - DNA, 20 bp, Artificial Sequence
  Description of Artificial Sequence: Synthetic oligonucleotide
  Target: LAMA2; (-) strand; PAM type: NRG; PAM sequence: AGG
atggcttttatccaaaagac

SEQ ID NO: 117600 - DNA, 20 bp, Artificial Sequence
  Description of Artificial Sequence: Synthetic oligonucleotide
  Target: LAMA2; (-) strand; PAM type: NRG; PAM sequence: CAG
aatggcttttatccaaaaga

SEQ ID NO: 117601 - DNA, 20 bp, Artificial Sequence
  Description of Artificial Sequence: Synthetic oligonucleotide
  Target: LAMA2; (-) strand; PAM type: NRG; PAM sequence: AAG
ttaaaatggcttttatccaa

SEQ ID NO: 117602 - DNA, 20 bp, Artificial Sequence
  Description of Artificial Sequence: Synthetic oligonucleotide
  Target: LAMA2; (-) strand; PAM type: NRG; PAM sequence: TGG
tcatctcacccaagttaaaa

SEQ ID NO: 117603 - DNA, 20 bp, Artificial Sequence
  Description of Artificial Sequence: Synthetic oligonucleotide
  Target: LAMA2; (-) strand; PAM type: NRG; PAM sequence: AAG
aatgagctatcatctcaccc

SEQ ID NO: 117604 - DNA, 20 bp, Artificial Sequence
  Description of Artificial Sequence: Synthetic oligonucleotide
  Target: LAMA2; (-) strand; PAM type: NRG; PAM sequence: GAG
atgcaaatcaaaactacaat

SEQ ID NO: 117605 - DNA, 20 bp, Artificial Sequence
  Description of Artificial Sequence: Synthetic oligonucleotide
  Target: LAMA2; (-) strand; PAM type: NRG; PAM sequence: GAG
ctcaacatcactgatcatca

SEQ ID NO: 117606 - DNA, 20 bp, Artificial Sequence
  Description of Artificial Sequence: Synthetic oligonucleotide
  Target: LAMA2; (-) strand; PAM type: NRG; PAM sequence: CAG
ggctcaacatcactgatcat

SEQ ID NO: 117607 - DNA, 20 bp, Artificial Sequence
  Description of Artificial Sequence: Synthetic oligonucleotide
  Target: LAMA2; (-) strand; PAM type: NRG; PAM sequence: GGG
aaaaacaggtatatcaaaag

SEQ ID NO: 117608 - DNA, 20 bp, Artificial Sequence
  Description of Artificial Sequence: Synthetic oligonucleotide
  Target: LAMA2; (-) strand; PAM type: NRG; PAM sequence: GGG
gaaaaacaggtatatcaaaa

SEQ ID NO: 117609 - DNA, 20 bp, Artificial Sequence
  Description of Artificial Sequence: Synthetic oligonucleotide
  Target: LAMA2; (-) strand; PAM type: NRG; PAM sequence: AGG
tgaaaaacaggtatatcaaa

SEQ ID NO: 117610 - DNA, 20 bp, Artificial Sequence
  Description of Artificial Sequence: Synthetic oligonucleotide
  Target: LAMA2; (-) strand; PAM type: NRG; PAM sequence: AAG
atgaaaaacaggtatatcaa

SEQ ID NO: 117611 - DNA, 20 bp, Artificial Sequence
  Description of Artificial Sequence: Synthetic oligonucleotide
  Target: LAMA2; (-) strand; PAM type: NRG; PAM sequence: AGG
aagatattcagatgaaaaac

SEQ ID NO: 117612 - DNA, 20 bp, Artificial Sequence
  Description of Artificial Sequence: Synthetic oligonucleotide
  Target: LAMA2; (-) strand; PAM type: NRG; PAM sequence: CAG
gaagatattcagatgaaaaa

SEQ ID NO: 117613 - DNA, 20 bp, Artificial Sequence
  Description of Artificial Sequence: Synthetic oligonucleotide
  Target: LAMA2; (-) strand; PAM type: NRG; PAM sequence: CAG
atttctcaaaagaagatatt

SEQ ID NO: 117614 - DNA, 20 bp, Artificial Sequence
  Description of Artificial Sequence: Synthetic oligonucleotide
  Target: LAMA2; (-) strand; PAM type: NRG; PAM sequence: AAG
ggatagacatttctcaaaag

SEQ ID NO: 117615 - DNA, 20 bp, Artificial Sequence
  Description of Artificial Sequence: Synthetic oligonucleotide
  Target: LAMA2; (-) strand; PAM type: NRG; PAM sequence: AAG
tttggatagacatttctcaa

SEQ ID NO: 117616 - DNA, 20 bp, Artificial Sequence
  Description of Artificial Sequence: Synthetic oligonucleotide
  Target: LAMA2; (-) strand; PAM type: NRG; PAM sequence: TAG
aaatgggtacaagatttgga

SEQ ID NO: 117617 - DNA, 20 bp, Artificial Sequence
  Description of Artificial Sequence: Synthetic oligonucleotide
  Target: LAMA2; (-) strand; PAM type: NRG; PAM sequence: TGG
ttaaaaatgggtacaagatt

SEQ ID NO: 117618 - DNA, 20 bp, Artificial Sequence
  Description of Artificial Sequence: Synthetic oligonucleotide
  Target: LAMA2; (-) strand; PAM type: NRG; PAM sequence: AAG
tcctatttaaaaatgggtac

SEQ ID NO: 117619 - DNA, 20 bp, Artificial Sequence
  Description of Artificial Sequence: Synthetic oligonucleotide
  Target: LAMA2; (-) strand; PAM type: NRG; PAM sequence: GGG
taataatcctatttaaaaat

SEQ ID NO: 117620 - DNA, 20 bp, Artificial Sequence
  Description of Artificial Sequence: Synthetic oligonucleotide
  Target: LAMA2; (-) strand; PAM type: NRG; PAM sequence: TGG
ctaataatcctatttaaaaa

SEQ ID NO: 117621 - DNA, 20 bp, Artificial Sequence
  Description of Artificial Sequence: Synthetic oligonucleotide
  Target: LAMA2; (-) strand; PAM type: NRG; PAM sequence: AGG
aggaattcaaacaattctat

SEQ ID NO: 117622 - DNA, 20 bp, Artificial Sequence
  Description of Artificial Sequence: Synthetic oligonucleotide
  Target: LAMA2; (-) strand; PAM type: NRG; PAM sequence: TAG
aaggaattcaaacaattcta

SEQ ID NO: 117623 - DNA, 20 bp, Artificial Sequence
  Description of Artificial Sequence: Synthetic oligonucleotide
  Target: LAMA2; (-) strand; PAM type: NRG; PAM sequence: AGG
attaataaccagaatataaa

SEQ ID NO: 117624 - DNA, 20 bp, Artificial Sequence
  Description of Artificial Sequence: Synthetic oligonucleotide
  Target: LAMA2; (-) strand; PAM type: NRG; PAM sequence: AAG
gattaataaccagaatataa

SEQ ID NO: 117625 - DNA, 20 bp, Artificial Sequence
  Description of Artificial Sequence: Synthetic oligonucleotide
  Target: LAMA2; (-) strand; PAM type: NRG; PAM sequence: CAG
tctgagaagggattaataac

SEQ ID NO: 117626 - DNA, 20 bp, Artificial Sequence
  Description of Artificial Sequence: Synthetic oligonucleotide
  Target: LAMA2; (-) strand; PAM type: NRG; PAM sequence: GGG
gcaaactacccatctgagaa

SEQ ID NO: 117627 - DNA, 20 bp, Artificial Sequence
  Description of Artificial Sequence: Synthetic oligonucleotide
  Target: LAMA2; (-) strand; PAM type: NRG; PAM sequence: AGG
tgcaaactacccatctgaga

SEQ ID NO: 117628 - DNA, 20 bp, Artificial Sequence
  Description of Artificial Sequence: Synthetic oligonucleotide
  Target: LAMA2; (-) strand; PAM type: NRG; PAM sequence: AAG
ttgcaaactacccatctgag

SEQ ID NO: 117629 - DNA, 20 bp, Artificial Sequence
  Description of Artificial Sequence: Synthetic oligonucleotide
  Target: LAMA2; (-) strand; PAM type: NRG; PAM sequence: GAG
tatttgcaaactacccatct

SEQ ID NO: 117630 - DNA, 20 bp, Artificial Sequence
  Description of Artificial Sequence: Synthetic oligonucleotide
  Target: LAMA2; (-) strand; PAM type: NRG; PAM sequence: GGG
gaagtgacaacccacagaat

SEQ ID NO: 117631 - DNA, 20 bp, Artificial Sequence
  Description of Artificial Sequence: Synthetic oligonucleotide
  Target: LAMA2; (-) strand; PAM type: NRG; PAM sequence: TGG
tgaagtgacaacccacagaa

SEQ ID NO: 117632 - DNA, 20 bp, Artificial Sequence
  Description of Artificial Sequence: Synthetic oligonucleotide
  Target: LAMA2; (-) strand; PAM type: NRG; PAM sequence: CAG
caaagtgaagtgacaaccca

SEQ ID NO: 117633 - DNA, 20 bp, Artificial Sequence
  Description of Artificial Sequence: Synthetic oligonucleotide
  Target: LAMA2; (-) strand; PAM type: NRG; PAM sequence: AAG
agtaaacaatcaacaaagtg

SEQ ID NO: 117634 - DNA, 20 bp, Artificial Sequence
  Description of Artificial Sequence: Synthetic oligonucleotide
  Target: LAMA2; (-) strand; PAM type: NRG; PAM sequence: AAG
agcaaagtaaacaatcaaca

SEQ ID NO: 117635 - DNA, 20 bp, Artificial Sequence
  Description of Artificial Sequence: Synthetic oligonucleotide
  Target: LAMA2; (-) strand; PAM type: NRG; PAM sequence: AAG
taaaaagcttctgcacagca

SEQ ID NO: 117636 - DNA, 20 bp, Artificial Sequence
  Description of Artificial Sequence: Synthetic oligonucleotide
  Target: LAMA2; (-) strand; PAM type: NRG; PAM sequence: CAG
caagttaaaaagcttctgca

SEQ ID NO: 117637 - DNA, 20 bp, Artificial Sequence
  Description of Artificial Sequence: Synthetic oligonucleotide
  Target: LAMA2; (-) strand; PAM type: NRG; PAM sequence: AAG
tgggatcacatcaagttaaa

SEQ ID NO: 117638 - DNA, 20 bp, Artificial Sequence
  Description of Artificial Sequence: Synthetic oligonucleotide
  Target: LAMA2; (-) strand; PAM type: NRG; PAM sequence: AAG
tagacaaatgggatcacatc

SEQ ID NO: 117639 - DNA, 20 bp, Artificial Sequence
  Description of Artificial Sequence: Synthetic oligonucleotide
  Target: LAMA2; (-) strand; PAM type: NRG; PAM sequence: GGG
caaagtaaaaatagacaaat

SEQ ID NO: 117640 - DNA, 20 bp, Artificial Sequence
  Description of Artificial Sequence: Synthetic oligonucleotide
  Target: LAMA2; (-) strand; PAM type: NRG; PAM sequence: TGG
ccaaagtaaaaatagacaaa

SEQ ID NO: 117641 - DNA, 20 bp, Artificial Sequence
  Description of Artificial Sequence: Synthetic oligonucleotide
  Target: LAMA2; (-) strand; PAM type: NRG; PAM sequence: TAG
acaggcaaccaaagtaaaaa

SEQ ID NO: 117642 - DNA, 20 bp, Artificial Sequence
  Description of Artificial Sequence: Synthetic oligonucleotide
  Target: LAMA2; (-) strand; PAM type: NRG; PAM sequence: AAG
cccacaagcacaggcaacca

SEQ ID NO: 117643 - DNA, 20 bp, Artificial Sequence
  Description of Artificial Sequence: Synthetic oligonucleotide
  Target: LAMA2; (-) strand; PAM type: NRG; PAM sequence: AGG
tgagtaatacccacaagcac

SEQ ID NO: 117644 - DNA, 20 bp, Artificial Sequence
  Description of Artificial Sequence: Synthetic oligonucleotide
  Target: LAMA2; (-) strand; PAM type: NRG; PAM sequence: CAG
ctgagtaatacccacaagca

SEQ ID NO: 117645 - DNA, 20 bp, Artificial Sequence
  Description of Artificial Sequence: Synthetic oligonucleotide
  Target: LAMA2; (-) strand; PAM type: NRG; PAM sequence: AAG
acttcctgagtaatacccac

SEQ ID NO: 117646 - DNA, 20 bp, Artificial Sequence
  Description of Artificial Sequence: Synthetic oligonucleotide
  Target: LAMA2; (-) strand; PAM type: NRG; PAM sequence: GAG
gaaatgggcaaagacttcct

SEQ ID NO: 117647 - DNA, 20 bp, Artificial Sequence
  Description of Artificial Sequence: Synthetic oligonucleotide
  Target: LAMA2; (-) strand; PAM type: NRG; PAM sequence: AAG
ccaggacattgaaatgggca

SEQ ID NO: 117648 - DNA, 20 bp, Artificial Sequence
  Description of Artificial Sequence: Synthetic oligonucleotide
  Target: LAMA2; (-) strand; PAM type: NRG; PAM sequence: GGG
attctccaggacattgaaat

SEQ ID NO: 117649 - DNA, 20 bp, Artificial Sequence
  Description of Artificial Sequence: Synthetic oligonucleotide
  Target: LAMA2; (-) strand; PAM type: NRG; PAM sequence: TGG
aattctccaggacattgaaa

SEQ ID NO: 117650 - DNA, 20 bp, Artificial Sequence
  Description of Artificial Sequence: Synthetic oligonucleotide
  Target: LAMA2; (-) strand; PAM type: NRG; PAM sequence: AGG
aaacattggggaaattctcc

SEQ ID NO: 117651 - DNA, 20 bp, Artificial Sequence
  Description of Artificial Sequence: Synthetic oligonucleotide
  Target: LAMA2; (-) strand; PAM type: NRG; PAM sequence: CAG
aaaacattggggaaattctc

SEQ ID NO: 117652 - DNA, 20 bp, Artificial Sequence
  Description of Artificial Sequence: Synthetic oligonucleotide
  Target: LAMA2; (-) strand; PAM type: NRG; PAM sequence: GGG
actattacaataaaacattg

SEQ ID NO: 117653 - DNA, 20 bp, Artificial Sequence
  Description of Artificial Sequence: Synthetic oligonucleotide
  Target: LAMA2; (-) strand; PAM type: NRG; PAM sequence: GGG
aactattacaataaaacatt

SEQ ID NO: 117654 - DNA, 20 bp, Artificial Sequence
  Description of Artificial Sequence: Synthetic oligonucleotide
  Target: LAMA2; (-) strand; PAM type: NRG; PAM sequence: TGG
aaactattacaataaaacat

SEQ ID NO: 117655 - DNA, 20 bp, Artificial Sequence
  Description of Artificial Sequence: Synthetic oligonucleotide
  Target: LAMA2; (-) strand; PAM type: NRG; PAM sequence: GAG
gattagagacttgaatctaa

SEQ ID NO: 117656 - DNA, 20 bp, Artificial Sequence
  Description of Artificial Sequence: Synthetic oligonucleotide
  Target: LAMA2; (-) strand; PAM type: NRG; PAM sequence: AAG
tggattagagacttgaatct

SEQ ID NO: 117657 - DNA, 20 bp, Artificial Sequence
  Description of Artificial Sequence: Synthetic oligonucleotide
  Target: LAMA2; (-) strand; PAM type: NRG; PAM sequence: GAG
aatcaaatcaaagtggatta

SEQ ID NO: 117658 - DNA, 20 bp, Artificial Sequence
  Description of Artificial Sequence: Synthetic oligonucleotide
  Target: LAMA2; (-) strand; PAM type: NRG; PAM sequence: TAG
aaaatcaaatcaaagtggat

SEQ ID NO: 117659 - DNA, 20 bp, Artificial Sequence
  Description of Artificial Sequence: Synthetic oligonucleotide
  Target: LAMA2; (-) strand; PAM type: NRG; PAM sequence: TGG
atacaaaaatcaaatcaaag

SEQ ID NO: 117660 - DNA, 20 bp, Artificial Sequence
  Description of Artificial Sequence: Synthetic oligonucleotide
  Target: LAMA2; (-) strand; PAM type: NRG; PAM sequence: AAG
catatacaaaaatcaaatca

SEQ ID NO: 117661 - DNA, 20 bp, Artificial Sequence
  Description of Artificial Sequence: Synthetic oligonucleotide
  Target: LAMA2; (-) strand; PAM type: NRG; PAM sequence: TAG
catatgcggaagaatgaaac

SEQ ID NO: 117662 - DNA, 20 bp, Artificial Sequence
  Description of Artificial Sequence: Synthetic oligonucleotide
  Target: LAMA2; (-) strand; PAM type: NRG; PAM sequence: AAG
aactggatattcatatgcgg

SEQ ID NO: 117663 - DNA, 20 bp, Artificial Sequence
  Description of Artificial Sequence: Synthetic oligonucleotide
  Target: LAMA2; (-) strand; PAM type: NRG; PAM sequence: CGG
gaaaactggatattcatatg

SEQ ID NO: 117664 - DNA, 20 bp, Artificial Sequence
  Description of Artificial Sequence: Synthetic oligonucleotide
  Target: LAMA2; (-) strand; PAM type: NRG; PAM sequence: TGG
ataaatggtgcagggaaaac

SEQ ID NO: 117665 - DNA, 20 bp, Artificial Sequence
  Description of Artificial Sequence: Synthetic oligonucleotide
  Target: LAMA2; (-) strand; PAM type: NRG; PAM sequence: GGG
tctcttcaataaatggtgca

SEQ ID NO: 117666 - DNA, 20 bp, Artificial Sequence
  Description of Artificial Sequence: Synthetic oligonucleotide
  Target: LAMA2; (-) strand; PAM type: NRG; PAM sequence: AGG
gtctcttcaataaatggtgc

SEQ ID NO: 117667 - DNA, 20 bp, Artificial Sequence
  Description of Artificial Sequence: Synthetic oligonucleotide
  Target: LAMA2; (-) strand; PAM type: NRG; PAM sequence: CAG
agtctcttcaataaatggtg

SEQ ID NO: 117668 - DNA, 20 bp, Artificial Sequence
  Description of Artificial Sequence: Synthetic oligonucleotide
  Target: LAMA2; (-) strand; PAM type: NRG; PAM sequence: TGG
aggacagtctcttcaataaa

SEQ ID NO: 117669 - DNA, 20 bp, Artificial Sequence
  Description of Artificial Sequence: Synthetic oligonucleotide
  Target: LAMA2; (-) strand; PAM type: NRG; PAM sequence: CAG
aacatacattagggaaagga

SEQ ID NO: 117670 - DNA, 20 bp, Artificial Sequence
  Description of Artificial Sequence: Synthetic oligonucleotide
  Target: LAMA2; (-) strand; PAM type: NRG; PAM sequence: AGG
taagaacatacattagggaa

SEQ ID NO: 117671 - DNA, 20 bp, Artificial Sequence
  Description of Artificial Sequence: Synthetic oligonucleotide
  Target: LAMA2; (-) strand; PAM type: NRG; PAM sequence: AAG
ctaagaacatacattaggga

SEQ ID NO: 117672 - DNA, 20 bp, Artificial Sequence
  Description of Artificial Sequence: Synthetic oligonucleotide
  Target: LAMA2; (-) strand; PAM type: NRG; PAM sequence: GGG
ggttctaagaacatacatta

SEQ ID NO: 117673 - DNA, 20 bp, Artificial Sequence
  Description of Artificial Sequence: Synthetic oligonucleotide
  Target: LAMA2; (-) strand; PAM type: NRG; PAM sequence: AGG
aggttctaagaacatacatt

SEQ ID NO: 117674 - DNA, 20 bp, Artificial Sequence
  Description of Artificial Sequence: Synthetic oligonucleotide
  Target: LAMA2; (-) strand; PAM type: NRG; PAM sequence: TAG
aaggttctaagaacatacat

SEQ ID NO: 117675 - DNA, 20 bp, Artificial Sequence
  Description of Artificial Sequence: Synthetic oligonucleotide
  Target: LAMA2; (-) strand; PAM type: NRG; PAM sequence: AAG
tcattttccataaaggttct

SEQ ID NO: 117676 - DNA, 20 bp, Artificial Sequence
  Description of Artificial Sequence: Synthetic oligonucleotide
  Target: LAMA2; (-) strand; PAM type: NRG; PAM sequence: AGG
agtgaactcattttccataa

SEQ ID NO: 117677 - DNA, 20 bp, Artificial Sequence
  Description of Artificial Sequence: Synthetic oligonucleotide
  Target: LAMA2; (-) strand; PAM type: NRG; PAM sequence: AAG
cagtgaactcattttccata

SEQ ID NO: 117678 - DNA, 20 bp, Artificial Sequence
  Description of Artificial Sequence: Synthetic oligonucleotide
  Target: LAMA2; (-) strand; PAM type: NRG; PAM sequence: CAG
gaaataaatccatacatcta

SEQ ID NO: 117679 - DNA, 20 bp, Artificial Sequence
  Description of Artificial Sequence: Synthetic oligonucleotide
  Target: LAMA2; (-) strand; PAM type: NRG; PAM sequence: CAG
gtggaacaggatagagaagc

SEQ ID NO: 117680 - DNA, 20 bp, Artificial Sequence
  Description of Artificial Sequence: Synthetic oligonucleotide
  Target: LAMA2; (-) strand; PAM type: NRG; PAM sequence: AAG
accagtggaacaggatagag

SEQ ID NO: 117681 - DNA, 20 bp, Artificial Sequence
  Description of Artificial Sequence: Synthetic oligonucleotide
  Target: LAMA2; (-) strand; PAM type: NRG; PAM sequence: GAG
tagaccagtggaacaggata

SEQ ID NO: 117682 - DNA, 20 bp, Artificial Sequence
  Description of Artificial Sequence: Synthetic oligonucleotide
  Target: LAMA2; (-) strand; PAM type: NRG; PAM sequence: TAG
catagaccagtggaacagga

SEQ ID NO: 117683 - DNA, 20 bp, Artificial Sequence
  Description of Artificial Sequence: Synthetic oligonucleotide
  Target: LAMA2; (-) strand; PAM type: NRG; PAM sequence: AGG
ggcacatagaccagtggaac

SEQ ID NO: 117684 - DNA, 20 bp, Artificial Sequence
  Description of Artificial Sequence: Synthetic oligonucleotide
  Target: LAMA2; (-) strand; PAM type: NRG; PAM sequence: CAG
aggcacatagaccagtggaa

SEQ ID NO: 117685 - DNA, 20 bp, Artificial Sequence
  Description of Artificial Sequence: Synthetic oligonucleotide
  Target: LAMA2; (-) strand; PAM type: NRG; PAM sequence: TGG
aaaataggcacatagaccag

SEQ ID NO: 117686 - DNA, 20 bp, Artificial Sequence
  Description of Artificial Sequence: Synthetic oligonucleotide
  Target: LAMA2; (-) strand; PAM type: NRG; PAM sequence: CAG
ataaaaataggcacatagac

SEQ ID NO: 117687 - DNA, 20 bp, Artificial Sequence
  Description of Artificial Sequence: Synthetic oligonucleotide
  Target: LAMA2; (-) strand; PAM type: NRG; PAM sequence: TAG
ctggcataaaaataggcaca

SEQ ID NO: 117688 - DNA, 20 bp, Artificial Sequence
  Description of Artificial Sequence: Synthetic oligonucleotide
  Target: LAMA2; (-) strand; PAM type: NRG; PAM sequence: AGG
catagtactggcataaaaat

SEQ ID NO: 117689 - DNA, 20 bp, Artificial Sequence
  Description of Artificial Sequence: Synthetic oligonucleotide
  Target: LAMA2; (-) strand; PAM type: NRG; PAM sequence: TAG
gcatagtactggcataaaaa

SEQ ID NO: 117690 - DNA, 20 bp, Artificial Sequence
  Description of Artificial Sequence: Synthetic oligonucleotide
  Target: LAMA2; (-) strand; PAM type: NRG; PAM sequence: TGG
taagccaaacggcatagtac

SEQ ID NO: 117691 - DNA, 20 bp, Artificial Sequence
  Description of Artificial Sequence: Synthetic oligonucleotide
  Target: LAMA2; (-) strand; PAM type: NRG; PAM sequence: TAG
ctatagtaagccaaacggca

SEQ ID NO: 117692 - DNA, 20 bp, Artificial Sequence
  Description of Artificial Sequence: Synthetic oligonucleotide
  Target: LAMA2; (-) strand; PAM type: NRG; PAM sequence: CGG
cagaactatagtaagccaaa

SEQ ID NO: 117693 - DNA, 20 bp, Artificial Sequence
  Description of Artificial Sequence: Synthetic oligonucleotide
  Target: LAMA2; (-) strand; PAM type: NRG; PAM sequence: AAG
ttataccacagaactatagt

SEQ ID NO: 117694 - DNA, 20 bp, Artificial Sequence
  Description of Artificial Sequence: Synthetic oligonucleotide
  Target: LAMA2; (-) strand; PAM type: NRG; PAM sequence: TAG
caaattataccacagaacta

SEQ ID NO: 117695 - DNA, 20 bp, Artificial Sequence
  Description of Artificial Sequence: Synthetic oligonucleotide
  Target: LAMA2; (-) strand; PAM type: NRG; PAM sequence: CAG
ccggacttcaaattatacca

SEQ ID NO: 117696 - DNA, 20 bp, Artificial Sequence
  Description of Artificial Sequence: Synthetic oligonucleotide
  Target: LAMA2; (-) strand; PAM type: NRG; PAM sequence: CGG
aattggaagaattacattac

SEQ ID NO: 117697 - DNA, 20 bp, Artificial Sequence
  Description of Artificial Sequence: Synthetic oligonucleotide
  Target: LAMA2; (-) strand; PAM type: NRG; PAM sequence: AAG
tgcaaaaggaacaaaattgg

SEQ ID NO: 117698 - DNA, 20 bp, Artificial Sequence
  Description of Artificial Sequence: Synthetic oligonucleotide
  Target: LAMA2; (-) strand; PAM type: NRG; PAM sequence: TGG
ctatgcaaaaggaacaaaat

SEQ ID NO: 117699 - DNA, 20 bp, Artificial Sequence
  Description of Artificial Sequence: Synthetic oligonucleotide
  Target: LAMA2; (-) strand; PAM type: NRG; PAM sequence: AGG
ccacagctatcctatgcaaa

SEQ ID NO: 117700 - DNA, 20 bp, Artificial Sequence
  Description of Artificial Sequence: Synthetic oligonucleotide
  Target: LAMA2; (-) strand; PAM type: NRG; PAM sequence: AAG
gccacagctatcctatgcaa

SEQ ID NO: 117701 - DNA, 20 bp, Artificial Sequence
  Description of Artificial Sequence: Synthetic oligonucleotide
  Target: LAMA2; (-) strand; PAM type: NRG; PAM sequence: CAG
tatgaaacccagaatagcca

SEQ ID NO: 117702 - DNA, 20 bp, Artificial Sequence
  Description of Artificial Sequence: Synthetic oligonucleotide
  Target: LAMA2; (-) strand; PAM type: NRG; PAM sequence: TAG
aattcatatgaaacccagaa

SEQ ID NO: 117703 - DNA, 20 bp, Artificial Sequence
  Description of Artificial Sequence: Synthetic oligonucleotide
  Target: LAMA2; (-) strand; PAM type: NRG; PAM sequence: CAG
cctaaaattcatatgaaacc

SEQ ID NO: 117704 - DNA, 20 bp, Artificial Sequence
  Description of Artificial Sequence: Synthetic oligonucleotide
  Target: LAMA2; (-) strand; PAM type: NRG; PAM sequence: TAG
aatgagattcttcacagaaa

SEQ ID NO: 117705 - DNA, 20 bp, Artificial Sequence
  Description of Artificial Sequence: Synthetic oligonucleotide
  Target: LAMA2; (-) strand; PAM type: NRG; PAM sequence: CAG
aataccaatgagattcttca

SEQ ID NO: 117706 - DNA, 20 bp, Artificial Sequence
  Description of Artificial Sequence: Synthetic oligonucleotide
  Target: LAMA2; (-) strand; PAM type: NRG; PAM sequence: GAG
atccctattaaaataccaat

SEQ ID NO: 117707 - DNA, 20 bp, Artificial Sequence
  Description of Artificial Sequence: Synthetic oligonucleotide
  Target: LAMA2; (-) strand; PAM type: NRG; PAM sequence: CAG
atactacccagagcaatctg

SEQ ID NO: 117708 - DNA, 20 bp, Artificial Sequence
  Description of Artificial Sequence: Synthetic oligonucleotide
  Target: LAMA2; (-) strand; PAM type: NRG; PAM sequence: GAG
taaaatgtccatactaccca

SEQ ID NO: 117709 - DNA, 20 bp, Artificial Sequence
  Description of Artificial Sequence: Synthetic oligonucleotide
  Target: LAMA2; (-) strand; PAM type: NRG; PAM sequence: CAG
gttaaaatgtccatactacc

SEQ ID NO: 117710 - DNA, 20 bp, Artificial Sequence
  Description of Artificial Sequence: Synthetic oligonucleotide
  Target: LAMA2; (-) strand; PAM type: NRG; PAM sequence: AAG
attccatgttaatggattgg

SEQ ID NO: 117711 - DNA, 20 bp, Artificial Sequence
  Description of Artificial Sequence: Synthetic oligonucleotide
  Target: LAMA2; (-) strand; PAM type: NRG; PAM sequence: TGG
gatattccatgttaatggat

SEQ ID NO: 117712 - DNA, 20 bp, Artificial Sequence
  Description of Artificial Sequence: Synthetic oligonucleotide
  Target: LAMA2; (-) strand; PAM type: NRG; PAM sequence: TGG
aataagatattccatgttaa

SEQ ID NO: 117713 - DNA, 20 bp, Artificial Sequence
  Description of Artificial Sequence: Synthetic oligonucleotide
  Target: LAMA2; (-) strand; PAM type: NRG; PAM sequence: AAG
attcaagagggcacaaaaat

SEQ ID NO: 117714 - DNA, 20 bp, Artificial Sequence
  Description of Artificial Sequence: Synthetic oligonucleotide
  Target: LAMA2; (-) strand; PAM type: NRG; PAM sequence: GGG
atgatgcaagaaattcaaga

SEQ ID NO: 117715 - DNA, 20 bp, Artificial Sequence
  Description of Artificial Sequence: Synthetic oligonucleotide
  Target: LAMA2; (-) strand; PAM type: NRG; PAM sequence: AGG
aatgatgcaagaaattcaag

SEQ ID NO: 117716 - DNA, 20 bp, Artificial Sequence
  Description of Artificial Sequence: Synthetic oligonucleotide
  Target: LAMA2; (-) strand; PAM type: NRG; PAM sequence: GAG
caatgatgcaagaaattcaa

SEQ ID NO: 117717 - DNA, 20 bp, Artificial Sequence
  Description of Artificial Sequence: Synthetic oligonucleotide
  Target: LAMA2; (-) strand; PAM type: NRG; PAM sequence: AAG
aacaatgatgcaagaaattc

SEQ ID NO: 117718 - DNA, 20 bp, Artificial Sequence
  Description of Artificial Sequence: Synthetic oligonucleotide
  Target: LAMA2; (-) strand; PAM type: NRG; PAM sequence: AAG
aaactataaaacaatgatgc

SEQ ID NO: 117719 - DNA, 20 bp, Artificial Sequence
  Description of Artificial Sequence: Synthetic oligonucleotide
  Target: LAMA2; (-) strand; PAM type: NRG; PAM sequence: AAG
gtgttccagatcttagagga

SEQ ID NO: 117720 - DNA, 20 bp, Artificial Sequence
  Description of Artificial Sequence: Synthetic oligonucleotide
  Target: LAMA2; (-) strand; PAM type: NRG; PAM sequence: AGG
tgtcgtgttccagatcttag

SEQ ID NO: 117721 - DNA, 20 bp, Artificial Sequence
  Description of Artificial Sequence: Synthetic oligonucleotide
  Target: LAMA2; (-) strand; PAM type: NRG; PAM sequence: GAG
ttgtcgtgttccagatctta

SEQ ID NO: 117722 - DNA, 20 bp, Artificial Sequence
  Description of Artificial Sequence: Synthetic oligonucleotide
  Target: LAMA2; (-) strand; PAM type: NRG; PAM sequence: TAG
ccttgtcgtgttccagatct

SEQ ID NO: 117723 - DNA, 20 bp, Artificial Sequence
  Description of Artificial Sequence: Synthetic oligonucleotide
  Target: LAMA2; (-) strand; PAM type: NRG; PAM sequence: CAG
tgggcatccttgtcgtgttc

SEQ ID NO: 117724 - DNA, 20 bp, Artificial Sequence
  Description of Artificial Sequence: Synthetic oligonucleotide
  Target: LAMA2; (-) strand; PAM type: NRG; PAM sequence: GGG
tgaataacagtggtgagagt

SEQ ID NO: 117725 - DNA, 20 bp, Artificial Sequence
  Description of Artificial Sequence: Synthetic oligonucleotide
  Target: LAMA2; (-) strand; PAM type: NRG; PAM sequence: TGG
ttgaataacagtggtgagag

SEQ ID NO: 117726 - DNA, 20 bp, Artificial Sequence
  Description of Artificial Sequence: Synthetic oligonucleotide
  Target: LAMA2; (-) strand; PAM type: NRG; PAM sequence: GAG
atgttgaataacagtggtga

SEQ ID NO: 117727 - DNA, 20 bp, Artificial Sequence
  Description of Artificial Sequence: Synthetic oligonucleotide
  Target: LAMA2; (-) strand; PAM type: NRG; PAM sequence: GAG
ctatgttgaataacagtggt

SEQ ID NO: 117728 - DNA, 20 bp, Artificial Sequence
  Description of Artificial Sequence: Synthetic oligonucleotide
  Target: LAMA2; (-) strand; PAM type: NRG; PAM sequence: TGG
aatactatgttgaataacag

SEQ ID NO: 117729 - DNA, 20 bp, Artificial Sequence
  Description of Artificial Sequence: Synthetic oligonucleotide
  Target: LAMA2; (-) strand; PAM type: NRG; PAM sequence: CAG
tccaatactatgttgaataa

SEQ ID NO: 117730 - DNA, 20 bp, Artificial Sequence
  Description of Artificial Sequence: Synthetic oligonucleotide
  Target: LAMA2; (-) strand; PAM type: NRG; PAM sequence: AGG
cttgtctgactgctctagct

SEQ ID NO: 117731 - DNA, 20 bp, Artificial Sequence
  Description of Artificial Sequence: Synthetic oligonucleotide
  Target: LAMA2; (-) strand; PAM type: NRG; PAM sequence: TAG
tcttgtctgactgctctagc

SEQ ID NO: 117732 - DNA, 20 bp, Artificial Sequence
  Description of Artificial Sequence: Synthetic oligonucleotide
  Target: LAMA2; (-) strand; PAM type: NRG; PAM sequence: TAG
tttctcttgtctgactgctc

SEQ ID NO: 117733 - DNA, 20 bp, Artificial Sequence
  Description of Artificial Sequence: Synthetic oligonucleotide
  Target: LAMA2; (-) strand; PAM type: NRG; PAM sequence: TGG
ggataatttgacttcttcct

SEQ ID NO: 117734 - DNA, 20 bp, Artificial Sequence
  Description of Artificial Sequence: Synthetic oligonucleotide
  Target: LAMA2; (-) strand; PAM type: NRG; PAM sequence: AGG
aatcatatcatttgcaaaca

SEQ ID NO: 117735 - DNA, 20 bp, Artificial Sequence
  Description of Artificial Sequence: Synthetic oligonucleotide
  Target: LAMA2; (-) strand; PAM type: NRG; PAM sequence: AAG
aaatcatatcatttgcaaac

SEQ ID NO: 117736 - DNA, 20 bp, Artificial Sequence
  Description of Artificial Sequence: Synthetic oligonucleotide
  Target: LAMA2; (-) strand; PAM type: NRG; PAM sequence: AGG
ggttttttggtggggtcttt

SEQ ID NO: 117737 - DNA, 20 bp, Artificial Sequence
  Description of Artificial Sequence: Synthetic oligonucleotide
  Target: LAMA2; (-) strand; PAM type: NRG; PAM sequence: TAG
tggttttttggtggggtctt

SEQ ID NO: 117738 - DNA, 20 bp, Artificial Sequence
  Description of Artificial Sequence: Synthetic oligonucleotide
  Target: LAMA2; (-) strand; PAM type: NRG; PAM sequence: GGG
gttctaatggttttttggtg

SEQ ID NO: 117739 - DNA, 20 bp, Artificial Sequence
  Description of Artificial Sequence: Synthetic oligonucleotide
  Target: LAMA2; (-) strand; PAM type: NRG; PAM sequence: GGG
agttctaatggttttttggt

SEQ ID NO: 117740 - DNA, 20 bp, Artificial Sequence
  Description of Artificial Sequence: Synthetic oligonucleotide
  Target: LAMA2; (-) strand; PAM type: NRG; PAM sequence: TGG
cagttctaatggttttttgg

SEQ ID NO: 117741 - DNA, 20 bp, Artificial Sequence
  Description of Artificial Sequence: Synthetic oligonucleotide
  Target: LAMA2; (-) strand; PAM type: NRG; PAM sequence: TGG
tatcagttctaatggttttt

SEQ ID NO: 117742 - DNA, 20 bp, Artificial Sequence
  Description of Artificial Sequence: Synthetic oligonucleotide
  Target: LAMA2; (-) strand; PAM type: NRG; PAM sequence: TGG
actgaatttatcagttctaa

SEQ ID NO: 117743 - DNA, 20 bp, Artificial Sequence
  Description of Artificial Sequence: Synthetic oligonucleotide
  Target: LAMA2; (-) strand; PAM type: NRG; PAM sequence: CAG
tgcagctttactgaatttat

SEQ ID NO: 117744 - DNA, 20 bp, Artificial Sequence
  Description of Artificial Sequence: Synthetic oligonucleotide
  Target: LAMA2; (-) strand; PAM type: NRG; PAM sequence: CAG
tatgttgactttgtatcctg

SEQ ID NO: 117745 - DNA, 20 bp, Artificial Sequence
  Description of Artificial Sequence: Synthetic oligonucleotide
  Target: LAMA2; (-) strand; PAM type: NRG; PAM sequence: TAG
gattgtttgctgttggcata

SEQ ID NO: 117746 - DNA, 20 bp, Artificial Sequence
  Description of Artificial Sequence: Synthetic oligonucleotide
  Target: LAMA2; (-) strand; PAM type: NRG; PAM sequence: TGG
tttttctgattgtttgctgt

SEQ ID NO: 117747 - DNA, 20 bp, Artificial Sequence
  Description of Artificial Sequence: Synthetic oligonucleotide
  Target: LAMA2; (-) strand; PAM type: NRG; PAM sequence: TGG
ttatttgtagctactgtaaa

SEQ ID NO: 117748 - DNA, 20 bp, Artificial Sequence
  Description of Artificial Sequence: Synthetic oligonucleotide
  Target: LAMA2; (-) strand; PAM type: NRG; PAM sequence: TAG
ttagtattttattttatttg

SEQ ID NO: 117749 - DNA, 20 bp, Artificial Sequence
  Description of Artificial Sequence: Synthetic oligonucleotide
  Target: LAMA2; (-) strand; PAM type: NRG; PAM sequence: TAG
cacttatttggttaattcct

SEQ ID NO: 117750 - DNA, 20 bp, Artificial Sequence
  Description of Artificial Sequence: Synthetic oligonucleotide
  Target: LAMA2; (-) strand; PAM type: NRG; PAM sequence: TGG
gtagagacctttcacttatt

SEQ ID NO: 117751 - DNA, 20 bp, Artificial Sequence
  Description of Artificial Sequence: Synthetic oligonucleotide
  Target: LAMA2; (-) strand; PAM type: NRG; PAM sequence: GAG
attatgcagttttcattgta

SEQ ID NO: 117752 - DNA, 20 bp, Artificial Sequence
  Description of Artificial Sequence: Synthetic oligonucleotide
  Target: LAMA2; (-) strand; PAM type: NRG; PAM sequence: TAG
ttattatgcagttttcattg

SEQ ID NO: 117753 - DNA, 20 bp, Artificial Sequence
  Description of Artificial Sequence: Synthetic oligonucleotide
  Target: LAMA2; (-) strand; PAM type: NRG; PAM sequence: CAG
agattttaaaaattattatg

SEQ ID NO: 117754 - DNA, 20 bp, Artificial Sequence
  Description of Artificial Sequence: Synthetic oligonucleotide
  Target: LAMA2; (-) strand; PAM type: NRG; PAM sequence: CAG
atcttaaagtacattaattg

SEQ ID NO: 117755 - DNA, 20 bp, Artificial Sequence
  Description of Artificial Sequence: Synthetic oligonucleotide
  Target: LAMA2; (-) strand; PAM type: NRG; PAM sequence: AAG
ggactgaatattctatctta

SEQ ID NO: 117756 - DNA, 20 bp, Artificial Sequence
  Description of Artificial Sequence: Synthetic oligonucleotide
  Target: LAMA2; (-) strand; PAM type: NRG; PAM sequence: GGG
acgtatttctatgataccac

SEQ ID NO: 117757 - DNA, 20 bp, Artificial Sequence
  Description of Artificial Sequence: Synthetic oligonucleotide
  Target: LAMA2; (-) strand; PAM type: NRG; PAM sequence: CGG
cacgtatttctatgatacca

SEQ ID NO: 117758 - DNA, 20 bp, Artificial Sequence
  Description of Artificial Sequence: Synthetic oligonucleotide
  Target: LAMA2; (-) strand; PAM type: NRG; PAM sequence: TAG
tccacatattatgtgcttat

SEQ ID NO: 117759 - DNA, 20 bp, Artificial Sequence
  Description of Artificial Sequence: Synthetic oligonucleotide
  Target: LAMA2; (-) strand; PAM type: NRG; PAM sequence: AAG
gataatatattcttgataga

SEQ ID NO: 117760 - DNA, 20 bp, Artificial Sequence
  Description of Artificial Sequence: Synthetic oligonucleotide
  Target: LAMA2; (-) strand; PAM type: NRG; PAM sequence: TAG
agttgataatatattcttga

SEQ ID NO: 117761 - DNA, 20 bp, Artificial Sequence
  Description of Artificial Sequence: Synthetic oligonucleotide
  Target: LAMA2; (-) strand; PAM type: NRG; PAM sequence: CAG
gccttctttcaatttcttac

SEQ ID NO: 117762 - DNA, 20 bp, Artificial Sequence
  Description of Artificial Sequence: Synthetic oligonucleotide
  Target: LAMA2; (-) strand; PAM type: NRG; PAM sequence: CAG
tctttttttctaagtatcta

SEQ ID NO: 117763 - DNA, 20 bp, Artificial Sequence
  Description of Artificial Sequence: Synthetic oligonucleotide
  Target: LAMA2; (-) strand; PAM type: NRG; PAM sequence: AAG
caaaattaatctttttttct

SEQ ID NO: 117764 - DNA, 20 bp, Artificial Sequence
  Description of Artificial Sequence: Synthetic oligonucleotide
  Target: LAMA2; (-) strand; PAM type: NRG; PAM sequence: AAG
gggagtgttaaaatcacctg

SEQ ID NO: 117765 - DNA, 20 bp, Artificial Sequence
  Description of Artificial Sequence: Synthetic oligonucleotide
  Target: LAMA2; (-) strand; PAM type: NRG; PAM sequence: GAG
tcacccactactttgtatgg

SEQ ID NO: 117766 - DNA, 20 bp, Artificial Sequence
  Description of Artificial Sequence: Synthetic oligonucleotide
  Target: LAMA2; (-) strand; PAM type: NRG; PAM sequence: GGG
tatcacccactactttgtat

SEQ ID NO: 117767 - DNA, 20 bp, Artificial Sequence
  Description of Artificial Sequence: Synthetic oligonucleotide
  Target: LAMA2; (-) strand; PAM type: NRG; PAM sequence: TGG
ctatcacccactactttgta

SEQ ID NO: 117768 - DNA, 20 bp, Artificial Sequence
  Description of Artificial Sequence: Synthetic oligonucleotide
  Target: LAMA2; (-) strand; PAM type: NRG; PAM sequence: GGG
cctacctatattttggtgga

SEQ ID NO: 117769 - DNA, 20 bp, Artificial Sequence
  Description of Artificial Sequence: Synthetic oligonucleotide
  Target: LAMA2; (-) strand; PAM type: NRG; PAM sequence: AGG
tcctacctatattttggtgg

SEQ ID NO: 117770 - DNA, 20 bp, Artificial Sequence
  Description of Artificial Sequence: Synthetic oligonucleotide
  Target: LAMA2; (-) strand; PAM type: NRG; PAM sequence: GAG
ttcctacctatattttggtg

SEQ ID NO: 117771 - DNA, 20 bp, Artificial Sequence
  Description of Artificial Sequence: Synthetic oligonucleotide
  Target: LAMA2; (-) strand; PAM type: NRG; PAM sequence: TGG
gtttcctacctatattttgg

SEQ ID NO: 117772 - DNA, 20 bp, Artificial Sequence
  Description of Artificial Sequence: Synthetic oligonucleotide
  Target: LAMA2; (-) strand; PAM type: NRG; PAM sequence: TGG
ggggtttcctacctatattt

SEQ ID NO: 117773 - DNA, 20 bp, Artificial Sequence
  Description of Artificial Sequence: Synthetic oligonucleotide
  Target: LAMA2; (-) strand; PAM type: NRG; PAM sequence: GGG
tttctgcttccctgtaggtg

SEQ ID NO: 117774 - DNA, 20 bp, Artificial Sequence
  Description of Artificial Sequence: Synthetic oligonucleotide
  Target: LAMA2; (-) strand; PAM type: NRG; PAM sequence: GGG
ttttctgcttccctgtaggt

SEQ ID NO: 117775 - DNA, 20 bp, Artificial Sequence
  Description of Artificial Sequence: Synthetic oligonucleotide
  Target: LAMA2; (-) strand; PAM type: NRG; PAM sequence: TGG
gttttctgcttccctgtagg

SEQ ID NO: 117776 - DNA, 20 bp, Artificial Sequence
  Description of Artificial Sequence: Synthetic oligonucleotide
  Target: LAMA2; (-) strand; PAM type: NRG; PAM sequence: AGG
tctgttttctgcttccctgt

SEQ ID NO: 117777 - DNA, 20 bp, Artificial Sequence
  Description of Artificial Sequence: Synthetic oligonucleotide
  Target: LAMA2; (-) strand; PAM type: NRG; PAM sequence: TAG
ttctgttttctgcttccctg

SEQ ID NO: 117778 - DNA, 20 bp, Artificial Sequence
  Description of Artificial Sequence: Synthetic oligonucleotide
  Target: LAMA2; (-) strand; PAM type: NRG; PAM sequence: CAG
agcacatggaattcggggtt

SEQ ID NO: 117779 - DNA, 20 bp, Artificial Sequence
  Description of Artificial Sequence: Synthetic oligonucleotide
  Target: LAMA2; (-) strand; PAM type: NRG; PAM sequence: GGG
ttcatagcacatggaattcg

SEQ ID NO: 117780 - DNA, 20 bp, Artificial Sequence
  Description of Artificial Sequence: Synthetic oligonucleotide
  Target: LAMA2; (-) strand; PAM type: NRG; PAM sequence: GGG
tttcatagcacatggaattc

SEQ ID NO: 117781 - DNA, 20 bp, Artificial Sequence
  Description of Artificial Sequence: Synthetic oligonucleotide
  Target: LAMA2; (-) strand; PAM type: NRG; PAM sequence: CGG
ctttcatagcacatggaatt

SEQ ID NO: 117782 - DNA, 20 bp, Artificial Sequence
  Description of Artificial Sequence: Synthetic oligonucleotide
  Target: LAMA2; (-) strand; PAM type: NRG; PAM sequence: TGG
ttttagactttcatagcaca

SEQ ID NO: 117783 - DNA, 20 bp, Artificial Sequence
  Description of Artificial Sequence: Synthetic oligonucleotide
  Target: LAMA2; (-) strand; PAM type: NRG; PAM sequence: TAG
gggaagcttttagactttca

SEQ ID NO: 117784 - DNA, 20 bp, Artificial Sequence
  Description of Artificial Sequence: Synthetic oligonucleotide
  Target: LAMA2; (-) strand; PAM type: NRG; PAM sequence: TAG
gaaatcttgggggaagcttt

SEQ ID NO: 117785 - DNA, 20 bp, Artificial Sequence
  Description of Artificial Sequence: Synthetic oligonucleotide
  Target: LAMA2; (-) strand; PAM type: NRG; PAM sequence: AAG
atttgcagaaatcttggggg

SEQ ID NO: 117786 - DNA, 20 bp, Artificial Sequence
  Description of Artificial Sequence: Synthetic oligonucleotide
  Target: LAMA2; (-) strand; PAM type: NRG; PAM sequence: GGG
tgaatttgcagaaatcttgg

SEQ ID NO: 117787 - DNA, 20 bp, Artificial Sequence
  Description of Artificial Sequence: Synthetic oligonucleotide
  Target: LAMA2; (-) strand; PAM type: NRG; PAM sequence: GGG
gtgaatttgcagaaatcttg

SEQ ID NO: 117788 - DNA, 20 bp, Artificial Sequence
  Description of Artificial Sequence: Synthetic oligonucleotide
  Target: LAMA2; (-) strand; PAM type: NRG; PAM sequence: GGG
tgtgaatttgcagaaatctt

SEQ ID NO: 117789 - DNA, 20 bp, Artificial Sequence
  Description of Artificial Sequence: Synthetic oligonucleotide
  Target: LAMA2; (-) strand; PAM type: NRG; PAM sequence: TGG
ctgtgaatttgcagaaatct

SEQ ID NO: 117790 - DNA, 20 bp, Artificial Sequence
  Description of Artificial Sequence: Synthetic oligonucleotide
  Target: LAMA2; (-) strand; PAM type: NRG; PAM sequence: CAG
gccagccatctgtgaatttg

SEQ ID NO: 117791 - DNA, 20 bp, Artificial Sequence
  Description of Artificial Sequence: Synthetic oligonucleotide
  Target: LAMA2; (-) strand; PAM type: NRG; PAM sequence: CAG
aaatttgactaagagaatgc

SEQ ID NO: 117792 - DNA, 20 bp, Artificial Sequence
  Description of Artificial Sequence: Synthetic oligonucleotide
  Target: LAMA2; (-) strand; PAM type: NRG; PAM sequence: GAG
ttgtcataaaatttgactaa

SEQ ID NO: 117793 - DNA, 20 bp, Artificial Sequence
  Description of Artificial Sequence: Synthetic oligonucleotide
  Target: LAMA2; (-) strand; PAM type: NRG; PAM sequence: AAG
acttgtcataaaatttgact

SEQ ID NO: 117794 - DNA, 20 bp, Artificial Sequence
  Description of Artificial Sequence: Synthetic oligonucleotide
  Target: LAMA2; (-) strand; PAM type: NRG; PAM sequence: AAG
tccattaagtgcaaaagctg

SEQ ID NO: 117795 - DNA, 20 bp, Artificial Sequence
  Description of Artificial Sequence: Synthetic oligonucleotide
  Target: LAMA2; (-) strand; PAM type: NRG; PAM sequence: AAG
agtcaatccattaagtgcaa

SEQ ID NO: 117796 - DNA, 20 bp, Artificial Sequence
  Description of Artificial Sequence: Synthetic oligonucleotide
  Target: LAMA2; (-) strand; PAM type: NRG; PAM sequence: AAG
ggatggcaagtcaatccatt

SEQ ID NO: 117797 - DNA, 20 bp, Artificial Sequence
  Description of Artificial Sequence: Synthetic oligonucleotide
  Target: LAMA2; (-) strand; PAM type: NRG; PAM sequence: AAG
aagagcccaggcaggatggc

SEQ ID NO: 117798 - DNA, 20 bp, Artificial Sequence
  Description of Artificial Sequence: Synthetic oligonucleotide
  Target: LAMA2; (-) strand; PAM type: NRG; PAM sequence: TGG
ttataagagcccaggcagga

SEQ ID NO: 117799 - DNA, 20 bp, Artificial Sequence
  Description of Artificial Sequence: Synthetic oligonucleotide
  Target: LAMA2; (-) strand; PAM type: NRG; PAM sequence: AGG
agaattataagagcccaggc

SEQ ID NO: 117800 - DNA, 20 bp, Artificial Sequence
  Description of Artificial Sequence: Synthetic oligonucleotide
  Target: LAMA2; (-) strand; PAM type: NRG; PAM sequence: CAG
cagaattataagagcccagg

SEQ ID NO: 117801 - DNA, 20 bp, Artificial Sequence
  Description of Artificial Sequence: Synthetic oligonucleotide
  Target: LAMA2; (-) strand; PAM type: NRG; PAM sequence: AGG
atccagaattataagagccc

SEQ ID NO: 117802 - DNA, 20 bp, Artificial Sequence
  Description of Artificial Sequence: Synthetic oligonucleotide
  Target: LAMA2; (-) strand; PAM type: NRG; PAM sequence: CAG
gatccagaattataagagcc

SEQ ID NO: 117803 - DNA, 20 bp, Artificial Sequence
  Description of Artificial Sequence: Synthetic oligonucleotide
  Target: LAMA2; (-) strand; PAM type: NRG; PAM sequence: GAG
tgtttgatccagaattataa

SEQ ID NO: 117804 - DNA, 20 bp, Artificial Sequence
  Description of Artificial Sequence: Synthetic oligonucleotide
  Target: LAMA2; (-) strand; PAM type: NRG; PAM sequence: AAG
tttgtttgatccagaattat

SEQ ID NO: 117805 - DNA, 20 bp, Artificial Sequence
  Description of Artificial Sequence: Synthetic oligonucleotide
  Target: LAMA2; (-) strand; PAM type: NRG; PAM sequence: CAG
ttttctggttttgtttgatc

SEQ ID NO: 117806 - DNA, 20 bp, Artificial Sequence
  Description of Artificial Sequence: Synthetic oligonucleotide
  Target: LAMA2; (-) strand; PAM type: NRG; PAM sequence: TGG
agaggaagtgagtaattttc

SEQ ID NO: 117807 - DNA, 20 bp, Artificial Sequence
  Description of Artificial Sequence: Synthetic oligonucleotide
  Target: LAMA2; (-) strand; PAM type: NRG; PAM sequence: GAG
acattagaaacagaggaagt

SEQ ID NO: 117808 - DNA, 20 bp, Artificial Sequence
  Description of Artificial Sequence: Synthetic oligonucleotide
  Target: LAMA2; (-) strand; PAM type: NRG; PAM sequence: AAG
agggacattagaaacagagg

SEQ ID NO: 117809 - DNA, 20 bp, Artificial Sequence
  Description of Artificial Sequence: Synthetic oligonucleotide
  Target: LAMA2; (-) strand; PAM type: NRG; PAM sequence: AGG
gcaagggacattagaaacag

SEQ ID NO: 117810 - DNA, 20 bp, Artificial Sequence
  Description of Artificial Sequence: Synthetic oligonucleotide
  Target: LAMA2; (-) strand; PAM type: NRG; PAM sequence: GAG
ggcaagggacattagaaaca

SEQ ID NO: 117811 - DNA, 20 bp, Artificial Sequence
  Description of Artificial Sequence: Synthetic oligonucleotide
  Target: LAMA2; (-) strand; PAM type: NRG; PAM sequence: CAG
atggcaagggacattagaaa

SEQ ID NO: 117812 - DNA, 20 bp, Artificial Sequence
  Description of Artificial Sequence: Synthetic oligonucleotide
  Target: LAMA2; (-) strand; PAM type: NRG; PAM sequence: TAG
caggggatggcaagggacat

SEQ ID NO: 117813 - DNA, 20 bp, Artificial Sequence
  Description of Artificial Sequence: Synthetic oligonucleotide
  Target: LAMA2; (-) strand; PAM type: NRG; PAM sequence: GGG
gtgtgttcaggggatggcaa

SEQ ID NO: 117814 - DNA, 20 bp, Artificial Sequence
  Description of Artificial Sequence: Synthetic oligonucleotide
  Target: LAMA2; (-) strand; PAM type: NRG; PAM sequence: AGG
tgtgtgttcaggggatggca

SEQ ID NO: 117815 - DNA, 20 bp, Artificial Sequence
  Description of Artificial Sequence: Synthetic oligonucleotide
  Target: LAMA2; (-) strand; PAM type: NRG; PAM sequence: AAG
ctgtgtgttcaggggatggc

SEQ ID NO: 117816 - DNA, 20 bp, Artificial Sequence
  Description of Artificial Sequence: Synthetic oligonucleotide
  Target: LAMA2; (-) strand; PAM type: NRG; PAM sequence: TGG
tacactgtgtgttcagggga

SEQ ID NO: 117817 - DNA, 20 bp, Artificial Sequence
  Description of Artificial Sequence: Synthetic oligonucleotide
  Target: LAMA2; (-) strand; PAM type: NRG; PAM sequence: GGG
gtattacactgtgtgttcag

SEQ ID NO: 117818 - DNA, 20 bp, Artificial Sequence
  Description of Artificial Sequence: Synthetic oligonucleotide
  Target: LAMA2; (-) strand; PAM type: NRG; PAM sequence: GGG
tgtattacactgtgtgttca

SEQ ID NO: 117819 - DNA, 20 bp, Artificial Sequence
  Description of Artificial Sequence: Synthetic oligonucleotide
  Target: LAMA2; (-) strand; PAM type: NRG; PAM sequence: AGG
ttgtattacactgtgtgttc

SEQ ID NO: 117820 - DNA, 20 bp, Artificial Sequence
  Description of Artificial Sequence: Synthetic oligonucleotide
  Target: LAMA2; (-) strand; PAM type: NRG; PAM sequence: CAG
attgtattacactgtgtgtt

SEQ ID NO: 117821 - DNA, 20 bp, Artificial Sequence
  Description of Artificial Sequence: Synthetic oligonucleotide
  Target: LAMA2; (-) strand; PAM type: NRG; PAM sequence: AAG
gtgatctcttctgaccaccc

SEQ ID NO: 117822 - DNA, 20 bp, Artificial Sequence
  Description of Artificial Sequence: Synthetic oligonucleotide
  Target: LAMA2; (-) strand; PAM type: NRG; PAM sequence: AAG
gaattgtatgttttccagtg

SEQ ID NO: 117823 - DNA, 20 bp, Artificial Sequence
  Description of Artificial Sequence: Synthetic oligonucleotide
  Target: LAMA2; (-) strand; PAM type: NRG; PAM sequence: CAG
aagatgaattgtatgttttc

SEQ ID NO: 117824 - DNA, 20 bp, Artificial Sequence
  Description of Artificial Sequence: Synthetic oligonucleotide
  Target: LAMA2; (-) strand; PAM type: NRG; PAM sequence: AAG
gaacaaagatgtcaaaggtt

SEQ ID NO: 117825 - DNA, 20 bp, Artificial Sequence
  Description of Artificial Sequence: Synthetic oligonucleotide
  Target: LAMA2; (-) strand; PAM type: NRG; PAM sequence: AGG
tttaagaacaaagatgtcaa

SEQ ID NO: 117826 - DNA, 20 bp, Artificial Sequence
  Description of Artificial Sequence: Synthetic oligonucleotide
  Target: LAMA2; (-) strand; PAM type: NRG; PAM sequence: AAG
ttttaagaacaaagatgtca

SEQ ID NO: 117827 - DNA, 20 bp, Artificial Sequence
  Description of Artificial Sequence: Synthetic oligonucleotide
  Target: LAMA2; (-) strand; PAM type: NRG; PAM sequence: AAG
ctggaaaacttttaagaaca

SEQ ID NO: 117828 - DNA, 20 bp, Artificial Sequence
  Description of Artificial Sequence: Synthetic oligonucleotide
  Target: LAMA2; (-) strand; PAM type: NRG; PAM sequence: AAG
tgggtcgctggaaaactttt

SEQ ID NO: 117829 - DNA, 20 bp, Artificial Sequence
  Description of Artificial Sequence: Synthetic oligonucleotide
  Target: LAMA2; (-) strand; PAM type: NRG; PAM sequence: TGG
agccccagtgattgggtcgc

SEQ ID NO: 117830 - DNA, 20 bp, Artificial Sequence
  Description of Artificial Sequence: Synthetic oligonucleotide
  Target: LAMA2; (-) strand; PAM type: NRG; PAM sequence: GGG
aaaaaaaagccccagtgatt

SEQ ID NO: 117831 - DNA, 20 bp, Artificial Sequence
  Description of Artificial Sequence: Synthetic oligonucleotide
  Target: LAMA2; (-) strand; PAM type: NRG; PAM sequence: TGG
caaaaaaaagccccagtgat

SEQ ID NO: 117832 - DNA, 20 bp, Artificial Sequence
  Description of Artificial Sequence: Synthetic oligonucleotide
  Target: LAMA2; (-) strand; PAM type: NRG; PAM sequence: CAG
aagaggccaaaaaaaagccc

SEQ ID NO: 117833 - DNA, 20 bp, Artificial Sequence
  Description of Artificial Sequence: Synthetic oligonucleotide
  Target: LAMA2; (-) strand; PAM type: NRG; PAM sequence: AAG
ggaatgaagaggccaaaaaa

SEQ ID NO: 117834 - DNA, 20 bp, Artificial Sequence
  Description of Artificial Sequence: Synthetic oligonucleotide
  Target: LAMA2; (-) strand; PAM type: NRG; PAM sequence: AGG
tgaggacagaaggaatgaag

SEQ ID NO: 117835 - DNA, 20 bp, Artificial Sequence
  Description of Artificial Sequence: Synthetic oligonucleotide
  Target: LAMA2; (-) strand; PAM type: NRG; PAM sequence: GAG
ctgaggacagaaggaatgaa

SEQ ID NO: 117836 - DNA, 20 bp, Artificial Sequence
  Description of Artificial Sequence: Synthetic oligonucleotide
  Target: LAMA2; (-) strand; PAM type: NRG; PAM sequence: AAG
ggctgaggacagaaggaatg

SEQ ID NO: 117837 - DNA, 20 bp, Artificial Sequence
  Description of Artificial Sequence: Synthetic oligonucleotide
  Target: LAMA2; (-) strand; PAM type: NRG; PAM sequence: AGG
gaagttcggctgaggacaga

SEQ ID NO: 117838 - DNA, 20 bp, Artificial Sequence
  Description of Artificial Sequence: Synthetic oligonucleotide
  Target: LAMA2; (-) strand; PAM type: NRG; PAM sequence: AAG
ggaagttcggctgaggacag

SEQ ID NO: 117839 - DNA, 20 bp, Artificial Sequence
  Description of Artificial Sequence: Synthetic oligonucleotide
  Target: LAMA2; (-) strand; PAM type: NRG; PAM sequence: CAG
tgaggaagttcggctgagga

SEQ ID NO: 117840 - DNA, 20 bp, Artificial Sequence
  Description of Artificial Sequence: Synthetic oligonucleotide
  Target: LAMA2; (-) strand; PAM type: NRG; PAM sequence: AGG
gacatgaggaagttcggctg

SEQ ID NO: 117841 - DNA, 20 bp, Artificial Sequence
  Description of Artificial Sequence: Synthetic oligonucleotide
  Target: LAMA2; (-) strand; PAM type: NRG; PAM sequence: GAG
tgacatgaggaagttcggct

SEQ ID NO: 117842 - DNA, 20 bp, Artificial Sequence
  Description of Artificial Sequence: Synthetic oligonucleotide
  Target: LAMA2; (-) strand; PAM type: NRG; PAM sequence: CGG
aggaatgacatgaggaagtt

SEQ ID NO: 117843 - DNA, 20 bp, Artificial Sequence
  Description of Artificial Sequence: Synthetic oligonucleotide
  Target: LAMA2; (-) strand; PAM type: NRG; PAM sequence: AAG
aagagaggaatgacatgagg

SEQ ID NO: 117844 - DNA, 20 bp, Artificial Sequence
  Description of Artificial Sequence: Synthetic oligonucleotide
  Target: LAMA2; (-) strand; PAM type: NRG; PAM sequence: AGG
gagaagagaggaatgacatg

SEQ ID NO: 117845 - DNA, 20 bp, Artificial Sequence
  Description of Artificial Sequence: Synthetic oligonucleotide
  Target: LAMA2; (-) strand; PAM type: NRG; PAM sequence: GAG
ggagaagagaggaatgacat

SEQ ID NO: 117846 - DNA, 20 bp, Artificial Sequence
  Description of Artificial Sequence: Synthetic oligonucleotide
  Target: LAMA2; (-) strand; PAM type: NRG; PAM sequence: AGG
gggagaagtaaggagaagag

SEQ ID NO: 117847 - DNA, 20 bp, Artificial Sequence
  Description of Artificial Sequence: Synthetic oligonucleotide
  Target: LAMA2; (-) strand; PAM type: NRG; PAM sequence: GAG
agggagaagtaaggagaaga

SEQ ID NO: 117848 - DNA, 20 bp, Artificial Sequence
  Description of Artificial Sequence: Synthetic oligonucleotide
  Target: LAMA2; (-) strand; PAM type: NRG; PAM sequence: GAG
aaagggagaagtaaggagaa

SEQ ID NO: 117849 - DNA, 20 bp, Artificial Sequence
  Description of Artificial Sequence: Synthetic oligonucleotide
  Target: LAMA2; (-) strand; PAM type: NRG; PAM sequence: AAG
agaaagggagaagtaaggag

SEQ ID NO: 117850 - DNA, 20 bp, Artificial Sequence
  Description of Artificial Sequence: Synthetic oligonucleotide
  Target: LAMA2; (-) strand; PAM type: NRG; PAM sequence: GAG
aacagaaagggagaagtaag

SEQ ID NO: 117851 - DNA, 20 bp, Artificial Sequence
  Description of Artificial Sequence: Synthetic oligonucleotide
  Target: LAMA2; (-) strand; PAM type: NRG; PAM sequence: AGG
aaaacagaaagggagaagta

SEQ ID NO: 117852 - DNA, 20 bp, Artificial Sequence
  Description of Artificial Sequence: Synthetic oligonucleotide
  Target: LAMA2; (-) strand; PAM type: NRG; PAM sequence: AAG
taaaacagaaagggagaagt

SEQ ID NO: 117853 - DNA, 20 bp, Artificial Sequence
  Description of Artificial Sequence: Synthetic oligonucleotide
  Target: LAMA2; (-) strand; PAM type: NRG; PAM sequence: AAG
aaaataaaacagaaagggag

SEQ ID NO: 117854 - DNA, 20 bp, Artificial Sequence
  Description of Artificial Sequence: Synthetic oligonucleotide
  Target: LAMA2; (-) strand; PAM type: NRG; PAM sequence: GAG
tgcaaaataaaacagaaagg

SEQ ID NO: 117855 - DNA, 20 bp, Artificial Sequence
  Description of Artificial Sequence: Synthetic oligonucleotide
  Target: LAMA2; (-) strand; PAM type: NRG; PAM sequence: GGG
tctgcaaaataaaacagaaa

SEQ ID NO: 117856 - DNA, 20 bp, Artificial Sequence
  Description of Artificial Sequence: Synthetic oligonucleotide
  Target: LAMA2; (-) strand; PAM type: NRG; PAM sequence: AGG
ctctgcaaaataaaacagaa

SEQ ID NO: 117857 - DNA, 20 bp, Artificial Sequence
  Description of Artificial Sequence: Synthetic oligonucleotide
  Target: LAMA2; (-) strand; PAM type: NRG; PAM sequence: AAG
gctctgcaaaataaaacaga

SEQ ID NO: 117858 - DNA, 20 bp, Artificial Sequence
  Description of Artificial Sequence: Synthetic oligonucleotide
  Target: LAMA2; (-) strand; PAM type: NRG; PAM sequence: CAG
aattgctctgcaaaataaaa

SEQ ID NO: 117859 - DNA, 20 bp, Artificial Sequence
  Description of Artificial Sequence: Synthetic oligonucleotide
  Target: LAMA2; (-) strand; PAM type: NRG; PAM sequence: AAG
aataaagtaaagggtagaag

SEQ ID NO: 117860 - DNA, 20 bp, Artificial Sequence
  Description of Artificial Sequence: Synthetic oligonucleotide
  Target: LAMA2; (-) strand; PAM type: NRG; PAM sequence: AAG
aaaaataaagtaaagggtag

SEQ ID NO: 117861 - DNA, 20 bp, Artificial Sequence
  Description of Artificial Sequence: Synthetic oligonucleotide
  Target: LAMA2; (-) strand; PAM type: NRG; PAM sequence: TAG
cgaaaaaataaagtaaaggg

SEQ ID NO: 117862 - DNA, 20 bp, Artificial Sequence
  Description of Artificial Sequence: Synthetic oligonucleotide
  Target: LAMA2; (-) strand; PAM type: NRG; PAM sequence: GGG
aaacgaaaaaataaagtaaa

SEQ ID NO: 117863 - DNA, 20 bp, Artificial Sequence
  Description of Artificial Sequence: Synthetic oligonucleotide
  Target: LAMA2; (-) strand; PAM type: NRG; PAM sequence: AGG
taaacgaaaaaataaagtaa

SEQ ID NO: 117864 - DNA, 20 bp, Artificial Sequence
  Description of Artificial Sequence: Synthetic oligonucleotide
  Target: LAMA2; (-) strand; PAM type: NRG; PAM sequence: AAG
ataaacgaaaaaataaagta

SEQ ID NO: 117865 - DNA, 20 bp, Artificial Sequence
  Description of Artificial Sequence: Synthetic oligonucleotide
  Target: LAMA2; (-) strand; PAM type: NRG; PAM sequence: AAG
tggaaataaacgaaaaaata

SEQ ID NO: 117866 - DNA, 20 bp, Artificial Sequence
  Description of Artificial Sequence: Synthetic oligonucleotide
  Target: LAMA2; (-) strand; PAM type: NRG; PAM sequence: TGG
caacatagtgacaccccttc

SEQ ID NO: 117867 - DNA, 20 bp, Artificial Sequence
  Description of Artificial Sequence: Synthetic oligonucleotide
  Target: LAMA2; (-) strand; PAM type: NRG; PAM sequence: TAG
ccagttgcgcctgggcaaca

SEQ ID NO: 117868 - DNA, 20 bp, Artificial Sequence
  Description of Artificial Sequence: Synthetic oligonucleotide
  Target: LAMA2; (-) strand; PAM type: NRG; PAM sequence: GGG
aaagctagccagttgcgcct

SEQ ID NO: 117869 - DNA, 20 bp, Artificial Sequence
  Description of Artificial Sequence: Synthetic oligonucleotide
  Target: LAMA2; (-) strand; PAM type: NRG; PAM sequence: TGG
aaaagctagccagttgcgcc

SEQ ID NO: 117870 - DNA, 20 bp, Artificial Sequence
  Description of Artificial Sequence: Synthetic oligonucleotide
  Target: LAMA2; (-) strand; PAM type: NRG; PAM sequence: CAG
ttttatgaataaaagctagc

SEQ ID NO: 117871 - DNA, 20 bp, Artificial Sequence
  Description of Artificial Sequence: Synthetic oligonucleotide
  Target: LAMA2; (-) strand; PAM type: NRG; PAM sequence: TAG
cagattttatgaataaaagc

SEQ ID NO: 117872 - DNA, 20 bp, Artificial Sequence
  Description of Artificial Sequence: Synthetic oligonucleotide
  Target: LAMA2; (-) strand; PAM type: NRG; PAM sequence: AAG
atagcagattttatgaataa

SEQ ID NO: 117873 - DNA, 20 bp, Artificial Sequence
  Description of Artificial Sequence: Synthetic oligonucleotide
  Target: LAMA2; (-) strand; PAM type: NRG; PAM sequence: CAG
tggcaaaggtgggtttatag

SEQ ID NO: 117874 - DNA, 20 bp, Artificial Sequence
  Description of Artificial Sequence: Synthetic oligonucleotide
  Target: LAMA2; (-) strand; PAM type: NRG; PAM sequence: TAG
gattggcaaaggtgggttta

SEQ ID NO: 117875 - DNA, 20 bp, Artificial Sequence
  Description of Artificial Sequence: Synthetic oligonucleotide
  Target: LAMA2; (-) strand; PAM type: NRG; PAM sequence: GGG
gggtttggattggcaaaggt

SEQ ID NO: 117876 - DNA, 20 bp, Artificial Sequence
  Description of Artificial Sequence: Synthetic oligonucleotide
  Target: LAMA2; (-) strand; PAM type: NRG; PAM sequence: TGG
tgggtttggattggcaaagg

SEQ ID NO: 117877 - DNA, 20 bp, Artificial Sequence
  Description of Artificial Sequence: Synthetic oligonucleotide
  Target: LAMA2; (-) strand; PAM type: NRG; PAM sequence: AGG
tgatgggtttggattggcaa

SEQ ID NO: 117878 - DNA, 20 bp, Artificial Sequence
  Description of Artificial Sequence: Synthetic oligonucleotide
  Target: LAMA2; (-) strand; PAM type: NRG; PAM sequence: AAG
ttgatgggtttggattggca

SEQ ID NO: 117879 - DNA, 20 bp, Artificial Sequence
  Description of Artificial Sequence: Synthetic oligonucleotide
  Target: LAMA2; (-) strand; PAM type: NRG; PAM sequence: TGG
gaaccttgatgggtttggat

SEQ ID NO: 117880 - DNA, 20 bp, Artificial Sequence
  Description of Artificial Sequence: Synthetic oligonucleotide
  Target: LAMA2; (-) strand; PAM type: NRG; PAM sequence: TGG
actgagaaccttgatgggtt

SEQ ID NO: 117881 - DNA, 20 bp, Artificial Sequence
  Description of Artificial Sequence: Synthetic oligonucleotide
  Target: LAMA2; (-) strand; PAM type: NRG; PAM sequence: GGG
gttctactgagaaccttgat

SEQ ID NO: 117882 - DNA, 20 bp, Artificial Sequence
  Description of Artificial Sequence: Synthetic oligonucleotide
  Target: LAMA2; (-) strand; PAM type: NRG; PAM sequence: TGG
tgttctactgagaaccttga

SEQ ID NO: 117883 - DNA, 20 bp, Artificial Sequence
  Description of Artificial Sequence: Synthetic oligonucleotide
  Target: LAMA2; (-) strand; PAM type: NRG; PAM sequence: GAG
tgaaagacttttgttctact

SEQ ID NO: 117884 - DNA, 20 bp, Artificial Sequence
  Description of Artificial Sequence: Synthetic oligonucleotide
  Target: LAMA2; (-) strand; PAM type: NRG; PAM sequence: AAG
ggatggtagctgttacatga

SEQ ID NO: 117885 - DNA, 20 bp, Artificial Sequence
  Description of Artificial Sequence: Synthetic oligonucleotide
  Target: LAMA2; (-) strand; PAM type: NRG; PAM sequence: TAG
ctgtctgcaatgaaggatgg

SEQ ID NO: 117886 - DNA, 20 bp, Artificial Sequence
  Description of Artificial Sequence: Synthetic oligonucleotide
  Target: LAMA2; (-) strand; PAM type: NRG; PAM sequence: TGG
cggctgtctgcaatgaagga

SEQ ID NO: 117887 - DNA, 20 bp, Artificial Sequence
  Description of Artificial Sequence: Synthetic oligonucleotide
  Target: LAMA2; (-) strand; PAM type: NRG; PAM sequence: AGG
gccacggctgtctgcaatga

SEQ ID NO: 117888 - DNA, 20 bp, Artificial Sequence
  Description of Artificial Sequence: Synthetic oligonucleotide
  Target: LAMA2; (-) strand; PAM type: NRG; PAM sequence: AAG
agccacggctgtctgcaatg

SEQ ID NO: 117889 - DNA, 20 bp, Artificial Sequence
  Description of Artificial Sequence: Synthetic oligonucleotide
  Target: LAMA2; (-) strand; PAM type: NRG; PAM sequence: CGG
ataaatgctatgtgtagcca

SEQ ID NO: 117890 - DNA, 20 bp, Artificial Sequence
  Description of Artificial Sequence: Synthetic oligonucleotide
  Target: LAMA2; (-) strand; PAM type: NRG; PAM sequence: TAG
caagaaataaatgctatgtg

SEQ ID NO: 117891 - DNA, 20 bp, Artificial Sequence
  Description of Artificial Sequence: Synthetic oligonucleotide
  Target: LAMA2; (-) strand; PAM type: NRG; PAM sequence: AAG
aagtcttctatttattaggc

SEQ ID NO: 117892 - DNA, 20 bp, Artificial Sequence
  Description of Artificial Sequence: Synthetic oligonucleotide
  Target: LAMA2; (-) strand; PAM type: NRG; PAM sequence: AGG
ctccaagtcttctatttatt

SEQ ID NO: 117893 - DNA, 20 bp, Artificial Sequence
  Description of Artificial Sequence: Synthetic oligonucleotide
  Target: LAMA2; (-) strand; PAM type: NRG; PAM sequence: TAG
tctccaagtcttctatttat

SEQ ID NO: 117894 - DNA, 20 bp, Artificial Sequence
  Description of Artificial Sequence: Synthetic oligonucleotide
  Target: LAMA2; (-) strand; PAM type: NRG; PAM sequence: AAG
tactcaggggaattttctcc

SEQ ID NO: 117895 - DNA, 20 bp, Artificial Sequence
  Description of Artificial Sequence: Synthetic oligonucleotide
  Target: LAMA2; (-) strand; PAM type: NRG; PAM sequence: GGG
agtatcagagaaatactcag

SEQ ID NO: 117896 - DNA, 20 bp, Artificial Sequence
  Description of Artificial Sequence: Synthetic oligonucleotide
  Target: LAMA2; (-) strand; PAM type: NRG; PAM sequence: GGG
gagtatcagagaaatactca

SEQ ID NO: 117897 - DNA, 20 bp, Artificial Sequence
  Description of Artificial Sequence: Synthetic oligonucleotide
  Target: LAMA2; (-) strand; PAM type: NRG; PAM sequence: AGG
tgagtatcagagaaatactc

SEQ ID NO: 117898 - DNA, 20 bp, Artificial Sequence
  Description of Artificial Sequence: Synthetic oligonucleotide
  Target: LAMA2; (-) strand; PAM type: NRG; PAM sequence: CAG
ctgagtatcagagaaatact

SEQ ID NO: 117899 - DNA, 20 bp, Artificial Sequence
  Description of Artificial Sequence: Synthetic oligonucleotide
  Target: LAMA2; (-) strand; PAM type: NRG; PAM sequence: GAG
accaactgaactgagtatca

SEQ ID NO: 117900 - DNA, 20 bp, Artificial Sequence
  Description of Artificial Sequence: Synthetic oligonucleotide
  Target: LAMA2; (-) strand; PAM type: NRG; PAM sequence: CAG
acaccaactgaactgagtat

SEQ ID NO: 117901 - DNA, 20 bp, Artificial Sequence
  Description of Artificial Sequence: Synthetic oligonucleotide
  Target: LAMA2; (-) strand; PAM type: NRG; PAM sequence: GAG
tagaccacaccaactgaact

SEQ ID NO: 117902 - DNA, 20 bp, Artificial Sequence
  Description of Artificial Sequence: Synthetic oligonucleotide
  Target: LAMA2; (-) strand; PAM type: NRG; PAM sequence: TAG
gtgatatgttaagatctgtc

SEQ ID NO: 117903 - DNA, 20 bp, Artificial Sequence
  Description of Artificial Sequence: Synthetic oligonucleotide
  Target: LAMA2; (-) strand; PAM type: NRG; PAM sequence: AAG
taggaacaaagtgatatgtt

SEQ ID NO: 117904 - DNA, 20 bp, Artificial Sequence
  Description of Artificial Sequence: Synthetic oligonucleotide
  Target: LAMA2; (-) strand; PAM type: NRG; PAM sequence: AAG
agatacatcacttaggaaca

SEQ ID NO: 117905 - DNA, 20 bp, Artificial Sequence
  Description of Artificial Sequence: Synthetic oligonucleotide
  Target: LAMA2; (-) strand; PAM type: NRG; PAM sequence: AGG
ttaagatagatacatcactt

SEQ ID NO: 117906 - DNA, 20 bp, Artificial Sequence
  Description of Artificial Sequence: Synthetic oligonucleotide
  Target: LAMA2; (-) strand; PAM type: NRG; PAM sequence: TAG
tttaagatagatacatcact

SEQ ID NO: 117907 - DNA, 20 bp, Artificial Sequence
  Description of Artificial Sequence: Synthetic oligonucleotide
  Target: LAMA2; (-) strand; PAM type: NRG; PAM sequence: TAG
ctttgagcaagtatttaaga

SEQ ID NO: 117908 - DNA, 20 bp, Artificial Sequence
  Description of Artificial Sequence: Synthetic oligonucleotide
  Target: LAMA2; (-) strand; PAM type: NRG; PAM sequence: AAG
taatctttgagcaagtattt

SEQ ID NO: 117909 - DNA, 20 bp, Artificial Sequence
  Description of Artificial Sequence: Synthetic oligonucleotide
  Target: LAMA2; (-) strand; PAM type: NRG; PAM sequence: AAG
tttttttttaatctttgagc

SEQ ID NO: 117910 - DNA, 20 bp, Artificial Sequence
  Description of Artificial Sequence: Synthetic oligonucleotide
  Target: LAMA2; (-) strand; PAM type: NRG; PAM sequence: GAG
tgattttttttttaatcttt

SEQ ID NO: 117911 - DNA, 20 bp, Artificial Sequence
  Description of Artificial Sequence: Synthetic oligonucleotide
  Target: LAMA2; (-) strand; PAM type: NRG; PAM sequence: CAG
atagacttatcttgttcatc

SEQ ID NO: 117912 - DNA, 20 bp, Artificial Sequence
  Description of Artificial Sequence: Synthetic oligonucleotide
  Target: LAMA2; (-) strand; PAM type: NRG; PAM sequence: TAG
ggaagcttctgggacataaa

SEQ ID NO: 117913 - DNA, 20 bp, Artificial Sequence
  Description of Artificial Sequence: Synthetic oligonucleotide
  Target: LAMA2; (-) strand; PAM type: NRG; PAM sequence: GGG
aatgttgatgggaagcttct

SEQ ID NO: 117914 - DNA, 20 bp, Artificial Sequence
  Description of Artificial Sequence: Synthetic oligonucleotide
  Target: LAMA2; (-) strand; PAM type: NRG; PAM sequence: TGG
caatgttgatgggaagcttc

SEQ ID NO: 117915 - DNA, 20 bp, Artificial Sequence
  Description of Artificial Sequence: Synthetic oligonucleotide
  Target: LAMA2; (-) strand; PAM type: NRG; PAM sequence: AAG
gtaagtacaatgttgatggg

SEQ ID NO: 117916 - DNA, 20 bp, Artificial Sequence
  Description of Artificial Sequence: Synthetic oligonucleotide
  Target: LAMA2; (-) strand; PAM type: NRG; PAM sequence: GGG
actgtaagtacaatgttgat

SEQ ID NO: 117917 - DNA, 20 bp, Artificial Sequence
  Description of Artificial Sequence: Synthetic oligonucleotide
  Target: LAMA2; (-) strand; PAM type: NRG; PAM sequence: TGG
aactgtaagtacaatgttga

SEQ ID NO: 117918 - DNA, 20 bp, Artificial Sequence
  Description of Artificial Sequence: Synthetic oligonucleotide
  Target: LAMA2; (-) strand; PAM type: NRG; PAM sequence: AAG
ttaataaagagagaaactgt

SEQ ID NO: 117919 - DNA, 20 bp, Artificial Sequence
  Description of Artificial Sequence: Synthetic oligonucleotide
  Target: LAMA2; (-) strand; PAM type: NRG; PAM sequence: GAG
acacattttattaataaaga

SEQ ID NO: 117920 - DNA, 20 bp, Artificial Sequence
  Description of Artificial Sequence: Synthetic oligonucleotide
  Target: LAMA2; (-) strand; PAM type: NRG; PAM sequence: GAG
ccacacattttattaataaa

SEQ ID NO: 117921 - DNA, 20 bp, Artificial Sequence
  Description of Artificial Sequence: Synthetic oligonucleotide
  Target: LAMA2; (-) strand; PAM type: NRG; PAM sequence: AAG
tgccacacattttattaata

SEQ ID NO: 117922 - DNA, 20 bp, Artificial Sequence
  Description of Artificial Sequence: Synthetic oligonucleotide
  Target: LAMA2; (-) strand; PAM type: NRG; PAM sequence: AAG
aatcatctgaaaggtttcaa

SEQ ID NO: 117923 - DNA, 20 bp, Artificial Sequence
  Description of Artificial Sequence: Synthetic oligonucleotide
  Target: LAMA2; (-) strand; PAM type: NRG; PAM sequence: AGG
tggtgccacaatcatctgaa

SEQ ID NO: 117924 - DNA, 20 bp, Artificial Sequence
  Description of Artificial Sequence: Synthetic oligonucleotide
  Target: LAMA2; (-) strand; PAM type: NRG; PAM sequence: AAG
atggtgccacaatcatctga

SEQ ID NO: 117925 - DNA, 20 bp, Artificial Sequence
  Description of Artificial Sequence: Synthetic oligonucleotide
  Target: LAMA2; (-) strand; PAM type: NRG; PAM sequence: TGG
ttttagtggggcacactaaa

SEQ ID NO: 117926 - DNA, 20 bp, Artificial Sequence
  Description of Artificial Sequence: Synthetic oligonucleotide
  Target: LAMA2; (-) strand; PAM type: NRG; PAM sequence: GGG
ttttcagtaaagttttagtg

SEQ ID NO: 117927 - DNA, 20 bp, Artificial Sequence
  Description of Artificial Sequence: Synthetic oligonucleotide
  Target: LAMA2; (-) strand; PAM type: NRG; PAM sequence: GGG
tttttcagtaaagttttagt

SEQ ID NO: 117928 - DNA, 20 bp, Artificial Sequence
  Description of Artificial Sequence: Synthetic oligonucleotide
  Target: LAMA2; (-) strand; PAM type: NRG; PAM sequence: TGG
atttttcagtaaagttttag

SEQ ID NO: 117929 - DNA, 20 bp, Artificial Sequence
  Description of Artificial Sequence: Synthetic oligonucleotide
  Target: LAMA2; (-) strand; PAM type: NRG; PAM sequence: TAG
gttatttttcagtaaagttt

SEQ ID NO: 117930 - DNA, 20 bp, Artificial Sequence
  Description of Artificial Sequence: Synthetic oligonucleotide
  Target: LAMA2; (-) strand; PAM type: NRG; PAM sequence: AAG
atttcagttatttttcagta

SEQ ID NO: 117931 - DNA, 20 bp, Artificial Sequence
  Description of Artificial Sequence: Synthetic oligonucleotide
  Target: LAMA2; (-) strand; PAM type: NRG; PAM sequence: CAG
aaaacatttcagttattttt

SEQ ID NO: 117932 - DNA, 20 bp, Artificial Sequence
  Description of Artificial Sequence: Synthetic oligonucleotide
  Target: LAMA2; (-) strand; PAM type: NRG; PAM sequence: CAG
ttgggtaaagaaaaacattt

SEQ ID NO: 117933 - DNA, 20 bp, Artificial Sequence
  Description of Artificial Sequence: Synthetic oligonucleotide
  Target: LAMA2; (-) strand; PAM type: NRG; PAM sequence: AAG
agaagtctctctgttgggta

SEQ ID NO: 117934 - DNA, 20 bp, Artificial Sequence
  Description of Artificial Sequence: Synthetic oligonucleotide
  Target: LAMA2; (-) strand; PAM type: NRG; PAM sequence: GGG
atcttagaagtctctctgtt

SEQ ID NO: 117935 - DNA, 20 bp, Artificial Sequence
  Description of Artificial Sequence: Synthetic oligonucleotide
  Target: LAMA2; (-) strand; PAM type: NRG; PAM sequence: TGG
tatcttagaagtctctctgt

SEQ ID NO: 117936 - DNA, 20 bp, Artificial Sequence
  Description of Artificial Sequence: Synthetic oligonucleotide
  Target: LAMA2; (-) strand; PAM type: NRG; PAM sequence: AAG
gtcaggtattattatcttag

SEQ ID NO: 117937 - DNA, 20 bp, Artificial Sequence
  Description of Artificial Sequence: Synthetic oligonucleotide
  Target: LAMA2; (-) strand; PAM type: NRG; PAM sequence: TAG
actgtcaggtattattatct

SEQ ID NO: 117938 - DNA, 20 bp, Artificial Sequence
  Description of Artificial Sequence: Synthetic oligonucleotide
  Target: LAMA2; (-) strand; PAM type: NRG; PAM sequence: AGG
acttaaagaatctcactgtc

SEQ ID NO: 117939 - DNA, 20 bp, Artificial Sequence
  Description of Artificial Sequence: Synthetic oligonucleotide
  Target: LAMA2; (-) strand; PAM type: NRG; PAM sequence: CAG
gacttaaagaatctcactgt

SEQ ID NO: 117940 - DNA, 20 bp, Artificial Sequence
  Description of Artificial Sequence: Synthetic oligonucleotide
  Target: LAMA2; (-) strand; PAM type: NRG; PAM sequence: AAG
tacacactgagattgactta

SEQ ID NO: 117941 - DNA, 20 bp, Artificial Sequence
  Description of Artificial Sequence: Synthetic oligonucleotide
  Target: LAMA2; (-) strand; PAM type: NRG; PAM sequence: GAG
tgaataaatggatacacact

SEQ ID NO: 117942 - DNA, 20 bp, Artificial Sequence
  Description of Artificial Sequence: Synthetic oligonucleotide
  Target: LAMA2; (-) strand; PAM type: NRG; PAM sequence: TGG
ctatgtattatttgaataaa

SEQ ID NO: 117943 - DNA, 20 bp, Artificial Sequence
  Description of Artificial Sequence: Synthetic oligonucleotide
  Target: LAMA2; (-) strand; PAM type: NRG; PAM sequence: GGG
aagtatctggcacaacatga

SEQ ID NO: 117944 - DNA, 20 bp, Artificial Sequence
  Description of Artificial Sequence: Synthetic oligonucleotide
  Target: LAMA2; (-) strand; PAM type: NRG; PAM sequence: AGG
aaagtatctggcacaacatg

SEQ ID NO: 117945 - DNA, 20 bp, Artificial Sequence
  Description of Artificial Sequence: Synthetic oligonucleotide
  Target: LAMA2; (-) strand; PAM type: NRG; PAM sequence: GAG
caaagtatctggcacaacat

SEQ ID NO: 117946 - DNA, 20 bp, Artificial Sequence
  Description of Artificial Sequence: Synthetic oligonucleotide
  Target: LAMA2; (-) strand; PAM type: NRG; PAM sequence: TGG
cctgtgcttaccaaagtatc

SEQ ID NO: 117947 - DNA, 20 bp, Artificial Sequence
  Description of Artificial Sequence: Synthetic oligonucleotide
  Target: LAMA2; (-) strand; PAM type: NRG; PAM sequence: AAG
ttttatccctgtgcttacca

SEQ ID NO: 117948 - DNA, 20 bp, Artificial Sequence
  Description of Artificial Sequence: Synthetic oligonucleotide
  Target: LAMA2; (-) strand; PAM type: NRG; PAM sequence: GGG
tgtatgtgctatgagatcag

SEQ ID NO: 117949 - DNA, 20 bp, Artificial Sequence
  Description of Artificial Sequence: Synthetic oligonucleotide
  Target: LAMA2; (-) strand; PAM type: NRG; PAM sequence: GGG
atgtatgtgctatgagatca

SEQ ID NO: 117950 - DNA, 20 bp, Artificial Sequence
  Description of Artificial Sequence: Synthetic oligonucleotide
  Target: LAMA2; (-) strand; PAM type: NRG; PAM sequence: AGG
aatgtatgtgctatgagatc

SEQ ID NO: 117951 - DNA, 20 bp, Artificial Sequence
  Description of Artificial Sequence: Synthetic oligonucleotide
  Target: LAMA2; (-) strand; PAM type: NRG; PAM sequence: CAG
gaatgtatgtgctatgagat

SEQ ID NO: 117952 - DNA, 20 bp, Artificial Sequence
  Description of Artificial Sequence: Synthetic oligonucleotide
  Target: LAMA2; (-) strand; PAM type: NRG; PAM sequence: GAG
ttttagaatgtatgtgctat

SEQ ID NO: 117953 - DNA, 20 bp, Artificial Sequence
  Description of Artificial Sequence: Synthetic oligonucleotide
  Target: LAMA2; (-) strand; PAM type: NRG; PAM sequence: TAG
ttctgggctaccttcccttt

SEQ ID NO: 117954 - DNA, 20 bp, Artificial Sequence
  Description of Artificial Sequence: Synthetic oligonucleotide
  Target: LAMA2; (-) strand; PAM type: NRG; PAM sequence: GGG
ttagttattgcttattttct

SEQ ID NO: 117955 - DNA, 20 bp, Artificial Sequence
  Description of Artificial Sequence: Synthetic oligonucleotide
  Target: LAMA2; (-) strand; PAM type: NRG; PAM sequence: TGG
gttagttattgcttattttc

SEQ ID NO: 117956 - DNA, 20 bp, Artificial Sequence
  Description of Artificial Sequence: Synthetic oligonucleotide
  Target: LAMA2; (-) strand; PAM type: NRG; PAM sequence: TAG
catgtaacacactccatagt

SEQ ID NO: 117957 - DNA, 20 bp, Artificial Sequence
  Description of Artificial Sequence: Synthetic oligonucleotide
  Target: LAMA2; (-) strand; PAM type: NRG; PAM sequence: TAG
gcatcatgtaacacactcca

SEQ ID NO: 117958 - DNA, 20 bp, Artificial Sequence
  Description of Artificial Sequence: Synthetic oligonucleotide
  Target: LAMA2; (-) strand; PAM type: NRG; PAM sequence: TGG
tataagtttcagatcctgcc

SEQ ID NO: 117959 - DNA, 20 bp, Artificial Sequence
  Description of Artificial Sequence: Synthetic oligonucleotide
  Target: LAMA2; (-) strand; PAM type: NRG; PAM sequence: CAG
ctaatgagggctataagttt

SEQ ID NO: 117960 - DNA, 20 bp, Artificial Sequence
  Description of Artificial Sequence: Synthetic oligonucleotide
  Target: LAMA2; (-) strand; PAM type: NRG; PAM sequence: AAG
ctaattctaatgagggctat

SEQ ID NO: 117961 - DNA, 20 bp, Artificial Sequence
  Description of Artificial Sequence: Synthetic oligonucleotide
  Target: LAMA2; (-) strand; PAM type: NRG; PAM sequence: GGG
atgctagctaattctaatga

SEQ ID NO: 117962 - DNA, 20 bp, Artificial Sequence
  Description of Artificial Sequence: Synthetic oligonucleotide
  Target: LAMA2; (-) strand; PAM type: NRG; PAM sequence: AGG
aatgctagctaattctaatg

SEQ ID NO: 117963 - DNA, 20 bp, Artificial Sequence
  Description of Artificial Sequence: Synthetic oligonucleotide
  Target: LAMA2; (-) strand; PAM type: NRG; PAM sequence: GAG
aaatgctagctaattctaat

SEQ ID NO: 117964 - DNA, 20 bp, Artificial Sequence
  Description of Artificial Sequence: Synthetic oligonucleotide
  Target: LAMA2; (-) strand; PAM type: NRG; PAM sequence: TAG
ttatatttcaattcaaatgc

SEQ ID NO: 117965 - DNA, 20 bp, Artificial Sequence
  Description of Artificial Sequence: Synthetic oligonucleotide
  Target: LAMA2; (-) strand; PAM type: NRG; PAM sequence: GGG
atattttggattagaggatg

SEQ ID NO: 117966 - DNA, 20 bp, Artificial Sequence
  Description of Artificial Sequence: Synthetic oligonucleotide
  Target: LAMA2; (-) strand; PAM type: NRG; PAM sequence: GGG
aatattttggattagaggat

SEQ ID NO: 117967 - DNA, 20 bp, Artificial Sequence
  Description of Artificial Sequence: Synthetic oligonucleotide
  Target: LAMA2; (-) strand; PAM type: NRG; PAM sequence: TGG
aaatattttggattagagga

SEQ ID NO: 117968 - DNA, 20 bp, Artificial Sequence
  Description of Artificial Sequence: Synthetic oligonucleotide
  Target: LAMA2; (-) strand; PAM type: NRG; PAM sequence: AGG
tttaaaatattttggattag

SEQ ID NO: 117969 - DNA, 20 bp, Artificial Sequence
  Description of Artificial Sequence: Synthetic oligonucleotide
  Target: LAMA2; (-) strand; PAM type: NRG; PAM sequence: GAG
ttttaaaatattttggatta

SEQ ID NO: 117970 - DNA, 20 bp, Artificial Sequence
  Description of Artificial Sequence: Synthetic oligonucleotide
  Target: LAMA2; (-) strand; PAM type: NRG; PAM sequence: TAG
gattttaaaatattttggat

SEQ ID NO: 117971 - DNA, 20 bp, Artificial Sequence
  Description of Artificial Sequence: Synthetic oligonucleotide
  Target: LAMA2; (-) strand; PAM type: NRG; PAM sequence: TGG
atgaagattttaaaatattt

SEQ ID NO: 117972 - DNA, 20 bp, Artificial Sequence
  Description of Artificial Sequence: Synthetic oligonucleotide
  Target: LAMA2; (-) strand; PAM type: NRG; PAM sequence: AAG
aatccaccaactgtaaaatg

SEQ ID NO: 117973 - DNA, 20 bp, Artificial Sequence
  Description of Artificial Sequence: Synthetic oligonucleotide
  Target: LAMA2; (-) strand; PAM type: NRG; PAM sequence: AGG
ggaattcaaattctacaaga

SEQ ID NO: 117974 - DNA, 20 bp, Artificial Sequence
  Description of Artificial Sequence: Synthetic oligonucleotide
  Target: LAMA2; (-) strand; PAM type: NRG; PAM sequence: AAG
cggaattcaaattctacaag

SEQ ID NO: 117975 - DNA, 20 bp, Artificial Sequence
  Description of Artificial Sequence: Synthetic oligonucleotide
  Target: LAMA2; (-) strand; PAM type: NRG; PAM sequence: AAG
gtgcggaattcaaattctac

SEQ ID NO: 117976 - DNA, 20 bp, Artificial Sequence
  Description of Artificial Sequence: Synthetic oligonucleotide
  Target: LAMA2; (-) strand; PAM type: NRG; PAM sequence: CGG
ctccagtcgttgtagttgtg

SEQ ID NO: 117977 - DNA, 20 bp, Artificial Sequence
  Description of Artificial Sequence: Synthetic oligonucleotide
  Target: LAMA2; (-) strand; PAM type: NRG; PAM sequence: TAG
cagaagaactccagtcgttg

SEQ ID NO: 117978 - DNA, 20 bp, Artificial Sequence
  Description of Artificial Sequence: Synthetic oligonucleotide
  Target: LAMA2; (-) strand; PAM type: NRG; PAM sequence: CAG
actgatccccagaagaactc

SEQ ID NO: 117979 - DNA, 20 bp, Artificial Sequence
  Description of Artificial Sequence: Synthetic oligonucleotide
  Target: LAMA2; (-) strand; PAM type: NRG; PAM sequence: AAG
ttttgactactgatccccag

SEQ ID NO: 117980 - DNA, 20 bp, Artificial Sequence
  Description of Artificial Sequence: Synthetic oligonucleotide
  Target: LAMA2; (-) strand; PAM type: NRG; PAM sequence: CAG
attttttgactactgatccc

SEQ ID NO: 117981 - DNA, 20 bp, Artificial Sequence
  Description of Artificial Sequence: Synthetic oligonucleotide
  Target: LAMA2; (-) strand; PAM type: NRG; PAM sequence: CAG
caacaatatcatgaagaaat

SEQ ID NO: 117982 - DNA, 20 bp, Artificial Sequence
  Description of Artificial Sequence: Synthetic oligonucleotide
  Target: LAMA2; (-) strand; PAM type: NRG; PAM sequence: AAG
tacacatcaacaatatcatg

SEQ ID NO: 117983 - DNA, 20 bp, Artificial Sequence
  Description of Artificial Sequence: Synthetic oligonucleotide
  Target: LAMA2; (-) strand; PAM type: NRG; PAM sequence: TGG
atattcgagtttcccacaca

SEQ ID NO: 117984 - DNA, 20 bp, Artificial Sequence
  Description of Artificial Sequence: Synthetic oligonucleotide
  Target: LAMA2; (-) strand; PAM type: NRG; PAM sequence: GAG
agccgggcttcaaaatattc

SEQ ID NO: 117985 - DNA, 20 bp, Artificial Sequence
  Description of Artificial Sequence: Synthetic oligonucleotide
  Target: LAMA2; (-) strand; PAM type: NRG; PAM sequence: GGG
tcccaacaaagaatacagcc

SEQ ID NO: 117986 - DNA, 20 bp, Artificial Sequence
  Description of Artificial Sequence: Synthetic oligonucleotide
  Target: LAMA2; (-) strand; PAM type: NRG; PAM sequence: CGG
ctcccaacaaagaatacagc

SEQ ID NO: 117987 - DNA, 20 bp, Artificial Sequence
  Description of Artificial Sequence: Synthetic oligonucleotide
  Target: LAMA2; (-) strand; PAM type: NRG; PAM sequence: CAG
ctttctcccaacaaagaata

SEQ ID NO: 117988 - DNA, 20 bp, Artificial Sequence
  Description of Artificial Sequence: Synthetic oligonucleotide
  Target: LAMA2; (-) strand; PAM type: NRG; PAM sequence: AAG
aatttagctttctcccaaca

SEQ ID NO: 117989 - DNA, 20 bp, Artificial Sequence
  Description of Artificial Sequence: Synthetic oligonucleotide
  Target: LAMA2; (-) strand; PAM type: NRG; PAM sequence: TAG
aaggatgaaaacatacaatt

SEQ ID NO: 117990 - DNA, 20 bp, Artificial Sequence
  Description of Artificial Sequence: Synthetic oligonucleotide
  Target: LAMA2; (-) strand; PAM type: NRG; PAM sequence: AGG
acaaattgaagtaatccaga

SEQ ID NO: 117991 - DNA, 20 bp, Artificial Sequence
  Description of Artificial Sequence: Synthetic oligonucleotide
  Target: LAMA2; (-) strand; PAM type: NRG; PAM sequence: AAG
cacaaattgaagtaatccag

SEQ ID NO: 117992 - DNA, 20 bp, Artificial Sequence
  Description of Artificial Sequence: Synthetic oligonucleotide
  Target: LAMA2; (-) strand; PAM type: NRG; PAM sequence: CAG
atacacaaattgaagtaatc

SEQ ID NO: 117993 - DNA, 20 bp, Artificial Sequence
  Description of Artificial Sequence: Synthetic oligonucleotide
  Target: LAMA2; (-) strand; PAM type: NRG; PAM sequence: AAG
ctgaaaacatacacaaattg

SEQ ID NO: 117994 - DNA, 20 bp, Artificial Sequence
  Description of Artificial Sequence: Synthetic oligonucleotide
  Target: LAMA2; (-) strand; PAM type: NRG; PAM sequence: TGG
aatgcatttaaaatttatac

SEQ ID NO: 117995 - DNA, 20 bp, Artificial Sequence
  Description of Artificial Sequence: Synthetic oligonucleotide
  Target: LAMA2; (-) strand; PAM type: NRG; PAM sequence: TGG
tcattattagtcaacacgat

SEQ ID NO: 117996 - DNA, 20 bp, Artificial Sequence
  Description of Artificial Sequence: Synthetic oligonucleotide
  Target: LAMA2; (-) strand; PAM type: NRG; PAM sequence: TAG
caaactatttggttcattat

SEQ ID NO: 117997 - DNA, 20 bp, Artificial Sequence
  Description of Artificial Sequence: Synthetic oligonucleotide
  Target: LAMA2; (-) strand; PAM type: NRG; PAM sequence: TGG
actcgagatctcaaactatt

SEQ ID NO: 117998 - DNA, 20 bp, Artificial Sequence
  Description of Artificial Sequence: Synthetic oligonucleotide
  Target: LAMA2; (-) strand; PAM type: NRG; PAM sequence: GAG
tagcaacacagtaagaactc

SEQ ID NO: 117999 - DNA, 20 bp, Artificial Sequence
  Description of Artificial Sequence: Synthetic oligonucleotide
  Target: LAMA2; (-) strand; PAM type: NRG; PAM sequence: AAG
tgtgtttatagcaacacagt

SEQ ID NO: 118000 - DNA, 20 bp, Artificial Sequence
  Description of Artificial Sequence: Synthetic oligonucleotide
  Target: LAMA2; (-) strand; PAM type: NRG; PAM sequence: CAG
agagtgtgtttatagcaaca

SEQ ID NO: 118001 - DNA, 20 bp, Artificial Sequence
  Description of Artificial Sequence: Synthetic oligonucleotide
  Target: LAMA2; (-) strand; PAM type: NRG; PAM sequence: TAG
ggagaataagagtgtgttta

SEQ ID NO: 118002 - DNA, 20 bp, Artificial Sequence
  Description of Artificial Sequence: Synthetic oligonucleotide
  Target: LAMA2; (-) strand; PAM type: NRG; PAM sequence: GAG
gttccttaagaggagaataa

SEQ ID NO: 118003 - DNA, 20 bp, Artificial Sequence
  Description of Artificial Sequence: Synthetic oligonucleotide
  Target: LAMA2; (-) strand; PAM type: NRG; PAM sequence: AAG
gtgttccttaagaggagaat

SEQ ID NO: 118004 - DNA, 20 bp, Artificial Sequence
  Description of Artificial Sequence: Synthetic oligonucleotide
  Target: LAMA2; (-) strand; PAM type: NRG; PAM sequence: GAG
gactgtgtgttccttaagag

SEQ ID NO: 118005 - DNA, 20 bp, Artificial Sequence
  Description of Artificial Sequence: Synthetic oligonucleotide
  Target: LAMA2; (-) strand; PAM type: NRG; PAM sequence: AGG
tagactgtgtgttccttaag

SEQ ID NO: 118006 - DNA, 20 bp, Artificial Sequence
  Description of Artificial Sequence: Synthetic oligonucleotide
  Target: LAMA2; (-) strand; PAM type: NRG; PAM sequence: GAG
atagactgtgtgttccttaa

SEQ ID NO: 118007 - DNA, 20 bp, Artificial Sequence
  Description of Artificial Sequence: Synthetic oligonucleotide
  Target: LAMA2; (-) strand; PAM type: NRG; PAM sequence: AAG
tcatagactgtgtgttcctt

SEQ ID NO: 118008 - DNA, 20 bp, Artificial Sequence
  Description of Artificial Sequence: Synthetic oligonucleotide
  Target: LAMA2; (-) strand; PAM type: NRG; PAM sequence: TAG
cactggagtccatagtctca

SEQ ID NO: 118009 - DNA, 20 bp, Artificial Sequence
  Description of Artificial Sequence: Synthetic oligonucleotide
  Target: LAMA2; (-) strand; PAM type: NRG; PAM sequence: TAG
ttttctcccactggagtcca

SEQ ID NO: 118010 - DNA, 20 bp, Artificial Sequence
  Description of Artificial Sequence: Synthetic oligonucleotide
  Target: LAMA2; (-) strand; PAM type: NRG; PAM sequence: GAG
ctctgccttttctcccactg

SEQ ID NO: 118011 - DNA, 20 bp, Artificial Sequence
  Description of Artificial Sequence: Synthetic oligonucleotide
  Target: LAMA2; (-) strand; PAM type: NRG; PAM sequence: TGG
ctctctgccttttctcccac

SEQ ID NO: 118012 - DNA, 20 bp, Artificial Sequence
  Description of Artificial Sequence: Synthetic oligonucleotide
  Target: LAMA2; (-) strand; PAM type: NRG; PAM sequence: TAG
taaaagaggcagactaattt

SEQ ID NO: 118013 - DNA, 20 bp, Artificial Sequence
  Description of Artificial Sequence: Synthetic oligonucleotide
  Target: LAMA2; (-) strand; PAM type: NRG; PAM sequence: CAG
gcctagcctgttaaaagagg

SEQ ID NO: 118014 - DNA, 20 bp, Artificial Sequence
  Description of Artificial Sequence: Synthetic oligonucleotide
  Target: LAMA2; (-) strand; PAM type: NRG; PAM sequence: AGG
gatgcctagcctgttaaaag

SEQ ID NO: 118015 - DNA, 20 bp, Artificial Sequence
  Description of Artificial Sequence: Synthetic oligonucleotide
  Target: LAMA2; (-) strand; PAM type: NRG; PAM sequence: GAG
agatgcctagcctgttaaaa

SEQ ID NO: 118016 - DNA, 20 bp, Artificial Sequence
  Description of Artificial Sequence: Synthetic oligonucleotide
  Target: LAMA2; (-) strand; PAM type: NRG; PAM sequence: AAG
agagatgcctagcctgttaa

SEQ ID NO: 118017 - DNA, 20 bp, Artificial Sequence
  Description of Artificial Sequence: Synthetic oligonucleotide
  Target: LAMA2; (-) strand; PAM type: NRG; PAM sequence: TAG
cttggcttctaagagatgcc

SEQ ID NO: 118018 - DNA, 20 bp, Artificial Sequence
  Description of Artificial Sequence: Synthetic oligonucleotide
  Target: LAMA2; (-) strand; PAM type: NRG; PAM sequence: GAG
ttggctaccttggcttctaa

SEQ ID NO: 118019 - DNA, 20 bp, Artificial Sequence
  Description of Artificial Sequence: Synthetic oligonucleotide
  Target: LAMA2; (-) strand; PAM type: NRG; PAM sequence: AAG
agttggctaccttggcttct

SEQ ID NO: 118020 - DNA, 20 bp, Artificial Sequence
  Description of Artificial Sequence: Synthetic oligonucleotide
  Target: LAMA2; (-) strand; PAM type: NRG; PAM sequence: TGG
gatgcgtcagttggctacct

SEQ ID NO: 118021 - DNA, 20 bp, Artificial Sequence
  Description of Artificial Sequence: Synthetic oligonucleotide
  Target: LAMA2; (-) strand; PAM type: NRG; PAM sequence: TGG
tgagaaactgatgcgtcagt

SEQ ID NO: 118022 - DNA, 20 bp, Artificial Sequence
  Description of Artificial Sequence: Synthetic oligonucleotide
  Target: LAMA2; (-) strand; PAM type: NRG; PAM sequence: CAG
aaattgagaaactgatgcgt

SEQ ID NO: 118023 - DNA, 20 bp, Artificial Sequence
  Description of Artificial Sequence: Synthetic oligonucleotide
  Target: LAMA2; (-) strand; PAM type: NRG; PAM sequence: GAG
gatgcttttttaaacaaatt

SEQ ID NO: 118024 - DNA, 20 bp, Artificial Sequence
  Description of Artificial Sequence: Synthetic oligonucleotide
  Target: LAMA2; (-) strand; PAM type: NRG; PAM sequence: TGG
ctgttttttgaaatggtagc

SEQ ID NO: 118025 - DNA, 20 bp, Artificial Sequence
  Description of Artificial Sequence: Synthetic oligonucleotide
  Target: LAMA2; (-) strand; PAM type: NRG; PAM sequence: TAG
tttgctgttttttgaaatgg

SEQ ID NO: 118026 - DNA, 20 bp, Artificial Sequence
  Description of Artificial Sequence: Synthetic oligonucleotide
  Target: LAMA2; (-) strand; PAM type: NRG; PAM sequence: TGG
aaatttgctgttttttgaaa

SEQ ID NO: 118027 - DNA, 20 bp, Artificial Sequence
  Description of Artificial Sequence: Synthetic oligonucleotide
  Target: LAMA2; (-) strand; PAM type: NRG; PAM sequence: TAG
gcagggctgaaagaggtgtt

SEQ ID NO: 118028 - DNA, 20 bp, Artificial Sequence
  Description of Artificial Sequence: Synthetic oligonucleotide
  Target: LAMA2; (-) strand; PAM type: NRG; PAM sequence: AGG
tcttaatgcagggctgaaag

SEQ ID NO: 118029 - DNA, 20 bp, Artificial Sequence
  Description of Artificial Sequence: Synthetic oligonucleotide
  Target: LAMA2; (-) strand; PAM type: NRG; PAM sequence: GAG
gtcttaatgcagggctgaaa

SEQ ID NO: 118030 - DNA, 20 bp, Artificial Sequence
  Description of Artificial Sequence: Synthetic oligonucleotide
  Target: LAMA2; (-) strand; PAM type: NRG; PAM sequence: AAG
ttgtcttaatgcagggctga

SEQ ID NO: 118031 - DNA, 20 bp, Artificial Sequence
  Description of Artificial Sequence: Synthetic oligonucleotide
  Target: LAMA2; (-) strand; PAM type: NRG; PAM sequence: GGG
tgcaaagttgtcttaatgca

SEQ ID NO: 118032 - DNA, 20 bp, Artificial Sequence
  Description of Artificial Sequence: Synthetic oligonucleotide
  Target: LAMA2; (-) strand; PAM type: NRG; PAM sequence: AGG
gtgcaaagttgtcttaatgc

SEQ ID NO: 118033 - DNA, 20 bp, Artificial Sequence
  Description of Artificial Sequence: Synthetic oligonucleotide
  Target: LAMA2; (-) strand; PAM type: NRG; PAM sequence: CAG
agtgcaaagttgtcttaatg

SEQ ID NO: 118034 - DNA, 20 bp, Artificial Sequence
  Description of Artificial Sequence: Synthetic oligonucleotide
  Target: LAMA2; (-) strand; PAM type: NRG; PAM sequence: AAG
tacctgctgcctatagtgca

SEQ ID NO: 118035 - DNA, 20 bp, Artificial Sequence
  Description of Artificial Sequence: Synthetic oligonucleotide
  Target: LAMA2; (-) strand; PAM type: NRG; PAM sequence: TAG
ctctgtttacctgctgccta

SEQ ID NO: 118036 - DNA, 20 bp, Artificial Sequence
  Description of Artificial Sequence: Synthetic oligonucleotide
  Target: LAMA2; (-) strand; PAM type: NRG; PAM sequence: TAG
attcctatttaataaccaaa

SEQ ID NO: 118037 - DNA, 20 bp, Artificial Sequence
  Description of Artificial Sequence: Synthetic oligonucleotide
  Target: LAMA2; (-) strand; PAM type: NRG; PAM sequence: AAG
tggaaacgtgaactgagttg

SEQ ID NO: 118038 - DNA, 20 bp, Artificial Sequence
  Description of Artificial Sequence: Synthetic oligonucleotide
  Target: LAMA2; (-) strand; PAM type: NRG; PAM sequence: GAG
taagggtggaaacgtgaact

SEQ ID NO: 118039 - DNA, 20 bp, Artificial Sequence
  Description of Artificial Sequence: Synthetic oligonucleotide
  Target: LAMA2; (-) strand; PAM type: NRG; PAM sequence: TGG
ttgggaggcaacactaaggg

SEQ ID NO: 118040 - DNA, 20 bp, Artificial Sequence
  Description of Artificial Sequence: Synthetic oligonucleotide
  Target: LAMA2; (-) strand; PAM type: NRG; PAM sequence: GGG
ttcttgggaggcaacactaa

SEQ ID NO: 118041 - DNA, 20 bp, Artificial Sequence
  Description of Artificial Sequence: Synthetic oligonucleotide
  Target: LAMA2; (-) strand; PAM type: NRG; PAM sequence: AGG
cttcttgggaggcaacacta

SEQ ID NO: 118042 - DNA, 20 bp, Artificial Sequence
  Description of Artificial Sequence: Synthetic oligonucleotide
  Target: LAMA2; (-) strand; PAM type: NRG; PAM sequence: AAG
tcttcttgggaggcaacact

SEQ ID NO: 118043 - DNA, 20 bp, Artificial Sequence
  Description of Artificial Sequence: Synthetic oligonucleotide
  Target: LAMA2; (-) strand; PAM type: NRG; PAM sequence: AGG
gtgtgatttttcttcttggg

SEQ ID NO: 118044 - DNA, 20 bp, Artificial Sequence
  Description of Artificial Sequence: Synthetic oligonucleotide
  Target: LAMA2; (-) strand; PAM type: NRG; PAM sequence: GAG
tgtgtgatttttcttcttgg

SEQ ID NO: 118045 - DNA, 20 bp, Artificial Sequence
  Description of Artificial Sequence: Synthetic oligonucleotide
  Target: LAMA2; (-) strand; PAM type: NRG; PAM sequence: GGG
actgtgtgatttttcttctt

SEQ ID NO: 118046 - DNA, 20 bp, Artificial Sequence
  Description of Artificial Sequence: Synthetic oligonucleotide
  Target: LAMA2; (-) strand; PAM type: NRG; PAM sequence: TGG
cactgtgtgatttttcttct

SEQ ID NO: 118047 - DNA, 20 bp, Artificial Sequence
  Description of Artificial Sequence: Synthetic oligonucleotide
  Target: LAMA2; (-) strand; PAM type: NRG; PAM sequence: AGG
aagcaagaaaaaactatttt

SEQ ID NO: 118048 - DNA, 20 bp, Artificial Sequence
  Description of Artificial Sequence: Synthetic oligonucleotide
  Target: LAMA2; (-) strand; PAM type: NRG; PAM sequence: TAG
aaagcaagaaaaaactattt

SEQ ID NO: 118049 - DNA, 20 bp, Artificial Sequence
  Description of Artificial Sequence: Synthetic oligonucleotide
  Target: LAMA2; (-) strand; PAM type: NRG; PAM sequence: AAG
agcagaaagaggaagaaagc

SEQ ID NO: 118050 - DNA, 20 bp, Artificial Sequence
  Description of Artificial Sequence: Synthetic oligonucleotide
  Target: LAMA2; (-) strand; PAM type: NRG; PAM sequence: AAG
attgagcagaaagaggaaga

SEQ ID NO: 118051 - DNA, 20 bp, Artificial Sequence
  Description of Artificial Sequence: Synthetic oligonucleotide
  Target: LAMA2; (-) strand; PAM type: NRG; PAM sequence: AAG
gaaaattgagcagaaagagg

SEQ ID NO: 118052 - DNA, 20 bp, Artificial Sequence
  Description of Artificial Sequence: Synthetic oligonucleotide
  Target: LAMA2; (-) strand; PAM type: NRG; PAM sequence: AGG
tttgaaaattgagcagaaag

SEQ ID NO: 118053 - DNA, 20 bp, Artificial Sequence
  Description of Artificial Sequence: Synthetic oligonucleotide
  Target: LAMA2; (-) strand; PAM type: NRG; PAM sequence: GAG
gtttgaaaattgagcagaaa

SEQ ID NO: 118054 - DNA, 20 bp, Artificial Sequence
  Description of Artificial Sequence: Synthetic oligonucleotide
  Target: LAMA2; (-) strand; PAM type: NRG; PAM sequence: AAG
cagtttgaaaattgagcaga

SEQ ID NO: 118055 - DNA, 20 bp, Artificial Sequence
  Description of Artificial Sequence: Synthetic oligonucleotide
  Target: LAMA2; (-) strand; PAM type: NRG; PAM sequence: CAG
aggacagtttgaaaattgag

SEQ ID NO: 118056 - DNA, 20 bp, Artificial Sequence
  Description of Artificial Sequence: Synthetic oligonucleotide
  Target: LAMA2; (-) strand; PAM type: NRG; PAM sequence: GAG
tggaggacagtttgaaaatt

SEQ ID NO: 118057 - DNA, 20 bp, Artificial Sequence
  Description of Artificial Sequence: Synthetic oligonucleotide
  Target: LAMA2; (-) strand; PAM type: NRG; PAM sequence: CAG
atattacctttgttggagga

SEQ ID NO: 118058 - DNA, 20 bp, Artificial Sequence
  Description of Artificial Sequence: Synthetic oligonucleotide
  Target: LAMA2; (-) strand; PAM type: NRG; PAM sequence: AGG
tcctatattacctttgttgg

SEQ ID NO: 118059 - DNA, 20 bp, Artificial Sequence
  Description of Artificial Sequence: Synthetic oligonucleotide
  Target: LAMA2; (-) strand; PAM type: NRG; PAM sequence: GAG
ttcctatattacctttgttg

SEQ ID NO: 118060 - DNA, 20 bp, Artificial Sequence
  Description of Artificial Sequence: Synthetic oligonucleotide
  Target: LAMA2; (-) strand; PAM type: NRG; PAM sequence: TGG
ttttcctatattacctttgt

SEQ ID NO: 118061 - DNA, 20 bp, Artificial Sequence
  Description of Artificial Sequence: Synthetic oligonucleotide
  Target: LAMA2; (-) strand; PAM type: NRG; PAM sequence: TGG
cctttttacctctaagctgg

SEQ ID NO: 118062 - DNA, 20 bp, Artificial Sequence
  Description of Artificial Sequence: Synthetic oligonucleotide
  Target: LAMA2; (-) strand; PAM type: NRG; PAM sequence: TGG
actcctttttacctctaagc

SEQ ID NO: 118063 - DNA, 20 bp, Artificial Sequence
  Description of Artificial Sequence: Synthetic oligonucleotide
  Target: LAMA2; (-) strand; PAM type: NRG; PAM sequence: AAG
gttcactcctttttacctct

SEQ ID NO: 118064 - DNA, 20 bp, Artificial Sequence
  Description of Artificial Sequence: Synthetic oligonucleotide
  Target: LAMA2; (-) strand; PAM type: NRG; PAM sequence: GAG
gaaaatttggtaaaactatt

SEQ ID NO: 118065 - DNA, 20 bp, Artificial Sequence
  Description of Artificial Sequence: Synthetic oligonucleotide
  Target: LAMA2; (-) strand; PAM type: NRG; PAM sequence: TGG
taaaagtatgtttgaaaatt

SEQ ID NO: 118066 - DNA, 20 bp, Artificial Sequence
  Description of Artificial Sequence: Synthetic oligonucleotide
  Target: LAMA2; (-) strand; PAM type: NRG; PAM sequence: AAG
acttgaaaaagatgtagtaa

SEQ ID NO: 118067 - DNA, 20 bp, Artificial Sequence
  Description of Artificial Sequence: Synthetic oligonucleotide
  Target: LAMA2; (-) strand; PAM type: NRG; PAM sequence: TAG
catgttacttgaaaaagatg

SEQ ID NO: 118068 - DNA, 20 bp, Artificial Sequence
  Description of Artificial Sequence: Synthetic oligonucleotide
  Target: LAMA2; (-) strand; PAM type: NRG; PAM sequence: AAG
taagagcatgttacttgaaa

SEQ ID NO: 118069 - DNA, 20 bp, Artificial Sequence
  Description of Artificial Sequence: Synthetic oligonucleotide
  Target: LAMA2; (-) strand; PAM type: NRG; PAM sequence: GAG
tcgatggtaactgcccttaa

SEQ ID NO: 118070 - DNA, 20 bp, Artificial Sequence
  Description of Artificial Sequence: Synthetic oligonucleotide
  Target: LAMA2; (-) strand; PAM type: NRG; PAM sequence: AAG
tatcgatggtaactgccctt

SEQ ID NO: 118071 - DNA, 20 bp, Artificial Sequence
  Description of Artificial Sequence: Synthetic oligonucleotide
  Target: LAMA2; (-) strand; PAM type: NRG; PAM sequence: TGG
acatgatagtgacatatcga

SEQ ID NO: 118072 - DNA, 20 bp, Artificial Sequence
  Description of Artificial Sequence: Synthetic oligonucleotide
  Target: LAMA2; (-) strand; PAM type: NRG; PAM sequence: TAG
ttggtgagaaacgcacatga

SEQ ID NO: 118073 - DNA, 20 bp, Artificial Sequence
  Description of Artificial Sequence: Synthetic oligonucleotide
  Target: LAMA2; (-) strand; PAM type: NRG; PAM sequence: GAG
gcatgtaaaaggagcttggt

SEQ ID NO: 118074 - DNA, 20 bp, Artificial Sequence
  Description of Artificial Sequence: Synthetic oligonucleotide
  Target: LAMA2; (-) strand; PAM type: NRG; PAM sequence: TGG
ttttgcatgtaaaaggagct

SEQ ID NO: 118075 - DNA, 20 bp, Artificial Sequence
  Description of Artificial Sequence: Synthetic oligonucleotide
  Target: LAMA2; (-) strand; PAM type: NRG; PAM sequence: GAG
caggcttttgcatgtaaaag

SEQ ID NO: 118076 - DNA, 20 bp, Artificial Sequence
  Description of Artificial Sequence: Synthetic oligonucleotide
  Target: LAMA2; (-) strand; PAM type: NRG; PAM sequence: AGG
aacaggcttttgcatgtaaa

SEQ ID NO: 118077 - DNA, 20 bp, Artificial Sequence
  Description of Artificial Sequence: Synthetic oligonucleotide
  Target: LAMA2; (-) strand; PAM type: NRG; PAM sequence: AAG
taacaggcttttgcatgtaa

SEQ ID NO: 118078 - DNA, 20 bp, Artificial Sequence
  Description of Artificial Sequence: Synthetic oligonucleotide
  Target: LAMA2; (-) strand; PAM type: NRG; PAM sequence: AGG
ttgggtggagtttgcataac

SEQ ID NO: 118079 - DNA, 20 bp, Artificial Sequence
  Description of Artificial Sequence: Synthetic oligonucleotide
  Target: LAMA2; (-) strand; PAM type: NRG; PAM sequence: CAG
attgggtggagtttgcataa

SEQ ID NO: 118080 - DNA, 20 bp, Artificial Sequence
  Description of Artificial Sequence: Synthetic oligonucleotide
  Target: LAMA2; (-) strand; PAM type: NRG; PAM sequence: GAG
aatgtttactatattgggtg

SEQ ID NO: 118081 - DNA, 20 bp, Artificial Sequence
  Description of Artificial Sequence: Synthetic oligonucleotide
  Target: LAMA2; (-) strand; PAM type: NRG; PAM sequence: TGG
gaaatgtttactatattggg

SEQ ID NO: 118082 - DNA, 20 bp, Artificial Sequence
  Description of Artificial Sequence: Synthetic oligonucleotide
  Target: LAMA2; (-) strand; PAM type: NRG; PAM sequence: GGG
aatgaaatgtttactatatt

SEQ ID NO: 118083 - DNA, 20 bp, Artificial Sequence
  Description of Artificial Sequence: Synthetic oligonucleotide
  Target: LAMA2; (-) strand; PAM type: NRG; PAM sequence: TGG
taatgaaatgtttactatat

SEQ ID NO: 118084 - DNA, 20 bp, Artificial Sequence
  Description of Artificial Sequence: Synthetic oligonucleotide
  Target: LAMA2; (-) strand; PAM type: NRG; PAM sequence: AAG
aatgcaagtaaataggtgaa

SEQ ID NO: 118085 - DNA, 20 bp, Artificial Sequence
  Description of Artificial Sequence: Synthetic oligonucleotide
  Target: LAMA2; (-) strand; PAM type: NRG; PAM sequence: AGG
gattaaaaatgcaagtaaat

SEQ ID NO: 118086 - DNA, 20 bp, Artificial Sequence
  Description of Artificial Sequence: Synthetic oligonucleotide
  Target: LAMA2; (-) strand; PAM type: NRG; PAM sequence: TAG
agattaaaaatgcaagtaaa

SEQ ID NO: 118087 - DNA, 20 bp, Artificial Sequence
  Description of Artificial Sequence: Synthetic oligonucleotide
  Target: LAMA2; (-) strand; PAM type: NRG; PAM sequence: AAG
agaagaaagattaaaaatgc

SEQ ID NO: 118088 - DNA, 20 bp, Artificial Sequence
  Description of Artificial Sequence: Synthetic oligonucleotide
  Target: LAMA2; (-) strand; PAM type: NRG; PAM sequence: AAG
gaaatgaagtcttaagaaga

SEQ ID NO: 118089 - DNA, 20 bp, Artificial Sequence
  Description of Artificial Sequence: Synthetic oligonucleotide
  Target: LAMA2; (-) strand; PAM type: NRG; PAM sequence: AAG
aaaagaaatgaagtcttaag

SEQ ID NO: 118090 - DNA, 20 bp, Artificial Sequence
  Description of Artificial Sequence: Synthetic oligonucleotide
  Target: LAMA2; (-) strand; PAM type: NRG; PAM sequence: AAG
aagaaaagaaatgaagtctt

SEQ ID NO: 118091 - DNA, 20 bp, Artificial Sequence
  Description of Artificial Sequence: Synthetic oligonucleotide
  Target: LAMA2; (-) strand; PAM type: NRG; PAM sequence: AAG
aaggtaaaagaaaagaaatg

SEQ ID NO: 118092 - DNA, 20 bp, Artificial Sequence
  Description of Artificial Sequence: Synthetic oligonucleotide
  Target: LAMA2; (-) strand; PAM type: NRG; PAM sequence: AAG
cattcgacaaggtaaaagaa

SEQ ID NO: 118093 - DNA, 20 bp, Artificial Sequence
  Description of Artificial Sequence: Synthetic oligonucleotide
  Target: LAMA2; (-) strand; PAM type: NRG; PAM sequence: AAG
caagacattcgacaaggtaa

SEQ ID NO: 118094 - DNA, 20 bp, Artificial Sequence
  Description of Artificial Sequence: Synthetic oligonucleotide
  Target: LAMA2; (-) strand; PAM type: NRG; PAM sequence: AGG
gtttggcaagacattcgaca

SEQ ID NO: 118095 - DNA, 20 bp, Artificial Sequence
  Description of Artificial Sequence: Synthetic oligonucleotide
  Target: LAMA2; (-) strand; PAM type: NRG; PAM sequence: AAG
agtttggcaagacattcgac

SEQ ID NO: 118096 - DNA, 20 bp, Artificial Sequence
  Description of Artificial Sequence: Synthetic oligonucleotide
  Target: LAMA2; (-) strand; PAM type: NRG; PAM sequence: AAG
aaaacattagtcagtttggc

SEQ ID NO: 118097 - DNA, 20 bp, Artificial Sequence
  Description of Artificial Sequence: Synthetic oligonucleotide
  Target: LAMA2; (-) strand; PAM type: NRG; PAM sequence: TGG
actaaaaacattagtcagtt

SEQ ID NO: 118098 - DNA, 20 bp, Artificial Sequence
  Description of Artificial Sequence: Synthetic oligonucleotide
  Target: LAMA2; (-) strand; PAM type: NRG; PAM sequence: CAG
gaaacactaaaaacattagt

SEQ ID NO: 118099 - DNA, 20 bp, Artificial Sequence
  Description of Artificial Sequence: Synthetic oligonucleotide
  Target: LAMA2; (-) strand; PAM type: NRG; PAM sequence: TAG
tattgaaacactaaaaacat

SEQ ID NO: 118100 - DNA, 20 bp, Artificial Sequence
  Description of Artificial Sequence: Synthetic oligonucleotide
  Target: LAMA2; (-) strand; PAM type: NRG; PAM sequence: AAG
gaattcttttgaagctggtg

SEQ ID NO: 118101 - DNA, 20 bp, Artificial Sequence
  Description of Artificial Sequence: Synthetic oligonucleotide
  Target: LAMA2; (-) strand; PAM type: NRG; PAM sequence: TGG
tgacagaattcttttgaagc

SEQ ID NO: 118102 - DNA, 20 bp, Artificial Sequence
  Description of Artificial Sequence: Synthetic oligonucleotide
  Target: LAMA2; (-) strand; PAM type: NRG; PAM sequence: AAG
gagatgacagaattcttttg

SEQ ID NO: 118103 - DNA, 20 bp, Artificial Sequence
  Description of Artificial Sequence: Synthetic oligonucleotide
  Target: LAMA2; (-) strand; PAM type: NRG; PAM sequence: CAG
gcccctgaaatttgagatga

SEQ ID NO: 118104 - DNA, 20 bp, Artificial Sequence
  Description of Artificial Sequence: Synthetic oligonucleotide
  Target: LAMA2; (-) strand; PAM type: NRG; PAM sequence: GAG
tggaaaagcccctgaaattt

SEQ ID NO: 118105 - DNA, 20 bp, Artificial Sequence
  Description of Artificial Sequence: Synthetic oligonucleotide
  Target: LAMA2; (-) strand; PAM type: NRG; PAM sequence: AAG
ctgtttttagtaatgtggaa

SEQ ID NO: 118106 - DNA, 20 bp, Artificial Sequence
  Description of Artificial Sequence: Synthetic oligonucleotide
  Target: LAMA2; (-) strand; PAM type: NRG; PAM sequence: TGG
aaaatctgtttttagtaatg

SEQ ID NO: 118107 - DNA, 20 bp, Artificial Sequence
  Description of Artificial Sequence: Synthetic oligonucleotide
  Target: LAMA2; (-) strand; PAM type: NRG; PAM sequence: TAG
aaatgagaaaaatctgtttt

SEQ ID NO: 118108 - DNA, 20 bp, Artificial Sequence
  Description of Artificial Sequence: Synthetic oligonucleotide
  Target: LAMA2; (-) strand; PAM type: NRG; PAM sequence: GAG
ctagaagttctggtctaaat

SEQ ID NO: 118109 - DNA, 20 bp, Artificial Sequence
  Description of Artificial Sequence: Synthetic oligonucleotide
  Target: LAMA2; (-) strand; PAM type: NRG; PAM sequence: TGG
agaacttagactagaagttc

SEQ ID NO: 118110 - DNA, 20 bp, Artificial Sequence
  Description of Artificial Sequence: Synthetic oligonucleotide
  Target: LAMA2; (-) strand; PAM type: NRG; PAM sequence: AAG
caatgaagaacttagactag

SEQ ID NO: 118111 - DNA, 20 bp, Artificial Sequence
  Description of Artificial Sequence: Synthetic oligonucleotide
  Target: LAMA2; (-) strand; PAM type: NRG; PAM sequence: TAG
taacaatgaagaacttagac

SEQ ID NO: 118112 - DNA, 20 bp, Artificial Sequence
  Description of Artificial Sequence: Synthetic oligonucleotide
  Target: LAMA2; (-) strand; PAM type: NRG; PAM sequence: TAG
attcctaacaatgaagaact

SEQ ID NO: 118113 - DNA, 20 bp, Artificial Sequence
  Description of Artificial Sequence: Synthetic oligonucleotide
  Target: LAMA2; (-) strand; PAM type: NRG; PAM sequence: AAG
cagttaaattcctaacaatg

SEQ ID NO: 118114 - DNA, 20 bp, Artificial Sequence
  Description of Artificial Sequence: Synthetic oligonucleotide
  Target: LAMA2; (-) strand; PAM type: NRG; PAM sequence: CAG
aaagacctgagccagaaggc

SEQ ID NO: 118115 - DNA, 20 bp, Artificial Sequence
  Description of Artificial Sequence: Synthetic oligonucleotide
  Target: LAMA2; (-) strand; PAM type: NRG; PAM sequence: AGG
tgccaaagacctgagccaga

SEQ ID NO: 118116 - DNA, 20 bp, Artificial Sequence
  Description of Artificial Sequence: Synthetic oligonucleotide
  Target: LAMA2; (-) strand; PAM type: NRG; PAM sequence: AAG
gtgccaaagacctgagccag

SEQ ID NO: 118117 - DNA, 20 bp, Artificial Sequence
  Description of Artificial Sequence: Synthetic oligonucleotide
  Target: LAMA2; (-) strand; PAM type: NRG; PAM sequence: CAG
caggtgccaaagacctgagc

SEQ ID NO: 118118 - DNA, 20 bp, Artificial Sequence
  Description of Artificial Sequence: Synthetic oligonucleotide
  Target: LAMA2; (-) strand; PAM type: NRG; PAM sequence: GAG
gtcacaggtgccaaagacct

SEQ ID NO: 118119 - DNA, 20 bp, Artificial Sequence
  Description of Artificial Sequence: Synthetic oligonucleotide
  Target: LAMA2; (-) strand; PAM type: NRG; PAM sequence: AAG
gtttcatgtcacaggtgcca

SEQ ID NO: 118120 - DNA, 20 bp, Artificial Sequence
  Description of Artificial Sequence: Synthetic oligonucleotide
  Target: LAMA2; (-) strand; PAM type: NRG; PAM sequence: AGG
tggagcccgtttcatgtcac

SEQ ID NO: 118121 - DNA, 20 bp, Artificial Sequence
  Description of Artificial Sequence: Synthetic oligonucleotide
  Target: LAMA2; (-) strand; PAM type: NRG; PAM sequence: CAG
ttggagcccgtttcatgtca

SEQ ID NO: 118122 - DNA, 20 bp, Artificial Sequence
  Description of Artificial Sequence: Synthetic oligonucleotide
  Target: LAMA2; (-) strand; PAM type: NRG; PAM sequence: GAG
gttacataaattacattttg

SEQ ID NO: 118123 - DNA, 20 bp, Artificial Sequence
  Description of Artificial Sequence: Synthetic oligonucleotide
  Target: LAMA2; (-) strand; PAM type: NRG; PAM sequence: TGG
gagttacataaattacattt

SEQ ID NO: 118124 - DNA, 20 bp, Artificial Sequence
  Description of Artificial Sequence: Synthetic oligonucleotide
  Target: LAMA2; (-) strand; PAM type: NRG; PAM sequence: GAG
cattttatatacaagattga

SEQ ID NO: 118125 - DNA, 20 bp, Artificial Sequence
  Description of Artificial Sequence: Synthetic oligonucleotide
  Target: LAMA2; (-) strand; PAM type: NRG; PAM sequence: GAG
ttcattttatatacaagatt

SEQ ID NO: 118126 - DNA, 20 bp, Artificial Sequence
  Description of Artificial Sequence: Synthetic oligonucleotide
  Target: LAMA2; (-) strand; PAM type: NRG; PAM sequence: AAG
atggatttcattttatatac

SEQ ID NO: 118127 - DNA, 20 bp, Artificial Sequence
  Description of Artificial Sequence: Synthetic oligonucleotide
  Target: LAMA2; (-) strand; PAM type: NRG; PAM sequence: TGG
aattatatttttttccttca

SEQ ID NO: 118128 - DNA, 20 bp, Artificial Sequence
  Description of Artificial Sequence: Synthetic oligonucleotide
  Target: LAMA2; (-) strand; PAM type: NRG; PAM sequence: AGG
ggtttacaaattcaaagtaa

SEQ ID NO: 118129 - DNA, 20 bp, Artificial Sequence
  Description of Artificial Sequence: Synthetic oligonucleotide
  Target: LAMA2; (-) strand; PAM type: NRG; PAM sequence: AAG
tggtttacaaattcaaagta

SEQ ID NO: 118130 - DNA, 20 bp, Artificial Sequence
  Description of Artificial Sequence: Synthetic oligonucleotide
  Target: LAMA2; (-) strand; PAM type: NRG; PAM sequence: AAG
taatttggtttacaaattca

SEQ ID NO: 118131 - DNA, 20 bp, Artificial Sequence
  Description of Artificial Sequence: Synthetic oligonucleotide
  Target: LAMA2; (-) strand; PAM type: NRG; PAM sequence: TGG
tttaaagtgactcattaatt

SEQ ID NO: 118132 - DNA, 20 bp, Artificial Sequence
  Description of Artificial Sequence: Synthetic oligonucleotide
  Target: LAMA2; (-) strand; PAM type: NRG; PAM sequence: AAG
ttcttaaaagatattgttta

SEQ ID NO: 118133 - DNA, 20 bp, Artificial Sequence
  Description of Artificial Sequence: Synthetic oligonucleotide
  Target: LAMA2; (-) strand; PAM type: NRG; PAM sequence: AAG
accttataaaattttcttaa

SEQ ID NO: 118134 - DNA, 20 bp, Artificial Sequence
  Description of Artificial Sequence: Synthetic oligonucleotide
  Target: LAMA2; (-) strand; PAM type: NRG; PAM sequence: GAG
cacgtctttttagaatgtga

SEQ ID NO: 118135 - DNA, 20 bp, Artificial Sequence
  Description of Artificial Sequence: Synthetic oligonucleotide
  Target: LAMA2; (-) strand; PAM type: NRG; PAM sequence: GAG
ctcacgtctttttagaatgt

SEQ ID NO: 118136 - DNA, 20 bp, Artificial Sequence
  Description of Artificial Sequence: Synthetic oligonucleotide
  Target: LAMA2; (-) strand; PAM type: NRG; PAM sequence: TAG
aattctacctcacgtctttt

SEQ ID NO: 118137 - DNA, 20 bp, Artificial Sequence
  Description of Artificial Sequence: Synthetic oligonucleotide
  Target: LAMA2; (-) strand; PAM type: NRG; PAM sequence: GGG
aaaaggacctagtgtacaca

SEQ ID NO: 118138 - DNA, 20 bp, Artificial Sequence
  Description of Artificial Sequence: Synthetic oligonucleotide
  Target: LAMA2; (-) strand; PAM type: NRG; PAM sequence: AGG
gaaaaggacctagtgtacac

SEQ ID NO: 118139 - DNA, 20 bp, Artificial Sequence
  Description of Artificial Sequence: Synthetic oligonucleotide
  Target: LAMA2; (-) strand; PAM type: NRG; PAM sequence: CAG
agaaaaggacctagtgtaca

SEQ ID NO: 118140 - DNA, 20 bp, Artificial Sequence
  Description of Artificial Sequence: Synthetic oligonucleotide
  Target: LAMA2; (-) strand; PAM type: NRG; PAM sequence: TAG
caggtgacaagaaaaggacc

SEQ ID NO: 118141 - DNA, 20 bp, Artificial Sequence
  Description of Artificial Sequence: Synthetic oligonucleotide
  Target: LAMA2; (-) strand; PAM type: NRG; PAM sequence: AGG
tgaggccaggtgacaagaaa

SEQ ID NO: 118142 - DNA, 20 bp, Artificial Sequence
  Description of Artificial Sequence: Synthetic oligonucleotide
  Target: LAMA2; (-) strand; PAM type: NRG; PAM sequence: AAG
ttgaggccaggtgacaagaa

SEQ ID NO: 118143 - DNA, 20 bp, Artificial Sequence
  Description of Artificial Sequence: Synthetic oligonucleotide
  Target: LAMA2; (-) strand; PAM type: NRG; PAM sequence: AAG
aaaatttgaggccaggtgac

SEQ ID NO: 118144 - DNA, 20 bp, Artificial Sequence
  Description of Artificial Sequence: Synthetic oligonucleotide
  Target: LAMA2; (-) strand; PAM type: NRG; PAM sequence: AGG
tttcagaaaaatttgaggcc

SEQ ID NO: 118145 - DNA, 20 bp, Artificial Sequence
  Description of Artificial Sequence: Synthetic oligonucleotide
  Target: LAMA2; (-) strand; PAM type: NRG; PAM sequence: CAG
ctttcagaaaaatttgaggc

SEQ ID NO: 118146 - DNA, 20 bp, Artificial Sequence
  Description of Artificial Sequence: Synthetic oligonucleotide
  Target: LAMA2; (-) strand; PAM type: NRG; PAM sequence: AGG
tctgctttcagaaaaatttg

SEQ ID NO: 118147 - DNA, 20 bp, Artificial Sequence
  Description of Artificial Sequence: Synthetic oligonucleotide
  Target: LAMA2; (-) strand; PAM type: NRG; PAM sequence: GAG
ttctgctttcagaaaaattt

SEQ ID NO: 118148 - DNA, 20 bp, Artificial Sequence
  Description of Artificial Sequence: Synthetic oligonucleotide
  Target: LAMA2; (-) strand; PAM type: NRG; PAM sequence: CAG
gctggtaataattctgcttt

SEQ ID NO: 118149 - DNA, 20 bp, Artificial Sequence
  Description of Artificial Sequence: Synthetic oligonucleotide
  Target: LAMA2; (-) strand; PAM type: NRG; PAM sequence: TGG
ataggcaagatacgtaaagc

SEQ ID NO: 118150 - DNA, 20 bp, Artificial Sequence
  Description of Artificial Sequence: Synthetic oligonucleotide
  Target: LAMA2; (-) strand; PAM type: NRG; PAM sequence: AAG
gttaataggcaagatacgta

SEQ ID NO: 118151 - DNA, 20 bp, Artificial Sequence
  Description of Artificial Sequence: Synthetic oligonucleotide
  Target: LAMA2; (-) strand; PAM type: NRG; PAM sequence: AAG
attgttgggagttaataggc

SEQ ID NO: 118152 - DNA, 20 bp, Artificial Sequence
  Description of Artificial Sequence: Synthetic oligonucleotide
  Target: LAMA2; (-) strand; PAM type: NRG; PAM sequence: AGG
gggcattgttgggagttaat

SEQ ID NO: 118153 - DNA, 20 bp, Artificial Sequence
  Description of Artificial Sequence: Synthetic oligonucleotide
  Target: LAMA2; (-) strand; PAM type: NRG; PAM sequence: TAG
ggggcattgttgggagttaa

SEQ ID NO: 118154 - DNA, 20 bp, Artificial Sequence
  Description of Artificial Sequence: Synthetic oligonucleotide
  Target: LAMA2; (-) strand; PAM type: NRG; PAM sequence: GAG
ttgctttggggcattgttgg

SEQ ID NO: 118155 - DNA, 20 bp, Artificial Sequence
  Description of Artificial Sequence: Synthetic oligonucleotide
  Target: LAMA2; (-) strand; PAM type: NRG; PAM sequence: GGG
ctttgctttggggcattgtt

SEQ ID NO: 118156 - DNA, 20 bp, Artificial Sequence
  Description of Artificial Sequence: Synthetic oligonucleotide
  Target: LAMA2; (-) strand; PAM type: NRG; PAM sequence: TGG
tctttgctttggggcattgt

SEQ ID NO: 118157 - DNA, 20 bp, Artificial Sequence
  Description of Artificial Sequence: Synthetic oligonucleotide
  Target: LAMA2; (-) strand; PAM type: NRG; PAM sequence: GGG
aaattatgctctttgctttg

SEQ ID NO: 118158 - DNA, 20 bp, Artificial Sequence
  Description of Artificial Sequence: Synthetic oligonucleotide
  Target: LAMA2; (-) strand; PAM type: NRG; PAM sequence: GGG
caaattatgctctttgcttt

SEQ ID NO: 118159 - DNA, 20 bp, Artificial Sequence
  Description of Artificial Sequence: Synthetic oligonucleotide
  Target: LAMA2; (-) strand; PAM type: NRG; PAM sequence: TGG
acaaattatgctctttgctt

SEQ ID NO: 118160 - DNA, 20 bp, Artificial Sequence
  Description of Artificial Sequence: Synthetic oligonucleotide
  Target: LAMA2; (-) strand; PAM type: NRG; PAM sequence: GAG
agtataaatctaatcaccag

SEQ ID NO: 118161 - DNA, 20 bp, Artificial Sequence
  Description of Artificial Sequence: Synthetic oligonucleotide
  Target: LAMA2; (-) strand; PAM type: NRG; PAM sequence: AGG
aaagtataaatctaatcacc

SEQ ID NO: 118162 - DNA, 20 bp, Artificial Sequence
  Description of Artificial Sequence: Synthetic oligonucleotide
  Target: LAMA2; (-) strand; PAM type: NRG; PAM sequence: CAG
taaagtataaatctaatcac

SEQ ID NO: 118163 - DNA, 20 bp, Artificial Sequence
  Description of Artificial Sequence: Synthetic oligonucleotide
  Target: LAMA2; (-) strand; PAM type: NRG; PAM sequence: AAG
ttttaaaacttgacaaatta

SEQ ID NO: 118164 - DNA, 20 bp, Artificial Sequence
  Description of Artificial Sequence: Synthetic oligonucleotide
  Target: LAMA2; (-) strand; PAM type: NRG; PAM sequence: GGG
catttgaaatggatgtaact

SEQ ID NO: 118165 - DNA, 20 bp, Artificial Sequence
  Description of Artificial Sequence: Synthetic oligonucleotide
  Target: LAMA2; (-) strand; PAM type: NRG; PAM sequence: TGG
tcatttgaaatggatgtaac

SEQ ID NO: 118166 - DNA, 20 bp, Artificial Sequence
  Description of Artificial Sequence: Synthetic oligonucleotide
  Target: LAMA2; (-) strand; PAM type: NRG; PAM sequence: TGG
tcagccagaatcatttgaaa

SEQ ID NO: 118167 - DNA, 20 bp, Artificial Sequence
  Description of Artificial Sequence: Synthetic oligonucleotide
  Target: LAMA2; (-) strand; PAM type: NRG; PAM sequence: CAG
tctctaggaaagacatcagc

SEQ ID NO: 118168 - DNA, 20 bp, Artificial Sequence
  Description of Artificial Sequence: Synthetic oligonucleotide
  Target: LAMA2; (-) strand; PAM type: NRG; PAM sequence: CAG
caggtctctaggaaagacat

SEQ ID NO: 118169 - DNA, 20 bp, Artificial Sequence
  Description of Artificial Sequence: Synthetic oligonucleotide
  Target: LAMA2; (-) strand; PAM type: NRG; PAM sequence: AAG
aaatgatcaggtctctagga

SEQ ID NO: 118170 - DNA, 20 bp, Artificial Sequence
  Description of Artificial Sequence: Synthetic oligonucleotide
  Target: LAMA2; (-) strand; PAM type: NRG; PAM sequence: AGG
atacaaatgatcaggtctct

SEQ ID NO: 118171 - DNA, 20 bp, Artificial Sequence
  Description of Artificial Sequence: Synthetic oligonucleotide
  Target: LAMA2; (-) strand; PAM type: NRG; PAM sequence: TAG
catacaaatgatcaggtctc

SEQ ID NO: 118172 - DNA, 20 bp, Artificial Sequence
  Description of Artificial Sequence: Synthetic oligonucleotide
  Target: LAMA2; (-) strand; PAM type: NRG; PAM sequence: AGG
gttcacacatacaaatgatc

SEQ ID NO: 118173 - DNA, 20 bp, Artificial Sequence
  Description of Artificial Sequence: Synthetic oligonucleotide
  Target: LAMA2; (-) strand; PAM type: NRG; PAM sequence: CAG
ggttcacacatacaaatgat

SEQ ID NO: 118174 - DNA, 20 bp, Artificial Sequence
  Description of Artificial Sequence: Synthetic oligonucleotide
  Target: LAMA2; (-) strand; PAM type: NRG; PAM sequence: TGG
tcattaaagaagtatcatga

SEQ ID NO: 118175 - DNA, 20 bp, Artificial Sequence
  Description of Artificial Sequence: Synthetic oligonucleotide
  Target: LAMA2; (-) strand; PAM type: NRG; PAM sequence: AAG
cacagatggtttcattaaag

SEQ ID NO: 118176 - DNA, 20 bp, Artificial Sequence
  Description of Artificial Sequence: Synthetic oligonucleotide
  Target: LAMA2; (-) strand; PAM type: NRG; PAM sequence: AAG
agtcacagatggtttcatta

SEQ ID NO: 118177 - DNA, 20 bp, Artificial Sequence
  Description of Artificial Sequence: Synthetic oligonucleotide
  Target: LAMA2; (-) strand; PAM type: NRG; PAM sequence: TGG
ggaaatagaacagtcacaga

SEQ ID NO: 118178 - DNA, 20 bp, Artificial Sequence
  Description of Artificial Sequence: Synthetic oligonucleotide
  Target: LAMA2; (-) strand; PAM type: NRG; PAM sequence: CAG
agtaggaaatagaacagtca

SEQ ID NO: 118179 - DNA, 20 bp, Artificial Sequence
  Description of Artificial Sequence: Synthetic oligonucleotide
  Target: LAMA2; (-) strand; PAM type: NRG; PAM sequence: CAG
ctggaaagtaggaaatagaa

SEQ ID NO: 118180 - DNA, 20 bp, Artificial Sequence
  Description of Artificial Sequence: Synthetic oligonucleotide
  Target: LAMA2; (-) strand; PAM type: NRG; PAM sequence: TAG
atcaactggaaagtaggaaa

SEQ ID NO: 118181 - DNA, 20 bp, Artificial Sequence
  Description of Artificial Sequence: Synthetic oligonucleotide
  Target: LAMA2; (-) strand; PAM type: NRG; PAM sequence: AGG
tgaaacatcaactggaaagt

SEQ ID NO: 118182 - DNA, 20 bp, Artificial Sequence
  Description of Artificial Sequence: Synthetic oligonucleotide
  Target: LAMA2; (-) strand; PAM type: NRG; PAM sequence: TAG
atgaaacatcaactggaaag

SEQ ID NO: 118183 - DNA, 20 bp, Artificial Sequence
  Description of Artificial Sequence: Synthetic oligonucleotide
  Target: LAMA2; (-) strand; PAM type: NRG; PAM sequence: AAG
cacatgaaacatcaactgga

SEQ ID NO: 118184 - DNA, 20 bp, Artificial Sequence
  Description of Artificial Sequence: Synthetic oligonucleotide
  Target: LAMA2; (-) strand; PAM type: NRG; PAM sequence: TGG
tgtccacatgaaacatcaac

SEQ ID NO: 118185 - DNA, 20 bp, Artificial Sequence
  Description of Artificial Sequence: Synthetic oligonucleotide
  Target: LAMA2; (-) strand; PAM type: NRG; PAM sequence: CAG
aaccccagcatcatagacag

SEQ ID NO: 118186 - DNA, 20 bp, Artificial Sequence
  Description of Artificial Sequence: Synthetic oligonucleotide
  Target: LAMA2; (-) strand; PAM type: NRG; PAM sequence: CAG
tggaaccccagcatcataga

SEQ ID NO: 118187 - DNA, 20 bp, Artificial Sequence
  Description of Artificial Sequence: Synthetic oligonucleotide
  Target: LAMA2; (-) strand; PAM type: NRG; PAM sequence: TAG
gccctggaaccccagcatca

SEQ ID NO: 118188 - DNA, 20 bp, Artificial Sequence
  Description of Artificial Sequence: Synthetic oligonucleotide
  Target: LAMA2; (-) strand; PAM type: NRG; PAM sequence: CAG
acacaaatgccctggaaccc

SEQ ID NO: 118189 - DNA, 20 bp, Artificial Sequence
  Description of Artificial Sequence: Synthetic oligonucleotide
  Target: LAMA2; (-) strand; PAM type: NRG; PAM sequence: TGG
tgtccatcacacaaatgccc

SEQ ID NO: 118190 - DNA, 20 bp, Artificial Sequence
  Description of Artificial Sequence: Synthetic oligonucleotide
  Target: LAMA2; (-) strand; PAM type: NRG; PAM sequence: CAG
gcggtgtttgatcttgttgg

SEQ ID NO: 118191 - DNA, 20 bp, Artificial Sequence
  Description of Artificial Sequence: Synthetic oligonucleotide
  Target: LAMA2; (-) strand; PAM type: NRG; PAM sequence: TGG
aatgcggtgtttgatcttgt

SEQ ID NO: 118192 - DNA, 20 bp, Artificial Sequence
  Description of Artificial Sequence: Synthetic oligonucleotide
  Target: LAMA2; (-) strand; PAM type: NRG; PAM sequence: CGG
catcgactgtgagctcaatg

SEQ ID NO: 118193 - DNA, 20 bp, Artificial Sequence
  Description of Artificial Sequence: Synthetic oligonucleotide
  Target: LAMA2; (-) strand; PAM type: NRG; PAM sequence: GAG
acctggttcccatcgactgt

SEQ ID NO: 118194 - DNA, 20 bp, Artificial Sequence
  Description of Artificial Sequence: Synthetic oligonucleotide
  Target: LAMA2; (-) strand; PAM type: NRG; PAM sequence: TGG
ttgggctttgggcttccacc

SEQ ID NO: 118195 - DNA, 20 bp, Artificial Sequence
  Description of Artificial Sequence: Synthetic oligonucleotide
  Target: LAMA2; (-) strand; PAM type: NRG; PAM sequence: GGG
agatgctgggtttgggcttt

SEQ ID NO: 118196 - DNA, 20 bp, Artificial Sequence
  Description of Artificial Sequence: Synthetic oligonucleotide
  Target: LAMA2; (-) strand; PAM type: NRG; PAM sequence: TGG
tagatgctgggtttgggctt

SEQ ID NO: 118197 - DNA, 20 bp, Artificial Sequence
  Description of Artificial Sequence: Synthetic oligonucleotide
  Target: LAMA2; (-) strand; PAM type: NRG; PAM sequence: GGG
ctgatgtagatgctgggttt

SEQ ID NO: 118198 - DNA, 20 bp, Artificial Sequence
  Description of Artificial Sequence: Synthetic oligonucleotide
  Target: LAMA2; (-) strand; PAM type: NRG; PAM sequence: TGG
gctgatgtagatgctgggtt

SEQ ID NO: 118199 - DNA, 20 bp, Artificial Sequence
  Description of Artificial Sequence: Synthetic oligonucleotide
  Target: LAMA2; (-) strand; PAM type: NRG; PAM sequence: GGG
tgtcagctgatgtagatgct

SEQ ID NO: 118200 - DNA, 20 bp, Artificial Sequence
  Description of Artificial Sequence: Synthetic oligonucleotide
  Target: LAMA2; (-) strand; PAM type: NRG; PAM sequence: TGG
gtgtcagctgatgtagatgc

SEQ ID NO: 118201 - DNA, 20 bp, Artificial Sequence
  Description of Artificial Sequence: Synthetic oligonucleotide
  Target: LAMA2; (-) strand; PAM type: NRG; PAM sequence: TAG
gtcatttgtgtcagctgatg

SEQ ID NO: 118202 - DNA, 20 bp, Artificial Sequence
  Description of Artificial Sequence: Synthetic oligonucleotide
  Target: LAMA2; (-) strand; PAM type: NRG; PAM sequence: CAG
aaacacagggtcatttgtgt

SEQ ID NO: 118203 - DNA, 20 bp, Artificial Sequence
  Description of Artificial Sequence: Synthetic oligonucleotide
  Target: LAMA2; (-) strand; PAM type: NRG; PAM sequence: GGG
ggaagcctccaacaaacaca

SEQ ID NO: 118204 - DNA, 20 bp, Artificial Sequence
  Description of Artificial Sequence: Synthetic oligonucleotide
  Target: LAMA2; (-) strand; PAM type: NRG; PAM sequence: AGG
gggaagcctccaacaaacac

SEQ ID NO: 118205 - DNA, 20 bp, Artificial Sequence
  Description of Artificial Sequence: Synthetic oligonucleotide
  Target: LAMA2; (-) strand; PAM type: NRG; PAM sequence: CAG
tgggaagcctccaacaaaca

SEQ ID NO: 118206 - DNA, 20 bp, Artificial Sequence
  Description of Artificial Sequence: Synthetic oligonucleotide
  Target: LAMA2; (-) strand; PAM type: NRG; PAM sequence: AAG
gtagccaacactcacctggg

SEQ ID NO: 118207 - DNA, 20 bp, Artificial Sequence
  Description of Artificial Sequence: Synthetic oligonucleotide
  Target: LAMA2; (-) strand; PAM type: NRG; PAM sequence: GGG
ggggtagccaacactcacct

SEQ ID NO: 118208 - DNA, 20 bp, Artificial Sequence
  Description of Artificial Sequence: Synthetic oligonucleotide
  Target: LAMA2; (-) strand; PAM type: NRG; PAM sequence: TGG
tggggtagccaacactcacc

SEQ ID NO: 118209 - DNA, 20 bp, Artificial Sequence
  Description of Artificial Sequence: Synthetic oligonucleotide
  Target: LAMA2; (-) strand; PAM type: NRG; PAM sequence: TAG
caaagaaattgttgctgggg

SEQ ID NO: 118210 - DNA, 20 bp, Artificial Sequence
  Description of Artificial Sequence: Synthetic oligonucleotide
  Target: LAMA2; (-) strand; PAM type: NRG; PAM sequence: GGG
gagcaaagaaattgttgctg

SEQ ID NO: 118211 - DNA, 20 bp, Artificial Sequence
  Description of Artificial Sequence: Synthetic oligonucleotide
  Target: LAMA2; (-) strand; PAM type: NRG; PAM sequence: GGG
agagcaaagaaattgttgct

SEQ ID NO: 118212 - DNA, 20 bp, Artificial Sequence
  Description of Artificial Sequence: Synthetic oligonucleotide
  Target: LAMA2; (-) strand; PAM type: NRG; PAM sequence: TGG
gagagcaaagaaattgttgc

SEQ ID NO: 118213 - DNA, 20 bp, Artificial Sequence
  Description of Artificial Sequence: Synthetic oligonucleotide
  Target: LAMA2; (-) strand; PAM type: NRG; PAM sequence: AAG
accagtaacataagagagca

SEQ ID NO: 118214 - DNA, 20 bp, Artificial Sequence
  Description of Artificial Sequence: Synthetic oligonucleotide
  Target: LAMA2; (-) strand; PAM type: NRG; PAM sequence: GAG
tcaaaaccagtaacataaga

SEQ ID NO: 118215 - DNA, 20 bp, Artificial Sequence
  Description of Artificial Sequence: Synthetic oligonucleotide
  Target: LAMA2; (-) strand; PAM type: NRG; PAM sequence: GAG
tttcaaaaccagtaacataa

SEQ ID NO: 118216 - DNA, 20 bp, Artificial Sequence
  Description of Artificial Sequence: Synthetic oligonucleotide
  Target: LAMA2; (-) strand; PAM type: NRG; PAM sequence: AAG
gttttcaaaaccagtaacat

SEQ ID NO: 118217 - DNA, 20 bp, Artificial Sequence
  Description of Artificial Sequence: Synthetic oligonucleotide
  Target: LAMA2; (-) strand; PAM type: NRG; PAM sequence: CAG
aatataaatgttttcaaaac

SEQ ID NO: 118218 - DNA, 20 bp, Artificial Sequence
  Description of Artificial Sequence: Synthetic oligonucleotide
  Target: LAMA2; (-) strand; PAM type: NRG; PAM sequence: TAG
tacacataagcacacattct

SEQ ID NO: 118219 - DNA, 20 bp, Artificial Sequence
  Description of Artificial Sequence: Synthetic oligonucleotide
  Target: LAMA2; (-) strand; PAM type: NRG; PAM sequence: AAG
gctaggaagcaagtacacat

SEQ ID NO: 118220 - DNA, 20 bp, Artificial Sequence
  Description of Artificial Sequence: Synthetic oligonucleotide
  Target: LAMA2; (-) strand; PAM type: NRG; PAM sequence: AAG
agattctaaagctaggaagc

SEQ ID NO: 118221 - DNA, 20 bp, Artificial Sequence
  Description of Artificial Sequence: Synthetic oligonucleotide
  Target: LAMA2; (-) strand; PAM type: NRG; PAM sequence: AAG
aagcagattctaaagctagg

SEQ ID NO: 118222 - DNA, 20 bp, Artificial Sequence
  Description of Artificial Sequence: Synthetic oligonucleotide
  Target: LAMA2; (-) strand; PAM type: NRG; PAM sequence: AGG
tctaagcagattctaaagct

SEQ ID NO: 118223 - DNA, 20 bp, Artificial Sequence
  Description of Artificial Sequence: Synthetic oligonucleotide
  Target: LAMA2; (-) strand; PAM type: NRG; PAM sequence: TAG
ttctaagcagattctaaagc

SEQ ID NO: 118224 - DNA, 20 bp, Artificial Sequence
  Description of Artificial Sequence: Synthetic oligonucleotide
  Target: LAMA2; (-) strand; PAM type: NRG; PAM sequence: AAG
cagattctaagcagattcta

SEQ ID NO: 118225 - DNA, 20 bp, Artificial Sequence
  Description of Artificial Sequence: Synthetic oligonucleotide
  Target: LAMA2; (-) strand; PAM type: NRG; PAM sequence: CAG
ggtaaggtgcagattctaag

SEQ ID NO: 118226 - DNA, 20 bp, Artificial Sequence
  Description of Artificial Sequence: Synthetic oligonucleotide
  Target: LAMA2; (-) strand; PAM type: NRG; PAM sequence: AAG
ttaggtaaggtgcagattct

SEQ ID NO: 118227 - DNA, 20 bp, Artificial Sequence
  Description of Artificial Sequence: Synthetic oligonucleotide
  Target: LAMA2; (-) strand; PAM type: NRG; PAM sequence: CAG
tggaaattttaggtaaggtg

SEQ ID NO: 118228 - DNA, 20 bp, Artificial Sequence
  Description of Artificial Sequence: Synthetic oligonucleotide
  Target: LAMA2; (-) strand; PAM type: NRG; PAM sequence: AGG
cacactggaaattttaggta

SEQ ID NO: 118229 - DNA, 20 bp, Artificial Sequence
  Description of Artificial Sequence: Synthetic oligonucleotide
  Target: LAMA2; (-) strand; PAM type: NRG; PAM sequence: AAG
acacactggaaattttaggt

SEQ ID NO: 118230 - DNA, 20 bp, Artificial Sequence
  Description of Artificial Sequence: Synthetic oligonucleotide
  Target: LAMA2; (-) strand; PAM type: NRG; PAM sequence: AGG
ttttacacactggaaatttt

SEQ ID NO: 118231 - DNA, 20 bp, Artificial Sequence
  Description of Artificial Sequence: Synthetic oligonucleotide
  Target: LAMA2; (-) strand; PAM type: NRG; PAM sequence: TAG
attttacacactggaaattt

SEQ ID NO: 118232 - DNA, 20 bp, Artificial Sequence
  Description of Artificial Sequence: Synthetic oligonucleotide
  Target: LAMA2; (-) strand; PAM type: NRG; PAM sequence: TGG
aatatgttcattttacacac

SEQ ID NO: 118233 - DNA, 20 bp, Artificial Sequence
  Description of Artificial Sequence: Synthetic oligonucleotide
  Target: LAMA2; (-) strand; PAM type: NRG; PAM sequence: AAG
cagtcccatgtggtttatat

SEQ ID NO: 118234 - DNA, 20 bp, Artificial Sequence
  Description of Artificial Sequence: Synthetic oligonucleotide
  Target: LAMA2; (-) strand; PAM type: NRG; PAM sequence: TGG
atgaaaagttcagtcccatg

SEQ ID NO: 118235 - DNA, 20 bp, Artificial Sequence
  Description of Artificial Sequence: Synthetic oligonucleotide
  Target: LAMA2; (-) strand; PAM type: NRG; PAM sequence: CAG
gggggctctcatgaaaagtt

SEQ ID NO: 118236 - DNA, 20 bp, Artificial Sequence
  Description of Artificial Sequence: Synthetic oligonucleotide
  Target: LAMA2; (-) strand; PAM type: NRG; PAM sequence: AAG
actttgggggctctcatgaa

SEQ ID NO: 118237 - DNA, 20 bp, Artificial Sequence
  Description of Artificial Sequence: Synthetic oligonucleotide
  Target: LAMA2; (-) strand; PAM type: NRG; PAM sequence: GGG
ctccacgaaggaaactttgg

SEQ ID NO: 118238 - DNA, 20 bp, Artificial Sequence
  Description of Artificial Sequence: Synthetic oligonucleotide
  Target: LAMA2; (-) strand; PAM type: NRG; PAM sequence: GGG
tctccacgaaggaaactttg

SEQ ID NO: 118239 - DNA, 20 bp, Artificial Sequence
  Description of Artificial Sequence: Synthetic oligonucleotide
  Target: LAMA2; (-) strand; PAM type: NRG; PAM sequence: GGG
ctctccacgaaggaaacttt

SEQ ID NO: 118240 - DNA, 20 bp, Artificial Sequence
  Description of Artificial Sequence: Synthetic oligonucleotide
  Target: LAMA2; (-) strand; PAM type: NRG; PAM sequence: TGG
tctctccacgaaggaaactt

SEQ ID NO: 118241 - DNA, 20 bp, Artificial Sequence
  Description of Artificial Sequence: Synthetic oligonucleotide
  Target: LAMA2; (-) strand; PAM type: NRG; PAM sequence: AGG
cagcttcaatctctccacga

SEQ ID NO: 118242 - DNA, 20 bp, Artificial Sequence
  Description of Artificial Sequence: Synthetic oligonucleotide
  Target: LAMA2; (-) strand; PAM type: NRG; PAM sequence: AAG
ccagcttcaatctctccacg

SEQ ID NO: 118243 - DNA, 20 bp, Artificial Sequence
  Description of Artificial Sequence: Synthetic oligonucleotide
  Target: LAMA2; (-) strand; PAM type: NRG; PAM sequence: CAG
taagccaaattcatttcctc

SEQ ID NO: 118244 - DNA, 20 bp, Artificial Sequence
  Description of Artificial Sequence: Synthetic oligonucleotide
  Target: LAMA2; (-) strand; PAM type: NRG; PAM sequence: AAG
aaatgcctcatatcttttat

SEQ ID NO: 118245 - DNA, 20 bp, Artificial Sequence
  Description of Artificial Sequence: Synthetic oligonucleotide
  Target: LAMA2; (-) strand; PAM type: NRG; PAM sequence: TGG
atcagaaagaacaccaagtt

SEQ ID NO: 118246 - DNA, 20 bp, Artificial Sequence
  Description of Artificial Sequence: Synthetic oligonucleotide
  Target: LAMA2; (-) strand; PAM type: NRG; PAM sequence: AAG
aaaaaatcagaaagaacacc

SEQ ID NO: 118247 - DNA, 20 bp, Artificial Sequence
  Description of Artificial Sequence: Synthetic oligonucleotide
  Target: LAMA2; (-) strand; PAM type: NRG; PAM sequence: AAG
ttaattttaaaaaaatcaga

SEQ ID NO: 118248 - DNA, 20 bp, Artificial Sequence
  Description of Artificial Sequence: Synthetic oligonucleotide
  Target: LAMA2; (-) strand; PAM type: NRG; PAM sequence: CAG
tatattaattttaaaaaaat

SEQ ID NO: 118249 - DNA, 20 bp, Artificial Sequence
  Description of Artificial Sequence: Synthetic oligonucleotide
  Target: LAMA2; (-) strand; PAM type: NRG; PAM sequence: TGG
cattttatgattgattcctc

SEQ ID NO: 118250 - DNA, 20 bp, Artificial Sequence
  Description of Artificial Sequence: Synthetic oligonucleotide
  Target: LAMA2; (-) strand; PAM type: NRG; PAM sequence: AAG
tttccagaacttgaggaaat

SEQ ID NO: 118251 - DNA, 20 bp, Artificial Sequence
  Description of Artificial Sequence: Synthetic oligonucleotide
  Target: LAMA2; (-) strand; PAM type: NRG; PAM sequence: AGG
ccaatgatttccagaacttg

SEQ ID NO: 118252 - DNA, 20 bp, Artificial Sequence
  Description of Artificial Sequence: Synthetic oligonucleotide
  Target: LAMA2; (-) strand; PAM type: NRG; PAM sequence: GAG
cccaatgatttccagaactt

SEQ ID NO: 118253 - DNA, 20 bp, Artificial Sequence
  Description of Artificial Sequence: Synthetic oligonucleotide
  Target: LAMA2; (-) strand; PAM type: NRG; PAM sequence: CAG
atgtttaacccaatgatttc

SEQ ID NO: 118254 - DNA, 20 bp, Artificial Sequence
  Description of Artificial Sequence: Synthetic oligonucleotide
  Target: LAMA2; (-) strand; PAM type: NRG; PAM sequence: TAG
taataacataagggggaaat

SEQ ID NO: 118255 - DNA, 20 bp, Artificial Sequence
  Description of Artificial Sequence: Synthetic oligonucleotide
  Target: LAMA2; (-) strand; PAM type: NRG; PAM sequence: GGG
aactctataataacataagg

SEQ ID NO: 118256 - DNA, 20 bp, Artificial Sequence
  Description of Artificial Sequence: Synthetic oligonucleotide
  Target: LAMA2; (-) strand; PAM type: NRG; PAM sequence: GGG
aaactctataataacataag

SEQ ID NO: 118257 - DNA, 20 bp, Artificial Sequence
  Description of Artificial Sequence: Synthetic oligonucleotide
  Target: LAMA2; (-) strand; PAM type: NRG; PAM sequence: GGG
taaactctataataacataa

SEQ ID NO: 118258 - DNA, 20 bp, Artificial Sequence
  Description of Artificial Sequence: Synthetic oligonucleotide
  Target: LAMA2; (-) strand; PAM type: NRG; PAM sequence: AGG
ataaactctataataacata

SEQ ID NO: 118259 - DNA, 20 bp, Artificial Sequence
  Description of Artificial Sequence: Synthetic oligonucleotide
  Target: LAMA2; (-) strand; PAM type: NRG; PAM sequence: AAG
tataaactctataataacat

SEQ ID NO: 118260 - DNA, 20 bp, Artificial Sequence
  Description of Artificial Sequence: Synthetic oligonucleotide
  Target: LAMA2; (-) strand; PAM type: NRG; PAM sequence: AGG
ctagagaaggattctgaatg

SEQ ID NO: 118261 - DNA, 20 bp, Artificial Sequence
  Description of Artificial Sequence: Synthetic oligonucleotide
  Target: LAMA2; (-) strand; PAM type: NRG; PAM sequence: GAG
gctagagaaggattctgaat

SEQ ID NO: 118262 - DNA, 20 bp, Artificial Sequence
  Description of Artificial Sequence: Synthetic oligonucleotide
  Target: LAMA2; (-) strand; PAM type: NRG; PAM sequence: AGG
tatatttaatgtgctagaga

SEQ ID NO: 118263 - DNA, 20 bp, Artificial Sequence
  Description of Artificial Sequence: Synthetic oligonucleotide
  Target: LAMA2; (-) strand; PAM type: NRG; PAM sequence: AAG
ctatatttaatgtgctagag

SEQ ID NO: 118264 - DNA, 20 bp, Artificial Sequence
  Description of Artificial Sequence: Synthetic oligonucleotide
  Target: LAMA2; (-) strand; PAM type: NRG; PAM sequence: GAG
atgctatatttaatgtgcta

SEQ ID NO: 118265 - DNA, 20 bp, Artificial Sequence
  Description of Artificial Sequence: Synthetic oligonucleotide
  Target: LAMA2; (-) strand; PAM type: NRG; PAM sequence: TAG
acatgctatatttaatgtgc

SEQ ID NO: 118266 - DNA, 20 bp, Artificial Sequence
  Description of Artificial Sequence: Synthetic oligonucleotide
  Target: LAMA2; (-) strand; PAM type: NRG; PAM sequence: CAG
gcactttaggtaaatctcta

SEQ ID NO: 118267 - DNA, 20 bp, Artificial Sequence
  Description of Artificial Sequence: Synthetic oligonucleotide
  Target: LAMA2; (-) strand; PAM type: NRG; PAM sequence: AGG
ctcttgtttatgggcacttt

SEQ ID NO: 118268 - DNA, 20 bp, Artificial Sequence
  Description of Artificial Sequence: Synthetic oligonucleotide
  Target: LAMA2; (-) strand; PAM type: NRG; PAM sequence: TAG
actcttgtttatgggcactt

SEQ ID NO: 118269 - DNA, 20 bp, Artificial Sequence
  Description of Artificial Sequence: Synthetic oligonucleotide
  Target: LAMA2; (-) strand; PAM type: NRG; PAM sequence: GGG
agttggccactcttgtttat

SEQ ID NO: 118270 - DNA, 20 bp, Artificial Sequence
  Description of Artificial Sequence: Synthetic oligonucleotide
  Target: LAMA2; (-) strand; PAM type: NRG; PAM sequence: TGG
aagttggccactcttgttta

SEQ ID NO: 118271 - DNA, 20 bp, Artificial Sequence
  Description of Artificial Sequence: Synthetic oligonucleotide
  Target: LAMA2; (-) strand; PAM type: NRG; PAM sequence: TGG
tggcttacttctcatcaagt

SEQ ID NO: 118272 - DNA, 20 bp, Artificial Sequence
  Description of Artificial Sequence: Synthetic oligonucleotide
  Target: LAMA2; (-) strand; PAM type: NRG; PAM sequence: AAG
cacttggcttacttctcatc

SEQ ID NO: 118273 - DNA, 20 bp, Artificial Sequence
  Description of Artificial Sequence: Synthetic oligonucleotide
  Target: LAMA2; (-) strand; PAM type: NRG; PAM sequence: TGG
agtacttattaagaggcact

SEQ ID NO: 118274 - DNA, 20 bp, Artificial Sequence
  Description of Artificial Sequence: Synthetic oligonucleotide
  Target: LAMA2; (-) strand; PAM type: NRG; PAM sequence: AGG
ttattacagtacttattaag

SEQ ID NO: 118275 - DNA, 20 bp, Artificial Sequence
  Description of Artificial Sequence: Synthetic oligonucleotide
  Target: LAMA2; (-) strand; PAM type: NRG; PAM sequence: GAG
gttattacagtacttattaa

SEQ ID NO: 118276 - DNA, 20 bp, Artificial Sequence
  Description of Artificial Sequence: Synthetic oligonucleotide
  Target: LAMA2; (-) strand; PAM type: NRG; PAM sequence: AAG
atgttattacagtacttatt

SEQ ID NO: 118277 - DNA, 20 bp, Artificial Sequence
  Description of Artificial Sequence: Synthetic oligonucleotide
  Target: LAMA2; (-) strand; PAM type: NRG; PAM sequence: CAG
tccaggaggctatgttatta

SEQ ID NO: 118278 - DNA, 20 bp, Artificial Sequence
  Description of Artificial Sequence: Synthetic oligonucleotide
  Target: LAMA2; (-) strand; PAM type: NRG; PAM sequence: AGG
tgatgaaagaccattccagg

SEQ ID NO: 118279 - DNA, 20 bp, Artificial Sequence
  Description of Artificial Sequence: Synthetic oligonucleotide
  Target: LAMA2; (-) strand; PAM type: NRG; PAM sequence: GAG
atgatgaaagaccattccag

SEQ ID NO: 118280 - DNA, 20 bp, Artificial Sequence
  Description of Artificial Sequence: Synthetic oligonucleotide
  Target: LAMA2; (-) strand; PAM type: NRG; PAM sequence: AGG
aaatgatgaaagaccattcc

SEQ ID NO: 118281 - DNA, 20 bp, Artificial Sequence
  Description of Artificial Sequence: Synthetic oligonucleotide
  Target: LAMA2; (-) strand; PAM type: NRG; PAM sequence: CAG
aaaatgatgaaagaccattc

SEQ ID NO: 118282 - DNA, 20 bp, Artificial Sequence
  Description of Artificial Sequence: Synthetic oligonucleotide
  Target: LAMA2; (-) strand; PAM type: NRG; PAM sequence: AAG
tcctcttgacaaaatgatga

SEQ ID NO: 118283 - DNA, 20 bp, Artificial Sequence
  Description of Artificial Sequence: Synthetic oligonucleotide
  Target: LAMA2; (-) strand; PAM type: NRG; PAM sequence: AAG
ctttatataaacagggataa

SEQ ID NO: 118284 - DNA, 20 bp, Artificial Sequence
  Description of Artificial Sequence: Synthetic oligonucleotide
  Target: LAMA2; (-) strand; PAM type: NRG; PAM sequence: GGG
aaaggagctttatataaaca

SEQ ID NO: 118285 - DNA, 20 bp, Artificial Sequence
  Description of Artificial Sequence: Synthetic oligonucleotide
  Target: LAMA2; (-) strand; PAM type: NRG; PAM sequence: AGG
caaaggagctttatataaac

SEQ ID NO: 118286 - DNA, 20 bp, Artificial Sequence
  Description of Artificial Sequence: Synthetic oligonucleotide
  Target: LAMA2; (-) strand; PAM type: NRG; PAM sequence: CAG
gcaaaggagctttatataaa

SEQ ID NO: 118287 - DNA, 20 bp, Artificial Sequence
  Description of Artificial Sequence: Synthetic oligonucleotide
  Target: LAMA2; (-) strand; PAM type: NRG; PAM sequence: GAG
gcttgtttcatttagcaaag

SEQ ID NO: 118288 - DNA, 20 bp, Artificial Sequence
  Description of Artificial Sequence: Synthetic oligonucleotide
  Target: LAMA2; (-) strand; PAM type: NRG; PAM sequence: AGG
ttgcttgtttcatttagcaa

SEQ ID NO: 118289 - DNA, 20 bp, Artificial Sequence
  Description of Artificial Sequence: Synthetic oligonucleotide
  Target: LAMA2; (-) strand; PAM type: NRG; PAM sequence: AAG
tttgcttgtttcatttagca

SEQ ID NO: 118290 - DNA, 20 bp, Artificial Sequence
  Description of Artificial Sequence: Synthetic oligonucleotide
  Target: LAMA2; (-) strand; PAM type: NRG; PAM sequence: TAG
tacattttgcttgtttcatt

SEQ ID NO: 118291 - DNA, 20 bp, Artificial Sequence
  Description of Artificial Sequence: Synthetic oligonucleotide
  Target: LAMA2; (-) strand; PAM type: NRG; PAM sequence: GGG
tggaaagaggagctgtcgtt

SEQ ID NO: 118292 - DNA, 20 bp, Artificial Sequence
  Description of Artificial Sequence: Synthetic oligonucleotide
  Target: LAMA2; (-) strand; PAM type: NRG; PAM sequence: TGG
ttggaaagaggagctgtcgt

SEQ ID NO: 118293 - DNA, 20 bp, Artificial Sequence
  Description of Artificial Sequence: Synthetic oligonucleotide
  Target: LAMA2; (-) strand; PAM type: NRG; PAM sequence: GAG
agaagccactttggaaagag

SEQ ID NO: 118294 - DNA, 20 bp, Artificial Sequence
  Description of Artificial Sequence: Synthetic oligonucleotide
  Target: LAMA2; (-) strand; PAM type: NRG; PAM sequence: AGG
acagaagccactttggaaag

SEQ ID NO: 118295 - DNA, 20 bp, Artificial Sequence
  Description of Artificial Sequence: Synthetic oligonucleotide
  Target: LAMA2; (-) strand; PAM type: NRG; PAM sequence: GAG
cacagaagccactttggaaa

SEQ ID NO: 118296 - DNA, 20 bp, Artificial Sequence
  Description of Artificial Sequence: Synthetic oligonucleotide
  Target: LAMA2; (-) strand; PAM type: NRG; PAM sequence: AAG
aacacagaagccactttgga

SEQ ID NO: 118297 - DNA, 20 bp, Artificial Sequence
  Description of Artificial Sequence: Synthetic oligonucleotide
  Target: LAMA2; (-) strand; PAM type: NRG; PAM sequence: TGG
ttaaaacacagaagccactt

SEQ ID NO: 118298 - DNA, 20 bp, Artificial Sequence
  Description of Artificial Sequence: Synthetic oligonucleotide
  Target: LAMA2; (-) strand; PAM type: NRG; PAM sequence: AAG
aagatctttttaaaacacag

SEQ ID NO: 118299 - DNA, 20 bp, Artificial Sequence
  Description of Artificial Sequence: Synthetic oligonucleotide
  Target: LAMA2; (-) strand; PAM type: NRG; PAM sequence: CAG
caaaagatctttttaaaaca

SEQ ID NO: 118300 - DNA, 20 bp, Artificial Sequence
  Description of Artificial Sequence: Synthetic oligonucleotide
  Target: LAMA2; (-) strand; PAM type: NRG; PAM sequence: AAG
atttatcctgattgaagcaa

SEQ ID NO: 118301 - DNA, 20 bp, Artificial Sequence
  Description of Artificial Sequence: Synthetic oligonucleotide
  Target: LAMA2; (-) strand; PAM type: NRG; PAM sequence: AAG
cttggaatttatcctgattg

SEQ ID NO: 118302 - DNA, 20 bp, Artificial Sequence
  Description of Artificial Sequence: Synthetic oligonucleotide
  Target: LAMA2; (-) strand; PAM type: NRG; PAM sequence: TGG
ttacctccttcataatatct

SEQ ID NO: 118303 - DNA, 20 bp, Artificial Sequence
  Description of Artificial Sequence: Synthetic oligonucleotide
  Target: LAMA2; (-) strand; PAM type: NRG; PAM sequence: AAG
ttatcatagactgaatggag

SEQ ID NO: 118304 - DNA, 20 bp, Artificial Sequence
  Description of Artificial Sequence: Synthetic oligonucleotide
  Target: LAMA2; (-) strand; PAM type: NRG; PAM sequence: GAG
ccattatcatagactgaatg

SEQ ID NO: 118305 - DNA, 20 bp, Artificial Sequence
  Description of Artificial Sequence: Synthetic oligonucleotide
  Target: LAMA2; (-) strand; PAM type: NRG; PAM sequence: TGG
tcccattatcatagactgaa

SEQ ID NO: 118306 - DNA, 20 bp, Artificial Sequence
  Description of Artificial Sequence: Synthetic oligonucleotide
  Target: LAMA2; (-) strand; PAM type: NRG; PAM sequence: TAG
taattaggatcccattatca

SEQ ID NO: 118307 - DNA, 20 bp, Artificial Sequence
  Description of Artificial Sequence: Synthetic oligonucleotide
  Target: LAMA2; (-) strand; PAM type: NRG; PAM sequence: AGG
aggcctactaggtgttaatt

SEQ ID NO: 118308 - DNA, 20 bp, Artificial Sequence
  Description of Artificial Sequence: Synthetic oligonucleotide
  Target: LAMA2; (-) strand; PAM type: NRG; PAM sequence: TAG
taggcctactaggtgttaat

SEQ ID NO: 118309 - DNA, 20 bp, Artificial Sequence
  Description of Artificial Sequence: Synthetic oligonucleotide
  Target: LAMA2; (-) strand; PAM type: NRG; PAM sequence: AGG
cttgtttcagtaggcctact

SEQ ID NO: 118310 - DNA, 20 bp, Artificial Sequence
  Description of Artificial Sequence: Synthetic oligonucleotide
  Target: LAMA2; (-) strand; PAM type: NRG; PAM sequence: TAG
gcttgtttcagtaggcctac

SEQ ID NO: 118311 - DNA, 20 bp, Artificial Sequence
  Description of Artificial Sequence: Synthetic oligonucleotide
  Target: LAMA2; (-) strand; PAM type: NRG; PAM sequence: AGG
atagaggtgcttgtttcagt

SEQ ID NO: 118312 - DNA, 20 bp, Artificial Sequence
  Description of Artificial Sequence: Synthetic oligonucleotide
  Target: LAMA2; (-) strand; PAM type: NRG; PAM sequence: TAG
tatagaggtgcttgtttcag

SEQ ID NO: 118313 - DNA, 20 bp, Artificial Sequence
  Description of Artificial Sequence: Synthetic oligonucleotide
  Target: LAMA2; (-) strand; PAM type: NRG; PAM sequence: CAG
tattatagaggtgcttgttt

SEQ ID NO: 118314 - DNA, 20 bp, Artificial Sequence
  Description of Artificial Sequence: Synthetic oligonucleotide
  Target: LAMA2; (-) strand; PAM type: NRG; PAM sequence: AGG
gaatcttcctcttattatag

SEQ ID NO: 118315 - DNA, 20 bp, Artificial Sequence
  Description of Artificial Sequence: Synthetic oligonucleotide
  Target: LAMA2; (-) strand; PAM type: NRG; PAM sequence: GAG
agaatcttcctcttattata

SEQ ID NO: 118316 - DNA, 20 bp, Artificial Sequence
  Description of Artificial Sequence: Synthetic oligonucleotide
  Target: LAMA2; (-) strand; PAM type: NRG; PAM sequence: TAG
gtagaatcttcctcttatta

SEQ ID NO: 118317 - DNA, 20 bp, Artificial Sequence
  Description of Artificial Sequence: Synthetic oligonucleotide
  Target: LAMA2; (-) strand; PAM type: NRG; PAM sequence: TAG
aagtaggttggatattcatg

SEQ ID NO: 118318 - DNA, 20 bp, Artificial Sequence
  Description of Artificial Sequence: Synthetic oligonucleotide
  Target: LAMA2; (-) strand; PAM type: NRG; PAM sequence: TGG
tccctaaaggttaagtaggt

SEQ ID NO: 118319 - DNA, 20 bp, Artificial Sequence
  Description of Artificial Sequence: Synthetic oligonucleotide
  Target: LAMA2; (-) strand; PAM type: NRG; PAM sequence: AGG
taaatccctaaaggttaagt

SEQ ID NO: 118320 - DNA, 20 bp, Artificial Sequence
  Description of Artificial Sequence: Synthetic oligonucleotide
  Target: LAMA2; (-) strand; PAM type: NRG; PAM sequence: TAG
ataaatccctaaaggttaag

SEQ ID NO: 118321 - DNA, 20 bp, Artificial Sequence
  Description of Artificial Sequence: Synthetic oligonucleotide
  Target: LAMA2; (-) strand; PAM type: NRG; PAM sequence: AAG
aaaataaatccctaaaggtt

SEQ ID NO: 118322 - DNA, 20 bp, Artificial Sequence
  Description of Artificial Sequence: Synthetic oligonucleotide
  Target: LAMA2; (-) strand; PAM type: NRG; PAM sequence: AGG
ttgtaaaaataaatccctaa

SEQ ID NO: 118323 - DNA, 20 bp, Artificial Sequence
  Description of Artificial Sequence: Synthetic oligonucleotide
  Target: LAMA2; (-) strand; PAM type: NRG; PAM sequence: AAG
attgtaaaaataaatcccta

SEQ ID NO: 118324 - DNA, 20 bp, Artificial Sequence
  Description of Artificial Sequence: Synthetic oligonucleotide
  Target: LAMA2; (-) strand; PAM type: NRG; PAM sequence: AGG
acttacttagaactttttga

SEQ ID NO: 118325 - DNA, 20 bp, Artificial Sequence
  Description of Artificial Sequence: Synthetic oligonucleotide
  Target: LAMA2; (-) strand; PAM type: NRG; PAM sequence: AAG
gacttacttagaactttttg

SEQ ID NO: 118326 - DNA, 20 bp, Artificial Sequence
  Description of Artificial Sequence: Synthetic oligonucleotide
  Target: LAMA2; (-) strand; PAM type: NRG; PAM sequence: TAG
cttttaagtactgacttact

SEQ ID NO: 118327 - DNA, 20 bp, Artificial Sequence
  Description of Artificial Sequence: Synthetic oligonucleotide
  Target: LAMA2; (-) strand; PAM type: NRG; PAM sequence: AAG
gcaattgatcaaatactttt

SEQ ID NO: 118328 - DNA, 20 bp, Artificial Sequence
  Description of Artificial Sequence: Synthetic oligonucleotide
  Target: LAMA2; (-) strand; PAM type: NRG; PAM sequence: AAG
aaatgttacttcatgaaaca

SEQ ID NO: 118329 - DNA, 20 bp, Artificial Sequence
  Description of Artificial Sequence: Synthetic oligonucleotide
  Target: LAMA2; (-) strand; PAM type: NRG; PAM sequence: TAG
gtttgggatgaacaaattta

SEQ ID NO: 118330 - DNA, 20 bp, Artificial Sequence
  Description of Artificial Sequence: Synthetic oligonucleotide
  Target: LAMA2; (-) strand; PAM type: NRG; PAM sequence: GGG
gacatgaaataacttggttt

SEQ ID NO: 118331 - DNA, 20 bp, Artificial Sequence
  Description of Artificial Sequence: Synthetic oligonucleotide
  Target: LAMA2; (-) strand; PAM type: NRG; PAM sequence: TGG
agacatgaaataacttggtt

SEQ ID NO: 118332 - DNA, 20 bp, Artificial Sequence
  Description of Artificial Sequence: Synthetic oligonucleotide
  Target: LAMA2; (-) strand; PAM type: NRG; PAM sequence: TGG
tcttaagacatgaaataact

SEQ ID NO: 118333 - DNA, 20 bp, Artificial Sequence
  Description of Artificial Sequence: Synthetic oligonucleotide
  Target: LAMA2; (-) strand; PAM type: NRG; PAM sequence: AAG
catctagaattatacatctt

SEQ ID NO: 118334 - DNA, 20 bp, Artificial Sequence
  Description of Artificial Sequence: Synthetic oligonucleotide
  Target: LAMA2; (-) strand; PAM type: NRG; PAM sequence: TAG
ttataacatatgaaaacatc

SEQ ID NO: 118335 - DNA, 20 bp, Artificial Sequence
  Description of Artificial Sequence: Synthetic oligonucleotide
  Target: LAMA2; (-) strand; PAM type: NRG; PAM sequence: TAG
gtccagcctcaactttttaa

SEQ ID NO: 118336 - DNA, 20 bp, Artificial Sequence
  Description of Artificial Sequence: Synthetic oligonucleotide
  Target: LAMA2; (-) strand; PAM type: NRG; PAM sequence: CAG
caggcatgagccaccatgtc

SEQ ID NO: 118337 - DNA, 20 bp, Artificial Sequence
  Description of Artificial Sequence: Synthetic oligonucleotide
  Target: LAMA2; (-) strand; PAM type: NRG; PAM sequence: GAG
agtgttgggattacaggcat

SEQ ID NO: 118338 - DNA, 20 bp, Artificial Sequence
  Description of Artificial Sequence: Synthetic oligonucleotide
  Target: LAMA2; (-) strand; PAM type: NRG; PAM sequence: AGG
ttccaaagtgttgggattac

SEQ ID NO: 118339 - DNA, 20 bp, Artificial Sequence
  Description of Artificial Sequence: Synthetic oligonucleotide
  Target: LAMA2; (-) strand; PAM type: NRG; PAM sequence: CAG
attccaaagtgttgggatta

SEQ ID NO: 118340 - DNA, 20 bp, Artificial Sequence
  Description of Artificial Sequence: Synthetic oligonucleotide
  Target: LAMA2; (-) strand; PAM type: NRG; PAM sequence: GGG
aagtgtaattccaaagtgtt

SEQ ID NO: 118341 - DNA, 20 bp, Artificial Sequence
  Description of Artificial Sequence: Synthetic oligonucleotide
  Target: LAMA2; (-) strand; PAM type: NRG; PAM sequence: TGG
aaagtgtaattccaaagtgt

SEQ ID NO: 118342 - DNA, 20 bp, Artificial Sequence
  Description of Artificial Sequence: Synthetic oligonucleotide
  Target: LAMA2; (-) strand; PAM type: NRG; PAM sequence: AAG
atgcccaaagtgtaattcca

SEQ ID NO: 118343 - DNA, 20 bp, Artificial Sequence
  Description of Artificial Sequence: Synthetic oligonucleotide
  Target: LAMA2; (-) strand; PAM type: NRG; PAM sequence: AAG
gatctccccatctatgccca

SEQ ID NO: 118344 - DNA, 20 bp, Artificial Sequence
  Description of Artificial Sequence: Synthetic oligonucleotide
  Target: LAMA2; (-) strand; PAM type: NRG; PAM sequence: GAG
tctccaactcctgggctcaa

SEQ ID NO: 118345 - DNA, 20 bp, Artificial Sequence
  Description of Artificial Sequence: Synthetic oligonucleotide
  Target: LAMA2; (-) strand; PAM type: NRG; PAM sequence: AAG
gctctccaactcctgggctc

SEQ ID NO: 118346 - DNA, 20 bp, Artificial Sequence
  Description of Artificial Sequence: Synthetic oligonucleotide
  Target: LAMA2; (-) strand; PAM type: NRG; PAM sequence: GGG
caggctgctctccaactcct

SEQ ID NO: 118347 - DNA, 20 bp, Artificial Sequence
  Description of Artificial Sequence: Synthetic oligonucleotide
  Target: LAMA2; (-) strand; PAM type: NRG; PAM sequence: TGG
ccaggctgctctccaactcc

SEQ ID NO: 118348 - DNA, 20 bp, Artificial Sequence
  Description of Artificial Sequence: Synthetic oligonucleotide
  Target: LAMA2; (-) strand; PAM type: NRG; PAM sequence: AGG
ctcccttcgccgtgttgccc

SEQ ID NO: 118349 - DNA, 20 bp, Artificial Sequence
  Description of Artificial Sequence: Synthetic oligonucleotide
  Target: LAMA2; (-) strand; PAM type: NRG; PAM sequence: CAG
cctcccttcgccgtgttgcc

SEQ ID NO: 118350 - DNA, 20 bp, Artificial Sequence
  Description of Artificial Sequence: Synthetic oligonucleotide
  Target: LAMA2; (-) strand; PAM type: NRG; PAM sequence: AAG
agcctcaacctcctgggctc

SEQ ID NO: 118351 - DNA, 20 bp, Artificial Sequence
  Description of Artificial Sequence: Synthetic oligonucleotide
  Target: LAMA2; (-) strand; PAM type: NRG; PAM sequence: GGG
tactgcagcctcaacctcct

SEQ ID NO: 118352 - DNA, 20 bp, Artificial Sequence
  Description of Artificial Sequence: Synthetic oligonucleotide
  Target: LAMA2; (-) strand; PAM type: NRG; PAM sequence: TGG
ttactgcagcctcaacctcc

SEQ ID NO: 118353 - DNA, 20 bp, Artificial Sequence
  Description of Artificial Sequence: Synthetic oligonucleotide
  Target: LAMA2; (-) strand; PAM type: NRG; PAM sequence: CAG
ggcgcaatcaaggcttactg

SEQ ID NO: 118354 - DNA, 20 bp, Artificial Sequence
  Description of Artificial Sequence: Synthetic oligonucleotide
  Target: LAMA2; (-) strand; PAM type: NRG; PAM sequence: AGG
ggagtgcaatggcgcaatca

SEQ ID NO: 118355 - DNA, 20 bp, Artificial Sequence
  Description of Artificial Sequence: Synthetic oligonucleotide
  Target: LAMA2; (-) strand; PAM type: NRG; PAM sequence: AAG
tggagtgcaatggcgcaatc

SEQ ID NO: 118356 - DNA, 20 bp, Artificial Sequence
  Description of Artificial Sequence: Synthetic oligonucleotide
  Target: LAMA2; (-) strand; PAM type: NRG; PAM sequence: TGG
ttgcccaggctggagtgcaa

SEQ ID NO: 118357 - DNA, 20 bp, Artificial Sequence
  Description of Artificial Sequence: Synthetic oligonucleotide
  Target: LAMA2; (-) strand; PAM type: NRG; PAM sequence: GAG
ttgctctgttgcccaggctg

SEQ ID NO: 118358 - DNA, 20 bp, Artificial Sequence
  Description of Artificial Sequence: Synthetic oligonucleotide
  Target: LAMA2; (-) strand; PAM type: NRG; PAM sequence: TGG
tcttgctctgttgcccaggc

SEQ ID NO: 118359 - DNA, 20 bp, Artificial Sequence
  Description of Artificial Sequence: Synthetic oligonucleotide
  Target: LAMA2; (-) strand; PAM type: NRG; PAM sequence: AGG
aggttcttgctctgttgccc

SEQ ID NO: 118360 - DNA, 20 bp, Artificial Sequence
  Description of Artificial Sequence: Synthetic oligonucleotide
  Target: LAMA2; (-) strand; PAM type: NRG; PAM sequence: CAG
caggttcttgctctgttgcc

SEQ ID NO: 118361 - DNA, 20 bp, Artificial Sequence
  Description of Artificial Sequence: Synthetic oligonucleotide
  Target: LAMA2; (-) strand; PAM type: NRG; PAM sequence: AGG
aacttaaaattttttgagac

SEQ ID NO: 118362 - DNA, 20 bp, Artificial Sequence
  Description of Artificial Sequence: Synthetic oligonucleotide
  Target: LAMA2; (-) strand; PAM type: NRG; PAM sequence: CAG
caacttaaaattttttgaga

SEQ ID NO: 118363 - DNA, 20 bp, Artificial Sequence
  Description of Artificial Sequence: Synthetic oligonucleotide
  Target: LAMA2; (-) strand; PAM type: NRG; PAM sequence: GAG
agatcaacttaaaatttttt

SEQ ID NO: 118364 - DNA, 20 bp, Artificial Sequence
  Description of Artificial Sequence: Synthetic oligonucleotide
  Target: LAMA2; (-) strand; PAM type: NRG; PAM sequence: AAG
aatagaattgtagagaaaga

SEQ ID NO: 118365 - DNA, 20 bp, Artificial Sequence
  Description of Artificial Sequence: Synthetic oligonucleotide
  Target: LAMA2; (-) strand; PAM type: NRG; PAM sequence: AAG
tactaatagaattgtagaga

SEQ ID NO: 118366 - DNA, 20 bp, Artificial Sequence
  Description of Artificial Sequence: Synthetic oligonucleotide
  Target: LAMA2; (-) strand; PAM type: NRG; PAM sequence: GAG
gccttactaatagaattgta

SEQ ID NO: 118367 - DNA, 20 bp, Artificial Sequence
  Description of Artificial Sequence: Synthetic oligonucleotide
  Target: LAMA2; (-) strand; PAM type: NRG; PAM sequence: TAG
tagccttactaatagaattg

SEQ ID NO: 118368 - DNA, 20 bp, Artificial Sequence
  Description of Artificial Sequence: Synthetic oligonucleotide
  Target: LAMA2; (-) strand; PAM type: NRG; PAM sequence: TAG
tttgtttttagccttactaa

SEQ ID NO: 118369 - DNA, 20 bp, Artificial Sequence
  Description of Artificial Sequence: Synthetic oligonucleotide
  Target: LAMA2; (-) strand; PAM type: NRG; PAM sequence: TAG
aaagttagtggttttgtttt

SEQ ID NO: 118370 - DNA, 20 bp, Artificial Sequence
  Description of Artificial Sequence: Synthetic oligonucleotide
  Target: LAMA2; (-) strand; PAM type: NRG; PAM sequence: TGG
gctgttttatgcaaagttag

SEQ ID NO: 118371 - DNA, 20 bp, Artificial Sequence
  Description of Artificial Sequence: Synthetic oligonucleotide
  Target: LAMA2; (-) strand; PAM type: NRG; PAM sequence: TAG
aatgctgttttatgcaaagt

SEQ ID NO: 118372 - DNA, 20 bp, Artificial Sequence
  Description of Artificial Sequence: Synthetic oligonucleotide
  Target: LAMA2; (-) strand; PAM type: NRG; PAM sequence: AAG
ttggaatgctgttttatgca

SEQ ID NO: 118373 - DNA, 20 bp, Artificial Sequence
  Description of Artificial Sequence: Synthetic oligonucleotide
  Target: LAMA2; (-) strand; PAM type: NRG; PAM sequence: TGG
ctgttagcttgagattaaat

SEQ ID NO: 118374 - DNA, 20 bp, Artificial Sequence
  Description of Artificial Sequence: Synthetic oligonucleotide
  Target: LAMA2; (-) strand; PAM type: NRG; PAM sequence: GAG
tcaaagtcaactgttagctt

SEQ ID NO: 118375 - DNA, 20 bp, Artificial Sequence
  Description of Artificial Sequence: Synthetic oligonucleotide
  Target: LAMA2; (-) strand; PAM type: NRG; PAM sequence: TAG
catgtttcaaagtcaactgt

SEQ ID NO: 118376 - DNA, 20 bp, Artificial Sequence
  Description of Artificial Sequence: Synthetic oligonucleotide
  Target: LAMA2; (-) strand; PAM type: NRG; PAM sequence: AAG
aatattaagagcatgtttca

SEQ ID NO: 118377 - DNA, 20 bp, Artificial Sequence
  Description of Artificial Sequence: Synthetic oligonucleotide
  Target: LAMA2; (-) strand; PAM type: NRG; PAM sequence: GAG
tgtcctgcaccaaatattaa

SEQ ID NO: 118378 - DNA, 20 bp, Artificial Sequence
  Description of Artificial Sequence: Synthetic oligonucleotide
  Target: LAMA2; (-) strand; PAM type: NRG; PAM sequence: AAG
aatgtcctgcaccaaatatt

SEQ ID NO: 118379 - DNA, 20 bp, Artificial Sequence
  Description of Artificial Sequence: Synthetic oligonucleotide
  Target: LAMA2; (-) strand; PAM type: NRG; PAM sequence: CAG
aaaggcaatgcaagagggct

SEQ ID NO: 118380 - DNA, 20 bp, Artificial Sequence
  Description of Artificial Sequence: Synthetic oligonucleotide
  Target: LAMA2; (-) strand; PAM type: NRG; PAM sequence: GGG
ctgaaaaaggcaatgcaaga

SEQ ID NO: 118381 - DNA, 20 bp, Artificial Sequence
  Description of Artificial Sequence: Synthetic oligonucleotide
  Target: LAMA2; (-) strand; PAM type: NRG; PAM sequence: AGG
tctgaaaaaggcaatgcaag

SEQ ID NO: 118382 - DNA, 20 bp, Artificial Sequence
  Description of Artificial Sequence: Synthetic oligonucleotide
  Target: LAMA2; (-) strand; PAM type: NRG; PAM sequence: GAG
atctgaaaaaggcaatgcaa

SEQ ID NO: 118383 - DNA, 20 bp, Artificial Sequence
  Description of Artificial Sequence: Synthetic oligonucleotide
  Target: LAMA2; (-) strand; PAM type: NRG; PAM sequence: AAG
tcatctgaaaaaggcaatgc

SEQ ID NO: 118384 - DNA, 20 bp, Artificial Sequence
  Description of Artificial Sequence: Synthetic oligonucleotide
  Target: LAMA2; (-) strand; PAM type: NRG; PAM sequence: AGG
tgcttgaggtcatctgaaaa

SEQ ID NO: 118385 - DNA, 20 bp, Artificial Sequence
  Description of Artificial Sequence: Synthetic oligonucleotide
  Target: LAMA2; (-) strand; PAM type: NRG; PAM sequence: AAG
ctgcttgaggtcatctgaaa

SEQ ID NO: 118386 - DNA, 20 bp, Artificial Sequence
  Description of Artificial Sequence: Synthetic oligonucleotide
  Target: LAMA2; (-) strand; PAM type: NRG; PAM sequence: AGG
ttgttaggccaaactgcttg

SEQ ID NO: 118387 - DNA, 20 bp, Artificial Sequence
  Description of Artificial Sequence: Synthetic oligonucleotide
  Target: LAMA2; (-) strand; PAM type: NRG; PAM sequence: GAG
gttgttaggccaaactgctt

SEQ ID NO: 118388 - DNA, 20 bp, Artificial Sequence
  Description of Artificial Sequence: Synthetic oligonucleotide
  Target: LAMA2; (-) strand; PAM type: NRG; PAM sequence: AGG
ggaacggaatactggttgtt

SEQ ID NO: 118389 - DNA, 20 bp, Artificial Sequence
  Description of Artificial Sequence: Synthetic oligonucleotide
  Target: LAMA2; (-) strand; PAM type: NRG; PAM sequence: TAG
cggaacggaatactggttgt

SEQ ID NO: 118390 - DNA, 20 bp, Artificial Sequence
  Description of Artificial Sequence: Synthetic oligonucleotide
  Target: LAMA2; (-) strand; PAM type: NRG; PAM sequence: TGG
gcaacctcggaacggaatac

SEQ ID NO: 118391 - DNA, 20 bp, Artificial Sequence
  Description of Artificial Sequence: Synthetic oligonucleotide
  Target: LAMA2; (-) strand; PAM type: NRG; PAM sequence: CGG
gatctgatgcaacctcggaa

SEQ ID NO: 118392 - DNA, 20 bp, Artificial Sequence
  Description of Artificial Sequence: Synthetic oligonucleotide
  Target: LAMA2; (-) strand; PAM type: NRG; PAM sequence: CGG
tcagggatctgatgcaacct

SEQ ID NO: 118393 - DNA, 20 bp, Artificial Sequence
  Description of Artificial Sequence: Synthetic oligonucleotide
  Target: LAMA2; (-) strand; PAM type: NRG; PAM sequence: GGG
tgtgcctttggtgagcttca

SEQ ID NO: 118394 - DNA, 20 bp, Artificial Sequence
  Description of Artificial Sequence: Synthetic oligonucleotide
  Target: LAMA2; (-) strand; PAM type: NRG; PAM sequence: AGG
ctgtgcctttggtgagcttc

SEQ ID NO: 118395 - DNA, 20 bp, Artificial Sequence
  Description of Artificial Sequence: Synthetic oligonucleotide
  Target: LAMA2; (-) strand; PAM type: NRG; PAM sequence: CAG
cctgtgcctttggtgagctt

SEQ ID NO: 118396 - DNA, 20 bp, Artificial Sequence
  Description of Artificial Sequence: Synthetic oligonucleotide
  Target: LAMA2; (-) strand; PAM type: NRG; PAM sequence: GAG
ggcttgcctgtgcctttggt

SEQ ID NO: 118397 - DNA, 20 bp, Artificial Sequence
  Description of Artificial Sequence: Synthetic oligonucleotide
  Target: LAMA2; (-) strand; PAM type: NRG; PAM sequence: TGG
cagtggcttgcctgtgcctt

SEQ ID NO: 118398 - DNA, 20 bp, Artificial Sequence
  Description of Artificial Sequence: Synthetic oligonucleotide
  Target: LAMA2; (-) strand; PAM type: NRG; PAM sequence: TGG
ttggcaaaattaacctccag

SEQ ID NO: 118399 - DNA, 20 bp, Artificial Sequence
  Description of Artificial Sequence: Synthetic oligonucleotide
  Target: LAMA2; (-) strand; PAM type: NRG; PAM sequence: CAG
gccttggcaaaattaacctc

SEQ ID NO: 118400 - DNA, 20 bp, Artificial Sequence
  Description of Artificial Sequence: Synthetic oligonucleotide
  Target: LAMA2; (-) strand; PAM type: NRG; PAM sequence: TGG
gcccctcagttccagggcct

SEQ ID NO: 118401 - DNA, 20 bp, Artificial Sequence
  Description of Artificial Sequence: Synthetic oligonucleotide
  Target: LAMA2; (-) strand; PAM type: NRG; PAM sequence: GGG
ttgaacgcccctcagttcca

SEQ ID NO: 118402 - DNA, 20 bp, Artificial Sequence
  Description of Artificial Sequence: Synthetic oligonucleotide
  Target: LAMA2; (-) strand; PAM type: NRG; PAM sequence: AGG
gttgaacgcccctcagttcc

SEQ ID NO: 118403 - DNA, 20 bp, Artificial Sequence
  Description of Artificial Sequence: Synthetic oligonucleotide
  Target: LAMA2; (-) strand; PAM type: NRG; PAM sequence: CAG
ggttgaacgcccctcagttc

SEQ ID NO: 118404 - DNA, 20 bp, Artificial Sequence
  Description of Artificial Sequence: Synthetic oligonucleotide
  Target: LAMA2; (-) strand; PAM type: NRG; PAM sequence: CAG
gatacaggttgaacgcccct

SEQ ID NO: 118405 - DNA, 20 bp, Artificial Sequence
  Description of Artificial Sequence: Synthetic oligonucleotide
  Target: LAMA2; (-) strand; PAM type: NRG; PAM sequence: AGG
tagttggctgggcatgatac

SEQ ID NO: 118406 - DNA, 20 bp, Artificial Sequence
  Description of Artificial Sequence: Synthetic oligonucleotide
  Target: LAMA2; (-) strand; PAM type: NRG; PAM sequence: CAG
ttagttggctgggcatgata

SEQ ID NO: 118407 - DNA, 20 bp, Artificial Sequence
  Description of Artificial Sequence: Synthetic oligonucleotide
  Target: LAMA2; (-) strand; PAM type: NRG; PAM sequence: GGG
cttatttttattagttggct

SEQ ID NO: 118408 - DNA, 20 bp, Artificial Sequence
  Description of Artificial Sequence: Synthetic oligonucleotide
  Target: LAMA2; (-) strand; PAM type: NRG; PAM sequence: TGG
acttatttttattagttggc

SEQ ID NO: 118409 - DNA, 20 bp, Artificial Sequence
  Description of Artificial Sequence: Synthetic oligonucleotide
  Target: LAMA2; (-) strand; PAM type: NRG; PAM sequence: TGG
ttacacttatttttattagt

SEQ ID NO: 118410 - DNA, 20 bp, Artificial Sequence
  Description of Artificial Sequence: Synthetic oligonucleotide
  Target: LAMA2; (-) strand; PAM type: NRG; PAM sequence: TAG
ggggttacacttatttttat

SEQ ID NO: 118411 - DNA, 20 bp, Artificial Sequence
  Description of Artificial Sequence: Synthetic oligonucleotide
  Target: LAMA2; (-) strand; PAM type: NRG; PAM sequence: GGG
gttttgacagactcttcctg

SEQ ID NO: 118412 - DNA, 20 bp, Artificial Sequence
  Description of Artificial Sequence: Synthetic oligonucleotide
  Target: LAMA2; (-) strand; PAM type: NRG; PAM sequence: GGG
tgttttgacagactcttcct

SEQ ID NO: 118413 - DNA, 20 bp, Artificial Sequence
  Description of Artificial Sequence: Synthetic oligonucleotide
  Target: LAMA2; (-) strand; PAM type: NRG; PAM sequence: TGG
ttgttttgacagactcttcc

SEQ ID NO: 118414 - DNA, 20 bp, Artificial Sequence
  Description of Artificial Sequence: Synthetic oligonucleotide
  Target: LAMA2; (-) strand; PAM type: NRG; PAM sequence: CAG
acttgatatacttgttttga

SEQ ID NO: 118415 - DNA, 20 bp, Artificial Sequence
  Description of Artificial Sequence: Synthetic oligonucleotide
  Target: LAMA2; (-) strand; PAM type: NRG; PAM sequence: AGG
ttagtttaattaacatatat

SEQ ID NO: 118416 - DNA, 20 bp, Artificial Sequence
  Description of Artificial Sequence: Synthetic oligonucleotide
  Target: LAMA2; (-) strand; PAM type: NRG; PAM sequence: TAG
attagtttaattaacatata

SEQ ID NO: 118417 - DNA, 20 bp, Artificial Sequence
  Description of Artificial Sequence: Synthetic oligonucleotide
  Target: LAMA2; (-) strand; PAM type: NRG; PAM sequence: TAG
ttctatgtacatgcacaaat

SEQ ID NO: 118418 - DNA, 20 bp, Artificial Sequence
  Description of Artificial Sequence: Synthetic oligonucleotide
  Target: LAMA2; (-) strand; PAM type: NRG; PAM sequence: AAG
tagcaccatctgaatacaga

SEQ ID NO: 118419 - DNA, 20 bp, Artificial Sequence
  Description of Artificial Sequence: Synthetic oligonucleotide
  Target: LAMA2; (-) strand; PAM type: NRG; PAM sequence: CAG
gaattagcaccatctgaata

SEQ ID NO: 118420 - DNA, 20 bp, Artificial Sequence
  Description of Artificial Sequence: Synthetic oligonucleotide
  Target: LAMA2; (-) strand; PAM type: NRG; PAM sequence: TAG
attcagtctggagtctgaat

SEQ ID NO: 118421 - DNA, 20 bp, Artificial Sequence
  Description of Artificial Sequence: Synthetic oligonucleotide
  Target: LAMA2; (-) strand; PAM type: NRG; PAM sequence: GAG
ttgaattaaaattcagtctg

SEQ ID NO: 118422 - DNA, 20 bp, Artificial Sequence
  Description of Artificial Sequence: Synthetic oligonucleotide
  Target: LAMA2; (-) strand; PAM type: NRG; PAM sequence: TGG
acttgaattaaaattcagtc

SEQ ID NO: 118423 - DNA, 20 bp, Artificial Sequence
  Description of Artificial Sequence: Synthetic oligonucleotide
  Target: LAMA2; (-) strand; PAM type: NRG; PAM sequence: CAG
aaagaacttgaattaaaatt

SEQ ID NO: 118424 - DNA, 20 bp, Artificial Sequence
  Description of Artificial Sequence: Synthetic oligonucleotide
  Target: LAMA2; (-) strand; PAM type: NRG; PAM sequence: AAG
tattatttatagacttgaga

SEQ ID NO: 118425 - DNA, 20 bp, Artificial Sequence
  Description of Artificial Sequence: Synthetic oligonucleotide
  Target: LAMA2; (-) strand; PAM type: NRG; PAM sequence: GAG
ttaatattatttatagactt

SEQ ID NO: 118426 - DNA, 20 bp, Artificial Sequence
  Description of Artificial Sequence: Synthetic oligonucleotide
  Target: LAMA2; (-) strand; PAM type: NRG; PAM sequence: TAG
aatcagtttaatattattta

SEQ ID NO: 118427 - DNA, 20 bp, Artificial Sequence
  Description of Artificial Sequence: Synthetic oligonucleotide
  Target: LAMA2; (-) strand; PAM type: NRG; PAM sequence: CAG
attatttagaatgaaataat

SEQ ID NO: 118428 - DNA, 20 bp, Artificial Sequence
  Description of Artificial Sequence: Synthetic oligonucleotide
  Target: LAMA2; (-) strand; PAM type: NRG; PAM sequence: TAG
acacaaaacaggcaattatt

SEQ ID NO: 118429 - DNA, 20 bp, Artificial Sequence
  Description of Artificial Sequence: Synthetic oligonucleotide
  Target: LAMA2; (-) strand; PAM type: NRG; PAM sequence: AGG
tccttaaaatcacacaaaac

SEQ ID NO: 118430 - DNA, 20 bp, Artificial Sequence
  Description of Artificial Sequence: Synthetic oligonucleotide
  Target: LAMA2; (-) strand; PAM type: NRG; PAM sequence: CAG
atccttaaaatcacacaaaa

SEQ ID NO: 118431 - DNA, 20 bp, Artificial Sequence
  Description of Artificial Sequence: Synthetic oligonucleotide
  Target: LAMA2; (-) strand; PAM type: NRG; PAM sequence: CAG
caaactcaacaatttatggc

SEQ ID NO: 118432 - DNA, 20 bp, Artificial Sequence
  Description of Artificial Sequence: Synthetic oligonucleotide
  Target: LAMA2; (-) strand; PAM type: NRG; PAM sequence: TGG
gttgcaaactcaacaattta

SEQ ID NO: 118433 - DNA, 20 bp, Artificial Sequence
  Description of Artificial Sequence: Synthetic oligonucleotide
  Target: LAMA2; (-) strand; PAM type: NRG; PAM sequence: GGG
ctttccttgagatgactgga

SEQ ID NO: 118434 - DNA, 20 bp, Artificial Sequence
  Description of Artificial Sequence: Synthetic oligonucleotide
  Target: LAMA2; (-) strand; PAM type: NRG; PAM sequence: AGG
tctttccttgagatgactgg

SEQ ID NO: 118435 - DNA, 20 bp, Artificial Sequence
  Description of Artificial Sequence: Synthetic oligonucleotide
  Target: LAMA2; (-) strand; PAM type: NRG; PAM sequence: GAG
ctctttccttgagatgactg

SEQ ID NO: 118436 - DNA, 20 bp, Artificial Sequence
  Description of Artificial Sequence: Synthetic oligonucleotide
  Target: LAMA2; (-) strand; PAM type: NRG; PAM sequence: TGG
aactctttccttgagatgac

SEQ ID NO: 118437 - DNA, 20 bp, Artificial Sequence
  Description of Artificial Sequence: Synthetic oligonucleotide
  Target: LAMA2; (-) strand; PAM type: NRG; PAM sequence: GAG
tacatctgaactctttcctt

SEQ ID NO: 118438 - DNA, 20 bp, Artificial Sequence
  Description of Artificial Sequence: Synthetic oligonucleotide
  Target: LAMA2; (-) strand; PAM type: NRG; PAM sequence: AAG
gaagaagtattgataggaat

SEQ ID NO: 118439 - DNA, 20 bp, Artificial Sequence
  Description of Artificial Sequence: Synthetic oligonucleotide
  Target: LAMA2; (-) strand; PAM type: NRG; PAM sequence: AGG
aagaaagaagaagtattgat

SEQ ID NO: 118440 - DNA, 20 bp, Artificial Sequence
  Description of Artificial Sequence: Synthetic oligonucleotide
  Target: LAMA2; (-) strand; PAM type: NRG; PAM sequence: TAG
aaagaaagaagaagtattga

SEQ ID NO: 118441 - DNA, 20 bp, Artificial Sequence
  Description of Artificial Sequence: Synthetic oligonucleotide
  Target: LAMA2; (-) strand; PAM type: NRG; PAM sequence: AAG
aggatgataaaagaaagaag

SEQ ID NO: 118442 - DNA, 20 bp, Artificial Sequence
  Description of Artificial Sequence: Synthetic oligonucleotide
  Target: LAMA2; (-) strand; PAM type: NRG; PAM sequence: AAG
taaaggatgataaaagaaag

SEQ ID NO: 118443 - DNA, 20 bp, Artificial Sequence
  Description of Artificial Sequence: Synthetic oligonucleotide
  Target: LAMA2; (-) strand; PAM type: NRG; PAM sequence: AAG
tggtaaaggatgataaaaga

SEQ ID NO: 118444 - DNA, 20 bp, Artificial Sequence
  Description of Artificial Sequence: Synthetic oligonucleotide
  Target: LAMA2; (-) strand; PAM type: NRG; PAM sequence: AAG
tacatggtaaaggatgataa

SEQ ID NO: 118445 - DNA, 20 bp, Artificial Sequence
  Description of Artificial Sequence: Synthetic oligonucleotide
  Target: LAMA2; (-) strand; PAM type: NRG; PAM sequence: AGG
aaagctgtcatacatggtaa

SEQ ID NO: 118446 - DNA, 20 bp, Artificial Sequence
  Description of Artificial Sequence: Synthetic oligonucleotide
  Target: LAMA2; (-) strand; PAM type: NRG; PAM sequence: AAG
caaagctgtcatacatggta

SEQ ID NO: 118447 - DNA, 20 bp, Artificial Sequence
  Description of Artificial Sequence: Synthetic oligonucleotide
  Target: LAMA2; (-) strand; PAM type: NRG; PAM sequence: TGG
aaggccaaagctgtcataca

SEQ ID NO: 118448 - DNA, 20 bp, Artificial Sequence
  Description of Artificial Sequence: Synthetic oligonucleotide
  Target: LAMA2; (-) strand; PAM type: NRG; PAM sequence: AAG
gtggcttggacagaaggcca

SEQ ID NO: 118449 - DNA, 20 bp, Artificial Sequence
  Description of Artificial Sequence: Synthetic oligonucleotide
  Target: LAMA2; (-) strand; PAM type: NRG; PAM sequence: AGG
ctgtcagtggcttggacaga

SEQ ID NO: 118450 - DNA, 20 bp, Artificial Sequence
  Description of Artificial Sequence: Synthetic oligonucleotide
  Target: LAMA2; (-) strand; PAM type: NRG; PAM sequence: AAG
gctgtcagtggcttggacag

SEQ ID NO: 118451 - DNA, 20 bp, Artificial Sequence
  Description of Artificial Sequence: Synthetic oligonucleotide
  Target: LAMA2; (-) strand; PAM type: NRG; PAM sequence: CAG
cttgctgtcagtggcttgga

SEQ ID NO: 118452 - DNA, 20 bp, Artificial Sequence
  Description of Artificial Sequence: Synthetic oligonucleotide
  Target: LAMA2; (-) strand; PAM type: NRG; PAM sequence: TGG
ttcacttgctgtcagtggct

SEQ ID NO: 118453 - DNA, 20 bp, Artificial Sequence
  Description of Artificial Sequence: Synthetic oligonucleotide
  Target: LAMA2; (-) strand; PAM type: NRG; PAM sequence: TGG
ccaaattcacttgctgtcag

SEQ ID NO: 118454 - DNA, 20 bp, Artificial Sequence
  Description of Artificial Sequence: Synthetic oligonucleotide
  Target: LAMA2; (-) strand; PAM type: NRG; PAM sequence: CAG
atgccaaattcacttgctgt

SEQ ID NO: 118455 - DNA, 20 bp, Artificial Sequence
  Description of Artificial Sequence: Synthetic oligonucleotide
  Target: LAMA2; (-) strand; PAM type: NRG; PAM sequence: GGG
ttctttcataaatagagtaa

SEQ ID NO: 118456 - DNA, 20 bp, Artificial Sequence
  Description of Artificial Sequence: Synthetic oligonucleotide
  Target: LAMA2; (-) strand; PAM type: NRG; PAM sequence: AGG
attctttcataaatagagta

SEQ ID NO: 118457 - DNA, 20 bp, Artificial Sequence
  Description of Artificial Sequence: Synthetic oligonucleotide
  Target: LAMA2; (-) strand; PAM type: NRG; PAM sequence: AAG
aattctttcataaatagagt

SEQ ID NO: 118458 - DNA, 20 bp, Artificial Sequence
  Description of Artificial Sequence: Synthetic oligonucleotide
  Target: LAMA2; (-) strand; PAM type: NRG; PAM sequence: GAG
taataattctttcataaata

SEQ ID NO: 118459 - DNA, 20 bp, Artificial Sequence
  Description of Artificial Sequence: Synthetic oligonucleotide
  Target: LAMA2; (-) strand; PAM type: NRG; PAM sequence: TAG
gctaataattctttcataaa

SEQ ID NO: 118460 - DNA, 20 bp, Artificial Sequence
  Description of Artificial Sequence: Synthetic oligonucleotide
  Target: LAMA2; (-) strand; PAM type: NRG; PAM sequence: AGG
tctaataatgaacttgggtc

SEQ ID NO: 118461 - DNA, 20 bp, Artificial Sequence
  Description of Artificial Sequence: Synthetic oligonucleotide
  Target: LAMA2; (-) strand; PAM type: NRG; PAM sequence: CAG
ctctaataatgaacttgggt

SEQ ID NO: 118462 - DNA, 20 bp, Artificial Sequence
  Description of Artificial Sequence: Synthetic oligonucleotide
  Target: LAMA2; (-) strand; PAM type: NRG; PAM sequence: GGG
aactctctaataatgaactt

SEQ ID NO: 118463 - DNA, 20 bp, Artificial Sequence
  Description of Artificial Sequence: Synthetic oligonucleotide
  Target: LAMA2; (-) strand; PAM type: NRG; PAM sequence: TGG
aaactctctaataatgaact

SEQ ID NO: 118464 - DNA, 20 bp, Artificial Sequence
  Description of Artificial Sequence: Synthetic oligonucleotide
  Target: LAMA2; (-) strand; PAM type: NRG; PAM sequence: TAG
aagctattcactcatacggc

SEQ ID NO: 118465 - DNA, 20 bp, Artificial Sequence
  Description of Artificial Sequence: Synthetic oligonucleotide
  Target: LAMA2; (-) strand; PAM type: NRG; PAM sequence: CGG
taaaaagctattcactcata

SEQ ID NO: 118466 - DNA, 20 bp, Artificial Sequence
  Description of Artificial Sequence: Synthetic oligonucleotide
  Target: LAMA2; (-) strand; PAM type: NRG; PAM sequence: AAG
ccctctaccttcagcataaa

SEQ ID NO: 118467 - DNA, 20 bp, Artificial Sequence
  Description of Artificial Sequence: Synthetic oligonucleotide
  Target: LAMA2; (-) strand; PAM type: NRG; PAM sequence: CAG
tggtctataccctctacctt

SEQ ID NO: 118468 - DNA, 20 bp, Artificial Sequence
  Description of Artificial Sequence: Synthetic oligonucleotide
  Target: LAMA2; (-) strand; PAM type: NRG; PAM sequence: TGG
taagctttctggcctgaatc

SEQ ID NO: 118469 - DNA, 20 bp, Artificial Sequence
  Description of Artificial Sequence: Synthetic oligonucleotide
  Target: LAMA2; (-) strand; PAM type: NRG; PAM sequence: TGG
aatcaagtaattaagctttc

SEQ ID NO: 118470 - DNA, 20 bp, Artificial Sequence
  Description of Artificial Sequence: Synthetic oligonucleotide
  Target: LAMA2; (-) strand; PAM type: NRG; PAM sequence: AAG
aataagaaaatcaagtaatt

SEQ ID NO: 118471 - DNA, 20 bp, Artificial Sequence
  Description of Artificial Sequence: Synthetic oligonucleotide
  Target: LAMA2; (-) strand; PAM type: NRG; PAM sequence: AAG
cattatcaaataagaaaatc

SEQ ID NO: 118472 - DNA, 20 bp, Artificial Sequence
  Description of Artificial Sequence: Synthetic oligonucleotide
  Target: LAMA2; (-) strand; PAM type: NRG; PAM sequence: AAG
cccataaatcattatcaaat

SEQ ID NO: 118473 - DNA, 20 bp, Artificial Sequence
  Description of Artificial Sequence: Synthetic oligonucleotide
  Target: LAMA2; (-) strand; PAM type: NRG; PAM sequence: AAG
ttggttttggcatctcccca

SEQ ID NO: 118474 - DNA, 20 bp, Artificial Sequence
  Description of Artificial Sequence: Synthetic oligonucleotide
  Target: LAMA2; (-) strand; PAM type: NRG; PAM sequence: TGG
gtcattcataagcttggttt

SEQ ID NO: 118475 - DNA, 20 bp, Artificial Sequence
  Description of Artificial Sequence: Synthetic oligonucleotide
  Target: LAMA2; (-) strand; PAM type: NRG; PAM sequence: TGG
ttggttgtcattcataagct

SEQ ID NO: 118476 - DNA, 20 bp, Artificial Sequence
  Description of Artificial Sequence: Synthetic oligonucleotide
  Target: LAMA2; (-) strand; PAM type: NRG; PAM sequence: AAG
tgtgcttggttgtcattcat

SEQ ID NO: 118477 - DNA, 20 bp, Artificial Sequence
  Description of Artificial Sequence: Synthetic oligonucleotide
  Target: LAMA2; (-) strand; PAM type: NRG; PAM sequence: TGG
tgtagtatcaaatgtgtgct

SEQ ID NO: 118478 - DNA, 20 bp, Artificial Sequence
  Description of Artificial Sequence: Synthetic oligonucleotide
  Target: LAMA2; (-) strand; PAM type: NRG; PAM sequence: TAG
ccaaatctttcttagtactg

SEQ ID NO: 118479 - DNA, 20 bp, Artificial Sequence
  Description of Artificial Sequence: Synthetic oligonucleotide
  Target: LAMA2; (-) strand; PAM type: NRG; PAM sequence: TAG
agagagccccaaatctttct

SEQ ID NO: 118480 - DNA, 20 bp, Artificial Sequence
  Description of Artificial Sequence: Synthetic oligonucleotide
  Target: LAMA2; (-) strand; PAM type: NRG; PAM sequence: GAG
atattcactgtaggcttaga

SEQ ID NO: 118481 - DNA, 20 bp, Artificial Sequence
  Description of Artificial Sequence: Synthetic oligonucleotide
  Target: LAMA2; (-) strand; PAM type: NRG; PAM sequence: GAG
tgatattcactgtaggctta

SEQ ID NO: 118482 - DNA, 20 bp, Artificial Sequence
  Description of Artificial Sequence: Synthetic oligonucleotide
  Target: LAMA2; (-) strand; PAM type: NRG; PAM sequence: TAG
tgtgatattcactgtaggct

SEQ ID NO: 118483 - DNA, 20 bp, Artificial Sequence
  Description of Artificial Sequence: Synthetic oligonucleotide
  Target: LAMA2; (-) strand; PAM type: NRG; PAM sequence: AGG
taaattgtgatattcactgt

SEQ ID NO: 118484 - DNA, 20 bp, Artificial Sequence
  Description of Artificial Sequence: Synthetic oligonucleotide
  Target: LAMA2; (-) strand; PAM type: NRG; PAM sequence: TAG
gtaaattgtgatattcactg

SEQ ID NO: 118485 - DNA, 20 bp, Artificial Sequence
  Description of Artificial Sequence: Synthetic oligonucleotide
  Target: LAMA2; (-) strand; PAM type: NRG; PAM sequence: AGG
agcattattcctctccacct

SEQ ID NO: 118486 - DNA, 20 bp, Artificial Sequence
  Description of Artificial Sequence: Synthetic oligonucleotide
  Target: LAMA2; (-) strand; PAM type: NRG; PAM sequence: TAG
cagcattattcctctccacc

SEQ ID NO: 118487 - DNA, 20 bp, Artificial Sequence
  Description of Artificial Sequence: Synthetic oligonucleotide
  Target: LAMA2; (-) strand; PAM type: NRG; PAM sequence: CAG
tgataagtacaaatgcattt

SEQ ID NO: 118488 - DNA, 20 bp, Artificial Sequence
  Description of Artificial Sequence: Synthetic oligonucleotide
  Target: LAMA2; (-) strand; PAM type: NRG; PAM sequence: AAG
ctggtttattgtttcctgat

SEQ ID NO: 118489 - DNA, 20 bp, Artificial Sequence
  Description of Artificial Sequence: Synthetic oligonucleotide
  Target: LAMA2; (-) strand; PAM type: NRG; PAM sequence: TGG
aagtatgccttttaagtttc

SEQ ID NO: 118490 - DNA, 20 bp, Artificial Sequence
  Description of Artificial Sequence: Synthetic oligonucleotide
  Target: LAMA2; (-) strand; PAM type: NRG; PAM sequence: AAG
ctcaatgaagtatgcctttt

SEQ ID NO: 118491 - DNA, 20 bp, Artificial Sequence
  Description of Artificial Sequence: Synthetic oligonucleotide
  Target: LAMA2; (-) strand; PAM type: NRG; PAM sequence: AAG
cagctccaaaagactcaatg

SEQ ID NO: 118492 - DNA, 20 bp, Artificial Sequence
  Description of Artificial Sequence: Synthetic oligonucleotide
  Target: LAMA2; (-) strand; PAM type: NRG; PAM sequence: AAG
aggtcaaattacagctccaa

SEQ ID NO: 118493 - DNA, 20 bp, Artificial Sequence
  Description of Artificial Sequence: Synthetic oligonucleotide
  Target: LAMA2; (-) strand; PAM type: NRG; PAM sequence: CAG
gaatttgttaggtcaaatta

SEQ ID NO: 118494 - DNA, 20 bp, Artificial Sequence
  Description of Artificial Sequence: Synthetic oligonucleotide
  Target: LAMA2; (-) strand; PAM type: NRG; PAM sequence: AGG
ttatagaaaatgaatttgtt

SEQ ID NO: 118495 - DNA, 20 bp, Artificial Sequence
  Description of Artificial Sequence: Synthetic oligonucleotide
  Target: LAMA2; (-) strand; PAM type: NRG; PAM sequence: TAG
tttatagaaaatgaatttgt

SEQ ID NO: 118496 - DNA, 20 bp, Artificial Sequence
  Description of Artificial Sequence: Synthetic oligonucleotide
  Target: LAMA2; (-) strand; PAM type: NRG; PAM sequence: TAG
aacaaaacacagaacgttta

SEQ ID NO: 118497 - DNA, 20 bp, Artificial Sequence
  Description of Artificial Sequence: Synthetic oligonucleotide
  Target: LAMA2; (-) strand; PAM type: NRG; PAM sequence: CAG
ggttaaaggagaacaaaaca

SEQ ID NO: 118498 - DNA, 20 bp, Artificial Sequence
  Description of Artificial Sequence: Synthetic oligonucleotide
  Target: LAMA2; (-) strand; PAM type: NRG; PAM sequence: GAG
actgaaatcatgggttaaag

SEQ ID NO: 118499 - DNA, 20 bp, Artificial Sequence
  Description of Artificial Sequence: Synthetic oligonucleotide
  Target: LAMA2; (-) strand; PAM type: NRG; PAM sequence: AGG
tgactgaaatcatgggttaa

SEQ ID NO: 118500 - DNA, 20 bp, Artificial Sequence
  Description of Artificial Sequence: Synthetic oligonucleotide
  Target: LAMA2; (-) strand; PAM type: NRG; PAM sequence: AAG
atgactgaaatcatgggtta

SEQ ID NO: 118501 - DNA, 20 bp, Artificial Sequence
  Description of Artificial Sequence: Synthetic oligonucleotide
  Target: LAMA2; (-) strand; PAM type: NRG; PAM sequence: GGG
ttgaagatgactgaaatcat

SEQ ID NO: 118502 - DNA, 20 bp, Artificial Sequence
  Description of Artificial Sequence: Synthetic oligonucleotide
  Target: LAMA2; (-) strand; PAM type: NRG; PAM sequence: TGG
tttgaagatgactgaaatca

SEQ ID NO: 118503 - DNA, 20 bp, Artificial Sequence
  Description of Artificial Sequence: Synthetic oligonucleotide
  Target: LAMA2; (-) strand; PAM type: NRG; PAM sequence: AAG
tcttctcacagagctctttg

SEQ ID NO: 118504 - DNA, 20 bp, Artificial Sequence
  Description of Artificial Sequence: Synthetic oligonucleotide
  Target: LAMA2; (-) strand; PAM type: NRG; PAM sequence: GAG
tcaaggccagtcttctcaca

SEQ ID NO: 118505 - DNA, 20 bp, Artificial Sequence
  Description of Artificial Sequence: Synthetic oligonucleotide
  Target: LAMA2; (-) strand; PAM type: NRG; PAM sequence: CAG
aatcaaggccagtcttctca

SEQ ID NO: 118506 - DNA, 20 bp, Artificial Sequence
  Description of Artificial Sequence: Synthetic oligonucleotide
  Target: LAMA2; (-) strand; PAM type: NRG; PAM sequence: CAG
ctggtgaataaaatcaaggc

SEQ ID NO: 118507 - DNA, 20 bp, Artificial Sequence
  Description of Artificial Sequence: Synthetic oligonucleotide
  Target: LAMA2; (-) strand; PAM type: NRG; PAM sequence: AGG
taagctggtgaataaaatca

SEQ ID NO: 118508 - DNA, 20 bp, Artificial Sequence
  Description of Artificial Sequence: Synthetic oligonucleotide
  Target: LAMA2; (-) strand; PAM type: NRG; PAM sequence: AAG
ttaagctggtgaataaaatc

SEQ ID NO: 118509 - DNA, 20 bp, Artificial Sequence
  Description of Artificial Sequence: Synthetic oligonucleotide
  Target: LAMA2; (-) strand; PAM type: NRG; PAM sequence: TGG
gaaacgtttcctttttaagc

SEQ ID NO: 118510 - DNA, 20 bp, Artificial Sequence
  Description of Artificial Sequence: Synthetic oligonucleotide
  Target: LAMA2; (-) strand; PAM type: NRG; PAM sequence: AAG
aaatgaaacgtttccttttt

SEQ ID NO: 118511 - DNA, 20 bp, Artificial Sequence
  Description of Artificial Sequence: Synthetic oligonucleotide
  Target: LAMA2; (-) strand; PAM type: NRG; PAM sequence: TGG
caaccattgtctactaaaga

SEQ ID NO: 118512 - DNA, 20 bp, Artificial Sequence
  Description of Artificial Sequence: Synthetic oligonucleotide
  Target: LAMA2; (-) strand; PAM type: NRG; PAM sequence: AAG
actgcaaccattgtctacta

SEQ ID NO: 118513 - DNA, 20 bp, Artificial Sequence
  Description of Artificial Sequence: Synthetic oligonucleotide
  Target: LAMA2; (-) strand; PAM type: NRG; PAM sequence: TAG
ttttacatgttctgaattat

SEQ ID NO: 118514 - DNA, 20 bp, Artificial Sequence
  Description of Artificial Sequence: Synthetic oligonucleotide
  Target: LAMA2; (-) strand; PAM type: NRG; PAM sequence: GAG
aaaatttccataggagaaag

SEQ ID NO: 118515 - DNA, 20 bp, Artificial Sequence
  Description of Artificial Sequence: Synthetic oligonucleotide
  Target: LAMA2; (-) strand; PAM type: NRG; PAM sequence: AGG
ctaaaatttccataggagaa

SEQ ID NO: 118516 - DNA, 20 bp, Artificial Sequence
  Description of Artificial Sequence: Synthetic oligonucleotide
  Target: LAMA2; (-) strand; PAM type: NRG; PAM sequence: AAG
gctaaaatttccataggaga

SEQ ID NO: 118517 - DNA, 20 bp, Artificial Sequence
  Description of Artificial Sequence: Synthetic oligonucleotide
  Target: LAMA2; (-) strand; PAM type: NRG; PAM sequence: GAG
tgttgctaaaatttccatag

SEQ ID NO: 118518 - DNA, 20 bp, Artificial Sequence
  Description of Artificial Sequence: Synthetic oligonucleotide
  Target: LAMA2; (-) strand; PAM type: NRG; PAM sequence: AGG
tttgttgctaaaatttccat

SEQ ID NO: 118519 - DNA, 20 bp, Artificial Sequence
  Description of Artificial Sequence: Synthetic oligonucleotide
  Target: LAMA2; (-) strand; PAM type: NRG; PAM sequence: TAG
ctttgttgctaaaatttcca

SEQ ID NO: 118520 - DNA, 20 bp, Artificial Sequence
  Description of Artificial Sequence: Synthetic oligonucleotide
  Target: LAMA2; (-) strand; PAM type: NRG; PAM sequence: AGG
ggataacaacattgtcagag

SEQ ID NO: 118521 - DNA, 20 bp, Artificial Sequence
  Description of Artificial Sequence: Synthetic oligonucleotide
  Target: LAMA2; (-) strand; PAM type: NRG; PAM sequence: GAG
tggataacaacattgtcaga

SEQ ID NO: 118522 - DNA, 20 bp, Artificial Sequence
  Description of Artificial Sequence: Synthetic oligonucleotide
  Target: LAMA2; (-) strand; PAM type: NRG; PAM sequence: GAG
agtggataacaacattgtca

SEQ ID NO: 118523 - DNA, 20 bp, Artificial Sequence
  Description of Artificial Sequence: Synthetic oligonucleotide
  Target: LAMA2; (-) strand; PAM type: NRG; PAM sequence: CAG
ctagtggataacaacattgt

SEQ ID NO: 118524 - DNA, 20 bp, Artificial Sequence
  Description of Artificial Sequence: Synthetic oligonucleotide
  Target: LAMA2; (-) strand; PAM type: NRG; PAM sequence: TGG
cagcaccttccttcccctag

SEQ ID NO: 118525 - DNA, 20 bp, Artificial Sequence
  Description of Artificial Sequence: Synthetic oligonucleotide
  Target: LAMA2; (-) strand; PAM type: NRG; PAM sequence: TAG
aaacagcaccttccttcccc

SEQ ID NO: 118526 - DNA, 20 bp, Artificial Sequence
  Description of Artificial Sequence: Synthetic oligonucleotide
  Target: LAMA2; (-) strand; PAM type: NRG; PAM sequence: CAG
gccatcacctcaattggaaa

SEQ ID NO: 118527 - DNA, 20 bp, Artificial Sequence
  Description of Artificial Sequence: Synthetic oligonucleotide
  Target: LAMA2; (-) strand; PAM type: NRG; PAM sequence: TGG
atgtcagccatcacctcaat

SEQ ID NO: 118528 - DNA, 20 bp, Artificial Sequence
  Description of Artificial Sequence: Synthetic oligonucleotide
  Target: LAMA2; (-) strand; PAM type: NRG; PAM sequence: CAG
tggtgaaatagtgagtatgt

SEQ ID NO: 118529 - DNA, 20 bp, Artificial Sequence
  Description of Artificial Sequence: Synthetic oligonucleotide
  Target: LAMA2; (-) strand; PAM type: NRG; PAM sequence: GAG
caggacggtggtgaaatagt

SEQ ID NO: 118530 - DNA, 20 bp, Artificial Sequence
  Description of Artificial Sequence: Synthetic oligonucleotide
  Target: LAMA2; (-) strand; PAM type: NRG; PAM sequence: TAG
gcaacaggacggtggtgaaa

SEQ ID NO: 118531 - DNA, 20 bp, Artificial Sequence
  Description of Artificial Sequence: Synthetic oligonucleotide
  Target: LAMA2; (-) strand; PAM type: NRG; PAM sequence: TGG
tgtattaagcaacaggacgg

SEQ ID NO: 118532 - DNA, 20 bp, Artificial Sequence
  Description of Artificial Sequence: Synthetic oligonucleotide
  Target: LAMA2; (-) strand; PAM type: NRG; PAM sequence: CGG
aattgtattaagcaacagga

SEQ ID NO: 118533 - DNA, 20 bp, Artificial Sequence
  Description of Artificial Sequence: Synthetic oligonucleotide
  Target: LAMA2; (-) strand; PAM type: NRG; PAM sequence: AGG
tacaaattgtattaagcaac

SEQ ID NO: 118534 - DNA, 20 bp, Artificial Sequence
  Description of Artificial Sequence: Synthetic oligonucleotide
  Target: LAMA2; (-) strand; PAM type: NRG; PAM sequence: CAG
gtacaaattgtattaagcaa

SEQ ID NO: 118535 - DNA, 20 bp, Artificial Sequence
  Description of Artificial Sequence: Synthetic oligonucleotide
  Target: LAMA2; (-) strand; PAM type: NRG; PAM sequence: AAG
ttgtgtgtacaaattgtatt

SEQ ID NO: 118536 - DNA, 20 bp, Artificial Sequence
  Description of Artificial Sequence: Synthetic oligonucleotide
  Target: LAMA2; (-) strand; PAM type: NRG; PAM sequence: AAG
agaattgcttctgtagaata

SEQ ID NO: 118537 - DNA, 20 bp, Artificial Sequence
  Description of Artificial Sequence: Synthetic oligonucleotide
  Target: LAMA2; (-) strand; PAM type: NRG; PAM sequence: TAG
aagcttgagaattgcttctg

SEQ ID NO: 118538 - DNA, 20 bp, Artificial Sequence
  Description of Artificial Sequence: Synthetic oligonucleotide
  Target: LAMA2; (-) strand; PAM type: NRG; PAM sequence: GAG
aaaaacactgagctaagctt

SEQ ID NO: 118539 - DNA, 20 bp, Artificial Sequence
  Description of Artificial Sequence: Synthetic oligonucleotide
  Target: LAMA2; (-) strand; PAM type: NRG; PAM sequence: AAG
ttttttaaaaacactgagct

SEQ ID NO: 118540 - DNA, 20 bp, Artificial Sequence
  Description of Artificial Sequence: Synthetic oligonucleotide
  Target: LAMA2; (-) strand; PAM type: NRG; PAM sequence: GAG
ggcagttttttaaaaacact

SEQ ID NO: 118541 - DNA, 20 bp, Artificial Sequence
  Description of Artificial Sequence: Synthetic oligonucleotide
  Target: LAMA2; (-) strand; PAM type: NRG; PAM sequence: CAG
gcacttttctaaagcatagg

SEQ ID NO: 118542 - DNA, 20 bp, Artificial Sequence
  Description of Artificial Sequence: Synthetic oligonucleotide
  Target: LAMA2; (-) strand; PAM type: NRG; PAM sequence: AGG
taggcacttttctaaagcat

SEQ ID NO: 118543 - DNA, 20 bp, Artificial Sequence
  Description of Artificial Sequence: Synthetic oligonucleotide
  Target: LAMA2; (-) strand; PAM type: NRG; PAM sequence: TAG
ctaggcacttttctaaagca

SEQ ID NO: 118544 - DNA, 20 bp, Artificial Sequence
  Description of Artificial Sequence: Synthetic oligonucleotide
  Target: LAMA2; (-) strand; PAM type: NRG; PAM sequence: AAG
actccctaggcacttttcta

SEQ ID NO: 118545 - DNA, 20 bp, Artificial Sequence
  Description of Artificial Sequence: Synthetic oligonucleotide
  Target: LAMA2; (-) strand; PAM type: NRG; PAM sequence: AGG
tagatttttaaaaactccct

SEQ ID NO: 118546 - DNA, 20 bp, Artificial Sequence
  Description of Artificial Sequence: Synthetic oligonucleotide
  Target: LAMA2; (-) strand; PAM type: NRG; PAM sequence: TAG
ctagatttttaaaaactccc

SEQ ID NO: 118547 - DNA, 20 bp, Artificial Sequence
  Description of Artificial Sequence: Synthetic oligonucleotide
  Target: LAMA2; (-) strand; PAM type: NRG; PAM sequence: TAG
agaatcactggaccaggtac

SEQ ID NO: 118548 - DNA, 20 bp, Artificial Sequence
  Description of Artificial Sequence: Synthetic oligonucleotide
  Target: LAMA2; (-) strand; PAM type: NRG; PAM sequence: AGG
aaaatcagaatcactggacc

SEQ ID NO: 118549 - DNA, 20 bp, Artificial Sequence
  Description of Artificial Sequence: Synthetic oligonucleotide
  Target: LAMA2; (-) strand; PAM type: NRG; PAM sequence: CAG
caaaatcagaatcactggac

SEQ ID NO: 118550 - DNA, 20 bp, Artificial Sequence
  Description of Artificial Sequence: Synthetic oligonucleotide
  Target: LAMA2; (-) strand; PAM type: NRG; PAM sequence: TGG
ctagacaaaatcagaatcac

SEQ ID NO: 118551 - DNA, 20 bp, Artificial Sequence
  Description of Artificial Sequence: Synthetic oligonucleotide
  Target: LAMA2; (-) strand; PAM type: NRG; PAM sequence: CAG
ggctatgtcctagacaaaat

SEQ ID NO: 118552 - DNA, 20 bp, Artificial Sequence
  Description of Artificial Sequence: Synthetic oligonucleotide
  Target: LAMA2; (-) strand; PAM type: NRG; PAM sequence: TAG
attatgctctggctatgtcc

SEQ ID NO: 118553 - DNA, 20 bp, Artificial Sequence
  Description of Artificial Sequence: Synthetic oligonucleotide
  Target: LAMA2; (-) strand; PAM type: NRG; PAM sequence: TGG
aaaaaaaaatcattatgctc

SEQ ID NO: 118554 - DNA, 20 bp, Artificial Sequence
  Description of Artificial Sequence: Synthetic oligonucleotide
  Target: LAMA2; (-) strand; PAM type: NRG; PAM sequence: GAG
tcctgcctgggtgacaacat

SEQ ID NO: 118555 - DNA, 20 bp, Artificial Sequence
  Description of Artificial Sequence: Synthetic oligonucleotide
  Target: LAMA2; (-) strand; PAM type: NRG; PAM sequence: GGG
gtgccattgcactcctgcct

SEQ ID NO: 118556 - DNA, 20 bp, Artificial Sequence
  Description of Artificial Sequence: Synthetic oligonucleotide
  Target: LAMA2; (-) strand; PAM type: NRG; PAM sequence: TGG
ggtgccattgcactcctgcc

SEQ ID NO: 118557 - DNA, 20 bp, Artificial Sequence
  Description of Artificial Sequence: Synthetic oligonucleotide
  Target: LAMA2; (-) strand; PAM type: NRG; PAM sequence: TGG
gaggctgcagtgagccaaga

SEQ ID NO: 118558 - DNA, 20 bp, Artificial Sequence
  Description of Artificial Sequence: Synthetic oligonucleotide
  Target: LAMA2; (-) strand; PAM type: NRG; PAM sequence: AAG
ggttgaggctgcagtgagcc

SEQ ID NO: 118559 - DNA, 20 bp, Artificial Sequence
  Description of Artificial Sequence: Synthetic oligonucleotide
  Target: LAMA2; (-) strand; PAM type: NRG; PAM sequence: GAG
ggggaggttgaggctgcagt

SEQ ID NO: 118560 - DNA, 20 bp, Artificial Sequence
  Description of Artificial Sequence: Synthetic oligonucleotide
  Target: LAMA2; (-) strand; PAM type: NRG; PAM sequence: CAG
aactggggaggttgaggctg

SEQ ID NO: 118561 - DNA, 20 bp, Artificial Sequence
  Description of Artificial Sequence: Synthetic oligonucleotide
  Target: LAMA2; (-) strand; PAM type: NRG; PAM sequence: AGG
cacttgaactggggaggttg

SEQ ID NO: 118562 - DNA, 20 bp, Artificial Sequence
  Description of Artificial Sequence: Synthetic oligonucleotide
  Target: LAMA2; (-) strand; PAM type: NRG; PAM sequence: GAG
tcacttgaactggggaggtt

SEQ ID NO: 118563 - DNA, 20 bp, Artificial Sequence
  Description of Artificial Sequence: Synthetic oligonucleotide
  Target: LAMA2; (-) strand; PAM type: NRG; PAM sequence: AGG
gaggatcacttgaactgggg

SEQ ID NO: 118564 - DNA, 20 bp, Artificial Sequence
  Description of Artificial Sequence: Synthetic oligonucleotide
  Target: LAMA2; (-) strand; PAM type: NRG; PAM sequence: GAG
ggaggatcacttgaactggg

SEQ ID NO: 118565 - DNA, 20 bp, Artificial Sequence
  Description of Artificial Sequence: Synthetic oligonucleotide
  Target: LAMA2; (-) strand; PAM type: NRG; PAM sequence: GGG
caggaggatcacttgaactg

SEQ ID NO: 118566 - DNA, 20 bp, Artificial Sequence
  Description of Artificial Sequence: Synthetic oligonucleotide
  Target: LAMA2; (-) strand; PAM type: NRG; PAM sequence: GGG
gcaggaggatcacttgaact

SEQ ID NO: 118567 - DNA, 20 bp, Artificial Sequence
  Description of Artificial Sequence: Synthetic oligonucleotide
  Target: LAMA2; (-) strand; PAM type: NRG; PAM sequence: TGG
ggcaggaggatcacttgaac

SEQ ID NO: 118568 - DNA, 20 bp, Artificial Sequence
  Description of Artificial Sequence: Synthetic oligonucleotide
  Target: LAMA2; (-) strand; PAM type: NRG; PAM sequence: AGG
tacttggggagtgaggcagg

SEQ ID NO: 118569 - DNA, 20 bp, Artificial Sequence
  Description of Artificial Sequence: Synthetic oligonucleotide
  Target: LAMA2; (-) strand; PAM type: NRG; PAM sequence: GAG
ctacttggggagtgaggcag

SEQ ID NO: 118570 - DNA, 20 bp, Artificial Sequence
  Description of Artificial Sequence: Synthetic oligonucleotide
  Target: LAMA2; (-) strand; PAM type: NRG; PAM sequence: AGG
agctacttggggagtgaggc

SEQ ID NO: 118571 - DNA, 20 bp, Artificial Sequence
  Description of Artificial Sequence: Synthetic oligonucleotide
  Target: LAMA2; (-) strand; PAM type: NRG; PAM sequence: CAG
cagctacttggggagtgagg

SEQ ID NO: 118572 - DNA, 20 bp, Artificial Sequence
  Description of Artificial Sequence: Synthetic oligonucleotide
  Target: LAMA2; (-) strand; PAM type: NRG; PAM sequence: AGG
tcccagctacttggggagtg

SEQ ID NO: 118573 - DNA, 20 bp, Artificial Sequence
  Description of Artificial Sequence: Synthetic oligonucleotide
  Target: LAMA2; (-) strand; PAM type: NRG; PAM sequence: GAG
gtcccagctacttggggagt

SEQ ID NO: 118574 - DNA, 20 bp, Artificial Sequence
  Description of Artificial Sequence: Synthetic oligonucleotide
  Target: LAMA2; (-) strand; PAM type: NRG; PAM sequence: GAG
tgtagtcccagctacttggg

SEQ ID NO: 118575 - DNA, 20 bp, Artificial Sequence
  Description of Artificial Sequence: Synthetic oligonucleotide
  Target: LAMA2; (-) strand; PAM type: NRG; PAM sequence: GGG
cctgtagtcccagctacttg

SEQ ID NO: 118576 - DNA, 20 bp, Artificial Sequence
  Description of Artificial Sequence: Synthetic oligonucleotide
  Target: LAMA2; (-) strand; PAM type: NRG; PAM sequence: GGG
acctgtagtcccagctactt

SEQ ID NO: 118577 - DNA, 20 bp, Artificial Sequence
  Description of Artificial Sequence: Synthetic oligonucleotide
  Target: LAMA2; (-) strand; PAM type: NRG; PAM sequence: TGG
cacctgtagtcccagctact

SEQ ID NO: 118578 - DNA, 20 bp, Artificial Sequence
  Description of Artificial Sequence: Synthetic oligonucleotide
  Target: LAMA2; (-) strand; PAM type: NRG; PAM sequence: CAG
gtggtgcccacctgtagtcc

SEQ ID NO: 118579 - DNA, 20 bp, Artificial Sequence
  Description of Artificial Sequence: Synthetic oligonucleotide
  Target: LAMA2; (-) strand; PAM type: NRG; PAM sequence: TAG
ggtgtggtggtgcccacctg

SEQ ID NO: 118580 - DNA, 20 bp, Artificial Sequence
  Description of Artificial Sequence: Synthetic oligonucleotide
  Target: LAMA2; (-) strand; PAM type: NRG; PAM sequence: TGG
taaaaattagctgggtgtgg

SEQ ID NO: 118581 - DNA, 20 bp, Artificial Sequence
  Description of Artificial Sequence: Synthetic oligonucleotide
  Target: LAMA2; (-) strand; PAM type: NRG; PAM sequence: TGG
atataaaaattagctgggtg

SEQ ID NO: 118582 - DNA, 20 bp, Artificial Sequence
  Description of Artificial Sequence: Synthetic oligonucleotide
  Target: LAMA2; (-) strand; PAM type: NRG; PAM sequence: GGG
taaaaatataaaaattagct

SEQ ID NO: 118583 - DNA, 20 bp, Artificial Sequence
  Description of Artificial Sequence: Synthetic oligonucleotide
  Target: LAMA2; (-) strand; PAM type: NRG; PAM sequence: TGG
ctaaaaatataaaaattagc

SEQ ID NO: 118584 - DNA, 20 bp, Artificial Sequence
  Description of Artificial Sequence: Synthetic oligonucleotide
  Target: LAMA2; (-) strand; PAM type: NRG; PAM sequence: TAG
tctactaaaaatataaaaat

SEQ ID NO: 118585 - DNA, 20 bp, Artificial Sequence
  Description of Artificial Sequence: Synthetic oligonucleotide
  Target: LAMA2; (-) strand; PAM type: NRG; PAM sequence: TGG
cgagaccagcctgggcaaca

SEQ ID NO: 118586 - DNA, 20 bp, Artificial Sequence
  Description of Artificial Sequence: Synthetic oligonucleotide
  Target: LAMA2; (-) strand; PAM type: NRG; PAM sequence: GGG
caggagttcgagaccagcct

SEQ ID NO: 118587 - DNA, 20 bp, Artificial Sequence
  Description of Artificial Sequence: Synthetic oligonucleotide
  Target: LAMA2; (-) strand; PAM type: NRG; PAM sequence: TGG
tcaggagttcgagaccagcc

SEQ ID NO: 118588 - DNA, 20 bp, Artificial Sequence
  Description of Artificial Sequence: Synthetic oligonucleotide
  Target: LAMA2; (-) strand; PAM type: NRG; PAM sequence: CAG
tgagctcaggagttcgagac

SEQ ID NO: 118589 - DNA, 20 bp, Artificial Sequence
  Description of Artificial Sequence: Synthetic oligonucleotide
  Target: LAMA2; (-) strand; PAM type: NRG; PAM sequence: GAG
tttcttgagctcaggagttc

SEQ ID NO: 118590 - DNA, 20 bp, Artificial Sequence
  Description of Artificial Sequence: Synthetic oligonucleotide
  Target: LAMA2; (-) strand; PAM type: NRG; PAM sequence: GAG
ggcagatttcttgagctcag

SEQ ID NO: 118591 - DNA, 20 bp, Artificial Sequence
  Description of Artificial Sequence: Synthetic oligonucleotide
  Target: LAMA2; (-) strand; PAM type: NRG; PAM sequence: AGG
caggcagatttcttgagctc

SEQ ID NO: 118592 - DNA, 20 bp, Artificial Sequence
  Description of Artificial Sequence: Synthetic oligonucleotide
  Target: LAMA2; (-) strand; PAM type: NRG; PAM sequence: CAG
gcaggcagatttcttgagct

SEQ ID NO: 118593 - DNA, 20 bp, Artificial Sequence
  Description of Artificial Sequence: Synthetic oligonucleotide
  Target: LAMA2; (-) strand; PAM type: NRG; PAM sequence: GAG
ctgaggcaggcagatttctt

SEQ ID NO: 118594 - DNA, 20 bp, Artificial Sequence
  Description of Artificial Sequence: Synthetic oligonucleotide
  Target: LAMA2; (-) strand; PAM type: NRG; PAM sequence: CAG
ctttgggaggctgaggcagg

SEQ ID NO: 118595 - DNA, 20 bp, Artificial Sequence
  Description of Artificial Sequence: Synthetic oligonucleotide
  Target: LAMA2; (-) strand; PAM type: NRG; PAM sequence: AGG
gcactttgggaggctgaggc

SEQ ID NO: 118596 - DNA, 20 bp, Artificial Sequence
  Description of Artificial Sequence: Synthetic oligonucleotide
  Target: LAMA2; (-) strand; PAM type: NRG; PAM sequence: CAG
agcactttgggaggctgagg

SEQ ID NO: 118597 - DNA, 20 bp, Artificial Sequence
  Description of Artificial Sequence: Synthetic oligonucleotide
  Target: LAMA2; (-) strand; PAM type: NRG; PAM sequence: AGG
cctagcactttgggaggctg

SEQ ID NO: 118598 - DNA, 20 bp, Artificial Sequence
  Description of Artificial Sequence: Synthetic oligonucleotide
  Target: LAMA2; (-) strand; PAM type: NRG; PAM sequence: GAG
tcctagcactttgggaggct

SEQ ID NO: 118599 - DNA, 20 bp, Artificial Sequence
  Description of Artificial Sequence: Synthetic oligonucleotide
  Target: LAMA2; (-) strand; PAM type: NRG; PAM sequence: AGG
agtaatcctagcactttggg

SEQ ID NO: 118600 - DNA, 20 bp, Artificial Sequence
  Description of Artificial Sequence: Synthetic oligonucleotide
  Target: LAMA2; (-) strand; PAM type: NRG; PAM sequence: GAG
cagtaatcctagcactttgg

SEQ ID NO: 118601 - DNA, 20 bp, Artificial Sequence
  Description of Artificial Sequence: Synthetic oligonucleotide
  Target: LAMA2; (-) strand; PAM type: NRG; PAM sequence: GGG
gccagtaatcctagcacttt

SEQ ID NO: 118602 - DNA, 20 bp, Artificial Sequence
  Description of Artificial Sequence: Synthetic oligonucleotide
  Target: LAMA2; (-) strand; PAM type: NRG; PAM sequence: TGG
tgccagtaatcctagcactt

SEQ ID NO: 118603 - DNA, 20 bp, Artificial Sequence
  Description of Artificial Sequence: Synthetic oligonucleotide
  Target: LAMA2; (-) strand; PAM type: NRG; PAM sequence: TAG
gtggttcatgccagtaatcc

SEQ ID NO: 118604 - DNA, 20 bp, Artificial Sequence
  Description of Artificial Sequence: Synthetic oligonucleotide
  Target: LAMA2; (-) strand; PAM type: NRG; PAM sequence: CAG
ctgggcacagtggttcatgc

SEQ ID NO: 118605 - DNA, 20 bp, Artificial Sequence
  Description of Artificial Sequence: Synthetic oligonucleotide
  Target: LAMA2; (-) strand; PAM type: NRG; PAM sequence: TGG
tcatgcttgactgggcacag

SEQ ID NO: 118606 - DNA, 20 bp, Artificial Sequence
  Description of Artificial Sequence: Synthetic oligonucleotide
  Target: LAMA2; (-) strand; PAM type: NRG; PAM sequence: CAG
tcctcatgcttgactgggca

SEQ ID NO: 118607 - DNA, 20 bp, Artificial Sequence
  Description of Artificial Sequence: Synthetic oligonucleotide
  Target: LAMA2; (-) strand; PAM type: NRG; PAM sequence: GGG
aagaatcctcatgcttgact

SEQ ID NO: 118608 - DNA, 20 bp, Artificial Sequence
  Description of Artificial Sequence: Synthetic oligonucleotide
  Target: LAMA2; (-) strand; PAM type: NRG; PAM sequence: TGG
taagaatcctcatgcttgac

SEQ ID NO: 118609 - DNA, 20 bp, Artificial Sequence
  Description of Artificial Sequence: Synthetic oligonucleotide
  Target: LAMA2; (-) strand; PAM type: NRG; PAM sequence: AAG
aattgcctgggaatgttttt

SEQ ID NO: 118610 - DNA, 20 bp, Artificial Sequence
  Description of Artificial Sequence: Synthetic oligonucleotide
  Target: LAMA2; (-) strand; PAM type: NRG; PAM sequence: GGG
acaacacattagaattgcct

SEQ ID NO: 118611 - DNA, 20 bp, Artificial Sequence
  Description of Artificial Sequence: Synthetic oligonucleotide
  Target: LAMA2; (-) strand; PAM type: NRG; PAM sequence: TGG
gacaacacattagaattgcc

SEQ ID NO: 118612 - DNA, 20 bp, Artificial Sequence
  Description of Artificial Sequence: Synthetic oligonucleotide
  Target: LAMA2; (-) strand; PAM type: NRG; PAM sequence: TAG
gttcatccttgacaacacat

SEQ ID NO: 118613 - DNA, 20 bp, Artificial Sequence
  Description of Artificial Sequence: Synthetic oligonucleotide
  Target: LAMA2; (-) strand; PAM type: NRG; PAM sequence: AGG
ccctattgcttatttttctt

SEQ ID NO: 118614 - DNA, 20 bp, Artificial Sequence
  Description of Artificial Sequence: Synthetic oligonucleotide
  Target: LAMA2; (-) strand; PAM type: NRG; PAM sequence: TAG
tccctattgcttatttttct

SEQ ID NO: 118615 - DNA, 20 bp, Artificial Sequence
  Description of Artificial Sequence: Synthetic oligonucleotide
  Target: LAMA2; (-) strand; PAM type: NRG; PAM sequence: GGG
ccagcaccatttattaaata

SEQ ID NO: 118616 - DNA, 20 bp, Artificial Sequence
  Description of Artificial Sequence: Synthetic oligonucleotide
  Target: LAMA2; (-) strand; PAM type: NRG; PAM sequence: AGG
cccagcaccatttattaaat

SEQ ID NO: 118617 - DNA, 20 bp, Artificial Sequence
  Description of Artificial Sequence: Synthetic oligonucleotide
  Target: LAMA2; (-) strand; PAM type: NRG; PAM sequence: TAG
tcccagcaccatttattaaa

SEQ ID NO: 118618 - DNA, 20 bp, Artificial Sequence
  Description of Artificial Sequence: Synthetic oligonucleotide
  Target: LAMA2; (-) strand; PAM type: NRG; PAM sequence: CAG
ttatggcttgccagttttcc

SEQ ID NO: 118619 - DNA, 20 bp, Artificial Sequence
  Description of Artificial Sequence: Synthetic oligonucleotide
  Target: LAMA2; (-) strand; PAM type: NRG; PAM sequence: CAG
gctttctacttatggcttgc

SEQ ID NO: 118620 - DNA, 20 bp, Artificial Sequence
  Description of Artificial Sequence: Synthetic oligonucleotide
  Target: LAMA2; (-) strand; PAM type: NRG; PAM sequence: TGG
cagtttcagctttctactta

SEQ ID NO: 118621 - DNA, 20 bp, Artificial Sequence
  Description of Artificial Sequence: Synthetic oligonucleotide
  Target: LAMA2; (-) strand; PAM type: NRG; PAM sequence: CAG
gtaaggaagggatccagttt

SEQ ID NO: 118622 - DNA, 20 bp, Artificial Sequence
  Description of Artificial Sequence: Synthetic oligonucleotide
  Target: LAMA2; (-) strand; PAM type: NRG; PAM sequence: CAG
taaggtgtaaggaagggatc

SEQ ID NO: 118623 - DNA, 20 bp, Artificial Sequence
  Description of Artificial Sequence: Synthetic oligonucleotide
  Target: LAMA2; (-) strand; PAM type: NRG; PAM sequence: GGG
tttgtataaggtgtaaggaa

SEQ ID NO: 118624 - DNA, 20 bp, Artificial Sequence
  Description of Artificial Sequence: Synthetic oligonucleotide
  Target: LAMA2; (-) strand; PAM type: NRG; PAM sequence: AGG
ttttgtataaggtgtaagga

SEQ ID NO: 118625 - DNA, 20 bp, Artificial Sequence
  Description of Artificial Sequence: Synthetic oligonucleotide
  Target: LAMA2; (-) strand; PAM type: NRG; PAM sequence: AAG
tttttgtataaggtgtaagg

SEQ ID NO: 118626 - DNA, 20 bp, Artificial Sequence
  Description of Artificial Sequence: Synthetic oligonucleotide
  Target: LAMA2; (-) strand; PAM type: NRG; PAM sequence: AGG
taatttttgtataaggtgta

SEQ ID NO: 118627 - DNA, 20 bp, Artificial Sequence
  Description of Artificial Sequence: Synthetic oligonucleotide
  Target: LAMA2; (-) strand; PAM type: NRG; PAM sequence: AAG
ttaatttttgtataaggtgt

SEQ ID NO: 118628 - DNA, 20 bp, Artificial Sequence
  Description of Artificial Sequence: Synthetic oligonucleotide
  Target: LAMA2; (-) strand; PAM type: NRG; PAM sequence: AGG
cttgaattaatttttgtata

SEQ ID NO: 118629 - DNA, 20 bp, Artificial Sequence
  Description of Artificial Sequence: Synthetic oligonucleotide
  Target: LAMA2; (-) strand; PAM type: NRG; PAM sequence: AAG
tcttgaattaatttttgtat

SEQ ID NO: 118630 - DNA, 20 bp, Artificial Sequence
  Description of Artificial Sequence: Synthetic oligonucleotide
  Target: LAMA2; (-) strand; PAM type: NRG; PAM sequence: AAG
tggttttaggtctaacgttt

SEQ ID NO: 118631 - DNA, 20 bp, Artificial Sequence
  Description of Artificial Sequence: Synthetic oligonucleotide
  Target: LAMA2; (-) strand; PAM type: NRG; PAM sequence: AGG
tctagggtttgtatggtttt

SEQ ID NO: 118632 - DNA, 20 bp, Artificial Sequence
  Description of Artificial Sequence: Synthetic oligonucleotide
  Target: LAMA2; (-) strand; PAM type: NRG; PAM sequence: TAG
ttctagggtttgtatggttt

SEQ ID NO: 118633 - DNA, 20 bp, Artificial Sequence
  Description of Artificial Sequence: Synthetic oligonucleotide
  Target: LAMA2; (-) strand; PAM type: NRG; PAM sequence: TGG
gttttcttctagggtttgta

SEQ ID NO: 118634 - DNA, 20 bp, Artificial Sequence
  Description of Artificial Sequence: Synthetic oligonucleotide
  Target: LAMA2; (-) strand; PAM type: NRG; PAM sequence: GGG
aatgcctaggttttcttcta

SEQ ID NO: 118635 - DNA, 20 bp, Artificial Sequence
  Description of Artificial Sequence: Synthetic oligonucleotide
  Target: LAMA2; (-) strand; PAM type: NRG; PAM sequence: AGG
taatgcctaggttttcttct

SEQ ID NO: 118636 - DNA, 20 bp, Artificial Sequence
  Description of Artificial Sequence: Synthetic oligonucleotide
  Target: LAMA2; (-) strand; PAM type: NRG; PAM sequence: TAG
gtaatgcctaggttttcttc

SEQ ID NO: 118637 - DNA, 20 bp, Artificial Sequence
  Description of Artificial Sequence: Synthetic oligonucleotide
  Target: LAMA2; (-) strand; PAM type: NRG; PAM sequence: AGG
tgtcctgaatggtaatgcct

SEQ ID NO: 118638 - DNA, 20 bp, Artificial Sequence
  Description of Artificial Sequence: Synthetic oligonucleotide
  Target: LAMA2; (-) strand; PAM type: NRG; PAM sequence: TAG
atgtcctgaatggtaatgcc

SEQ ID NO: 118639 - DNA, 20 bp, Artificial Sequence
  Description of Artificial Sequence: Synthetic oligonucleotide
  Target: LAMA2; (-) strand; PAM type: NRG; PAM sequence: TGG
gcccatgcctatgtcctgaa

SEQ ID NO: 118640 - DNA, 20 bp, Artificial Sequence
  Description of Artificial Sequence: Synthetic oligonucleotide
  Target: LAMA2; (-) strand; PAM type: NRG; PAM sequence: AAG
cttttggtgttttagacatg

SEQ ID NO: 118641 - DNA, 20 bp, Artificial Sequence
  Description of Artificial Sequence: Synthetic oligonucleotide
  Target: LAMA2; (-) strand; PAM type: NRG; PAM sequence: TAG
tgccattgcttttggtgttt

SEQ ID NO: 118642 - DNA, 20 bp, Artificial Sequence
  Description of Artificial Sequence: Synthetic oligonucleotide
  Target: LAMA2; (-) strand; PAM type: NRG; PAM sequence: TGG
gcttttgttgccattgcttt

SEQ ID NO: 118643 - DNA, 20 bp, Artificial Sequence
  Description of Artificial Sequence: Synthetic oligonucleotide
  Target: LAMA2; (-) strand; PAM type: NRG; PAM sequence: TGG
tagatcccatttgtcaattt

SEQ ID NO: 118644 - DNA, 20 bp, Artificial Sequence
  Description of Artificial Sequence: Synthetic oligonucleotide
  Target: LAMA2; (-) strand; PAM type: NRG; PAM sequence: TAG
cagaagctctttagtttaat

SEQ ID NO: 118645 - DNA, 20 bp, Artificial Sequence
  Description of Artificial Sequence: Synthetic oligonucleotide
  Target: LAMA2; (-) strand; PAM type: NRG; PAM sequence: TAG
tttgctgtgcagaagctctt

SEQ ID NO: 118646 - DNA, 20 bp, Artificial Sequence
  Description of Artificial Sequence: Synthetic oligonucleotide
  Target: LAMA2; (-) strand; PAM type: NRG; PAM sequence: AAG
tagtttcttttgctgtgcag

SEQ ID NO: 118647 - DNA, 20 bp, Artificial Sequence
  Description of Artificial Sequence: Synthetic oligonucleotide
  Target: LAMA2; (-) strand; PAM type: NRG; PAM sequence: CAG
tggtagtttcttttgctgtg

SEQ ID NO: 118648 - DNA, 20 bp, Artificial Sequence
  Description of Artificial Sequence: Synthetic oligonucleotide
  Target: LAMA2; (-) strand; PAM type: NRG; PAM sequence: TAG
ttgcctgttcgctctgctgg

SEQ ID NO: 118649 - DNA, 20 bp, Artificial Sequence
  Description of Artificial Sequence: Synthetic oligonucleotide
  Target: LAMA2; (-) strand; PAM type: NRG; PAM sequence: TGG
aggttgcctgttcgctctgc

SEQ ID NO: 118650 - DNA, 20 bp, Artificial Sequence
  Description of Artificial Sequence: Synthetic oligonucleotide
  Target: LAMA2; (-) strand; PAM type: NRG; PAM sequence: AGG
aaaattttctcccattctgt

SEQ ID NO: 118651 - DNA, 20 bp, Artificial Sequence
  Description of Artificial Sequence: Synthetic oligonucleotide
  Target: LAMA2; (-) strand; PAM type: NRG; PAM sequence: TAG
gaaaattttctcccattctg

SEQ ID NO: 118652 - DNA, 20 bp, Artificial Sequence
  Description of Artificial Sequence: Synthetic oligonucleotide
  Target: LAMA2; (-) strand; PAM type: NRG; PAM sequence: AGG
tagccctttgtcagatgagt

SEQ ID NO: 118653 - DNA, 20 bp, Artificial Sequence
  Description of Artificial Sequence: Synthetic oligonucleotide
  Target: LAMA2; (-) strand; PAM type: NRG; PAM sequence: TAG
ttagccctttgtcagatgag

SEQ ID NO: 118654 - DNA, 20 bp, Artificial Sequence
  Description of Artificial Sequence: Synthetic oligonucleotide
  Target: LAMA2; (-) strand; PAM type: NRG; PAM sequence: GAG
atattagccctttgtcagat

SEQ ID NO: 118655 - DNA, 20 bp, Artificial Sequence
  Description of Artificial Sequence: Synthetic oligonucleotide
  Target: LAMA2; (-) strand; PAM type: NRG; PAM sequence: CAG
tctggatattagccctttgt

SEQ ID NO: 118656 - DNA, 20 bp, Artificial Sequence
  Description of Artificial Sequence: Synthetic oligonucleotide
  Target: LAMA2; (-) strand; PAM type: NRG; PAM sequence: TAG
tcattgtagattctggatat

SEQ ID NO: 118657 - DNA, 20 bp, Artificial Sequence
  Description of Artificial Sequence: Synthetic oligonucleotide
  Target: LAMA2; (-) strand; PAM type: NRG; PAM sequence: TGG
tttgagttcattgtagattc

SEQ ID NO: 118658 - DNA, 20 bp, Artificial Sequence
  Description of Artificial Sequence: Synthetic oligonucleotide
  Target: LAMA2; (-) strand; PAM type: NRG; PAM sequence: TAG
aaatttgtttgagttcattg

SEQ ID NO: 118659 - DNA, 20 bp, Artificial Sequence
  Description of Artificial Sequence: Synthetic oligonucleotide
  Target: LAMA2; (-) strand; PAM type: NRG; PAM sequence: GAG
tttttcttgtaaatttgttt

SEQ ID NO: 118660 - DNA, 20 bp, Artificial Sequence
  Description of Artificial Sequence: Synthetic oligonucleotide
  Target: LAMA2; (-) strand; PAM type: NRG; PAM sequence: GGG
cctttgcccactttttgatg

SEQ ID NO: 118661 - DNA, 20 bp, Artificial Sequence
  Description of Artificial Sequence: Synthetic oligonucleotide
  Target: LAMA2; (-) strand; PAM type: NRG; PAM sequence: GGG
tcctttgcccactttttgat

SEQ ID NO: 118662 - DNA, 20 bp, Artificial Sequence
  Description of Artificial Sequence: Synthetic oligonucleotide
  Target: LAMA2; (-) strand; PAM type: NRG; PAM sequence: TGG
atcctttgcccactttttga

SEQ ID NO: 118663 - DNA, 20 bp, Artificial Sequence
  Description of Artificial Sequence: Synthetic oligonucleotide
  Target: LAMA2; (-) strand; PAM type: NRG; PAM sequence: AAG
cataaatgtctccttctgag

SEQ ID NO: 118664 - DNA, 20 bp, Artificial Sequence
  Description of Artificial Sequence: Synthetic oligonucleotide
  Target: LAMA2; (-) strand; PAM type: NRG; PAM sequence: GAG
ctgcataaatgtctccttct

SEQ ID NO: 118665 - DNA, 20 bp, Artificial Sequence
  Description of Artificial Sequence: Synthetic oligonucleotide
  Target: LAMA2; (-) strand; PAM type: NRG; PAM sequence: TGG
gcattttttcatgtgtcttt

SEQ ID NO: 118666 - DNA, 20 bp, Artificial Sequence
  Description of Artificial Sequence: Synthetic oligonucleotide
  Target: LAMA2; (-) strand; PAM type: NRG; PAM sequence: GAG
ctctgatggccagtgatgat

SEQ ID NO: 118667 - DNA, 20 bp, Artificial Sequence
  Description of Artificial Sequence: Synthetic oligonucleotide
  Target: LAMA2; (-) strand; PAM type: NRG; PAM sequence: CAG
atttgcatttctctgatggc

SEQ ID NO: 118668 - DNA, 20 bp, Artificial Sequence
  Description of Artificial Sequence: Synthetic oligonucleotide
  Target: LAMA2; (-) strand; PAM type: NRG; PAM sequence: TGG
tttgatttgcatttctctga

SEQ ID NO: 118669 - DNA, 20 bp, Artificial Sequence
  Description of Artificial Sequence: Synthetic oligonucleotide
  Target: LAMA2; (-) strand; PAM type: NRG; PAM sequence: TGG
tgtgagatggtatctcattg

SEQ ID NO: 118670 - DNA, 20 bp, Artificial Sequence
  Description of Artificial Sequence: Synthetic oligonucleotide
  Target: LAMA2; (-) strand; PAM type: NRG; PAM sequence: TGG
ccattctaactggtgtgaga

SEQ ID NO: 118671 - DNA, 20 bp, Artificial Sequence
  Description of Artificial Sequence: Synthetic oligonucleotide
  Target: LAMA2; (-) strand; PAM type: NRG; PAM sequence: GAG
attgccattctaactggtgt

SEQ ID NO: 118672 - DNA, 20 bp, Artificial Sequence
  Description of Artificial Sequence: Synthetic oligonucleotide
  Target: LAMA2; (-) strand; PAM type: NRG; PAM sequence: TGG
ttaatgattgccattctaac

SEQ ID NO: 118673 - DNA, 20 bp, Artificial Sequence
  Description of Artificial Sequence: Synthetic oligonucleotide
  Target: LAMA2; (-) strand; PAM type: NRG; PAM sequence: CAG
ctatttctccacatcctctc

SEQ ID NO: 118674 - DNA, 20 bp, Artificial Sequence
  Description of Artificial Sequence: Synthetic oligonucleotide
  Target: LAMA2; (-) strand; PAM type: NRG; PAM sequence: AAG
cagtcccaccaacagtgtaa

SEQ ID NO: 118675 - DNA, 20 bp, Artificial Sequence
  Description of Artificial Sequence: Synthetic oligonucleotide
  Target: LAMA2; (-) strand; PAM type: NRG; PAM sequence: CAG
ctagtttacagtcccaccaa

SEQ ID NO: 118676 - DNA, 20 bp, Artificial Sequence
  Description of Artificial Sequence: Synthetic oligonucleotide
  Target: LAMA2; (-) strand; PAM type: NRG; PAM sequence: CAG
acaatggttgaactagttta

SEQ ID NO: 118677 - DNA, 20 bp, Artificial Sequence
  Description of Artificial Sequence: Synthetic oligonucleotide
  Target: LAMA2; (-) strand; PAM type: NRG; PAM sequence: TAG
gacttccacaatggttgaac

SEQ ID NO: 118678 - DNA, 20 bp, Artificial Sequence
  Description of Artificial Sequence: Synthetic oligonucleotide
  Target: LAMA2; (-) strand; PAM type: NRG; PAM sequence: TGG
ggccacactgacttccacaa

SEQ ID NO: 118679 - DNA, 20 bp, Artificial Sequence
  Description of Artificial Sequence: Synthetic oligonucleotide
  Target: LAMA2; (-) strand; PAM type: NRG; PAM sequence: TGG
agttctagatccctgaggaa

SEQ ID NO: 118680 - DNA, 20 bp, Artificial Sequence
  Description of Artificial Sequence: Synthetic oligonucleotide
  Target: LAMA2; (-) strand; PAM type: NRG; PAM sequence: AGG
tttctagttctagatccctg

SEQ ID NO: 118681 - DNA, 20 bp, Artificial Sequence
  Description of Artificial Sequence: Synthetic oligonucleotide
  Target: LAMA2; (-) strand; PAM type: NRG; PAM sequence: GAG
atttctagttctagatccct

SEQ ID NO: 118682 - DNA, 20 bp, Artificial Sequence
  Description of Artificial Sequence: Synthetic oligonucleotide
  Target: LAMA2; (-) strand; PAM type: NRG; PAM sequence: TAG
tcaaatggtatttctagttc

SEQ ID NO: 118683 - DNA, 20 bp, Artificial Sequence
  Description of Artificial Sequence: Synthetic oligonucleotide
  Target: LAMA2; (-) strand; PAM type: NRG; PAM sequence: TAG
gctgggtcaaatggtatttc

SEQ ID NO: 118684 - DNA, 20 bp, Artificial Sequence
  Description of Artificial Sequence: Synthetic oligonucleotide
  Target: LAMA2; (-) strand; PAM type: NRG; PAM sequence: TGG
aatgggatggctgggtcaaa

SEQ ID NO: 118685 - DNA, 20 bp, Artificial Sequence
  Description of Artificial Sequence: Synthetic oligonucleotide
  Target: LAMA2; (-) strand; PAM type: NRG; PAM sequence: GGG
tacccagtaatgggatggct

SEQ ID NO: 118686 - DNA, 20 bp, Artificial Sequence
  Description of Artificial Sequence: Synthetic oligonucleotide
  Target: LAMA2; (-) strand; PAM type: NRG; PAM sequence: TGG
atacccagtaatgggatggc

SEQ ID NO: 118687 - DNA, 20 bp, Artificial Sequence
  Description of Artificial Sequence: Synthetic oligonucleotide
  Target: LAMA2; (-) strand; PAM type: NRG; PAM sequence: TGG
gtatatacccagtaatggga

SEQ ID NO: 118688 - DNA, 20 bp, Artificial Sequence
  Description of Artificial Sequence: Synthetic oligonucleotide
  Target: LAMA2; (-) strand; PAM type: NRG; PAM sequence: GGG
ttgggtatatacccagtaat

SEQ ID NO: 118689 - DNA, 20 bp, Artificial Sequence
  Description of Artificial Sequence: Synthetic oligonucleotide
  Target: LAMA2; (-) strand; PAM type: NRG; PAM sequence: TGG
tttgggtatatacccagtaa

SEQ ID NO: 118690 - DNA, 20 bp, Artificial Sequence
  Description of Artificial Sequence: Synthetic oligonucleotide
  Target: LAMA2; (-) strand; PAM type: NRG; PAM sequence: CAG
tagtcctttgggtatatacc

SEQ ID NO: 118691 - DNA, 20 bp, Artificial Sequence
  Description of Artificial Sequence: Synthetic oligonucleotide
  Target: LAMA2; (-) strand; PAM type: NRG; PAM sequence: GGG
agcatgatttatagtccttt

SEQ ID NO: 118692 - DNA, 20 bp, Artificial Sequence
  Description of Artificial Sequence: Synthetic oligonucleotide
  Target: LAMA2; (-) strand; PAM type: NRG; PAM sequence: TGG
cagcatgatttatagtcctt

SEQ ID NO: 118693 - DNA, 20 bp, Artificial Sequence
  Description of Artificial Sequence: Synthetic oligonucleotide
  Target: LAMA2; (-) strand; PAM type: NRG; PAM sequence: TAG
ctttatagcagcatgattta

SEQ ID NO: 118694 - DNA, 20 bp, Artificial Sequence
  Description of Artificial Sequence: Synthetic oligonucleotide
  Target: LAMA2; (-) strand; PAM type: NRG; PAM sequence: CAG
atgtgcatgtgtctttatag

SEQ ID NO: 118695 - DNA, 20 bp, Artificial Sequence
  Description of Artificial Sequence: Synthetic oligonucleotide
  Target: LAMA2; (-) strand; PAM type: NRG; PAM sequence: TAG
tacatgtgcatgtgtcttta

SEQ ID NO: 118696 - DNA, 20 bp, Artificial Sequence
  Description of Artificial Sequence: Synthetic oligonucleotide
  Target: LAMA2; (-) strand; PAM type: NRG; PAM sequence: TAG
caagtctttgctattgtgaa

SEQ ID NO: 118697 - DNA, 20 bp, Artificial Sequence
  Description of Artificial Sequence: Synthetic oligonucleotide
  Target: LAMA2; (-) strand; PAM type: NRG; PAM sequence: AAG
tggacatttgggttggttcc

SEQ ID NO: 118698 - DNA, 20 bp, Artificial Sequence
  Description of Artificial Sequence: Synthetic oligonucleotide
  Target: LAMA2; (-) strand; PAM type: NRG; PAM sequence: TGG
tcattgttggacatttgggt

SEQ ID NO: 118699 - DNA, 20 bp, Artificial Sequence
  Description of Artificial Sequence: Synthetic oligonucleotide
  Target: LAMA2; (-) strand; PAM type: NRG; PAM sequence: GGG
tctatcattgttggacattt

SEQ ID NO: 118700 - DNA, 20 bp, Artificial Sequence
  Description of Artificial Sequence: Synthetic oligonucleotide
  Target: LAMA2; (-) strand; PAM type: NRG; PAM sequence: TGG
gtctatcattgttggacatt

SEQ ID NO: 118701 - DNA, 20 bp, Artificial Sequence
  Description of Artificial Sequence: Synthetic oligonucleotide
  Target: LAMA2; (-) strand; PAM type: NRG; PAM sequence: TGG
ttaatccagtctatcattgt

SEQ ID NO: 118702 - DNA, 20 bp, Artificial Sequence
  Description of Artificial Sequence: Synthetic oligonucleotide
  Target: LAMA2; (-) strand; PAM type: NRG; PAM sequence: CAG
tgtgccacatttgcttaatc

SEQ ID NO: 118703 - DNA, 20 bp, Artificial Sequence
  Description of Artificial Sequence: Synthetic oligonucleotide
  Target: LAMA2; (-) strand; PAM type: NRG; PAM sequence: TGG
tttttatgcatactattcca

SEQ ID NO: 118704 - DNA, 20 bp, Artificial Sequence
  Description of Artificial Sequence: Synthetic oligonucleotide
  Target: LAMA2; (-) strand; PAM type: NRG; PAM sequence: AGG
tttcatccatgtccctacaa

SEQ ID NO: 118705 - DNA, 20 bp, Artificial Sequence
  Description of Artificial Sequence: Synthetic oligonucleotide
  Target: LAMA2; (-) strand; PAM type: NRG; PAM sequence: AAG
gtttcatccatgtccctaca

SEQ ID NO: 118706 - DNA, 20 bp, Artificial Sequence
  Description of Artificial Sequence: Synthetic oligonucleotide
  Target: LAMA2; (-) strand; PAM type: NRG; PAM sequence: CAG
ttactgagaatgatgatttc

SEQ ID NO: 118707 - DNA, 20 bp, Artificial Sequence
  Description of Artificial Sequence: Synthetic oligonucleotide
  Target: LAMA2; (-) strand; PAM type: NRG; PAM sequence: GAG
tgtccttgtgatagtttact

SEQ ID NO: 118708 - DNA, 20 bp, Artificial Sequence
  Description of Artificial Sequence: Synthetic oligonucleotide
  Target: LAMA2; (-) strand; PAM type: NRG; PAM sequence: TAG
ttggttttttgtccttgtga

SEQ ID NO: 118709 - DNA, 20 bp, Artificial Sequence
  Description of Artificial Sequence: Synthetic oligonucleotide
  Target: LAMA2; (-) strand; PAM type: NRG; PAM sequence: TGG
gagtgagaacatgcgttgtt

SEQ ID NO: 118710 - DNA, 20 bp, Artificial Sequence
  Description of Artificial Sequence: Synthetic oligonucleotide
  Target: LAMA2; (-) strand; PAM type: NRG; PAM sequence: GAG
ttcaattcccatctatgagt

SEQ ID NO: 118711 - DNA, 20 bp, Artificial Sequence
  Description of Artificial Sequence: Synthetic oligonucleotide
  Target: LAMA2; (-) strand; PAM type: NRG; PAM sequence: GAG
attgttcaattcccatctat

SEQ ID NO: 118712 - DNA, 20 bp, Artificial Sequence
  Description of Artificial Sequence: Synthetic oligonucleotide
  Target: LAMA2; (-) strand; PAM type: NRG; PAM sequence: GAG
ccaccccaaaacagtcccca

SEQ ID NO: 118713 - DNA, 20 bp, Artificial Sequence
  Description of Artificial Sequence: Synthetic oligonucleotide
  Target: LAMA2; (-) strand; PAM type: NRG; PAM sequence: CAG
ccccaccccaaaacagtccc

SEQ ID NO: 118714 - DNA, 20 bp, Artificial Sequence
  Description of Artificial Sequence: Synthetic oligonucleotide
  Target: LAMA2; (-) strand; PAM type: NRG; PAM sequence: CAG
cccctccccccaccccaaaa

SEQ ID NO: 118715 - DNA, 20 bp, Artificial Sequence
  Description of Artificial Sequence: Synthetic oligonucleotide
  Target: LAMA2; (-) strand; PAM type: NRG; PAM sequence: AGG
ttaactcatcatttaacatt

SEQ ID NO: 118716 - DNA, 20 bp, Artificial Sequence
  Description of Artificial Sequence: Synthetic oligonucleotide
  Target: LAMA2; (-) strand; PAM type: NRG; PAM sequence: TAG
attaactcatcatttaacat

SEQ ID NO: 118717 - DNA, 20 bp, Artificial Sequence
  Description of Artificial Sequence: Synthetic oligonucleotide
  Target: LAMA2; (-) strand; PAM type: NRG; PAM sequence: TGG
tatgtatacatgtgccatgc

SEQ ID NO: 118718 - DNA, 20 bp, Artificial Sequence
  Description of Artificial Sequence: Synthetic oligonucleotide
  Target: LAMA2; (-) strand; PAM type: NRG; PAM sequence: TAG
catgtgcacaatgtgccggt

SEQ ID NO: 118719 - DNA, 20 bp, Artificial Sequence
  Description of Artificial Sequence: Synthetic oligonucleotide
  Target: LAMA2; (-) strand; PAM type: NRG; PAM sequence: CGG
ggtacatgtgcacaatgtgc

SEQ ID NO: 118720 - DNA, 20 bp, Artificial Sequence
  Description of Artificial Sequence: Synthetic oligonucleotide
  Target: LAMA2; (-) strand; PAM type: NRG; PAM sequence: GGG
ttattatactttaagtttaa

SEQ ID NO: 118721 - DNA, 20 bp, Artificial Sequence
  Description of Artificial Sequence: Synthetic oligonucleotide
  Target: LAMA2; (-) strand; PAM type: NRG; PAM sequence: AGG
attattatactttaagttta

SEQ ID NO: 118722 - DNA, 20 bp, Artificial Sequence
  Description of Artificial Sequence: Synthetic oligonucleotide
  Target: LAMA2; (-) strand; PAM type: NRG; PAM sequence: AAG
tattattatactttaagttt

SEQ ID NO: 118723 - DNA, 20 bp, Artificial Sequence
  Description of Artificial Sequence: Synthetic oligonucleotide
  Target: LAMA2; (-) strand; PAM type: NRG; PAM sequence: AAG
ttttattattattatacttt

SEQ ID NO: 118724 - DNA, 20 bp, Artificial Sequence
  Description of Artificial Sequence: Synthetic oligonucleotide
  Target: LAMA2; (-) strand; PAM type: NRG; PAM sequence: TAG
gataatgtttctttttagaa

SEQ ID NO: 118725 - DNA, 20 bp, Artificial Sequence
  Description of Artificial Sequence: Synthetic oligonucleotide
  Target: LAMA2; (-) strand; PAM type: NRG; PAM sequence: TAG
tggaggataatgtttctttt

SEQ ID NO: 118726 - DNA, 20 bp, Artificial Sequence
  Description of Artificial Sequence: Synthetic oligonucleotide
  Target: LAMA2; (-) strand; PAM type: NRG; PAM sequence: AGG
aaaactctttgttggcatgg

SEQ ID NO: 118727 - DNA, 20 bp, Artificial Sequence
  Description of Artificial Sequence: Synthetic oligonucleotide
  Target: LAMA2; (-) strand; PAM type: NRG; PAM sequence: GAG
taaaactctttgttggcatg

SEQ ID NO: 118728 - DNA, 20 bp, Artificial Sequence
  Description of Artificial Sequence: Synthetic oligonucleotide
  Target: LAMA2; (-) strand; PAM type: NRG; PAM sequence: TGG
tataaaactctttgttggca

SEQ ID NO: 118729 - DNA, 20 bp, Artificial Sequence
  Description of Artificial Sequence: Synthetic oligonucleotide
  Target: LAMA2; (-) strand; PAM type: NRG; PAM sequence: TGG
atgactataaaactctttgt

SEQ ID NO: 118730 - DNA, 20 bp, Artificial Sequence
  Description of Artificial Sequence: Synthetic oligonucleotide
  Target: LAMA2; (-) strand; PAM type: NRG; PAM sequence: TAG
tgccaagacaaagctaatag

SEQ ID NO: 118731 - DNA, 20 bp, Artificial Sequence
  Description of Artificial Sequence: Synthetic oligonucleotide
  Target: LAMA2; (-) strand; PAM type: NRG; PAM sequence: TAG
aattgccaagacaaagctaa

SEQ ID NO: 118732 - DNA, 20 bp, Artificial Sequence
  Description of Artificial Sequence: Synthetic oligonucleotide
  Target: LAMA2; (-) strand; PAM type: NRG; PAM sequence: AAG
gtgtggaaattgccaagaca

SEQ ID NO: 118733 - DNA, 20 bp, Artificial Sequence
  Description of Artificial Sequence: Synthetic oligonucleotide
  Target: LAMA2; (-) strand; PAM type: NRG; PAM sequence: AAG
taatgggtgtggaaattgcc

SEQ ID NO: 118734 - DNA, 20 bp, Artificial Sequence
  Description of Artificial Sequence: Synthetic oligonucleotide
  Target: LAMA2; (-) strand; PAM type: NRG; PAM sequence: TGG
attattatttttaatgggtg

SEQ ID NO: 118735 - DNA, 20 bp, Artificial Sequence
  Description of Artificial Sequence: Synthetic oligonucleotide
  Target: LAMA2; (-) strand; PAM type: NRG; PAM sequence: GGG
ataatattattatttttaat

SEQ ID NO: 118736 - DNA, 20 bp, Artificial Sequence
  Description of Artificial Sequence: Synthetic oligonucleotide
  Target: LAMA2; (-) strand; PAM type: NRG; PAM sequence: TGG
tataatattattatttttaa

SEQ ID NO: 118737 - DNA, 20 bp, Artificial Sequence
  Description of Artificial Sequence: Synthetic oligonucleotide
  Target: LAMA2; (-) strand; PAM type: NRG; PAM sequence: TGG
caggtgtgaactactgcacc

SEQ ID NO: 118738 - DNA, 20 bp, Artificial Sequence
  Description of Artificial Sequence: Synthetic oligonucleotide
  Target: LAMA2; (-) strand; PAM type: NRG; PAM sequence: AGG
gaccaaagtgctgggattac

SEQ ID NO: 118739 - DNA, 20 bp, Artificial Sequence
  Description of Artificial Sequence: Synthetic oligonucleotide
  Target: LAMA2; (-) strand; PAM type: NRG; PAM sequence: CAG
cgaccaaagtgctgggatta

SEQ ID NO: 118740 - DNA, 20 bp, Artificial Sequence
  Description of Artificial Sequence: Synthetic oligonucleotide
  Target: LAMA2; (-) strand; PAM type: NRG; PAM sequence: GGG
gcctgagcgaccaaagtgct

SEQ ID NO: 118741 - DNA, 20 bp, Artificial Sequence
  Description of Artificial Sequence: Synthetic oligonucleotide
  Target: LAMA2; (-) strand; PAM type: NRG; PAM sequence: TGG
tgcctgagcgaccaaagtgc

SEQ ID NO: 118742 - DNA, 20 bp, Artificial Sequence
  Description of Artificial Sequence: Synthetic oligonucleotide
  Target: LAMA2; (-) strand; PAM type: NRG; PAM sequence: AAG
tcctcctgcctgagcgacca

SEQ ID NO: 118743 - DNA, 20 bp, Artificial Sequence
  Description of Artificial Sequence: Synthetic oligonucleotide
  Target: LAMA2; (-) strand; PAM type: NRG; PAM sequence: GAG
ttccactgatcctcctgcct

SEQ ID NO: 118744 - DNA, 20 bp, Artificial Sequence
  Description of Artificial Sequence: Synthetic oligonucleotide
  Target: LAMA2; (-) strand; PAM type: NRG; PAM sequence: GGG
caggctggtctcaaactcct

SEQ ID NO: 118745 - DNA, 20 bp, Artificial Sequence
  Description of Artificial Sequence: Synthetic oligonucleotide
  Target: LAMA2; (-) strand; PAM type: NRG; PAM sequence: TGG
ccaggctggtctcaaactcc

SEQ ID NO: 118746 - DNA, 20 bp, Artificial Sequence
  Description of Artificial Sequence: Synthetic oligonucleotide
  Target: LAMA2; (-) strand; PAM type: NRG; PAM sequence: TGG
tctccctatgttgcccaggc

SEQ ID NO: 118747 - DNA, 20 bp, Artificial Sequence
  Description of Artificial Sequence: Synthetic oligonucleotide
  Target: LAMA2; (-) strand; PAM type: NRG; PAM sequence: AGG
agggtctccctatgttgccc

SEQ ID NO: 118748 - DNA, 20 bp, Artificial Sequence
  Description of Artificial Sequence: Synthetic oligonucleotide
  Target: LAMA2; (-) strand; PAM type: NRG; PAM sequence: CAG
cagggtctccctatgttgcc

SEQ ID NO: 118749 - DNA, 20 bp, Artificial Sequence
  Description of Artificial Sequence: Synthetic oligonucleotide
  Target: LAMA2; (-) strand; PAM type: NRG; PAM sequence: GGG
ttaaatttttggtagagaca

SEQ ID NO: 118750 - DNA, 20 bp, Artificial Sequence
  Description of Artificial Sequence: Synthetic oligonucleotide
  Target: LAMA2; (-) strand; PAM type: NRG; PAM sequence: AGG
tttaaatttttggtagagac

SEQ ID NO: 118751 - DNA, 20 bp, Artificial Sequence
  Description of Artificial Sequence: Synthetic oligonucleotide
  Target: LAMA2; (-) strand; PAM type: NRG; PAM sequence: CAG
ttttaaatttttggtagaga

SEQ ID NO: 118752 - DNA, 20 bp, Artificial Sequence
  Description of Artificial Sequence: Synthetic oligonucleotide
  Target: LAMA2; (-) strand; PAM type: NRG; PAM sequence: GAG
taatttttaaatttttggta

SEQ ID NO: 118753 - DNA, 20 bp, Artificial Sequence
  Description of Artificial Sequence: Synthetic oligonucleotide
  Target: LAMA2; (-) strand; PAM type: NRG; PAM sequence: TAG
gctaatttttaaatttttgg

SEQ ID NO: 118754 - DNA, 20 bp, Artificial Sequence
  Description of Artificial Sequence: Synthetic oligonucleotide
  Target: LAMA2; (-) strand; PAM type: NRG; PAM sequence: TGG
ctggctaatttttaaatttt

SEQ ID NO: 118755 - DNA, 20 bp, Artificial Sequence
  Description of Artificial Sequence: Synthetic oligonucleotide
  Target: LAMA2; (-) strand; PAM type: NRG; PAM sequence: TGG
taggtgcatgccactatgcc

SEQ ID NO: 118756 - DNA, 20 bp, Artificial Sequence
  Description of Artificial Sequence: Synthetic oligonucleotide
  Target: LAMA2; (-) strand; PAM type: NRG; PAM sequence: AGG
cctggagtagctaggactat

SEQ ID NO: 118757 - DNA, 20 bp, Artificial Sequence
  Description of Artificial Sequence: Synthetic oligonucleotide
  Target: LAMA2; (-) strand; PAM type: NRG; PAM sequence: TAG
tcctggagtagctaggacta

SEQ ID NO: 118758 - DNA, 20 bp, Artificial Sequence
  Description of Artificial Sequence: Synthetic oligonucleotide
  Target: LAMA2; (-) strand; PAM type: NRG; PAM sequence: AGG
atcaacctcctggagtagct

SEQ ID NO: 118759 - DNA, 20 bp, Artificial Sequence
  Description of Artificial Sequence: Synthetic oligonucleotide
  Target: LAMA2; (-) strand; PAM type: NRG; PAM sequence: TAG
catcaacctcctggagtagc

SEQ ID NO: 118760 - DNA, 20 bp, Artificial Sequence
  Description of Artificial Sequence: Synthetic oligonucleotide
  Target: LAMA2; (-) strand; PAM type: NRG; PAM sequence: TAG
cctgcatcaacctcctggag

SEQ ID NO: 118761 - DNA, 20 bp, Artificial Sequence
  Description of Artificial Sequence: Synthetic oligonucleotide
  Target: LAMA2; (-) strand; PAM type: NRG; PAM sequence: GAG
cttcctgcatcaacctcctg

SEQ ID NO: 118762 - DNA, 20 bp, Artificial Sequence
  Description of Artificial Sequence: Synthetic oligonucleotide
  Target: LAMA2; (-) strand; PAM type: NRG; PAM sequence: TGG
atcttcctgcatcaacctcc

SEQ ID NO: 118763 - DNA, 20 bp, Artificial Sequence
  Description of Artificial Sequence: Synthetic oligonucleotide
  Target: LAMA2; (-) strand; PAM type: NRG; PAM sequence: AAG
agctttgacctcccaggctc

SEQ ID NO: 118764 - DNA, 20 bp, Artificial Sequence
  Description of Artificial Sequence: Synthetic oligonucleotide
  Target: LAMA2; (-) strand; PAM type: NRG; PAM sequence: AGG
cactggagctttgacctccc

SEQ ID NO: 118765 - DNA, 20 bp, Artificial Sequence
  Description of Artificial Sequence: Synthetic oligonucleotide
  Target: LAMA2; (-) strand; PAM type: NRG; PAM sequence: CAG
tcactggagctttgacctcc

SEQ ID NO: 118766 - DNA, 20 bp, Artificial Sequence
  Description of Artificial Sequence: Synthetic oligonucleotide
  Target: LAMA2; (-) strand; PAM type: NRG; PAM sequence: GAG
gtataatcatcagctcactg

SEQ ID NO: 118767 - DNA, 20 bp, Artificial Sequence
  Description of Artificial Sequence: Synthetic oligonucleotide
  Target: LAMA2; (-) strand; PAM type: NRG; PAM sequence: TGG
tggtataatcatcagctcac

SEQ ID NO: 118768 - DNA, 20 bp, Artificial Sequence
  Description of Artificial Sequence: Synthetic oligonucleotide
  Target: LAMA2; (-) strand; PAM type: NRG; PAM sequence: CAG
gagtgcagtggtataatcat

SEQ ID NO: 118769 - DNA, 20 bp, Artificial Sequence
  Description of Artificial Sequence: Synthetic oligonucleotide
  Target: LAMA2; (-) strand; PAM type: NRG; PAM sequence: TGG
ttgcccaggctggagtgcag

SEQ ID NO: 118770 - DNA, 20 bp, Artificial Sequence
  Description of Artificial Sequence: Synthetic oligonucleotide
  Target: LAMA2; (-) strand; PAM type: NRG; PAM sequence: CAG
ctgttgcccaggctggagtg

SEQ ID NO: 118771 - DNA, 20 bp, Artificial Sequence
  Description of Artificial Sequence: Synthetic oligonucleotide
  Target: LAMA2; (-) strand; PAM type: NRG; PAM sequence: GAG
ttgctctgttgcccaggctg

SEQ ID NO: 118772 - DNA, 20 bp, Artificial Sequence
  Description of Artificial Sequence: Synthetic oligonucleotide
  Target: LAMA2; (-) strand; PAM type: NRG; PAM sequence: TGG
tcttgctctgttgcccaggc

SEQ ID NO: 118773 - DNA, 20 bp, Artificial Sequence
  Description of Artificial Sequence: Synthetic oligonucleotide
  Target: LAMA2; (-) strand; PAM type: NRG; PAM sequence: AGG
agggtcttgctctgttgccc

SEQ ID NO: 118774 - DNA, 20 bp, Artificial Sequence
  Description of Artificial Sequence: Synthetic oligonucleotide
  Target: LAMA2; (-) strand; PAM type: NRG; PAM sequence: CAG
cagggtcttgctctgttgcc

SEQ ID NO: 118775 - DNA, 20 bp, Artificial Sequence
  Description of Artificial Sequence: Synthetic oligonucleotide
  Target: LAMA2; (-) strand; PAM type: NRG; PAM sequence: GGG
tatttctttcatttgagaca

SEQ ID NO: 118776 - DNA, 20 bp, Artificial Sequence
  Description of Artificial Sequence: Synthetic oligonucleotide
  Target: LAMA2; (-) strand; PAM type: NRG; PAM sequence: AGG
atatttctttcatttgagac

SEQ ID NO: 118777 - DNA, 20 bp, Artificial Sequence
  Description of Artificial Sequence: Synthetic oligonucleotide
  Target: LAMA2; (-) strand; PAM type: NRG; PAM sequence: CAG
gatatttctttcatttgaga

SEQ ID NO: 118778 - DNA, 20 bp, Artificial Sequence
  Description of Artificial Sequence: Synthetic oligonucleotide
  Target: LAMA2; (-) strand; PAM type: NRG; PAM sequence: GAG
aaaagatatttctttcattt

SEQ ID NO: 118779 - DNA, 20 bp, Artificial Sequence
  Description of Artificial Sequence: Synthetic oligonucleotide
  Target: LAMA2; (-) strand; PAM type: NRG; PAM sequence: AAG
gattcaatatttgatataaa

SEQ ID NO: 118780 - DNA, 20 bp, Artificial Sequence
  Description of Artificial Sequence: Synthetic oligonucleotide
  Target: LAMA2; (-) strand; PAM type: NRG; PAM sequence: TAG
gttttatatattaaattcac

SEQ ID NO: 118781 - DNA, 20 bp, Artificial Sequence
  Description of Artificial Sequence: Synthetic oligonucleotide
  Target: LAMA2; (-) strand; PAM type: NRG; PAM sequence: TAG
tttggttaaaagatattcac

SEQ ID NO: 118782 - DNA, 20 bp, Artificial Sequence
  Description of Artificial Sequence: Synthetic oligonucleotide
  Target: LAMA2; (-) strand; PAM type: NRG; PAM sequence: AAG
atttcttaaagtttggttaa

SEQ ID NO: 118783 - DNA, 20 bp, Artificial Sequence
  Description of Artificial Sequence: Synthetic oligonucleotide
  Target: LAMA2; (-) strand; PAM type: NRG; PAM sequence: TGG
aagttttatttcttaaagtt

SEQ ID NO: 118784 - DNA, 20 bp, Artificial Sequence
  Description of Artificial Sequence: Synthetic oligonucleotide
  Target: LAMA2; (-) strand; PAM type: NRG; PAM sequence: AAG
tcaaaaagttttatttctta

SEQ ID NO: 118785 - DNA, 20 bp, Artificial Sequence
  Description of Artificial Sequence: Synthetic oligonucleotide
  Target: LAMA2; (-) strand; PAM type: NRG; PAM sequence: AAG
aaaacacattggttttcaaa

SEQ ID NO: 118786 - DNA, 20 bp, Artificial Sequence
  Description of Artificial Sequence: Synthetic oligonucleotide
  Target: LAMA2; (-) strand; PAM type: NRG; PAM sequence: TGG
tttccacttttaaaacacat

SEQ ID NO: 118787 - DNA, 20 bp, Artificial Sequence
  Description of Artificial Sequence: Synthetic oligonucleotide
  Target: LAMA2; (-) strand; PAM type: NRG; PAM sequence: CAG
agtcatgtcagcgtttagtg

SEQ ID NO: 118788 - DNA, 20 bp, Artificial Sequence
  Description of Artificial Sequence: Synthetic oligonucleotide
  Target: LAMA2; (-) strand; PAM type: NRG; PAM sequence: TAG
caaaaagtcatgtcagcgtt

SEQ ID NO: 118789 - DNA, 20 bp, Artificial Sequence
  Description of Artificial Sequence: Synthetic oligonucleotide
  Target: LAMA2; (-) strand; PAM type: NRG; PAM sequence: CAG
ttaagcccaaaaagtcatgt

SEQ ID NO: 118790 - DNA, 20 bp, Artificial Sequence
  Description of Artificial Sequence: Synthetic oligonucleotide
  Target: LAMA2; (-) strand; PAM type: NRG; PAM sequence: AAG
gtgtccagattaagcccaaa

SEQ ID NO: 118791 - DNA, 20 bp, Artificial Sequence
  Description of Artificial Sequence: Synthetic oligonucleotide
  Target: LAMA2; (-) strand; PAM type: NRG; PAM sequence: AAG
tcccactcagtgtccagatt

SEQ ID NO: 118792 - DNA, 20 bp, Artificial Sequence
  Description of Artificial Sequence: Synthetic oligonucleotide
  Target: LAMA2; (-) strand; PAM type: NRG; PAM sequence: CAG
tgtttatcccactcagtgtc

SEQ ID NO: 118793 - DNA, 20 bp, Artificial Sequence
  Description of Artificial Sequence: Synthetic oligonucleotide
  Target: LAMA2; (-) strand; PAM type: NRG; PAM sequence: CAG
ttattcctgtttatcccact

SEQ ID NO: 118794 - DNA, 20 bp, Artificial Sequence
  Description of Artificial Sequence: Synthetic oligonucleotide
  Target: LAMA2; (-) strand; PAM type: NRG; PAM sequence: AGG
aggctttagcttttaatcta

SEQ ID NO: 118795 - DNA, 20 bp, Artificial Sequence
  Description of Artificial Sequence: Synthetic oligonucleotide
  Target: LAMA2; (-) strand; PAM type: NRG; PAM sequence: AAG
aaggctttagcttttaatct

SEQ ID NO: 118796 - DNA, 20 bp, Artificial Sequence
  Description of Artificial Sequence: Synthetic oligonucleotide
  Target: LAMA2; (-) strand; PAM type: NRG; PAM sequence: TAG
gactcaagaaagaaaggctt

SEQ ID NO: 118797 - DNA, 20 bp, Artificial Sequence
  Description of Artificial Sequence: Synthetic oligonucleotide
  Target: LAMA2; (-) strand; PAM type: NRG; PAM sequence: AGG
gtgcaggactcaagaaagaa

SEQ ID NO: 118798 - DNA, 20 bp, Artificial Sequence
  Description of Artificial Sequence: Synthetic oligonucleotide
  Target: LAMA2; (-) strand; PAM type: NRG; PAM sequence: AAG
tgtgcaggactcaagaaaga

SEQ ID NO: 118799 - DNA, 20 bp, Artificial Sequence
  Description of Artificial Sequence: Synthetic oligonucleotide
  Target: LAMA2; (-) strand; PAM type: NRG; PAM sequence: AAG
tttctgtgcaggactcaaga

SEQ ID NO: 118800 - DNA, 20 bp, Artificial Sequence
  Description of Artificial Sequence: Synthetic oligonucleotide
  Target: LAMA2; (-) strand; PAM type: NRG; PAM sequence: AAG
tatctttctgtgcaggactc

SEQ ID NO: 118801 - DNA, 20 bp, Artificial Sequence
  Description of Artificial Sequence: Synthetic oligonucleotide
  Target: LAMA2; (-) strand; PAM type: NRG; PAM sequence: AGG
tgttacatatctttctgtgc

SEQ ID NO: 118802 - DNA, 20 bp, Artificial Sequence
  Description of Artificial Sequence: Synthetic oligonucleotide
  Target: LAMA2; (-) strand; PAM type: NRG; PAM sequence: CAG
ttgttacatatctttctgtg

SEQ ID NO: 118803 - DNA, 20 bp, Artificial Sequence
  Description of Artificial Sequence: Synthetic oligonucleotide
  Target: LAMA2; (-) strand; PAM type: NRG; PAM sequence: GAG
gcaggactttattctgatag

SEQ ID NO: 118804 - DNA, 20 bp, Artificial Sequence
  Description of Artificial Sequence: Synthetic oligonucleotide
  Target: LAMA2; (-) strand; PAM type: NRG; PAM sequence: AGG
aggcaggactttattctgat

SEQ ID NO: 118805 - DNA, 20 bp, Artificial Sequence
  Description of Artificial Sequence: Synthetic oligonucleotide
  Target: LAMA2; (-) strand; PAM type: NRG; PAM sequence: TAG
gaggcaggactttattctga

SEQ ID NO: 118806 - DNA, 20 bp, Artificial Sequence
  Description of Artificial Sequence: Synthetic oligonucleotide
  Target: LAMA2; (-) strand; PAM type: NRG; PAM sequence: AGG
acctacaaattgactgaggc

SEQ ID NO: 118807 - DNA, 20 bp, Artificial Sequence
  Description of Artificial Sequence: Synthetic oligonucleotide
  Target: LAMA2; (-) strand; PAM type: NRG; PAM sequence: CAG
tacctacaaattgactgagg

SEQ ID NO: 118808 - DNA, 20 bp, Artificial Sequence
  Description of Artificial Sequence: Synthetic oligonucleotide
  Target: LAMA2; (-) strand; PAM type: NRG; PAM sequence: AGG
atctacctacaaattgactg

SEQ ID NO: 118809 - DNA, 20 bp, Artificial Sequence
  Description of Artificial Sequence: Synthetic oligonucleotide
  Target: LAMA2; (-) strand; PAM type: NRG; PAM sequence: GAG
catctacctacaaattgact

SEQ ID NO: 118810 - DNA, 20 bp, Artificial Sequence
  Description of Artificial Sequence: Synthetic oligonucleotide
  Target: LAMA2; (-) strand; PAM type: NRG; PAM sequence: AGG
tctatcattctatcattcta

SEQ ID NO: 118811 - DNA, 20 bp, Artificial Sequence
  Description of Artificial Sequence: Synthetic oligonucleotide
  Target: LAMA2; (-) strand; PAM type: NRG; PAM sequence: AAG
ttctatcattctatcattct

SEQ ID NO: 118812 - DNA, 20 bp, Artificial Sequence
  Description of Artificial Sequence: Synthetic oligonucleotide
  Target: LAMA2; (-) strand; PAM type: NRG; PAM sequence: CAG
cgctgatctcaattcacttc

SEQ ID NO: 118813 - DNA, 20 bp, Artificial Sequence
  Description of Artificial Sequence: Synthetic oligonucleotide
  Target: LAMA2; (-) strand; PAM type: NRG; PAM sequence: GAG
ttaaacatctagctagactt

SEQ ID NO: 118814 - DNA, 20 bp, Artificial Sequence
  Description of Artificial Sequence: Synthetic oligonucleotide
  Target: LAMA2; (-) strand; PAM type: NRG; PAM sequence: TAG
aagcactttaaacatctagc

SEQ ID NO: 118815 - DNA, 20 bp, Artificial Sequence
  Description of Artificial Sequence: Synthetic oligonucleotide
  Target: LAMA2; (-) strand; PAM type: NRG; PAM sequence: TAG
cccaaagcactttaaacatc

SEQ ID NO: 118816 - DNA, 20 bp, Artificial Sequence
  Description of Artificial Sequence: Synthetic oligonucleotide
  Target: LAMA2; (-) strand; PAM type: NRG; PAM sequence: AAG
gtagattttttaagcaccca

SEQ ID NO: 118817 - DNA, 20 bp, Artificial Sequence
  Description of Artificial Sequence: Synthetic oligonucleotide
  Target: LAMA2; (-) strand; PAM type: NRG; PAM sequence: AAG
agcccaaatgtagatttttt

SEQ ID NO: 118818 - DNA, 20 bp, Artificial Sequence
  Description of Artificial Sequence: Synthetic oligonucleotide
  Target: LAMA2; (-) strand; PAM type: NRG; PAM sequence: TAG
tgctgtgcccagcccaaatg

SEQ ID NO: 118819 - DNA, 20 bp, Artificial Sequence
  Description of Artificial Sequence: Synthetic oligonucleotide
  Target: LAMA2; (-) strand; PAM type: NRG; PAM sequence: CAG
caggcgtgagctgctgtgcc

SEQ ID NO: 118820 - DNA, 20 bp, Artificial Sequence
  Description of Artificial Sequence: Synthetic oligonucleotide
  Target: LAMA2; (-) strand; PAM type: NRG; PAM sequence: GAG
agtgttgggattacaggcgt

SEQ ID NO: 118821 - DNA, 20 bp, Artificial Sequence
  Description of Artificial Sequence: Synthetic oligonucleotide
  Target: LAMA2; (-) strand; PAM type: NRG; PAM sequence: AGG
tcccagagtgttgggattac

SEQ ID NO: 118822 - DNA, 20 bp, Artificial Sequence
  Description of Artificial Sequence: Synthetic oligonucleotide
  Target: LAMA2; (-) strand; PAM type: NRG; PAM sequence: CAG
ctcccagagtgttgggatta

SEQ ID NO: 118823 - DNA, 20 bp, Artificial Sequence
  Description of Artificial Sequence: Synthetic oligonucleotide
  Target: LAMA2; (-) strand; PAM type: NRG; PAM sequence: GGG
ccttggcctcccagagtgtt

SEQ ID NO: 118824 - DNA, 20 bp, Artificial Sequence
  Description of Artificial Sequence: Synthetic oligonucleotide
  Target: LAMA2; (-) strand; PAM type: NRG; PAM sequence: TGG
gccttggcctcccagagtgt

SEQ ID NO: 118825 - DNA, 20 bp, Artificial Sequence
  Description of Artificial Sequence: Synthetic oligonucleotide
  Target: LAMA2; (-) strand; PAM type: NRG; PAM sequence: GAG
cctcctgccttggcctccca

SEQ ID NO: 118826 - DNA, 20 bp, Artificial Sequence
  Description of Artificial Sequence: Synthetic oligonucleotide
  Target: LAMA2; (-) strand; PAM type: NRG; PAM sequence: CAG
atcctcctgccttggcctcc

SEQ ID NO: 118827 - DNA, 20 bp, Artificial Sequence
  Description of Artificial Sequence: Synthetic oligonucleotide
  Target: LAMA2; (-) strand; PAM type: NRG; PAM sequence: TGG
cttaagtgatcctcctgcct

SEQ ID NO: 118828 - DNA, 20 bp, Artificial Sequence
  Description of Artificial Sequence: Synthetic oligonucleotide
  Target: LAMA2; (-) strand; PAM type: NRG; PAM sequence: AAG
ggtctcaaactcctgggctt

SEQ ID NO: 118829 - DNA, 20 bp, Artificial Sequence
  Description of Artificial Sequence: Synthetic oligonucleotide
  Target: LAMA2; (-) strand; PAM type: NRG; PAM sequence: GGG
caggctggtctcaaactcct

SEQ ID NO: 118830 - DNA, 20 bp, Artificial Sequence
  Description of Artificial Sequence: Synthetic oligonucleotide
  Target: LAMA2; (-) strand; PAM type: NRG; PAM sequence: TGG
tcaggctggtctcaaactcc

SEQ ID NO: 118831 - DNA, 20 bp, Artificial Sequence
  Description of Artificial Sequence: Synthetic oligonucleotide
  Target: LAMA2; (-) strand; PAM type: NRG; PAM sequence: TGG
tctcactgtgtggctcaggc

SEQ ID NO: 118832 - DNA, 20 bp, Artificial Sequence
  Description of Artificial Sequence: Synthetic oligonucleotide
  Target: LAMA2; (-) strand; PAM type: NRG; PAM sequence: AGG
aaggtctcactgtgtggctc

SEQ ID NO: 118833 - DNA, 20 bp, Artificial Sequence
  Description of Artificial Sequence: Synthetic oligonucleotide
  Target: LAMA2; (-) strand; PAM type: NRG; PAM sequence: CAG
taaggtctcactgtgtggct

SEQ ID NO: 118834 - DNA, 20 bp, Artificial Sequence
  Description of Artificial Sequence: Synthetic oligonucleotide
  Target: LAMA2; (-) strand; PAM type: NRG; PAM sequence: TGG
agagctaaggtctcactgtg

SEQ ID NO: 118835 - DNA, 20 bp, Artificial Sequence
  Description of Artificial Sequence: Synthetic oligonucleotide
  Target: LAMA2; (-) strand; PAM type: NRG; PAM sequence: AGG
tttttttttttttagagcta

SEQ ID NO: 118836 - DNA, 20 bp, Artificial Sequence
  Description of Artificial Sequence: Synthetic oligonucleotide
  Target: LAMA2; (-) strand; PAM type: NRG; PAM sequence: AAG
ttttttttttttttagagct

SEQ ID NO: 118837 - DNA, 20 bp, Artificial Sequence
  Description of Artificial Sequence: Synthetic oligonucleotide
  Target: LAMA2; (-) strand; PAM type: NRG; PAM sequence: GAG
ttttttttttttttttttta

SEQ ID NO: 118838 - DNA, 20 bp, Artificial Sequence
  Description of Artificial Sequence: Synthetic oligonucleotide
  Target: LAMA2; (-) strand; PAM type: NRG; PAM sequence: TAG
tttttttttttttttttttt

SEQ ID NO: 118839 - DNA, 20 bp, Artificial Sequence
  Description of Artificial Sequence: Synthetic oligonucleotide
  Target: LAMA2; (-) strand; PAM type: NRG; PAM sequence: AGG
gcatgcaccaccaacacacc

SEQ ID NO: 118840 - DNA, 20 bp, Artificial Sequence
  Description of Artificial Sequence: Synthetic oligonucleotide
  Target: LAMA2; (-) strand; PAM type: NRG; PAM sequence: CAG
ggcatgcaccaccaacacac

SEQ ID NO: 118841 - DNA, 20 bp, Artificial Sequence
  Description of Artificial Sequence: Synthetic oligonucleotide
  Target: LAMA2; (-) strand; PAM type: NRG; PAM sequence: AGG
ccaaatagtcgggaccacac

SEQ ID NO: 118842 - DNA, 20 bp, Artificial Sequence
  Description of Artificial Sequence: Synthetic oligonucleotide
  Target: LAMA2; (-) strand; PAM type: NRG; PAM sequence: CAG
cccaaatagtcgggaccaca

SEQ ID NO: 118843 - DNA, 20 bp, Artificial Sequence
  Description of Artificial Sequence: Synthetic oligonucleotide
  Target: LAMA2; (-) strand; PAM type: NRG; PAM sequence: GGG
cctcagcttcccaaatagtc

SEQ ID NO: 118844 - DNA, 20 bp, Artificial Sequence
  Description of Artificial Sequence: Synthetic oligonucleotide
  Target: LAMA2; (-) strand; PAM type: NRG; PAM sequence: CGG
acctcagcttcccaaatagt

SEQ ID NO: 118845 - DNA, 20 bp, Artificial Sequence
  Description of Artificial Sequence: Synthetic oligonucleotide
  Target: LAMA2; (-) strand; PAM type: NRG; PAM sequence: TAG
tcccacctcagcttcccaaa

SEQ ID NO: 118846 - DNA, 20 bp, Artificial Sequence
  Description of Artificial Sequence: Synthetic oligonucleotide
  Target: LAMA2; (-) strand; PAM type: NRG; PAM sequence: CAG
ctcaagtgaacctcccacct

SEQ ID NO: 118847 - DNA, 20 bp, Artificial Sequence
  Description of Artificial Sequence: Synthetic oligonucleotide
  Target: LAMA2; (-) strand; PAM type: NRG; PAM sequence: AAG
agccttaacctaccctgctc

SEQ ID NO: 118848 - DNA, 20 bp, Artificial Sequence
  Description of Artificial Sequence: Synthetic oligonucleotide
  Target: LAMA2; (-) strand; PAM type: NRG; PAM sequence: CAG
tcacgatcactggctcactg

SEQ ID NO: 118849 - DNA, 20 bp, Artificial Sequence
  Description of Artificial Sequence: Synthetic oligonucleotide
  Target: LAMA2; (-) strand; PAM type: NRG; PAM sequence: TGG
tagcatagtgtcacgatcac

SEQ ID NO: 118850 - DNA, 20 bp, Artificial Sequence
  Description of Artificial Sequence: Synthetic oligonucleotide
  Target: LAMA2; (-) strand; PAM type: NRG; PAM sequence: TAG
ttgttgcccaggctgtagca

SEQ ID NO: 118851 - DNA, 20 bp, Artificial Sequence
  Description of Artificial Sequence: Synthetic oligonucleotide
  Target: LAMA2; (-) strand; PAM type: NRG; PAM sequence: TAG
ttgctttgttgcccaggctg

SEQ ID NO: 118852 - DNA, 20 bp, Artificial Sequence
  Description of Artificial Sequence: Synthetic oligonucleotide
  Target: LAMA2; (-) strand; PAM type: NRG; PAM sequence: AGG
aggatattgctttgttgccc

SEQ ID NO: 118853 - DNA, 20 bp, Artificial Sequence
  Description of Artificial Sequence: Synthetic oligonucleotide
  Target: LAMA2; (-) strand; PAM type: NRG; PAM sequence: CAG
caggatattgctttgttgcc

SEQ ID NO: 118854 - DNA, 20 bp, Artificial Sequence
  Description of Artificial Sequence: Synthetic oligonucleotide
  Target: LAMA2; (-) strand; PAM type: NRG; PAM sequence: AGG
ttttttttcttttttgagac

SEQ ID NO: 118855 - DNA, 20 bp, Artificial Sequence
  Description of Artificial Sequence: Synthetic oligonucleotide
  Target: LAMA2; (-) strand; PAM type: NRG; PAM sequence: CAG
tttttttttcttttttgaga

SEQ ID NO: 118856 - DNA, 20 bp, Artificial Sequence
  Description of Artificial Sequence: Synthetic oligonucleotide
  Target: LAMA2; (-) strand; PAM type: NRG; PAM sequence: GAG
caattttttttttctttttt

SEQ ID NO: 118857 - DNA, 20 bp, Artificial Sequence
  Description of Artificial Sequence: Synthetic oligonucleotide
  Target: LAMA2; (-) strand; PAM type: NRG; PAM sequence: CAG
aattgggctggggtgacacc

SEQ ID NO: 118858 - DNA, 20 bp, Artificial Sequence
  Description of Artificial Sequence: Synthetic oligonucleotide
  Target: LAMA2; (-) strand; PAM type: NRG; PAM sequence: GGG
attatagtttaattgggctg

SEQ ID NO: 118859 - DNA, 20 bp, Artificial Sequence
  Description of Artificial Sequence: Synthetic oligonucleotide
  Target: LAMA2; (-) strand; PAM type: NRG; PAM sequence: GGG
gattatagtttaattgggct

SEQ ID NO: 118860 - DNA, 20 bp, Artificial Sequence
  Description of Artificial Sequence: Synthetic oligonucleotide
  Target: LAMA2; (-) strand; PAM type: NRG; PAM sequence: TGG
agattatagtttaattgggc

SEQ ID NO: 118861 - DNA, 20 bp, Artificial Sequence
  Description of Artificial Sequence: Synthetic oligonucleotide
  Target: LAMA2; (-) strand; PAM type: NRG; PAM sequence: GGG
ccagagattatagtttaatt

SEQ ID NO: 118862 - DNA, 20 bp, Artificial Sequence
  Description of Artificial Sequence: Synthetic oligonucleotide
  Target: LAMA2; (-) strand; PAM type: NRG; PAM sequence: TGG
cccagagattatagtttaat

SEQ ID NO: 118863 - DNA, 20 bp, Artificial Sequence
  Description of Artificial Sequence: Synthetic oligonucleotide
  Target: LAMA2; (-) strand; PAM type: NRG; PAM sequence: TAG
tgggccctacccagagatta

SEQ ID NO: 118864 - DNA, 20 bp, Artificial Sequence
  Description of Artificial Sequence: Synthetic oligonucleotide
  Target: LAMA2; (-) strand; PAM type: NRG; PAM sequence: GAG
caatgcctgggccctaccca

SEQ ID NO: 118865 - DNA, 20 bp, Artificial Sequence
  Description of Artificial Sequence: Synthetic oligonucleotide
  Target: LAMA2; (-) strand; PAM type: NRG; PAM sequence: CAG
gccaatgcctgggccctacc

SEQ ID NO: 118866 - DNA, 20 bp, Artificial Sequence
  Description of Artificial Sequence: Synthetic oligonucleotide
  Target: LAMA2; (-) strand; PAM type: NRG; PAM sequence: GGG
tttaaaaaatgccaatgcct

SEQ ID NO: 118867 - DNA, 20 bp, Artificial Sequence
  Description of Artificial Sequence: Synthetic oligonucleotide
  Target: LAMA2; (-) strand; PAM type: NRG; PAM sequence: TGG
ttttaaaaaatgccaatgcc

SEQ ID NO: 118868 - DNA, 20 bp, Artificial Sequence
  Description of Artificial Sequence: Synthetic oligonucleotide
  Target: LAMA2; (-) strand; PAM type: NRG; PAM sequence: GGG
tttcacatttgaatcaagtg

SEQ ID NO: 118869 - DNA, 20 bp, Artificial Sequence
  Description of Artificial Sequence: Synthetic oligonucleotide
  Target: LAMA2; (-) strand; PAM type: NRG; PAM sequence: GGG
gtttcacatttgaatcaagt

SEQ ID NO: 118870 - DNA, 20 bp, Artificial Sequence
  Description of Artificial Sequence: Synthetic oligonucleotide
  Target: LAMA2; (-) strand; PAM type: NRG; PAM sequence: TGG
ggtttcacatttgaatcaag

SEQ ID NO: 118871 - DNA, 20 bp, Artificial Sequence
  Description of Artificial Sequence: Synthetic oligonucleotide
  Target: LAMA2; (-) strand; PAM type: NRG; PAM sequence: AAG
cttggtttcacatttgaatc

SEQ ID NO: 118872 - DNA, 20 bp, Artificial Sequence
  Description of Artificial Sequence: Synthetic oligonucleotide
  Target: LAMA2; (-) strand; PAM type: NRG; PAM sequence: TGG
agcccaggggttttcagtct

SEQ ID NO: 118873 - DNA, 20 bp, Artificial Sequence
  Description of Artificial Sequence: Synthetic oligonucleotide
  Target: LAMA2; (-) strand; PAM type: NRG; PAM sequence: CAG
gacaggagcccaggggtttt

SEQ ID NO: 118874 - DNA, 20 bp, Artificial Sequence
  Description of Artificial Sequence: Synthetic oligonucleotide
  Target: LAMA2; (-) strand; PAM type: NRG; PAM sequence: GGG
tggaggtgacaggagcccag

SEQ ID NO: 118875 - DNA, 20 bp, Artificial Sequence
  Description of Artificial Sequence: Synthetic oligonucleotide
  Target: LAMA2; (-) strand; PAM type: NRG; PAM sequence: GGG
gtggaggtgacaggagccca

SEQ ID NO: 118876 - DNA, 20 bp, Artificial Sequence
  Description of Artificial Sequence: Synthetic oligonucleotide
  Target: LAMA2; (-) strand; PAM type: NRG; PAM sequence: AGG
tgtggaggtgacaggagccc

SEQ ID NO: 118877 - DNA, 20 bp, Artificial Sequence
  Description of Artificial Sequence: Synthetic oligonucleotide
  Target: LAMA2; (-) strand; PAM type: NRG; PAM sequence: CAG
atgtggaggtgacaggagcc

SEQ ID NO: 118878 - DNA, 20 bp, Artificial Sequence
  Description of Artificial Sequence: Synthetic oligonucleotide
  Target: LAMA2; (-) strand; PAM type: NRG; PAM sequence: GAG
ataaaatgtggaggtgacag

SEQ ID NO: 118879 - DNA, 20 bp, Artificial Sequence
  Description of Artificial Sequence: Synthetic oligonucleotide
  Target: LAMA2; (-) strand; PAM type: NRG; PAM sequence: AGG
ccataaaatgtggaggtgac

SEQ ID NO: 118880 - DNA, 20 bp, Artificial Sequence
  Description of Artificial Sequence: Synthetic oligonucleotide
  Target: LAMA2; (-) strand; PAM type: NRG; PAM sequence: CAG
cccataaaatgtggaggtga

SEQ ID NO: 118881 - DNA, 20 bp, Artificial Sequence
  Description of Artificial Sequence: Synthetic oligonucleotide
  Target: LAMA2; (-) strand; PAM type: NRG; PAM sequence: AGG
ttcctccccataaaatgtgg

SEQ ID NO: 118882 - DNA, 20 bp, Artificial Sequence
  Description of Artificial Sequence: Synthetic oligonucleotide
  Target: LAMA2; (-) strand; PAM type: NRG; PAM sequence: GAG
gttcctccccataaaatgtg

SEQ ID NO: 118883 - DNA, 20 bp, Artificial Sequence
  Description of Artificial Sequence: Synthetic oligonucleotide
  Target: LAMA2; (-) strand; PAM type: NRG; PAM sequence: TGG
tagttcctccccataaaatg

SEQ ID NO: 118884 - DNA, 20 bp, Artificial Sequence
  Description of Artificial Sequence: Synthetic oligonucleotide
  Target: LAMA2; (-) strand; PAM type: NRG; PAM sequence: TAG
aaatatccttgagttccttc

SEQ ID NO: 118885 - DNA, 20 bp, Artificial Sequence
  Description of Artificial Sequence: Synthetic oligonucleotide
  Target: LAMA2; (-) strand; PAM type: NRG; PAM sequence: GAG
acagttatcaaaatatcctt

SEQ ID NO: 118886 - DNA, 20 bp, Artificial Sequence
  Description of Artificial Sequence: Synthetic oligonucleotide
  Target: LAMA2; (-) strand; PAM type: NRG; PAM sequence: CAG
ctaaggtgggactttgagca

SEQ ID NO: 118887 - DNA, 20 bp, Artificial Sequence
  Description of Artificial Sequence: Synthetic oligonucleotide
  Target: LAMA2; (-) strand; PAM type: NRG; PAM sequence: GAG
ctttactaaggtgggacttt

SEQ ID NO: 118888 - DNA, 20 bp, Artificial Sequence
  Description of Artificial Sequence: Synthetic oligonucleotide
  Target: LAMA2; (-) strand; PAM type: NRG; PAM sequence: GGG
ttgggaaactttactaaggt

SEQ ID NO: 118889 - DNA, 20 bp, Artificial Sequence
  Description of Artificial Sequence: Synthetic oligonucleotide
  Target: LAMA2; (-) strand; PAM type: NRG; PAM sequence: TGG
attgggaaactttactaagg

SEQ ID NO: 118890 - DNA, 20 bp, Artificial Sequence
  Description of Artificial Sequence: Synthetic oligonucleotide
  Target: LAMA2; (-) strand; PAM type: NRG; PAM sequence: AGG
tacattgggaaactttacta

SEQ ID NO: 118891 - DNA, 20 bp, Artificial Sequence
  Description of Artificial Sequence: Synthetic oligonucleotide
  Target: LAMA2; (-) strand; PAM type: NRG; PAM sequence: AAG
ctacattgggaaactttact

SEQ ID NO: 118892 - DNA, 20 bp, Artificial Sequence
  Description of Artificial Sequence: Synthetic oligonucleotide
  Target: LAMA2; (-) strand; PAM type: NRG; PAM sequence: GGG
gcaactgtctggactacatt

SEQ ID NO: 118893 - DNA, 20 bp, Artificial Sequence
  Description of Artificial Sequence: Synthetic oligonucleotide
  Target: LAMA2; (-) strand; PAM type: NRG; PAM sequence: TGG
tgcaactgtctggactacat

SEQ ID NO: 118894 - DNA, 20 bp, Artificial Sequence
  Description of Artificial Sequence: Synthetic oligonucleotide
  Target: LAMA2; (-) strand; PAM type: NRG; PAM sequence: TGG
tggatccagatgcaactgtc

SEQ ID NO: 118895 - DNA, 20 bp, Artificial Sequence
  Description of Artificial Sequence: Synthetic oligonucleotide
  Target: LAMA2; (-) strand; PAM type: NRG; PAM sequence: CAG
cagtgaattctgcttggatc

SEQ ID NO: 118896 - DNA, 20 bp, Artificial Sequence
  Description of Artificial Sequence: Synthetic oligonucleotide
  Target: LAMA2; (-) strand; PAM type: NRG; PAM sequence: TGG
ctaattcagtgaattctgct
